United States Patent Application Publication US 2021/0199660 A1 - sequence listing, part 45

SEQ ID NO: 642059 - DNA, 120 bp, Artificial Sequence
  ENSG00000181852_7 (sequence is synthesized)
ctgaacacaaacaccagctggcggagcagaagcgagacatccagctgctaaaggcatacatgcgtgcaatccgcagtgtcaaccccaaccttcagaacctggaggagacaattgaataca

SEQ ID NO: 642060 - DNA, 120 bp, Artificial Sequence
  ENSG00000181852_8 (sequence is synthesized)
acgagatcctagagtgggtgaactcccttcagccagcaagagtgacccgctggggagggatgatctcgactcctgatgctgtgctccaggctgtaatcaagcgctccctggtggagagtg

SEQ ID NO: 642061 - DNA, 120 bp, Artificial Sequence
  ENSG00000181852_9 (sequence is synthesized)
gctgtcctgcttctattgtcaacgagctgattgaaaatgcccacgagcgtagctggccccagggtctggccacactagagactagacagatgaaccgacgctactatgagaactacgtgg

SEQ ID NO: 642062 - DNA, 120 bp, Artificial Sequence
  ENSG00000181852_10 (sequence is synthesized)
ccaagcgcatccctggcaagcaggctgttgtcgtgatggcctgtgagaaccagcacatgggggatgacatggtgcaagagccaggccttgtcatgatatttgcgcatggcgtggaagaga

SEQ ID NO: 642063 - DNA, 120 bp, Artificial Sequence
  ENSG00000181852_11 (sequence is synthesized)
tataagagaactcgactggctatcaggaagagatggaaatcagaaaatcccatcactccagcagctgggacctgagtcctacccaccattcttaatactgtggcttatacctgagccaca

SEQ ID NO: 642064 - DNA, 120 bp, Artificial Sequence
  ENSG00000181852_12 (sequence is synthesized)
catctccctgcccttctggcactgaagggccttggggtagtttgctcagcctttcaggtgggaaacccagatttcctccctttgccatattcccctaaaatgtctataaattatcagtct

SEQ ID NO: 642065 - DNA, 120 bp, Artificial Sequence
  ENSG00000181852_13 (sequence is synthesized)
gggtgggaaagcccccacctccatccattttcctgcttagggtccctggttccagttattttcagaaagcacaaagagattcaatttccctggaggatcaggacagaggaaggaatctct

SEQ ID NO: 642066 - DNA, 120 bp, Artificial Sequence
  ENSG00000181852_14 (sequence is synthesized)
aatcgtccctctcctccaaaaccagggaatcagagcagtcaggcctgttgactctaagcagcagacatcctgaagaaatggtaagggtggagccaaatctctagaaataagtagtgaggc

SEQ ID NO: 642067 - DNA, 120 bp, Artificial Sequence
  ENSG00000181852_15 (sequence is synthesized)
cgttaattggccatcactgatggcccttagggaaagactggacctctgtgccaagcagtatccctgttcagcccaccttaaaggtgtaggcacccactgggtctaccagtatgcaggttg

SEQ ID NO: 642068 - DNA, 120 bp, Artificial Sequence
  ENSG00000181852_16 (sequence is synthesized)
ggatactgaaaatttccagatgagctcttctttcctacaagttttcataattagggaatgccagggtttagggtaggggttaatctgttgggggttgatgtgtttagcaagaagctactc

SEQ ID NO: 642069 - DNA, 120 bp, Artificial Sequence
  ENSG00000181852_17 (sequence is synthesized)
ctagcttttgctaaaatatggttggcactgcctcttgtggcacaggccataattgttccatagacccctctctagccctgtgactgtagttagttactttgataattttctttggccatt

SEQ ID NO: 642070 - DNA, 120 bp, Artificial Sequence
  ENSG00000181852_18 (sequence is synthesized)
gtttgtttatatttcacaaactccacctactgcccccccccctcttttttttaagaatggcctgatcatggctatctcagccacattgttggcaatttaatttatttacttccttttttt

SEQ ID NO: 642071 - DNA, 120 bp, Artificial Sequence
  ENSG00000181852_19 (sequence is synthesized)
ttttttaagaaaggaaaaaagaaaaaaaaatcaaacttgaaacttttcttttgatgttcctattgtgggggttctggatagggtgggacagggatgggggtgtgttttatattttttcct

SEQ ID NO: 642072 - DNA, 120 bp, Artificial Sequence
  ENSG00000181852_20 (sequence is synthesized)
tttcagcacaacctttggctttaatataggaagagccaagggagtcctcggctgaacttacgatatctgccccaaacctctgtaaccccaactgaaatgaggagcttcctctcttcctgt

SEQ ID NO: 642073 - DNA, 120 bp, Artificial Sequence
  ENSG00000181852_21 (sequence is synthesized)
gaaggatatgacagtccagcatcgatgcctgtgccctctggaaaaatttcctcctagcccttccagggccttatcataaaactctggatttagagtattcattttgaaggcaactccccc

SEQ ID NO: 642074 - DNA, 120 bp, Artificial Sequence
  ENSG00000181852_22 (sequence is synthesized)
ttccccaagtttccttggagctgtatagctgggttctaagcttcaccatgcaaatcagaaattttatctctaagtacaggctgtgccgtgtctcacccacacccccctggggacttcagt

SEQ ID NO: 642075 - DNA, 120 bp, Artificial Sequence
  ENSG00000181852_23 (sequence is synthesized)
aggtgtgattattttaatatggaggtgggagtgtggttggagatagaaaggctcctccccaccatgtaatggcttcctctcagaattttattccaggctagcttgctgcaggtctgggta

SEQ ID NO: 642076 - DNA, 120 bp, Artificial Sequence
  ENSG00000181852_24 (sequence is synthesized)
gttggatcatggctccactgggattggggtggaaagcttgaggggagtagggttccagctctgggacattgtgctcaggaatttgaaaacgctgctatacttactctggttactacattt

SEQ ID NO: 642077 - DNA, 120 bp, Artificial Sequence
  ENSG00000181852_25 (sequence is synthesized)
cttccactcccctttcccctacctgccttaaccaaggctcatactgtcctgtccttaccctcagatggagccaggaagctcagtgaaaggcttccctaccctttgcactagtgtctctgc

SEQ ID NO: 642078 - DNA, 120 bp, Artificial Sequence
  ENSG00000181852_26 (sequence is synthesized)
aggttgctggttgtgttgtatgtgctgttccatggtgttgactgcactaataataaaccttttactcaactctctaaattcttcagcattactccctttcttgagaaggtttcccctctg

SEQ ID NO: 642079 - DNA, 120 bp, Artificial Sequence
  ENSG00000181852_27 (sequence is synthesized)
cttttgcctttctctcaccttaattccctttcttccttactttgttacctacccttatcttagtgctaacttctctttcaggaggatgtctgggagtagtgtgcacttcacagctgcttt

SEQ ID NO: 642080 - DNA, 120 bp, Artificial Sequence
  ENSG00000181852_28 (sequence is synthesized)
cccatgtaccctcctgcattcttccctcctatctcctgttctgtagcagccaaagctctctagtgatctgaactgtgtgcttcccagggtctgcctttatcctaaattccatgtcttccc

SEQ ID NO: 642081 - DNA, 120 bp, Artificial Sequence
  ENSG00000181852_29 (sequence is synthesized)
tgagtggtcctgagtttttgggataatttctacagaagatatgtatatatctttttcctttgtcccacaagcaactttgctttagaatctagaattcctttgcaggcagagaagtctcta

SEQ ID NO: 642082 - DNA, 120 bp, Artificial Sequence
  ENSG00000181852_30 (sequence is synthesized)
cctcccagtgtttcctagctaagaacgtaaatgtgaggagggaaatgtacttgcagaggtttcataattatttacttataaaaatagtcttcatagccgggcgcggtggctcacgcctgt

SEQ ID NO: 642083 - DNA, 60 bp, Artificial Sequence
  ENSG00000181852_31 (sequence is synthesized)
agtcttcataagtatttgctgctacctttccctgtcataagaaaaaggatagccagacat

SEQ ID NO: 642084 - DNA, 120 bp, Artificial Sequence
  ENSG00000181852_32 (sequence is synthesized)
ttcataagtatttgctgctacctttccctgtcataagaaaaaggatagccagacatggtgggacgccactatgatcccagctccttggaaggctaaggcacaagaatcgcttgaacctgg

SEQ ID NO: 642085 - DNA, 83 bp, Artificial Sequence
  ENSG00000181852_33 (sequence is synthesized)
agcaagagcgatatcttttcctcctcccagaagtttgttttaaatttgagcatttatcatgcacctgatgtaaacctaatagt

SEQ ID NO: 642086 - DNA, 120 bp, Artificial Sequence
  ENSG00000181852_34 (sequence is synthesized)
atttgagcatttatcatgcacctgatgtaaacctaatagtactcttgatactctagtggcttgaaaaaaaaaaaaaaggcatttctgtgctgagtctgcgcttctatgcacacaaggtat

SEQ ID NO: 642087 - DNA, 120 bp, Artificial Sequence
  ENSG00000181852_35 (sequence is synthesized)
gtttataaaatactgataagcatgtcacagtatagagcataagaggcaatgtatgtatcctagtgacattagcagtgcttttccccccttaaactcctttaaaattacttttagaacttg

SEQ ID NO: 642088 - DNA, 120 bp, Artificial Sequence
  ENSG00000181852_36 (sequence is synthesized)
ctgctcattcttgtgaatgttatgaatggtgtcatattgtccttttacagaagatacgatttttagaaacaaatattcattgaatgtctgccctgtgagatactcactagagtgaacatg

SEQ ID NO: 642089 - DNA, 120 bp, Artificial Sequence
  ENSG00000181852_37 (sequence is synthesized)
aggaggcttatgtagcaaaatggcacctacctgcaaagaacttagtccctaatggagatgaatatataataagggatcataaatgtgctaagtggatttactagtaatatgtgagccaag

SEQ ID NO: 642090 - DNA, 120 bp, Artificial Sequence
  ENSG00000181852_38 (sequence is synthesized)
gacgataaagctcctgattctgatgggtatcaggaaaggcttttcaggaagtgttacttgttataggtcagaggtcagcaaactacaggttacaaccccactgcctgcttttgtaaaaaa

SEQ ID NO: 642091 - DNA, 120 bp, Artificial Sequence
  ENSG00000181852_39 (sequence is synthesized)
ctttattggaatacagttatgcccacttgtttatatattgtctgtggctgctttcacattacaacagcagggttaagtagctggaacaaagcctaaaatacttggtcttttacagaaaaa

SEQ ID NO: 642092 - DNA, 120 bp, Artificial Sequence
  ENSG00000181852_40 (sequence is synthesized)
aatttgccaacctgttctaaacttttaaggtcaggagaactgggggaaggagggagtagaaagaacactgtcacccagactggagtgcagtggcaccatcatatagctcactgtagcctc

SEQ ID NO: 642093 - DNA, 120 bp, Artificial Sequence
  ENSG00000181852_41 (sequence is synthesized)
aaactcctgggctctagtggtcttcccacttcagcttctggagtagctggggctactgcacctggaattgtcttaatctgttttaatactagtaaaattttttttgtttcatctctttca

SEQ ID NO: 642094 - DNA, 120 bp, Artificial Sequence
  ENSG00000181852_42 (sequence is synthesized)
gatgtcccaggggtattggggcggggggttgaaataactggggttcaggaggagggatggtggtagagataaaaatgtgagaagggagcagcactggcgaggagtcgggagagtactcct

SEQ ID NO: 642095 - DNA, 78 bp, Artificial Sequence
  ENSG00000181852_43 (sequence is synthesized)
cttgcagtgagcagagattggaaaaaaaaaaaaaaaaaaaaaagtcttcataggccgggcacggtggctcacgtctgt

SEQ ID NO: 642096 - DNA, 120 bp, Artificial Sequence
  ENSG00000181852_44 (sequence is synthesized)
gaggaggcagagtgcaagtccaggaaagtgatctctaaaatgcagcaaaaacaagcgaagtatacaagtgaagtctaagatctctttcagttctggagtcctatacagttcatagagtaa

SEQ ID NO: 642097 - DNA, 120 bp, Artificial Sequence
  ENSG00000181852_45 (sequence is synthesized)
tttgatgtgaaagctgccaccttcaataggtcatttctctgccagccttgccagaccagagtcagttgtatcatcctggggcaagtatgaggagaagctcacgattaccaggcacctcat

SEQ ID NO: 642098 - DNA, 120 bp, Artificial Sequence
  ENSG00000181852_46 (sequence is synthesized)
ccccacatggataagggccatctcatttatgcccctgtctctggctgccctcctcactagctgaggaggtctctttggcatgttggcaaggagtattcttagcctccttggcttcctgct

SEQ ID NO: 642099 - DNA, 120 bp, Artificial Sequence
  ENSG00000181852_47 (sequence is synthesized)
ctaagatcttactttcttgctgcttttccaactataatcattttgctcttgctttaacaaaagaaggggcacagcaatttagtaaatttgtgtaataacattaaagcttgattgactcta

SEQ ID NO: 642100 - DNA, 120 bp, Artificial Sequence
  ENSG00000181852_48 (sequence is synthesized)
aaaaatagataaaacactgtgtcttgattggggaaagaaatttaaggaaaatagacagcaaaggggcaagtaggaagcttggacgaagaaagtgaagggaataaacaagagggaggcctg

SEQ ID NO: 642101 - DNA, 120 bp, Artificial Sequence
  ENSG00000181852_49 (sequence is synthesized)
aaatgaatgttagaaattttgggtaggacaaaatctacttagcagttatctgccacagaataggccatttgcatacatgtcccagggatcacctctgttctgctctttccccaccctggt

SEQ ID NO: 642102 - DNA, 120 bp, Artificial Sequence
  ENSG00000181856_0 (sequence is synthesized)
gtcttttcccccagccccgctccaccagatccgcgggagccccactgctctccgggtccttggcttgtggctgtgggtcccatcgggcccgccctcgcacgtcactccgggacccccgcg

SEQ ID NO: 642103 - DNA, 120 bp, Artificial Sequence
  ENSG00000181856_1 (sequence is synthesized)
gcctccgcaggttctgcgctccaggccggagtcagagactccaggatcggttctttcatcttcgccgcccctgcgcgtccagctcttctaagacgagatgccgtcgggcttccaacagat

SEQ ID NO: 642104 - DNA, 120 bp, Artificial Sequence
  ENSG00000181856_2 (sequence is synthesized)
aggctccgaagatggggaaccccctcagcagcgagtgactgggaccctggtccttgctgtgttctctgcggtgcttggctccctgcagtttgggtacaacattggggtcatcaatgcccc

SEQ ID NO: 642105 - DNA, 120 bp, Artificial Sequence
  ENSG00000181856_3 (sequence is synthesized)
tcagaaggtgattgaacagagctacaatgagacgtggctggggaggcaggggcctgagggacccagctccatccctccaggcaccctcaccaccctctgggccctctccgtggccatctt

SEQ ID NO: 642106 - DNA, 120 bp, Artificial Sequence
  ENSG00000181856_4 (sequence is synthesized)
ttccgtgggcggcatgatttcctccttcctcattggtatcatctctcagtggcttggaaggaaaagggccatgctggtcaacaatgtcctggcggtgctggggggcagcctcatgggcct

SEQ ID NO: 642107 - DNA, 120 bp, Artificial Sequence
  ENSG00000181856_5 (sequence is synthesized)
ggccaatgctgctgcctcctatgaaatgctcatccttggacgattcctcattggcgcctactcagggctgacatcagggctggtgcccatgtacgtgggggagattgctcccactcacct

SEQ ID NO: 642108 - DNA, 120 bp, Artificial Sequence
  ENSG00000181856_6 (sequence is synthesized)
gcggggcgccctggggacgctcaaccaactggccattgttatcggcattctgatcgcccaggtgctgggcttggagtccctcctgggcactgccagcctgtggccactgctcctgggcct

SEQ ID NO: 642109 - DNA, 120 bp, Artificial Sequence
  ENSG00000181856_7 (sequence is synthesized)
cacagtgctacctgccctcctgcagctggtcctgctgcccttctgtcccgagagcccccgctacctctacatcatccagaatctcgaggggcctgccagaaagagtctgaagcgcctgac

SEQ ID NO: 642110 - DNA, 120 bp, Artificial Sequence
  ENSG00000181856_8 (sequence is synthesized)
aggctgggccgatgtttctggagtgctggctgagctgaaggatgagaagcggaagctggagcgtgagcggccactgtccctgctccagctcctgggcagccgtacccaccggcagcccct

SEQ ID NO: 642111 - DNA, 120 bp, Artificial Sequence
  ENSG00000181856_9 (sequence is synthesized)
gatcattgcggtcgtgctgcagctgagccagcagctctctggcatcaatgctgttttctattattcgaccagcatcttcgagacagcaggggtaggccagcctgcctatgccaccatagg

SEQ ID NO: 642112 - DNA, 120 bp, Artificial Sequence
  ENSG00000181856_10 (sequence is synthesized)
agctggtgtggtcaacacagtcttcaccttggtctcggtgttgttggtggagcgggcggggcgccggacgctccatctcctgggcctggcgggcatgtgtggctgtgccatcctgatgac

SEQ ID NO: 642113 - DNA, 120 bp, Artificial Sequence
  ENSG00000181856_11 (sequence is synthesized)
tgtggctctgctcctgctggagcgagttccagccatgagctacgtctccattgtggccatctttggcttcgtggcattttttgagattggccctggccccattccttggttcatcgtggc

SEQ ID NO: 642114 - DNA, 120 bp, Artificial Sequence
  ENSG00000181856_12 (sequence is synthesized)
cgagctcttcagccagggaccccgcccggcagccatggctgtggctggtttctccaactggacgagcaacttcatcattggcatgggtttccagtatgttgcggaggctatggggcccta

SEQ ID NO: 642115 - DNA, 120 bp, Artificial Sequence
  ENSG00000181856_13 (sequence is synthesized)
cgtcttccttctatttgcggtcctcctgctgggcttcttcatcttcaccttcttaagagtacctgaaactcgaggccggacgtttgaccagatctcagctgccttccaccggacaccctc

SEQ ID NO: 642116 - DNA, 120 bp, Artificial Sequence
  ENSG00000181856_14 (sequence is synthesized)
ggtgaaacccagcacagaacttgagtatttagggccagatgagaacgactgaggggccaggcaggggtgggagagccagctctctctacccggcccagagaccccttcctttcctctgca

SEQ ID NO: 642117 - DNA, 120 bp, Artificial Sequence
  ENSG00000181856_15 (sequence is synthesized)
gcactttaaccctctcttccctattatttccgggtggaaaagaatccctgcagcctggtagaattgggaagctgggggaagggtggtctgagcaccccctcattcccctcgtgtgactct

SEQ ID NO: 642118 - DNA, 120 bp, Artificial Sequence
  ENSG00000181856_16 (sequence is synthesized)
cttggattatttatgtgttgtggtttggccgtggccatcagggtgggccactctcccctccctcttccttcccccatcccctttcctccccaccttccccagactcagctccagaatacc

SEQ ID NO: 642119 - DNA, 120 bp, Artificial Sequence
  ENSG00000181856_17 (sequence is synthesized)
ttcttcgctgctagagaagggggattggagggaagacaggtctagactttctcagtgggacaaaccagagcagagagcaggacaggagacaagaaatccagtttcccaccaccttggact

SEQ ID NO: 642120 - DNA, 120 bp, Artificial Sequence
  ENSG00000181856_18 (sequence is synthesized)
gacaggagacaagaaatccagtttcccaccaccttggactcctcccacaatctgggactttcactgaattcttgccacgcagactctgggcaaaggggtttttttttttttttttttttt

SEQ ID NO: 642121 - DNA, 60 bp, Artificial Sequence
  ENSG00000181856_19 (sequence is synthesized)
agacagtctcgctctgtcgcccaggctcgagtgcagtggcgtgatcttgcttcactgcaa

SEQ ID NO: 642122 - DNA, 120 bp, Artificial Sequence
  ENSG00000181856_20 (sequence is synthesized)
ctggcgaagggagttctctcttgacccctgcagggaaaaggactcacctccctcactgcaggctcagccttccagggcaagagggaacaggaaagtatgtgcccatgtgtggcaagatgg

SEQ ID NO: 642123 - DNA, 120 bp, Artificial Sequence
  ENSG00000181856_21 (sequence is synthesized)
aaggacggcaggctcccgcctctaggcttggggctctaccccgatggtttcccaaggctgccaagaaggagccctaactttcttcctctcccttcctggaagggtgctgcatccacaggc

SEQ ID NO: 642124 - DNA, 120 bp, Artificial Sequence
  ENSG00000181856_22 (sequence is synthesized)
ttttgaccaactaaggcaaagaggggatttgaaaggctgcctggaaacactgggctgggaggagcctttggatatttttatatacgtttgaaaaggggattgagagaagaaaccaaaggt

SEQ ID NO: 642125 - DNA, 120 bp, Artificial Sequence
  ENSG00000181856_23 (sequence is synthesized)
cggttgtactaaatgtatatatatagatacttctataaagtcactgctgaagacaagcatcctattgtggaggtacttgaggatgggctgagacagggaccataactcttcacccctctt

SEQ ID NO: 642126 - DNA, 120 bp, Artificial Sequence
  ENSG00000181856_24 (sequence is synthesized)
cctccctctgtcctgcctcagctcaaggcctcagaatcttctggatgccattgctcatgcccctactcacatttctactcgttgctttattaatagtaaatgctcaataaattgtagctg

SEQ ID NO: 642127 - DNA, 120 bp, Artificial Sequence
  ENSG00000181856_25 (sequence is synthesized)
ccagtgccgggcattgctcttggcatttgcagaatactcactctgtgagggaggtgtcagcccatgtcacagatgggcagtgaaacccatgataggggcactcttcaccagggacacagc

SEQ ID NO: 642128 - DNA, 120 bp, Artificial Sequence
  ENSG00000181856_26 (sequence is synthesized)
tggagacatggcagcaaggatgccaggccctgcccacggccccacatcccctcctccccaccttcaacagtgagttactagcgattctccaaaacagaagagatggagaccaagaccaca

SEQ ID NO: 642129 - DNA, 120 bp, Artificial Sequence
  ENSG00000181856_27 (sequence is synthesized)
ggtccccccgccccagcctcccacaccgtaggccagaggtgggcatcacacagctagcccacctgcttccccgtcagggactcctccagccacagaccatgggtctttgggtcagtttgg

SEQ ID NO: 642130 - DNA, 120 bp, Artificial Sequence
  ENSG00000181856_28 (sequence is synthesized)
tggaccacctgctccacagaatcaaagcaaggaagggagctgacctagattggatagtaactgaggtgtctgaaacgcaccagtggcataacttaccttactccaagaataaaatgatac

SEQ ID NO: 642131 - DNA, 120 bp, Artificial Sequence
  ENSG00000181856_29 (sequence is synthesized)
gattccaatcctaccaaaaggcagagtgggtctggagggcctttcggggcacaggcagcaagtggattctgcgagccagggttcacccccttgcctagtaggcggcgcggcgctccggaa

SEQ ID NO: 642132 - DNA, 120 bp, Artificial Sequence
  ENSG00000181856_30 (sequence is synthesized)
tcggggacaccctgccctcgatccgactcgggaaagcagatccaggcgggtcttgccctccgggagctgtccgtccgtcttcgctcacgggcagtgtttcgaggaccggaggctctccgt

SEQ ID NO: 642133 - DNA, 120 bp, Artificial Sequence
  ENSG00000181867_0 (sequence is synthesized)
gatcagatctgacgcctccagcgcccgaccccacgccaagagggccgggcctcagtttccccacttccaaggaggcggcgctatgctgtcctgcttcaggctcctctccaggcacatcag

SEQ ID NO: 642134 - DNA, 120 bp, Artificial Sequence
  ENSG00000181867_1 (sequence is synthesized)
tctccaggcacatcagcccttcgctggcgtctctgcgcccggtgcgctgctgcttcgcgctcccgctgcgttgggccccggggcgccccttggaccccaggcagatcgccccccgccgcc

SEQ ID NO: 642135 - DNA, 120 bp, Artificial Sequence
  ENSG00000181867_2 (sequence is synthesized)
ctcctcccgggaccctaccgggcccgccgccggcccctctcgggtgcgccagaacttccaccccgactccgaggctgccatcaaccgccagatcaacctcgagctctatgcgtcctacgt

SEQ ID NO: 642136 - DNA, 120 bp, Artificial Sequence
  ENSG00000181867_3 (sequence is synthesized)
aggctgcagaaccagcgaggaggccggatccgcctgcaggacatcaagaagccggaacaggacgactgggaaagcgggctgcatgccatggagtgtgctctactcttggaaaagaacgtg

SEQ ID NO: 642137 - DNA, 120 bp, Artificial Sequence
  ENSG00000181867_4 (sequence is synthesized)
aaccagtcgttgctggaattgcacgctctagcctcagataaaggtgacccccatttgtgcgatttcctggaaacctactacctgaatgagcaggtgaagtctatcaaagaactaggtgac

SEQ ID NO: 642138 - DNA, 120 bp, Artificial Sequence
  ENSG00000181867_5 (sequence is synthesized)
cacgtgcacaacttagtgaagatgggggccccggatgctggcctggcggagtacctttttgacacacatacccttggaaatgaaaacaagcagaactaagccacgagctgccttcctccc

SEQ ID NO: 642139 - DNA, 120 bp, Artificial Sequence
  ENSG00000181867_6 (sequence is synthesized)
aggctagtggatccaaagaccaaagtcagctgtctcctgctttcttgcccttaaaatcacctccatctttatattcttctgttatactattcctccaataaagtgatttgtagaaaaaaa

SEQ ID NO: 642140 - DNA, 120 bp, Artificial Sequence
  ENSG00000181873_0 (sequence is synthesized)
actcttgtccaagatggcgaccgcggcgctgcttcgaggcgccactccggggcgcggcggcccggtctggcgctggcggctgcgcgcggccccaaggtgccgcctggcccacagctcctg

SEQ ID NO: 642141 - DNA, 120 bp, Artificial Sequence
  ENSG00000181873_1 (sequence is synthesized)
cagtcctggtggcgacccaacggccggagcggcctgggcctgcttccggctggacgggcgcaccctgctgcgcgtgcgtggccccgacgcggcgcccttcctgctagggctgctgaccaa

SEQ ID NO: 642142 - DNA, 120 bp, Artificial Sequence
  ENSG00000181873_2 (sequence is synthesized)
tgaactgccgcttccgagtcctgcggccgcgggggccccgcctgctgcgcgcgcgggctacgcccacttcctgaacgtgcagggccggacgctctatgacgtcatcttgtacgggctcca

SEQ ID NO: 642143 - DNA, 120 bp, Artificial Sequence
  ENSG00000181873_3 (sequence is synthesized)
ggaacactcggaggtgtctggcttccttctggagtgtgacagctcggtgcagggcgcgctgcagaagcacctcgcgctatacaggatccggcggaaggtcacggtggagccgcacccgga

SEQ ID NO: 642144 - DNA, 120 bp, Artificial Sequence
  ENSG00000181873_4 (sequence is synthesized)
gctgcgagtgtgggcggtgttgcccagttcccctgaggcctgcggggctgcatcgctgcaggagagggcaggggctgccgccatcctcatccgcgacccgcgaacagcacgcatggggtg

SEQ ID NO: 642145 - DNA, 120 bp, Artificial Sequence
  ENSG00000181873_5 (sequence is synthesized)
gcggctcctcacccaggatgaaggcccagccctggtgcccgggggccggctcggggacttgtgggattatcaccagcaccgatacctgcaaggcgttcctgagggggtccgagacttgcc

SEQ ID NO: 642146 - DNA, 120 bp, Artificial Sequence
  ENSG00000181873_6 (sequence is synthesized)
tcctggggtggccctgcccctggagtccaacctggccttcatgaacggcgtgagcttcaccaaaggctgctacattggccaggagctgacggcccgcacccaccacatgggcgtcatccg

SEQ ID NO: 642147 - DNA, 120 bp, Artificial Sequence
  ENSG00000181873_7 (sequence is synthesized)
caagcgcctcttccctgtccggttcttggacccccttcccaccagtggcatcacccctggtgccacggtgctgactgcctcaggacagactgtgggcaagttcagggctggccagggcaa

SEQ ID NO: 642148 - DNA, 120 bp, Artificial Sequence
  ENSG00000181873_8 (sequence is synthesized)
cgtggggctggccctgctgtggtcagagaagatcaagggtcctctgcacatcagagcctctgagggtgcccaggtggccttagccgcatctgtgccagactggtggcctacagtctccaa

SEQ ID NO: 642149 - DNA, 120 bp, Artificial Sequence
  ENSG00000181873_9 (sequence is synthesized)
gtagtccgaagccttggctggcgcaggctgatggggaggctggggcctggggcctttggcctctgtccagggtcttcccgtcccatctgtctgctgcgcctactgggtgggagccctggt

SEQ ID NO: 642150 - DNA, 120 bp, Artificial Sequence
  ENSG00000181873_10 (sequence is synthesized)
ttccatctgggaaagtcccccttgtaggtgccctgcctggccccacccatgctcaggggccccaggcacgtgggttgttttctccctggacttcctgtggccccagaggagcccaccgtg

SEQ ID NO: 642151 - DNA, 120 bp, Artificial Sequence
  ENSG00000181873_11 (sequence is synthesized)
tgagtgctgggctccagatggcgccgggtcccaatcgtggctccacacagggttgtctgggaggacgggacggtgtctctggccagcactggcagcttccgggccttgtaccccactctg

SEQ ID NO: 642152 - DNA, 120 bp, Artificial Sequence
  ENSG00000181873_12 (sequence is synthesized)
cctggcatgagcctcatggggggttggtccctgtgcctggaagcggggtggtgtccagggtctgcaggctggggctcgggctttgggagttgtttcactgtgcttgcttccagcatgtct

SEQ ID NO: 642153 - DNA, 120 bp, Artificial Sequence
  ENSG00000181873_13 (sequence is synthesized)
cagggtggggctatgcgtggtctagaggggtctggggcattggatcaggtggcatgtgggtgtctacacatcgagaagcacacagggatgagccactaggtatcccatgctggaggcttg

SEQ ID NO: 642154 - DNA, 120 bp, Artificial Sequence
  ENSG00000181873_14 (sequence is synthesized)
tggaaggctgtgcccatctcccatgtttccccacctctgttcctcctcagagccctccaggagcgtggggtgggggccagcgcagggctcaggagccagcagggcagagttctgcctgtg

SEQ ID NO: 642155 - DNA, 120 bp, Artificial Sequence
  ENSG00000181873_15 (sequence is synthesized)
tgtgctgggttttggcatagcctgtgtttgcagtgagagtgacttgctgtcagtcacggggcacagcctcctgttcacccactggcttcccccttcccactgaagtgtgagctctatgtt

SEQ ID NO: 642156 - DNA, 120 bp, Artificial Sequence
  ENSG00000181873_16 (sequence is synthesized)
tcagggcatctattaaagagtgagccacaggcagccccttgggagctctggtttcatttgggggagagggaggtgggggcttagtttttgtgatctggctgactggaccccgggaacagc

SEQ ID NO: 642157 - DNA, 120 bp, Artificial Sequence
  ENSG00000181873_17 (sequence is synthesized)
gctcctttgagaacgcccagacctaccagatgaagcacttggcatggctgcaggccagcaggggaggcctcagaggcccaggctgggcacgtgggtgccgagtctgcaaaggacagcccc

SEQ ID NO: 642158 - DNA, 120 bp, Artificial Sequence
  ENSG00000181873_18 (sequence is synthesized)
atggctgtgagctgtcggctgcagggcgcagggcctggggggcaggcgtttgggccaccaagctggacgttagggtggccacagagggccaagcaggcagggagcctgtgccgccatcct

SEQ ID NO: 642159 - DNA, 120 bp, Artificial Sequence
  ENSG00000181873_19 (sequence is synthesized)
ggggggccacaggtgctctctagaaatctgcagccatggcggttttggggtcaggggtctaaaggcagctctgagctgcagtgtagtttgtgatcacccaggaggagggtgtagagcgga

SEQ ID NO: 642160 - DNA, 120 bp, Artificial Sequence
  ENSG00000181873_20 (sequence is synthesized)
tggacgggaggaagcggctgcagctggagggaagagaggggccgtccagcctcacccgctgcagtcagctctcctatgggcaaggaaacagctaggtggccctgacccctgcggtcctga

SEQ ID NO: 642161 - DNA, 120 bp, Artificial Sequence
  ENSG00000181873_21 (sequence is synthesized)
gagccggtggccttcagcccctcttggacaggtcatggtctggaagcgcccagcgcaggatggattccagaccagcatccctgcaaccttttcagccccactggctgctgctttaaactg

SEQ ID NO: 642162 - DNA, 120 bp, Artificial Sequence
  ENSG00000181873_22 (sequence is synthesized)
gcatggagacatttgatcagcttcccagccagttttctctccagctcagccaggagtgggtgcctgtggcctgtgtcaccaagagctggtgtctcctgcatgaggggcatgcacccctgg

SEQ ID NO: 642163 - DNA, 120 bp, Artificial Sequence
  ENSG00000181873_23 (sequence is synthesized)
aatgagggtctgtgcctcgagctcaaagtgtcccggctctgtcatctgcctgaagttgcctggcttttccagtggggcctccttgagtgctgcagcatctgggagcatcctagcctgtcc

SEQ ID NO: 642164 - DNA, 120 bp, Artificial Sequence
  ENSG00000181873_24 (sequence is synthesized)
cgtgggtgtggctgggtgagggctaggaggtgagccaggaaggaagcactccactccagagtgaggtgccgcctgagccatcctgtgccccctcagtgtcttcaggtctctgcaggtgtc

SEQ ID NO: 642165 - DNA, 84 bp, Artificial Sequence
  ENSG00000181873_25 (sequence is synthesized)
tcctgtgccccctcagtgtcttcaggtctctgcaggtgtcaggatctcaaaatacttggttcagatcaaacacatttcgtgttc

SEQ ID NO: 642166 - DNA, 90 bp, Artificial Sequence
  ENSG00000181873_26 (sequence is synthesized)
cttctgtgtctttaaaaaggaaagtgtcagtcaacaaaagagcccctctgtcatacaaaccaaatcagttttcaccaaaatgtccttagt

SEQ ID NO: 642167 - DNA, 120 bp, Artificial Sequence
  ENSG00000181873_27 (sequence is synthesized)
tcatacaaaccaaatcagttttcaccaaaatgtccttagtcctctcagaaaggcctggcctttaggaccttggaagcaggccctaaagcgcatcggcagggtcagagctttgtgttcagg

SEQ ID NO: 642168 - DNA, 120 bp, Artificial Sequence
  ENSG00000181873_28 (sequence is synthesized)
aacactgggatctgctgagagctggtgtagccgctccaaaactgcacactgcttttcctgtctgctttagtttgtgttgtaaaaacataggaagttcgtgtgtgtgtgtgtgtgtgtgaa

SEQ ID NO: 642169 - DNA, 120 bp, Artificial Sequence
  ENSG00000181873_29 (sequence is synthesized)
ttcaaggcataaggtgcagttgtgttatgtgggtatagtgcatggtggtgcagtctgggcttcttaccctcacacctcctgcctcccctcgttagagtcccccacatccgccttccactt

SEQ ID NO: 642170 - DNA, 120 bp, Artificial Sequence
  ENSG00000181873_30 (sequence is synthesized)
tctgagcccacattgcctgttgggcagctcctggttatgaggcaggacgtgtggtgtttgactgtctgtttctgagctgttttacttaacacagtgtatatggtgcatctttaggaaagc

SEQ ID NO: 642171 - DNA, 89 bp, Artificial Sequence
  ENSG00000181873_31 (sequence is synthesized)
catatcaagactctgtctcttccacacctgtggtcccacctattcgggaggctgaagtgcgaggatcacttgagcccaggaggttgagg

SEQ ID NO: 642172 - DNA, 120 bp, Artificial Sequence
  ENSG00000181873_32 (sequence is synthesized)
gcaacagagcaagaccctgtcttaaaacaaagaaagaataaaaaagaagagaagttgcagttggtagtatttccagagcccggcagacagtgtagaaactgtgagaaacccacctccaaa

SEQ ID NO: 642173 - DNA, 120 bp, Artificial Sequence
  ENSG00000181873_33 (sequence is synthesized)
gtgagaaacccacctccaaatcaggccttagatagaaaacatcctaagaagtatacgttcattgtaaaatcattatcatcatcatcttctaatccccaaggagacaagctccctgttctg

SEQ ID NO: 642174 - DNA, 120 bp, Artificial Sequence
  ENSG00000181873_34 (sequence is synthesized)
tgttcttgtatgaggcggtcagtcaagcgcagcccgagaggagaggcaggagcctgggagagcctctgctagacctttcctggcacttccccaggaaaggcaaggcagggcagatgtgcg

SEQ ID NO: 642175 - DNA, 120 bp, Artificial Sequence
  ENSG00000181873_35 (sequence is synthesized)
gctggccagctggagtgatttccatgggctccaagctgtaggagtggtccctggctgccagagtgctctggccagatagaggtgggctctggactggtgaggctgcattgcggaggcgcg

SEQ ID NO: 642176 - DNA, 120 bp, Artificial Sequence
  ENSG00000181873_36 (sequence is synthesized)
cacacccagctgggcccttatctgtaaggactggctggcctgggaggggcagtctcccagccagaaggtggaatttttttttttttttgagataccaaaacatcctaaggtacaggaaag

SEQ ID NO: 642177 - DNA, 120 bp, Artificial Sequence
  ENSG00000181873_37 (sequence is synthesized)
aaattgtcaacacacacacacagtaccataaacaaggcccagcagaaaggcagacagaagcacacacaccaatgttctgatcttagagtaagcagacacatcacatggaatgaggatgtt

SEQ ID NO: 642178 - DNA, 120 bp, Artificial Sequence
  ENSG00000181873_38 (sequence is synthesized)
taatatatttaaagaaaacaatttatgcacaggaagcaagagactataaaaatgaccaagcagattttaaaaagagaacttgttgaaataaaaataaaatactctaaaaaatattccatg

SEQ ID NO: 642179 - DNA, 120 bp, Artificial Sequence
  ENSG00000181873_39 (sequence is synthesized)
atgtgtttcctgaagaatcgggaactgtttgaagaaatgacccaaagtgcagcacagaaagacagagctggaaaatatgagatgggatgagacaagaagatggagagtttagtatgacat

SEQ ID NO: 642180 - DNA, 120 bp, Artificial Sequence
  ENSG00000181873_40 (sequence is synthesized)
ccgcaatttacgagtaattccagaaggaggggaaagagaatatggggtggaggcaagtattcagagaaatacggctgagaactttcccaaaccaacaggagcccctgctccttaggttca

SEQ ID NO: 642181 - DNA, 120 bp, Artificial Sequence
  ENSG00000181873_41 (sequence is synthesized)
ggaaccagcagctcccaagcagcatagttaaaaagctctacccaaacagtcacgtcttggtgaaagtacagaatctcatgacaaagagatcttaaggcagaaaagaaagagattatctgg

SEQ ID NO: 642182 - DNA, 120 bp, Artificial Sequence
  ENSG00000181873_42 (sequence is synthesized)
aaagaagaaaataagtagttgattaaaagcaacagtggaagccagaaagatagtaaataatatcttcaaagtcctgggagaaaatagtgatagcctagaattgtgtacccagaaaatccg

SEQ ID NO: 642183 - DNA, 77 bp, Artificial Sequence
  ENSG00000181873_43 (sequence is synthesized)
aaaatagtgatagcctagaattgtgtacccagaaaatccgtctttcaagaatgaggggccaggcgcagtggctcacg

SEQ ID NO: 642184 - DNA, 67 bp, Artificial Sequence
  ENSG00000181873_44 (sequence is synthesized)
taaacgcattttcataccacgaaactgccctcactccggagtttgctgccagcagagcctagagcgt

SEQ ID NO: 642185 - DNA, 120 bp, Artificial Sequence
  ENSG00000181873_45 (sequence is synthesized)
ccctcactccggagtttgctgccagcagagcctagagcgtctaaggcatgtctgggcttctggcgagggatcctgtggggaagctggagatggaagaaggagtgaataggcaggaaggtg

SEQ ID NO: 642186 - DNA, 120 bp, Artificial Sequence
  ENSG00000181873_46 (sequence is synthesized)
gatttgtgggcatgtctaaaacaccacatctagaagcttctacttagaatgcctacttttggagtttataaaaaagatgccacatgttgagttgggagagaggtgcccaaacctacagtg

SEQ ID NO: 642187 - DNA, 120 bp, Artificial Sequence
  ENSG00000181873_47 (sequence is synthesized)
ttctaaagtccccctactggtcggaaggagggcacggacactgacttcagcatctgttacaaggcttatcagagttttcagataatctctaaaagaatggaaatatatcttccaaactat

SEQ ID NO: 642188 - DNA, 120 bp, Artificial Sequence
  ENSG00000181873_48 (sequence is synthesized)
aaatatatcttccaaactatagagggaagaccatggaatttaaaagccagtccttcaaggagaaatgaacaaactcaaaatcgtagttgggagtgttttttttttttttgagacagagtc

SEQ ID NO: 642189 - DNA, 86 bp, Artificial Sequence
  ENSG00000181873_49 (sequence is synthesized)
agtctcactcttgcccaggctggagtggagtggcataaacacagctcactacagcctcaaccttctgggctcagaactacaggtgt

SEQ ID NO: 642190 - DNA, 90 bp, Artificial Sequence
  ENSG00000181873_50 (sequence is synthesized)
gagtcatcacactcagcagagatggggttctcactgcattgcccaggctggtcttgaatttctgggctcaggtgatcttcccacctcagc

SEQ ID NO: 642191 - DNA, 120 bp, Artificial Sequence
  ENSG00000181873_51 (sequence is synthesized)
tgcatgctaatttttaaaattttttgtttttaaatgctggtcttcaactcttgtccccaagtagctgggattggggcatgaggcactgtgctaacttcatgttgaaattgaattgccatt

SEQ ID NO: 642192 - DNA, 120 bp, Artificial Sequence
  ENSG00000181873_52 (sequence is synthesized)
ctaacagtgttaagagatggggcctgtaagaggtgattaggctgtgagggctccactctccaagggcggagttaatgttatgaaagggtaagtccagcccgcttgtgcctctcttgccct

SEQ ID NO: 642193 - DNA, 120 bp, Artificial Sequence
  ENSG00000181873_53 (sequence is synthesized)
ccagtgttcaaagcaccatcttggaggtggaattcccaagtcggccagttcctggatcttggactgtccggtctccagaaccgtgagccaataaacctctgttccttgtaaatgagtcag

SEQ ID NO: 642194 - DNA, 120 bp, Artificial Sequence
  ENSG00000181873_54 (sequence is synthesized)
cctcaggtattctcttgtagcagcacaaatggaggcagacacttccttcaccaatctcatgggaggcccactcctgtgagctgcctctagttccccaggccacagactccatcagggctc

SEQ ID NO: 642195 - DNA, 120 bp, Artificial Sequence
  ENSG00000181873_55 (sequence is synthesized)
acctggagccgtccctgtctcacctggaagctctcccactcctctggccagcctgggcatctccacccaatatgagtgatggcgactgattcccttactttagcaagctgggaataagga

SEQ ID NO: 642196 - DNA, 120 bp, Artificial Sequence
  ENSG00000181873_56 (sequence is synthesized)
atgtttgcctgttcttattcaggggtctctgcatctccacacttgcacaggttgtgtgtacatacattttcctgtctttctggtaagcccctggggtggagctctgggccacagggcagg

SEQ ID NO: 642197 - DNA, 120 bp, Artificial Sequence
  ENSG00000181873_57 (sequence is synthesized)
aaaactcagtgttgctaggaactgccagacattttcccggagtgagtgcagcatttacattcccaccagaagtgtgccaggttcttgtcatactgcgtcctcgccagcgcttggtgctgt

SEQ ID NO: 642198 - DNA, 120 bp, Artificial Sequence
  ENSG00000181873_58 (sequence is synthesized)
cagtcttcttagtttccatttagagattcagtgtttaaattttgaacgtcttgggtgaacaccttggtttgagaaaagtaagaaaaagggtctgtctggctatgggccatggagacccag

SEQ ID NO: 642199 - DNA, 120 bp, Artificial Sequence
  ENSG00000181873_59 (sequence is synthesized)
ggcagtgctccacgtgccaaccctggggcagggagcccaagctaggactgtgactgtctgggctgtgggcatctgaccatctccagtgtccccgtctttgatttccctggcgatggtgct

SEQ ID NO: 642200 - DNA, 120 bp, Artificial Sequence
  ENSG00000181873_60 (sequence is synthesized)
agcttagtttgtgcgcatcggcatttgtgggagaaatgaaggattaatacattttgttttatgtcagactctctcagtgagaagttctcagggacaataatagcagggggtcctgctgaa

SEQ ID NO: 642201 - DNA, 120 bp, Artificial Sequence
  ENSG00000181873_61 (sequence is synthesized)
gaaaaactgggagatggctgagctctggtccatctttcattgattcattcatttcttcattcattcaaccatgtattgaatgcttatagccaatgaaaataaagtacacagtatatttta

SEQ ID NO: 642202 - DNA, 120 bp, Artificial Sequence
  ENSG00000181873_62 (sequence is synthesized)
cctgcgcccctcagcggtatctggaaatatttttggttgtcatgatggggtggggtacaggccaggggtgctgcttagcatctggacagcccccactatggagaatgatgaggctgagaa

SEQ ID NO: 642203 - DNA, 120 bp, Artificial Sequence
  ENSG00000181873_63 (sequence is synthesized)
agctccccaggccggggctctcctgtgaggcaagtctcctggcagtcttcaggtgtggcaggggttggggtgggcccgggggtcatgtcccagctcagctggtcctgagaagctgcctgg

SEQ ID NO: 642204 - DNA, 120 bp, Artificial Sequence
  ENSG00000181873_64 (sequence is synthesized)
tagacagtcaccggcacagagagctggaaagtgccctcgaccccagaacctgggtcctgtgaggacatccaccctgtgtgaggccagggagtgctcagcagatgggggcagcagggggtg

SEQ ID NO: 642205 - DNA, 120 bp, Artificial Sequence
  ENSG00000181873_65 (sequence is synthesized)
tcagcatgggtgggggttcctgccaaggcaggcagctgagctggccccacctcagagtgcaggggccctcagcttgatcttttctgggctccactcttgactgatggacccatggggcac

SEQ ID NO: 642206 - DNA, 120 bp, Artificial Sequence
  ENSG00000181873_66 (sequence is synthesized)
cctggccccaccctgcctgccttgccccagctcctgcccttgccctgtagggctctgcggcctcccctgtgcctgtgtgcctggctcactagaccctggacctgtggtccctcagctcca

SEQ ID NO: 642207 - DNA, 120 bp, Artificial Sequence
  ENSG00000181873_67 (sequence is synthesized)
ctctagtccccttactctgtccctctactgcctggcgtcgctcagctcctccctgcctgtccggcgcccagcatcctgtgcccatgacctcacatctgtccctctgcccgggtcccccac

SEQ ID NO: 642208 - DNA, 120 bp, Artificial Sequence
  ENSG00000181873_68 (sequence is synthesized)
tcacctgtgttttggtccatctttgtctgctgaccccactatagattttaaaaatacaaatatgcatgcacgtggttaaaaactcgctgatgtcagatggctgggatgaaaggactgcct

SEQ ID NO: 642209 - DNA, 120 bp, Artificial Sequence
  ENSG00000181873_69 (sequence is synthesized)
aactcgctgatgtcagatggctgggatgaaaggactgcctgctgcctttcctcttgtagtgctcggacacctctgcaggcgaagctccttgttttttttttttgttgttgttgttgttgt

SEQ ID NO: 642210 - DNA, 120 bp, Artificial Sequence
  ENSG00000181873_70 (sequence is synthesized)
aagttgcaaaaaaaaaaacaaaacaaaacccgtgggagagatcgcacggacccctccccagttcccctgattgcacacacagggcatatctggggtctctggatttgtgtgtcttacttt

SEQ ID NO: 642211 - DNA, 120 bp, Artificial Sequence
  ENSG00000181873_71 (sequence is synthesized)
gtgcgtctgtgcacgcatgtgtataactgcagttttatcacgtgtgaatatctgtggccattctcaggcccacgcggcttcctgctcctgcccctgaatgggcacccccaacaccccaaa

SEQ ID NO: 642212 - DNA, 120 bp, Artificial Sequence
  ENSG00000181873_72 (sequence is synthesized)
acctgttctcagctgtaaaatcgtgtcatttcaggagtgtcatagatggatgcatcggcctgtcactttttagccttacccttttccctcaccatagtgccctcagatccacccacttct

SEQ ID NO: 642213 - DNA, 120 bp, Artificial Sequence
  ENSG00000181873_73 (sequence is synthesized)
gtccatctccagctccctgttcttgctgagaagtcccacatggtgtagtggcaccttgattctccctttctggctgttaccagtatagctggctgctgtgagctttcgctgcaggttttg

SEQ ID NO: 642214 - DNA, 120 bp, Artificial Sequence
  ENSG00000181873_74 (sequence is synthesized)
tgtgagctgcagtcttcgtttctcagtgatccatgcccggaagtgagagggccaggtcgtggagtagttgcttgtttggtgttgtgaggacctgcaccctgtcttccagagggccacccg

SEQ ID NO: 642215 - DNA, 120 bp, Artificial Sequence
  ENSG00000181873_75 (sequence is synthesized)
ttttgcctccccaccagcagcatgccagtgacctggtttctcctcatgctggccagtgttcaggttcaccactgcatctgtctgggccacatcgcctgtgtttccctggtggcgtggtga

SEQ ID NO: 642216 - DNA, 120 bp, Artificial Sequence
  ENSG00000181873_76 (sequence is synthesized)
cctttccgcggcacacctgcggctgcccctctgtgctgtccttgctgttcctcccgtcatcttagcccacgtgtgtaaatgacatatgttcccctcccttgtgggtgttgtttttgatgt

SEQ ID NO: 642217 - DNA, 120 bp, Artificial Sequence
  ENSG00000181873_77 (sequence is synthesized)
cctgtgaccgctgtcctggagtgtgggccagattcactggctgtcacagctggctatgcccaccctccctgcggcagggtcctcagtgagacctgtgcctactggttctgggtgatgagc

SEQ ID NO: 642218 - DNA, 120 bp, Artificial Sequence
  ENSG00000181873_78 (sequence is synthesized)
gtgaacgttctccgtggctgctggcacgtgggcatgaccacagggtagagtgagactgcagagatgagggcagcaggcccctgcttggcacctgaagccctgggcaactggcaaggactg

SEQ ID NO: 642219 - DNA, 120 bp, Artificial Sequence
  ENSG00000181873_79 (sequence is synthesized)
agccctctcctggctggaaggggctgggccacctgctcttgggcttgtctctggaaggccctctgggggtcttactacctccctgtctcagctcccaccagcctgtgaagccctgtgcag

SEQ ID NO: 642220 - DNA, 120 bp, Artificial Sequence
  ENSG00000181873_80 (sequence is synthesized)
tccatacctgcaatcaaccccagccatggaggtggctgtaccccaggtgtctccacttagtgcccccccccccgacatgccccacgctgcccagcctctcctcttcccaccatccgtctg

SEQ ID NO: 642221 - DNA, 120 bp, Artificial Sequence
  ENSG00000181885_0 (sequence is synthesized)
gcccgcacctgctggctcacctccgagccacctctgctgcgcaccgcagcctcggacctacagcccaggatactttgggacttgccggcgctcagaaacgcgcccagacggcccctccac

SEQ ID NO: 642222 - DNA, 120 bp, Artificial Sequence
  ENSG00000181885_1 (sequence is synthesized)
cttttgtttgcctagggtcgccgagagcgcccggagggaaccgcctggccttcggggaccaccaattttgtctggaaccaccctcccggcgtatcctactccctgtgccgcgaggccatc

SEQ ID NO: 642223 - DNA, 120 bp, Artificial Sequence
  ENSG00000181885_2 (sequence is synthesized)
gcttcactggaggggtcgatttgtgtgtagtttggtgacaagatttgcattcacctggcccaaaccctttttgtctctttgggtgaccggaaaactccacctcaagttttcttttgtggg

SEQ ID NO: 642224 - DNA, 120 bp, Artificial Sequence
  ENSG00000181885_3 (sequence is synthesized)
gctgccccccaagtgtcgtttgttttactgtagggtctccccgcccggcgcccccagtgttttctgagggcggaaatggccaattcgggcctgcagttgctgggcttctccatggccctg

SEQ ID NO: 642225 - DNA, 120 bp, Artificial Sequence
  ENSG00000181885_4 (sequence is synthesized)
ctgggctgggtgggtctggtggcctgcaccgccatcccgcagtggcagatgagctcctatgcgggtgacaacatcatcacggcccaggccatgtacaaggggctgtggatggactgcgtc

SEQ ID NO: 642226 - DNA, 120 bp, Artificial Sequence
  ENSG00000181885_5 (sequence is synthesized)
acgcagagcacggggatgatgagctgcaaaatgtacgactcggtgctcgccctgtccgcggccttgcaggccactcgagccctaatggtggtctccctggtgctgggcttcctggccatg

SEQ ID NO: 642227 - DNA, 120 bp, Artificial Sequence
  ENSG00000181885_6 (sequence is synthesized)
ggtcttgccgccttggtagcttgctcctggtatggccatcagattgtcacagacttttataaccctttgatccctaccaacattaagtatgagtttggccctgccatctttattggctgg

SEQ ID NO: 642228 - DNA, 120 bp, Artificial Sequence
  ENSG00000181885_7 (sequence is synthesized)
gcagggtctgccctagtcatcctgggaggtgcactgctctcctgttcctgtcctgggaatgagagcaaggctgggtaccgtgtaccccgctcttaccctaagtccaactcttccaaggag

SEQ ID NO: 642229 - DNA, 120 bp, Artificial Sequence
  ENSG00000181885_8 (sequence is synthesized)
tatgtgtgacctgggatctccttgccccagcctgacaggctatgggagtgtctagatgcctgaaagggcctggggctgagctcagcctgtgggcagggtgccggacaaaggcctcctggt

SEQ ID NO: 642230 - DNA, 120 bp, Artificial Sequence
  ENSG00000181885_9 (sequence is synthesized)
cactctgtccctgcactccatgtatagtcctcttgggttgggggtgggggggtgccgttggtgggagagacaaaaagagggagagtgtgctttttgtacagtaataaaaaataagtattg

SEQ ID NO: 642231 - DNA, 120 bp, Artificial Sequence
  ENSG00000181885_10 (sequence is synthesized)
ggaagcaggcttttttcccttcagggcctctgctttcctcccgtccagatccttgcagggagcttggaaccttagtgcacctacttcagttcagaacacttagcaccccactgactccac

SEQ ID NO: 642232 - DNA, 120 bp, Artificial Sequence
  ENSG00000181885_11 (sequence is synthesized)
tgacaattgactaaaagatgcaggtgctcgtatctcgacattcattcccacccccctcttatttaaatagctaccaaagtacttcttttttaataaaaaaataaagatttttattaggta

SEQ ID NO: 642233 - DNA, 120 bp, Artificial Sequence
  ENSG00000181885_12 (sequence is synthesized)
ggaaaaaaaaggagagcagcgggtgggggcgaaagcagggccgaggagagagcactttggacagaacccggcggggaaagggcggcgccgaggcttgtcaggggcgccccgcagcgtccc

SEQ ID NO: 642234 - DNA, 120 bp, Artificial Sequence
  ENSG00000181885_13 (sequence is synthesized)
aggcgcacctgttgggaagaaaggaaggggcttcccggtgttcgagggaaatccagtccggaggggctgactcggagcttgggactcctggggagccaccgcctcctccccagcggcggt

SEQ ID NO: 642235 - DNA, 120 bp, Artificial Sequence
  ENSG00000181885_14 (sequence is synthesized)
caaaaccgggcaagcgaaggggcgtgaccctggtgctcaggtttcttcctcctcacctgggcaaggaggggtgggggccacgacttccggttcaggtgagtgtcccttcggtgacgtcag

SEQ ID NO: 642236 - DNA, 120 bp, Artificial Sequence
  ENSG00000181885_15 (sequence is synthesized)
gcatgaagtgcacgcgctgtgggggagacgacaaagtgaagaaggcccgtatagccatgggtggaggcataattttcatcgtggcaggtatgagtttggccctgccatctttattggctg

SEQ ID NO: 642237 - DNA, 120 bp, Artificial Sequence
  ENSG00000181885_16 (sequence is synthesized)
ccgcttggcccaggtcttggacacctgggcgcccctggccctcggcagaacacggcgccggacagaagaggtccagcggttagtgggcgcggccggcggcacgaaggctggagccgcctg

SEQ ID NO: 642238 - DNA, 120 bp, Artificial Sequence
  ENSG00000181885_17 (sequence is synthesized)
tggtttcttcctccagttaggagccttgatgccggaggggacagtggtaggtggggaggttgagtgcaaagggttcaggctgtaagtcatgttgggttggaatgggggcacaggaaggtg

SEQ ID NO: 642239 - DNA, 120 bp, Artificial Sequence
  ENSG00000181885_18 (sequence is synthesized)
gggctgttggggagccacgctaagccgggtgtctgtagcagagccagagaaccgggacactgaagagggtgctgaagggggcgactctcagggatcgagccagggcccccgaaggtggga

SEQ ID NO: 642240 - DNA, 120 bp, Artificial Sequence
  ENSG00000181894_0 (sequence is synthesized)
cagagatggctggagccgtgtggatgggcataaatggctaatgtccagcaaccatcgatgtcaagtatccacacacctggcctgaatggatccctctgcctttcagagtttgggatatga

SEQ ID NO: 642241 - DNA, 120 bp, Artificial Sequence
  ENSG00000181894_1 (sequence is synthesized)
gattgaaaatgacgactcggaattttcctgagagagaagtaccctgtgatgtagaagtggaaagattcacaagggaagttccctgcttgtccagtttaggtgatggttgggactgtgaga

SEQ ID NO: 642242 - DNA, 120 bp, Artificial Sequence
  ENSG00000181894_2 (sequence is synthesized)
accaggagggacacttgaggcaatcagctttaactctggagaaaccagggactcaggaagcaatttgtgaatatcctggttttggggagcatttgattgcaagctcagaccttccaccgt

SEQ ID NO: 642243 - DNA, 120 bp, Artificial Sequence
  ENSG00000181894_3 (sequence is synthesized)
ctcagagagttctggcaacaaatggtttccatgcacctgactcaaatgttagtggtctggattgtgaccccgccttacccagctatcctaaaagttatgcagataagagaactggtgaca

SEQ ID NO: 642244 - DNA, 120 bp, Artificial Sequence
  ENSG00000181894_4 (sequence is synthesized)
gtgatgcctgtggaaaaggcttcaaccattccatggaagttattcatggaagaaatccagtgagagagaagccctacaaataccctgaaagtgttaagtcttttaatcattttacctctc

SEQ ID NO: 642245 - DNA, 120 bp, Artificial Sequence
  ENSG00000181894_5 (sequence is synthesized)
ttggtcatcagaaaataatgaaaagaggcaagaaatcgtatgaaggtaagaattttgagaacatctttactctgagctcatcgcttaatgaaaaccagagaaatctccctggagagaaac

SEQ ID NO: 642246 - DNA, 120 bp, Artificial Sequence
  ENSG00000181894_6 (sequence is synthesized)
aatatagatgtactgaatgtggcaaatgcttcaaacggaactcttctcttgttttgcatcaccgaactcacaccggagagaagccttatacttgtaatgagtgtggaaagtccttctcca

SEQ ID NO: 642247 - DNA, 120 bp, Artificial Sequence
  ENSG00000181894_7 (sequence is synthesized)
agaactacaacctgattgtgcatcaaagaatccacacaggagagaagccctatgaatgcagtaaatgtgggaaagctttcagtgatggctcagctctgacacagcaccagagaattcaca

SEQ ID NO: 642248 - DNA, 120 bp, Artificial Sequence
  ENSG00000181894_8 (sequence is synthesized)
caggcgagaaaccttatgaatgcctagagtgtggaaaaaccttcaaccgaaattcatccttaattttgcaccaaagaactcatacaggggaaaaaccatatagatgtaacgaatgtggga

SEQ ID NO: 642249 - DNA, 120 bp, Artificial Sequence
  ENSG00000181894_9 (sequence is synthesized)
aacccttcactgacatctcccaccttacagtgcatctcagaatccacaccggtgagaagccctatgagtgtagcaaatgtggaaaggctttccgggacggctcgtacctcacccagcatg

SEQ ID NO: 642250 - DNA, 120 bp, Artificial Sequence
  ENSG00000181894_10 (sequence is synthesized)
agaggactcacactggagaaaagccctttgagtgtgcagagtgcgggaaatccttcaacagaaactctcacctcattgtgcatcaaaagatccattctggggagaaaccctatgaatgta

SEQ ID NO: 642251 - DNA, 120 bp, Artificial Sequence
  ENSG00000181894_11 (sequence is synthesized)
aagaatgtggcaagactttcatcgagagtgcgtacctcatcaggcatcagaggattcatactggcgagaagccctatggctgcaaccagtgtcagaaacttttcaggaatatcgctggcc

SEQ ID NO: 642252 - DNA, 120 bp, Artificial Sequence
  ENSG00000181894_12 (sequence is synthesized)
tcattaggcaccagaggactcatactggtgagaagccctatgagtgtaatcagtgtggcaaagccttcagggacagctcctgtctgaccaagcaccagagaattcacactaaggagaccc

SEQ ID NO: 642253 - DNA, 120 bp, Artificial Sequence
  ENSG00000181894_13 (sequence is synthesized)
gcagtacatcagagactccatagcagggagggtcccagccggtgtcctcagtgtggaaaaatgttccaaaagagctcatcccttgttcgacatcaaagagcacacctgggagagcaaccc

SEQ ID NO: 642254 - DNA, 120 bp, Artificial Sequence
  ENSG00000181894_14 (sequence is synthesized)
atggaaacataatggttgggggccacatgagtcttccagttcactctcactcctgtgtttaggaggcgtgtcttagatctgactcctctctggtcagtagaaaagaatcctttaagctat

SEQ ID NO: 642255 - DNA, 120 bp, Artificial Sequence
  ENSG00000181894_15 (sequence is synthesized)
ccagtgaattgatgaatgtgagacattgctgagccacactgttaagtctgctcattggggaactccagagacaacttaggatgagggcagaaaagtctttggggatgattcagtctgtac

SEQ ID NO: 642256 - DNA, 120 bp, Artificial Sequence
  ENSG00000181894_16 (sequence is synthesized)
cagacatgacaacacacacactggaatgaaatgtgcaaacatgggggtgacaccacagagagaacctgtgaatgcattcagaacatgattggaatgaagagccctgtagtagggagtttc

SEQ ID NO: 642257 - DNA, 120 bp, Artificial Sequence
  ENSG00000181894_17 (sequence is synthesized)
gtagggagtttccaccttgtacgtaagcaaacactgaatcaacttttttttttttttcggacagagtctcactgtgcagtggcatgatctccactcacagcaacctctgcctcccaggtt

SEQ ID NO: 642258 - DNA, 120 bp, Artificial Sequence
  ENSG00000181894_18 (sequence is synthesized)
gtgttgggattacaggcatgagacactgcctggcctgaatcaaccttttttaagtgtaatcagaaagagaggctttggcaggggctcttactgtgttttctgtaacaacaaaggtgtaca

SEQ ID NO: 642259 - DNA, 120 bp, Artificial Sequence
  ENSG00000181894_19 (sequence is synthesized)
tactgtgttttctgtaacaacaaaggtgtacaatgagagagtccacacagtgctgtactgcacacaccacagaatgtgtgagattttcctgtttgaatgtatgtctgcattatactcctg

SEQ ID NO: 642260 - DNA, 120 bp, Artificial Sequence
  ENSG00000181894_20 (sequence is synthesized)
caataatgctgaggactcgttgcaggagggcaaactaggtgaataaattacctgtgaatgaacaatgaagtcgttcctcttaagactgaaacaagcaggccagatgtggtggctcacgcc

SEQ ID NO: 642261 - DNA, 120 bp, Artificial Sequence
  ENSG00000181894_21 (sequence is synthesized)
agagcgagactccatttcaaaaaaaaagactgaaacaagcttgtgctaagatggaaagggctgcttctaacagatgtggtttgttgctttagttgttgaagcaaaaatactgagttgtta

SEQ ID NO: 642262 - DNA, 120 bp, Artificial Sequence
  ENSG00000181894_22 (sequence is synthesized)
tgtttatgttatcaccccaccactacctccatggttgttcatttaggatgcttctaattcagccactgtgaaccattataaaggttttattgccatgttgaaaatgtttataatatggca

SEQ ID NO: 642263 - DNA, 120 bp, Artificial Sequence
  ENSG00000181894_23 (sequence is synthesized)
aaaaggggcatcaaatagaagatttactattattccagccatgtaaaaatatgtgcacatatggatgtatgttgaaagtggatgatggagaaataaaatgtggttttctttggggactgg

SEQ ID NO: 642264 - DNA, 68 bp, Artificial Sequence
  ENSG00000181894_24 (sequence is synthesized)
ttgctggctcctgggctaccaagtagctgggacttcagagatggctggagccgtgtggatgggcataa

SEQ ID NO: 642265 - DNA, 120 bp, Artificial Sequence
  ENSG00000181894_25 (sequence is synthesized)
gatgacctgcactccccaaaccactgcgggatagaacggggccgagtgctctcaggggtggccgctaccggggcggcccgagacacggctgcgggttccagccaacaggcccggagtcgc

SEQ ID NO: 642266 - DNA, 120 bp, Artificial Sequence
  ENSG00000181894_26 (sequence is synthesized)
tggggatcgtccccagatcccgccttccgggcagggcctccgctgcctgcgatcctgcccacagtccaaggatcctcctcgcctctcgcggactgcggtgtcagccgcccgagccgttcc

SEQ ID NO: 642267 - DNA, 120 bp, Artificial Sequence
  ENSG00000181896_0 (sequence is synthesized)
attcgggtccgggttttagttcctcggggagcccctggtgccccggatacggctgattttgtcgtgtgggacctgttctggctgctccagccccaggaaggacccaggacacccggaagc

SEQ ID NO: 642268 - DNA, 120 bp, Artificial Sequence
  ENSG00000181896_1 (sequence is synthesized)
cggaaatggactcagtggcctttgaggatgtggctgtgaacttcacccaggaggagtgggctttgctgagtccttcccagaagaatctctacagagatgtgacgctggaaaccttcagga

SEQ ID NO: 642269 - DNA, 120 bp, Artificial Sequence
  ENSG00000181896_2 (sequence is synthesized)
acctggcctcggtcggaatccaatggaaagaccaggacattgagaatctgtaccaaaacctggggattaagctaagaagtctggtggagagactctgtggacgtaaagaagggaatgaac

SEQ ID NO: 642270 - DNA, 120 bp, Artificial Sequence
  ENSG00000181896_3 (sequence is synthesized)
acagagaaactttcagccagattcctgattgtcacctgaacaagaaaagtcaaactggagtgaaaccatgcaaatgcagcgtgtgtgggaaagtcttcctccgtcattcattcctggaca

SEQ ID NO: 642271 - DNA, 120 bp, Artificial Sequence
  ENSG00000181896_4 (sequence is synthesized)
ggcacatgagagctcatgctggacacaaacgatctgagtgtggtggggaatggagagagacgccccgtaaacagaaacaacatgggaaagcctccatttcccccagtagtggtgcacggc

SEQ ID NO: 642272 - DNA, 120 bp, Artificial Sequence
  ENSG00000181896_5 (sequence is synthesized)
gcacagtaacaccaactcgaaagagaccttatgaatgcaaggtgtgcgggaaagcctttaattctcccaatttatttcaaatccatcaaagaactcacactggaaagaggtcctataaat

SEQ ID NO: 642273 - DNA, 120 bp, Artificial Sequence
  ENSG00000181896_6 (sequence is synthesized)
gtagggaaatagtgagagccttcacagtttccagtttctttcgaaaacatggaaaaatgcatactggagaaaaacgctatgaatgtaaatactgtggaaaacctatcgattatcccagtt

SEQ ID NO: 642274 - DNA, 120 bp, Artificial Sequence
  ENSG00000181896_7 (sequence is synthesized)
tatttcaaattcatgttagaactcacactggagaaaaaccttacaaatgtaaacaatgtggtaaagccttcatttccgcaggttaccttcggacacatgaaatcagatctcacgcgctgg

SEQ ID NO: 642275 - DNA, 120 bp, Artificial Sequence
  ENSG00000181896_8 (sequence is synthesized)
agaaatcccaccaatgtcaggaatgtgggaaaaaactcagttgttccagttcccttcacagacatgaaagaactcatagtggaggaaaactctacgaatgtcaaaaatgtgccaaagtct

SEQ ID NO: 642276 - DNA, 120 bp, Artificial Sequence
  ENSG00000181896_9 (sequence is synthesized)
ttagatgtcccacgtcccttcaagcacatgaaagagctcacactggagaaagaccttatgaatgtaataaatgtggtaaaaccttcaattatcccagttgttttcgaagacataaaaaaa

SEQ ID NO: 642277 - DNA, 120 bp, Artificial Sequence
  ENSG00000181896_10 (sequence is synthesized)
ctcatagtggagaaaagccatatgaatgtacaaggtgtggtaaagcctttgggtggtgcagttccctccgaagacatgaaatgactcacactggagaaaaaccctttgattgtaaacagt

SEQ ID NO: 642278 - DNA, 120 bp, Artificial Sequence
  ENSG00000181896_11 (sequence is synthesized)
cagtgtggtaaagtctttactttttcaaattaccttagacttcatgaaagaactcatttggccgggcgtagccagtgctttggcaggaggcagggggatcacctgagcccaggagtttga

SEQ ID NO: 642279 - DNA, 120 bp, Artificial Sequence
  ENSG00000181896_12 (sequence is synthesized)
ccattgcactccagcctgggcgacaaaagtgagactccatcacacacacacacaaaaaagccccatatcacgtggtggctcatgcctgtaaaaccagcactttgggaagccgaggtgggt

SEQ ID NO: 642280 - DNA, 79 bp, Artificial Sequence
  ENSG00000181896_13 (sequence is synthesized)
cacacaaaaaagccccatatcacgtggtggctcatgcctgtaaacagagatggagactatcttggccaacatggtgaaa

SEQ ID NO: 642281 - DNA, 120 bp, Artificial Sequence
  ENSG00000181896_14 (sequence is synthesized)
cgagacttcgtctcaaaacaaacaaaaaaaagaaggccccatatctccaaagaaaaaaaaaattaactgggtgaggtggtgcatccctgtagttctagctgctcagaaagctgaggtggg

SEQ ID NO: 642282 - DNA, 120 bp, Artificial Sequence
  ENSG00000181896_15 (sequence is synthesized)
gagatcgtgccactacactccagcctggatgacggtgacactctgtctcagaaaaaaagggaaagaaataattctcatttatacaggagagaaatcctatgaatgtaaggaatatgggaa

SEQ ID NO: 642283 - DNA, 120 bp, Artificial Sequence
  ENSG00000181896_16 (sequence is synthesized)
aatccaaagacctcagatattccagttctattcagagccataaaaggactcatactggagaaaaattgtagaaatgtacagaatatggggaaactctcattgctctcatctccattcaaa

SEQ ID NO: 642284 - DNA, 120 bp, Artificial Sequence
  ENSG00000181896_17 (sequence is synthesized)
gacacgtgtcagtgcacactggagatggatggtatgaatcgaagaatacacactggatggaaacgttagtagtttggaaaatacaggaaacttccattttaacaataattaaaattcaca

SEQ ID NO: 642285 - DNA, 120 bp, Artificial Sequence
  ENSG00000181896_18 (sequence is synthesized)
ctgtaatcccagcattttgggaggctggggtgggtagattgcttgaggccaggtattcaagaccagcctggcaacctggagaaatcccatgtatacaaaaaatagaaaagttagccaggg

SEQ ID NO: 642286 - DNA, 75 bp, Artificial Sequence
  ENSG00000181896_19 (sequence is synthesized)
tcaagaccagcctggcaacctggagaaatcccatgtatacaaaaaatagaaaagttagccagggatgatggtgtt

SEQ ID NO: 642287 - DNA, 120 bp, Artificial Sequence
  ENSG00000181896_20 (sequence is synthesized)
cagcctgggcaacagtgagaccctgtctaaaaaaattaatcatgtgagaacatccactcgaaagaaatcctataaacgtaagtaattttgaaagcctgatgcaaattaattattatataa

SEQ ID NO: 642288 - DNA, 120 bp, Artificial Sequence
  ENSG00000181896_21 (sequence is synthesized)
tgatgcaaattaattattatataatgctcaaaaacttaatcatgaatgagttattacacaaagttataaatatatagcatttatcagtggctcattcttttttctttctttttttttttt

SEQ ID NO: 642289 - DNA, 70 bp, Artificial Sequence
  ENSG00000181896_22 (sequence is synthesized)
ttttttttccctgactcactgtaacctctgacttctgggttcaagcaattctcctgcttcagtctccgaa

SEQ ID NO: 642290 - DNA, 84 bp, Artificial Sequence
  ENSG00000181896_23 (sequence is synthesized)
tagagtgcagtggcgcgatcttgactcactgtaacctctgacttctgggttcaagcaattctcctgcttcagtctccgaagcat

SEQ ID NO: 642291 - DNA, 120 bp, Artificial Sequence
  ENSG00000181896_24 (sequence is synthesized)
ggctggtcttgaactcctgacctcaaggaatccatcctcttcagcctcgcaaagtgctgagattataggcatgagacaccttgcccggcccctgtgactcattcttaaaaaggatctttg

SEQ ID NO: 642292 - DNA, 120 bp, Artificial Sequence
  ENSG00000181896_25 (sequence is synthesized)
tttggattatgggtttccacttttgcaaggaaatgtgagaatgatactctttaagcagtggtacctgaggtttaataggaagtgtttttatcctaagttagttaataaaatttttttcta

SEQ ID NO: 642293 - DNA, 120 bp, Artificial Sequence
  ENSG00000181896_26 (sequence is synthesized)
tccattttggttttcatttttttctatccattttaaagtgttggatctgtgggtgaagtgaaatttatttctaatatgtaagcaggtttaatttttatgtagtgtttaattgttctgtga

SEQ ID NO: 642294 - DNA, 120 bp, Artificial Sequence
  ENSG00000181896_27 (sequence is synthesized)
ttctgtgatgaatgggccattacaaaatgagtctatttttgtttgttttcttttgtttttgagactgagtcttgctctgtcgccaggctgaagtgtagtggcgcgatcttggctcactgc

SEQ ID NO: 642295 - DNA, 75 bp, Artificial Sequence
  ENSG00000181896_28 (sequence is synthesized)
aacctccacctcccgggttcaagtaatccccctgccttagcctcctacaggcgcgtgccgttgtactggccagga

SEQ ID NO: 642296 - DNA, 89 bp, Artificial Sequence
  ENSG00000181896_29 (sequence is synthesized)
accggcccatgagtctttattaatagagatttcttactggtgttatgtggcagattctgcatattcctcacccatcatatgtattccac

SEQ ID NO: 642297 - DNA, 120 bp, Artificial Sequence
  ENSG00000181896_30 (sequence is synthesized)
gcagattctgcatattcctcacccatcatatgtattccactttcctttattatggggaaaactactctttttggcatgatacaatgttgactccattttctttgctaataaggacttggt

SEQ ID NO: 642298 - DNA, 120 bp, Artificial Sequence
  ENSG00000181896_31 (sequence is synthesized)
atcaatttatcagtatgtaaagtttaccatagagtattgtctcatgtgaatcattcccattttttgctctttactctttgtcgttatttctgagtattatttggatggttcattttgact

SEQ ID NO: 642299 - DNA, 120 bp, Artificial Sequence
  ENSG00000181896_32 (sequence is synthesized)
taaggatagccctgtgatatgacaatatttttatctaatctgatggagaaagcatttagtctcctgatcaagtatgatgttagctgcaggtttttaataaatgccttaattcagtttgaa

SEQ ID NO: 642300 - DNA, 120 bp, Artificial Sequence
  ENSG00000181896_33 (sequence is synthesized)
caagtagctaggaccacagacacctgctaacataccctgctaatgtttttaaaaaatttttctagaggtggctataacttttaatttttttgttttttgaggtggagtcttgctctgttg

SEQ ID NO: 642301 - DNA, 90 bp, Artificial Sequence
  ENSG00000181896_34 (sequence is synthesized)
ggtggagtcttgctctgttgcccaggcccaccatgccaggctaatttttctatttttaatagagaccagttttcactatgtaagtggtcc

SEQ ID NO: 642302 - DNA, 120 bp, Artificial Sequence
  ENSG00000181896_35 (sequence is synthesized)
tgctctgttattaaccaagttttcatatgaatactggcccattgaagactcttctttttccttgatctatttgtttatctctctgctaatagtatgctgtcctgaatgtgatggtttgga

SEQ ID NO: 642303 - DNA, 120 bp, Artificial Sequence
  ENSG00000181896_36 (sequence is synthesized)
aatctttggtgttaggtaagccatccacctgctattcagaaggctttgacaattattagatgttaattcctgcacaccaggtggtgggaggtttggaaaagtagcttttgtttacctaaa

SEQ ID NO: 642304 - DNA, 87 bp, Artificial Sequence
  ENSG00000181896_37 (sequence is synthesized)
tgtattgggtatttatgaaattttgtaaggatatcatttggaagaagggacatcttattgagttttttctaggaacacatgttatct

SEQ ID NO: 642305 - DNA, 120 bp, Artificial Sequence
  ENSG00000181896_38 (sequence is synthesized)
ggacatcttattgagttttttctaggaacacatgttatctttccacttactccatactgctttgacattacctgacagaaattttaaaattcttccattaggacaattaaatattgatca

SEQ ID NO: 642306 - DNA, 120 bp, Artificial Sequence
  ENSG00000181896_39 (sequence is synthesized)
tgaatcttatttactacttgattaaatttggtctagagtaaactgcttgcaagcttcaggatattctctcttggtataaccacatgggatgagctcagttccccaggggacaagttgtga

SEQ ID NO: 642307 - DNA, 120 bp, Artificial Sequence
  ENSG00000181896_40 (sequence is synthesized)
caacacgtgtgacatattgtctcccaggaaagctcattaaagactctgtgcccagagtgtttttctggggctagtgccctaggcaccacttctagtttggaacaaaagagtaggctttca

SEQ ID NO: 642308 - DNA, 120 bp, Artificial Sequence
  ENSG00000181896_41 (sequence is synthesized)
gaaggaaaacagttcagtcagtaccatcctgtttgtcaataccataaaccgtttagccacagtaagccactttgtcacttaagttgatgggatccctctcgtagtctaagttgaccccga

SEQ ID NO: 642309 - DNA, 120 bp, Artificial Sequence
  ENSG00000181896_42 (sequence is synthesized)
attcactctgcaaagagcatttggggcaacgcagcagcacaactgactccctggacccaccacagagagggtggtcctcctctgtggctggctctctgagtaggtcagttctcacactgg

SEQ ID NO: 642310 - DNA, 120 bp, Artificial Sequence
  ENSG00000181896_43 (sequence is synthesized)
aactgctgcgagggaggaagtgcgtgtagataggaggaggccgatgactcaatcatggagtgagtgtttggagagcccggcgtcatgggatcactcatgtattgagtagagatccccagt

SEQ ID NO: 642311 - DNA, 67 bp, Artificial Sequence
  ENSG00000181896_44 (sequence is synthesized)
agaaggccccatatcggctcttgaactcctgacctcaaggaatccatcctcttcagcctcgcaaagt

SEQ ID NO: 642312 - DNA, 70 bp, Artificial Sequence
  ENSG00000181896_45 (sequence is synthesized)
cgtgtgggacctgttctggctgctccagccccaggaaggacccaggacacccggaagccggaaatgacaa

SEQ ID NO: 642313 - DNA, 120 bp, Artificial Sequence
  ENSG00000181903_0 (sequence is synthesized)
catgaaggtggctgatggtgtgattcaagattgaactggaagttcaaggattctcaactctcagctggaactcatatcaacacctgagaaatggaaaatcaaaacaatgtgactgaattc

SEQ ID NO: 642314 - DNA, 120 bp, Artificial Sequence
  ENSG00000181903_1 (sequence is synthesized)
attcttctgggtctcacagagaacctggagctgtggaaaatattttctgctgtgtttcttgtcatgtatgtagccacagtgctggaaaatctacttattgtggtaactattatcacaagt

SEQ ID NO: 642315 - DNA, 120 bp, Artificial Sequence
  ENSG00000181903_2 (sequence is synthesized)
cagagtctgaggtcacctatgtatttttttcttaccttcttgtcccttttggatgtcatgttctcatctgtcgttgcccccaaggtgattgtagacaccctctccaagagcactaccatc

SEQ ID NO: 642316 - DNA, 120 bp, Artificial Sequence
  ENSG00000181903_3 (sequence is synthesized)
tctctcaaaggctgcctcacccagctgtttgtggagcatttctttggtggtgtggggatcatcctcctcactgtgatggcctatgaccgctacgtggccatctgtaagcccctgcactac

SEQ ID NO: 642317 - DNA, 120 bp, Artificial Sequence
  ENSG00000181903_4 (sequence is synthesized)
tttatgcacgcaatgatacaacttctcttcatgtatcaaatacccttctgtggtcctaatatcatagatcactttatatgtgatttgtttcagttgttgacacttgcctgcacggacacc

SEQ ID NO: 642318 - DNA, 120 bp, Artificial Sequence
  ENSG00000181903_5 (sequence is synthesized)
cacatcctgggcctcttagttaccctcaacagtgggatgatgtgtgtggccatctttcttatcttaattgcgtcctacacggtcatcctatgctccctgaagtcttacagctctaaaggg

SEQ ID NO: 642319 - DNA, 120 bp, Artificial Sequence
  ENSG00000181903_6 (sequence is synthesized)
cggcacaaagccctctctacctgcagctcccacctcacggtggttgtattgttctttgtcccctgtattttcttgtacatgaggcctgtggtcactcaccccatagacaaggcaatggct

SEQ ID NO: 642320 - DNA, 120 bp, Artificial Sequence
  ENSG00000181903_7 (sequence is synthesized)
gtgtcagactcaatcatcacacccatgttaaatcccttgatctatacactgaggaatgcagaggtgaaaagtgccatgaagaaactctggatgaaatgggaggctttggctgggaaataa

SEQ ID NO: 642321 - DNA, 120 bp, Artificial Sequence
  ENSG00000181904_0 (sequence is synthesized)
aagaaatggggtcagcaggagttccagcatctcagaattgtggtgaaaaccaatacaaaaaatgatgcatcctgttgccagcagtaatccagctttctgtgggcctggcaagccttcctg

SEQ ID NO: 642322 - DNA, 120 bp, Artificial Sequence
  ENSG00000181904_1 (sequence is synthesized)
cctcaatgaagatgccatgagagctgctgatcagtttgacatatattcctcccagcaaagcaaatacagccacacagtcaaccacaaaccaatggtttgtcagaggcaagacccattaaa

SEQ ID NO: 642323 - DNA, 120 bp, Artificial Sequence
  ENSG00000181904_2 (sequence is synthesized)
tgaaacacacttgcagactacaagtggcagaagcatagaaataaaagatgaactaaagaaaaagaagaatctcaaccgatctggtaagcgtggccggccttcgggaaccaccaaatcagc

SEQ ID NO: 642324 - DNA, 120 bp, Artificial Sequence
  ENSG00000181904_3 (sequence is synthesized)
aggataccggaccagcacaggcagacccctgggaaccaccaaagcagctggatttaagacaagtccaggcagacctttggggacaactaaagctgcgggatacaaagtcagcccaggcag

SEQ ID NO: 642325 - DNA, 120 bp, Artificial Sequence
  ENSG00000181904_4 (sequence is synthesized)
acctccaggtagcattaaagctctatcccgtcttgccgatcttggttatggctgtggcactgctgcttttccttaccctatgatgcatggcagagcagttcatggggtagaggaaactag

SEQ ID NO: 642326 - DNA, 120 bp, Artificial Sequence
  ENSG00000181904_5 (sequence is synthesized)
cagtgaagtcaaaccacccaatgagtgaatgaggcaggaaaagagggccaggtttagaaggaagattgtgaataatcccaaagcttcttggttttattttgatatacataattttatggc

SEQ ID NO: 642327 - DNA, 120 bp, Artificial Sequence
  ENSG00000181904_6 (sequence is synthesized)
ctgggctttccaaatttgttttcctgtttggtttttttcctgcttttgctcaaaaactgccatatgctgacagatgcactcagggcatgagcagcggcattgtatttgtacataggttca

SEQ ID NO: 642328 - DNA, 120 bp, Artificial Sequence
  ENSG00000181904_7 (sequence is synthesized)
agtgtaacacctaactaaatcatttttccttttcctttagagttatggtcatgtctcatgtttcattactactttggggctgttctaaatagatgctttatgtgataaacaactgaaacc

SEQ ID NO: 642329 - DNA, 120 bp, Artificial Sequence
  ENSG00000181904_8 (sequence is synthesized)
attatacctattagtttgtgaagtaagcctacagtataataaagacactaacgtatttttaactgatggagcaaaaaagcaaactaatgaatcaggattacttgaggtaatggctgtgtg

SEQ ID NO: 642330 - DNA, 120 bp, Artificial Sequence
  ENSG00000181904_9 (sequence is synthesized)
agtttttgtaacatttattttcacaagatgggacacatatttgtatgctttggcatttacatccacttcaaatgttaaaaaacttatttttaatgttttaggtttaagcagcttgtaatt

SEQ ID NO: 642331 - DNA, 120 bp, Artificial Sequence
  ENSG00000181904_10 (sequence is synthesized)
tattgatctacatggcattaattgatttaaccattatacctgaaataattcttcagtgtttgcctttgagcagtgataggttgtgtattttttaattgcctaagagcatatataccaaac

SEQ ID NO: 642332 - DNA, 120 bp, Artificial Sequence
  ENSG00000181904_11 (sequence is synthesized)
actacaaacaattcatatttacagaaaatttaaactattttataaaaactgcacattacatttttggtgaaatatagtgcattctgaggatagcatatttcatataatagaaaaagaagc

SEQ ID NO: 642333 - DNA, 120 bp, Artificial Sequence
  ENSG00000181904_12 (sequence is synthesized)
attctctaggtttgcatgtagctatagtcactatattttgcctttcatatagaaagttttaaagtattatgtttaaaaacatttattggctgggtgtggtggctcacacccagcactttg

SEQ ID NO: 642334 - DNA, 120 bp, Artificial Sequence
  ENSG00000181904_13 (sequence is synthesized)
taaataaataaataaataaataaaaccatttattgatgttgctcatttatttggaacgtttttagtttttctcagaaattgtcccattgcattagcacttactgtgttttcaggttgata

SEQ ID NO: 642335 - DNA, 120 bp, Artificial Sequence
  ENSG00000181904_14 (sequence is synthesized)
actgtgttttcaggttgatatctaccaaaggacacaaattgaatggtagactgtaaaactggtataaacagaatgcagtttcccgaccatcagaacccaaatattaagaagcatatagga

SEQ ID NO: 642336 - DNA, 120 bp, Artificial Sequence
  ENSG00000181904_15 (sequence is synthesized)
tgagaccatctcatccaaaagattttttttcccccaatgatgtttgctttagaagcaagatagaaaggaaaaaaagtattaggtagatatgtatagtagggacagagggaaatctttctt

SEQ ID NO: 642337 - DNA, 120 bp, Artificial Sequence
  ENSG00000181904_16 (sequence is synthesized)
ctttcctttctgaaagtaatacttcttgttacacattttatttattgagtttgttctaaataaaatattataaacttcagacttgaaaaaattccacttaactttaaagttacaatgttt

SEQ ID NO: 642338 - DNA, 120 bp, Artificial Sequence
  ENSG00000181904_17 (sequence is synthesized)
gtatttgggattttaaatgcctttgagattaaaatgtagaattgcaggacccaaaaacttttaaaataattaaaattttaaaagagcacatgttgtgttttttgggcttgctattaatgc

SEQ ID NO: 642339 - DNA, 120 bp, Artificial Sequence
  ENSG00000181904_18 (sequence is synthesized)
aaactctgattgcaaatggatgtcatgtttcataccttttttatcaggaaaaaagcagcaagccttcaggtgttccagtgatgcctgacacaattgagctggactttatgctgctcttta

SEQ ID NO: 642340 - DNA, 120 bp, Artificial Sequence
  ENSG00000181904_19 (sequence is synthesized)
cagtaagaggtgttgcattgtatgtggggactatgtgcactggcgtctaagacagtgacctcaacaatattagctttgcacaaaccatagagaacgatgttggatggttacataatcagt

SEQ ID NO: 642341 - DNA, 120 bp, Artificial Sequence
  ENSG00000181904_20 (sequence is synthesized)
tataacattctggcagctaaattgctacaagagctttttcttgcaaaagcttaaaatacaagatttttaataatttactcagaacagtataacttctgacacacacaaatgcttgcctct

SEQ ID NO: 642342 - DNA, 120 bp, Artificial Sequence
  ENSG00000181904_21 (sequence is synthesized)
ttattcatatgttcgttacctactctgtacatgtatctgtcatttagctgtttctcaagatgatgttcagcagttggctgcttagaaatctttttcaagccagtttctaaagacatttgt

SEQ ID NO: 642343 - DNA, 120 bp, Artificial Sequence
  ENSG00000181904_22 (sequence is synthesized)
ttaatgttctaccatagaataatgcacaccattgtcaaagatttgattattgtgttttatagtaagtccatttgacatttatttccctttcagtttattttccttccttattttgttata

SEQ ID NO: 642344 - DNA, 120 bp, Artificial Sequence
  ENSG00000181904_23 (sequence is synthesized)
catacccttccctttctcccctgcctttcgtacattcattcctcttcctctaccctccagcacatctacttactggtgctgtgctgtgtgtcagaagataaaacaggtgtattattgtat

SEQ ID NO: 642345 - DNA, 120 bp, Artificial Sequence
  ENSG00000181904_24 (sequence is synthesized)
aatgaattttgtatacatgtttatgaaatggtgagatcaactaaaggaggcatgttcataacagtgtttattatcagcagctatgtcccaggaaaaaaaaatgggaggggcaaatggcta

SEQ ID NO: 642346 - DNA, 120 bp, Artificial Sequence
  ENSG00000181904_25 (sequence is synthesized)
cagttgtaaatggataacatcatttagaaagccgaatttactgttcatctgagcggttacctggagtattatatctatgcactggtgagcatctcctgattccacttacttttctccctg

SEQ ID NO: 642347 - DNA, 120 bp, Artificial Sequence
  ENSG00000181904_26 (sequence is synthesized)
tgaacagtttaccggtgccatgctgaagagaaagacatctaagtgataacatgaatgaagtcttaaaatttaaagtatttttactgctatataaactaaagactacattgtgcatatttt

SEQ ID NO: 642348 - DNA, 120 bp, Artificial Sequence
  ENSG00000181904_27 (sequence is synthesized)
gttaacactgtctcttgttatgataaacactgaaatagcatgttaaacagttgcctatactttaatataatcagttggggaaaactggccttttctcccccactgtatgattgtttcttg

SEQ ID NO: 642349 - DNA, 120 bp, Artificial Sequence
  ENSG00000181904_28 (sequence is synthesized)
aaaggtaaattgctaattttatacagtgtaattctgttcttcacaaaataggtttcattattctatatttaaactgttggtcagaaaatgatctgcaattcaagtaagtctgcattactt

SEQ ID NO: 642350 - DNA, 120 bp, Artificial Sequence
  ENSG00000181904_29 (sequence is synthesized)
ttttctttaaaaagtactttaacatgccttatttattatattagcaaatgagctaataacagatgaaattttcattttttgacagatataaccttgcataagtagtatttagggtgattt

SEQ ID NO: 642351 - DNA, 120 bp, Artificial Sequence
  ENSG00000181904_30 (sequence is synthesized)
tgatactatctttagagttttgcattggatattaaaaaatatattggcacaatgtattggaagaaaatgagtagtatctggtttaatttttaatatttagggacattttaaaaaatcaat

SEQ ID NO: 642352 - DNA, 120 bp, Artificial Sequence
  ENSG00000181904_31 (sequence is synthesized)
gttttaattagactaaaaattctttatattttttatttactttttaaagaaacatctgtcaaagtaatattgattccaaactgatgtttgtgtgaatttacatgtctattttcatgaact

SEQ ID NO: 642353 - DNA, 120 bp, Artificial Sequence
  ENSG00000181904_32 (sequence is synthesized)
aagaatagagtttctttgagttgaggagaaaaaaatatatatgtgggtccatttattaggttaaagttgacccattcagtgtaaaaataaccatagtgtgtgagctaaagaaaaaaaaaa

SEQ ID NO: 642354 - DNA, 120 bp, Artificial Sequence
  ENSG00000181904_33 (sequence is synthesized)
aacactacagggtggtagcggcctcttcgtactgcgtccggggcaggaccgtgcgcggcggccgcggcgggtgctgggagccagcgcctgcctcgccgccgccctcgctgcctgccactc

SEQ ID NO: 642355 - DNA, 120 bp, Artificial Sequence
  ENSG00000181904_34 (sequence is synthesized)
cgtcttggcccgttctccgcaccgtgcagaggcggcgggctggggagggagcggcgccagcacgaggttcccagccgctgggaagcccctagacgcgccgaggggccgggctacgagcgg

SEQ ID NO: 642356 - DNA, 120 bp, Artificial Sequence
  ENSG00000181904_35 (sequence is synthesized)
agctttaaaagaacaattcaggggttattgataactgctactctgtcggtcattgtctctatatgcagtaaaattttatggtccctttataggaatataaagaattcaaaacagtttttc

SEQ ID NO: 642357 - DNA, 120 bp, Artificial Sequence
  ENSG00000181904_36 (sequence is synthesized)
aaaagatttttttccttggacataaaaaattttgatgctattctatttttgtttttattacagcttaactgtatgctgttaaactctaggatgtatctgaatctttccttttttcccccc

SEQ ID NO: 642358 - DNA, 120 bp, Artificial Sequence
  ENSG00000181904_37 (sequence is synthesized)
tcctccaaatatataaatctgtgctctcacatgtaatgtatttaatttttggaaaatttaatgctatatagtaaatcaagtgtgtgatttaaagtaatcagatcactttgattcttttaa

SEQ ID NO: 642359 - DNA, 120 bp, Artificial Sequence
  ENSG00000181904_38 (sequence is synthesized)
gttttcagaatttcttttttccacaggtaattttggagaaaataattaccaattaactgataataagcacgctgtcctctgctgtaaaaagtctgaatagatactgtgtatgtttttatg

SEQ ID NO: 642360 - DNA, 120 bp, Artificial Sequence
  ENSG00000181904_39 (sequence is synthesized)
tccatgaacttgagctactcgtgtgcaattatgtgtatgggaatggagtagtgttcatgatttgtatctacatcatcatatggatgtatatttattaataaagtcattactttaaaacca

SEQ ID NO: 642361 - DNA, 120 bp, Artificial Sequence
  ENSG00000181904_40 (sequence is synthesized)
gttcccagccgctgggaagcccctagacgcgccgaggggccgggctacgagcggctgagcacacaacaggtaatacattctaaacgcctcgtgtcaaaataaggagagtccttatttgtg

SEQ ID NO: 642362 - DNA, 120 bp, Artificial Sequence
  ENSG00000181904_41 (sequence is synthesized)
caccgtggggcacagttaaggagcaggaagaagacaaaggaggccgttatttatgtgccgtcctattatcaaaactttccgtggtggggcagggtgcgtggctattggcctctgctgaat

SEQ ID NO: 642363 - DNA, 120 bp, Artificial Sequence
  ENSG00000181904_42 (sequence is synthesized)
gggagcggggtagggcggcggcgagaacgggcgcctcgctgaccggggagaagaggcctcctgccaaggggccctagtgtagccggagtgagaggaggggccccggacgtagcctgctct

SEQ ID NO: 642364 - DNA, 120 bp, Artificial Sequence
  ENSG00000181904_43 (sequence is synthesized)
tccccggtgtggagccattacggggggacattcctcctgcggcggggggagggagccccctttcttttctttgagaggtcagaatccgcagtccgcccttcgcctttaaataaaagcctg

SEQ ID NO: 642365 - DNA, 120 bp, Artificial Sequence
  ENSG00000181904_44 (sequence is synthesized)
acgcttgcggaactccgagtggacggatagcggcttatgaattttgctttttagagggtacacaaccctttctctagggtggcgtgcatcttctgcaaacttgttattgccaatacgcta

SEQ ID NO: 642366 - DNA, 120 bp, Artificial Sequence
  ENSG00000181915_0 (sequence is synthesized)
gggcgcccggccaccgtcgtaggtgcgggccgcatgaatggagcgccgggcgtaaggcaaagcctggcaccgtctgcgcggccgctatctgctcccggagcgtgagtgcggggtgtgggg

SEQ ID NO: 642367 - DNA, 120 bp, Artificial Sequence
  ENSG00000181915_1 (sequence is synthesized)
ctgctcccggagcgtgagtgcggggtgtggggcgtgcgcgtgcgcgctcagagggggctcaaggcgagcgcgccgggcagttgcgggcgcgtggctgctgaggttggcggcggtgccgcg

SEQ ID NO: 642368 - DNA, 120 bp, Artificial Sequence
  ENSG00000181915_2 (sequence is synthesized)
gcctcgacccgggctgggggcagccgtggcggccgccggggaccgcaaggggcggaggaaaggagggggccggtcccggcacgcagaggagcagccgaccatgccccgagacaacatggc

SEQ ID NO: 642369 - DNA, 120 bp, Artificial Sequence
  ENSG00000181915_3 (sequence is synthesized)
ctccttgatccaacggatcgcccgccaggcttgcctcaccttccggggcagcgggggcggccgcggcgcttccgatcgcgacgcggcttctggcccggaggcgccgatgcagccgggctt

SEQ ID NO: 642370 - DNA, 120 bp, Artificial Sequence
  ENSG00000181915_4 (sequence is synthesized)
ccccgagaacctgagcaagctgaagagcctcctgacccagctccgcgccgaggacttgaacatcgccccgcgcaaggccacactgcagccgctgccgcccaacctgccgccagtcaccta

SEQ ID NO: 642371 - DNA, 120 bp, Artificial Sequence
  ENSG00000181915_5 (sequence is synthesized)
catgcacatctacgagacggacggcttcagcctgggcgtgttcctgctcaagagcggcacgtccatcccgctgcacgaccacccgggcatgcacggcatgctcaaggtgctgtacggcac

SEQ ID NO: 642372 - DNA, 120 bp, Artificial Sequence
  ENSG00000181915_6 (sequence is synthesized)
cgtgcgcatcagctgcatggacaagctagacgcgggcggcgggcaacggccgcgggccttgccgcccgagcagcagttcgagccgccgctgcagccccgggagcgagaagccgtgcggcc

SEQ ID NO: 642373 - DNA, 120 bp, Artificial Sequence
  ENSG00000181915_7 (sequence is synthesized)
gggcgtgctgcgttcgcgggccgagtacaccgaggccagcggcccctgcatcctcacaccgcaccgggacaacctgcaccagatcgacgccgtggaagggcctgccgccttcctggacat

SEQ ID NO: 642374 - DNA, 120 bp, Artificial Sequence
  ENSG00000181915_8 (sequence is synthesized)
cctggccccgccctacgacccggacgatggccgggactgccactattaccgggtgctggagccggtcaggcccaaggaggcctccagctcggcctgtgacctgcctcgagaggtgtggct

SEQ ID NO: 642375 - DNA, 120 bp, Artificial Sequence
  ENSG00000181915_9 (sequence is synthesized)
cctggagaccccacaggccgatgacttctggtgcgagggagaaccctatccaggtcccaaggtcttcccttgaagccactggcgcccaggagcggtgggccgaagacgtgccctacccta

SEQ ID NO: 642376 - DNA, 120 bp, Artificial Sequence
  ENSG00000181915_10 (sequence is synthesized)
ccacaagggctgtgtctctaccccctagcctgggcgttggatctactggaatgagcagcagccgcttcctcggcagccttgggaagcacgggcgactggacagcagccgccgggcacggt

SEQ ID NO: 642377 - DNA, 120 bp, Artificial Sequence
  ENSG00000181915_11 (sequence is synthesized)
tatgggggcggggtgggcggggaggctagattgtttcctggtactgtcactgccactggggctttgatttggaggaatggggcaggggactatctgaagcgcttccatcctaaagccata

SEQ ID NO: 642378 - DNA, 120 bp, Artificial Sequence
  ENSG00000181915_12 (sequence is synthesized)
atgaaaatatcttcctctcttccccattctatacaaaatactaagtggttttcttgctcccactccctaccccttagttaaatagggtttattttccactcatgcccttatgcctttttt

SEQ ID NO: 642379 - DNA, 120 bp, Artificial Sequence
  ENSG00000181915_13 (sequence is synthesized)
tcttatagttttttaacttattgactgtgcatgacccagtggtttgaattgtttttagttcaagtcattggtaaaaactaggtttaaggagatgagctactgtttaaagtgagctggcct

SEQ ID NO: 642380 - DNA, 120 bp, Artificial Sequence
  ENSG00000181915_14 (sequence is synthesized)
gcctaattaattccttgtgaaaactaaatgattttttcagtttggggatcattctcacaacataactatgcatgtagaggacaagatttattttctttcctccctttgcccagtagccac

SEQ ID NO: 642381 - DNA, 120 bp, Artificial Sequence
  ENSG00000181915_15 (sequence is synthesized)
cctgcatatctctgtgacatggtcacttagagcttatcttccctatgaatctccagatctgtgagtcgagcagatttcatgttgcagattcacctttaatgcaaagactgtattatcctc

SEQ ID NO: 642382 - DNA, 120 bp, Artificial Sequence
  ENSG00000181915_16 (sequence is synthesized)
acatgactttttttcttgtcttactgtaccttaaaaggtgatagagtaattctgtattttctaacgggaagattcaaaggagctgaatgtgttatgcttccaaacaactgaatgtaaaac

SEQ ID NO: 642383 - DNA, 120 bp, Artificial Sequence
  ENSG00000181915_17 (sequence is synthesized)
actcctagccagttgttgcattccctatatttatttacttccaatattttactgtaaaagtagggagaaatattatgttgatagttgtttcatattctctcaggaactttaatgttcccg

SEQ ID NO: 642384 - DNA, 120 bp, Artificial Sequence
  ENSG00000181915_18 (sequence is synthesized)
actcgggtgattccagctgtgttgctggcagtgttgtctcaaccctctccctaaaatgactgagccctgggttcatctaatgtggttttccttaggaagagatagaaggcacagaagatc

SEQ ID NO: 642385 - DNA, 120 bp, Artificial Sequence
  ENSG00000181915_19 (sequence is synthesized)
acagctagagaattgagaattaactatactactagccattttagggcaccaaaacttgggattaaacacttcctacttcccactcccaactcctgaaatgaagtcttgctatctgtgact

SEQ ID NO: 642386 - DNA, 120 bp, Artificial Sequence
  ENSG00000181915_20 (sequence is synthesized)
agttttatttttgtgcttttaatagtccgagcagtcttaccttgtttacacatgtattgacaccatttgcttcaggccatggagcactgtttctccctttttactatttataggattccg

SEQ ID NO: 642387 - DNA, 120 bp, Artificial Sequence
  ENSG00000181915_21 (sequence is synthesized)
ttttttcacaagacttttaataaaaagaaattgtagaaataaacacattaaaatttgcccagctgtcgtctaagccctcttgattgacttgcccaagtggcaatagagttctaatatcta

SEQ ID NO: 642388 - DNA, 120 bp, Artificial Sequence
  ENSG00000181915_22 (sequence is synthesized)
taataaagggagatttgctattattagtggaatgttgaccccgtatgtagagaaacagtacgtgcctttgcctctttatgcacacagagacccagggtgagggagtatttgttcccagtt

SEQ ID NO: 642389 - DNA, 120 bp, Artificial Sequence
  ENSG00000181915_23 (sequence is synthesized)
tttaagatagtataaaaaagcaaatacttggtgagtgatttaaaaataaaaccaaaacaaaacacaaaaagatattccacaggacatgccactttattataaaacctgacacaggcatag

SEQ ID NO: 642390 - DNA, 120 bp, Artificial Sequence
  ENSG00000181915_24 (sequence is synthesized)
taccaagtatttcctgcattgttgctaaaattgttttattgtagctccacattctggtgtagtttaaaatgcctttgggggcagtttgaagcagttcttcatgccacttagtttgaaaat

SEQ ID NO: 642391 - DNA, 120 bp, Artificial Sequence
  ENSG00000181915_25 (sequence is synthesized)
aaaattctagatatgcaaatgattttcttagaaaacttcacaaaataaaagatcttgtttttttttccatagcacagtaatgaatgtggttatcaatcacatacttttttggattatatt

SEQ ID NO: 642392 - DNA, 120 bp, Artificial Sequence
  ENSG00000181915_26 (sequence is synthesized)
gtagcaaaaagttgattagcttaccaagattattaatagcaatgtatgtgttataatacaacttagtacattaaagctacgaaaactcatcctggctgtaggatagtaataaaggaagaa

SEQ ID NO: 642393 - DNA, 120 bp, Artificial Sequence
  ENSG00000181915_27 (sequence is synthesized)
ttatgacttcattatgaaaaaaagaagttttaaagttttcaattacgagcaatttggaagaaaaaacctaaggtgcttttcaaaagagtaactgaaattgttgcaggccaaaacagcaat

SEQ ID NO: 642394 - DNA, 120 bp, Artificial Sequence
  ENSG00000181915_28 (sequence is synthesized)
atgatatctcagatttagttcaataagaacagtgaaacttttggttcactaataaattctgagtaaattagtggtgaagacaaaatataacttgttttagtgagccactgaggaaagaat

SEQ ID NO: 642395 - DNA, 120 bp, Artificial Sequence
  ENSG00000181915_29 (sequence is synthesized)
atgcttattacaaagacaaaatgtggtgcagaaactatcttgcacctgtgtgcataaactgttagtcgtgactgacttggtgtgttgctattgtgtttctatatactccgtccaatatag

SEQ ID NO: 642396 - DNA, 120 bp, Artificial Sequence
  ENSG00000181915_30 (sequence is synthesized)
ataatgttttaataacaactgtgggataaaagttatcttccccttggaaagactaatgagcacaatgatattaatcacttttatggtgaataataaatgcaataattgcctcatgggtga

SEQ ID NO: 642397 - DNA, 120 bp, Artificial Sequence
  ENSG00000181924_0 (sequence is synthesized)
gaaaggatgtacagaggatccccaaccgcctgcgaaacccaagccgccgcgtaggagcgtgcgttcgggccctcttctcccacctgttcgactccccatccccaggatgtcaacctcagt

SEQ ID NO: 642398 - DNA, 120 bp, Artificial Sequence
  ENSG00000181924_1 (sequence is synthesized)
ccctcaaggccatacctggacccaacgggtgaagaaagacgatgaggaggaggacccgctggaccagctgatctcccgctctggctgtgctgcctcccactttgcagtgcaggagtgcat

SEQ ID NO: 642399 - DNA, 120 bp, Artificial Sequence
  ENSG00000181924_2 (sequence is synthesized)
ggcccagcaccaggactggcggcaatgccagccacaggtgcaggcgttcaaggattgcatgagtgaacagcaggcgaggcggcaagaggagctgcagaggaggcaagaacaagccggtgc

SEQ ID NO: 642400 - DNA, 120 bp, Artificial Sequence
  ENSG00000181924_3 (sequence is synthesized)
gggaggtctaaaacatggggagagtttttggatctggagttgagagccatgggtttggacatgactggcacaaacagctgtcatatgttcatggtcagatgtcatacattctcagctgtc

SEQ ID NO: 642401 - DNA, 120 bp, Artificial Sequence
  ENSG00000181924_4 (sequence is synthesized)
ttgttccaccagtatttaccaggaaaacaaagaatgtgttaagggatgctcccccaccccacatcttaagtcagtgtgccaagtactgagatgattttagggacattttattttaaatta

SEQ ID NO: 642402 - DNA, 120 bp, Artificial Sequence
  ENSG00000181924_5 (sequence is synthesized)
aatttacaatctaatggtaaattgattacctaattagtgcctttctctttcatcacttgttctggatgtttcaatcagtttagtggaaggaaaaataaatggggaaactttttattcaaa

SEQ ID NO: 642403 - DNA, 120 bp, Artificial Sequence
  ENSG00000181924_6 (sequence is synthesized)
aggatgtacagaggatccccaaccgcctgcgaaacccaagccgccgcgtaggagcgtgcgttcgggccctcttctcccacctgttcggccagcctccacgatccagctgccaaccatcta

SEQ ID NO: 642404 - DNA, 120 bp, Artificial Sequence
  ENSG00000181924_7 (sequence is synthesized)
ctcaaagttcaaagtcctcgatacgcctgaggcgcctcaggcctcgtggctgccagcatttttctgctttaagatcctttccatgacttccttgtttaggccagcctccacgatccagct

SEQ ID NO: 642405 - DNA, 120 bp, Artificial Sequence
  ENSG00000181924_8 (sequence is synthesized)
cacgatccagctgccaaccatctagcctaccctgatctctgagcaggggtcgtcgtcattttactccagaggagactgaagccaaaagggtctcccgctgtaacccaggctggaatgcag

SEQ ID NO: 642406 - DNA, 120 bp, Artificial Sequence
  ENSG00000181924_9 (sequence is synthesized)
ccatggcacccggcttcatctctgtgcttccagagaggttattaaatgatgtgtccaagggcaccaaatgaggcagtgacaaagctaggtccaagtctgtttcaaagcccattttctccc

SEQ ID NO: 642407 - DNA, 120 bp, Artificial Sequence
  ENSG00000181924_10 (sequence is synthesized)
tcttgcttaagttataccgcctccaaggcaaatgagttgtgtaaagtgcctaactccctcttgtgattccccattgccctcagaataaaaagtcttaaactccctactatgtcctacaaa

SEQ ID NO: 642408 - DNA, 120 bp, Artificial Sequence
  ENSG00000181924_11 (sequence is synthesized)
attgtgcgaattaaatattattaatgggaaaactaaaatgaaaaagattacatagtaaggcgtagtgctgggatttgaacacggatctcttggtttaggatcaaggcactttctattcca

SEQ ID NO: 642409 - DNA, 120 bp, Artificial Sequence
  ENSG00000181924_12 (sequence is synthesized)
ctgttctttctctaaattatttgctcctggccctatttaaagagttaacagtgtatttaggaagagaaaactatcatttattgaactctttagacataccagcctccttacaaaccttac

SEQ ID NO: 642410 - DNA, 120 bp, Artificial Sequence
  ENSG00000181924_13 (sequence is synthesized)
agatggagttttgctcttattgcccaggagtttgagaccatgctgagcaacatggaaaaaccttgtctctattaaagaatcaaaaaaattagctgagtggtgatgcacacctgtagtccc

SEQ ID NO: 642411 - DNA, 120 bp, Artificial Sequence
  ENSG00000181924_14 (sequence is synthesized)
tgatgcacacctgtagtcccagctactctggccagggagggactgagggggaaggattgcttgatccctaaagatggaggctacagtgagcctgggcaacaaagcaagacaccctcaaaa

SEQ ID NO: 642412 - DNA, 120 bp, Artificial Sequence
  ENSG00000181924_15 (sequence is synthesized)
cctcaaaaaaaaaaaaaaaaaaacaagcatctgtcttcaagcttagagtctcccacgggagacagacacattaaacaggctaaatggtgcagtctggtcagtgctatttataatttagga

SEQ ID NO: 642413 - DNA, 120 bp, Artificial Sequence
  ENSG00000181927_0 (sequence is synthesized)
atggaaaaaagcaataatagcactttgtttattctcttggggttttcccaaaataagaacattgaagtcctctgctttgtattatttttgttttgctacattgctatttggatgggaaac

SEQ ID NO: 642414 - DNA, 120 bp, Artificial Sequence
  ENSG00000181927_1 (sequence is synthesized)
ttactcataatgatttctatcacgtgcacccagctcattcaccaacccatgtatttcttcctcaattacctctcactctccgacctttgctacacatccacagtgacccccaaattaatg

SEQ ID NO: 642415 - DNA, 120 bp, Artificial Sequence
  ENSG00000181927_2 (sequence is synthesized)
gttgacttactggcagaaagaaagaccatttcctataataactgtatgatacaactctttaccacccatttttttggaggcatagagatcttcattctcacagggatggcctatgaccgc

SEQ ID NO: 642416 - DNA, 120 bp, Artificial Sequence
  ENSG00000181927_3 (sequence is synthesized)
tctgccagtcagtttcttctcaccatctttgtaccattttgtggcccaaatgagatagatcactacttctgtgatgtgtatcctttgctgaaattggcctgttctaatatacacatgata

SEQ ID NO: 642417 - DNA, 120 bp, Artificial Sequence
  ENSG00000181927_4 (sequence is synthesized)
ggtctcttagtcattgctaattcaggcttaattgctttggtgacatttgttgtcttgttgttgtcttatgtttttatattgtataccatcagagcatactctgcagagagacgcagcaaa

SEQ ID NO: 642418 - DNA, 120 bp, Artificial Sequence
  ENSG00000181927_5 (sequence is synthesized)
gctcttgccacttgtagttctcatgtaattgttgtggtcctgttttttgcacctgcattgttcatttacattagaccggtcacaacattctcagaagataaagtgtttgcccttttttat

SEQ ID NO: 642419 - DNA, 120 bp, Artificial Sequence
  ENSG00000181927_6 (sequence is synthesized)
accatcattgctcccatgttcaaccctctcatatacacgctgagaaacacagagatgaagaacgccatgaggaaagtgtggtgttgtcaaatactcctgaaaagaaatcaacttttctga

SEQ ID NO: 642420 - DNA, 120 bp, Artificial Sequence
  ENSG00000181927_7 (sequence is synthesized)
aactcaaattgcataaacggcagatctcagtcataaaaatctttgtattaaataggattcaagttacatgctctggtaacgtgggtctaagaggatgctaattggtgacttatatgttct

SEQ ID NO: 642421 - DNA, 120 bp, Artificial Sequence
  ENSG00000181927_8 (sequence is synthesized)
tcatcttgctcttgtccttaatgtttggagagaaaagtgggcaaacaggaagcatatcccttctgtggttttatacttctacattgacatctctttaacaaattgaacattattcttatc

SEQ ID NO: 642422 - DNA, 120 bp, Artificial Sequence
  ENSG00000181927_9 (sequence is synthesized)
catactctcctccgcctttcttaatcattacgattgtgcttatgtgacatgaaataaccagaaaatttcttaaaaataaaggattacatggcgttgtgttgaaaaaataaaacagattat

SEQ ID NO: 642423 - DNA, 120 bp, Artificial Sequence
  ENSG00000181927_10 (sequence is synthesized)
gtgttttttgtgccttaaagttctgagaagatcaatgaaatattactctcagcttttacatttttactcaagtctaaacacagaaaatgcatgtattgcctgtgtacagctcacgaattt

SEQ ID NO: 642424 - DNA, 120 bp, Artificial Sequence
  ENSG00000181927_11 (sequence is synthesized)
ttgcaaactgagcatgattgtgaaatcagcaactgaattaagagacagaaattatcagcacatcagaggtcctccttattcctctttatgattaatacctcccaaagttaaccacaatat

SEQ ID NO: 642425 - DNA, 120 bp, Artificial Sequence
  ENSG00000181927_12 (sequence is synthesized)
cctctttatgattaatacctcccaaagttaaccacaatatttattcctaaaataaatagttttcggctgggcacggtgcctcatgcctgtaataccagcactctgggaggctgaggtggg

SEQ ID NO: 642426 - DNA, 77 bp, Artificial Sequence
  ENSG00000181927_13 (sequence is synthesized)
gttgcagtgagccgagatcatgccacggcactctagcctgggtgacagaacaagattccgtctggtttttatctttt

SEQ ID NO: 642427 - DNA, 120 bp, Artificial Sequence
  ENSG00000181927_14 (sequence is synthesized)
cttgtactttgaagagtaagagtgatttacattttgttgctgcgtgtgtgtcttcttagtgtttcatttgtgagtcatttctcatgttggtaagttttctgactgttttcattgatgtat

SEQ ID NO: 642428 - DNA, 120 bp, Artificial Sequence
  ENSG00000181929_0 (sequence is synthesized)
cctaaagcgaggaaaccaagccgggcgcctcttgcaatggagacggtcatttcttcagatagctccccagctgtggaaaatgagcatcctcaagagaccccagaatccaacaatagcgtg

SEQ ID NO: 642429 - DNA, 120 bp, Artificial Sequence
  ENSG00000181929_1 (sequence is synthesized)
tatacttccttcatgaagtctcatcgctgctatgacctgattcccacaagctccaaattggttgtatttgatacgtccctgcaggtgaagaaagctttttttgctttggtgactaacggt

SEQ ID NO: 642430 - DNA, 120 bp, Artificial Sequence
  ENSG00000181929_2 (sequence is synthesized)
gtacgagctgcccctttatgggatagtaagaagcaaagttttgtgggcatgctgaccatcactgatttcatcaatatcctgcaccgctactataaatcagccttggtacagatctatgag

SEQ ID NO: 642431 - DNA, 120 bp, Artificial Sequence
  ENSG00000181929_3 (sequence is synthesized)
ctagaagaacacaagatagaaacttggagagaggtgtatctccaggactcctttaaaccgcttgtctgcatttctcctaatgccagcttgtttgatgctgtctcttcattaattcggaac

SEQ ID NO: 642432 - DNA, 120 bp, Artificial Sequence
  ENSG00000181929_4 (sequence is synthesized)
aagatccacaggctgccagttattgacccagaatcaggcaatactttgtacatcctcacccacaagcgcattctgaagttcctcaaattgtttatcactgagttccccaagccagagttc

SEQ ID NO: 642433 - DNA, 120 bp, Artificial Sequence
  ENSG00000181929_5 (sequence is synthesized)
atgtccaagtctctggaagagctacagattggcacctatgccaatattgctatggttcgcactaccacccccgtctatgtggctctggggatttttgtacagcatcgagtctcagccctg

SEQ ID NO: 642434 - DNA, 120 bp, Artificial Sequence
  ENSG00000181929_6 (sequence is synthesized)
ctgtgactaaagccttgcaacatcgatcacattactttgagggtgttctcaagtgctacctgcatgagactctggagaccatcatcaacaggctagtggaagcagaggttcaccgacttg

SEQ ID NO: 642435 - DNA, 120 bp, Artificial Sequence
  ENSG00000181929_7 (sequence is synthesized)
tagtggtggatgaaaatgatgtggtcaagggaattgtatcactgtctgacatcctgcaggccctggtgctcacaggtggagagaagaagccctgagctgggggaaggggtcatgcagcac

SEQ ID NO: 642436 - DNA, 120 bp, Artificial Sequence
  ENSG00000181929_8 (sequence is synthesized)
caggggatatgcccaactcactgcctgctggaagctctgtgggaatcagatgaaacttgagggaattgtgactctgttccctgttcagggtcccctgcccttctatctgggagctaggga

SEQ ID NO: 642437 - DNA, 120 bp, Artificial Sequence
  ENSG00000181929_9 (sequence is synthesized)
aggtatgggggaggaaagagaatggatttatagctacccttaccctcacacatacacttgaaaaaactttcagcctagccagttctagcccctgtcctcttagatatatccccctttctg

SEQ ID NO: 642438 - DNA, 120 bp, Artificial Sequence
  ENSG00000181929_10 (sequence is synthesized)
ggtgaactataggctctgtgcctctcagacaaattctgatctctaagagatccccagacctcacttgcctctgcctccatcttggccctgattcaaccctaagataatagcacaacaaaa

SEQ ID NO: 642439 - DNA, 120 bp, Artificial Sequence
  ENSG00000181929_11 (sequence is synthesized)
ttcttcataaagatatttttattcacctgttccgtgctatatggaggaggccaagtccatttagtgacatttcttcccataatgtgagtggggaggattgtggggaggaggggctttggg

SEQ ID NO: 642440 - DNA, 120 bp, Artificial Sequence
  ENSG00000181929_12 (sequence is synthesized)
ttcctgtgtttgtgcatatgaagggagatgggggttaggtggaggaggagagcagcgtggttagctaaggttattgctttttgtggcaaatctaattaaatgacaggaatctcttcacga

SEQ ID NO: 642441 - DNA, 120 bp, Artificial Sequence
  ENSG00000181929_13 (sequence is synthesized)
cacacacacagtctctctctctctctcattctcactctctctctctctctctttctctttaagtctggcctgtacactgccccccttccctaaccatcagttttccctgttgagcaatac

SEQ ID NO: 642442 - DNA, 120 bp, Artificial Sequence
  ENSG00000181929_14 (sequence is synthesized)
tcagcccagttcttttttctcttttttcattgattgattgattgattgattgaaaagagagacgaggtctcactgtgttgctcaggctagtgtcaaactcctgagctcaagtgatcctcc

SEQ ID NO: 642443 - DNA, 120 bp, Artificial Sequence
  ENSG00000181929_15 (sequence is synthesized)
gtgtgagccactgcatccagccccacttcttatttatttattaatttattttgagacaagttcttactctgttgcccaggctggcgtgcagaggcgctatcatggctcactgcagcctcc

SEQ ID NO: 642444 - DNA, 120 bp, Artificial Sequence
  ENSG00000181929_16 (sequence is synthesized)
gcctcttgcaatggagacggtcatttcttcagatagctccccagctgtggaaaatgagcatcctcaaggtgggtgaaatcctcttttcccttccccctttggagcctgtggtttaatacc

SEQ ID NO: 642445 - DNA, 120 bp, Artificial Sequence
  ENSG00000181929_17 (sequence is synthesized)
ctcttgcaatggagacggtcatttcttcagatagctccccagctgtggaaaatgagcatcctcaaggaagctactggaagatgtgttccaccaaaataagggagtaatcaaaaaagataa

SEQ ID NO: 642446 - DNA, 120 bp, Artificial Sequence
  ENSG00000181929_18 (sequence is synthesized)
aaacgcgatataggagcaccagtagaggacagacgtgaaaggggtacccaggatggtgatgaagaaagatcccaggatgacagcagtgcacaccagacaaaccagcccagatttgagcag

SEQ ID NO: 642447 - DNA, 120 bp, Artificial Sequence
  ENSG00000181929_19 (sequence is synthesized)
tcctaaagcgaggaaaccaagccgggcgcctcttgcaatggagacggtcatttcttcagatagctccccagctgtggaaaatgagcatcctcaaggtgaagaaagctttttttgctttgg

SEQ ID NO: 642448 - DNA, 89 bp, Artificial Sequence
  ENSG00000181929_20 (sequence is synthesized)
gttaaaaagaggaaaaagaaaacgccagtactttgggaggccaaggcaagtggattgcttgagctcaggagttcagcatcagcctgggc

SEQ ID NO: 642449 - DNA, 120 bp, Artificial Sequence
  ENSG00000181929_21 (sequence is synthesized)
cagtactttgggaggccaaggcaagtggattgcttgagctcaggagttcagcatcagcctgggcaacatgatgaaagcctgtctcgacagaaacaaaaatacaaaaattacccaggcgtg

SEQ ID NO: 642450 - DNA, 120 bp, Artificial Sequence
  ENSG00000181929_22 (sequence is synthesized)
gagatcatgccactgcactccagtctgagtgacacagtgagatcctgtctccaaaaaaaaagaaaagaaagaaaactcctgctttgaaaatgttcagcctaactggagtgatggtcattt

SEQ ID NO: 642451 - DNA, 120 bp, Artificial Sequence
  ENSG00000181929_23 (sequence is synthesized)
aactggagtgatggtcatttcttcagatagctccccagctgtggaaaatgagcatcctcaagagaccccagaatccaacaatagcgtgtatacttccttcatgaagtctcatcgctgcta

SEQ ID NO: 642452 - DNA, 120 bp, Artificial Sequence
  ENSG00000181929_24 (sequence is synthesized)
aagagagtttcctaaagcgaggaaaccaagccgggcgcctcttgcaatggagacggtcatttcttcagatagctccccagctgtggaaaatgagcatcctcaaggtaagtttactgaaga

SEQ ID NO: 642453 - DNA, 120 bp, Artificial Sequence
  ENSG00000181929_25 (sequence is synthesized)
aaggaaactgggcatgaaaacaatagcctgaccctaacaatgtcttcaacaatgcttttgaatctctcccctggaaaaatcaaagcagggccagataatgtgccaaaccacaaaaatcag

SEQ ID NO: 642454 - DNA, 120 bp, Artificial Sequence
  ENSG00000181929_26 (sequence is synthesized)
aaaccacttgagagaaacatctgaggtacaggcaaaacttccataggcaactctgggctggctaccatgttttagaagtcctgggtattttctgcatagtccagaaacagtgctaccagg

SEQ ID NO: 642455 - DNA, 120 bp, Artificial Sequence
  ENSG00000181929_27 (sequence is synthesized)
tgcatagtccagaaacagtgctaccaggattttatcacccagcaagctcactaaagccactgaatgtacaccaaaaattatgcaaagggcttggtgcagtggcttacacctgtaatccca

SEQ ID NO: 642456 - DNA, 120 bp, Artificial Sequence
  ENSG00000181929_28 (sequence is synthesized)
actaacggtgtacgagctgcccctttatgggatagtaagaagcaaagttttgtgggtaagcaaaagtttctggaacacaatattattggcatcttgtgctgggcagggagacaagcttca

SEQ ID NO: 642457 - DNA, 120 bp, Artificial Sequence
  ENSG00000181929_29 (sequence is synthesized)
ttttagaggtttgagagcgcagggttgtgagccggctttgctgggtgaggcacggggcgtccagagggatctccgcttgcaggggacccatggaagatttatgagcaagtcagtgaatgt

SEQ ID NO: 642458 - DNA, 120 bp, Artificial Sequence
  ENSG00000181929_30 (sequence is synthesized)
cctttaggaatgttcatagcagctttctgtacatggactgagctacttcgaaaagtaaagtttcttgttaatggggatgaaagtcccttccaaatctgagatgctttggtgaacaaactt

SEQ ID NO: 642459 - DNA, 120 bp, Artificial Sequence
  ENSG00000181929_31 (sequence is synthesized)
gtgtatacttccttcatgaagtctcatcgctgctatgacctgattcccacaagctccaaattggttgtatttgatacgtccctgcaggtgggtgaaatcctcttttcccttccccctttg

SEQ ID NO: 642460 - DNA, 120 bp, Artificial Sequence
  ENSG00000181929_32 (sequence is synthesized)
gagcctgtggtttaatacctctcatcctatctcatcctaagggtaatatccttatccttctgtgaagttagtctcatgttttacccaacatgcccaaacactgttctttttttacagtcc

SEQ ID NO: 642461 - DNA, 120 bp, Artificial Sequence
  ENSG00000181929_33 (sequence is synthesized)
ctcttgcaatggagacggtgaggagtgcaggagggcggtcgggggcgctgtggagcctaagacacccccccaacccttaggagaccgggagggccgggcaggggctggcgctggtgtcta

SEQ ID NO: 642462 - DNA, 120 bp, Artificial Sequence
  ENSG00000181929_34 (sequence is synthesized)
gcaaacaaaaagcagccgggtgtctgccctatcccgtgaccctgttcctccgcttcttcgttgggcgcatctcctggaactgggccgcgtccccgccgcctttccgtcatttcttcagat

SEQ ID NO: 642463 - DNA, 120 bp, Artificial Sequence
  ENSG00000181938_0 (sequence is synthesized)
agacttgatcgattgcttctgcctgggcggtaccgcccgaattgactgctcctgtctgatgcgtccccgggcgcgggaaacgagtttcaatccactttcctgaccccaaccatcctgccc

SEQ ID NO: 642464 - DNA, 120 bp, Artificial Sequence
  ENSG00000181938_1 (sequence is synthesized)
agtctccgcttccccgtcttgtacacccctaactcctgaggctcctccgaatcacgcgagtggaagcggagaagctcaagtggccgccatgtcagaggcttatttccgagtggagtcggg

SEQ ID NO: 642465 - DNA, 120 bp, Artificial Sequence
  ENSG00000181938_2 (sequence is synthesized)
tgcgctggggcctgaggagaactttctttctttggacgacatcctgatgtcccacgagaagctgccggtgcgcacggagaccgccatgcctcgccttggcgctttcttcctggagcggag

SEQ ID NO: 642466 - DNA, 120 bp, Artificial Sequence
  ENSG00000181938_3 (sequence is synthesized)
cgcaggcgccgagactgacaacgcggtcccacagggttccaagcttgaactacccttgtggctggcaaaaggactttttgacaacaagcgacggatcctttctgtggaactccccaagat

SEQ ID NO: 642467 - DNA, 120 bp, Artificial Sequence
  ENSG00000181938_4 (sequence is synthesized)
ctaccaagagggttggaggactgtgttcagtgcagatcccaatgtggtggacctccacaaaatggggccccatttctacgggtttggctcccagctcctgcattttgacagtcccgagaa

SEQ ID NO: 642468 - DNA, 120 bp, Artificial Sequence
  ENSG00000181938_5 (sequence is synthesized)
tgcagacatttcccagtctctgctgcagacttttatcggacgttttcgccgcatcatggactcctcacagaatgcttacaacgaagacacttcagccctggtagccaggctagacgagat

SEQ ID NO: 642469 - DNA, 120 bp, Artificial Sequence
  ENSG00000181938_6 (sequence is synthesized)
ggagaggggcttatttcaaacagggcagaaaggactgaatgactttcagtgttgggagaaggggcaggcttctcagatcacagcttccaacctcgttcagaattacaagaagagaaaatt

SEQ ID NO: 642470 - DNA, 120 bp, Artificial Sequence
  ENSG00000181938_7 (sequence is synthesized)
cactgatatggaagactgaaagccggaagaacacagaatggctcctcacagacgtatccctccgtgtgtccttgataggagctggttgaccttgtacagaaccagaatcctgtcccattt

SEQ ID NO: 642471 - DNA, 120 bp, Artificial Sequence
  ENSG00000181938_8 (sequence is synthesized)
catggcttatttcctgtggccatagagaattatagggaactggacatgctggaggatgtgggtgtccctggctctgtgagtcttccaggaccgtcccaccctgctgacccacagcccagg

SEQ ID NO: 642472 - DNA, 120 bp, Artificial Sequence
  ENSG00000181938_9 (sequence is synthesized)
gtttggacagcttcagatgtacagtttcactagccacaaagcacaggtacaaactgggtcatcgcctgttcacaaaatgctctcttgatcttatttgcctcatcttcctcatggttgtac

SEQ ID NO: 642473 - DNA, 120 bp, Artificial Sequence
  ENSG00000181938_10 (sequence is synthesized)
agaggatagcaccccaccatgccagcctgacttggagatatctcctgctgcctgcctgcagggagttaccccagtttccaaaaacagtcgcccagataaaggaggaaaagggaaaggcag

SEQ ID NO: 642474 - DNA, 120 bp, Artificial Sequence
  ENSG00000181938_11 (sequence is synthesized)
acgaatggcatggcttttactaaagaaaagatgttggcctcatactctatactcagggcttaatgaactggaatctgcataactcagcagtcaacccagaagggaaatggttaaactgag

SEQ ID NO: 642475 - DNA, 120 bp, Artificial Sequence
  ENSG00000181938_12 (sequence is synthesized)
cttgttattgcctcggagagcctaagagcacccgcacacttaattctactccctgtctagaaaagctgtcagggagtcgtttggaattgcaatgtagttattaagggctgttaaccagcc

SEQ ID NO: 642476 - DNA, 120 bp, Artificial Sequence
  ENSG00000181938_13 (sequence is synthesized)
tgcattacatctggaagtcaggacttgggtgctgactatgaagggccctgttttcaaaatctaacattgcaagtgtaaatgggcaagaagcctccgttgtgctttttttttcctcttcag

SEQ ID NO: 642477 - DNA, 120 bp, Artificial Sequence
  ENSG00000181938_14 (sequence is synthesized)
taacttttgcaacattattgcatagaagatccctgaccatttactaggaacctggttaagcaagcactaatctcttttcctggagatcaaggatgcaacctcaggttgagaaagaaacag

SEQ ID NO: 642478 - DNA, 120 bp, Artificial Sequence
  ENSG00000181938_15 (sequence is synthesized)
ggttccctgggcccattagactgtttgcagggcatcactgcttccccctgacacctcacaactagcaaaaattgtctttgtctttggaaattatagagggatttgggtatccagattgtg

SEQ ID NO: 642479 - DNA, 120 bp, Artificial Sequence
  ENSG00000181938_16 (sequence is synthesized)
cagatgcaaacttaggctgtcttgatgcaaacttagaaccacagaaatgcttttaaaatgcctgttttaagatggaattgttgtttttataatttgattttagtgctaaataaatgattg

SEQ ID NO: 642480 - DNA, 120 bp, Artificial Sequence
  ENSG00000181938_17 (sequence is synthesized)
gctttgtacatgaatatgttctgtacaagtgctctttcactagtactacagataatcaaagctatcagaattgtgtctttgatcatatttgacggtaatacacaaatccatgttttagca

SEQ ID NO: 642481 - DNA, 120 bp, Artificial Sequence
  ENSG00000181938_18 (sequence is synthesized)
aactgtctggacatggggacttacgaggagctaggatgaaaggcctccttgttgcttagccttggcagggctcttctggaagccaggctctctcctagtctgagaaggcaagctttttgc

SEQ ID NO: 642482 - DNA, 120 bp, Artificial Sequence
  ENSG00000181938_19 (sequence is synthesized)
tggattacaaagtcttctctggtcgtggccacggtctgtctaccccactcagcgcccgccctgtgtccacacatgcttgtcagactggactgaggaagcccacaactggggtgggtttgg

SEQ ID NO: 642483 - DNA, 120 bp, Artificial Sequence
  ENSG00000181938_20 (sequence is synthesized)
ttctttagcctctcagtttccgggtccaatctaagctaccagaccagctctgccaaaccagaggcccagatgggatctgccactccagccactgtgagcagctttggtttcagcccaaat

SEQ ID NO: 642484 - DNA, 120 bp, Artificial Sequence
  ENSG00000181938_21 (sequence is synthesized)
gccaggactcgagaagtgtcgacaaggttgagggctctaacttggatacactttcttccagacagaagttgcttctgcctctactggtcaccagagggcgccactaaccagggactgtgg

SEQ ID NO: 642485 - DNA, 120 bp, Artificial Sequence
  ENSG00000181938_22 (sequence is synthesized)
gtttgctgtacctatcaacccattatgtcctccacttcttccaccttggctacccctgagatagcaagaccaatccttcctcttcttcctccttctcagtctacacaacaagaagacgac

SEQ ID NO: 642486 - DNA, 120 bp, Artificial Sequence
  ENSG00000181938_23 (sequence is synthesized)
aaggatgaaggcctttatcatgactcacttccattcaatgaataatacagaagcttctgagaggtaactgacccaaagttacaaagccaattaaagtggtaaaaattggaccctactcag

SEQ ID NO: 642487 - DNA, 120 bp, Artificial Sequence
  ENSG00000181938_24 (sequence is synthesized)
cattgcttcgagtcacgaccaggtcttctgtgcttgacagccactcccccaaagagaaaaggcagtattgcgcaggcgatgtgtatttccttttcgtcacacacatttgctgtgttactt

SEQ ID NO: 642488 - DNA, 120 bp, Artificial Sequence
  ENSG00000181938_25 (sequence is synthesized)
acttttacccaggacagtgtatgacttgtaaatttagtctgtttttattccaggtcagcctacagttacactgtctgtccattttatatatttacatatatacacacacacacacacaca

SEQ ID NO: 642489 - DNA, 120 bp, Artificial Sequence
  ENSG00000181938_26 (sequence is synthesized)
cacatttttttaatatgacttgtctgccactcctcatatttgcttgctacaagttgaggccagcaggaactctaggaaatgagaaaagggtgatgatggccaggcatggtggctcacacc

SEQ ID NO: 642490 - DNA, 90 bp, Artificial Sequence
  ENSG00000181938_27 (sequence is synthesized)
ttaaaaagaaaaaagagaaaaaaagggctatggtgcattacaggtgacaggcacttagatacacagtcccaggcctggcctaagggttcc

SEQ ID NO: 642491 - DNA, 120 bp, Artificial Sequence
  ENSG00000181938_28 (sequence is synthesized)
gcacttagatacacagtcccaggcctggcctaagggttcctgttggaaatacaagagttattgggttgtttccttcctttgttctggggttagggcttggccctgccatgaactagcaat

SEQ ID NO: 642492 - DNA, 120 bp, Artificial Sequence
  ENSG00000181938_29 (sequence is synthesized)
atgacttggtcaagctacttgacctctctagacatcaattcacctgtaagaattgatggagatgataatagtgccaaaattatagagttgtggtaaaactatgtaatgccgtgtaataaa

SEQ ID NO: 642493 - DNA, 120 bp, Artificial Sequence
  ENSG00000181938_30 (sequence is synthesized)
caataactcatattgttattacttttccaggacaaaacaatgttatacatctgttcccaacctttatggtataaccttattttaatttttcataattacttttttattctgttactgtta

SEQ ID NO: 642494 - DNA, 120 bp, Artificial Sequence
  ENSG00000181938_31 (sequence is synthesized)
gaagaaaccatcatttcttcctcttgggacagaagcatttgctactaatgacaataataggtgatgcttctcaaggagcttgctgtgtgctagccatttgctaggtgcattacatgtatt

SEQ ID NO: 642495 - DNA, 120 bp, Artificial Sequence
  ENSG00000181938_32 (sequence is synthesized)
cattggttttcttaacaacttactggattttcataacaatccacttcacagatgaggaaattgaggcatggcaatgtgcaataacttacttgggtgctagagggaattcagacctccttc

SEQ ID NO: 642496 - DNA, 120 bp, Artificial Sequence
  ENSG00000181938_33 (sequence is synthesized)
tgagtcctacacatcattctttcttttcatgccatttaaatgttctgagataaaaatggatatgactttgtggggtgtgaggtcaaccctgacttgtcttactcccttgtttcccagact

SEQ ID NO: 642497 - DNA, 72 bp, Artificial Sequence
  ENSG00000181938_34 (sequence is synthesized)
ccgccatgcctcgccttggcgctttcttcctggagcggagcgcaggcgccgagactgacaacgcggtccggc

SEQ ID NO: 642498 - DNA, 120 bp, Artificial Sequence
  ENSG00000181938_35 (sequence is synthesized)
tgtccatctcagctgcaactgtactttgtgtcaaccagtattcaagggaggactctgattggttcagttaatcctttcaagccaagcccatgagttgtgctctgcttggaacaggggttt

SEQ ID NO: 642499 - DNA, 120 bp, Artificial Sequence
  ENSG00000181938_36 (sequence is synthesized)
tgagaccataaaatctgccatggatgagaccacactgagtcctccacttcttccaccttggctacccctgagatagcaagaccaatccttcctcttcttcctccttctcagtctacacaa

SEQ ID NO: 642500 - DNA, 120 bp, Artificial Sequence
  ENSG00000181939_0 (sequence is synthesized)
atgttctcaatgacaacagaagcactcaataattttgcacttggatgtaccaacttgttaatgactatgataccacaaattgatctgaagcaaattttcctttgtcctaattgcagacta

SEQ ID NO: 642501 - DNA, 120 bp, Artificial Sequence
  ENSG00000181939_1 (sequence is synthesized)
tacatgatccctgttggagctttcatcttttccttgggaaacatgcaaaaccaaagctttgtaactgagtttgtcctcctgggactttcacagaatccaaatgttcaggaaatagtattt

SEQ ID NO: 642502 - DNA, 120 bp, Artificial Sequence
  ENSG00000181939_2 (sequence is synthesized)
gttgtatttttgtttgtctacattgcaactgttgggggcaacatgctaattgtagtaaccattctcagcagccctgctcttctggtgtctcctatgtacttcttcttgggcttcctgtcc

SEQ ID NO: 642503 - DNA, 120 bp, Artificial Sequence
  ENSG00000181939_3 (sequence is synthesized)
ttcctggatgcgtgcttctcatctgtcatcaccccaaagatgattgtagactccctctatgtgacaaaaaccatctcttttgaaggctgcatgatgcagctctttgctgaacacttcttt

SEQ ID NO: 642504 - DNA, 120 bp, Artificial Sequence
  ENSG00000181939_4 (sequence is synthesized)
gcctatgatcgttatgtggccatttgcaagcccttgcattactcttctatcatgaacaggaggctctgtggcattctgatgggggtagcctggacagggggcctcttgcattccatgata

SEQ ID NO: 642505 - DNA, 120 bp, Artificial Sequence
  ENSG00000181939_5 (sequence is synthesized)
caaattctttttactttccagcttcccttttgtggccccaatgtcatcaatcactttatgtgtgacttgtacccgttactggagcttgcctgcactgatactcacatctttggcctcatg

SEQ ID NO: 642506 - DNA, 120 bp, Artificial Sequence
  ENSG00000181939_6 (sequence is synthesized)
gtggtcatcaacagtgggtttatctgcatcataaacttctccttgttgcttgtctcctatgctgtcatcttgctctctctgagaacacacagttctgaagggcgctggaaagctctctcc

SEQ ID NO: 642507 - DNA, 120 bp, Artificial Sequence
  ENSG00000181939_7 (sequence is synthesized)
acctgtggatctcacattgctgttgtgattttgttctttgtcccatgcatatttgtatatacacgacctccatctgctttttcccttgacaaaatggcggcaatattttatatcatctta

SEQ ID NO: 642508 - DNA, 120 bp, Artificial Sequence
  ENSG00000181939_8 (sequence is synthesized)
aatcccttgctcaatcctttgatttacactttcaggaataaggaagtaaaacaggccatgaggagaatatggaacagactgatggtggtttctgatgagaaagaaaatattaaactttaa

SEQ ID NO: 642509 - DNA, 120 bp, Artificial Sequence
  ENSG00000181958_0 (sequence is synthesized)
atggagcttctgacaaataatctcaaatttatcactgacccttttgtttgtaggctccgacacctgagtccaacaccttcagaagaacacatgaaaaataagaacaatgtgactgaattt

SEQ ID NO: 642510 - DNA, 120 bp, Artificial Sequence
  ENSG00000181958_1 (sequence is synthesized)
atcctcttagggctcacacagaaccctgaggggcaaaaggttttatttgtcacattcttactaatctacatggtgacgataatgggcaacctgcttatcatagtgaccatcatggccagc

SEQ ID NO: 642511 - DNA, 120 bp, Artificial Sequence
  ENSG00000181958_2 (sequence is synthesized)
cagtccctgggttcccccatgtacttttttctggcttctttatcattcatagataccgtctattctactgcatttgctcccaaaatgattgttgacttgctctctgagaaaaagaccatt

SEQ ID NO: 642512 - DNA, 120 bp, Artificial Sequence
  ENSG00000181958_3 (sequence is synthesized)
tcctttcagggttgtatggctcaactttttatggatcatttatttgctggtgctgaagtcattcttctggtggtaatggcctatgatcgatacatggccatctgtaagcctcttcatgaa

SEQ ID NO: 642513 - DNA, 120 bp, Artificial Sequence
  ENSG00000181958_4 (sequence is synthesized)
gttcaatttctctttatttatcagctccctttctgtggacccaatgtcattgacaacttcctgtgtgatttgtatcccttattgaaacttgcttgcaccaatacctatgtcactgggctt

SEQ ID NO: 642514 - DNA, 120 bp, Artificial Sequence
  ENSG00000181958_5 (sequence is synthesized)
tctatgatagctaatggaggagcgatttgtgctgtcaccttcttcactatcctgctttcctatggggtcatattacactctcttaagactcagagtttggaagggaaacgaaaagctttc

SEQ ID NO: 642515 - DNA, 120 bp, Artificial Sequence
  ENSG00000181958_6 (sequence is synthesized)
tacacctgtgcatcccacgtcactgtggtcattttattctttgtcccctgtatcttcttgtatgcaaggcccaattctacttttcccattgataaatccatgactgtagttctaactttt

SEQ ID NO: 642516 - DNA, 120 bp, Artificial Sequence
  ENSG00000181958_7 (sequence is synthesized)
ataactcccatgctgaacccactaatctataccctgaagaatgcagaaatgaaaagtgccatgaggaaactttggagtaaaaaagtaagcttagctgggaaatggctgtatcactcatga

SEQ ID NO: 642517 - DNA, 120 bp, Artificial Sequence
  ENSG00000181961_0 (sequence is synthesized)
ccctgttctcctgagctctcatttctgatataagcttgaaagaagagtaaatgagaccaagcagcaatgttacagaatttgtcctcctgggcctcactcaagatcctgatgtgaaaaaaa

SEQ ID NO: 642518 - DNA, 120 bp, Artificial Sequence
  ENSG00000181961_1 (sequence is synthesized)
cattatttgtcatgtttttactcatatacattgtgacaatggtgggaaacctcctcatttgggtgactactattggcagcccctccttgggctccctaatgtacttcttccttgcctact

SEQ ID NO: 642519 - DNA, 120 bp, Artificial Sequence
  ENSG00000181961_2 (sequence is synthesized)
tgtcacttatggatgccatatattccactgccatgtcacccaaattgatgatagacttactctgtgataaaatcgctatttccttgtcagcttgcatgggtcagctcttcatagaacact

SEQ ID NO: 642520 - DNA, 120 bp, Artificial Sequence
  ENSG00000181961_3 (sequence is synthesized)
tacttggtggtgcagaggtcttccttttggtggtgatggcctatgatcgctatgtggctatctctaagccgctgcactatttgaacatcatgaatcgactggtttgcatccttctgttgg

SEQ ID NO: 642521 - DNA, 120 bp, Artificial Sequence
  ENSG00000181961_4 (sequence is synthesized)
ggtggccatgattggaggttttgtgcactctgtggttcaaattgtctttctgtacagtctaccaatctgtggccccaatgttattgaccactctgtctgtgacatgtacccattgttgga

SEQ ID NO: 642522 - DNA, 120 bp, Artificial Sequence
  ENSG00000181961_5 (sequence is synthesized)
actgttgtgccttgacacctactttataggactcactgtggttgccaatggtggaataatttgtatggtcatctttacctttctgctaatctcctgtggagtcatcctaaacttccttaa

SEQ ID NO: 642523 - DNA, 120 bp, Artificial Sequence
  ENSG00000181961_6 (sequence is synthesized)
aacttacagtcaggaagagaggcataaagccctgcctacctgcatctcccacatcattgtggttgccctcgtttttgttccctgtatttttatgtatgttagacccgtttccaactttcc

SEQ ID NO: 642524 - DNA, 120 bp, Artificial Sequence
  ENSG00000181961_7 (sequence is synthesized)
ctttgataaattaatgactgtgttttattcaattatcacactcatgttgaatcctttaatatactcgttgagacaatcagagatgaaaaatgctatgaaaaatctctggtgtgaaaagtt

SEQ ID NO: 642525 - DNA, 120 bp, Artificial Sequence
  ENSG00000181961_8 (sequence is synthesized)
aagtatagttagaaaaagagtatctcccacactgaacatatttattcctagttctaaggcaacaaataggcggtaaaatactgcagtcaattcaacagattctgtagggatgcttctctc

SEQ ID NO: 642526 - DNA, 120 bp, Artificial Sequence
  ENSG00000181963_0 (sequence is synthesized)
gggccctgtggaagcagataaggaggaagagaattcccaggagccatgtcagcctccaatatcaccttaacacatccaactgccttcttgttggtggggattccaggcctggaacacctg

SEQ ID NO: 642527 - DNA, 120 bp, Artificial Sequence
  ENSG00000181963_1 (sequence is synthesized)
cacatctggatctccatccctttctgcttagcatatacactggccctgcttggaaactgcactctccttctcatcatccaggctgatgcagccctccatgaacccatgtacctctttctg

SEQ ID NO: 642528 - DNA, 120 bp, Artificial Sequence
  ENSG00000181963_2 (sequence is synthesized)
gccatgttggcagccatcgacctggtcctttcctcctcagcactgcccaaaatgcttgccatattctggttcagggatcgggagataaacttctttgcctgtctggcccagatgttcttc

SEQ ID NO: 642529 - DNA, 120 bp, Artificial Sequence
  ENSG00000181963_3 (sequence is synthesized)
cttcactccttctccatcatggagtcagcagtgctgctggccatggcctttgaccgctatgtggctatctgcaagccactgcactacaccaaggtcctgactgggtccctcatcaccaag

SEQ ID NO: 642530 - DNA, 120 bp, Artificial Sequence
  ENSG00000181963_4 (sequence is synthesized)
tgaacacatggctgtggtgaggctggcgtgtggggacactagcttcaacaatatctatggcatcgctgtggccatgtttattgtggtgttggacctgctccttgttatcctgtcttatat

SEQ ID NO: 642531 - DNA, 120 bp, Artificial Sequence
  ENSG00000181963_5 (sequence is synthesized)
ctttattcttcaggcagttctactgcttgcctctcaggaggcccgctacaaggcatttgggacatgtgtctctcatataggtgccatcttagccttctacacaactgtggtcatctcttc

SEQ ID NO: 642532 - DNA, 120 bp, Artificial Sequence
  ENSG00000181963_6 (sequence is synthesized)
agtcatgcaccgtgtagcccgccatgctgcccctcatgtccacatcctccttgccaatttctatctgctcttcccacccatggtcaatcccataatctatggtgtcaagaccaagcaaat

SEQ ID NO: 642533 - DNA, 120 bp, Artificial Sequence
  ENSG00000181963_7 (sequence is synthesized)
ccgtgagagcatcttgggagtattcccaagaaaggatatgtagagggtgaggtggagaaagaatgggttggcttgtctgctggagttggagacaggctatggtagaatgtgcacggctgc

SEQ ID NO: 642534 - DNA, 120 bp, Artificial Sequence
  ENSG00000181965_0 (sequence is synthesized)
gccacactcggtgctcacacgagctgatctgatcgccggcgacatcactcaggagaccggccgggcgcgtggcccctgcaggcgaggcgaggaggccaggccaagttctccgtgcgcccc

SEQ ID NO: 642535 - DNA, 120 bp, Artificial Sequence
  ENSG00000181965_1 (sequence is synthesized)
tgcacccttccaggctctcgcacccgcaactggcacagagtaacaaccccaggctgttgggaacgtaagtgcgccctggcggctctgccctcagtccgggctgcagcgctctgagcgcct

SEQ ID NO: 642536 - DNA, 120 bp, Artificial Sequence
  ENSG00000181965_2 (sequence is synthesized)
ttctatctgtccgtcggtcctgcacagcgcaacgatgccagcccgccttgagacctgcatctccgacctcgactgcgccagcagcagcggcagtgacctatccggcttcctcaccgacga

SEQ ID NO: 642537 - DNA, 120 bp, Artificial Sequence
  ENSG00000181965_3 (sequence is synthesized)
ggaagactgtgccagactccaacaggcagcctccgcttcggggccgcccgcgccggcccgcaggggcgcgcccaatatctcccgggcgtctgaggttccaggggcacaggacgacgagca

SEQ ID NO: 642538 - DNA, 120 bp, Artificial Sequence
  ENSG00000181965_4 (sequence is synthesized)
ggagaggcggcggcgccgcggccggacgcgggtccgctccgaggcgctgctgcactcgctgcgcaggagccggcgcgtcaaggccaacgatcgcgagcgcaaccgcatgcacaacttgaa

SEQ ID NO: 642539 - DNA, 120 bp, Artificial Sequence
  ENSG00000181965_5 (sequence is synthesized)
cgcggccctggacgcactgcgcagcgtgctgccctcgttccccgacgacaccaagctcaccaaaatcgagacgctgcgcttcgcctacaactacatctgggctctggccgagacactgcg

SEQ ID NO: 642540 - DNA, 120 bp, Artificial Sequence
  ENSG00000181965_6 (sequence is synthesized)
cgagacactgcgcctggcggatcaagggctgcccggaggcggtgcccgggagcgcctcctgccgccgcagtgcgtcccctgcctgcccggtcccccaagccccgccagcgacgcggagtc

SEQ ID NO: 642541 - DNA, 120 bp, Artificial Sequence
  ENSG00000181965_7 (sequence is synthesized)
cgccgccgcctccccgctctctgaccccagtagcccagccgcctccgaagacttcacctaccgccccggcgaccctgttttctccttcccaagcctgcccaaagacttgctccacacaac

SEQ ID NO: 642542 - DNA, 120 bp, Artificial Sequence
  ENSG00000181965_8 (sequence is synthesized)
gccctgtttcattccttaccactaggccctttgtagacactgttactttccccctcccctagtcagcaggcaatagatggggccccagctgccgcctcgggaccccctctccaggcggag

SEQ ID NO: 642543 - DNA, 120 bp, Artificial Sequence
  ENSG00000181965_9 (sequence is synthesized)
ggaggaagcgggagctttaaagcagtcggggatacctgagccgcttgttaggtcgccgcaccctcgcggcggatgtctcttggtctgtttctccggccctcagcccagcgcccctcctgc

SEQ ID NO: 642544 - DNA, 120 bp, Artificial Sequence
  ENSG00000181965_10 (sequence is synthesized)
ccgcccctagacggcctttccttttgcactttctgaactccacaaaacctcctttgtgactggctcagaactgaccccagccaccacttcagtgtgatttagaaaagggacagatcagcc

SEQ ID NO: 642545 - DNA, 120 bp, Artificial Sequence
  ENSG00000181965_11 (sequence is synthesized)
cctgaagacgaggtgaaaagtcaattttacaatttgtagaactctaatgaagaaaaacgagcatgaaaattcggtttgagccggctgacaatacaatgaaaaggcttaaaaagcagagac

SEQ ID NO: 642546 - DNA, 120 bp, Artificial Sequence
  ENSG00000181965_12 (sequence is synthesized)
aaggagtgggcttcatgcattatggatcccgacccccaccactgcagactcgctctaggaagaactggagactcttgcttagctattcaggcacagggctggagagtactttaatttatt

SEQ ID NO: 642547 - DNA, 120 bp, Artificial Sequence
  ENSG00000181965_13 (sequence is synthesized)
caagatgcttcattcatatgaaaatgtatttttgtacataaagagtttattctattatgagctatcaaagtttacatttttgtactgcagacgcttcatgtaaataaaaactaaaaataa

SEQ ID NO: 642548 - DNA, 120 bp, Artificial Sequence
  ENSG00000181982_0 (sequence is synthesized)
aaaatgctacgcttaaattttcctggagtccagatgtccttctgaatccactaaaccttgtgaagcgatgtgaacgtcagtcagcactacttattcataagtagtggatagttgccacgt

SEQ ID NO: 642549 - DNA, 120 bp, Artificial Sequence
  ENSG00000181982_1 (sequence is synthesized)
cattaactcatcatcatcaccatcatggtcgtcatcgtcgtcgtcatcatcatcatcatcgccagagcggccacttgggattctgagtacctggtgtgtaagaggaagctggagagtaag

SEQ ID NO: 642550 - DNA, 120 bp, Artificial Sequence
  ENSG00000181982_2 (sequence is synthesized)
aaggaagccctgctgatcctctccaaggagctggacacctgtcaacaggaaagggaccagtacaaactcatggccaatcagctccgggagcgccaccagtcactgaagaagaagtaccga

SEQ ID NO: 642551 - DNA, 120 bp, Artificial Sequence
  ENSG00000181982_3 (sequence is synthesized)
gagctgattgatggagatccatcacttcctcctgaaaaaaggaaacaggctaatcttgcacaactattgagagattctcaggaccgaaataaacatctgggagaagaaattaaagaactt

SEQ ID NO: 642552 - DNA, 120 bp, Artificial Sequence
  ENSG00000181982_4 (sequence is synthesized)
cagcaaaggcttggagaagtccagggcgacaacaagctcttgaggatgacgattgccaaacaaaggctcggagacgaagcaatcggcgtgcgacactttgcagcccatgagcgtgaagac

SEQ ID NO: 642553 - DNA, 120 bp, Artificial Sequence
  ENSG00000181982_5 (sequence is synthesized)
ttggtgcagcagctagagcgagctaaggaacagattgagtctctggagcacgacctgcaggcttctgtggacgagcttcaggatgttaaagaagaacggtcttcctaccaggacaaagtg

SEQ ID NO: 642554 - DNA, 120 bp, Artificial Sequence
  ENSG00000181982_6 (sequence is synthesized)
gagaggctcaaccaggagctgaaccatatcctgagtgggcacgagaaccgcatcattgacgtggacgccctgtgtatggagaacaggtaccttcaagagagattaaagcaactccatgaa

SEQ ID NO: 642555 - DNA, 120 bp, Artificial Sequence
  ENSG00000181982_7 (sequence is synthesized)
gaggtcaacctcttgaaatcaaacattgccaaatacaagaatgctctggagagacggaaaaactcgaagggccagggtaaatccagcagcagtgctctgacaggagtcctgtctgcaaag

SEQ ID NO: 642556 - DNA, 120 bp, Artificial Sequence
  ENSG00000181982_8 (sequence is synthesized)
gccctgttggaaacaatccacgagaaaaacatggtcattcagcaccagaggcaaaccaacaaaatcctagggaatcgggtggctgagctggaaaaaaaattaagaactctggaagtttct

SEQ ID NO: 642557 - DNA, 120 bp, Artificial Sequence
  ENSG00000181982_9 (sequence is synthesized)
ggtttgtggagtcttccagggggcaaggacaccatactgttcagcgaccccactcttcctagtggacagaggtcgagatccccactgctgaagtttgtcgagcagcccactgagaacaaa

SEQ ID NO: 642558 - DNA, 120 bp, Artificial Sequence
  ENSG00000181982_10 (sequence is synthesized)
gcagatcccaaggatggggaggctcagaagcaagaagaagatgaaagttgtgccgctgctgaggcgttgacagcgcctgaggatgctgggaggcccgctgtcaactccccagcaaatcag

SEQ ID NO: 642559 - DNA, 120 bp, Artificial Sequence
  ENSG00000181982_11 (sequence is synthesized)
agccgcgggaaccaatgcaagctctttcatccttcattaccccagttaccttctgaggaagaagtaaacagccttgggagggaaataattaaactgacaaaggaacaggcagctgcagaa

SEQ ID NO: 642560 - DNA, 120 bp, Artificial Sequence
  ENSG00000181982_12 (sequence is synthesized)
ctggaagaggtcagaagagagagtcccatagaaggtcagaggagtgagacggggccagccccgccaggcctggccatccagggggagctccctaaatctcacctggactccttcgaggcc

SEQ ID NO: 642561 - DNA, 120 bp, Artificial Sequence
  ENSG00000181982_13 (sequence is synthesized)
agccggccagcagccaaagcttccacaccggaagacggcaaagggatcccagagggcggaggcatgaggagcaccgtgaaaacctgaaggggagagggatctgacacaatgacacattga

SEQ ID NO: 642562 - DNA, 120 bp, Artificial Sequence
  ENSG00000181982_14 (sequence is synthesized)
aagccccagagagggtcaagaatgaagcatcggaatggtgcgctcacgtcgccttctcctgaaatacctccgagtctgcaagtgagaaaacgcactgatcctgttgcaaactgtgaatat

SEQ ID NO: 642563 - DNA, 120 bp, Artificial Sequence
  ENSG00000181982_15 (sequence is synthesized)
tctgatgatgccagtacagtttgatttattaaatgtaggtcctcaagcttctcagtgtcatctcttttctgccagagagtgctactgtgaacagggccaggcccaggaatcgtgtccacc

SEQ ID NO: 642564 - DNA, 120 bp, Artificial Sequence
  ENSG00000181982_16 (sequence is synthesized)
atatggctggttttcagcatccgtctttctgtcagcttttgttttatcagagataagatgtttttgtattagcatttaatgttgtcaatcaaaattatgggaagagctagaaactgatgg

SEQ ID NO: 642565 - DNA, 120 bp, Artificial Sequence
  ENSG00000181982_17 (sequence is synthesized)
gacccatggctgcaccccatcaagtcagggcccaggaggactgcctggcatgggtgtgcttggcattgtgcccacagcactgctgtcgtggtacagactggcagttggaaggggccttaa

SEQ ID NO: 642566 - DNA, 120 bp, Artificial Sequence
  ENSG00000181982_18 (sequence is synthesized)
gccggctgagaagtttgggcttctgggttgaaatccacagccccggttgaggcctgtgtgctgagtgccagagctggagttttctagcttgtaaatctggagaattaactgatctgaagt

SEQ ID NO: 642567 - DNA, 120 bp, Artificial Sequence
  ENSG00000181982_19 (sequence is synthesized)
gactgggaggggtgagcataaaagccggggaacaggactcccagtggtggtctggttttttttgtgagatgagatgagagctaccacctggaaatgctcattctctgcattcagcctgtc

SEQ ID NO: 642568 - DNA, 120 bp, Artificial Sequence
  ENSG00000181982_20 (sequence is synthesized)
tcacatacaggattgtatggccatttcaggtttgggaaagatctacctgctgggagccagtctagtttcctgcaccacctggaacttccaaacccttcactccttcaacagaatgttgag

SEQ ID NO: 642569 - DNA, 120 bp, Artificial Sequence
  ENSG00000181982_21 (sequence is synthesized)
gctgcctcatttgtgccaccaagtacgggaatcttaaagacagaaacagagctcatgaccttttatgggaaagagagaggaaaacaaaacaacttcacaacagcatggcaaggggggatg

SEQ ID NO: 642570 - DNA, 120 bp, Artificial Sequence
  ENSG00000181982_22 (sequence is synthesized)
tggaaccaaggacatgatacagggatgggaaaggagggcatgctcaattctagctggttctttcctttcagataaaaatgagcttttctagttggcatccggcactgcagaaaactaaaa

SEQ ID NO: 642571 - DNA, 120 bp, Artificial Sequence
  ENSG00000181982_23 (sequence is synthesized)
gtcatccagccatagctttttccttccctggaaagcctgagactagatcccaaagctcagaatgcctctgagaaccagaatcactcctttgagaggcgctccttgcaggaaaaagagagg

SEQ ID NO: 642572 - DNA, 120 bp, Artificial Sequence
  ENSG00000181982_24 (sequence is synthesized)
ctcccagagtggtagcctctcagtgaaaatgcatcctaaaaattcaatgtttataccaggctcatgacactaagatgtgacatctggacacgaggggtcagccacgtggatacatccctc

SEQ ID NO: 642573 - DNA, 120 bp, Artificial Sequence
  ENSG00000181982_25 (sequence is synthesized)
ccagattgcatctccaggaatcactctgctagcagaatgggcgccccatcccttactatgctgctcctcctcaaagtgcagcccagaaggacccaggcctttgatgcacattgggtgggt

SEQ ID NO: 642574 - DNA, 120 bp, Artificial Sequence
  ENSG00000181982_26 (sequence is synthesized)
ctcccactactttagttgaaatgggagcatgctggagtcggcgttctgttgcttctggtgagaaggacatcccattgacccctggccaccaggtccagtattccatccttccttctgtcc

SEQ ID NO: 642575 - DNA, 120 bp, Artificial Sequence
  ENSG00000181982_27 (sequence is synthesized)
cagcctatcgccctccccaccaggcccacccccacaacttctcctcaagggaggttgctcccgcagctggagggcttgcacagaccagcagtcacagaaatcattcttcctgctgtactg

SEQ ID NO: 642576 - DNA, 120 bp, Artificial Sequence
  ENSG00000181982_28 (sequence is synthesized)
ggccttaactgcctgcaaatgtccagcactactgcataggatgccagagccaccgaaggaaaacacagccaagtttaataataataaaaggaaaaatctcagcctgcagaactctggttt

SEQ ID NO: 642577 - DNA, 120 bp, Artificial Sequence
  ENSG00000181982_29 (sequence is synthesized)
tgacccaccatcggccagatgcacatcttcagggcctgttgagcaccttctgaaaagcagggctcgtaatagactccagcacattccatcagagtcaggaaaactgcagtgagtcccaga

SEQ ID NO: 642578 - DNA, 120 bp, Artificial Sequence
  ENSG00000181982_30 (sequence is synthesized)
gaatctagggtgcagggcagggagcaggagtcataaggagtgataacctaaactgtgtgtagtcagcggggagggtcttatgttatcaggtgaaatgagagccagtaagttagttgatcc

SEQ ID NO: 642579 - DNA, 120 bp, Artificial Sequence
  ENSG00000181982_31 (sequence is synthesized)
tgtcacagatataaccctgataacaccccatagatacgcgacacgtgtgtcctgcccctgctttccccatccaacatggttcttctgttccacagacattaaaggggctttctgcaatta

SEQ ID NO: 642580 - DNA, 120 bp, Artificial Sequence
  ENSG00000181982_32 (sequence is synthesized)
agacaccagcatccacaagcccaatgaagccctgcattcatccactcctccatttctgattgtatttcataatgtgttgatatttctaggctaatcttgcacaactattgagagattctc

SEQ ID NO: 642581 - DNA, 120 bp, Artificial Sequence
  ENSG00000181982_33 (sequence is synthesized)
ggggcccgggcggcggcggcgacgcgacgtcgcgaggaggaggaggcggcgggggtccaggaggccggccagcgcatggaggaggaggccatgaacggcgaccggactgagagcgactgg

SEQ ID NO: 642582 - DNA, 120 bp, Artificial Sequence
  ENSG00000181982_34 (sequence is synthesized)
ctcaagctggtgaatccgcgattgcgtactagagaagggggccttagggaagtctcaaaatgctacgcttaaattttcctggagtccagatgtccttctgaatccactaaaccttgtgaa

SEQ ID NO: 642583 - DNA, 120 bp, Artificial Sequence
  ENSG00000181982_35 (sequence is synthesized)
agtgggacgaggctaccagaagtgaatgtcaaccagctggaacgacggacctgcagggaaggtgagacccctcaaatcaagaaggaaacttattaaactagaatggtgcttctgctttat

SEQ ID NO: 642584 - DNA, 120 bp, Artificial Sequence
  ENSG00000181982_36 (sequence is synthesized)
atcagcatcttggctatcagctggagccaagcaaggaaagggtaccagccatactgaatgcttactctgagctacacactgagtagtatgtatttcatggatgagttccataaaataatc

SEQ ID NO: 642585 - DNA, 120 bp, Artificial Sequence
  ENSG00000181982_37 (sequence is synthesized)
gcctgggtgacttgacccacctctcctccagctcttcttttaggggagaaactgcctcagtgccatttaaaactcccagcatgactttgagggtcttttaatggcagaaatcacccaagc

SEQ ID NO: 642586 - DNA, 120 bp, Artificial Sequence
  ENSG00000181982_38 (sequence is synthesized)
atcaacttccacaggctgcggggcctagaaaagaatctcatgtcactcttccagatccacaaaaaagatggtgaaaaggaagggtaattaaaatggaatgtcttatctggtttttatagc

SEQ ID NO: 642587 - DNA, 120 bp, Artificial Sequence
  ENSG00000181982_39 (sequence is synthesized)
atgttgactatgttgtgtaaaaccaagcaggttaacgtagccattagagatgacagaggtaatatcaagagtgttcagagaatggtgaataaacaataaattaaagtagcaaatactaca

SEQ ID NO: 642588 - DNA, 120 bp, Artificial Sequence
  ENSG00000181982_40 (sequence is synthesized)
catggggttggctttgtgggcatgcaacctgtgctcagaaggaccccacattaggtctgatcttccactgtcaccatcttggaattcttagtcattgttttaacaagagggtcccacatt

SEQ ID NO: 642589 - DNA, 120 bp, Artificial Sequence
  ENSG00000181982_41 (sequence is synthesized)
tttattttgcactggaccctgcaatttatgtagctggtcctgcttgcaagacagacgtacacctggaaccaaaatgcaagtgtgagagaactgagcggggcctggaaagctaggcttcaa

SEQ ID NO: 642590 - DNA, 120 bp, Artificial Sequence
  ENSG00000181982_42 (sequence is synthesized)
gtgacaaagggagggaccagagaatccggggcctgacgaacgcaggggcatgggagagaggcaagtggaaaatgattgaaagtattataaaaacaaaatagaaaaagagaagctggagtg

SEQ ID NO: 642591 - DNA, 120 bp, Artificial Sequence
  ENSG00000181982_43 (sequence is synthesized)
aagggaagattgcaccagagatgaagatgtatgtggaagaaagcggagagcagcaaagggaagcagggcaatctcgaagggatgacacgggtaatttattgacaggagaaggtttaaatg

SEQ ID NO: 642592 - DNA, 120 bp, Artificial Sequence
  ENSG00000181982_44 (sequence is synthesized)
ttcttgaaaagtgaaatcttaaccaaggaatgaaaagtcagatgctgaaatgcagttgcttctcaggggaggaagaaggaatgggcatcccctgcagcacgaaatgtcctccatgagctg

SEQ ID NO: 642593 - DNA, 120 bp, Artificial Sequence
  ENSG00000181982_45 (sequence is synthesized)
gcttcgtccttccctctctacagaacacctcatctttcaagccttctcacatcttctaaaccctggtccattctcagcaggtcaccacagttcctcattcactgagaaagtggggcttct

SEQ ID NO: 642594 - DNA, 120 bp, Artificial Sequence
  ENSG00000181982_46 (sequence is synthesized)
caccatgagcctctcaacttgcggctgccctgaaaccagtctccccatgttctgctcactcctgtctccaggaagtacaccagctgccatcttgttggtccatgggatctttcctcttct

SEQ ID NO: 642595 - DNA, 120 bp, Artificial Sequence
  ENSG00000181982_47 (sequence is synthesized)
gggcctctgctcccctgggacctcctgtctcaccctcttcaacctcctcccttcttctggcttttgcctctttgccctgaactcccaaagcctttcctaaaccctgctgccttcccaaaa

SEQ ID NO: 642596 - DNA, 120 bp, Artificial Sequence
  ENSG00000181982_48 (sequence is synthesized)
ataccacccagcctggaatgtttttgaagaaggcctcctctccttcctcaacagccaccctgtctaaatgtattccgggaggtcacttatgttggaattgcttgggtgcagcggctgggg

SEQ ID NO: 642597 - DNA, 120 bp, Artificial Sequence
  ENSG00000181982_49 (sequence is synthesized)
agtccatgcacaggaaagaaagataaccttggctttaatgcctcccaagacctcttcctacatttcccacggtattctttctttgcaggtcaccagtatccccaaactccacctttgagt

SEQ ID NO: 642598 - DNA, 120 bp, Artificial Sequence
  ENSG00000181982_50 (sequence is synthesized)
ctcttccttctttaatttcttcacattgagattttcatcttgaaatccaagtaagatggatttcaagggggaaactccagccttctccactgtctcatttccttttcccacctctcccct

SEQ ID NO: 642599 - DNA, 120 bp, Artificial Sequence
  ENSG00000181982_51 (sequence is synthesized)
gacccccaccccagacccactccatcttttttctccatcttctgtgctttttcccctacctgggagacctcattccctgtctctgtctttgcttctcattctctgcagactcttctcaga

SEQ ID NO: 642600 - DNA, 120 bp, Artificial Sequence
  ENSG00000181982_52 (sequence is synthesized)
tctcttgtacccaccaccccatcaagagcaagaccaagacccacatttccaacttctggttgatggtttctccagatatcctttcagctcctcaaattccatcagtcaacatccatccta

SEQ ID NO: 642601 - DNA, 120 bp, Artificial Sequence
  ENSG00000181982_53 (sequence is synthesized)
gtatgtttcaaaaatggttatgccctttgaccatcacttcttccttggggagaccgtcccacagctccatcctcagaccccagtcctacctcccccgcctaacccacctgccagctacag

SEQ ID NO: 642602 - DNA, 120 bp, Artificial Sequence
  ENSG00000181982_54 (sequence is synthesized)
ttctgagcatgacactagccttctctgcaaagcagactgagtccccattgcctgccaaagacagcatccacaggctgtcggcctgacatgcctctgcagaggatcccagcctcctctgac

SEQ ID NO: 642603 - DNA, 120 bp, Artificial Sequence
  ENSG00000181982_55 (sequence is synthesized)
agattgattcactaatgtgttcctaaccatacccactgcaaacacacccatgccccaggttcacagcactccctccctccattgtgaaagactgacattttcatttgaccatgtttattt

SEQ ID NO: 642604 - DNA, 120 bp, Artificial Sequence
  ENSG00000181982_56 (sequence is synthesized)
ttgtttctatgtactttttcatgtttattttttaataatttttgagccatcctctgggttttttgtttgtttgtttgttttgacggggtcttgctatgtctcccaggctggagtgcagtg

SEQ ID NO: 642605 - DNA, 66 bp, Artificial Sequence
  ENSG00000181982_57 (sequence is synthesized)
aacctccacctcccgggttcaagtgattcatgtgcctcagcctcccttttagtagagatagggttt

SEQ ID NO: 642606 - DNA, 60 bp, Artificial Sequence
  ENSG00000181982_58 (sequence is synthesized)
ttagtagagatagggttttaccatagaagtcatccgcccacctcgacctcccaaagtgct

SEQ ID NO: 642607 - DNA, 120 bp, Artificial Sequence
  ENSG00000181982_59 (sequence is synthesized)
ggcctctgtggttttaatttaatattaatttaaggttaaataacaatgtctttccaaactactcccagctaccttaatccccttcctggaagaaacgtccattcctcatttcttatatat

SEQ ID NO: 642608 - DNA, 120 bp, Artificial Sequence
  ENSG00000181982_60 (sequence is synthesized)
ccttccaaaggatgcatagacagtataagcaaatgcacaatatatttatgtatatacacatactcatatatttacatagatatactgtcttttttttttttttacaaacggtaactggta

SEQ ID NO: 642609 - DNA, 120 bp, Artificial Sequence
  ENSG00000181982_61 (sequence is synthesized)
ttcattttttaaaaaggtttcttttttcattattctgcatcttgatttttccccctgtaataatggatcttggagattgcttcgcatcagtacataagttgcctaatgtgccatctttaa

SEQ ID NO: 642610 - DNA, 120 bp, Artificial Sequence
  ENSG00000181982_62 (sequence is synthesized)
tacttagggggtcctctgtttcatacttttaataaatgttttatttgggggcatgtaaagaaactaattatactacaaatggaatgagggctgagaatagaatgtgactttggtctatgt

SEQ ID NO: 642611 - DNA, 120 bp, Artificial Sequence
  ENSG00000181982_63 (sequence is synthesized)
gtgttctcccccttgatttagccttgtgtaactgaaataataaaatagcttttggaatgcactggaaactaccctggtctctgtgtgcatgacccaattgcaatcttagaaaaaaataat

SEQ ID NO: 642612 - DNA, 120 bp, Artificial Sequence
  ENSG00000181982_64 (sequence is synthesized)
aattaattaattttaaaaagaaaagaaatggctttattttgctggagcgttatacatagcagtaaaggtgttccttcctggcagcgtatgctcctatgctggttttccactgcctgacag

SEQ ID NO: 642613 - DNA, 120 bp, Artificial Sequence
  ENSG00000181982_65 (sequence is synthesized)
ttaccacccttgagaggctccaacggaagccatctcgaagaattgatgaagaaacctaggactttacatcttgagcaacattcaattaataggcaatttgcttgagctacttcttgccag

SEQ ID NO: 642614 - DNA, 120 bp, Artificial Sequence
  ENSG00000181982_66 (sequence is synthesized)
caagttggcagttgcctggtgatcgagaaagaacggatatgaggttcatttatctttcaaaccgggtggcaaagcattcgtggacgaggtggttgttcaagggccatttcactgtgcacc

SEQ ID NO: 642615 - DNA, 120 bp, Artificial Sequence
  ENSG00000181982_67 (sequence is synthesized)
acatttcgttctccagaccttccccccaggcccatgccttaccatggcggggaggtggtggtgaatatatgaggacatattggccttttgctatccttcctgctatgcctgaaaccgttt

SEQ ID NO: 642616 - DNA, 120 bp, Artificial Sequence
  ENSG00000181982_68 (sequence is synthesized)
cctcttctctttccctggccaatggtaaatgagcttggaaattcagcatcttggggagcagcagcaagagggtgtatggatcagagcagagacgtgaaaggaggccacctggggtagaag

SEQ ID NO: 642617 - DNA, 120 bp, Artificial Sequence
  ENSG00000181982_69 (sequence is synthesized)
caagcaggggcgtcttcaggcatgtagagacacagttacctgcttcccctttagagccaggctttccttaaagaccttcactctggtattcctgctgtctgtgttgtccagagagcgagc

SEQ ID NO: 642618 - DNA, 120 bp, Artificial Sequence
  ENSG00000181982_70 (sequence is synthesized)
acggtagtgcagttcctgtgtgagttctgtcttcacagactcctcatcacagactcctttgatgatgtcattactatctaaaaccactgcagggaagccatctggagactgggcatcctg

SEQ ID NO: 642619 - DNA, 120 bp, Artificial Sequence
  ENSG00000181982_71 (sequence is synthesized)
agagattttcctagactactaggtagatacatgctgaaatctcccccaaagcaacccataactaaataaaaactttaaaactttaaaatctccctcatcctgcaaaaacaaaaaacaaaa

SEQ ID NO: 642620 - DNA, 120 bp, Artificial Sequence
  ENSG00000181982_72 (sequence is synthesized)
tattatgtattgacttaaaacaacattaccaagcatgtccatccatcttattttttagacctggttatttccaaaaatcagatccaccctccaagaatcaagatgtgatattattaaggg

SEQ ID NO: 642621 - DNA, 120 bp, Artificial Sequence
  ENSG00000181982_73 (sequence is synthesized)
tattcaaaatttattgtcatctttgcagtgagcatttctcaaatagaaattccatcaaatgatttgggcagcggtggagtcatcatttagcttcccaggaaaactaccttttgggagagg

SEQ ID NO: 642622 - DNA, 120 bp, Artificial Sequence
  ENSG00000181982_74 (sequence is synthesized)
catacaaatactccattttttgcatatatcataaatctcaacacttttctactagggcaccagtgggattcccagggctgggggctgacaggatgctcagtaattgattgtcattttctc

SEQ ID NO: 642623 - DNA, 120 bp, Artificial Sequence
  ENSG00000181982_75 (sequence is synthesized)
cccttttttcagaatcctagggaatcgggtggctgagctggaaaaaaaattaagaactctggaagtttctggtttgtggagtcttccaggcctgagctacaatgtttcagtaggatttgg

SEQ ID NO: 642624 - DNA, 120 bp, Artificial Sequence
  ENSG00000181982_76 (sequence is synthesized)
aaattagtgataaggattttgtgtgtgtgtgtgtgcaagggttagggctagggtggtgcaatagtgtaaggaagtatggagcatgtcagcagtcgtagcaggcttcccttcaatggtagt

SEQ ID NO: 642625 - DNA, 120 bp, Artificial Sequence
  ENSG00000181991_0 (sequence is synthesized)
aattcaagtcatgcaggctgtgagaaacgcggggtcgcggttcctgcggtcctggacttggccccagacagccggcagggtcgtggccagaacgccggccgggaccatctgcacaggcgc

SEQ ID NO: 642626 - DNA, 120 bp, Artificial Sequence
  ENSG00000181991_1 (sequence is synthesized)
tcgacagctccaagacgctgcggccaagcagaaagttgaacagaacgcggctcccagccacaccaagttcagcatttaccctcccattccaggagaggagagctctctgaggtgggcagg

SEQ ID NO: 642627 - DNA, 120 bp, Artificial Sequence
  ENSG00000181991_2 (sequence is synthesized)
aaagaaatttgaggagatcccaattgcacacattaaagcatcccacaacaacacacagatccaggtagtctctgctagtaatgagccccttgcctttgcttcctgtggcacagagggatt

SEQ ID NO: 642628 - DNA, 120 bp, Artificial Sequence
  ENSG00000181991_3 (sequence is synthesized)
tcggaatgccaagaagggcacaggcatcgcagcacagacagcaggcatagccgcagcggcgagagctaaacaaaagggcgtgatccacatccgagttgtggtgaaaggcctggggccagg

SEQ ID NO: 642629 - DNA, 120 bp, Artificial Sequence
  ENSG00000181991_4 (sequence is synthesized)
acgcttgtctgccatgcacggactgatcatgggcggcctggaagtgatctcaatcacagacaacaccccaatcccacacaacggctgccgccccaggaaggctcggaagctgtgatggga

SEQ ID NO: 642630 - DNA, 120 bp, Artificial Sequence
  ENSG00000181991_5 (sequence is synthesized)
aggaggcctgcacttggacctgacctcaagcctcagctccagtgggaccttgtaaaatgctccctgtcagagctctccagaatatgcttgttggagatccttcaggcagtaagggagagt

SEQ ID NO: 642631 - DNA, 120 bp, Artificial Sequence
  ENSG00000181991_6 (sequence is synthesized)
tttgcctccttacacagtggcctttgcttgcacctccagctggagatgggtgtgccccagaagtaagctttgcatctcttacaagaggggagctacaggggcagccgtggcctaggccca

SEQ ID NO: 642632 - DNA, 120 bp, Artificial Sequence
  ENSG00000181991_7 (sequence is synthesized)
aactctgctctgagaaaataaatatctgtaccacctgtcataattttgagattttttgctttcagagttacgtaattcctaattcctcttgaaaaagagagtgtgaaatgaggtgaggcc

SEQ ID NO: 642633 - DNA, 120 bp, Artificial Sequence
  ENSG00000181991_8 (sequence is synthesized)
tcagatgaaagtaaaatataaatgtgagttgctatttaccagacacttctggtttcagatatttcttttctagccccttacccaagatttctagagctaatcctagtaacttttcttatt

SEQ ID NO: 642634 - DNA, 120 bp, Artificial Sequence
  ENSG00000181991_9 (sequence is synthesized)
aatgacttataatttggccccaaattggagctttttgccacctacctctggattctgatggatttcgccattatgggcatgtttaaagttagccctaaacacaggattttctacaagtgg

SEQ ID NO: 642635 - DNA, 120 bp, Artificial Sequence
  ENSG00000181991_10 (sequence is synthesized)
acagtcaaactccccacactaaagtggcagtcatcgtttacactccatgggcttcagcagtcccagcactaacgagagagtgccctaaaagcggggagggtagagttgtacaaaacatga

SEQ ID NO: 642636 - DNA, 120 bp, Artificial Sequence
  ENSG00000181991_11 (sequence is synthesized)
tcctactgcactccagcccaggtgacagcgagactgtctcaaaaaaataaataaatataaataaaaatttaaaaaaattaaaaaaaaaaacctgatgattctctagaaaatagggtggat

SEQ ID NO: 642637 - DNA, 120 bp, Artificial Sequence
  ENSG00000181991_12 (sequence is synthesized)
gaagtgcagaaagcaagttgataaggaacctgggtagtgctggcagtggggcacaactcaggacccccaggcaggactgactgctcctctgttggggctctagggttcctggatacggca

SEQ ID NO: 642638 - DNA, 120 bp, Artificial Sequence
  ENSG00000181991_13 (sequence is synthesized)
cagaggccaaaggtgggggctctagagacacgaccagagagtcccctcttccacaggcaaagactaagggtgagagtatcaccagaagctgagaaggagtggtcaagtacacaaaagcac

SEQ ID NO: 642639 - DNA, 120 bp, Artificial Sequence
  ENSG00000181991_14 (sequence is synthesized)
tgttcctcccagatgagtgcaggaagggctgctgaccagaaggggaaggcactgtggagttttacttctgtgtccagccagctaagtactgtgatctgcctgaactcagtataggaaaag

SEQ ID NO: 642640 - DNA, 120 bp, Artificial Sequence
  ENSG00000181991_15 (sequence is synthesized)
acacagatgcccccttaaataggcaagaggctgtgttaggacaaagaaaggaggaagatcacgaaccaagacatgaatttagaggaaaaatgcctccctactgccttctctttagtcctt

SEQ ID NO: 642641 - DNA, 120 bp, Artificial Sequence
  ENSG00000181991_16 (sequence is synthesized)
agcaggtcctatgaaggccatcttgtgacagtgaccaaagaagcccaaccggaggcttcttggatcaaagccactgtcggaaggaattagactgtttcaccgcaaaactacatataaaca

SEQ ID NO: 642642 - DNA, 120 bp, Artificial Sequence
  ENSG00000181991_17 (sequence is synthesized)
caatgcattaaaacatggtgcacttgaaaattgcacttcgcgatttgatatggtttggtggacagagggcccgtagccatcagacagttcaatcagggtctgagcaggaaacagctcaca

SEQ ID NO: 642643 - DNA, 120 bp, Artificial Sequence
  ENSG00000181991_18 (sequence is synthesized)
aggtttaagagaaaagctcaatgaaagctctttgcagaggcatgggtaagattaaggaaataaagaaggtggactacaaagcagctgccaccctaggctagaagaggcagggaagaacag

SEQ ID NO: 642644 - DNA, 120 bp, Artificial Sequence
  ENSG00000181991_19 (sequence is synthesized)
ttcctagaacctggcaggagctgccacagcagcagagtgcacctctgccaaaaccatggcctgagggagagggaagaaatgcctggctgttcccggcctgtagtcccttgctggggtccc

SEQ ID NO: 642645 - DNA, 120 bp, Artificial Sequence
  ENSG00000181991_20 (sequence is synthesized)
ccttggctgatcccaaaaggaagcaaaaaggaagggaactcagtgttgtggtacttggaggctcagcctcccaggctgcagagtggatctggaggggcacgtagaggatagtaaacacag

SEQ ID NO: 642646 - DNA, 120 bp, Artificial Sequence
  ENSG00000181991_21 (sequence is synthesized)
gaggcttctgtggcttctgtaagtcctccatacaccataggtttttattttggttttggtttttgagtctcgttgtcacccaggctggattgcagtggtacgaccatggttcactgcagc

SEQ ID NO: 642647 - DNA, 120 bp, Artificial Sequence
  ENSG00000181991_22 (sequence is synthesized)
aactcctgggctcaagtgatcctccagcttcagcctcctgtgagcatctgggactacaggcgcatgccaccacacatggataatttttgtattttttgtattgagaccaggtcttgaact

SEQ ID NO: 642648 - DNA, 84 bp, Artificial Sequence
  ENSG00000181991_23 (sequence is synthesized)
atccacacaccatagtttttaaaatgttattttactcacaagagggctttggaaaggaagatcctgcccagcagagcctacatg

SEQ ID NO: 642649 - DNA, 120 bp, Artificial Sequence
  ENSG00000181991_24 (sequence is synthesized)
ggctttggaaaggaagatcctgcccagcagagcctacatgcgcagacaggacagaggacccttaaggatcaatggtcttgttgccggaaatggatgtctggcgcaacccccggagctagt

SEQ ID NO: 642650 - DNA, 120 bp, Artificial Sequence
  ENSG00000181991_25 (sequence is synthesized)
tttggggaggccgccttgttgactgtgcactggaaaatgcacattgctttatcgtgagctctcggtgcacagtgtggtttccaggctctgagtggccaataaagctggtgctgtcttaaa

SEQ ID NO: 642651 - DNA, 120 bp, Artificial Sequence
  ENSG00000181991_26 (sequence is synthesized)
tcttgcccgacaccctccagagtcagaaccagtgaattttcagctatgtcacttgctatccgtgggaccttatgcaaataaatctgagcctcagccttctcatctaaaaatgcggataat

SEQ ID NO: 642652 - DNA, 120 bp, Artificial Sequence
  ENSG00000181991_27 (sequence is synthesized)
gctgagagaggttgtgagaatcagatgagccgtggtacagagtaaatgttcagtgaacattcgttaaatcaatgagtgaatgtgagatatccataacatgtatcagcgttcttttcttct

SEQ ID NO: 642653 - DNA, 120 bp, Artificial Sequence
  ENSG00000181991_28 (sequence is synthesized)
gagatggagatcttttcagaccaataaccttccctgcctccaaaacaaaatggggaggtagagggcgctagcgatggaacagatgttcctgcacgtcttacggatggtccagggtgggtt

SEQ ID NO: 642654 - DNA, 120 bp, Artificial Sequence
  ENSG00000181991_29 (sequence is synthesized)
ttgtgctcagccctaggaactggcatcttgcttcccaccagtgccaccacctctgtatgctgtatacacatccacttaacttcacatccatttaacaaacatttaccaagaatctactat

SEQ ID NO: 642655 - DNA, 120 bp, Artificial Sequence
  ENSG00000181991_30 (sequence is synthesized)
gagtgagacaccatgctaggtgccgtgaatacagatacaaaagatcattcctccccacaagtagttcacagtctttgagggaagacaaacatgcaaacattttaaccataatctgctcaa

SEQ ID NO: 642656 - DNA, 120 bp, Artificial Sequence
  ENSG00000181991_31 (sequence is synthesized)
taatataatggaggtaagcattggttggaagtatgaaatcataagtgtctaactcctggccgggtgcagtagctcatgcctttaatcccagcactttaggcggccaaggtgggcgaatta

SEQ ID NO: 642657 - DNA, 89 bp, Artificial Sequence
  ENSG00000181991_32 (sequence is synthesized)
actaaaagcacaaaaactagccaggcgtgatgtctggcgtagaagaatcgcatgaacccagggagcggaggttgcagtgagccaagatc

SEQ ID NO: 642658 - DNA, 120 bp, Artificial Sequence
  ENSG00000181991_33 (sequence is synthesized)
gattgagactctgtctcaaagaaaaaaaaaaaaaaaaagaataagtgtctcattcctgaggaaatcaggcaagaccatggagaaaagaacatggagctcagaagtgaatgggagttcatc

SEQ ID NO: 642659 - DNA, 120 bp, Artificial Sequence
  ENSG00000181991_34 (sequence is synthesized)
gaaaatcccttctcatagcggaaagtccccagatgtgtctgaagtcagcaagtcaagaaacagcatcataagcacagcagtcacacatgcggtggtggcaccagaaggactgaaaaggaa

SEQ ID NO: 642660 - DNA, 120 bp, Artificial Sequence
  ENSG00000181991_35 (sequence is synthesized)
tggtgggggcagccacttaagaagcagcagggggcacagagctgttattttttaaccatgtgttgtatttctttgatttttaaaaagtcgagacaattttaaataaaatctttcttctaa

SEQ ID NO: 642661 - DNA, 120 bp, Artificial Sequence
  ENSG00000181991_36 (sequence is synthesized)
gcggggtcgcggttcctgcggtcctggacttggccccagacagccgggtaacaaatgactgccccctcgagcccaccgccacctccaggactatgctcctactcgtgtcccttgagccac

SEQ ID NO: 642662 - DNA, 120 bp, Artificial Sequence
  ENSG00000181991_37 (sequence is synthesized)
agcaatatttagaaatttccattaggtggcggtgctgtcctaggctaaacagatcacagtcacgtgaattctgcaacctgccaaattctgtggtctctgctggcgcctgtcctccactat

SEQ ID NO: 642663 - DNA, 120 bp, Artificial Sequence
  ENSG00000181991_38 (sequence is synthesized)
agccatctgccctttgcctccctgtttacttctctggatgccctttccctgagctcacacaccccttgctctaggaggcagtagcaagagatttggatgcagtagttctctctccggggc

SEQ ID NO: 642664 - DNA, 120 bp, Artificial Sequence
  ENSG00000181991_39 (sequence is synthesized)
tgtcgctgcagacggaaactgactggggtcaattcaagtcatgcaggctgtgagaaacgcggggtcgcggttcctgcggtcctggacttggccccagacagccggggtcgtggccagaac

SEQ ID NO: 642665 - DNA, 120 bp, Artificial Sequence
  ENSG00000181991_40 (sequence is synthesized)
agtcccggaactgctagaacgaaccattcgcatatggagggggtgacccaccatctcagaacattaaaaaagggaaagaatcccctggtgaactacagtgaaagtcttattgagcattta

SEQ ID NO: 642666 - DNA, 120 bp, Artificial Sequence
  ENSG00000181991_41 (sequence is synthesized)
aatggaaataaaaatattcagtggacctaatgaagagtagatgactttcccttctgtcccctccccgacaggcactcatggtaccggcgccggcgcagctgtgactgtcgctgcagacgg

SEQ ID NO: 642667 - DNA, 120 bp, Artificial Sequence
  ENSG00000181991_42 (sequence is synthesized)
caagacgctgcggccaagcagaaagttgaacagaacgcggctcccagccacaccaagttcagagtccagatattgtctatggttgatgaaataagaaacagaggtttgactgtatttttt

SEQ ID NO: 642668 - DNA, 120 bp, Artificial Sequence
  ENSG00000181991_43 (sequence is synthesized)
gggcagccacttaagaagcagcagggggcacagagctgttattttttaaccatgtgttgtatttctttgatttttaaaaagtcgagacaattttaaataaaatctttcttctaattgcag

SEQ ID NO: 642669 - DNA, 120 bp, Artificial Sequence
  ENSG00000182004_0 (sequence is synthesized)
ctttattccggaagttgctctcagaggcagcgtgcgggtgtgctctttgtgaaattccaccatggcgtaccgtggccagggtcagaaagtgcagaaggttatggtgcagcccatcaacct

SEQ ID NO: 642670 - DNA, 120 bp, Artificial Sequence
  ENSG00000182004_1 (sequence is synthesized)
catcttcagatacttacaaaatagatcgcggattcaggtgtggctctatgagcaagtgaatatgcggatagaaggctgtatcattggttttgatgagtatatgaaccttgtattagatga

SEQ ID NO: 642671 - DNA, 120 bp, Artificial Sequence
  ENSG00000182004_2 (sequence is synthesized)
tgcagaagagattcattctaaaacaaagtcaagaaaacaactgggtcggatcatgctaaaaggagataatattactctgctacaaagtgtctccaactagaaatgatcaatgaagtgaga

SEQ ID NO: 642672 - DNA, 120 bp, Artificial Sequence
  ENSG00000182004_3 (sequence is synthesized)
aattgttgagaaggatacagtttgtttttagatgtcctttgtccaatgtgaacatttattcatattgttttgattaccctcgtgttactacaagatggcaataaatactatgggattgtt

SEQ ID NO: 642673 - DNA, 120 bp, Artificial Sequence
  ENSG00000182004_4 (sequence is synthesized)
tgtattaaaaaatttacattgcttcttactattcagcagtagaaactttttacacagtaacaccattcgttgctggtatttagttttctgaagggtcgcagttgccttgagcacttggta

SEQ ID NO: 642674 - DNA, 120 bp, Artificial Sequence
  ENSG00000182004_5 (sequence is synthesized)
ttcgcagagcttggacctgtagattttgaggcagattaggaattctgcctgatgggtaagcttccagtattgggaggtggagaaggggagggttcagaaaaataaataagagttattgca

SEQ ID NO: 642675 - DNA, 120 bp, Artificial Sequence
  ENSG00000182004_6 (sequence is synthesized)
ctaacaaaagtcttcatcacttgtagttctggatgctggaataccagagtttctaacctaaatatgttgggtacattatttaatggggtcagtattgctcaacactctcattgagtcact

SEQ ID NO: 642676 - DNA, 120 bp, Artificial Sequence
  ENSG00000182004_7 (sequence is synthesized)
gtgaggtctttgtgaattttatcgctaagatcagaatgtgagaagtatttggatatagggaaagaatgaagtgcctttcaagtacattaaaaatcagttaagagtttacaggaaagagac

SEQ ID NO: 642677 - DNA, 120 bp, Artificial Sequence
  ENSG00000182004_8 (sequence is synthesized)
tgagattggtaatctgaaaaggaccacaagcatagctggtaggcaaattgttaggcagaataatggtatgttggagaaatacacctgtctcttattcttatctcttaagaattttggttc

SEQ ID NO: 642678 - DNA, 120 bp, Artificial Sequence
  ENSG00000182004_9 (sequence is synthesized)
ttcccccagtgattgctggttgaattcttatatggacaggtttcccttcccccagtatcgcacatggttctagttagaatcctgttagatagtgagcatctgctgttagctagacactgt

SEQ ID NO: 642679 - DNA, 120 bp, Artificial Sequence
  ENSG00000182004_10 (sequence is synthesized)
tgaatcaatacagtgaaacagacaggtaagcaggtggttttaatgcctcattctaagtgctatttaaattggatcttgaaagatgaataaggcctgccttaagttctgctaaaggccatg

SEQ ID NO: 642680 - DNA, 120 bp, Artificial Sequence
  ENSG00000182004_11 (sequence is synthesized)
ttgttattaaggacgggtgaggaaggaccaagaagtctggctcctgcttttctacatgcctgtgaaggagacttttcatgaaactgaataaaagaaatcctttccgagatagaggagatt

SEQ ID NO: 642681 - DNA, 120 bp, Artificial Sequence
  ENSG00000182004_12 (sequence is synthesized)
tgtaggtgaatgcagaagtgtatccagctttgaaccatgcattccatctatattcctcctgtctgaactcatgctcttttgattatgttttgaaataaagggctgcattagttcttttaa

SEQ ID NO: 642682 - DNA, 120 bp, Artificial Sequence
  ENSG00000182004_13 (sequence is synthesized)
attccggaagttgctctcagaggcagcgtgcgggtgtgctctttgtgaaattccaccatggcgtaccgtggccagggtcagaaagtgcagaaggttatggtgcagcccatcgtatcctac

SEQ ID NO: 642683 - DNA, 120 bp, Artificial Sequence
  ENSG00000182004_14 (sequence is synthesized)
aaagcgcgggtagttgaaccgtgatggtggggaggtggtcttggggggacccctgccgtggggaatgcaggaatggacgcggcaaaaggagggaagagaacttcagagatcgcggattca

SEQ ID NO: 642684 - DNA, 120 bp, Artificial Sequence
  ENSG00000182004_15 (sequence is synthesized)
gcaggatgtcaggactaggaggttcgggtcagaatacggggtgcgaaggcgcaggctgagggcaggcctgggatagtggagtacggatccacatcccatgagcccccggggctaccaaga

SEQ ID NO: 642685 - DNA, 120 bp, Artificial Sequence
  ENSG00000182004_16 (sequence is synthesized)
ctggaagaaagcgcgggtagttgaaccgtgatggtggggaggtggtcttggggggacccctgccgtggggaatgcaggaatggacgcggcaaaaggagggaagagaacttcaggtgcgga

SEQ ID NO: 642686 - DNA, 120 bp, Artificial Sequence
  ENSG00000182004_17 (sequence is synthesized)
gtgaaaacgggagttaacggttttgggaaactccagggggatgaaagtggaatggatgttctttagtctttagaagacccgtaacgaatgcccagctgggcacttgttgtttgcgtaagc

SEQ ID NO: 642687 - DNA, 120 bp, Artificial Sequence
  ENSG00000182010_0 (sequence is synthesized)
cgccgcgctagagcctggggtctcggcaacttccggcggcgggagctgcagagcgcaaggcgcgcccactgcgcgtgcgcttcggcccggctcctcctgcgcccccggcccctgcgactg

SEQ ID NO: 642688 - DNA, 120 bp, Artificial Sequence
  ENSG00000182010_1 (sequence is synthesized)
actgggacttggtacggccgggcggttggcgtcctctgcggctcctgccaggggcgggcttttcaaatcttccctttgaaggagtggcgacggcccggacagttcgcgttggagatggag

SEQ ID NO: 642689 - DNA, 120 bp, Artificial Sequence
  ENSG00000182010_2 (sequence is synthesized)
gggccgagcctgaggggtcctgcgctccgcctggcggggcttcccacccagcaggactgcaacattcaagaaaaaatagacttagaaattcgaatgcgagaaggaatatggaaactcctt

SEQ ID NO: 642690 - DNA, 120 bp, Artificial Sequence
  ENSG00000182010_3 (sequence is synthesized)
tctctgagcactcagaaagatcaagttttacatgcagttaagaatctcatggtgtgcaatgctcgactaatggcctatacatcggagctacagaaattagaagaacagattgcaaatcag

SEQ ID NO: 642691 - DNA, 120 bp, Artificial Sequence
  ENSG00000182010_4 (sequence is synthesized)
actggaagatgtgatgtgaaatttgaaagtaaagaacgaacagcatgtaaaggaaagattgccatatcagatattcgaataccactaatgtggaaagactctgatcacttcagcaataaa

SEQ ID NO: 642692 - DNA, 120 bp, Artificial Sequence
  ENSG00000182010_5 (sequence is synthesized)
gaacgatcacgacgctatgccattttttgtttattcaaaatgggagctaatgtgtttgatactgatgtggtgaatgtggataaaacaatcacagatatatgttttgaaaatgtaaccata

SEQ ID NO: 642693 - DNA, 120 bp, Artificial Sequence
  ENSG00000182010_6 (sequence is synthesized)
tttaatgaagcagggccagactttcagataaaggtggaagtgtatagttgctgtacagaagaatcttctataaccaacacaccaaaaaagctagctaagaaactcaagacatctataagt

SEQ ID NO: 642694 - DNA, 120 bp, Artificial Sequence
  ENSG00000182010_7 (sequence is synthesized)
aaagctacaggaaagaaaataagttcagtgcttcaagaagaggatgatgaaatgtgcttgctcctcagctctgctgtttttggtgtaaagtataatttgctagctcacactaccctaacc

SEQ ID NO: 642695 - DNA, 120 bp, Artificial Sequence
  ENSG00000182010_8 (sequence is synthesized)
ttggaaagtgctgaggatagtttcaagacccataatctgtctattaatggaaatgaggagtcttcattttggcttcccctgtatggcaacatgtgctgccgactagttgcccagccagct

SEQ ID NO: 642696 - DNA, 120 bp, Artificial Sequence
  ENSG00000182010_9 (sequence is synthesized)
tgtatggctgaggatgcatttgcaggatttcttaatcagcagcaaatggtagaaggtctgattagttggagaaggttgtattgtgttttgcgaggaggtaaactctattgtttttacagt

SEQ ID NO: 642697 - DNA, 120 bp, Artificial Sequence
  ENSG00000182010_10 (sequence is synthesized)
ccagaggaaattgaagctaaagtggaaccagctttggtagtacccattaacaaggaaaccagaatccgggcaatggataaggatgccaagaaaagaatccataatttctctgtcatcaat

SEQ ID NO: 642698 - DNA, 120 bp, Artificial Sequence
  ENSG00000182010_11 (sequence is synthesized)
cctgttcctggacaagctataactcagatttttgcagttgacaatagagaagatcttcagaagtggatggaagccttctggcagcatttctttgatcttagccaatggaagcactgttgt

SEQ ID NO: 642699 - DNA, 120 bp, Artificial Sequence
  ENSG00000182010_12 (sequence is synthesized)
gaagaacttatgaaaattgagattatgtcaccacggaaaccacctttgttcttgacaaaagaggcaacctcagtctaccatgatatgagcattgattcacctatgaaacttgaaagttta

SEQ ID NO: 642700 - DNA, 120 bp, Artificial Sequence
  ENSG00000182010_13 (sequence is synthesized)
acggatataatacaaaaaaaaattgaagagacaaatgggcagttccttattggtcagcatgaagaatccttaccacctccttgggccacactctttgatggtaaccatcaaatggtcatc

SEQ ID NO: 642701 - DNA, 120 bp, Artificial Sequence
  ENSG00000182010_14 (sequence is synthesized)
cagaaaaaggtactgtatcctgcaagtgagccattacatgatgaaaaagggaaaaagagacaagctccccttcctccttctgataaacttccattcagcttaaaatcacagagtaacaca

SEQ ID NO: 642702 - DNA, 120 bp, Artificial Sequence
  ENSG00000182010_15 (sequence is synthesized)
gatcaattggttaaggacaactggggaaaaacaagtgtatctcagacatcgtctttggataccaaactatcaactctaatgcatcacttacagaaaccaatggctgctcctcgaaaactt

SEQ ID NO: 642703 - DNA, 120 bp, Artificial Sequence
  ENSG00000182010_16 (sequence is synthesized)
ctgcctgccaggagaaatagattaagtgatggtgagcacacagacactaaaaccaattttgaagccaagccagtgccagctccaaggcagaaatccatcaaagacattctggaccctaga

SEQ ID NO: 642704 - DNA, 120 bp, Artificial Sequence
  ENSG00000182010_17 (sequence is synthesized)
tcatggctgcaggcacaagtatagaaaactcttaatgataaaacatttaacaaaatctataactgtgaagcttaattcagaggcattatagaataatgtgtaattatataggtaaatata

SEQ ID NO: 642705 - DNA, 120 bp, Artificial Sequence
  ENSG00000182010_18 (sequence is synthesized)
gtgatttataccaataattaataagctattaggtatagaaaaacattttataatgaagaagtggatttctcttttactcctgatttgcagaatgtaagtgatttctccagcagtgtgcaa

SEQ ID NO: 642706 - DNA, 120 bp, Artificial Sequence
  ENSG00000182010_19 (sequence is synthesized)
gaggcagtttctagacaatatcctaattgttggaagggttaatttattcctgaattagtaccaggcagtgaataagccctaggcagaataaagcattaaaatttcttttggggagagact

SEQ ID NO: 642707 - DNA, 120 bp, Artificial Sequence
  ENSG00000182010_20 (sequence is synthesized)
gtctagtaatttaaaatgtgttaaatatgaaccatattctcattgtgagaattttaatactaatggaatgtttcaaaggttttattcaaaccacaaattatagaatccacccaagaaaat

SEQ ID NO: 642708 - DNA, 120 bp, Artificial Sequence
  ENSG00000182010_21 (sequence is synthesized)
tttcttagcattctggaattctcatctaatggttcactggctctcatctattgtttaactcactagtttataggcctgaccttttaaattcctgggataaattttagaatattaaattct

SEQ ID NO: 642709 - DNA, 120 bp, Artificial Sequence
  ENSG00000182010_22 (sequence is synthesized)
tcatctttaaagggaatttgtaatgtgctattcaaacttgtttccttgatgagccctgaaatactgttgacattaactttcataaatgaagcataacacttactagtttagagaaatggt

SEQ ID NO: 642710 - DNA, 120 bp, Artificial Sequence
  ENSG00000182010_23 (sequence is synthesized)
agatgaaatgctctttacattcaattttctgtgtgtggtgctaatttccattgtgactttggaatttagggaagtgagtagctgatcaacaccttaaaattcatttaatacttatttaaa

SEQ ID NO: 642711 - DNA, 120 bp, Artificial Sequence
  ENSG00000182010_24 (sequence is synthesized)
aagaagatgagagattcaaaaatatcagaaaagttggccatggtaaataattttcagaattcttttttaaaattttaattagatttccttttcctagtaagagttgatgtctgctagtgg

SEQ ID NO: 642712 - DNA, 120 bp, Artificial Sequence
  ENSG00000182010_25 (sequence is synthesized)
tatttttcattaaatgtcatattcttacaacagtgacattggaatcatttccataggaggtaatttccatagcaactaatcatagtgacccaaacaggattataaagtcaagtgaggaat

SEQ ID NO: 642713 - DNA, 120 bp, Artificial Sequence
  ENSG00000182010_26 (sequence is synthesized)
aaatagcagaaaaataccttaaaggaacaaaaaatccattttttataataatgctttttgtaaacaagagcagaacagttttaaaaatctaattagaatttccaaataaaacagtttcca

SEQ ID NO: 642714 - DNA, 120 bp, Artificial Sequence
  ENSG00000182010_27 (sequence is synthesized)
taaggtgtcagcaacagcactaaaaatctcaaatcacactgaaccctaaatgtcattgcaagaaataaaaatttaagaattaaattgctgccctgtgtataatctcttgagatcttttta

SEQ ID NO: 642715 - DNA, 120 bp, Artificial Sequence
  ENSG00000182010_28 (sequence is synthesized)
caaaatgaacacttgaccaaaaaaccacattaatttaaatggagcctttcattattttcagatagcggggtcttttccatttatagagaatgatgtaactgccaggacacttttgtgttt

SEQ ID NO: 642716 - DNA, 120 bp, Artificial Sequence
  ENSG00000182010_29 (sequence is synthesized)
gcccaggactcctagtaagaattgaatcttgagggagtaatgataacaaaaggtttcttgtgactggtaacatcaggacagacagagtttttggtgagaagaaagtactatatgcctgct

SEQ ID NO: 642717 - DNA, 120 bp, Artificial Sequence
  ENSG00000182010_30 (sequence is synthesized)
tgatagcatgtagagatcatcacatgtatggaaaccttaaaaagtaaacttattttttctaactagaaggctctcataagtttctgttatgattgccatttcaataaatgacattaaaaa

SEQ ID NO: 642718 - DNA, 120 bp, Artificial Sequence
  ENSG00000182010_31 (sequence is synthesized)
tctaaaggatattattgtttgaatttttgggttattttttaaaacttcattgctgtttttgacagcatttgtgactgtcattgccactaaattattgagctagaagatgctgcagggaaa

SEQ ID NO: 642719 - DNA, 120 bp, Artificial Sequence
  ENSG00000182010_32 (sequence is synthesized)
attgttttgaagctggcatctaagcattcttttttttttcctagttgatgccttcctttattacaaatcagtattaaaacttccagattatattcttgtcatttttcctcatgcagataa

SEQ ID NO: 642720 - DNA, 120 bp, Artificial Sequence
  ENSG00000182010_33 (sequence is synthesized)
cagcaggaaggacttaaggtgtataagaaaaagaaagtattcatacagaaattacctagcagttgtgccctcagagtagaactttgaaacaggactgaagccctttttacctagaaccat

SEQ ID NO: 642721 - DNA, 120 bp, Artificial Sequence
  ENSG00000182010_34 (sequence is synthesized)
ttaaaagcctgagcaaggaccaccaccccctccccaccaaattattcggtctctttctggggggcccagcttactgtatgttacaagtctttgaaatgggtctggtgtcttcagctcctg

SEQ ID NO: 642722 - DNA, 89 bp, Artificial Sequence
  ENSG00000182010_35 (sequence is synthesized)
ttacaagtctttgaaatgggtctggtgtcttcagctcctgaaatgctaatttaccccttacctaaggagtgtagttataatacagagtt

SEQ ID NO: 642723 - DNA, 120 bp, Artificial Sequence
  ENSG00000182010_36 (sequence is synthesized)
ttccctctgtccgtctctccttccctccttccctccttccttcctttttgtctttgtttctttctctggccccctgtcctctctctctgtctcatccccttttcccactttccttctgtc

SEQ ID NO: 642724 - DNA, 120 bp, Artificial Sequence
  ENSG00000182010_37 (sequence is synthesized)
tctccttcctcccttcctttacagtttaaaaaaaaaatctaaaaatagttaagcactgtgtcaaagagtgtttcaaaagaattgtttgttttctcatttcttaaaccagaagtttatgac

SEQ ID NO: 642725 - DNA, 120 bp, Artificial Sequence
  ENSG00000182010_38 (sequence is synthesized)
aaataaatatgccatgtaatatgaaagctgcttcagctttttatgagctttcacattccttgtttgtccttttaatttgtttcttgatatatgaagactataaacttgaaacaaagagtt

SEQ ID NO: 642726 - DNA, 120 bp, Artificial Sequence
  ENSG00000182010_39 (sequence is synthesized)
agctgtcagctcttgataatataattggggaaacagaatagatattttatgatatgataattctgatgatctaaagataatgtcttagacaattacctttacatttcaagctctgggata

SEQ ID NO: 642727 - DNA, 120 bp, Artificial Sequence
  ENSG00000182010_40 (sequence is synthesized)
taaattacgtagtcagcattaagatagtattatttttaattgctactaagtggtaacttttgtattttaatatcttgcaagggcaaagaaggcatttttaaaattctaaatgcacacctc

SEQ ID NO: 642728 - DNA, 120 bp, Artificial Sequence
  ENSG00000182010_41 (sequence is synthesized)
ctaaggtaaatagtctttcaaaaatatcaggcgtgccaactcttgctgagttttgttaaatcctccttaactgtctgcagtgccccctgacttcttttaaatggatgtgaatatatgtgg

SEQ ID NO: 642729 - DNA, 120 bp, Artificial Sequence
  ENSG00000182010_42 (sequence is synthesized)
aaaactaaatccatttattataaatgccttatctttaccctttgggatcttactaaatgcattttacctgctactatttattaaaaatggaagctgtcttgaattagagatacctcacgt

SEQ ID NO: 642730 - DNA, 120 bp, Artificial Sequence
  ENSG00000182010_43 (sequence is synthesized)
aaggtaggttaagcagtcaagtatttctttaggcttatgttcagcacctcagccccctactgagaagttaattaattcagtccaaaatgaaattatagggcagtttggtgcaatttatgt

SEQ ID NO: 642731 - DNA, 120 bp, Artificial Sequence
  ENSG00000182010_44 (sequence is synthesized)
taaatgccatttgaatgtaatcacctgtgttaccacgaatgaggcacaactatactacatggacagagtactgcattgcaccatgagcaagaactgctctgcaagaaaaatatctgtccc

SEQ ID NO: 642732 - DNA, 120 bp, Artificial Sequence
  ENSG00000182010_45 (sequence is synthesized)
tgtggtctgaatttatcaaaactcattttcttgttaaagagtgaattattgaatagtaattaaactttaactgatgaccatttatattctagtagccatcttcactgttagtcttaaatt

SEQ ID NO: 642733 - DNA, 120 bp, Artificial Sequence
  ENSG00000182010_46 (sequence is synthesized)
ataatgtaaagttgacattttccccttacatttcaaaggcatcactatttttaaatgtttacatatgtttacatgtttgtgtgcaactgcttcattgctattaatagttaaatgaaatct

SEQ ID NO: 642734 - DNA, 120 bp, Artificial Sequence
  ENSG00000182010_47 (sequence is synthesized)
gcatattctggatcatagatgttcttagttaactctgggaaagatgttacctttgggtttttaaaagacaagtcatcatttgaaaatatattagggtgtgttgattttctgacatgcttg

SEQ ID NO: 642735 - DNA, 120 bp, Artificial Sequence
  ENSG00000182010_48 (sequence is synthesized)
tgtaattggctttgtttataatttttattttttaatatgggtcagacttttggattaaaaagtattatatcatggacatacattttttaaagtaccaaaggtatttggtaagcgagccca

SEQ ID NO: 642736 - DNA, 120 bp, Artificial Sequence
  ENSG00000182010_49 (sequence is synthesized)
agtcatgtaattgaaacttctgtacattaaaagaactgattcatgaagacgttttctaactttttctctttaagtgctcctctagactagactgattgaagtagacagtgtggtggaatc

SEQ ID NO: 642737 - DNA, 120 bp, Artificial Sequence
  ENSG00000182010_50 (sequence is synthesized)
agtttaatcagaaaaagacataccaagtagctggtgctaattattataagactaacattctgataagccatggtataattaacattattaaaatgtttacatataatccttcttaaagta

SEQ ID NO: 642738 - DNA, 120 bp, Artificial Sequence
  ENSG00000182010_51 (sequence is synthesized)
tactcttttaaaaatccattgacataaccttacttttagtttagtgatccagaatttccccagagcttaagccactgcagtaaattaggtacgtaggatattcagtcgctactagccaca

SEQ ID NO: 642739 - DNA, 120 bp, Artificial Sequence
  ENSG00000182010_52 (sequence is synthesized)
aggagtctccttattttaatgtacctccctcagtactttattcctgcagagcgcctcagagtgggggagagaaatgagcaatcctggctcagttggattatttcagcattttatttctaa

SEQ ID NO: 642740 - DNA, 120 bp, Artificial Sequence
  ENSG00000182010_53 (sequence is synthesized)
atctgtagtgtgatcagaaatatttaaaattaaaaaaatactttacagagagaggcctactaatcaatgtgcttagagaaacaaactacctttacattcaattaacaacaaaaaaagtta

SEQ ID NO: 642741 - DNA, 120 bp, Artificial Sequence
  ENSG00000182010_54 (sequence is synthesized)
cagaaattttaacaaacatttttctttatctgagtatgggagaaaatactaatgctgacacgtttaataattagaaaagatcattccagatcttatggaaaattgtgttttaaattccag

SEQ ID NO: 642742 - DNA, 120 bp, Artificial Sequence
  ENSG00000182010_55 (sequence is synthesized)
cagtttgctcttgagacatggtaatctcttaatgtaactactaaaggagaggtagattgaaaagatcttgtatatacataattatgtcagatggttcaagatatcaaaataaattgtttt

SEQ ID NO: 642743 - DNA, 120 bp, Artificial Sequence
  ENSG00000182010_56 (sequence is synthesized)
gttgaaaatgaatactttttggtgtcttgcttaaaaatatttttatattttgtttatctactcaaaattatgaatggatgcatttttgtagaacttaatcttaataaacatttaactgaa

SEQ ID NO: 642744 - DNA, 120 bp, Artificial Sequence
  ENSG00000182010_57 (sequence is synthesized)
tcttcttttttaaaagaaagttcttattattggttctttggattcattttatgtttaaatgtttaagtgatctttaaatgtttaatatgattttaaaaatcattttgttcagaagaagtc

SEQ ID NO: 642745 - DNA, 120 bp, Artificial Sequence
  ENSG00000182010_58 (sequence is synthesized)
ttaaaaatcattttgttcagaagaagtccatttctctatctgcagttttctgatgtgaaataaaaatggaaatcttgtaattactattagcagtaaatatttgacttattagatatgacc

SEQ ID NO: 642746 - DNA, 120 bp, Artificial Sequence
  ENSG00000182010_59 (sequence is synthesized)
catttttaaattgttaataaatatagttcagttattaacaaagctatgcatacaacagaatatcctgtaatgttatttgatatagagagaatttaagcataaaacaggatttttatctca

SEQ ID NO: 642747 - DNA, 120 bp, Artificial Sequence
  ENSG00000182010_60 (sequence is synthesized)
tagcaactttatttacaagatagtcctgaagtacatgctatataggaagagcactttgaaattttggggtgttctttttcttatggtgcacttctttcatgtacttcaaagcaataaaaa

SEQ ID NO: 642748 - DNA, 120 bp, Artificial Sequence
  ENSG00000182010_61 (sequence is synthesized)
aaaatgggtgatctcagggctgtttttattgtccctgctcttttacaggctcattttattgtggtcataatacagaacaagaaggaactccttgggtagccatagaaatcatttttaact

SEQ ID NO: 642749 - DNA, 120 bp, Artificial Sequence
  ENSG00000182010_62 (sequence is synthesized)
aacatagtttttcctgccctccttcaaaggttctatgtgcctaaatcagtgtgggatttgtattttagacttttaaagacacgatctttagatctaaatgttaatagctactaactatta

SEQ ID NO: 642750 - DNA, 120 bp, Artificial Sequence
  ENSG00000182010_63 (sequence is synthesized)
atataaaaatccatgtgcatggtttttgccattttcagctatggagctagacaggtgagattttagaggcctagttttgccactcacataacattaaaaaaacctatagtaaaccatatt

SEQ ID NO: 642751 - DNA, 120 bp, Artificial Sequence
  ENSG00000182010_64 (sequence is synthesized)
ttgtagcttctggtccagtgtctcatagtaatagtatagcctggaaaaataaaatgcattgttctgagttataagtagtaattcaggccttcttacaagctgtattgaaccaaaggaatt

SEQ ID NO: 642752 - DNA, 120 bp, Artificial Sequence
  ENSG00000182010_65 (sequence is synthesized)
tatttaggatccaaaacatatccccaaatgcttatataattgaggctaaaaaaattacttttttcttggttatctgaatacatttatttccattatcaactattgctagtgaactttttt

SEQ ID NO: 642753 - DNA, 120 bp, Artificial Sequence
  ENSG00000182010_66 (sequence is synthesized)
ttctgccaaaattaccagttgatgggcccttttcttcacatcattttgctattgtttgttttgatcatggagacaaaaatcagacttttttttccagggaaagaacaatagaagttactg

SEQ ID NO: 642754 - DNA, 120 bp, Artificial Sequence
  ENSG00000182010_67 (sequence is synthesized)
aggaagacaacacatgatttataattttttgagaattctgtaaatattttaaattgtactaaaaataactgctgacaaatgttctacatgttgaaaaatgtgctttttgttatgatgatt

SEQ ID NO: 642755 - DNA, 120 bp, Artificial Sequence
  ENSG00000182010_68 (sequence is synthesized)
gtttttaataagtattcaatatttatgaatctctggtttttctctaaatattgacatttgttagtcattaccaggaatactgcatgtttaaaagttgccaaataataaactataaaaata

SEQ ID NO: 642756 - DNA, 120 bp, Artificial Sequence
  ENSG00000182010_69 (sequence is synthesized)
agaggaaattgaagctaaagtggaaccagctttggtagtacccattaacaagtcattagttttatttgaagacagtctcgaaggaattcaactcgccatatctcagtcctttaaggaaac

SEQ ID NO: 642757 - DNA, 120 bp, Artificial Sequence
  ENSG00000182010_70 (sequence is synthesized)
aagacaacgcgtctccttcctgtattcctagcacccagtacggcacctgacacataatagtgaccttagaagaatatttaagagtcattgagtaaacattttgtagagctgtccatgttt

SEQ ID NO: 642758 - DNA, 120 bp, Artificial Sequence
  ENSG00000182010_71 (sequence is synthesized)
attttccattcagtgtttaccaggtgtctgctatttggacagtcacttcattgttcattagtacatgactttggtaaatatatctcctgtgaagagaaatattataactactatggcatt

SEQ ID NO: 642759 - DNA, 120 bp, Artificial Sequence
  ENSG00000182010_72 (sequence is synthesized)
caacactggtatttcagttactcaactaatccacccactgatggagtgaaccttgaattaaatgctttgaagaataaagtgaatcttgataaaaatcaaaggctgaagaaatcttgtttg

SEQ ID NO: 642760 - DNA, 120 bp, Artificial Sequence
  ENSG00000182010_73 (sequence is synthesized)
acagaaggcatgaacaaaaatgctaaaattaatactgtttgtggagaaacactcattccaccgcagactaaatggagttcatgagtatcaaaatgcctatgtgatcaaaaggcagaaaca

SEQ ID NO: 642761 - DNA, 120 bp, Artificial Sequence
  ENSG00000182010_74 (sequence is synthesized)
gcttctttttactaggtctgttaatattccaggactcataatattgtgcctacatgagcacctgtgtttgtggtaactcaaagtatttgaacaccttatctcatccaacctcaaatttcc

SEQ ID NO: 642762 - DNA, 120 bp, Artificial Sequence
  ENSG00000182010_75 (sequence is synthesized)
tgtgaggtatttaagcaccgagagctcttggtactgttttcaagatgaagcagatgaattagagaggctgttcacacaccaaatttcacagaagcctatggaggaaatgacggggagact

SEQ ID NO: 642763 - DNA, 120 bp, Artificial Sequence
  ENSG00000182010_76 (sequence is synthesized)
taccagttaacacccagttgcagaaatcaatgtcagagcttgaaaggaccttataaacccctgatccaatgtggactttcctagtaagacttctgtttgcagtgacttggttcatttcac

SEQ ID NO: 642764 - DNA, 120 bp, Artificial Sequence
  ENSG00000182010_77 (sequence is synthesized)
caaccacaagaattttaagtaatttttaatcataaaagtaacatagaacatagtaatacatatatacgtacatacatgatacagaaaggtatcaaaaaacaaaaacatatattacttcct

SEQ ID NO: 642765 - DNA, 120 bp, Artificial Sequence
  ENSG00000182010_78 (sequence is synthesized)
cctctaacattccagtgccagtttccaaagattcctattacccagaggtaaccactgttaataatttttaatgtatatttccaaaaattttttatgcatttagaaatgtgtgcatgtggg

SEQ ID NO: 642766 - DNA, 120 bp, Artificial Sequence
  ENSG00000182013_0 (sequence is synthesized)
agtgcgcaggcgcgcgctgcgacgccaacctcggcttctcgccgctaacggcatcgagtctggacgccccgtgacccgcctgggccggagcgggggcggacggcgccttcttggcccttt

SEQ ID NO: 642767 - DNA, 120 bp, Artificial Sequence
  ENSG00000182013_1 (sequence is synthesized)
ctgcctctagcagcggcgccggggtagccggagccagcgactgggaaacggctgcattccactgcgtctccttggcctggctgggcggtcggaggctgatctgccaagattactgtttgg

SEQ ID NO: 642768 - DNA, 120 bp, Artificial Sequence
  ENSG00000182013_2 (sequence is synthesized)
agaccgctgcagcccacgtccacctgatagactatttactacacatagtaggttcagagccgctaaatgtccaagaccatggcgatgaaccttctggaggattggtgcaggggaatggaa

SEQ ID NO: 642769 - DNA, 120 bp, Artificial Sequence
  ENSG00000182013_3 (sequence is synthesized)
gtggacatccacaggtccttgttggtcacaggcatcccagaggactgtgggcaggcagaaattgaggagaccttgaatggggtcctctccccactgggcccgtaccgcgtgctcaacaag

SEQ ID NO: 642770 - DNA, 120 bp, Artificial Sequence
  ENSG00000182013_4 (sequence is synthesized)
atttttgtgagggaagagaatgttaaagctgccctcattgaggttggtgaaggtgtgaatctgagcaccatcccccgtgaattcccaggaaggggtggtgtctggagagtggtctgtaga

SEQ ID NO: 642771 - DNA, 120 bp, Artificial Sequence
  ENSG00000182013_5 (sequence is synthesized)
gaccctacccaggatgccgagtttttaaaaaatctgaatgaattcctggatgccgaggggcgcacctgggaggatgtggtccgcctgctccagctcaaccaccccaccctgtcccagaac

SEQ ID NO: 642772 - DNA, 120 bp, Artificial Sequence
  ENSG00000182013_6 (sequence is synthesized)
cagcatcagcccccagagaactgggcagaagctctgggggtgcttctgggagcagtggtgcagatcatcttctgcatggatgccgagatccgcagccgggaggaagccagggcccaggag

SEQ ID NO: 642773 - DNA, 120 bp, Artificial Sequence
  ENSG00000182013_7 (sequence is synthesized)
gccgctgaattcgaggagatggcagcctgggctttagcagcagggaggaaggtgaagaaagaaccggggcttgcagcagaggtgggttctgccttaaaggcagagacccccaacaactgg

SEQ ID NO: 642774 - DNA, 120 bp, Artificial Sequence
  ENSG00000182013_8 (sequence is synthesized)
aatgccacggaagaccagcatgagcctaccaaacctttggttcgcagggctggagctaagtctcgctccaggagaaagaagcagaagaagaactccaggcaggaagcagtgccctggaaa

SEQ ID NO: 642775 - DNA, 120 bp, Artificial Sequence
  ENSG00000182013_9 (sequence is synthesized)
aaacccaaaggcatcaattccaacagcacagctaacttggaggatcctgaggtgggtgatgctgaaagcatggcgatctcagagccgatcaagggcagcagaaagccctgtgtgaataag

SEQ ID NO: 642776 - DNA, 120 bp, Artificial Sequence
  ENSG00000182013_10 (sequence is synthesized)
gaggagttggctttgaagaagcccatggcgaaatgtgcctggaagggtcccagagagccacctcaggatgcccgggcagaagccgagagcccaggaggcgcctctgagtcagaccaagat

SEQ ID NO: 642777 - DNA, 120 bp, Artificial Sequence
  ENSG00000182013_11 (sequence is synthesized)
ggtggccatgaaagcccaccaaagaagaaggccgtggcctgggtgtctgccaagaaccccgctcccatgaggaagaagaagaaggtgagcttgggccctgtctcctacgtcttggttgac

SEQ ID NO: 642778 - DNA, 120 bp, Artificial Sequence
  ENSG00000182013_12 (sequence is synthesized)
tcagaagatggcaggaagaagccggtgatgccaaagaaagggccaggctcaagaagggaggcatcagatcagaaggcccctcggggccagcagcctgccgaggcaacagcctcaacctct

SEQ ID NO: 642779 - DNA, 120 bp, Artificial Sequence
  ENSG00000182013_13 (sequence is synthesized)
aggggtccgaaggccaagccagaaggctctcctcggcgtgccaccaatgaatccagaaaggtttgatctgggggaccacccatactgaggagttgaaagaacaaggaagaagtaccaagt

SEQ ID NO: 642780 - DNA, 120 bp, Artificial Sequence
  ENSG00000182013_14 (sequence is synthesized)
caaccaagttctctcttgtcactgaataagactttggactctcttagggcccctgttgatagagatctggccctgaggtaaacgataggtgaggtcttgggtgggagggagttggggaag

SEQ ID NO: 642781 - DNA, 120 bp, Artificial Sequence
  ENSG00000182013_15 (sequence is synthesized)
gttggtaagaggattgggaaaattctagaacattcattcccctttatgcatgagcagggtcactgttacactcatccatgttcagcttttctcccccacgccttgctccctcctcggaat

SEQ ID NO: 642782 - DNA, 120 bp, Artificial Sequence
  ENSG00000182013_16 (sequence is synthesized)
ggtcagcgacctctgcaggccctggcatttggaagagctgggtggccctgccatattcttcctcccgccttcctctcgtgtaaccagcggggtaagttaagccaggaccttcgctgcaaa

SEQ ID NO: 642783 - DNA, 120 bp, Artificial Sequence
  ENSG00000182013_17 (sequence is synthesized)
cctggttttattgctccttcagtctccagcttccatcctccagttatctagccaggaggtcccaagagttagttttagggaaaaagaatgtctgcctagacctcaaagtctttgagtttt

SEQ ID NO: 642784 - DNA, 120 bp, Artificial Sequence
  ENSG00000182013_18 (sequence is synthesized)
agagtctgttagtaaaaatggcactttgattcccatttgggatgagccctctcaggaatcctgtggggaaggggggtgattatagggaaggacgcaggcattcctaggtccccagctcta

SEQ ID NO: 642785 - DNA, 120 bp, Artificial Sequence
  ENSG00000182013_19 (sequence is synthesized)
attccatccatctacccaactgtcaccatctttgcaccaaactgtcaccatctttgcagcagaaggtcactactcacattatagtaagaggggaaaaaaatcttttaaaacttggctgtt

SEQ ID NO: 642786 - DNA, 120 bp, Artificial Sequence
  ENSG00000182013_20 (sequence is synthesized)
cagcctgggcagcagagtgagactctctctcaaaaaaacaaaacttggctgttaatgtctgccctctgaattcagacacactatattagaccagaccaccatgtgtcattgtgtgtgtgt

SEQ ID NO: 642787 - DNA, 120 bp, Artificial Sequence
  ENSG00000182013_21 (sequence is synthesized)
gtgtgtgtgtttgcgtgcgcatgtgtagaggagagagcagggtccctgagataatggtttccaaactgtatcgtagccgtccacaaagatgtaatccaaatctatttttctcacgtgttt

SEQ ID NO: 642788 - DNA, 120 bp, Artificial Sequence
  ENSG00000182013_22 (sequence is synthesized)
aaaaaactgaaaagtgactactcagatatgttggaagtcacatcgaagactatcagaatattaccttgtgttcataggttaacttgtttttgtacacgtcttagttatttcaggcatctc

SEQ ID NO: 642789 - DNA, 120 bp, Artificial Sequence
  ENSG00000182013_23 (sequence is synthesized)
tttgcttaaaattgagtttcttgtaaatgtgactgatgagcgaggttagaagtggaagaaattcctgtgcatgttctataatctgacaccctgaaagcaagtttcctttcgtcattcaca

SEQ ID NO: 642790 - DNA, 120 bp, Artificial Sequence
  ENSG00000182013_24 (sequence is synthesized)
tgctcttgttctgccgtgactgttcaggtgtatggtagtaagtaaatgtattaacatggtgaacagtagtaatattctatcatagagtattagcccttgcaagttttcagggcgtctttt

SEQ ID NO: 642791 - DNA, 120 bp, Artificial Sequence
  ENSG00000182013_25 (sequence is synthesized)
ccgacttcagtttttgtgataaagaatgtgaacagttgttagatgttctcagtgattcaactttaaaacaaatttctcgtgatgattcatttcaaaatcctgagtgagtctgactgaaaa

SEQ ID NO: 642792 - DNA, 120 bp, Artificial Sequence
  ENSG00000182013_26 (sequence is synthesized)
atacgagagaaaagagagtggtttccgtttgcagctacacagctgtgtgcatcgacgttctcctggggtgtgtgccaagcgaaacccaggggtgaattggattcttgaagagaccaaagc

SEQ ID NO: 642793 - DNA, 120 bp, Artificial Sequence
  ENSG00000182013_27 (sequence is synthesized)
ctgtaactgtccagcttctaatttcaaaacgggtccattagggcttcgttgtgttaacaagttgacaccatgactagtaaatgtaaacgtgtatgtataaaataaagtttagcaaattaa

SEQ ID NO: 642794 - DNA, 120 bp, Artificial Sequence
  ENSG00000182022_0 (sequence is synthesized)
gtcccctccctgcgccccgccgcgtctcgggaggcggcgtgactcgggagttgccggcgcttcccggcggtggcggcgtctctggccggccttggtgcggcgagccgagcgaggcagctc

SEQ ID NO: 642795 - DNA, 120 bp, Artificial Sequence
  ENSG00000182022_1 (sequence is synthesized)
tgagccgcgcggaaatctggcattttttaaagtttgcgccccacaaagaggaaatattccaaaggtactcaggatgtaaaaggggagatcttcacagatgcctccgtggatggcatggca

SEQ ID NO: 642796 - DNA, 120 bp, Artificial Sequence
  ENSG00000182022_2 (sequence is synthesized)
atccatccatcaatgagaagaccatgatttcttttaattttctgtgtgtttccacattccccagtgagaattcttccacctttttttgtgccatgggaaaaacctgaagggcaggcagag

SEQ ID NO: 642797 - DNA, 120 bp, Artificial Sequence
  ENSG00000182022_3 (sequence is synthesized)
ctgctcccgaacttgtgaccttctctgaggttgcagcggctcttgtagaacatgactctgggacatcacttccttttgttttctttcggagctgaaccaaagaatgtgcaccctctttct

SEQ ID NO: 642798 - DNA, 120 bp, Artificial Sequence
  ENSG00000182022_4 (sequence is synthesized)
ctagtgctgtggtgtctgcttatttttgtatttgtgctttccatccatcttctgtgatcacaaggcattcttaaggttttctagcacgacttgcggacatccagactcgtggggggccca

SEQ ID NO: 642799 - DNA, 120 bp, Artificial Sequence
  ENSG00000182022_5 (sequence is synthesized)
cccatggctcggtaagccagcagcccagggcactggcactaccatgaggcactgcattaattgctgcatacagctgttacccgacggcgcacacaagcagcaggtcaactgccaaggggg

SEQ ID NO: 642800 - DNA, 120 bp, Artificial Sequence
  ENSG00000182022_6 (sequence is synthesized)
cccccatcacggtcaccaggcgtgccccacgtgcaaaggagaaaacaaaattctgtttcgtgtggacagtaagcagatgaacttgcttgctgttctcgaagtgaggactgaagggaacga

SEQ ID NO: 642801 - DNA, 120 bp, Artificial Sequence
  ENSG00000182022_7 (sequence is synthesized)
aaactggggtgggtttttgcgcttcaaaaaggggaagcgatgtagcctcgtttttggactgataataatgaccttggtaatggcttcttacatcctttctggggcccaccaagagcttct

SEQ ID NO: 642802 - DNA, 120 bp, Artificial Sequence
  ENSG00000182022_8 (sequence is synthesized)
gatctcatcacctttccattacggaggcttccccagcaaccccagcttgatggacagcgaaaacccaagtgacacaaaggagcatcaccaccaatcctctgtaaataatatttcatacat

SEQ ID NO: 642803 - DNA, 120 bp, Artificial Sequence
  ENSG00000182022_9 (sequence is synthesized)
gaaggactatccaagcattaaattaattatcaacagcatcacaactaggattgagttcacgaccagacagctcccagacttagaagaccttaagaagcaggagttgcatatgttttcagt

SEQ ID NO: 642804 - DNA, 120 bp, Artificial Sequence
  ENSG00000182022_10 (sequence is synthesized)
catccccaacaaattccttccaaacagtaagagcccctgttggtacgaggagttctcggggcagaacaccaccgacccctacctcaccaactcctacgtgctctactccaagcgcttccg

SEQ ID NO: 642805 - DNA, 120 bp, Artificial Sequence
  ENSG00000182022_11 (sequence is synthesized)
ctccaccttcgacgccctgcgcaaggccttctggggccacctggcgcacgcgcacgggaagcacttccgcctgcgctgcctgccgcacttctacatcatagggcagcccaagtgcgggac

SEQ ID NO: 642806 - DNA, 120 bp, Artificial Sequence
  ENSG00000182022_12 (sequence is synthesized)
cacagacctctatgaccgcctgcggctgcaccctgaggtcaagttctccgccatcaaggagccacactggtggacccggaagcgctttggaatcgtccgcctaagagatgggctgcgaga

SEQ ID NO: 642807 - DNA, 120 bp, Artificial Sequence
  ENSG00000182022_13 (sequence is synthesized)
ccgctatcccgtggaagattatctggacctctttgacctggccgcacaccagatccatcaaggactgcaggccagctctgcaaaggagcagagcaagatgaatacaatcattatcgggga

SEQ ID NO: 642808 - DNA, 120 bp, Artificial Sequence
  ENSG00000182022_14 (sequence is synthesized)
ggccagtgcctccacgatgtgggataataatgcctggacgttcttctacgacaacagcacggatggcgagccaccgtttctgacgcaggacttcatccacgcctttcagccaaatgccag

SEQ ID NO: 642809 - DNA, 120 bp, Artificial Sequence
  ENSG00000182022_15 (sequence is synthesized)
actgattgtcatgctcagggaccctgtggagaggttgtactcagactatctctactttgcaagttcgaataaatccgcggacgacttccatgagaaagtgacagaagcactgcagctgtt

SEQ ID NO: 642810 - DNA, 120 bp, Artificial Sequence
  ENSG00000182022_16 (sequence is synthesized)
tgaaaattgcatgcttgattattcactgcgcgcctgcgtctacaacaacaccctcaacaacgccatgcctgtgaggctccaggttgggctctatgctgtgtaccttctggactggctcag

SEQ ID NO: 642811 - DNA, 120 bp, Artificial Sequence
  ENSG00000182022_17 (sequence is synthesized)
cgtttttgacaagcaacagtttctcattcttcgcctggaagatcatgcatccaacgtcaagtacaccatgcacaaggtcttccagtttctgaacctagggcccttaagtgagaagcagga

SEQ ID NO: 642812 - DNA, 120 bp, Artificial Sequence
  ENSG00000182022_18 (sequence is synthesized)
ggctttgatgaccaagagccccgcatccaatgcacggcgtcccgaggaccggaacctggggcccatgtggcccatcacacagaagattctgcgggatttctacaggcccttcaacgctag

SEQ ID NO: 642813 - DNA, 120 bp, Artificial Sequence
  ENSG00000182022_19 (sequence is synthesized)
gctggcgcaggtcctcgcggatgaggcgtttgcgtggaagacgacgtgagagctgaattgttgctgcacgtgctgggcccgccaatgccgtcatcatcaggattttacaaatctctttgc

SEQ ID NO: 642814 - DNA, 120 bp, Artificial Sequence
  ENSG00000182022_20 (sequence is synthesized)
ttcactcatggtatggaaaaccccaggactctgccactctaggcacacatgaattataaccattttggaatttccttcgtgatgttcgagagctcagcaatggacccctcacagagctcc

SEQ ID NO: 642815 - DNA, 120 bp, Artificial Sequence
  ENSG00000182022_21 (sequence is synthesized)
tctatccgaggccattggagaccccagtttctcaagaattcagctctgctctgagcgtcctggagcttggggatgcagccagctggcctgcactgggtgtggagagaacacctagggaag

SEQ ID NO: 642816 - DNA, 120 bp, Artificial Sequence
  ENSG00000182022_22 (sequence is synthesized)
gcagcctggccctgcccgcctccgccttctggagagcctctgggttctgagtcagcaagccagaggtcatgccacaggcctggctggaacttacacttcacgttccctttttttccccct

SEQ ID NO: 642817 - DNA, 120 bp, Artificial Sequence
  ENSG00000182022_23 (sequence is synthesized)
agagatggggtctcgccgtgttgcacagactgtctgtattcaatggctatcttcacaggtgtgatcataccacattcacttctgaaacactcttgttgcgatcgctaacctcactgggac

SEQ ID NO: 642818 - DNA, 120 bp, Artificial Sequence
  ENSG00000182022_24 (sequence is synthesized)
agagaaccgcagtctttcgagaatggaggctcttcattttttttttctcctttactccaaactcagccctccagtttcttcagatgtaaaccctgttaacgtcactgtttccaaaaggaa

SEQ ID NO: 642819 - DNA, 120 bp, Artificial Sequence
  ENSG00000182022_25 (sequence is synthesized)
aaaaataagtcagtttttggcagcaccttcatctttctgacctcctcctattctgtccttgtggacttatgtttaacatagaaaatgaatgcgtttaaaacaaaaccactttctgcattt

SEQ ID NO: 642820 - DNA, 120 bp, Artificial Sequence
  ENSG00000182022_26 (sequence is synthesized)
aaccagtcctggctctctctctgctgcctcttcatacgttttctcaagaacttcagtttataattggaagagaaatttttgctgttaatgccagaatgagcaacctcaaggaattgaaca

SEQ ID NO: 642821 - DNA, 120 bp, Artificial Sequence
  ENSG00000182022_27 (sequence is synthesized)
cttcttggaaaatctaggtaattcaagccctcatcaggtttacaagatcatcagagaaacagaggattttaatttttagttctggccggctacaggctccatttctctgccttcccattg

SEQ ID NO: 642822 - DNA, 120 bp, Artificial Sequence
  ENSG00000182022_28 (sequence is synthesized)
gaaatagtttatttccacattctccactgcgtgtggtcaaagttcctcacccagcaagggactatagatactcgtgtcccaattccaaaacacaatgcacaagctgaacttgggctgaac

SEQ ID NO: 642823 - DNA, 120 bp, Artificial Sequence
  ENSG00000182022_29 (sequence is synthesized)
gtggcgtgttgagatttggaatgaggtttctaagagccgtgttcttcatggaattttccaggccacttggcagcttggtttaccgatggatgggctagagatcttgtcgtttcttggaag

SEQ ID NO: 642824 - DNA, 120 bp, Artificial Sequence
  ENSG00000182022_30 (sequence is synthesized)
tcacagggaagattgaagagaacgcttgagcatccttggcaacagcccaggtgggacctggatgaagctttgcactcaagtattgtcaagggaagcttcctgtgaaccaaagttctcagg

SEQ ID NO: 642825 - DNA, 120 bp, Artificial Sequence
  ENSG00000182022_31 (sequence is synthesized)
ccaaggtctcgcccaccaaagccagaaagtgcaagcacccgtctacccagctctaacttgtatgtgtgagacagaccaggcttcgggggtaggaggatctgcagttgttcagccgtcttt

SEQ ID NO: 642826 - DNA, 120 bp, Artificial Sequence
  ENSG00000182022_32 (sequence is synthesized)
ctgctggtgttgtctttctgccatcagagaagggacacacagcccgttcgaaggtgtgcagagggctctgagcgccaggatggccagggctgtttttgctactgaaggagcgtgtgtcct

SEQ ID NO: 642827 - DNA, 120 bp, Artificial Sequence
  ENSG00000182022_33 (sequence is synthesized)
gaactcccacttgcagggacagtccccaccttctctatagccggcactgggagcagccgccagcagggaaatctggcctgagcacaaggatgctttagggagagatcacttcagtgtgtg

SEQ ID NO: 642828 - DNA, 120 bp, Artificial Sequence
  ENSG00000182022_34 (sequence is synthesized)
tgtatatttatttgcagtacagtgcgcgcgtgtgtgtgtgtgtacgcgcacgtgtgggtgagtgcgtcttctgagtgggttctgttcagttgctaatgaggctcctccgctctggacaca

SEQ ID NO: 642829 - DNA, 120 bp, Artificial Sequence
  ENSG00000182022_35 (sequence is synthesized)
acccttttatagattaatttctctgccaattaacttgtcattttcagtacatattttactattccacaccaaccataattacaacaagggatttttcttatgcactcctatgcatgtgaa

SEQ ID NO: 642830 - DNA, 120 bp, Artificial Sequence
  ENSG00000182022_36 (sequence is synthesized)
taacatgtggtgtaattctgcttcttacagaagtattactgaaggtattatttccaatattatttggtttattatgcggatcttttttatatatgcagtcccatcccttctgtgccactc

SEQ ID NO: 642831 - DNA, 120 bp, Artificial Sequence
  ENSG00000182022_37 (sequence is synthesized)
aatgccatccagacatggtttttccctccaggggcctttctctccagagggcacttcggctgcctctgcttcctctcattcgaggcccggctcttgctgacagaataggttccgttctgg

SEQ ID NO: 642832 - DNA, 120 bp, Artificial Sequence
  ENSG00000182022_38 (sequence is synthesized)
gcggtggttctcgagcctgccattcaaaaccaaagcaaattggagcatttctcacaacatggtattgaagttcctttttgttctcaaaagttgtgaccgtgttaaattgtactcccttag

SEQ ID NO: 642833 - DNA, 120 bp, Artificial Sequence
  ENSG00000182022_39 (sequence is synthesized)
tcctgtaaggtatgttaagtgaatcgcagttacgctgtacttttattaatatttaacataattaaagatggacccataagagtgacgcctgtggagcgcgtgctcttcctctgcagccaa

SEQ ID NO: 642834 - DNA, 120 bp, Artificial Sequence
  ENSG00000182022_40 (sequence is synthesized)
aaacttttcctcccagcgctcggggagtcaggttgacgcgccctggatgcggggctagaggctcggggctgggcgcgctcccgcggagccggagccgcagaggctcccgggctggactca

SEQ ID NO: 642835 - DNA, 120 bp, Artificial Sequence
  ENSG00000182022_41 (sequence is synthesized)
gtttgttgttattatgcaagcggcattgtgggtttgcgtttcagcataggaacagagagaagcgttttaatgtgcaaatgctgttccccattattcatggatgtaaaagctgaaaactga

SEQ ID NO: 642836 - DNA, 120 bp, Artificial Sequence
  ENSG00000182022_42 (sequence is synthesized)
gacacccagcaattagaatcggcagacatgaggacacccaactctcaaattgtcttaagagcattctcttgagcggtggattgttttgttggtttaaaaaactacccatcaatgattttc

SEQ ID NO: 642837 - DNA, 120 bp, Artificial Sequence
  ENSG00000182022_43 (sequence is synthesized)
aatgcttctttgacagagtctcaattgaaaaacattttctgttgattcctcaatcgtatctcttgttcttccttcagaactatgtctgtaaatttctagcctttttgaatgcaaaaagct

SEQ ID NO: 642838 - DNA, 120 bp, Artificial Sequence
  ENSG00000182022_44 (sequence is synthesized)
gttattggtgaattcagcaccttttagccccgggatagttttccatgctgggctccctgggctggctgtgtacttcaacagcagggcttatgcagcgagcattgccgctgcgtgttccag

SEQ ID NO: 642839 - DNA, 120 bp, Artificial Sequence
  ENSG00000182022_45 (sequence is synthesized)
agtggctttacaagccttgctctgctcagcgtctcgcatagcaaggcaccaacaggcctgctgtggagtcttggaagcccccaggtggtgggacttcaggccaagaggctctgccccctc

SEQ ID NO: 642840 - DNA, 120 bp, Artificial Sequence
  ENSG00000182022_46 (sequence is synthesized)
tttcttactacagaggccgtgggatctgggaggcagcatgcaggggcagcaggtgggattccaggctgccctgttggactttgtagtttggcaaggaagatgccacagggacacaggtaa

SEQ ID NO: 642841 - DNA, 120 bp, Artificial Sequence
  ENSG00000182022_47 (sequence is synthesized)
ccccagagcctgctctggtgccaggtaggaggagtacactttggaaccagccattggtgtgggtcaggtttccagcttggccatttgctggctctgtgactctaggcagttgtctcagcc

SEQ ID NO: 642842 - DNA, 120 bp, Artificial Sequence
  ENSG00000182022_48 (sequence is synthesized)
tttctgagactcagttgctttgtcatacaatggggtaataatgctgctgtaccaggctgttgtgatgggtctgtcttgcattcctgcgttcattcttgccactatgtcccctgcatgacg

SEQ ID NO: 642843 - DNA, 120 bp, Artificial Sequence
  ENSG00000182022_49 (sequence is synthesized)
ctgggtcctggggccacagcaatgccaggacaggtgtggtccttgccttcctgtgcagctggcggggagagaagatggaggctgggcagggagctctggccaccagagaaccacctgaga

SEQ ID NO: 642844 - DNA, 120 bp, Artificial Sequence
  ENSG00000182022_50 (sequence is synthesized)
acggggcttcaggcaggttcttaggagagggaatgtctgtgctgaggcctgaaggagagttggccagggaactgagagcagcgtgtgcagaggcccagtggtcagcaccacctaccatac

SEQ ID NO: 642845 - DNA, 120 bp, Artificial Sequence
  ENSG00000182022_51 (sequence is synthesized)
agaacgcagccagccgcctggtgtgggagatggggggcactgaggcagggggcttgggtgcgtggcacatggggccgcaccacctggtctagcctcagaagaagtctagacatcaccctg

SEQ ID NO: 642846 - DNA, 120 bp, Artificial Sequence
  ENSG00000182022_52 (sequence is synthesized)
agagagatgggacccctcagagggttttaagcagaagatagtgtaggagtggaaaaggaatatctcactactgtgttcatggctgaggcacctataataaaagactaacgcgagaaagca

SEQ ID NO: 642847 - DNA, 120 bp, Artificial Sequence
  ENSG00000182035_0 (sequence is synthesized)
atggggcagccctgccagcccagcccaggctggcccagcttagccacacatgcgccatgaagtaccctttgatgccgctggtgaacgacctcacattttctttcctggttttctggttct

SEQ ID NO: 642848 - DNA, 120 bp, Artificial Sequence
  ENSG00000182035_1 (sequence is synthesized)
gcctccctgtgggtttgctgttgttattgatcatctggctacgcttcttacttagccaagattcagaggaaaatgactccagtgtgtgcttggattgggagccctggagcaaaggcccag

SEQ ID NO: 642849 - DNA, 120 bp, Artificial Sequence
  ENSG00000182035_2 (sequence is synthesized)
ctgagttttgctggaaggggacactccacggccaagagaaggagaggccctgctggtgagcctgctgtgccaggtgaggcccttccaggggccagggggagcctcaaggcccacccaaag

SEQ ID NO: 642850 - DNA, 120 bp, Artificial Sequence
  ENSG00000182035_3 (sequence is synthesized)
ttggttttcctggagtcagcagggcagtggcaatggcagaagtggatgggagagacttgccagggaggcaagaggactttggcaactgtggtgcctccctggaacccccaactcatctcc

SEQ ID NO: 642851 - DNA, 120 bp, Artificial Sequence
  ENSG00000182035_4 (sequence is synthesized)
tcttcagaccgacatgtgaaagcctccagaggtcccagcccttctccagcatcacagatgacctccagccctgcagggagccgctcaagtctgggagggcatgggagcagtgagcaggcc

SEQ ID NO: 642852 - DNA, 120 bp, Artificial Sequence
  ENSG00000182035_5 (sequence is synthesized)
catggggagaaattggccaatttaattcagaggggtcttaaagcagggctgggccggagggtgtgggtccatattaaagaagcaagggtcttcccatacccgggggacccctgacaaacc

SEQ ID NO: 642853 - DNA, 120 bp, Artificial Sequence
  ENSG00000182035_6 (sequence is synthesized)
acagatatgatgcaaacattttaacagcttcatgacaagccatcagacggagggtccgggtctccatgtggtgtgactctcccacagcttagtcacccagatctctcgtgatctgtggac

SEQ ID NO: 642854 - DNA, 120 bp, Artificial Sequence
  ENSG00000182035_7 (sequence is synthesized)
gtggacacagtttccaggtgttttattgttcgtgtgtgcgtgtttcatcacaaaacagggctacagtggagatcattgtgcctttgtactcagatgtttgttaatgaatgaactagtgga

SEQ ID NO: 642855 - DNA, 120 bp, Artificial Sequence
  ENSG00000182040_0 (sequence is synthesized)
agatgtcttggtagtcgcggctctggcgctccgcaccctccgtctgcggcagcgggggctggcggccccggcccctgcccggccccgtcctccaacctcatgcctcagccctaataccgc

SEQ ID NO: 642856 - DNA, 120 bp, Artificial Sequence
  ENSG00000182040_1 (sequence is synthesized)
cgccctcccctgcggggggcctttctccgtgtcccccgcccgccccgtccacttcgggcgccatgaacgaccagtaccaccgggcagcccgggatggctacctggagctcctcaaggagg

SEQ ID NO: 642857 - DNA, 120 bp, Artificial Sequence
  ENSG00000182040_2 (sequence is synthesized)
ccacccgaaaggagctgaatgcccccgacgaggatggcatgacccccactctctgggctgcctaccatggcaacctcgagtcgctgcgtctcattgtgagccgcgggggtgacccggaca

SEQ ID NO: 642858 - DNA, 120 bp, Artificial Sequence
  ENSG00000182040_3 (sequence is synthesized)
agtgtgacatctggggcaacacacccctgcatctggcagcttccaatggccacttgcactgcctgtccttcctggtgtccttcggagccaacatctggtgcctagacaacgactaccaca

SEQ ID NO: 642859 - DNA, 120 bp, Artificial Sequence
  ENSG00000182040_4 (sequence is synthesized)
cgccgctggacatggctgccatgaagggccacatggaatgcgtgcgctacctggactccatcgcggccaagcagagcagcctcaaccccaagctggtgggtaagctgaaggacaaggcct

SEQ ID NO: 642860 - DNA, 120 bp, Artificial Sequence
  ENSG00000182040_5 (sequence is synthesized)
tccgcgaggcggagcggcgcatccgcgagtgcgccaagctgcagcggaggcaccacgaacgcatggagcggcgataccggcgcgagctggccgagcgttccgacaccctcagcttctcca

SEQ ID NO: 642861 - DNA, 120 bp, Artificial Sequence
  ENSG00000182040_6 (sequence is synthesized)
gcctcacgtccagcaccctgagccgccggctgcagcatctggcgctgggcagccacctgccgtactctcaggccacgctgcacggcacggccaggggcaagaccaagatgcagaagaagc

SEQ ID NO: 642862 - DNA, 120 bp, Artificial Sequence
  ENSG00000182040_7 (sequence is synthesized)
tggagcggcgcaagcagggcggcgaaggcaccttcaaggtctccgaggatgggcgcaagagcgcccgctcgctctcgggcctgcagctgggcagcgacgtgatgttcgtgcgccagggca

SEQ ID NO: 642863 - DNA, 120 bp, Artificial Sequence
  ENSG00000182040_8 (sequence is synthesized)
cctacgccaatcccaaggagtggggccgagccccgctccgggacatgttcctctcggacgaggacagcgtctcccgtgccacgctggcggccgagcctgcccactcggaggtcagcaccg

SEQ ID NO: 642864 - DNA, 120 bp, Artificial Sequence
  ENSG00000182040_9 (sequence is synthesized)
actcaggccacgactccctgtttacccgccccggcctgggcaccatggtgttccgcagaaattacttgagcagtgggctgcacggactgggccgcgaggatgggggtctggatggggtgg

SEQ ID NO: 642865 - DNA, 120 bp, Artificial Sequence
  ENSG00000182040_10 (sequence is synthesized)
gagcgccgcggggtcggctgcagagctcccccagcctggacgatgacagcctgggcagtgccaacagcctgcaggaccgcagctgtggggaggagctgccctgggatgagctcgatttag

SEQ ID NO: 642866 - DNA, 120 bp, Artificial Sequence
  ENSG00000182040_11 (sequence is synthesized)
gcttggacgaggacctggagcccgagactagcccgctggagaccttcctggcctctctgcacatggaggactttgccgccctcctgcggcaggagaagatcgacctcgaggctttgatgc

SEQ ID NO: 642867 - DNA, 120 bp, Artificial Sequence
  ENSG00000182040_12 (sequence is synthesized)
tgtgctctgacctcgacctccgcagcatcagcgtcccactggggccccgaaagaagatcttgggggccgtgaggaggcggcggcaggcgatggagcgcccgccggccctggaggacacag

SEQ ID NO: 642868 - DNA, 120 bp, Artificial Sequence
  ENSG00000182040_13 (sequence is synthesized)
agctataaccgggggctcctctccccagaccaaaatgaattgcaagttgccacaacctatggtggggtctcgaggtcctcacagttgccagccctgcagcccccttccccaggagcaagg

SEQ ID NO: 642869 - DNA, 120 bp, Artificial Sequence
  ENSG00000182040_14 (sequence is synthesized)
gagaatgttccggaactccagttctgaggggtcttgaaggccctgagccacccattctgagcagccgtaaaggacatgtagacttgggggaggcctgccccagagggagggcaggggcat

SEQ ID NO: 642870 - DNA, 120 bp, Artificial Sequence
  ENSG00000182040_15 (sequence is synthesized)
cggaactggatgagagtgtgggaggtggatgcgggagggtgcacctgtcccgggcgccgtggcctctcccacccctcccctgatggtcttgttctcttgtgctcaggccagagacttgct

SEQ ID NO: 642871 - DNA, 120 bp, Artificial Sequence
  ENSG00000182040_16 (sequence is synthesized)
cacttcctgcattgttgtgaagggaagagtttgggctgcctcccctcctcccgtccaccccagaggggaagttcctcagccagactcttcagccaaatgccccaactttcagtctgtacc

SEQ ID NO: 642872 - DNA, 120 bp, Artificial Sequence
  ENSG00000182040_17 (sequence is synthesized)
ccatcccaagcatagccagctccccctccttcacctagtggtcaaggcccggagctggaaagccgggttggggtggggtgggggtactgacgcccttcccagctcatccaggggtggagc

SEQ ID NO: 642873 - DNA, 120 bp, Artificial Sequence
  ENSG00000182040_18 (sequence is synthesized)
ctggcctgtcttcctccaacctccccctttttcgttgtgcagcctggccccccagggaccccagagggccagggcgctagatgcaaggtgctagaccaatgggctgcagtattatagccc

SEQ ID NO: 642874 - DNA, 120 bp, Artificial Sequence
  ENSG00000182040_19 (sequence is synthesized)
ccaggcctggcaggcatgcgctgggctagagaaaggtgtccgccaacctcctcagtctcccaggcctgggacaggcagaacagggtgtggctgggtgtcaggcctggggtgggtaagtcc

SEQ ID NO: 642875 - DNA, 120 bp, Artificial Sequence
  ENSG00000182040_20 (sequence is synthesized)
tgcgatgtggacactggagaaagtggatcctctaaactgcagattgtccccaggtcaccagggctgtgtgcgtgtgcatgtttgtgtgcatgtatgcgtgtgtgcatgcatgtgtgtgta

SEQ ID NO: 642876 - DNA, 120 bp, Artificial Sequence
  ENSG00000182040_21 (sequence is synthesized)
agtatgtggtatgtgtgagcacgggtgtgtgcttgggtgtgtgtgttcttgcatacatgtgtgcgtgtgtgtgcacgtgaacgcgtgcgtgtttgtgtgtgtgcatgcatgtgtgtgcat

SEQ ID NO: 642877 - DNA, 120 bp, Artificial Sequence
  ENSG00000182040_22 (sequence is synthesized)
gtgtgtgtgtgcatgcatgtgtgtgtgtgtgcatgtgtgcgtgtgtgcacactcacgttgggtggtgtttggtaggtttccctccaggtctggtagggactgggctgttgcgtgattctg

SEQ ID NO: 642878 - DNA, 120 bp, Artificial Sequence
  ENSG00000182040_23 (sequence is synthesized)
cgtggatcgggggtaagagagctcacctgtgtcccagccctctgatggtggtgagaccaggggaaaggccagctcagagggtggtcacagcatgtgtcctctgacgtatgcccccaaagc

SEQ ID NO: 642879 - DNA, 120 bp, Artificial Sequence
  ENSG00000182040_24 (sequence is synthesized)
tctccagccagactgaggtcacagatgtgggagagtccctgatgagcccgctgacacgtgtgcgcccctttgcaccccatgcagaggtgctctcctcctttctcagccatggccccccat

SEQ ID NO: 642880 - DNA, 120 bp, Artificial Sequence
  ENSG00000182040_25 (sequence is synthesized)
ccctgacctcagcttgggaagcagctcctgctgggagcatggcctcagcccccagcatctcctggggcccccatggctggggcaggggaaagagagccctcaaaggcctctttctggtct

SEQ ID NO: 642881 - DNA, 120 bp, Artificial Sequence
  ENSG00000182040_26 (sequence is synthesized)
gtctgggggttcccattcccacacatgtgcccagagtagggggcatggaggagatggtccctgtcctactgcaggacactgagggcttggctgcctgccaccgccatctggagcccacca

SEQ ID NO: 642882 - DNA, 120 bp, Artificial Sequence
  ENSG00000182040_27 (sequence is synthesized)
cagctcttctccctgttctctgggcctgagcctggggccacccccaagtgccgacttgtttctcccagagccccaggtgctgccccttctctcctgttcctcgtccgtttactgccgcag

SEQ ID NO: 642883 - DNA, 120 bp, Artificial Sequence
  ENSG00000182040_28 (sequence is synthesized)
cccctcctggttcttctggtgctggggtggagcaggctctgtgctcccaccactgtaccccgaatccctcctgcaggctcattgccacttttgtagagaatgttctctatcagtatcgta

SEQ ID NO: 642884 - DNA, 120 bp, Artificial Sequence
  ENSG00000182050_0 (sequence is synthesized)
agggtatcaacggtttctgtacagcacagattatgacagcgtctttcttaagcagatggaatcttggaacgtctcatgcttgggaaggacatggtcagatttgttgtaagaaagactgtg

SEQ ID NO: 642885 - DNA, 120 bp, Artificial Sequence
  ENSG00000182050_1 (sequence is synthesized)
cagaggagtgtggcaaagggatccagaagatgcaaggtattatttagaaaagaagagaatgtttaaatttcatcaaatgaaacatatttttgaaatacttgataaaatgagatgcctgag

SEQ ID NO: 642886 - DNA, 120 bp, Artificial Sequence
  ENSG00000182050_2 (sequence is synthesized)
aaaacgttctacagtgtcattcttgggagttcttgtcatttttctcctttttatgaacttgtacattgaagatagctatgttctggaaggagacaaacaacttataagggaaacatccac

SEQ ID NO: 642887 - DNA, 120 bp, Artificial Sequence
  ENSG00000182050_3 (sequence is synthesized)
acatcaactgaattcagaacgctatgttcatactttcaaggatttatctaatttctcaggagccataaatgtcacctatcgctacctagctgccacacctttacaaagaaagcggtatct

SEQ ID NO: 642888 - DNA, 120 bp, Artificial Sequence
  ENSG00000182050_4 (sequence is synthesized)
tacaattggactttcttcagtaaagcgaaaaaaaggaaactatttacttgagacaattaagtcaatttttgagcaatccagctatgaagagctgaaggaaatttcagtggtggttcacct

SEQ ID NO: 642889 - DNA, 120 bp, Artificial Sequence
  ENSG00000182050_5 (sequence is synthesized)
agcagactttaattcttcctggcgtgatgccatggtccaggatattacacagaaatttgcgcaccatattattgcaggaagattaatggttatacatgctccagaggagtattacccaat

SEQ ID NO: 642890 - DNA, 120 bp, Artificial Sequence
  ENSG00000182050_6 (sequence is synthesized)
cctagatggccttaaaagaaattacaatgatccagaagatagagtcaaatttcgttccaagcaaaatgtagattatgcttttctgcttaatttttgtgccaatacttcagactattatgt

SEQ ID NO: 642891 - DNA, 120 bp, Artificial Sequence
  ENSG00000182050_7 (sequence is synthesized)
aatgcttgaagatgatgttcgatgttcaaaaaatttcttaactgccatcaagaaagtcattgcatccctagaaggaacttactgggtaactcttgaattctctaagcttggctacattgg

SEQ ID NO: 642892 - DNA, 120 bp, Artificial Sequence
  ENSG00000182050_8 (sequence is synthesized)
tgatccgttttaaaccatctctctttcagcacatgggctattattcatcatacaaagggacggagaataagctgaaggatgatgattttgaagaggagtcatttgacattcctgataacc

SEQ ID NO: 642893 - DNA, 120 bp, Artificial Sequence
  ENSG00000182050_9 (sequence is synthesized)
cccctgcaagtctgtacaccaacatgaatgtgtttgaaaattatgaagcaagcaaggcttacagtagtgttgatgagtacttttgggggaaaccaccttcaacaggagatgtttttgtga

SEQ ID NO: 642894 - DNA, 120 bp, Artificial Sequence
  ENSG00000182050_10 (sequence is synthesized)
ttgtatttgaaaatccaattataataaaaaaaattaaagtaaatactggaacagaagatcggcaaaatgatattttgcatcatggagccctagatgttggggaaaacgttatgcctagca

SEQ ID NO: 642895 - DNA, 120 bp, Artificial Sequence
  ENSG00000182050_11 (sequence is synthesized)
aacaaaggagacaatgttctacttacttaagactaggagaattcaaaaatggaaactttgaaatgtcaggtgtaaatcaaaaaattccatttgatatacattgtatgaggatatatgtca

SEQ ID NO: 642896 - DNA, 120 bp, Artificial Sequence
  ENSG00000182050_12 (sequence is synthesized)
ccaaaacacaaaaggaatggctaattattaggagtattagcatttggacttcttagccaattaaatcagtatgttcagtttctgaagcagttcttcctgcttcgtcttttgctacctttg

SEQ ID NO: 642897 - DNA, 120 bp, Artificial Sequence
  ENSG00000182050_13 (sequence is synthesized)
tcttttggagggaaagcaatggatgggatatgttaaaagaaacattaattacattggcagttttcatttatacattgttgacataattttactcttaatacacacttgtatttattttaa

SEQ ID NO: 642898 - DNA, 120 bp, Artificial Sequence
  ENSG00000182050_14 (sequence is synthesized)
cgtctgaagttgaatatcagtctatagctaatgctactttcatttatatttttaaatgttcttagttttaaaatttcaactgattgtcgaaagggtaatatgaaagattttaaatgaaaa

SEQ ID NO: 642899 - DNA, 120 bp, Artificial Sequence
  ENSG00000182050_15 (sequence is synthesized)
aaatttgttggatgatgatttttgaaaaatagtcaccaactgtatatacttcctcaagaactgataattcattatatcatcagatagcttttattaagcatctgtgggaatatacagttg

SEQ ID NO: 642900 - DNA, 120 bp, Artificial Sequence
  ENSG00000182050_16 (sequence is synthesized)
ggtggaatgataatctggtttattttttctgtaaacttaagtttccgttgacttctgtacatctacaatgaatacctcctcatagaagtggtgtctttacataattttttgtgtaggtga

SEQ ID NO: 642901 - DNA, 120 bp, Artificial Sequence
  ENSG00000182050_17 (sequence is synthesized)
actcatgcttccaggctgcacagagcactgttggatctagctgaacgaattgttttctctgtctctgggtatcaacggtttctgtacagcacagattatgacagcgtctttcttaagatg

SEQ ID NO: 642902 - DNA, 120 bp, Artificial Sequence
  ENSG00000182050_18 (sequence is synthesized)
gaatcttggaacgtctcatgcttgggaaggacatggtcagatttgttgtaagaaagactgtgcagaggagtgtggcaaagggatccagaagatgcaagaagagaatgtttaaatttcatc

SEQ ID NO: 642903 - DNA, 120 bp, Artificial Sequence
  ENSG00000182050_19 (sequence is synthesized)
tatggaaaaagaaaaaaaagacttaaaaatatctctcccctgattatttatatgaaaggggatattgttcattgtttaaaaacatttaattgagcacctattgttgataaattttctggg

SEQ ID NO: 642904 - DNA, 120 bp, Artificial Sequence
  ENSG00000182050_20 (sequence is synthesized)
ggaagcagtctttttcaagtttcccttttgaaaaaaaaaaagaagagttaagctcaatattttcaggttacattgagtacccacatttaatagaataaattagggaaggcctatagtagt

SEQ ID NO: 642905 - DNA, 120 bp, Artificial Sequence
  ENSG00000182050_21 (sequence is synthesized)
tagctcattcgtacagacattttcagtatatgcagaaaatttttggaaattgattttatacattttgtattaaaatccatgtgattgaaattattgtgatttatcatatacctttttgga

SEQ ID NO: 642906 - DNA, 120 bp, Artificial Sequence
  ENSG00000182050_22 (sequence is synthesized)
atttaaatgggtatattataaaggagaaaagtaagaaccatagaaattagttgacttttctagaatcaaagatctatttcctagcaaggccagaatgagagatctgatattctgataacc

SEQ ID NO: 642907 - DNA, 120 bp, Artificial Sequence
  ENSG00000182050_23 (sequence is synthesized)
agacaatgctctttttctcgtatgatttctcctgacagatttatgctttgtgttctatttgctacatgcctgtcagataataagttataccatctggaaataggtggtacaattcctgca

SEQ ID NO: 642908 - DNA, 120 bp, Artificial Sequence
  ENSG00000182050_24 (sequence is synthesized)
taaataatattatcctaaataatgtcctaaatgatgcttttttggtataagcacccaaatagtaagcaaacttgactaaacttttcctaatagggattggagagtgtgtctttacaatgt

SEQ ID NO: 642909 - DNA, 120 bp, Artificial Sequence
  ENSG00000182050_25 (sequence is synthesized)
gtccgttaaagtaattcaggacaccttagtgtgtcctaaagacattggttttcagaatgtcctgagcttgtctcttcctttttgttttttaatgaacagcaaaaactaagggatttatta

SEQ ID NO: 642910 - DNA, 120 bp, Artificial Sequence
  ENSG00000182050_26 (sequence is synthesized)
ttaatgaacagcaaaaactaagggatttattataaagggaaatggaaggtgcttcatatatgtttaagaaactcaagtacgtgttcatatagatgactctgtgtgtgtgtgtgtgtgtgt

SEQ ID NO: 642911 - DNA, 120 bp, Artificial Sequence
  ENSG00000182050_27 (sequence is synthesized)
gaaggctagacttttgctggtaagacagaatgaggaaatcttcctgctcttccttttcatactgaaacacaatccttaagatttactggtatgctgtggtgcaaacaacactaggatatt

SEQ ID NO: 642912 - DNA, 120 bp, Artificial Sequence
  ENSG00000182050_28 (sequence is synthesized)
tttattttattcgttctctgcaaataaatgagaaactcagataaaaaatggaaactttttatttcatttataaacagctgttgtgtattttctttgtattcagctactaaagtgttagaa

SEQ ID NO: 642913 - DNA, 120 bp, Artificial Sequence
  ENSG00000182050_29 (sequence is synthesized)
gaaaaacgaacctttcataagaggctaaatattaatattttgtgaggcacctaaatcttacagtcataggaaaatatgaacactgccactaaattattatctttaccttgatttagagga

SEQ ID NO: 642914 - DNA, 120 bp, Artificial Sequence
  ENSG00000182050_30 (sequence is synthesized)
tacttgccagacacctaaaaatgttctattttctttatttttcttatcttttattaaccggctagttgatagtattgtgtgtatatctcagaagttacaaatggcattattttcttcact

SEQ ID NO: 642915 - DNA, 120 bp, Artificial Sequence
  ENSG00000182050_31 (sequence is synthesized)
gtcaatgataaaaggtacacaattgtatgccaaagacatgtaatatcaagagctaggcagactccctgaaatgagttgtaaccccttacatattcttctgggaatggctttctaaagatc

SEQ ID NO: 642916 - DNA, 120 bp, Artificial Sequence
  ENSG00000182050_32 (sequence is synthesized)
agctattggtgtctatcaatgtcttaaaaatgtttcaagaaacattgctgagggtagcagtgaagttggatgtttgctaggaaattatgaaaacaaatgtgactcagagaggtcatttca

SEQ ID NO: 642917 - DNA, 120 bp, Artificial Sequence
  ENSG00000182050_33 (sequence is synthesized)
cattttatctttatatcctctctttactaaacctgtgtttggataagttggtcaatcatccaaggatcctctatgttttctttacagttgacactgggtcaattttctaaggaaaacacc

SEQ ID NO: 642918 - DNA, 120 bp, Artificial Sequence
  ENSG00000182050_34 (sequence is synthesized)
ttgacaaataaagcatcttcattagaggtcaggaggaaaaataactattctctttcaaaagaaaatctgaacaatttttttagcatggcccaatgttctatttcctatatttagaaactt

SEQ ID NO: 642919 - DNA, 120 bp, Artificial Sequence
  ENSG00000182050_35 (sequence is synthesized)
tgaataagggtctagtaatcttgtctcagaggcatagaaacaaaagtacagttattaggtttaactatactcaaactatttgctatttttaaacatttttgctgtaagtttatatatata

SEQ ID NO: 642920 - DNA, 120 bp, Artificial Sequence
  ENSG00000182050_36 (sequence is synthesized)
acatatatataatatatatatacatatatatataattttctttgttaaaaataacaattgaaaaagactggcatgagacatgaatggctgagtcatttaattgccatacaaataaaatgc

SEQ ID NO: 642921 - DNA, 120 bp, Artificial Sequence
  ENSG00000182050_37 (sequence is synthesized)
ttgccatacaaataaaatgctgacaggtttcaagcaaaaaatacagtatgcaccttaaataatgcctcagaattgtataatttaagctcactaaaaaccttacttagtcttaaaattctc

SEQ ID NO: 642922 - DNA, 120 bp, Artificial Sequence
  ENSG00000182050_38 (sequence is synthesized)
cttaggggagccttttcagcagttatggacatcaaagaaaaaagtatcttgtaaaagcacaatgaaatttagaaaatacacattttagtggcaatcacaaatgtcaatataaaagataca

SEQ ID NO: 642923 - DNA, 120 bp, Artificial Sequence
  ENSG00000182050_39 (sequence is synthesized)
taaaatatgttaatgcaagaactttttcatattcattgaaaactataactttgtgctatttataaagtagatattttccaggtatgaaaatataatttggaaaccaacctgtcgtttaga

SEQ ID NO: 642924 - DNA, 120 bp, Artificial Sequence
  ENSG00000182050_40 (sequence is synthesized)
tctatttctttcatatagctacactatgagttgtgaacattccatttcttactgggccagtattctctgggaatttttataatgctatcatagaaaaactgttctgtataataattatat

SEQ ID NO: 642925 - DNA, 120 bp, Artificial Sequence
  ENSG00000182050_41 (sequence is synthesized)
aaaaaatgaaacaaacattttcaaattgtaatatatgatgtggtatggaaagtacctacatttttagatgctcaaatattggcatatttcatgtcagtatttgccaatttgtcaacaagt

SEQ ID NO: 642926 - DNA, 120 bp, Artificial Sequence
  ENSG00000182050_42 (sequence is synthesized)
ttatggcaaagaacatgataccaggattaacattgaaaacactacatccagtgccatctaacaattgaaggaaacagtgtgtaattctcttctttttccttgacaatacatccatcaaca

SEQ ID NO: 642927 - DNA, 120 bp, Artificial Sequence
  ENSG00000182050_43 (sequence is synthesized)
cagtaatggcatcatattactgagtaatagagctcacacttaaactttataatatttattatgggatctactgataaaatgatttaccgttttgtacaaattcaactgattttggggggt

SEQ ID NO: 642928 - DNA, 120 bp, Artificial Sequence
  ENSG00000182050_44 (sequence is synthesized)
ttcttgtaagatttaatattaattttaggataattttatcctgtttcttttgattcatgatcccaaactttctagatcttgcttctgtcattccacgtcttattatgcctcctcagcttt

SEQ ID NO: 642929 - DNA, 120 bp, Artificial Sequence
  ENSG00000182050_45 (sequence is synthesized)
gtgtttcaacaaattttatatgcatgccttttgtcttcatgggagacaaaacagaaggttcatacagacttgattttgacacccagttctgcattaccagcctcccaatatgaggaaatt

SEQ ID NO: 642930 - DNA, 120 bp, Artificial Sequence
  ENSG00000182050_46 (sequence is synthesized)
tacttaaccttcttgaaactcagtttctacatctgtgaataggaataattttacctcatatgtttttaaaggtagcaattttaccttgtagctccttgtagagctggaattgagataaca

SEQ ID NO: 642931 - DNA, 120 bp, Artificial Sequence
  ENSG00000182050_47 (sequence is synthesized)
taaactaggcacacaataaatatttgtttcctttttatccatgtcacgtatatgtaacaggatatgaccctggaaaacattaccagaggccttcattgtaatcaataacaattataaaat

SEQ ID NO: 642932 - DNA, 120 bp, Artificial Sequence
  ENSG00000182050_48 (sequence is synthesized)
ttactgccctttaaaaatgttattcagcctaccttttcatattttgtccagagaatatcatgtggaattatacagacactttcctaaaatcaatatatattcctgtcattctaatttatt

SEQ ID NO: 642933 - DNA, 120 bp, Artificial Sequence
  ENSG00000182050_49 (sequence is synthesized)
actctagaaaccttatcaaaaatatcaaaattgcccctagtgctctcatcacaaataataatattcatttctgttttaagaaatcttgatccatttacattgaaaaacaaagaaacataa

SEQ ID NO: 642934 - DNA, 120 bp, Artificial Sequence
  ENSG00000182050_50 (sequence is synthesized)
agtcatttcctagtttctaagatgttgtttagaatctaccttaagctcagaaatgcagtcttcagaatctttttactttttttttttaatgtcaggatccggttctctggcatcttttct

SEQ ID NO: 642935 - DNA, 120 bp, Artificial Sequence
  ENSG00000182050_51 (sequence is synthesized)
atcattggcaaaagttatcaatgcactgacctataaattaccttggcactgatgtttgaaataggtatcttatctgctagtctactttgagtttcattgttgagttttccattactttga

SEQ ID NO: 642936 - DNA, 120 bp, Artificial Sequence
  ENSG00000182050_52 (sequence is synthesized)
atttctttgttcagattggggttattctttttaggaagaaaaaggccataacaaaattcaatgtgattagttattgccatttattttttgtttgcttttaaactttttttttatttatcc

SEQ ID NO: 642937 - DNA, 120 bp, Artificial Sequence
  ENSG00000182050_53 (sequence is synthesized)
caaacagaggatatatcttttattactttttggcatgctttgaaatgatttcattattgcatatgtgcatgtgtgtatctacatatggttaatctctcaatctgtgtgtatgtatatata

SEQ ID NO: 642938 - DNA, 120 bp, Artificial Sequence
  ENSG00000182050_54 (sequence is synthesized)
tgtatatatgtatacatacttgaatattatgtgaatatgtgtgtatatttgtgtatatatatacatatatacatgtatgtatttgtatatgtgttgtgtaagtgtgtctgtgtgtatgag

SEQ ID NO: 642939 - DNA, 120 bp, Artificial Sequence
  ENSG00000182050_55 (sequence is synthesized)
agtgtgtctgtgtgtatgagagaaagacagaaggatatgcaccatttgcattattttttagcctttacacctccacttattcttggattttcctgacacactgtcctcctggttgtgttc

SEQ ID NO: 642940 - DNA, 120 bp, Artificial Sequence
  ENSG00000182050_56 (sequence is synthesized)
ctcttctgaacttgcttttgctttcatgttctcactcaaatcttttatacatgacatcctttgaaaatcacagcacattagagatctttgtgcatccttttagatactttaaatttatta

SEQ ID NO: 642941 - DNA, 120 bp, Artificial Sequence
  ENSG00000182050_57 (sequence is synthesized)
aaagtgtactagaggaggccatctctctcaaaacagaatttttcttttagagtttcaggtttatggtttttatttgaattctttaacattaaaagatcaaaatatgagttgcatagcatt

SEQ ID NO: 642942 - DNA, 120 bp, Artificial Sequence
  ENSG00000182050_58 (sequence is synthesized)
ctctttctaagctataaaaatattaagataacaaggttgcactttcccaaagttctagtcccttccacctcattaatctgttcatcacatttactccaagtccagggtagaatttgcttc

SEQ ID NO: 642943 - DNA, 120 bp, Artificial Sequence
  ENSG00000182050_59 (sequence is synthesized)
aataatcccaatattttctgagatgtttaatatcctatttttaacattgaaattgaaatgtatgtttgagaccatttgccagataactggatctgaatatcttttctgaaaaacatggat

SEQ ID NO: 642944 - DNA, 120 bp, Artificial Sequence
  ENSG00000182050_60 (sequence is synthesized)
ttgagaccaaagcagtttttgatttgactgttgtttcagctttcatttcactctgtctagacggtctcttagaagatttaccaaaaagttaaattgattatgtgagaaagtgataggtaa

SEQ ID NO: 642945 - DNA, 120 bp, Artificial Sequence
  ENSG00000182050_61 (sequence is synthesized)
attgtatatgaccatagaagtacaattaaattaagaatatagcatgatcaaattttcacattatattggattaaaaagtaccctaagtagccatctccttaaagtaggtgagccaaagac

SEQ ID NO: 642946 - DNA, 120 bp, Artificial Sequence
  ENSG00000182050_62 (sequence is synthesized)
taataaaatattcaatatttttctataaaatacaaatttccatgaggcacacatacattaaatttaatataaagagaatcattactttatttaagagttgtttaaaggtgcacaacaaca

SEQ ID NO: 642947 - DNA, 120 bp, Artificial Sequence
  ENSG00000182050_63 (sequence is synthesized)
aacagtgagttaccaatattcagaaccttagtctataatttcaatgtactgtaagttactacagctttaaccacaatagctggcataacctaaatcattctgcccaaatacaggtaatta

SEQ ID NO: 642948 - DNA, 120 bp, Artificial Sequence
  ENSG00000182050_64 (sequence is synthesized)
tagttttgatgtataaaaattaccaaaataaatgcatatataaagcaatagaggctgagagtgttcataattgaaagctaactattgcaaaaatattttaaatatttaatttatagtgca

SEQ ID NO: 642949 - DNA, 120 bp, Artificial Sequence
  ENSG00000182050_65 (sequence is synthesized)
ctcgaagttctggaagagacgtaggatttgtctcttccaccctttccctcactttaccgtttattatgaaggtaccaaaagtatggcacagagatatgtggcagttccacatatctcaat

SEQ ID NO: 642950 - DNA, 120 bp, Artificial Sequence
  ENSG00000182050_66 (sequence is synthesized)
caacaaagctctaactctattagaaactagacatttaaaaagtactttttttgtaacttcatctgagtcaggtttctcattgaataataatctgtcagttttgtctatagtatgttccaa

SEQ ID NO: 642951 - DNA, 120 bp, Artificial Sequence
  ENSG00000182050_67 (sequence is synthesized)
ttggaaaatgtttaaggtagtacatgcctcttttctccataaaataccccacatttgtttaactatttgacatagtcctattttttccatctttaataattgataaaattttccctactt

SEQ ID NO: 642952 - DNA, 120 bp, Artificial Sequence
  ENSG00000182050_68 (sequence is synthesized)
ttaaacatatgtatgtattttctgccacacttaaactttgttattccacgttgtaacttacttcatcaatgagtgaaagtatagttccaaaaagttagaataattatctcagatccttta

SEQ ID NO: 642953 - DNA, 120 bp, Artificial Sequence
  ENSG00000182050_69 (sequence is synthesized)
tcataattgtccaattatctcagatcctttatcataattgtccatcctttaatgtaatccggttttcaatacaagtaacacttgcattcttacaactgtgcatttttggtcactaaagga

SEQ ID NO: 642954 - DNA, 120 bp, Artificial Sequence
  ENSG00000182050_70 (sequence is synthesized)
ccatgtgacgatatcagtagttgtcaggagttattcactacccttagaaaataaactcggtaatgtaaactatatcccacactttaacaattaatactgttgaatgacattgaaggattg

SEQ ID NO: 642955 - DNA, 120 bp, Artificial Sequence
  ENSG00000182050_71 (sequence is synthesized)
tatctttttttaataaagaagcaatatattaaaaataattaaaactcctaaagtctttttttttgttttagaaatcagtctcaattttcaaaagggcatttgatatctgctaataaaatg

SEQ ID NO: 642956 - DNA, 120 bp, Artificial Sequence
  ENSG00000182050_72 (sequence is synthesized)
aacaaatagtttttctttaaatgaaaatatctataagcttagctgtgtgtagaagtacataataaataagttgtccattttgaataaaaattaaaatcctattaatgcagttgtaacttc

SEQ ID NO: 642957 - DNA, 120 bp, Artificial Sequence
  ENSG00000182050_73 (sequence is synthesized)
tcttcttaacatttcttaagctctaaaacaaacataattagacacattttctgttgcatgtggcatctttacccaccataatttggtaatcagtcatatcaaaatcacttacaagaacca

SEQ ID NO: 642958 - DNA, 120 bp, Artificial Sequence
  ENSG00000182050_74 (sequence is synthesized)
actatttttggaaaaacatttagaaaatttgtcacaaattgtcaagaagattttcaagacatatatatgaattgtctgtaatgtaatggttggggatattttcattaaatccataaacca

SEQ ID NO: 642959 - DNA, 120 bp, Artificial Sequence
  ENSG00000182050_75 (sequence is synthesized)
atgtatgtatgctgccctctaactttctgctgagttactgtagtcaatggtaaatatagtcaaagtagaaaagacacattcaccctgaatattcccaacaacctatctctcattcaattc

SEQ ID NO: 642960 - DNA, 120 bp, Artificial Sequence
  ENSG00000182050_76 (sequence is synthesized)
tgactattgacaaagtactcctttcaattattgtggtaaggaggcctttctgagcatccagatgtgtaaaaataacaacaggggaaatgttacaaacatgaggtaaaaggatgcagagga

SEQ ID NO: 642961 - DNA, 120 bp, Artificial Sequence
  ENSG00000182050_77 (sequence is synthesized)
aaagttgtacttcatgattttgcctcaagcaagttcttctttcctgtcagcattgcaaattaccatagctcgacttgcttgtattcaagcaaatcaaaacttgactccctgagagggtca

SEQ ID NO: 642962 - DNA, 120 bp, Artificial Sequence
  ENSG00000182050_78 (sequence is synthesized)
aaagacaattttggtacgtatctagtgtttttacttactagaacaaacaggtcaagtttattcttaatgaagttaaaatttcaaattaaacctgaagctctagtgttttccattttacta

SEQ ID NO: 642963 - DNA, 120 bp, Artificial Sequence
  ENSG00000182050_79 (sequence is synthesized)
agtggataaacacttttctgccatgggatgaactacaatgagatgtttgaattgatttgggcaattgatttgggcaatgatgagtcatgtgtttgctacaaaagtgatacaaaatataag

SEQ ID NO: 642964 - DNA, 120 bp, Artificial Sequence
  ENSG00000182050_80 (sequence is synthesized)
tgtccttcaagttaaagcaatctaaaccgatcatctttgaaaagttaacaacatattttgtaatatttgtttcctagcaaatttttcagttgtccaaaccaaggtaatgtagataaagct

SEQ ID NO: 642965 - DNA, 120 bp, Artificial Sequence
  ENSG00000182050_81 (sequence is synthesized)
acatattttcactcagcgtaccaccaaataactgggtgcccaatagtgttgatctgatgcactactaaaattagttaccataaaaattattttcttttataagaagaaagtgaaatttgt

SEQ ID NO: 642966 - DNA, 120 bp, Artificial Sequence
  ENSG00000182050_82 (sequence is synthesized)
tcaatgttaattttttatgaataattaaatttattataaatgcactaatttttcaacattcttctgattttcatcagtaaattgaataaccattgttgcaatgaaatttacatattgctc

SEQ ID NO: 642967 - DNA, 120 bp, Artificial Sequence
  ENSG00000182050_83 (sequence is synthesized)
attgaataaccattgttgcaatgaaatttacatattgctctcataatatgaaattttacaaggtataatttcacttaacacaaacaatagtcctcataccactttttcattttaacttta

SEQ ID NO: 642968 - DNA, 120 bp, Artificial Sequence
  ENSG00000182050_84 (sequence is synthesized)
atctcattatttatgtgattaagtttgcaattttagccactcatgtgttaggagcaatagagattgacattatgtaggtaggaaaatacatttttagtaacttaagaaacaagttgtaca

SEQ ID NO: 642969 - DNA, 120 bp, Artificial Sequence
  ENSG00000182050_85 (sequence is synthesized)
ttagtgaatttattatcttgctgtataaactttaataaaaacaattatttttatttaaattatttaaggttcctctatttgacttcaaagcaaaataatatctgaattgtacaagcactg

SEQ ID NO: 642970 - DNA, 120 bp, Artificial Sequence
  ENSG00000182050_86 (sequence is synthesized)
tctgaattgtacaagcactgtgaatttgtaatagtctaatcacagtctaatcactaaattcaattagtactttactaaatttcttacagtatgctcaggacaaataatttattgaaatga

SEQ ID NO: 642971 - DNA, 120 bp, Artificial Sequence
  ENSG00000182050_87 (sequence is synthesized)
gtatactcaggatggagttattttcatgcaaacttaaaaattacaagacatgtttagaagaattatagctggataacactaaacattcacaagttttaagttagcataaggggatttata

SEQ ID NO: 642972 - DNA, 120 bp, Artificial Sequence
  ENSG00000182050_88 (sequence is synthesized)
agtaatgtgcctacgttcataatcaatttaacagttttcactaacttgacccaataatttagggtgtatttccagaccacaagataaaactaaattttgtccatttttaccagatgattc

SEQ ID NO: 642973 - DNA, 120 bp, Artificial Sequence
  ENSG00000182050_89 (sequence is synthesized)
accagatgattcaaaatttaccatttgattcatttcttaataaaactgcctgtcaatctactagactaaataagaatataaataattcaatattatttatataaacaaaatcaatggaaa

SEQ ID NO: 642974 - DNA, 120 bp, Artificial Sequence
  ENSG00000182050_90 (sequence is synthesized)
tctaatttaatcaatgcctgtgacttagcaaagatattcagttcaatttaacaatctttatgaattaatatttccttaggaattatgtagctaaattatattaataatccatatttattg

SEQ ID NO: 642975 - DNA, 120 bp, Artificial Sequence
  ENSG00000182050_91 (sequence is synthesized)
aagggtaaaggccacagagtgagactaaattatctaggtccagagaaaaggcatctagggcaataaggaaacgaaacaaatataacaaataacttctaatttacagatcacttaatgtaa

SEQ ID NO: 642976 - DNA, 120 bp, Artificial Sequence
  ENSG00000182050_92 (sequence is synthesized)
gctcagccaagaacaatgcttactacataaatatgttccaagcaactatgagacactgtgtgaagatttcatgtgcatttcactgtctatttaatagattaaacaaccatataaggtaag

SEQ ID NO: 642977 - DNA, 120 bp, Artificial Sequence
  ENSG00000182050_93 (sequence is synthesized)
aggtattaaaaaagctaaagagcatatgaaaaatagggttttactaacttgtccaaggtcacataactaataaatgaaagagagagcattggatttcaggtttgtgtaattcaaaatcta

SEQ ID NO: 642978 - DNA, 120 bp, Artificial Sequence
  ENSG00000182050_94 (sequence is synthesized)
tgccccttatcactattatacattgcctcctaactataataataatttattgaaaacccatttgtctaagatgggattttctggatgatatgactatattaaaataacattaaatagttg

SEQ ID NO: 642979 - DNA, 120 bp, Artificial Sequence
  ENSG00000182050_95 (sequence is synthesized)
aaaaatgaatttaaataattagtttcttcatgtaaaacatttttttctcattttttaaacttgaacatctaaaacacttgcttctgtaattccactgaaccacaacctaatttctgttat

SEQ ID NO: 642980 - DNA, 120 bp, Artificial Sequence
  ENSG00000182050_96 (sequence is synthesized)
tccaaaaagaaaataaaaactcatgggctctgggtacactaaaagactccaaaaattataactttgtattaatcatataatagtctttcataacaccagccccaaacataccaaactggt

SEQ ID NO: 642981 - DNA, 120 bp, Artificial Sequence
  ENSG00000182050_97 (sequence is synthesized)
agttagacagtatgtatgcaacattttttgtgtgattaactatgtttctaaatttcagctattatttcggatgttggaaaacatcagtaaaccccaaagttgtgtttattggcctatagc

SEQ ID NO: 642982 - DNA, 120 bp, Artificial Sequence
  ENSG00000182050_98 (sequence is synthesized)
ttacatgaactgagtgtttaatatgtatttggtactctcctaatcggtacttccattacctatgaaagtaatgattataacaagtcatcatgcaaaagaatcatcttttcaatatattga

SEQ ID NO: 642983 - DNA, 120 bp, Artificial Sequence
  ENSG00000182050_99 (sequence is synthesized)
aaatgtgtgtttcagactactgaattcttccctgtaaatctaggatagatctaggaattggcactttcaatgtattttagttaacactgatgcagattgtccattcactccttttagaaa

SEQ ID NO: 642984 - DNA, 120 bp, Artificial Sequence
  ENSG00000182050_100 (sequence is synthesized)
cactacattacatccttacaagtctatgaagtattaaaacagaaatgactattattattgctacttcagtgatgaagaatctcaaagtttgagttaagtgatgtatcaaaactctgacct

SEQ ID NO: 642985 - DNA, 120 bp, Artificial Sequence
  ENSG00000182050_101 (sequence is synthesized)
tgttagtgaaatattaagcccagttcatctcaacattattaacctctgctcacacttgtctaaattactagtttttaagtctggctgttcattaacatctctggggaagaatttcaccca

SEQ ID NO: 642986 - DNA, 120 bp, Artificial Sequence
  ENSG00000182050_102 (sequence is synthesized)
ttcctgagctccatgctcagagttatcataattgttctggagtttccaggcatcagcatacttttaaaattcttcctaagtgatcctaatgtgcagacagatttgacaaccacggagcaa

SEQ ID NO: 642987 - DNA, 120 bp, Artificial Sequence
  ENSG00000182050_103 (sequence is synthesized)
ctaagactgtaccacagtaaaattccaaaacttcccatttatccagtttgaaagattatagattagaaaacatgatgacaagcgtagattattctgtgttgtttcctgccctttttaggt

SEQ ID NO: 642988 - DNA, 120 bp, Artificial Sequence
  ENSG00000182050_104 (sequence is synthesized)
atttcaatactattattgttgtactgaaaaataaaagttccagtcaatttttatggttttgctgggtttatagagaacactctgcatgccttcctattgaatctgggactctcgtttttg

SEQ ID NO: 642989 - DNA, 120 bp, Artificial Sequence
  ENSG00000182050_105 (sequence is synthesized)
gagaactacgtaagtgatctgttttcctgagtcttgacatatgcaccttattaattagagactataaatccactttttaacacataaaatctaatgatgacatctttgtagatattgaaa

SEQ ID NO: 642990 - DNA, 120 bp, Artificial Sequence
  ENSG00000182050_106 (sequence is synthesized)
ctgtttgtaaactgagctgccttcctctttccacaaaattaactaaacatattcaagaaagaaggagaaaaactatcagttttccacagtggactttttttcataaatccttcaaatgtc

SEQ ID NO: 642991 - DNA, 120 bp, Artificial Sequence
  ENSG00000182050_107 (sequence is synthesized)
agcatgtatgccttgtctcatttagtcatagcccatatgatccaaatctccaatttatttgtttttctttttccaagaactgggtactttaaaaatttgtcaaatttttaaatttcagat

SEQ ID NO: 642992 - DNA, 120 bp, Artificial Sequence
  ENSG00000182050_108 (sequence is synthesized)
agctgaaacagaacaagtcatattgacttgctctaagtgtttaaaaggtttgaggttattgatataggcctcaatatatttccacaaatgaaataatgtatttacatagagatctaaaaa

SEQ ID NO: 642993 - DNA, 120 bp, Artificial Sequence
  ENSG00000182050_109 (sequence is synthesized)
gtgtacgaaacttgagatagctatttgagtcaagaaaaacaaggactgtgaatagtgtaaattatgtaaatatacacagataattcacacacacatattcacacatagttccaaggattc

SEQ ID NO: 642994 - DNA, 120 bp, Artificial Sequence
  ENSG00000182050_110 (sequence is synthesized)
ccctatatcaattccaactcaaaatttctcagtcatttctggctaaagagaaacatgtccatttaattaaaatcacttttaaaaaatctgatcatctattctttatgagatcaatgaata

SEQ ID NO: 642995 - DNA, 120 bp, Artificial Sequence
  ENSG00000182050_111 (sequence is synthesized)
cattattttaatgctctgtcttatttaaaatatttttctacatagtgttgctagctaaaatgaggcttttttaaataaatggatacacctcaaaataataatttgagatcagtttcatct

SEQ ID NO: 642996 - DNA, 120 bp, Artificial Sequence
  ENSG00000182050_112 (sequence is synthesized)
tggacttatatgattttcagattttatctgcataaaattagattttctggaaaactaatttgtattacttattttctctgtataaaccttgctgaaaatgaaaactaataagcttgaatt

SEQ ID NO: 642997 - DNA, 120 bp, Artificial Sequence
  ENSG00000182050_113 (sequence is synthesized)
tatgggttttatgtattttaaaacgtaatgtatagagatttcttataattatttgacagcttcaagataaccagttttttctttaaacattccactgattaatacaaaaagtaacatttt

SEQ ID NO: 642998 - DNA, 120 bp, Artificial Sequence
  ENSG00000182050_114 (sequence is synthesized)
tttcatgagatgaaatgaaacttgttcttaggcaaacatcacttaattaaagcaatttatagtgaatacactcaattaactgattatgaacctgcaacaccaaaagatttaccagatttg

SEQ ID NO: 642999 - DNA, 120 bp, Artificial Sequence
  ENSG00000182050_115 (sequence is synthesized)
ttcacaattttactgctagctgatatcaaataagaaaaagacaaatcaatgttatatcttcaggaactaataacttttttcatcctgcaagtttgtgaattcaaaaaaactattttcaaa

SEQ ID NO: 643000 - DNA, 77 bp, Artificial Sequence
  ENSG00000182050_116 (sequence is synthesized)
ctatccctcccccctcccctgaccccacaacagatgttcagttcccacctatgagaacatgcagtgtttggtttttt

SEQ ID NO: 643001 - DNA, 86 bp, Artificial Sequence
  ENSG00000182050_117 (sequence is synthesized)
aagaactaagaatttttaaaaagattttggttatgtaattagagtgcacaatagaataaaacagccaggttttatattttcactgg

SEQ ID NO: 643002 - DNA, 120 bp, Artificial Sequence
  ENSG00000182050_118 (sequence is synthesized)
cacaatagaataaaacagccaggttttatattttcactggcaaatgataaagagacaactttgattaaatactcataatttttataaaacctccaaagtttcaaagtaggtagatgatgg

SEQ ID NO: 643003 - DNA, 120 bp, Artificial Sequence
  ENSG00000182050_119 (sequence is synthesized)
gtaataattaaatagagtgacagtgttatatgccaggttaaaaaaaaaagagacatgcggcttcatccacaagcttagcaaaatatgagaaagtaagaaactgtggccaaatcagataaa

SEQ ID NO: 643004 - DNA, 120 bp, Artificial Sequence
  ENSG00000182050_120 (sequence is synthesized)
cataaatgagaataagttgtagaaactgaccttcaagttaataattaaatcagatggtatcattttcctccatctggttattattgtttagatttttaatagtacaaaaataaatgtttt

SEQ ID NO: 643005 - DNA, 120 bp, Artificial Sequence
  ENSG00000182050_121 (sequence is synthesized)
atgaattattttggatgcaattacagtaaataaccataatataaaatgtctcataataggaaaataatgcctgacacttttaattacttaacatacctttttatacattttttaatgtca

SEQ ID NO: 643006 - DNA, 120 bp, Artificial Sequence
  ENSG00000182050_122 (sequence is synthesized)
tttatttggcagctatttaaggagtgccctctgtatcctgggccatctctttctatccagagtcctacaagtcaccttgtatcattattaggatatagtataaaaatttgtccactttta

SEQ ID NO: 643007 - DNA, 120 bp, Artificial Sequence
  ENSG00000182050_123 (sequence is synthesized)
aatggagaaataatacagataagtaaaaaaatgatgtaataatttgagttctgtacatgactcagagacttggacagaattgacaattctaagtttttaagttaaaccaaagctgaaatt

SEQ ID NO: 643008 - DNA, 120 bp, Artificial Sequence
  ENSG00000182050_124 (sequence is synthesized)
tctaatcatttagaagctaggaaaagttctgtttcaaattcaattgatcacttcatgaacagtttgttcataattacttcttctctgcctttcagcgtagtcttgttcaattgttcagag

SEQ ID NO: 643009 - DNA, 120 bp, Artificial Sequence
  ENSG00000182050_125 (sequence is synthesized)
ctgggattacatgcgtgagccaccgcgccgggcccagagtgtccttattcccaagttcgtgattttcataatagtaagagaacaaaaaacaaatcttacaagcaataaattttataaata

SEQ ID NO: 643010 - DNA, 90 bp, Artificial Sequence
  ENSG00000182050_126 (sequence is synthesized)
ttattcccaagttcgtgattttcataatagtaagagaacaaaaaacaaatcttacaagcaataaattttataaatagtcttctcttaaga

SEQ ID NO: 643011 - DNA, 120 bp, Artificial Sequence
  ENSG00000182050_127 (sequence is synthesized)
cttaaagtataataaaaataaacaaataaataaatattcaacacctcactctaattggaaaggaaatgtgcctacagaagttaaagcacattctatgagttttaatcttaggtgccaaga

SEQ ID NO: 643012 - DNA, 120 bp, Artificial Sequence
  ENSG00000182050_128 (sequence is synthesized)
aggatccatgacctccacatttgacagagaatagaaagactccacggttttcatcataatccaagggaggtcagtaatagtttatttgcatttctcgagggctctctggggcctcactat

SEQ ID NO: 643013 - DNA, 120 bp, Artificial Sequence
  ENSG00000182050_129 (sequence is synthesized)
cttacataaaagtgagtttaatcataggactttcagacattagcccacagatgggacatatattttgggatggagaacttttaataaatcacattacctaggtggcctctcattctactt

SEQ ID NO: 643014 - DNA, 120 bp, Artificial Sequence
  ENSG00000182050_130 (sequence is synthesized)
ctccatatggcagactctgtaggaaaaaaaaatgcttcctataatgtttcttctttaccacagaactgtcagaggaaacagccgagaaaaacttaaaactaagctacaatatttggcaaa

SEQ ID NO: 643015 - DNA, 120 bp, Artificial Sequence
  ENSG00000182050_131 (sequence is synthesized)
aataatggtagttttcagaggagaagcaatttttctggcgtatatgtaggataagagtatcttaccttccttaaataatgttatctttaccagtaaacatgatgtatttgccttaaccta

SEQ ID NO: 643016 - DNA, 120 bp, Artificial Sequence
  ENSG00000182050_132 (sequence is synthesized)
gtcaatttcctttacctgaattcccttaagtttaaaatcataatttttcaagataaggttctagtcttaggaatgttgcttaagaacctgaaatagaatgatactattatttcatcctgg

SEQ ID NO: 643017 - DNA, 120 bp, Artificial Sequence
  ENSG00000182050_133 (sequence is synthesized)
tattaaaatctctaaaattttctacaaaactaacattctatgtgttctgtggccaatgtgataataaatccttgcataacaacagagaaaaatatcctatacatttgtcttacatttttg

SEQ ID NO: 643018 - DNA, 120 bp, Artificial Sequence
  ENSG00000182050_134 (sequence is synthesized)
caaaataaagaaaatattttggaattaaactaatttcaaaatccaagaatttctatgaaagaattttttagcagtaaccacagatgaaaagaatatcatttagtatctcttcatagtgtc

SEQ ID NO: 643019 - DNA, 120 bp, Artificial Sequence
  ENSG00000182050_135 (sequence is synthesized)
tttataacataatctaatcattggtgttttataatctttcataatttttcatatatttgataaatcctgatgttgggtttatttctgttgaaacaccagtaattgttttatgtcactttg

SEQ ID NO: 643020 - DNA, 120 bp, Artificial Sequence
  ENSG00000182050_136 (sequence is synthesized)
acttttttctatagttttgttttctgcttgtttatctaaattatcatcatagttgtaatctgagaactaggcaaacataggtacttttgactatcactttggggtgatactatttaccca

SEQ ID NO: 643021 - DNA, 120 bp, Artificial Sequence
  ENSG00000182050_137 (sequence is synthesized)
atatgattttttcccattttactcttgaagtatcctgttgcttactcttttgtgtatgcatacatttgaaacatatgacctcccaagcattctactttctcttattttacttattgtgtt

SEQ ID NO: 643022 - DNA, 120 bp, Artificial Sequence
  ENSG00000182050_138 (sequence is synthesized)
ggctttactgtttatgtatgatttaacataaataattattttgttttctctctcccatcacccaccccatttacacgttacaacaagacttcatcagccctggggtcatgatttgaatta

SEQ ID NO: 643023 - DNA, 120 bp, Artificial Sequence
  ENSG00000182050_139 (sequence is synthesized)
tattatctgtgccattaaacaaccttgagcctcaataatatctgttcagattttttcaatggctattgttcattgataattacattctggggacatgccagaatgaaatctcatggtttc

SEQ ID NO: 643024 - DNA, 120 bp, Artificial Sequence
  ENSG00000182050_140 (sequence is synthesized)
tcagccacaaagatttgttaagaatcaaattcaaaggtatttgacttggtatttatgattcatggcaaacccaagcataatctttagcagatctttaagcttcctgagcttataagcaaa

SEQ ID NO: 643025 - DNA, 120 bp, Artificial Sequence
  ENSG00000182050_141 (sequence is synthesized)
ctctgtgtgtgtctgtgtgtatgtgtgtgtgttcctatgtgggtaaatttttcttgatagcatctctgtgctttcatcattatcaaaaagtttcaggaccccaaaatggttaagaaacac

SEQ ID NO: 643026 - DNA, 120 bp, Artificial Sequence
  ENSG00000182050_142 (sequence is synthesized)
tgactatgtgctagttacatttcaagaatatatttctacataaaaatgttgtatttattctaaaggcaaaagccatggaacaatgtgtacttttaaaatatttatgaggaattaaaaatt

SEQ ID NO: 643027 - DNA, 120 bp, Artificial Sequence
  ENSG00000182050_143 (sequence is synthesized)
caattattataatttttccattttaaaattttaggatgtgattttgtaatagcctccaaaaaacatttaaagcacccaagtaattaaactagtaaaagttccttataaaccagaaagcaa

SEQ ID NO: 643028 - DNA, 120 bp, Artificial Sequence
  ENSG00000182050_144 (sequence is synthesized)
aactattttccaaatgggcaataaaaatattacttttgcatgtaaatagttgtttaagtgaatttattgtttatattaattaaattcttttggacaatttgccacttaaaaagatcagtg

SEQ ID NO: 643029 - DNA, 120 bp, Artificial Sequence
  ENSG00000182050_145 (sequence is synthesized)
tttgaactctaggaaatacttgtttatgtaattttttttgcaagtaggtaagaaaagtatatttcattatcaaatagctaccctgcaatactaacataaacagctatttacccatttaga

SEQ ID NO: 643030 - DNA, 120 bp, Artificial Sequence
  ENSG00000182050_146 (sequence is synthesized)
cttaactattcagtcaattacacaacagtcttaccatgttatttaatgagtggaacaaaaataaaggtctttataacagataaaatatttcatttatataatgaaataaaatatcttggg

SEQ ID NO: 643031 - DNA, 120 bp, Artificial Sequence
  ENSG00000182050_147 (sequence is synthesized)
attaataaaaataatgatttttttcatcctatgtaaaatgtagttgatagcactgatatattaataatgttatgggtgaagtttacagttcattacaagttgaatgtacttaaacaatct

SEQ ID NO: 643032 - DNA, 120 bp, Artificial Sequence
  ENSG00000182050_148 (sequence is synthesized)
acatccttcactccttcattcaatcatttaattcagccattccttatttgacaaatgtgatttgtcaaatcacattactaaatgtattatacatttagtaataaccatacatatcatgtt

SEQ ID NO: 643033 - DNA, 120 bp, Artificial Sequence
  ENSG00000182050_149 (sequence is synthesized)
cattggatgttgtaaattgctctggtttagcctttagacatttgaatcaaaatggtcaaattagtctctaaattcagacattgactttgttctgcagatctcaaaacgaaagatatgttg

SEQ ID NO: 643034 - DNA, 120 bp, Artificial Sequence
  ENSG00000182050_150 (sequence is synthesized)
ggatatttagaccagaatgcatgtgaaaatactacatgaatgaatgtatttgacactgatcttgagatgacaatctacagtcctacaataattattctaactccatgttctctttcgtgc

SEQ ID NO: 643035 - DNA, 120 bp, Artificial Sequence
  ENSG00000182050_151 (sequence is synthesized)
acactagctagagcacatctcacccactgacattggaatctatcctttcgtaagttatttttaacgtcttaggatgacttttataaattgaagatttaagagtttctaaggggactgtag

SEQ ID NO: 643036 - DNA, 120 bp, Artificial Sequence
  ENSG00000182050_152 (sequence is synthesized)
gtatattctactgttgtgtttaccacatgttccattcagatacacaaaagaaatgaataaaactggacatagcacacagtctcactgctttgatgggcaatgatttttgacaatgggtaa

SEQ ID NO: 643037 - DNA, 120 bp, Artificial Sequence
  ENSG00000182050_153 (sequence is synthesized)
ttaactcttacatcattaagttccatcgtcacagaataaccttagaatcctaataaaatcccacggcttcaaattgtatttaatagctgccaatccaagcctcctgactatgctaatcta

SEQ ID NO: 643038 - DNA, 120 bp, Artificial Sequence
  ENSG00000182050_154 (sequence is synthesized)
ttatttagaataaatgaaaagtgtgtatcaatttgcctattataatacaaagtgggaactctcatgccaacaaggttaggccagaaaaattcaaataaattggagatgtgttttgataca

SEQ ID NO: 643039 - DNA, 120 bp, Artificial Sequence
  ENSG00000182050_155 (sequence is synthesized)
ttttcttccgttgctcttattgtatctgacatggaaatttccttagggtgaagtttatatagtgacaagcatatacaatattcttgaggtattaggccacagtcagaaaaagagaatata

SEQ ID NO: 643040 - DNA, 120 bp, Artificial Sequence
  ENSG00000182050_156 (sequence is synthesized)
ccacagtcagaaaaagagaatataggaggaattatgtggtagaggatgataaaagattagaagttgaaactataccatatataattttatatatatacataattatcttgattataacct

SEQ ID NO: 643041 - DNA, 120 bp, Artificial Sequence
  ENSG00000182050_157 (sequence is synthesized)
agtaccatccccagacacattccctttgtttcttaaatttttactctccaaaaatgggaatcacagaaacagaagatgcttaaatgttcatgttaggcatttttttctgagctcataaaa

SEQ ID NO: 643042 - DNA, 120 bp, Artificial Sequence
  ENSG00000182050_158 (sequence is synthesized)
gattatttgatcatttaatgtgtttttctctccaataagactgtaaaaagttcagtgtttcgaggctgctaaacaatgcccatagagttgacagtctcaagaatgactggaaaatgatgg

SEQ ID NO: 643043 - DNA, 120 bp, Artificial Sequence
  ENSG00000182050_159 (sequence is synthesized)
agttggatgctataggtcatactttataaatctgactgaaggagaattagaatactaatgagagtcaacaacaattttcttacctgctcccaatttgtaattcttgccctggtggcacat

SEQ ID NO: 643044 - DNA, 120 bp, Artificial Sequence
  ENSG00000182050_160 (sequence is synthesized)
atattacaaggagaatattgttttcaaatttatagtcagaaagtcatttaggtgactgactttgttttttaaatagtaagttgactgtcttgtttaaaaatgcatagtgccctggaaagt

SEQ ID NO: 643045 - DNA, 120 bp, Artificial Sequence
  ENSG00000182050_161 (sequence is synthesized)
tatgtgaatacaatgatttattttaagtaaagggtagttttataaaataaagtgccaaacatcatataaataaatatttacaggctcagtatcaatcaaatcagtggtaagagtgaattt

SEQ ID NO: 643046 - DNA, 120 bp, Artificial Sequence
  ENSG00000182050_162 (sequence is synthesized)
tttcaatgtatgactttcatatcaaatttttttttggtgattcagcttaataggagtttatggtatgggcccattcacgttatatccaaataaacaaaaattatctagagttgttcatgc

SEQ ID NO: 643047 - DNA, 120 bp, Artificial Sequence
  ENSG00000182050_163 (sequence is synthesized)
catcatttccttcagcacagtcttcaaagtagttttctcattacccactttgaaagatatttccaaggagaggataatgcaacccattctatatgtgaataatgggtgggacacaggcca

SEQ ID NO: 643048 - DNA, 120 bp, Artificial Sequence
  ENSG00000182050_164 (sequence is synthesized)
ataatcatgatccaaattagtctgaaaatcaaaggagtaaggggagaaaaaaagaatgaaggattaattgatttgctgagagcatgtcacatgctaattgttgttttacatttttcatct

SEQ ID NO: 643049 - DNA, 120 bp, Artificial Sequence
  ENSG00000182050_165 (sequence is synthesized)
atgtctctcatgtgattcagaccacaaatctgtgtgataagtattgttatccttattctaccaatgacgacacagtagtgaagtcataattcagacttgaaattctgtcttctctcaatt

SEQ ID NO: 643050 - DNA, 120 bp, Artificial Sequence
  ENSG00000182050_166 (sequence is synthesized)
ttcatcccaaaattagatatcctcgatgccagttcggattctcttattcaatgagaaaatcacttccttttcggcccttgtcatctttgtctgtataacaaggggataagacaaagacgt

SEQ ID NO: 643051 - DNA, 120 bp, Artificial Sequence
  ENSG00000182050_167 (sequence is synthesized)
ttgatgaaaatttcttcaagttgtatcatgtttttattcttagtgggtagtcctttgtaagtctgcatacggctggctggtgacacaatgtgggcaccatagaccgaaaaataaaattac

SEQ ID NO: 643052 - DNA, 120 bp, Artificial Sequence
  ENSG00000182050_168 (sequence is synthesized)
tgaaaaggcgaagtatactttccaaaaattagactctaatcaatgtagtccgtgcaacaattttctttaataccgaattgcattttatatagctatttgcacagatcttcacaataaaac

SEQ ID NO: 643053 - DNA, 120 bp, Artificial Sequence
  ENSG00000182050_169 (sequence is synthesized)
cataagaaaaggagaataggatattatcttcacagttctacagaggagtaaaaaaactgaccttgatctaaataagtttagaggtggattttaatcctttaataagcaaaagacatataa

SEQ ID NO: 643054 - DNA, 120 bp, Artificial Sequence
  ENSG00000182050_170 (sequence is synthesized)
taaaattgataaatgacaatatcaatactttatctaaaagtaatttcataaagaaacaaagccaaaattgattcagttaacataaaaaagagttaacccagaagaaaacaatgaatattg

SEQ ID NO: 643055 - DNA, 120 bp, Artificial Sequence
  ENSG00000182050_171 (sequence is synthesized)
taaaaaaaaaaaaaaagcagaaaaaagtgagaaattgttaaggtgagtgaaagatgagcggcggttgctctgagaaactacaacacaacttatttattcaagtggctgggtcagatttaa

SEQ ID NO: 643056 - DNA, 120 bp, Artificial Sequence
  ENSG00000182050_172 (sequence is synthesized)
ttcaagtggctgggtcagatttaaagatgtgatttcaataacttttttgaatagagtgttgtacctttgtctaaagtagtaaaattcatttgaattaaagctgaatatgggttttcctcc

SEQ ID NO: 643057 - DNA, 120 bp, Artificial Sequence
  ENSG00000182050_173 (sequence is synthesized)
tcaaatccaattcaattccaaggtttgaaattgcaggggctcctgagaagaaatggcaaaaataaaaaagagaaagagagagaaaggggaagagaaaaggaaaaaagaaaaatctataac

SEQ ID NO: 643058 - DNA, 120 bp, Artificial Sequence
  ENSG00000182050_174 (sequence is synthesized)
ttgaagccctgtaaagcaaagatttaccaaactttagattttataccccctcttttttcagcatatccaaataaatttacatgatcttatgagtgtaaatcttctagtcttcatgagatt

SEQ ID NO: 643059 - DNA, 120 bp, Artificial Sequence
  ENSG00000182050_175 (sequence is synthesized)
tttccagcttttctgccttttagattgacatttctagttgcttaaggtttcttcttcaaagcaatgggtataaaacatgtgattattattaaacagttatggaaaataccatctttattc

SEQ ID NO: 643060 - DNA, 120 bp, Artificial Sequence
  ENSG00000182050_176 (sequence is synthesized)
attattaaacagttatggaaaataccatctttattccaccactttatcaggtagaacttgaaggtaaaataaagtttggatgctgagtctacatgtattgtattgtattgtattgtattg

SEQ ID NO: 643061 - DNA, 120 bp, Artificial Sequence
  ENSG00000182050_177 (sequence is synthesized)
atagtggttaccagagatttaataacatagcagaagtaactgaatcgcctcctctgccctatgcacttgtattttttttatttcaaaaatgccaggaagataagtgtatgcaaaaatata

SEQ ID NO: 643062 - DNA, 120 bp, Artificial Sequence
  ENSG00000182050_178 (sequence is synthesized)
atgccaggaagataagtgtatgcaaaaatataaagtttgtaaaattttatacaacttaatctatttgatcattagttaagtaagcttaactaaattaaaaatgtattttattgctacttt

SEQ ID NO: 643063 - DNA, 120 bp, Artificial Sequence
  ENSG00000182050_179 (sequence is synthesized)
attaattttagtaaaaataatcatacccttttaataataaaaattaaactttaagtctttaaaattgctagttgtaagtgaatttgtcaaagattaattcatagttgccaacacttactg

SEQ ID NO: 643064 - DNA, 120 bp, Artificial Sequence
  ENSG00000182050_180 (sequence is synthesized)
tgtcaaagattaattcatagttgccaacacttactgaacaggtagataaaattaactttgtttatttaacaaataacttggtgctttctagttagtttaaaaatatcaataattgtttcc

SEQ ID NO: 643065 - DNA, 120 bp, Artificial Sequence
  ENSG00000182050_181 (sequence is synthesized)
tcacatgtatttatgtccttccttcacagcatatagtcaaccatagagactcaatgtaaagtattatgataatttatatgtctgagaaaataagaagattgattcattgaaaagttaaat

SEQ ID NO: 643066 - DNA, 120 bp, Artificial Sequence
  ENSG00000182050_182 (sequence is synthesized)
agaaaataagaagattgattcattgaaaagttaaatgaatttgagatacaggtatttctgactgcctagttacactgtatgaaatactttaaaaactggccaggcgtggtggctcatgcc

SEQ ID NO: 643067 - DNA, 120 bp, Artificial Sequence
  ENSG00000182050_183 (sequence is synthesized)
ctccatctctactaaaaatacaaaacattatctgagtgtggtagagcacgcctgtggtcctagctactcaggcggccgaggcaggataatcacttgaatctgggagtcggaggttttggt

SEQ ID NO: 643068 - DNA, 90 bp, Artificial Sequence
  ENSG00000182050_184 (sequence is synthesized)
gtagagcacgcctgtggtcctagctactcaggcggccgaggcaggataatcacttgaatctgggagtcggaggttttggtaagcagagat

SEQ ID NO: 643069 - DNA, 120 bp, Artificial Sequence
  ENSG00000182050_185 (sequence is synthesized)
cacacacacacacacacacaaaaacacttagaaaaactgtaaacaattcagtcttgtatttggaagaatggtgacttgtaaattttgctgtacattaatgacaagtctctcactcaaata

SEQ ID NO: 643070 - DNA, 120 bp, Artificial Sequence
  ENSG00000182050_186 (sequence is synthesized)
ctcaaataaagataacctaagtaaaataatttatgtcagatgaaaacattccaaattttcttggagaaaaagcaacaaaagccaataaataaaggtggttcccattacctatttaattat

SEQ ID NO: 643071 - DNA, 120 bp, Artificial Sequence
  ENSG00000182050_187 (sequence is synthesized)
ttaatatcttaaactattattaaatgcatgcaccacctgcactaccctgaccgattaaccccttagctgaaggagttcagtttgtatttttaccatatgatctgtctagattcactcttt

SEQ ID NO: 643072 - DNA, 120 bp, Artificial Sequence
  ENSG00000182050_188 (sequence is synthesized)
ttttttttttttttttgctttcttattcaactctacagtaaaagaaaatctgtggttttatttgacataacagagctatcttcagccatagctagaaggaggatagtaggataaaggtca

SEQ ID NO: 643073 - DNA, 120 bp, Artificial Sequence
  ENSG00000182050_189 (sequence is synthesized)
tagctagaaggaggatagtaggataaaggtcaatttttgtcttccttcacagctaacagatatatgtagcatgcttaataataactctcaaagtctgttgctcaacctcccaaaccatta

SEQ ID NO: 643074 - DNA, 120 bp, Artificial Sequence
  ENSG00000182050_190 (sequence is synthesized)
atttccttctagccactgctagagttcatgcatgtcatgaaaggaaggctagagggacaatttctgtatgcatatctctggcccatgcccttcaatgagacccaaatataattaatttct

SEQ ID NO: 643075 - DNA, 120 bp, Artificial Sequence
  ENSG00000182050_191 (sequence is synthesized)
gggatttttgcaataaataatatgagatgacctcattatagaatgaggggcaagatccttggccttggtctttcacaaataatatgactttatttacagatgaagaaaataaaataaaaa

SEQ ID NO: 643076 - DNA, 120 bp, Artificial Sequence
  ENSG00000182050_192 (sequence is synthesized)
ttaaacataaactttcctcaacttcctgcttttagcccaggtagcatgttattactatttcttttataaacaactgagttctgactaacagtctttaagaggagctgctatgaggaaata

SEQ ID NO: 643077 - DNA, 120 bp, Artificial Sequence
  ENSG00000182050_193 (sequence is synthesized)
tagataataacaaaataataacatatttttaaagctttgccagcagcaaagggctcgcatctacatactctcattttatgtgtccaaccaatggttccacatagccatgaaatcagctgt

SEQ ID NO: 643078 - DNA, 120 bp, Artificial Sequence
  ENSG00000182050_194 (sequence is synthesized)
tacaataggaagaccaccactgaacagttttgtaactcatttcagaattgactttggtatgtgcttattggtgtatttctgtgcttgtgtcaattcaacaaagcttcccaagcaaggtta

SEQ ID NO: 643079 - DNA, 120 bp, Artificial Sequence
  ENSG00000182050_195 (sequence is synthesized)
cttcaaacattacttgggccacggtaaaagaaaaataaaattctgttgattcagagtcaccttcaatctcatgtcataaattatgtttctctagtctttgatattgtttcacatgtgcat

SEQ ID NO: 643080 - DNA, 120 bp, Artificial Sequence
  ENSG00000182050_196 (sequence is synthesized)
gattagattggttgaggatagactttgggctcatgatttattgactaattatgtggttttcccactgtagcttgggttaaatcttacaagacaggctgaaaactgaaattgttatgacat

SEQ ID NO: 643081 - DNA, 120 bp, Artificial Sequence
  ENSG00000182050_197 (sequence is synthesized)
ttttgttttctctacaccataccaagtaatgctgtttgattgaatcaaatattttctaaagactaaatgtaatccaaaaaatgatctgtaaatgttcccaacaggtgtcccaaaaccata

SEQ ID NO: 643082 - DNA, 120 bp, Artificial Sequence
  ENSG00000182050_198 (sequence is synthesized)
ttttagtaagtttttcaattggtccaacagttctataaattttaccttgaggtaactaaaatggaaacataatgaatatattatctctattgtctaaggacaaacaaaacaccgaagtta

SEQ ID NO: 643083 - DNA, 120 bp, Artificial Sequence
  ENSG00000182050_199 (sequence is synthesized)
ttgagaatcagattcccatgttagcataaatgagtcacctagttttttcaacaaaaccaagtaataaataaatcaacactttcagttttctgccagtgtcacagatggcagccaattggt

SEQ ID NO: 643084 - DNA, 120 bp, Artificial Sequence
  ENSG00000182050_200 (sequence is synthesized)
ttgattaaaaatctgatgcttgcatgtttgcatagtaaaagacagggttttcaggaaaaaatcattatacttctcactgtgttccacacaatgttgaaggttatgtccaaatttgaaaaa

SEQ ID NO: 643085 - DNA, 120 bp, Artificial Sequence
  ENSG00000182050_201 (sequence is synthesized)
caaatccaattaaactagctaccatacaaatatatcttttgttattgaaagagtgatttcagtcgtgatttttcattaatctagttttgtaaaaatcagacttcctgtaaaccaattgaa

SEQ ID NO: 643086 - DNA, 120 bp, Artificial Sequence
  ENSG00000182050_202 (sequence is synthesized)
aacctctacattttactatatgtattcatggacttaatttcatcaaaaataccaatattctctgtgccctaacaagtgtaattgcactaaccttgtagttgatatttactgattgaaatg

SEQ ID NO: 643087 - DNA, 120 bp, Artificial Sequence
  ENSG00000182050_203 (sequence is synthesized)
tatatacacaaaaattatgtaaaactgattatctagaggtttcttcattagctagcacaaatagttattgtaaacctttgtcctgtatttttttaaagtctgcaacatggtgaaccagta

SEQ ID NO: 643088 - DNA, 120 bp, Artificial Sequence
  ENSG00000182050_204 (sequence is synthesized)
tgcttgatggctttaatacctgtgtctgcaatttattattcatttgaagcaacaaattcagaattgtttgaaattatgaaggctaaacagcataaatacattgtggtttcttttataaat

SEQ ID NO: 643089 - DNA, 120 bp, Artificial Sequence
  ENSG00000182050_205 (sequence is synthesized)
agctgaacgaattgttttctctgtctctgggtatcaacggtttctgtacagcacagattatgacagcgtctttcttaagattctgtggacctgactgacactagaaaagccgcagtagca

SEQ ID NO: 643090 - DNA, 120 bp, Artificial Sequence
  ENSG00000182050_206 (sequence is synthesized)
tgtgacatggaagtttatattatcagggtgtgctcacctggttgcaaatttgagaccaaagttttactttaacacttggagctggtaaaggatgttttattcattgtgtttctgacagat

SEQ ID NO: 643091 - DNA, 120 bp, Artificial Sequence
  ENSG00000182050_207 (sequence is synthesized)
ggaacaagttaaggttaccttctcaatatgaggactaaagcttttagccaatatttgtggagaagacacatttaagattttcttttgcccatacatgcaatgttatggaggctgtgacca

SEQ ID NO: 643092 - DNA, 120 bp, Artificial Sequence
  ENSG00000182050_208 (sequence is synthesized)
cattttaggcaagaaactgaaagaacatcaagcacctatctggatgtctccaaagcctcatctggataaaatatccaatctatttttcaatcagcctttttttttcctttttcaacctca

SEQ ID NO: 643093 - DNA, 120 bp, Artificial Sequence
  ENSG00000182050_209 (sequence is synthesized)
gacaattgcttttggggtcctagagtcccttgaaagttatgatggaaataggagacctaaagttcaggtgactgaagggctgaagcaggaaggaaaaacgtctgggaggacaggtagaca

SEQ ID NO: 643094 - DNA, 120 bp, Artificial Sequence
  ENSG00000182050_210 (sequence is synthesized)
gaggaaagaggtctgaagaggcacatatcaaaagattcaagaaagctgaagggaagattgaaggtagtaaaaggatgaaggaggagcagaagcaatgggaaggaagagatctcagaggac

SEQ ID NO: 643095 - DNA, 120 bp, Artificial Sequence
  ENSG00000182050_211 (sequence is synthesized)
tcacttcgggaaaatcttcagtttcccaaagagatcctgaagtctcaaattatccttaacaaaaccatgaccacaagaaaggaagtggagtatacgatcagtgagagtttaagaaggggg

SEQ ID NO: 643096 - DNA, 120 bp, Artificial Sequence
  ENSG00000182050_212 (sequence is synthesized)
tttccgttgactaaaaagttaccgtgggagaaataggatcaaatagaacagagttgcctcacaaagaaccaaggaaaatatttcagctcagggattcaagaagtaaattcccactcaaag

SEQ ID NO: 643097 - DNA, 120 bp, Artificial Sequence
  ENSG00000182050_213 (sequence is synthesized)
acagaaacaggaagtaagatttacaattcagccagtaccttcctaacagagaagcatgtgactataccaacttcttacaaaaagaaacaggactaactcagcctctgtatagtgtactca

SEQ ID NO: 643098 - DNA, 120 bp, Artificial Sequence
  ENSG00000182050_214 (sequence is synthesized)
ggctctctcagccctcactgtgcttcaacagacttatcatttggagcactggctcaggagtcgaaatcaccaatggctcatccatcaatcaaccagaagtgaagacgaaagcttcaaaga

SEQ ID NO: 643099 - DNA, 120 bp, Artificial Sequence
  ENSG00000182050_215 (sequence is synthesized)
cacaggaacaccagattgccatccctggggaacagaatgcaacccgggatctagagagctgtcacattccaagaaatatttaaattgtgctgattttcttctggagaactgagcccaggg

SEQ ID NO: 643100 - DNA, 120 bp, Artificial Sequence
  ENSG00000182050_216 (sequence is synthesized)
aatgaaactctccatcaagtcatggctttgcgggcaatagatcagaggatattgccagttttctaatggattattgttatcgggcaggttttctctgaagcttctcagctgctgttacat

SEQ ID NO: 643101 - DNA, 120 bp, Artificial Sequence
  ENSG00000182050_217 (sequence is synthesized)
tctacttggatgggaactggagatcagccagatcacttgtatgcacaaagctgctgtggatctgtctttcaaacaagagctgcagaaaacgctatagcaaggttgaagctttatccactc

SEQ ID NO: 643102 - DNA, 120 bp, Artificial Sequence
  ENSG00000182050_218 (sequence is synthesized)
gtgtgaggcccaaggatcactcatgcttccaggctgcacagagcactgttggatctagctgaacgaattgttttctctgtctctgaaaacagaagcagttatgacttacatcaactctga

SEQ ID NO: 643103 - DNA, 120 bp, Artificial Sequence
  ENSG00000182050_219 (sequence is synthesized)
aaaataagaatgcatccttggaatcagaaaatacaaaccctgaaagtgaagtacaagagcttcattagtaacataatgaatgaattataacaataaatgaaaaacaaactaatatcaatg

SEQ ID NO: 643104 - DNA, 120 bp, Artificial Sequence
  ENSG00000182050_220 (sequence is synthesized)
ttcctaatagagggaaaggatagtttagagatagttgcaaagcagattaagacatgaagagtagaacatctgccaaaaaggcaagccaaagtttaaaagaacaacaaaaacaaacaaata

SEQ ID NO: 643105 - DNA, 120 bp, Artificial Sequence
  ENSG00000182050_221 (sequence is synthesized)
attatttgttccttaaaaatctgctttggtgcccttgataacaaaatgtgtgatatatgtttgatagcacaggttggtcagagaaactttagtaaggtatgagaaaagaacatacacagc

SEQ ID NO: 643106 - DNA, 120 bp, Artificial Sequence
  ENSG00000182050_222 (sequence is synthesized)
cagtaggtaaaattcaggcagtagcatgtgacatggaagtttatattatcagggtgtgctcacctggttgcaaatttgagaccaaagttttactttaacacttggagctggtaaaggatg

SEQ ID NO: 643107 - DNA, 120 bp, Artificial Sequence
  ENSG00000182050_223 (sequence is synthesized)
aaattctcactcccggttgtggtctccatccggaaatggccgtctcgccgccaggcctgaaggtcaggacctgccagctgtaaaatgggataatgttcaccccaccaccctgctgtgagc

SEQ ID NO: 643108 - DNA, 120 bp, Artificial Sequence
  ENSG00000182050_224 (sequence is synthesized)
tgtacagcacagattatgacagcgtctttcttaagattctgtggacctgactgacactagaaaagccgtatgttctttttgttggtggtttgtaaacagtaggtaaaattcagttttatt

SEQ ID NO: 643109 - DNA, 120 bp, Artificial Sequence
  ENSG00000182053_0 (sequence is synthesized)
ctgcattttggtgacctctgaaattcagtacggcagtgaatgagcttctgacgttgaggtgaacttaacaaaattatttttggaaaaatcgttgtgggaaccattaaaagaactcaggga

SEQ ID NO: 643110 - DNA, 120 bp, Artificial Sequence
  ENSG00000182053_1 (sequence is synthesized)
aacatgaattctggaatcttacaggtctttcagagggaactcatctgccccatctgcatgaactacttcatagacccggtcaccatagactgtgggcacagcttttgcaggccttgtttc

SEQ ID NO: 643111 - DNA, 120 bp, Artificial Sequence
  ENSG00000182053_2 (sequence is synthesized)
tacctcaactggaaagacagcccatttcttgtccagtgctctgaatgcacaaagtcaacagggcagataaacctcaaaaccaacattcatttcaagaagatggcttctcttgctagaaaa

SEQ ID NO: 643112 - DNA, 120 bp, Artificial Sequence
  ENSG00000182053_3 (sequence is synthesized)
gtcagtctctggctattcctgagctctgaggagcaaatgtgtggcactcacagggagacaaagaagatgttctgtgaagtggacaggagcctgctctgtttgctgtgctccagctctcag

SEQ ID NO: 643113 - DNA, 120 bp, Artificial Sequence
  ENSG00000182053_4 (sequence is synthesized)
gagcaccgggatcacagacactgtcccattgagtcggctgctgaggaacaccaggagaagcttttacagaaaatgcagtctttgtgggaaaaagcttgtgaaaatcacagaaacctgaat

SEQ ID NO: 643114 - DNA, 120 bp, Artificial Sequence
  ENSG00000182053_5 (sequence is synthesized)
gtggaaaccaccagaaccagatgctggaaggattatgtgaatttaaggctagaagcaattagagctgagtatcagaagatgcctgcatttcaccatgaagaagaaaaacataatttggag

SEQ ID NO: 643115 - DNA, 120 bp, Artificial Sequence
  ENSG00000182053_6 (sequence is synthesized)
gggagattttaagaggaatgtatgaggagctgaacgaaatgtgccataaaccagatgtggagctacttcaggcttttggagacatattacacaggagtgagtccgtgctgctgcacatgc

SEQ ID NO: 643116 - DNA, 120 bp, Artificial Sequence
  ENSG00000182053_7 (sequence is synthesized)
gtgcagggcccatcactggactgagggacaggctcaaccaattccgagtgcatattactctgcatcatgaagaagccaacagtgatatctttctatgtgaaattttgagaagcatgtgta

SEQ ID NO: 643117 - DNA, 120 bp, Artificial Sequence
  ENSG00000182053_8 (sequence is synthesized)
ttggatgtgaccatcaagatgtaccctatttcactgcaacacctagaagttttcttgcatggggtgctcagactttcacctcgggcaaatattactgggaggtccatgtaggggactcct

SEQ ID NO: 643118 - DNA, 120 bp, Artificial Sequence
  ENSG00000182053_9 (sequence is synthesized)
ggaattgggcttttggtgtctgtaatatgtattggaaagagaagaatcagaatgagaagatagatggagaggatggactctttcttcttgggtgtgttaagaatgacattcaacgcagtc

SEQ ID NO: 643119 - DNA, 120 bp, Artificial Sequence
  ENSG00000182053_10 (sequence is synthesized)
tctttaccacctccccacttctgctgcaatatatcccaagacctaccagccgagtaggattattcctggattgtgaggctaagactgtgagctttgttgatgttaatcaaagctccctaa

SEQ ID NO: 643120 - DNA, 120 bp, Artificial Sequence
  ENSG00000182053_11 (sequence is synthesized)
tatacaccatccctaattgctctttctcacctcctctcaggcctatcttttgctgtattcacttctgaccagagacaaatcagaaatgtgttcacatgctgtgggaacccctttatccca

SEQ ID NO: 643121 - DNA, 120 bp, Artificial Sequence; identical to SEQ ID NO: 555728
  ENSG00000182053_12 (sequence is synthesized)

SEQ ID NO: 643122 - DNA, 120 bp, Artificial Sequence
  ENSG00000182053_13 (sequence is synthesized)
tgccttctaatgttatcaaaactcatttattgtgttactattaaatatgctgaaaacactaaaagtatatgtattggttctttattaaataatttttgaaaaatcattattcatgatcat

SEQ ID NO: 643123 - DNA, 120 bp, Artificial Sequence
  ENSG00000182053_14 (sequence is synthesized)
ggcatacagtatattctctttttttctttatttctgactgtcactgagtgaaataatagatggcagacatgtctgaatgaagtaaaaatcaatggaagacagtcaggatcttttgcttca

SEQ ID NO: 643124 - DNA, 120 bp, Artificial Sequence
  ENSG00000182053_15 (sequence is synthesized)
tgcaaaaaacttggagtgaagtctcaatgataactgggaaatgtttttcttcctctttatctaactatattacacttatccatcaggcttcattgtattaatctatcctttgaggtaata

SEQ ID NO: 643125 - DNA, 120 bp, Artificial Sequence
  ENSG00000182054_0 (sequence is synthesized)
gcggccagcgcccgccaggcccagcgttagcccgcggccaggcagccgggaggagcggcgcgcgctcggacctctcccgccctgctcgttcgctctccagcttgggatggccggctacct

SEQ ID NO: 643126 - DNA, 120 bp, Artificial Sequence
  ENSG00000182054_1 (sequence is synthesized)
ggctacctgcgggtcgtgcgctcgctctgcagagcctcaggctcgcggccggcctgggcgccggcggccctgacagcccccacctcgcaagagcagccgcggcgccactatgccgacaaa

SEQ ID NO: 643127 - DNA, 120 bp, Artificial Sequence
  ENSG00000182054_2 (sequence is synthesized)
aggatcaaggtggcgaagcccgtggtggagatggatggtgatgagatgacccgtattatctggcagttcatcaaggagaagctcatcctgccccacgtggacatccagctaaagtatttt

SEQ ID NO: 643128 - DNA, 120 bp, Artificial Sequence
  ENSG00000182054_3 (sequence is synthesized)
gacctcgggctcccaaaccgtgaccagactgatgaccaggtcaccattgactctgcactggccacccagaagtacagtgtggctgtcaagtgtgccaccatcacccctgatgaggcccgt

SEQ ID NO: 643129 - DNA, 120 bp, Artificial Sequence
  ENSG00000182054_4 (sequence is synthesized)
gtggaagagttcaagctgaagaagatgtggaaaagtcccaatggaactatccggaacatcctgggggggactgtcttccgggagcccatcatctgcaaaaacatcccacgcctagtccct

SEQ ID NO: 643130 - DNA, 120 bp, Artificial Sequence
  ENSG00000182054_5 (sequence is synthesized)
ggctggaccaagcccatcaccattggcaggcacgcccatggcgaccagtacaaggccacagactttgtggcagaccgggccggcactttcaaaatggtcttcaccccaaaagatggcagt

SEQ ID NO: 643131 - DNA, 120 bp, Artificial Sequence
  ENSG00000182054_6 (sequence is synthesized)
ggtgtcaaggagtgggaagtgtacaacttccccgcaggcggcgtgggcatgggcatgtacaacaccgacgagtccatctcaggttttgcgcacagctgcttccagtatgccatccagaag

SEQ ID NO: 643132 - DNA, 120 bp, Artificial Sequence
  ENSG00000182054_7 (sequence is synthesized)
aaatggccgctgtacatgagcaccaagaacaccatactgaaagcctacgatgggcgtttcaaggacatcttccaggagatctttgacaagcactataagaccgacttcgacaagaataag

SEQ ID NO: 643133 - DNA, 120 bp, Artificial Sequence
  ENSG00000182054_8 (sequence is synthesized)
atctggtatgagcaccggctcattgatgacatggtggctcaggtcctcaagtcttcgggtggctttgtgtgggcctgcaagaactatgacggagatgtgcagtcagacatcctggcccag

SEQ ID NO: 643134 - DNA, 120 bp, Artificial Sequence
  ENSG00000182054_9 (sequence is synthesized)
ggctttggctcccttggcctgatgacgtccgtcctggtctgccctgatgggaagacgattgaggctgaggccgctcatgggaccgtcacccgccactatcgggagcaccagaagggccgg

SEQ ID NO: 643135 - DNA, 120 bp, Artificial Sequence
  ENSG00000182054_10 (sequence is synthesized)
cccaccagcaccaaccccatcgccagcatctttgcctggacacgtggcctggagcaccgggggaagctggatgggaaccaagacctcatcaggtttgcccagatgctggagaaggtgtgc

SEQ ID NO: 643136 - DNA, 120 bp, Artificial Sequence
  ENSG00000182054_11 (sequence is synthesized)
ggcctcagcaatgtgaagctgaacgagcacttcctgaacaccacggacttcctcgacaccatcaagagcaacctggacagagccctgggcaggcagtagggggaggcgccacccatggct

SEQ ID NO: 643137 - DNA, 120 bp, Artificial Sequence
  ENSG00000182054_12 (sequence is synthesized)
gcagtggaggggccagggctgagccggcgggtcctcctgagcgcggcagagggtgagcctcacagcccctctctggaggcctttctaggggatgtttttttataagccagatgtttttaa

SEQ ID NO: 643138 - DNA, 120 bp, Artificial Sequence
  ENSG00000182054_13 (sequence is synthesized)
aagcatatgtgtgtttcccctcatggtgacgtgaggcaggagcagtgcgttttacctcagccagtcagtatgttttgcatactgtaatttatattgcccttggaacacatggtgccatat

SEQ ID NO: 643139 - DNA, 120 bp, Artificial Sequence
  ENSG00000182054_14 (sequence is synthesized)
ttagctactaaaaagctcttcacaaaattgtctgctgtgtttgtccctgaggggaggaggtagtgggaccctgaggcagaggccctgctagagctggcaggttcccctggggcagaccag

SEQ ID NO: 643140 - DNA, 120 bp, Artificial Sequence
  ENSG00000182054_15 (sequence is synthesized)
agcacctcaggaaggggctgccacggcagggaagggaccaggcagccctgggagcccgcattccacaggggcccactgcggagttctcggacactcagggcacaggcctgtgggttccct

SEQ ID NO: 643141 - DNA, 120 bp, Artificial Sequence
  ENSG00000182054_16 (sequence is synthesized)
ggaattttctagcatgatccagtttctgtgtccagttctccattctgagagtcaatcagttcctgataggttgtcattgatttttttcttcgttggttttaaccttctaaacatctccag

SEQ ID NO: 643142 - DNA, 120 bp, Artificial Sequence
  ENSG00000182054_17 (sequence is synthesized)
gccactttcttagcctttttctaggtactaaaaagaggtcctacccacacctgcctcacacttctcctttccaaggctgcctgagtttggaggggcttgggtgtgtgtgaacaagggccc

SEQ ID NO: 643143 - DNA, 120 bp, Artificial Sequence
  ENSG00000182054_18 (sequence is synthesized)
tgcattgtctaggcctgcagttcccaggcttgggttcactttcaccatgcattggcaaaactagaaaagtaagcttgtgacaaattgttctcggccgggcacagtggcgcacgcctataa

SEQ ID NO: 643144 - DNA, 70 bp, Artificial Sequence
  ENSG00000182054_19 (sequence is synthesized)
ctatgcaagttttttagccccatgtaaaaaggaaaaataaaagttgctctaaagctacatataatcaaaa

SEQ ID NO: 643145 - DNA, 120 bp, Artificial Sequence
  ENSG00000182054_20 (sequence is synthesized)
aaggaaagaatattttggggctaaaagagccccgtgtctttgctgcctggtaattcctgcacgcatcttttcctattttgcaacgccataggcttccagcgactgctggtgatgtttctg

SEQ ID NO: 643146 - DNA, 120 bp, Artificial Sequence
  ENSG00000182070_0 (sequence is synthesized)
atgtccatttccaacatcacagtctacatgccctctgtgttgacactagtagggatcccaggcctagaatctgtgcagtgctggattgggattccattctgtgccatttatctcattgct

SEQ ID NO: 643147 - DNA, 120 bp, Artificial Sequence
  ENSG00000182070_1 (sequence is synthesized)
atgattggaaattccttgcttctgagcatcatcaaatctgagcgcagtctccatgagcccttgtacattttcttaggcatgctaggagccacagacattgcacttgctagcagcattatg

SEQ ID NO: 643148 - DNA, 120 bp, Artificial Sequence
  ENSG00000182070_2 (sequence is synthesized)
ccaaagatgcttggaatattctggtttaatgtgcctgaaatctattttgattcctgcttgcttcaaatgtggttcatccacacattgcagggtatagagtcaggcatccttgtggccatg

SEQ ID NO: 643149 - DNA, 120 bp, Artificial Sequence
  ENSG00000182070_3 (sequence is synthesized)
gctgctattcttgtagccccatgcctagtactgataaagtgccggtttcaattttatcacacaacagtcatctcccactcctactgtgagcatatggccattgtgaaactagcagcagca

SEQ ID NO: 643150 - DNA, 120 bp, Artificial Sequence
  ENSG00000182070_4 (sequence is synthesized)
aatgttcaagtcaacaaaatctatggtttgtttgtggccttcactgtagcaggatttgacctcacattcatcacattgtcctacatccagatatttatcacagtttttcgtttgccccag

SEQ ID NO: 643151 - DNA, 120 bp, Artificial Sequence
  ENSG00000182070_5 (sequence is synthesized)
aaggaggctaggtttaaagcattcaatacctgcattgctcacatctgtgtcttcctccagttctacctccttgccttcttctccttcttcacacataggtttgggtctcacatctcccct

SEQ ID NO: 643152 - DNA, 120 bp, Artificial Sequence
  ENSG00000182070_6 (sequence is synthesized)
tatatccatattctcttttctagcatttacttgctggtccctccatttctcaatccacttgtctatggtgcaaagaccacacagattcgcattcatgtggtaaaaatgttctgttcataa

SEQ ID NO: 643153 - DNA, 120 bp, Artificial Sequence
  ENSG00000182070_7 (sequence is synthesized)
aattcatcccgtgtttcagaatgctacagacctcactatgagttttactgggggatgagcacacaaagatggtctgagacagacttccagaagaagaagaagatgtccgtgttagagata

SEQ ID NO: 643154 - DNA, 120 bp, Artificial Sequence
  ENSG00000182070_8 (sequence is synthesized)
aatgaaaagtgtaaaaagtcatctgcaaaatgtccacagtatattatattggcacatatcctggcaccaaacagagtaaaatttatgacattagctggatgctgttacacagagtgcaga

SEQ ID NO: 643155 - DNA, 120 bp, Artificial Sequence
  ENSG00000182070_9 (sequence is synthesized)
cagaaagtagagccatcacagaacccacaacttaagggaatgaagctggaatccttggagaagaaaaattggtctggaaagaaataacagactggccagtagtccaatcccctgtccagg

SEQ ID NO: 643156 - DNA, 120 bp, Artificial Sequence
  ENSG00000182070_10 (sequence is synthesized)
tgattttgctggttctaatgtatttggattgccatgcacataacatcctattatggcacagtgcctgtgaatgccccacctgaaaacagtgatgtatctccatgaatccatcttttcctt

SEQ ID NO: 643157 - DNA, 120 bp, Artificial Sequence
  ENSG00000182070_11 (sequence is synthesized)
tcaaaactgtgaataagatggatgattttagagttatacccaaatcagacagactcaatataatgagtttggagaaaatcagaaagcagaagaggaacagtaacactgactgagaaactt

SEQ ID NO: 643158 - DNA, 120 bp, Artificial Sequence
  ENSG00000182070_12 (sequence is synthesized)
cacaatagctggttttagatcatcatggctcatatcaatcagtgggattgtgaattctacgtgactaatgaaagtgagaagtgtgaaatgagtgaagtagtgaatatatattattttttc

SEQ ID NO: 643159 - DNA, 120 bp, Artificial Sequence
  ENSG00000182070_13 (sequence is synthesized)
tcttttattctttagcccctggttgagttattcttctaagaatatttctccaggaggatttataaattatgcctttgtcactgaatttaaatgcacctaaggctcgttgttctgaaacat

SEQ ID NO: 643160 - DNA, 120 bp, Artificial Sequence
  ENSG00000182070_14 (sequence is synthesized)
ccagggactcaatgaaaacaagttgttgactctcattttcttgatcatccctgccttaaaaaaaaaaatcaaaggaagtacatgttaactgtgttcttgtcaaagaaaatcttatgaata

SEQ ID NO: 643161 - DNA, 120 bp, Artificial Sequence
  ENSG00000182070_15 (sequence is synthesized)
tcaagagacaataaagcctaaaaatttaaatacattttcagagtcatacaaggaattacaggcacaaaaattagaaccaggtgttgcatttgacacatcaatgttgttgttttttttttt

SEQ ID NO: 643162 - DNA, 120 bp, Artificial Sequence
  ENSG00000182070_16 (sequence is synthesized)
gctaacctcaaaatttacttctttattaattcatcattttatcaaaaacctgcaatattaaaaatactatactacagaatcgtgacataatagtaaatctggcacagtgaataattctca

SEQ ID NO: 643163 - DNA, 120 bp, Artificial Sequence
  ENSG00000182070_17 (sequence is synthesized)
tgagtttgtacctatgtaattctggaaaagagagactgaaaggaagagaggtggggaatgggcaggcaagggaaagaagagagaaataacaagtgtacacataggatgtggagttcagag

SEQ ID NO: 643164 - DNA, 120 bp, Artificial Sequence
  ENSG00000182070_18 (sequence is synthesized)
agaatgaagcattgaaatctaaccaaagcaggggagttgcatttattgtattttgttttttggttaggtagttacctctgattcttgaggaatgatggatgagtagccaaggaagtaaga

SEQ ID NO: 643165 - DNA, 120 bp, Artificial Sequence
  ENSG00000182070_19 (sequence is synthesized)
acacatcatgccaggtagatagtagaggagatttaaactagataatgtagtttaaggtaactctagttttttcaatatggtatgagtgcaaggtagaacttggggagacaaggaaaatat

SEQ ID NO: 643166 - DNA, 120 bp, Artificial Sequence
  ENSG00000182070_20 (sequence is synthesized)
gaatatcaaaaatggctattaatgttgtgcagagttgctggactttattccaaaagctataatgtgccattggagagtattcatttgtttgcttgtgttctacaagtaagacgtgtgtgt

SEQ ID NO: 643167 - DNA, 120 bp, Artificial Sequence
  ENSG00000182070_21 (sequence is synthesized)
gtgtgtgtgtgtgtgtgtgtctgcttgggcatgtggcagcataccacacagcaaatataaataagtctagggctattgtgttagtgaagaggaggactatattgtctaaaattagtggca

SEQ ID NO: 643168 - DNA, 120 bp, Artificial Sequence
  ENSG00000182070_22 (sequence is synthesized)
tagtggcataagaatttacggctagtcaattgttcttgaaaaacctcaggtcatagatcatttttttcaaggttatggaaaatattcacatatgggcagatgtccatactttgatttacc

SEQ ID NO: 643169 - DNA, 120 bp, Artificial Sequence
  ENSG00000182070_23 (sequence is synthesized)
agattaaaaccactgcaaatataagaaatattggattgcttgtcatacacccacctggtggatcctctggcttcacggattaggacttagcagatatccatggctgttgagaatgattat

SEQ ID NO: 643170 - DNA, 120 bp, Artificial Sequence
  ENSG00000182070_24 (sequence is synthesized)
agaggctatcttaagggatcttttgagactgtttcaagtttcaatatctactagagctaattttattggattaccaatagggatggtttttcttaagtaacataattttctcaaaaataa

SEQ ID NO: 643171 - DNA, 120 bp, Artificial Sequence
  ENSG00000182070_25 (sequence is synthesized)
aatagcctctgatgttatttcttaatattttagccagaattcagcaaacttttacataaatggccaaataatatatagctaaggctttatggaaaaagaggcaaattcaagaatatcatg

SEQ ID NO: 643172 - DNA, 120 bp, Artificial Sequence
  ENSG00000182070_26 (sequence is synthesized)
catgtaggcattaatataacaagatagaaaaatgtatgtccacaaataatttttatgaaattcaaacaatattaacaataataattgcattgtctttaattaaagaaggtctactaatta

SEQ ID NO: 643173 - DNA, 120 bp, Artificial Sequence
  ENSG00000182070_27 (sequence is synthesized)
aatagaatccattttttttttctacagagtaacaaagtgtagctgaaagttagagtttccccatcaccaaattgattacaaatattcatctgtaaaaatcattcttaactagtggactat

SEQ ID NO: 643174 - DNA, 120 bp, Artificial Sequence
  ENSG00000182070_28 (sequence is synthesized)
agaaaacaggaagtaggccaggtttgggatgtttaacaatgaccactttaagcagcaccaccaaaaatatgtggtaatataggtccaacaaagagacacaatgtgaaactacaacatatt

SEQ ID NO: 643175 - DNA, 120 bp, Artificial Sequence
  ENSG00000182070_29 (sequence is synthesized)
tgcaccatctccgaattttaatatctcataaaatatgtagtccagagttcatattgtttaattactgtagtcttcaaatttcaggatcagtcccaagctgagacttactaatagaaaaca

SEQ ID NO: 643176 - DNA, 120 bp, Artificial Sequence
  ENSG00000182070_30 (sequence is synthesized)
gaagaaacaaataggtcattacaaggaaaagaggataaccaggaccctctaacctcccacacacttggacggggacaattattgaaaaaaaatctttaacataaaattgcttgaaagata

SEQ ID NO: 643177 - DNA, 120 bp, Artificial Sequence
  ENSG00000182070_31 (sequence is synthesized)
ataatattttttgtaaggataattttcaagaaaggtttctagaaatcataaaattaacttccaggagattacatcaatttcaacaatgactaaaataatgtttgcctaaattcttaacaa

SEQ ID NO: 643178 - DNA, 120 bp, Artificial Sequence
  ENSG00000182070_32 (sequence is synthesized)
cactagttattaccgatatttacctttgacagtttgataggtgaaatatgattccctttataattagcatttaacaaagaaatatttgtgctgctatcttcttttccgtttgtacattct

SEQ ID NO: 643179 - DNA, 120 bp, Artificial Sequence
  ENSG00000182070_33 (sequence is synthesized)
ttatgtgaagtacttcattgtttcctttgttcatttttctaatttgtgtccatttattttcttcttgagtttaaaatttgatgagtaaatattgaattatttccaagggctttattgctc

SEQ ID NO: 643180 - DNA, 120 bp, Artificial Sequence
  ENSG00000182070_34 (sequence is synthesized)
aggactttaccagaggatttccaataggctattggcattttctagtagaagtgacttcaggcataaagaagaaaagaaaaagtaaaaagtcttaacattggagacctttgacctattagg

SEQ ID NO: 643181 - DNA, 71 bp, Artificial Sequence
  ENSG00000182070_35 (sequence is synthesized)
agtaaaaagtcttaacattggagacctttgacctattaggagcagaacgcttggtgaaaaaaaaaaaatgc

SEQ ID NO: 643182 - DNA, 62 bp, Artificial Sequence
  ENSG00000182070_36 (sequence is synthesized)
catctctaccaaaaatacaaaaaattagatgggcgtgttggggagggcggaggttgcggtga

SEQ ID NO: 643183 - DNA, 66 bp, Artificial Sequence
  ENSG00000182070_37 (sequence is synthesized)
gatttcaggaactgaaccttctagctttttgcagcccttcatttaaatgttcaatttgggaaaaat

SEQ ID NO: 643184 - DNA, 120 bp, Artificial Sequence
  ENSG00000182070_38 (sequence is synthesized)
ccacccttcttggtagagaactgtcctttggcaacaagccttctatgctgatattcctaagcggtctccatttcaatgtgagaatacatcaatattaccctcaatttattgttaaatgga

SEQ ID NO: 643185 - DNA, 120 bp, Artificial Sequence
  ENSG00000182070_39 (sequence is synthesized)
cgaccttttgagatttggttagcaggcctatttggctttaatactaagctgtatgcctgtatttaaacagtattaaaaatgcaagtgattcctagctactcctgaggctaaggcaggaga

SEQ ID NO: 643186 - DNA, 74 bp, Artificial Sequence
  ENSG00000182070_40 (sequence is synthesized)
cggtgagtcgagatggaaaaaaaaaaaaaaatacaggtaatattttgtcctaccacatctatttataatttcta

SEQ ID NO: 643187 - DNA, 120 bp, Artificial Sequence
  ENSG00000182070_41 (sequence is synthesized)
gtcctaccacatctatttataatttctaaaattgctcagaatttgtattaataaggattcttcacagtacaaaaccaataggttatgcatacatatatgtatatacacatatatgcagat

SEQ ID NO: 643188 - DNA, 120 bp, Artificial Sequence
  ENSG00000182070_42 (sequence is synthesized)
atgtatacctatacatatatatctgtatctatgtatctatatgagatagattaattttaagaacctgactcacacagttatgaaggctggcaaatccaaaatctgcagggagagcctata

SEQ ID NO: 643189 - DNA, 120 bp, Artificial Sequence
  ENSG00000182070_43 (sequence is synthesized)
ggctggagactcagggaagagccagtgttgtaatttaagtccaaaggcagtctcctggcagaattctctcttgattggggcaagtcagtcttttgttctatccaggccttcaactgcttg

SEQ ID NO: 643190 - DNA, 120 bp, Artificial Sequence
  ENSG00000182070_44 (sequence is synthesized)
gaaggcacattataaaggtcaatatgctttactcaaagtttattaatttaaatgccagtctcatccagaaatacccacacagaaacatccagaataatatctgaccagaatctgggcatt

SEQ ID NO: 643191 - DNA, 120 bp, Artificial Sequence
  ENSG00000182070_45 (sequence is synthesized)
gtgccccaatcaaattgacacatacaactattcagtgtgaaaaaaccaaggcagagagcaggtaagtacagcacctccccacaccagagactcaacatcatggtttacaagttactaaag

SEQ ID NO: 643192 - DNA, 120 bp, Artificial Sequence
  ENSG00000182070_46 (sequence is synthesized)
aataatattgggacaaaataaagcttgtaggaattcatccacgttcaaccattgatgtgctgatctcagtgttgtaaagatatcaattctccttaaatttaatctagaaatgtagagtaa

SEQ ID NO: 643193 - DNA, 120 bp, Artificial Sequence
  ENSG00000182070_47 (sequence is synthesized)
tcttaagcagaatgctgtcagacttttctggcataagtgcaaatgctttaaaaaaatatttaattaaagaagtaaaaactgaaagtgaaatgtatgatagagttctgataaatacctctg

SEQ ID NO: 643194 - DNA, 120 bp, Artificial Sequence
  ENSG00000182070_48 (sequence is synthesized)
ccctatattctaagatttcagatttagatgatgactctctaaagagtcgaggatgggaacagaggacagtaactgtggtcgcctccatgcaaggtctgagactaacatacacaatgacaa

SEQ ID NO: 643195 - DNA, 120 bp, Artificial Sequence
  ENSG00000182070_49 (sequence is synthesized)
ttgcacaacctttatttgtagtgaacacaactttttaacatgaaaaatcctaaggaatatacaaatacaacagatatcatgaattagtaagtgaatttagcaagttttaatgtaggaagt

SEQ ID NO: 643196 - DNA, 120 bp, Artificial Sequence
  ENSG00000182070_50 (sequence is synthesized)
aagtctatgtaaaaattgtttgtaaatctacatactggaatccagtaattagaaaataacaatagtttgccataaagtgtaaaaacataagatacataatttatatttatgcatacaata

SEQ ID NO: 643197 - DNA, 120 bp, Artificial Sequence
  ENSG00000182070_51 (sequence is synthesized)
acaagaattttacactgataattacaagacattgttgaaagaaaggcaaaatctaaagaaatagagagctgttccatattcatggattggaaatctcattattgttaaaatgttaatttc

SEQ ID NO: 643198 - DNA, 120 bp, Artificial Sequence
  ENSG00000182070_52 (sequence is synthesized)
cttaaagtcatctaaagattcaaagcaatcccaaatataatcataacaaccttttgtttgccatgaattgagaaggtaattttatattttacatgggaattcaaaggacctacagccaaa

SEQ ID NO: 643199 - DNA, 120 bp, Artificial Sequence
  ENSG00000182070_53 (sequence is synthesized)
gcaatctcaaagaataaatgttgattactgagaatacctgacatcaagacttactacaaaattctaataataaagacagtgtgatatcagcatgagaacagctaatgaaacacaacagag

SEQ ID NO: 643200 - DNA, 120 bp, Artificial Sequence
  ENSG00000182070_54 (sequence is synthesized)
agcctgtaagtaagcccacatttgtacaatccattgattttatacaaaagtatcaaagcaattcaatggaaaatagaaagccttttaaacaaaattagatattcatatatatctatatat

SEQ ID NO: 643201 - DNA, 120 bp, Artificial Sequence
  ENSG00000182070_55 (sequence is synthesized)
aatatatatatgttcaatctaaaaatttatttaataccacacaaaatataggatgtatatttatgggataatatagaagtgaaaaataaggcttctaggaagaaaaaatcagaatacctt

SEQ ID NO: 643202 - DNA, 120 bp, Artificial Sequence
  ENSG00000182070_56 (sequence is synthesized)
aataccttaatatattgaggattggcaaagatttccttcttacgacacaggaagcaacaagatataaccttatcaacaatttcgactacagcaaaagtatactgctaagaaaattaacaa

SEQ ID NO: 643203 - DNA, 120 bp, Artificial Sequence
  ENSG00000182070_57 (sequence is synthesized)
acaagcaataaacagactaaaatcatgcaaaaaaacttaaatctgaattatataagtattttttaaattttatataaataactcataactccatgtaaaagacaaaaatgtgcaaaacat

SEQ ID NO: 643204 - DNA, 120 bp, Artificial Sequence
  ENSG00000182070_58 (sequence is synthesized)
ctagacacttcataaataaactaataagctatgcaaaagtatggatcataatttagaaaaaaactttttagtgagtaaaactgattagttcatattttagtatttatatgatgttctagt

SEQ ID NO: 643205 - DNA, 67 bp, Artificial Sequence
  ENSG00000182070_59 (sequence is synthesized)
ttcatattttagtatttatatgatgtttcgcggaccctcgccgtgagtgttacagttcttaaaggca

SEQ ID NO: 643206 - DNA, 87 bp, Artificial Sequence
  ENSG00000182070_60 (sequence is synthesized)
ttgctggctcaggagtgaaagaggtggcgcgtctggagttgttcgtttctcccggtgggttcgggtccggctggcttcaggagtgaa

SEQ ID NO: 643207 - DNA, 87 bp, Artificial Sequence
  ENSG00000182070_61 (sequence is synthesized)
ggcagtgtgcacccaaagagtgagcaggagcaagatttattgcaaagagagaaagaacaaagctaccacgagcttgccactgctggc

SEQ ID NO: 643208 - DNA, 86 bp, Artificial Sequence
  ENSG00000182070_62 (sequence is synthesized)
aacaaagctaccacgagctgcttatctggccccacccacattcctgctgactggtagaaccgagtggtctgttttgacagggcgct

SEQ ID NO: 643209 - DNA, 120 bp, Artificial Sequence
  ENSG00000182070_63 (sequence is synthesized)
caaaggttctccacctccccaccagatttggtagatacagagtgtccacacaaagggtctccaagtccctaccagagtagctagatacagagtgtggactgttgcattcagaaaccctga

SEQ ID NO: 643210 - DNA, 70 bp, Artificial Sequence
  ENSG00000182070_64 (sequence is synthesized)
agtgtccacacaaagggtctccaagtccctaccagagtagctagatacagagtgtggactgttgcattca

SEQ ID NO: 643211 - DNA, 90 bp, Artificial Sequence
  ENSG00000182070_65 (sequence is synthesized)
ggggtccgcctcagcaagcgctgggcgcagccctggttcccgcccacgcctctccctccacacctccctgtaagctgagggagctggctc

SEQ ID NO: 643212 - DNA, 60 bp, Artificial Sequence
  ENSG00000182070_66 (sequence is synthesized)
tcagcaagcgctgggcgcagccctggttcccgcccacgcctctccctccacacctccctg

SEQ ID NO: 643213 - DNA, 120 bp, Artificial Sequence
  ENSG00000182070_67 (sequence is synthesized)
cccaggcagaggaggcgccgagagcaagccagggctgtgaggaccgccagcacgctgtcacctctcactaggacaggtaaaattaattgaaagtaatttttttttttaaacaacaatgct

SEQ ID NO: 643214 - DNA, 120 bp, Artificial Sequence
  ENSG00000182070_68 (sequence is synthesized)
ttcccctgaaaaagtaggaatggtcatgttgggaaaactttctggagtgcaggaaatattttatatcttgataggataatgagtaacgtatttgcaaaaaataagcttaagatcaattta

SEQ ID NO: 643215 - DNA, 120 bp, Artificial Sequence
  ENSG00000182070_69 (sequence is synthesized)
ttttactgtcttttcttagtaacaaaagagtagtataaacaaacaccaaacagctattacatttgcttttcatagtaatattggctagccatatgggagttatttactgggtattctagg

SEQ ID NO: 643216 - DNA, 120 bp, Artificial Sequence
  ENSG00000182070_70 (sequence is synthesized)
cttgaagaaatgagaaaaactgttgaggataatggaggataatttttatacttgtgaagaaaataattacttgtaagtaaagtattgagactagaaagaatcttgaaggtttggattcca

SEQ ID NO: 643217 - DNA, 120 bp, Artificial Sequence
  ENSG00000182070_71 (sequence is synthesized)
attgcaattgcaagtatggattcattgtttttaataaagagagatacaaacatatgcaaatgtaattatataattgtgtgtgtgtgtgtgcatgtatttcctctgttcacttataggaac

SEQ ID NO: 643218 - DNA, 120 bp, Artificial Sequence
  ENSG00000182070_72 (sequence is synthesized)
caaaagcaatgaacaaacaatggcaatgaataaacaatccttgtttcaagatactgattttcttaataactttgttcacagaaagagaccagggcttttcggaaaaatatctgtttctgt

SEQ ID NO: 643219 - DNA, 120 bp, Artificial Sequence
  ENSG00000182070_73 (sequence is synthesized)
ggcttgagctgaaaaagcataaagtaatttgaaatgatgatgcagagatagaaagtaaggaagtactcaaagcatgattggaacatgtggaaaggacccaagatctggttggaaggagct

SEQ ID NO: 643220 - DNA, 120 bp, Artificial Sequence
  ENSG00000182070_74 (sequence is synthesized)
ccttatggcaaaatttagaaaattttgagcatcaaaataaataattatggcaaaggattatagcccattgaataaaatcagattctgtgaatctatacaaacataagtaaagcaatacaa

SEQ ID NO: 643221 - DNA, 120 bp, Artificial Sequence
  ENSG00000182070_75 (sequence is synthesized)
atttgggaaaagggaatgttcttctttacagtgtaatgccaataaataaataggaaaggtatgatggatttaaaaattcataaacagaataaaaaaactcatgagtgaaagtgttcagag

SEQ ID NO: 643222 - DNA, 120 bp, Artificial Sequence
  ENSG00000182083_0 (sequence is synthesized)
aggcctgcagctcccaagcacagaggcatgagtggggagaatgtcaccaaggtcagcaccttcatcctggtgggcctccccacggccccagggctgcagtacctgctcttcctcctcttc

SEQ ID NO: 643223 - DNA, 120 bp, Artificial Sequence
  ENSG00000182083_1 (sequence is synthesized)
ctgctcacctacctctttgtcctggtggagaacctggccatcatcctcatcgtctggagcagcacctccctccacaggcccatgtactactttctgagctccatgtctttcctggagatc

SEQ ID NO: 643224 - DNA, 120 bp, Artificial Sequence
  ENSG00000182083_2 (sequence is synthesized)
tggtacgtgtctgacatcacccccaagatgctggagggcttcctcctccagcagaaacgcatctctttcgtcgggtgcatgacgcagctctacttcttcagctccctggtgtgcaccgag

SEQ ID NO: 643225 - DNA, 120 bp, Artificial Sequence
  ENSG00000182083_3 (sequence is synthesized)
tgtgtgcttctggcctccatggcctacgaccgctacgtggccatctgccacccgctgcgctaccacgtccttgtgaccccggggctgtgcctccagctggtgggcttctcctttgtgagt

SEQ ID NO: 643226 - DNA, 120 bp, Artificial Sequence
  ENSG00000182083_4 (sequence is synthesized)
ggcttcaccatctccatgatcaaggtctgttttatctccagcgtcacgttctgtggctccaacgtcttgaaccacttcttctgtgacatttcccccatcctcaagctggcctgcacggac

SEQ ID NO: 643227 - DNA, 120 bp, Artificial Sequence
  ENSG00000182083_5 (sequence is synthesized)
ttctccactgcagagctggtggatttcatcctggccttcatcatcctggtgtttccgctcctggccaccatactgtcatattggcacatcaccctggctgtcctgcgcatcccctcggcc

SEQ ID NO: 643228 - DNA, 120 bp, Artificial Sequence
  ENSG00000182083_6 (sequence is synthesized)
ccgtcttctatacagccttgcttttcatgtatgtccggccccaagccattgattcccagagctccaacaagctcatctctgccgtgtacactgttgtcacgccaataattaaccctttga

SEQ ID NO: 643229 - DNA, 120 bp, Artificial Sequence
  ENSG00000182083_7 (sequence is synthesized)
tttactgcctgaggaacaaggaatttaaggacgccttgaaaaaggccttgggcttgggtcaaacttcacactaagacaactaaatgtcctagagtaaaatctgtagtgatgaaacaacat

SEQ ID NO: 643230 - DNA, 120 bp, Artificial Sequence
  ENSG00000182083_8 (sequence is synthesized)
tgtatgtggcactttgtgctctttaaattaatttttaagttaaatttaacaaacctacagaactaagtgaaatttaacaaacctacacaactgtgcacaagtaacaagccttcgtctgca

SEQ ID NO: 643231 - DNA, 120 bp, Artificial Sequence
  ENSG00000182083_9 (sequence is synthesized)
tatgttttcacaaaaggactgtgctcatggaaccagctcccagatcaagaactagaagctgccttcacgccctctcccagtcattaacccttctccacaaaaagcactgtcctgacttcc

SEQ ID NO: 643232 - DNA, 120 bp, Artificial Sequence
  ENSG00000182083_10 (sequence is synthesized)
aaaaccagatgctagcattggtgtttctgaggggcttacacataaagtatgtgccctgttatgttcagcttctttcattcaccgtgttgcttgagtgaatccttgatgtttttgcatgta

SEQ ID NO: 643233 - DNA, 120 bp, Artificial Sequence
  ENSG00000182083_11 (sequence is synthesized)
acaataattcatgcattctcattgctatccaatattcataataaataatacatttatactgtataatacacaatgcataatacattcatactgggataatacatatactgggataatgca

SEQ ID NO: 643234 - DNA, 120 bp, Artificial Sequence
  ENSG00000182087_0 (sequence is synthesized)
ggaagatggcggcggcggccgggaggccgtgaggagagcggcggctgcgagggcggccgatggcggccgggaggcgccctcggacacttgcgggtcgttagggcgcgacgctgggaggca

SEQ ID NO: 643235 - DNA, 120 bp, Artificial Sequence
  ENSG00000182087_1 (sequence is synthesized)
cccgggcccaacggcggcggcggcggcccggcccccgcgcgcgggcctcgcacccccaatctcaaccccaaccccctcatcaacgtgcgcgaccggctcttccacgcgctgttcttcaag

SEQ ID NO: 643236 - DNA, 120 bp, Artificial Sequence
  ENSG00000182087_2 (sequence is synthesized)
gcgaccggctcttccacgcgctgttcttcaagatggctgtcacctattcgcggctcttcccgcccgccttccgccgtctcttcgagttcttcgtgctgctcaaggccctgtttgtgctct

SEQ ID NO: 643237 - DNA, 120 bp, Artificial Sequence
  ENSG00000182087_3 (sequence is synthesized)
tcgtcctggcctacatccacatcgtcttctcccgctcgcccatcaactgcctggagcatgtgcgtgacaagtggccgcgtgagggcatcctgcgtgtggaagtgcggcacaactcgagcc

SEQ ID NO: 643238 - DNA, 120 bp, Artificial Sequence
  ENSG00000182087_4 (sequence is synthesized)
gcgcgcccgtcttcctacagttctgtgacagcggcggccgcgggagcttcccgggcctggccgtggaaccaggcagcaacctggacatggaagatgaggaggaggaagagctgaccatgg

SEQ ID NO: 643239 - DNA, 120 bp, Artificial Sequence
  ENSG00000182087_5 (sequence is synthesized)
agatgtttgggaacagctccatcaagtttgagctggacatcgagcccaaggtgttcaagccgccgagtagcacagaggccctgaatgacagccaggagttccccttccccgagacgccca

SEQ ID NO: 643240 - DNA, 120 bp, Artificial Sequence
  ENSG00000182087_6 (sequence is synthesized)
ccaaagtgtggccgcaggacgagtacatcgtggagtactcactagagtatggcttccttcgcctgtcgcaggccacccgccagcgcctgagcatccccgtcatggtggtcaccctggacc

SEQ ID NO: 643241 - DNA, 120 bp, Artificial Sequence
  ENSG00000182087_7 (sequence is synthesized)
ccacgcgggaccagtgcttcggggaccgcttcagccgcctgctgctggatgagttcctgggctacgatgacatcctcatgtccagcgtgaagggcctggccgagaacgaggagaacaagg

SEQ ID NO: 643242 - DNA, 120 bp, Artificial Sequence
  ENSG00000182087_8 (sequence is synthesized)
gcttcctgcggaatgtggtgtcgggcgagcactaccgctttgtgagcatgtggatggcgcggacgtcctacctggccgccttcgccatcatggtcatcttcacgctgagcgtgtccatgc

SEQ ID NO: 643243 - DNA, 120 bp, Artificial Sequence
  ENSG00000182087_9 (sequence is synthesized)
tgctgcggtactcacaccaccagatcttcgtcttcatcgtggacctgctgcagatgctggagatgaacatggccatcgccttccccgcagcgcccctgctgaccgtcatcctggccctcg

SEQ ID NO: 643244 - DNA, 120 bp, Artificial Sequence
  ENSG00000182087_10 (sequence is synthesized)
cctcatcgtgtggctcgcggaccagtatgacgccatctgctgccacaccagcaccagcaagcggcattggctgcgcattccatgatctacttcttccaccactacgagctgcctgccatc

SEQ ID NO: 643245 - DNA, 120 bp, Artificial Sequence
  ENSG00000182087_11 (sequence is synthesized)
ctgcagcaggtccgcatccaggagatgctgcttcaggcgccgccactgggccccgggacccccacggcgctgcccgatgacatgaacaacaactcgggcgccccggctacagcccctgac

SEQ ID NO: 643246 - DNA, 120 bp, Artificial Sequence
  ENSG00000182087_12 (sequence is synthesized)
cctgggccccgtctcgcctggggccagcgggagtcccgggcctgtggcagcggcgcccagctccctggtggccgcggcagcctcagtggcagcagctgccggtggtgacctgggttggat

SEQ ID NO: 643247 - DNA, 120 bp, Artificial Sequence
  ENSG00000182087_13 (sequence is synthesized)
ggtggtgacctgggttggatggcagagaccgctgccatcatcacagacgcctccttcctgtccggcctgagcgcctccctcctggagcggcgtccagccagcccgctgggccctgctggg

SEQ ID NO: 643248 - DNA, 120 bp, Artificial Sequence
  ENSG00000182087_14 (sequence is synthesized)
ggcctcccccacgccccccaggacagtgtccccccgagtgactccgcagcttctgacacaactcccctgggggctgcggtaggcgggcctagcccggcctccatggccccaacggaggcg

SEQ ID NO: 643249 - DNA, 120 bp, Artificial Sequence
  ENSG00000182087_15 (sequence is synthesized)
ccctcggaggtggggtcctgagccgcacagctgagccgcctctgacccctgctggctgggcctgaccttcccgagcccgtgggggtgggggaggccagccacctccttcctctgggactg

SEQ ID NO: 643250 - DNA, 120 bp, Artificial Sequence
  ENSG00000182087_16 (sequence is synthesized)
cccagcctgtgtcgggggctttcagggtttcgtggggtttgcccggaaggcggctttcctccccctggtgtgaggtcgcgcccgaggcttgtacccgctagtgaggtgtttgagctggtc

SEQ ID NO: 643251 - DNA, 120 bp, Artificial Sequence
  ENSG00000182087_17 (sequence is synthesized)
agcaaggagagggggtggggttccgcggaaggttctggaggggtcttggtaggtctgcagtgaaccgtcctgaggatggagtggggtcccatggtgcaggtctctgagcaaggcggaggt

SEQ ID NO: 643252 - DNA, 120 bp, Artificial Sequence
  ENSG00000182087_18 (sequence is synthesized)
gtggaggagaggccggcttggggtggggcctcgcgccctagtgccggccggcctcagcccggctctgcctggtgctccctgcagtgccttctccatggccccgccctccccgcgtgtgcg

SEQ ID NO: 643253 - DNA, 120 bp, Artificial Sequence
  ENSG00000182087_19 (sequence is synthesized)
ccaggcttggggtccccgggagagcagagcttgcgcctcgggcatagggacgtggggtgcaggcgccaacatcagtggcagcagccagggccgtggtccagtcccactcggggatggagt

SEQ ID NO: 643254 - DNA, 120 bp, Artificial Sequence
  ENSG00000182087_20 (sequence is synthesized)
gggccggcggccaaaccagtcactcggggaggaatgcggaggagcgctcattccattctatttaattgcagtgtacaaaattgtgtttgtatatagaataaactgtctgttgacagcggc

SEQ ID NO: 643255 - DNA, 120 bp, Artificial Sequence
  ENSG00000182087_21 (sequence is synthesized)
ccttctatgcctatcactaccgcttcaatgggcagtatagcagcctggccctggtcacctcctggctcttcatccagcattccatgatctacttcttccaccactacgagctgcctgcca

SEQ ID NO: 643256 - DNA, 120 bp, Artificial Sequence
  ENSG00000182087_22 (sequence is synthesized)
ttgagtgtttgggcagagcatcatggacccttccatggggtctactgcctgtagctggcccttgcctcagcttcaggattcagagctgtgctggagatggcctcacagcagggcaggctt

SEQ ID NO: 643257 - DNA, 120 bp, Artificial Sequence
  ENSG00000182087_23 (sequence is synthesized)
gaggctgaggcttccagtcccttcccattagcaggactgtatcctcaggctgggccctcacagcccgggctggcgctgctgacacccaggtccctggtcgcccacagtttgagctggaca

SEQ ID NO: 643258 - DNA, 120 bp, Artificial Sequence
  ENSG00000182087_24 (sequence is synthesized)
tgctgcggtactcacaccaccagatcttcgtcttcatcgcgcccctgctgaccgtcatcctggccctcgtcgggatggaggccatcatgtcggagttcttcaacgacaccaccaccgcct

SEQ ID NO: 643259 - DNA, 120 bp, Artificial Sequence
  ENSG00000182087_25 (sequence is synthesized)
ctggagcatgtgggtgcctgctggggagcctgggtcagggacagggtcatggagtgtaggggactggaccacccagggcatgcgagtggctgagccaggttgcgggcagagggtggccag

SEQ ID NO: 643260 - DNA, 120 bp, Artificial Sequence
  ENSG00000182087_26 (sequence is synthesized)
cacccggcctcccccgccccgcgctgcaccccgccccgcccgcttcaaccggcgccgcctctccctgcagggatggaggccatcatgtcggagttcttcaacgacaccaccaccgccttc

SEQ ID NO: 643261 - DNA, 120 bp, Artificial Sequence
  ENSG00000182087_27 (sequence is synthesized)
ccaccagatcttcgtcttcatcggtgagtgtcccgccggcgcagggcggggcgggcgtcctccaggccctcaccgggcgcccgccgccctgtgcccgcagtggacctgctgcagatgctg

SEQ ID NO: 643262 - DNA, 120 bp, Artificial Sequence
  ENSG00000182087_28 (sequence is synthesized)
gggaggggcgctggaggcgggggtggtggctgcgccacgcgggaaccccaggggctgggcctggcagggtgggacctgcagccccgacgccctcaccccgccccgcaggttcttctatct

SEQ ID NO: 643263 - DNA, 120 bp, Artificial Sequence
  ENSG00000182087_29 (sequence is synthesized)
acctcctggctcttcatccaggtgaggcctgggcggcaagcagggggcaggccagccgtgcctttccaggcaggagaggctgcagccggggaggatgccctgtggggtcggcccaagcgg

SEQ ID NO: 643264 - DNA, 120 bp, Artificial Sequence
  ENSG00000182087_30 (sequence is synthesized)
gcagaggtagcgtggatggtcccgggtgggctgccctctgggagcagcggctgggtggggcaggggcgggcccgtcctgactcccactctccctcccgcagcattccatgatctacttct

SEQ ID NO: 643265 - DNA, 120 bp, Artificial Sequence
  ENSG00000182087_31 (sequence is synthesized)
cctcctgctggtgcgggacggggggctgtgcaggaagcactggggtctgccccgccccaggcacgcttcccagggctggggtcctggatgggtttcctaagaatgggcagggccaggaag

SEQ ID NO: 643266 - DNA, 120 bp, Artificial Sequence
  ENSG00000182087_32 (sequence is synthesized)
ggccagccgtgcctttccaggcaggagaggctgcagccggggaggatgccctgtggggtcggcccaagcgggcagagcattccatgatctacttcttccaccactacgagctgcctgcca

SEQ ID NO: 643267 - DNA, 120 bp, Artificial Sequence
  ENSG00000182087_33 (sequence is synthesized)
gcggccgcgggagcttcccgggcctggccgtggaaccaggcagcaacctggacatggaagatgaggaggaggaagagctgaccatggagatgtttgggaacagctccatcaaggtccctg

SEQ ID NO: 643268 - DNA, 120 bp, Artificial Sequence
  ENSG00000182093_0 (sequence is synthesized)
gttgttgtggtccccatggagctgccgtagcggacccagcacagccaggagcgtccgggatgagctcagccgcggccgaccactgggcgtggttgctggtgctcagcttcgtgtttggat

SEQ ID NO: 643269 - DNA, 120 bp, Artificial Sequence
  ENSG00000182093_1 (sequence is synthesized)
gcaatgttcttaggatcctcctcccgtccttctcatccttcatgtccagggtgctgcagaaggacgcggagcaggagtcacagatgagagcggagatccaggacatgaagcaggagctct

SEQ ID NO: 643270 - DNA, 120 bp, Artificial Sequence
  ENSG00000182093_2 (sequence is synthesized)
ccacagtcaacatgatggacgagtttgccagatatgccaggctggaaagaaagatcaacaagatgacggataagctcaaaacccatgtgaaagctcggacagctcaattagccaagataa

SEQ ID NO: 643271 - DNA, 120 bp, Artificial Sequence
  ENSG00000182093_3 (sequence is synthesized)
aatgggtgataagtgtcgctttctacgtattgcaggctgccctgatgatctcactcatttggaagtattattctgtccctgtggctgtcgtgccgagtaaatggataacccctctagacc

SEQ ID NO: 643272 - DNA, 120 bp, Artificial Sequence
  ENSG00000182093_4 (sequence is synthesized)
gcctggtagcctttcctactagagtagcaggtggtgttggaattacctgttggattttagtctgtaacaaagttgtcgctattgtgcttcatccgttcagctgaacaggaggatggatac

SEQ ID NO: 643273 - DNA, 120 bp, Artificial Sequence
  ENSG00000182093_5 (sequence is synthesized)
agccgcgaggctaaaaaacggatttcctcttcctagcttaaaatctgatttacactgttttgttttttaagaaacaaaagtgcatagtttagattttttttttgttgaatatgtttgttc

SEQ ID NO: 643274 - DNA, 120 bp, Artificial Sequence
  ENSG00000182093_6 (sequence is synthesized)
acaccgtcctcgatctgtacgaaatgtgaaatgtttagggacatctccatgctgtcacttgtgatttgccctcttatgtattttggtcatattgccaactggaaagtcaaaattttctaa

SEQ ID NO: 643275 - DNA, 120 bp, Artificial Sequence
  ENSG00000182093_7 (sequence is synthesized)
caactttaagtaagttctttgaagacttagtgctgtttttaatccagtttagaaagtaacttaattttaataccactactaaaaattcgaaaatttcttctttaatcacattcaatatgg

SEQ ID NO: 643276 - DNA, 120 bp, Artificial Sequence
  ENSG00000182093_8 (sequence is synthesized)
ttaaaagaacaacactaattgacattgcgtgggctttttctccctttgtttaaaatgtcatttgttgagcaagagttgtatagtattatctacttacttgaggctgttaatttttcatta

SEQ ID NO: 643277 - DNA, 120 bp, Artificial Sequence
  ENSG00000182093_9 (sequence is synthesized)
cagtgttttgtaaatgtatccacgagaccatgatgcattgttttgtgctcaacttgtgttttgtatttaaagcattttgaatgaagtgtattttataagcatttaatatttatgctcttt

SEQ ID NO: 643278 - DNA, 120 bp, Artificial Sequence
  ENSG00000182093_10 (sequence is synthesized)
agaatggaacacagaaaacaaaccttataagtcctgattaatctgaaccaataacctgtgtggcctacaaagtataattctattaaatgttccttaaaacacttttttctaattaaaatc

SEQ ID NO: 643279 - DNA, 120 bp, Artificial Sequence
  ENSG00000182093_11 (sequence is synthesized)
tttgcaaatgcttgtgtaacttcctgccttacagctacttgtttgctgtgagccacccgcaactgacaagtggctgttaactgagtcaccatatcccagtaaagctgaattttctcacta

SEQ ID NO: 643280 - DNA, 120 bp, Artificial Sequence
  ENSG00000182093_12 (sequence is synthesized)
ggccacaggagctctggccaaggccccaggagtcaagaagtgcacagagggcatggatgcgttggaaaggggaggtgctggccttttaaagatcatatggcttggacaaggaacatgagc

SEQ ID NO: 643281 - DNA, 120 bp, Artificial Sequence
  ENSG00000182093_13 (sequence is synthesized)
atgctgcagacctcctattgttttctaatgccacgccgaagaaatgctcatctatatttgtttttgttagatcagccaaagacatagcaaacaacctaataaaagaaaagtaaaacctaa

SEQ ID NO: 643282 - DNA, 120 bp, Artificial Sequence
  ENSG00000182093_14 (sequence is synthesized)
tgatgggagggcagaggcatgagagggtgctaagggactaaacgccatggccacaggagctctggccaaggccccaggagtcaagaagtgcacagagggcatggatgcgttggaaagggg

SEQ ID NO: 643283 - DNA, 120 bp, Artificial Sequence
  ENSG00000182093_15 (sequence is synthesized)
ctgaataatcatactgagaacttaaacttccacaggagcactgagatctgctataatcaacactcttattggaagcattactgttccgtgaaaaatcgcctgtgcctgggcttctcttgc

SEQ ID NO: 643284 - DNA, 120 bp, Artificial Sequence
  ENSG00000182093_16 (sequence is synthesized)
tgggattacaggcgtgagccacctcgccctgctcactttgcatacatttgagttgggattctttcgctgcaaaacctgatcttcacctagattcagtgaaagctcggacagctcaattag

SEQ ID NO: 643285 - DNA, 120 bp, Artificial Sequence
  ENSG00000182093_17 (sequence is synthesized)
gaacaaagaaagggtttttattaaatatcaaatgctccttcttacatgtacaccaggaggcaagaaaggctttggactcaagaccattgaattttagtaacaaccatggttaagagaggt

SEQ ID NO: 643286 - DNA, 120 bp, Artificial Sequence
  ENSG00000182093_18 (sequence is synthesized)
gggcatatatgaagtaaggaggaaggaacccagggatgtcagagtgtgacagacgtgcatgtgcacacacacacacacacacggggggtggggcggggagagagagctcttgtctccttg

SEQ ID NO: 643287 - DNA, 120 bp, Artificial Sequence
  ENSG00000182093_19 (sequence is synthesized)
tgccccttagggtcaaatctatgggccaagggatattcagggggtgagaaacatctctgaggtttgggaaagtctcagtgcaagaggccttggcgtggtccaggaaaattgcaagcccct

SEQ ID NO: 643288 - DNA, 120 bp, Artificial Sequence
  ENSG00000182093_20 (sequence is synthesized)
taaaaagcgcctcccccgccgccccattcatcatggagctaaagtaacatggtattgcccaagtgtaagttagaaagggctaaataccctctctaggccagagattgtgcttcccttacc

SEQ ID NO: 643289 - DNA, 120 bp, Artificial Sequence
  ENSG00000182093_21 (sequence is synthesized)
cttgcaaccagtgggacctgtggagggagctgcacctgccctggagtccttaaggttacagatccaggtgctcccatagcacaggctttgcaacagagaatctagccagggatcagatgg

SEQ ID NO: 643290 - DNA, 120 bp, Artificial Sequence
  ENSG00000182093_22 (sequence is synthesized)
aggatgcatctcagagcatttgcatcaacagtcagcaggggacaatcaccaggatttatttgaccagactgagaagaggccaggagttttagcagccacattcagtacacatcagacagg

SEQ ID NO: 643291 - DNA, 120 bp, Artificial Sequence
  ENSG00000182093_23 (sequence is synthesized)
gtcctgggaatttgatttaagactagtcactcgtcaggagaaccagctctagagaggggccagagggcagaacacagaccagaggcctctttttcactccaccaagagtacacatatgtt

SEQ ID NO: 643292 - DNA, 120 bp, Artificial Sequence
  ENSG00000182093_24 (sequence is synthesized)
ttctctcatgcccaggatgccatctccactgagacagaagatagggatgaggaaaaagtctgcaagtctaagagacaacctagcataagactgttttgagttagaagagactgagacaag

SEQ ID NO: 643293 - DNA, 120 bp, Artificial Sequence
  ENSG00000182093_25 (sequence is synthesized)
ctggggctcataaggaagtatggcttagttacagaaaataaagaacatgacatatttttgtacctgaattgtacagtgtaaattttctactcatttgaatcataaaattagtttattatc

SEQ ID NO: 643294 - DNA, 120 bp, Artificial Sequence
  ENSG00000182093_26 (sequence is synthesized)
agaggtacacaaagggataaaacatgagaatattaatcttttctagaatttaagtttctggaggcaaaaatgttaacagttcatctctcttttcttattgtggtaacagccaaaagaaca

SEQ ID NO: 643295 - DNA, 120 bp, Artificial Sequence
  ENSG00000182093_27 (sequence is synthesized)
gtaaatgctgacagttcatcaccatgaaaagttgatcaggtgtattctggataatagctttcagatgaaggatactgtgtaaaacattttagaatgagttttcatccacactggttagga

SEQ ID NO: 643296 - DNA, 120 bp, Artificial Sequence
  ENSG00000182093_28 (sequence is synthesized)
aacattttcatgtttacagggacacattttgattacctgaaaaattcagttctatcttttgatttggtctggacacctggaggtcagcaaccgagagcaggaaggaggcacagcaacaac

SEQ ID NO: 643297 - DNA, 120 bp, Artificial Sequence
  ENSG00000182093_29 (sequence is synthesized)
agaacaacaacaagaggctgcgacaggggcggcgtgggtcaaaaggaagcaacctggaggacggtcctccttgcggcttggagcagagcttcagctcttaggtgctctgaccctggagga

SEQ ID NO: 643298 - DNA, 120 bp, Artificial Sequence
  ENSG00000182093_30 (sequence is synthesized)
catgtgaaagctcggacagctcaattagccaagataaaatgggtgataagtgtcgctttctacgtattgcaggtgacgatggcttaatagaatttaccacagttactttagagtctccga

SEQ ID NO: 643299 - DNA, 120 bp, Artificial Sequence
  ENSG00000182093_31 (sequence is synthesized)
aagcatggctggtggaggcctgactgggaggcaggggatgcgactccttactttgcaaaggctcctctgagccttttgcaacaccaggacttgattgtattctccagcagtatttggact

SEQ ID NO: 643300 - DNA, 120 bp, Artificial Sequence
  ENSG00000182093_32 (sequence is synthesized)
tccaaatgtttctcttcccctgataaatctatattagaaaaataggcaatttagtgctgtttaaaatgaatggatctctatttcaagatggcatgtctagtacacttacgtgcaccgcct

SEQ ID NO: 643301 - DNA, 120 bp, Artificial Sequence
  ENSG00000182093_33 (sequence is synthesized)
ctcccaagagctgaagattataagccagaagcaaacaaaggcaggcaaggaaatttgaggttgttgcatctggaagtaaacatgtagctacttcttctaataaaacagagctcttaggtg

SEQ ID NO: 643302 - DNA, 120 bp, Artificial Sequence
  ENSG00000182093_34 (sequence is synthesized)
gtaagtggctgcctggcctcccaagggccggtggggatgccgccccagtcccccggcgggtctggcgtaggtacaggggtctcaactgggcgactgaaggccgtagtagcgtcttggttg

SEQ ID NO: 643303 - DNA, 120 bp, Artificial Sequence
  ENSG00000182093_35 (sequence is synthesized)
gtccgtaagcttttttgagatagttgttagcgtctaaaaggtacgacgctttaccccaaaatcagactttctgggttctagggggttgggagaaacaccgggcaaccctggactcttctg

SEQ ID NO: 643304 - DNA, 120 bp, Artificial Sequence
  ENSG00000182093_36 (sequence is synthesized)
tttccgttaatcctggttcctagaggcattcgagcagccctcggccagggtttcccagaggcctggcgggcgaagtcagctgttccaggtcccggagagatggatcctcgcgtccaggag

SEQ ID NO: 643305 - DNA, 120 bp, Artificial Sequence
  ENSG00000182093_37 (sequence is synthesized)
cccacattcttgggatgtccagggtgctgcagaaggacgcggagcaggagtcacagatgagagcggagatccaggacatgaagcaggagctctccacagtcaacatgatggacgagtttg

SEQ ID NO: 643306 - DNA, 120 bp, Artificial Sequence
  ENSG00000182093_38 (sequence is synthesized)
gaatattgatggaaacttaagttatctggaggaaactcagtaataagtattactttcctcttatttgctggtgaacctttgctttctaagcacagaaatatctaagatcctctcagattt

SEQ ID NO: 643307 - DNA, 120 bp, Artificial Sequence
  ENSG00000182093_39 (sequence is synthesized)
tcctcagagccaactctttaaaattttaagctaactcttaaaaattgtaggttttcatttttaaattcatcacttttctgagagaagcccagaaaaaaagtctcacagtggattcccaga

SEQ ID NO: 643308 - DNA, 120 bp, Artificial Sequence
  ENSG00000182093_40 (sequence is synthesized)
atgcgcagacaccctcaggcgactggcgggtcgcggcttccaagctctaaatggagagttgtccctactgtgcggcaggcggaggagacctatgtccagggtgctgcagaaggacgcgga

SEQ ID NO: 643309 - DNA, 120 bp, Artificial Sequence
  ENSG00000182093_41 (sequence is synthesized)
aaagggtatcaaggaagagttaaatgggaagttgggtcatggtgtggaatcatattaaggtcagcattgatggcttccggaacttagatagaaagcagtgtcttaatgcaggagtgtgac

SEQ ID NO: 643310 - DNA, 120 bp, Artificial Sequence
  ENSG00000182093_42 (sequence is synthesized)
cgtagcctgggtgtaagacgggtggcagtacctcacgtgggagctgtggaaggctgacatccctcttcttacttcggctcatactgcagaagtgggcctagaactcggtgtgggatgact

SEQ ID NO: 643311 - DNA, 120 bp, Artificial Sequence
  ENSG00000182093_43 (sequence is synthesized)
ttgaaaatgagtttcaaagtaaagaaacgaacttttgacctttgggaccagactcttccaagctcaaactatgactttcgttaatgtggcagactgtattttcctagaattcccacgaca

SEQ ID NO: 643312 - DNA, 120 bp, Artificial Sequence
  ENSG00000182093_44 (sequence is synthesized)
agatttctagtcctatatgctcttcaacaacctcgtgactcgctaccaaaagctcttaggtgctctgaccctggaggagagggatttcactgagatgagaaggatgcgtgatgggatcca

SEQ ID NO: 643313 - DNA, 120 bp, Artificial Sequence
  ENSG00000182093_45 (sequence is synthesized)
tcagggcagcccgtgtgctgagggaccccggtcacagtgtgtgcacagtcagagagctgtctctgtggctaggaaaacagacagaggggcctgtccaggcccaggacaagctggactccc

SEQ ID NO: 643314 - DNA, 120 bp, Artificial Sequence
  ENSG00000182093_46 (sequence is synthesized)
tgtatccttcacttttattctggaagacttaccaaatgagggctcatacccactgtcagaatgctctagctccatttcctctctgttactgagatgcttgcctgtactatgactgtacct

SEQ ID NO: 643315 - DNA, 120 bp, Artificial Sequence
  ENSG00000182093_47 (sequence is synthesized)
ggatcctcctcccgtccttctcatccttcgtaagtggctgcctggcctcccaagggccggtggggatgccgccccagtcccccggcgggtctggcgtagatgtccagggtgctgcagaag

SEQ ID NO: 643316 - DNA, 120 bp, Artificial Sequence
  ENSG00000182093_48 (sequence is synthesized)
gttcacataggaaggctcgcctacttgttggcagtgttcagacatgctgctgagctcgtctttaatttgactttctcattcaaggtttcaccaagggacattagtggctgtgcgtgctca

SEQ ID NO: 643317 - DNA, 120 bp, Artificial Sequence
  ENSG00000182093_49 (sequence is synthesized)
tctgttgtctgtggggactgggttcctaggcttgaggtgctcagtctggagagttttcctggttttattttcgcatttccctgtcctcccttctgtgtggtcggttgtgtgattggcagg

SEQ ID NO: 643318 - DNA, 120 bp, Artificial Sequence
  ENSG00000182093_50 (sequence is synthesized)
tggactgaaaaataagcagaaaatttaaacacaccagtgaccacagtgcaactgcaactgacgatcagtttccaccaaactgcaacagagagagtggctttgccgtctgggccagctgag

SEQ ID NO: 643319 - DNA, 120 bp, Artificial Sequence
  ENSG00000182093_51 (sequence is synthesized)
gtttggaacacaacccgggatacttgtgtggttgggttcagtcagtcaagggaaacaagaagctaacccgtggctgggagtgttcatgcaatgctcgtggaatactcagcgcaaagcctg

SEQ ID NO: 643320 - DNA, 120 bp, Artificial Sequence
  ENSG00000182093_52 (sequence is synthesized)
gggcttacgggccgagtgccctttgagattcaactttttctaaattatccttcactttctgctgtaaagagtggccacctcctttttcctctaggggactgaagcgagaggaggatattg

SEQ ID NO: 643321 - DNA, 120 bp, Artificial Sequence
  ENSG00000182093_53 (sequence is synthesized)
cagggtttgcctctgtggtcatcttcttagagagcaccccctccgcccccacacccttttcctcagagccgttgcttagtgagtccctgccatggaccaggcttgggaatggtccccaag

SEQ ID NO: 643322 - DNA, 120 bp, Artificial Sequence
  ENSG00000182093_54 (sequence is synthesized)
tattagtttaggaggacgactctctgcttcacaggacctaccccagaatcctgtgactcagaagcgcgcttgtgaagtgcgcatgtgcgggcagggcctccagtggggctctcgtggggg

SEQ ID NO: 643323 - DNA, 120 bp, Artificial Sequence
  ENSG00000182093_55 (sequence is synthesized)
caggcaaggaaatttgaggttgttgcatctggaagtaaacatgtagctacttcttctaataaaacagaggctgctttaaataatttctattaatagccttttctgaacaatcacagagaa

SEQ ID NO: 643324 - DNA, 120 bp, Artificial Sequence
  ENSG00000182093_56 (sequence is synthesized)
gtgataagtgtcgctttctacgtattgcaggtaagtgtgctagagcgtcagccgggtcattggagttggtgaccccggcctccagagccgtgtctgcagatccagggctgggagttcggg

SEQ ID NO: 643325 - DNA, 120 bp, Artificial Sequence
  ENSG00000182093_57 (sequence is synthesized)
ctgttccaccttcagctgtcgtgtcgtgtgtccctgcccacatggagctctaaacactctcggtctctaagtcagactaaaaggaagcctttctcttgaggagagttgttaaagtttggg

SEQ ID NO: 643326 - DNA, 120 bp, Artificial Sequence
  ENSG00000182093_58 (sequence is synthesized)
gagttcttcagactgggttgcctgtgaagcccgggtgctgctgcttctctcccaccgctgctgcaaagttgaggacatgctccagggttttttttttgttaggagttctcgactgtccag

SEQ ID NO: 643327 - DNA, 120 bp, Artificial Sequence
  ENSG00000182093_59 (sequence is synthesized)
cggcattggctggcccccctgaagcaggaagcccatgatgcaggttttcagttgcttctgtgaatgagtaatgtcttctttgtctgagggggcctttcgtgtagggagcagtgcctttgc

SEQ ID NO: 643328 - DNA, 120 bp, Artificial Sequence
  ENSG00000182093_60 (sequence is synthesized)
caagtgtgtcatccacaccatttctctgcatgcttcttttaaacttttctcttactagaacatcttcttgattgctttctctttcaggatgaataacttcaattatttttggtggtagtt

SEQ ID NO: 643329 - DNA, 120 bp, Artificial Sequence
  ENSG00000182093_61 (sequence is synthesized)
cctatatgctcttcaacaacctcgtgactcgctaccaaaaggtggagttcactgcttgaactgcctaggactgccctgacaaatgctgtgaggcagaagtgatgctgcgtgactgccaag

SEQ ID NO: 643330 - DNA, 76 bp, Artificial Sequence
  ENSG00000182093_62 (sequence is synthesized)
aaatgctgtgaggcagaagtgatgctgcgtgactgccaaggctaggtcataaaaggcagtactgcatctgtctggt

SEQ ID NO: 643331 - DNA, 120 bp, Artificial Sequence
  ENSG00000182093_63 (sequence is synthesized)
ttactttgtgattgtctatgtttggtttcattaatctacaaaaaagaaaaacccctttttatcttccagaaattctttgttagatctggtagttttggtattcctttctggtattctgga

SEQ ID NO: 643332 - DNA, 75 bp, Artificial Sequence
  ENSG00000182093_64 (sequence is synthesized)
tagatctggtagttttggtattcctttctggtattctggattattttatttatttttagagacactaaagcctct

SEQ ID NO: 643333 - DNA, 120 bp, Artificial Sequence
  ENSG00000182093_65 (sequence is synthesized)
gggattacaggcttgtgccaccatgcccagataatttctaaatttttttgtagagacaggctttgttctgttgccttggctggtcttgacttcttgggctcaaaagatccttctgcctca

SEQ ID NO: 643334 - DNA, 120 bp, Artificial Sequence
  ENSG00000182093_66 (sequence is synthesized)
ctcaacttcccaaaaaatgatgtaagccaccatgcctggcttggagtgttattttaaaaataacattttctgtcatttccatggggctttggcagggagggacaaaaagcatgtgttgag

SEQ ID NO: 643335 - DNA, 120 bp, Artificial Sequence
  ENSG00000182093_67 (sequence is synthesized)
gccaccttcttgatctagccatttctactcttttaaaaatgcataaaatatgtaatttcaaaagcatttttccctttgaaactttattatacaaattaaaatatataaaaaaataaaagt

SEQ ID NO: 643336 - DNA, 80 bp, Artificial Sequence
  ENSG00000182095_0 (sequence is synthesized)
gggagccggggccgccgccggagtcgttgtcgccggagcctggagccgtgaacccagccgcgccagacgccgtgtgcgcc

SEQ ID NO: 643337 - DNA, 80 bp, Artificial Sequence
  ENSG00000182095_1 (sequence is synthesized)
ccgccgccgagcgcaagccccgctggccgccgccatgcacgccgcggagcccccgccgcccgaggactctgggactacgc

SEQ ID NO: 643338 - DNA, 120 bp, Artificial Sequence
  ENSG00000182095_2 (sequence is synthesized)
gcccccgccgcccgaggactctgggactacgccgaggccgaacttttaggtcccactgagctaggcctgcgggccgggtggggggctgatcgcggcactcccgcggaggatggatggccg

SEQ ID NO: 643339 - DNA, 120 bp, Artificial Sequence
  ENSG00000182095_3 (sequence is synthesized)
gatggccgagacttcgggccccagcggtccgtgcacggtcccccgccgccgctgctgtccggcctggccatggacagccaccgcgtgggcgcggccactgccggacgcttgcccgcctcg

SEQ ID NO: 643340 - DNA, 120 bp, Artificial Sequence
  ENSG00000182095_4 (sequence is synthesized)
cggcccgctgccgcccgggaagtacatggccggcctgaatctccatccgcacccgggcgaggccttcttgggcagctttgtggccagcgggatggggccctcggcctcgtcccatgggag

SEQ ID NO: 643341 - DNA, 120 bp, Artificial Sequence
  ENSG00000182095_5 (sequence is synthesized)
cccagtgccactgccctctgacctgtctttccgctccccaacccctagcaacctgcccatggtgcagctgtgggccgcccacgcccatgaaggcttctcccacctgcccagtgggctgta

SEQ ID NO: 643342 - DNA, 120 bp, Artificial Sequence
  ENSG00000182095_6 (sequence is synthesized)
cccatcctacctccacctgaaccacctggagccccccagcagtgggagccccctcctcagccagctgggtcagcccagcattttcgatacccagaaaggtcaggggccaggaggagacgg

SEQ ID NO: 643343 - DNA, 120 bp, Artificial Sequence
  ENSG00000182095_7 (sequence is synthesized)
tttctacctgcccaccgcgggggctccgggctccctgcactctcacgcgccctcggcccggacccctggcggcggccactcctcgggcgccccggccaaaggctcgtcgtcgcgggacgg

SEQ ID NO: 643344 - DNA, 120 bp, Artificial Sequence
  ENSG00000182095_8 (sequence is synthesized)
caaaggctcgtcgtcgcgggacggtccagccaaggagcgggcgggccgcggcggggagccgcctccgcttttcggcaagaaggacccgcgcgcccggggcgaggaggcctcggggccacg

SEQ ID NO: 643345 - DNA, 120 bp, Artificial Sequence
  ENSG00000182095_9 (sequence is synthesized)
ggcgcgcgccgagggccgccaggaccgggggcccccgcgcctggctgagcgcctgtcgcccttcctggctgagtccaagaccaagaatgcggcgctgcagccgtcggtactgaccatgtg

SEQ ID NO: 643346 - DNA, 120 bp, Artificial Sequence
  ENSG00000182095_10 (sequence is synthesized)
cgctgcagccgtcggtactgaccatgtgcaacggcggcgccggggacgtggggctgcccgcgctggtggccgaagcggggcgcgggggtgccaaggaggctgcccggcaggacgagggcg

SEQ ID NO: 643347 - DNA, 80 bp, Artificial Sequence
  ENSG00000182095_11 (sequence is synthesized)
ccgcccgcgccccccaaggggcctcctgcaccccccgcggccacccccgccggcgtctacaccgtcttccgcgagcaggg

SEQ ID NO: 643348 - DNA, 120 bp, Artificial Sequence
  ENSG00000182095_12 (sequence is synthesized)
ccgtgagcaccgcgtggtggcgcccaccttcgtgccttccgtggaggccttcgacgagcgcccggggcccatccagatcgcatcccaggcgcgcgatgcccgggcccgcgagcgcgaggc

SEQ ID NO: 643349 - DNA, 120 bp, Artificial Sequence
  ENSG00000182095_13 (sequence is synthesized)
cgagcgcgaggctggcaggccaggggtcctgcaggcgccccccggctccccgcggcctctggaccggcccgagggcctgcgcgagaagaactcggtcatccgctcgctcaagcggccgcc

SEQ ID NO: 643350 - DNA, 120 bp, Artificial Sequence
  ENSG00000182095_14 (sequence is synthesized)
acacgcgcctccccggacccccgcgcctacgtgcctgccaaggagctgctcaagcccgaggcggacccgaggccctgcgagcgtgcgccccgcggcccagccggtcctgcagcccaacag

SEQ ID NO: 643351 - DNA, 120 bp, Artificial Sequence
  ENSG00000182095_15 (sequence is synthesized)
tcctgcagcccaacaggccgccaagctcttcggcctggagcccgggcgccccccgcccaccggccctgagcataaatggaaacccttcgagctgggcaacttcgccgccacgcagatggc

SEQ ID NO: 643352 - DNA, 120 bp, Artificial Sequence
  ENSG00000182095_16 (sequence is synthesized)
cgtgctggccgcgcagcaccaccacagccgcgccgaagaggaggccgccgtggtcgctgcctcctcctccaagaaggcctacctggaccctggggctgtgctgccccgctcggcggccac

SEQ ID NO: 643353 - DNA, 120 bp, Artificial Sequence
  ENSG00000182095_17 (sequence is synthesized)
ctgcggccggccggtcgctgacatgcactctgcggcccacgggtctggagaggcctcggccatgcagagccttataaagtacagtggcagctttgcccgggacgccgtggccgtgcgccc

SEQ ID NO: 643354 - DNA, 120 bp, Artificial Sequence
  ENSG00000182095_18 (sequence is synthesized)
tggtggctgtggcaagaagagcccctttggaggtttgggcaccatgaaacccgagcctgcgcccacctctgcgggtgcctcccgagcccaggcccgtctcccacactccggaggccctgc

SEQ ID NO: 643355 - DNA, 120 bp, Artificial Sequence
  ENSG00000182095_19 (sequence is synthesized)
agcgggcggcggccggcagctgaagcgggaccccgagaggcccgagagcgccaaagctttcgggcgcgagggctctggtgcccagggtgaggcagaagtgcgacacccgcctgtgggcat

SEQ ID NO: 643356 - DNA, 120 bp, Artificial Sequence
  ENSG00000182095_20 (sequence is synthesized)
tgcagtggctgtggcccggcagaaggacagtggcggcagtggccggctggggcctgggctggtagaccaggagcgctctctgtcgctgagtaacgtcaaagggcacggccgagcagatga

SEQ ID NO: 643357 - DNA, 120 bp, Artificial Sequence
  ENSG00000182095_21 (sequence is synthesized)
ggactgtgtggacgaccgggccagacaccgggaggaacggctgctcggggcacggctggaccgggatcaggagaagctgctcagagagagtaaggagctggctgacctggcccgcctgca

SEQ ID NO: 643358 - DNA, 120 bp, Artificial Sequence
  ENSG00000182095_22 (sequence is synthesized)
ccctaccagctgtgctcctaacggcctgaaccccaacctcatggtgacggggggcccggcgctggcgggctcaggtcgctggtctgccgaccccgcagcccatctggccacgcacccctg

SEQ ID NO: 643359 - DNA, 120 bp, Artificial Sequence
  ENSG00000182095_23 (sequence is synthesized)
gttgccccgctcgggcaacgcatccatgtggctcgctggacacccctacggcttgggtcccccatctctgcaccagggcatggcccctgcgttcccacctggcctggggggctccctccc

SEQ ID NO: 643360 - DNA, 120 bp, Artificial Sequence
  ENSG00000182095_24 (sequence is synthesized)
gtcagcctaccagtttgtcagggacccccaatcgggccagctggtggtcattcccagtgatcaccttcctcactttgcggagctgatggagcgggccaccgtaccgcccctctggcccgc

SEQ ID NO: 643361 - DNA, 120 bp, Artificial Sequence
  ENSG00000182095_25 (sequence is synthesized)
cctgtacccgccgggccgcagccccctgcaccacgcccagcagctgcagctcttctcacagcagcacttcctgcggcagcaggagttcctgtacctgcagcagcaggcggcccaggcctt

SEQ ID NO: 643362 - DNA, 120 bp, Artificial Sequence
  ENSG00000182095_26 (sequence is synthesized)
ggaactgcagaggagcgcccagctcgtgcaggagcggttgaaggcgcaggagcaccgggcggagatggaagagaaggggagcaagcggggcctggaggctgcgggcaaggctggcctggc

SEQ ID NO: 643363 - DNA, 120 bp, Artificial Sequence
  ENSG00000182095_27 (sequence is synthesized)
ctgctgccgcggaagccccctggcctggccgccggccccgcgggcacctacggcaaggccgtgagcccgccaccatcaccccgcgcatcccctgtggctgccctgaaggccaaggtcatc

SEQ ID NO: 643364 - DNA, 120 bp, Artificial Sequence
  ENSG00000182095_28 (sequence is synthesized)
gaaggccaaggtcatccagaagctggaggacgtgtccaagccacccgcctacgcctaccccgccacccccagctcccaccccaccagcccgccgcccgcctccccaccgcccaccccggg

SEQ ID NO: 643365 - DNA, 120 bp, Artificial Sequence
  ENSG00000182095_29 (sequence is synthesized)
tatcacccgcaaggaggaggctcccgagaatgtggtcgagaagaaagacttggagttggagaaggaagcccccagccccttccaggccctgttctcagatatcccgcccaggtacccgtt

SEQ ID NO: 643366 - DNA, 120 bp, Artificial Sequence
  ENSG00000182095_30 (sequence is synthesized)
ccaagccctgccaccgcactacgggaggccctaccctttcctgctgcagcccacggccgccgccgacgcggacggcttggcccctgatgtgccgctcccggctgatgggcccgagcgcct

SEQ ID NO: 643367 - DNA, 120 bp, Artificial Sequence
  ENSG00000182095_31 (sequence is synthesized)
ggcactctcacccgaagacaagcccatccgcttgtccccctccaagatcacagagccgctgcgggagggcccggaggaagaaccgctggctgagcgggaggtgaaggcagaggtggagga

SEQ ID NO: 643368 - DNA, 120 bp, Artificial Sequence
  ENSG00000182095_32 (sequence is synthesized)
catggacgagggccccacagagctgccgcctctggagtcgccgctgccactgcccgccgcggaagccatggctacccccagccctgcagggggttgtggaggtggcctgttggaggccca

SEQ ID NO: 643369 - DNA, 120 bp, Artificial Sequence
  ENSG00000182095_33 (sequence is synthesized)
ggcgctgagtgccaccgggcagagctgcgcagagccctctgagtgtccagactttgtggaggggcctgaaccacgggtggattccccgggccggacagaaccctgcaccgccgccctgga

SEQ ID NO: 643370 - DNA, 120 bp, Artificial Sequence
  ENSG00000182095_34 (sequence is synthesized)
cctgggggtgcagctgacacccgagacactggtggaggccaaggaggagccggtggaggtgcctgtggcggtgcccgtggtggaggcagtgcccgaggaaggcctggcgcaggtggcacc

SEQ ID NO: 643371 - DNA, 120 bp, Artificial Sequence
  ENSG00000182095_35 (sequence is synthesized)
gagcgagtcccagcccaccctagaaatgtcagactgtgacgtgcccgccggggagggacagtgcccgagcctggagccccaagaggccgtgcctgtactcggcagcacctgcttcctgga

SEQ ID NO: 643372 - DNA, 120 bp, Artificial Sequence
  ENSG00000182095_36 (sequence is synthesized)
agaggcaagctctgaccagttcctgcccagtctggaggacccactggctggcatgaacgccctggcggcagctgcggagctgccccaggccaggcctctgccctccccgggtgctgctgg

SEQ ID NO: 643373 - DNA, 120 bp, Artificial Sequence
  ENSG00000182095_37 (sequence is synthesized)
agcccaggccttggagaagctggaagcagccgagagccttgtcttggagcagagcttcctgcatggcatcaccctgctaagtgagatcgcagagctggagctggagaggaggagccaaga

SEQ ID NO: 643374 - DNA, 120 bp, Artificial Sequence
  ENSG00000182095_38 (sequence is synthesized)
gatgggaggtgcggagcgggccctggtggcgcggccctccctggagagtctgctggcagctggcagccacatgctgagggaggtgctggatgggcccgtggtggacccactcaagaacct

SEQ ID NO: 643375 - DNA, 120 bp, Artificial Sequence
  ENSG00000182095_39 (sequence is synthesized)
gcggctcccgcgggagctgaagcccaacaagaagtacagctggatgcgcaagaaggaggagcggatgtatgccatgaagtcctccctggaggacatggacgccctggagctggacttccg

SEQ ID NO: 643376 - DNA, 120 bp, Artificial Sequence
  ENSG00000182095_40 (sequence is synthesized)
gatgcggctggccgaggtgcagcgccagtacaaggagaagcagcgtgagctggtgaagctgcagcgccgccgggactccgaggacaggcgcgaggaaccccatagaagcttggcacgcag

SEQ ID NO: 643377 - DNA, 120 bp, Artificial Sequence
  ENSG00000182095_41 (sequence is synthesized)
aggccctggcaggccgcggaaacggacccacgccccgagcgccctgtcgcccccccgcaagagagggaagagcggccacagtagcggaaagctgagcagcaagtctctgctgacatcaga

SEQ ID NO: 643378 - DNA, 120 bp, Artificial Sequence
  ENSG00000182095_42 (sequence is synthesized)
tgattatgagctgggagcagggataagaaagagacacaaggggtctgaggaggaacatgatgccctcatcggaatggggaaagccagggggaggaaccagacttgggatgaacatgaggc

SEQ ID NO: 643379 - DNA, 120 bp, Artificial Sequence
  ENSG00000182095_43 (sequence is synthesized)
ctcgtcggacttcatcagtcagctaaagattaagaagaagaagatggccagcgaccaggagcagttggcaagcaagctcgacaaggccctctccctcaccaagcaggacaagttgaagtc

SEQ ID NO: 643380 - DNA, 120 bp, Artificial Sequence
  ENSG00000182095_44 (sequence is synthesized)
ccttcaagttttcggacagtgctggggggaaatcgaaaactagcgggggctgcggcaggtacttgactccttacgacagcctgctggggaagaacaggaaggcgctggccaagggcctcg

SEQ ID NO: 643381 - DNA, 120 bp, Artificial Sequence
  ENSG00000182095_45 (sequence is synthesized)
gcctgtctctgaaatcctccagagaaggtaaacacaaaagggcagccaaaaccaggaagatggaggtggggttcaaggccagaggccagcccaagtcggcccattccccgtttgcctcgg

SEQ ID NO: 643382 - DNA, 120 bp, Artificial Sequence
  ENSG00000182095_46 (sequence is synthesized)
aagtgagcagctactcttacaatacggactcagaggaagacgaagaattcctgaaggacgagtggcccgcccaaggcccctccagctccaaactgacgccttccctcctgtgtagcatgg

SEQ ID NO: 643383 - DNA, 120 bp, Artificial Sequence
  ENSG00000182095_47 (sequence is synthesized)
tggcaaagaacagcaaggcagctggtggccccaagctgaccaagaggggcctggcggccccccggactctgaaacccaagccggccaccagcaggaagcagccgttttgtctgctgcttc

SEQ ID NO: 643384 - DNA, 120 bp, Artificial Sequence
  ENSG00000182095_48 (sequence is synthesized)
gagaggccgaggcgcgttcctccttcagcgactcttcggaggaatcgtttgaccaagatgagagctcggaggaggaggacgaggaggaggagctcgaggaggaggacgaggccagcggtg

SEQ ID NO: 643385 - DNA, 120 bp, Artificial Sequence
  ENSG00000182095_49 (sequence is synthesized)
gtggctacaggctgggtgcccgggagcgggccctgtcaccgggcctggaggagagtgggctgggcctgctggcacgcttcgccgccagcgccctccccagccccacggtgggtccatccc

SEQ ID NO: 643386 - DNA, 120 bp, Artificial Sequence
  ENSG00000182095_50 (sequence is synthesized)
tgtctgtggtacagctggaggccaagcagaaggcccggaagaaagaggagcggcagagcctgctgggcacagagttcgagtacaccgactcagagagcgaggtcaaggtgcgcaagcggt

SEQ ID NO: 643387 - DNA, 120 bp, Artificial Sequence
  ENSG00000182095_51 (sequence is synthesized)
gggctgctgcggcccaagaaggggctgggggagccgggaccctccctggccgcacccacgcctggcgcccgcggtcccgaccccagcagcccagacaaggccaagctggcggtggagaag

SEQ ID NO: 643388 - DNA, 120 bp, Artificial Sequence
  ENSG00000182095_52 (sequence is synthesized)
tggagaaggggcgcaaggcccggaagctgcggggccccaaggagcctggcttcgaggcggggcccgaggccagcgacgacgacctgtggacgcggcgccgcagcgagcgcatcttcctgc

SEQ ID NO: 643389 - DNA, 120 bp, Artificial Sequence
  ENSG00000182095_53 (sequence is synthesized)
acgacgcctcggctgctgcacctgcgcccgtcagcaccgcgcccgccaccaagaccagccgctgcgccaagggcggccccctgagcccgcgcaaggacgccgggcgtgcaaaggacagga

SEQ ID NO: 643390 - DNA, 120 bp, Artificial Sequence
  ENSG00000182095_54 (sequence is synthesized)
aggaccccaggaagaagaagaaagggaaagaggctgggccaggagctgggctgccgccgccccgagctcctgccttgccctctgaggccagggctcctcacgccagctccctgaccgctg

SEQ ID NO: 643391 - DNA, 120 bp, Artificial Sequence
  ENSG00000182095_55 (sequence is synthesized)
ccaaaaggagcaaagccaaggccaaagggaaggaggtgaagaaggagaaccgcggcaaggggggtgccgtgagcaagctgatggagagcatggcagccgaggaggactttgaacccaacc

SEQ ID NO: 643392 - DNA, 120 bp, Artificial Sequence
  ENSG00000182095_56 (sequence is synthesized)
aagactcgagcttctctgaggacgagcacctgccgcgtggcggggctgtggagcggccgctgaccccggcccctcgctcctgcatcatcgacaaggatgagctgaaggacggcctgcgtg

SEQ ID NO: 643393 - DNA, 120 bp, Artificial Sequence
  ENSG00000182095_57 (sequence is synthesized)
tgctcatccccatggatgacaagctgctgtacgccgggcacgtgcagaccgtgcactcgccagacatataccgcgtggtggtggagggtgagcggggcaaccggccccacatctactgtc

SEQ ID NO: 643394 - DNA, 120 bp, Artificial Sequence
  ENSG00000182095_58 (sequence is synthesized)
tggagcagttgctgcaggaggcgatcatcgatgtgaggccagcctccactcgcttcttgccacaagggaccaggattgcagcctactggagccagcagtaccgctgtctctacccaggca

SEQ ID NO: 643395 - DNA, 120 bp, Artificial Sequence
  ENSG00000182095_59 (sequence is synthesized)
ctgtggtccgagggttactggacctggaggacgatggggacttgatcaccgtggagtttgacgacggagacacgggcaggatccccctctcacatatccgcctcctgccccctgactata

SEQ ID NO: 643396 - DNA, 120 bp, Artificial Sequence
  ENSG00000182095_60 (sequence is synthesized)
agatacagtgtgctgagccgtccccggcccttctggtgccaagtgccaagcgccgcagccggaagaccagcaaagacactggggagggcaaagatggtggcacggctgggtcggaggagc

SEQ ID NO: 643397 - DNA, 120 bp, Artificial Sequence
  ENSG00000182095_61 (sequence is synthesized)
caggagccaaggcccgtgggcgtgggcggaaacccagcgccaaggccaagggtgacagagccgctaccctggaggaggggaacccaacagacgaggtccccagtacccccttagccctgg

SEQ ID NO: 643398 - DNA, 120 bp, Artificial Sequence
  ENSG00000182095_62 (sequence is synthesized)
agccgagcagcaccccaggttccaagaagagccccccagagcctgtggacaagcgagccaaggcccccaaggcgcgcccggcaccgccgcagcccagtcccgcaccacccgccttcacca

SEQ ID NO: 643399 - DNA, 120 bp, Artificial Sequence
  ENSG00000182095_63 (sequence is synthesized)
gctgcccagcacccgagccatttgcagagctgccagctcctgccacctccctggccccagcacccctcatcaccatgcctgccacacgccccaagcccaagaaggcgcgggcagccgagg

SEQ ID NO: 643400 - DNA, 120 bp, Artificial Sequence
  ENSG00000182095_64 (sequence is synthesized)
agtcgggtgccaagggccctcggaggccgggggaggaggccgagctgcttgtcaaactggaccacgagggtgtcacgtcacccaaaagcaagaaggctaaagaggccctgctgctccggg

SEQ ID NO: 643401 - DNA, 120 bp, Artificial Sequence
  ENSG00000182095_65 (sequence is synthesized)
aggatccgggggcggggggctggcaggagcccaagagcctcctgagcctgggcagctatccccccgcggccggcagcagcgagcccaaggcaccctggcccaaggccaccgacggggacc

SEQ ID NO: 643402 - DNA, 120 bp, Artificial Sequence
  ENSG00000182095_66 (sequence is synthesized)
tcgcccaggagcccgggccggggctcacgttcgaggactctgggaaccccaagagcccagacaaggcccaggctgagcaggacggggccgaagagtccgagagcagcagcagcagcagta

SEQ ID NO: 643403 - DNA, 120 bp, Artificial Sequence
  ENSG00000182095_67 (sequence is synthesized)
gtggcagcagtagcagcagcagcagcagcagcagcagcggctcggagacagaaggggaggaggaaggcgacaagaacggggacgggggctgcggcaccgggggccgtaactgcagcgctg

SEQ ID NO: 643404 - DNA, 120 bp, Artificial Sequence
  ENSG00000182095_68 (sequence is synthesized)
gggccgtaactgcagcgctgccagctccagggcggcctcaccggcctcctcctcctcctcctcatcctcctcctcctcctcctcctcctcctcatcctcctcttcctcctcctcctcttc

SEQ ID NO: 643405 - DNA, 120 bp, Artificial Sequence
  ENSG00000182095_69 (sequence is synthesized)
cgtcttcctcctcttcctcctcctcctcttcctcgtcctcatcctcctcctcctcctcctcttcctcctcttcttcctccaccacagacgaggactcttcctgcagctcggacgatgagg

SEQ ID NO: 643406 - DNA, 120 bp, Artificial Sequence
  ENSG00000182095_70 (sequence is synthesized)
cgatgaggcagcccccgcccccacggctggcccttccgcgcaggcggcgctccccaccaaggccaccaagcaggccggcaaggcgcggccctcggcccactccccaggcaagaagacgcc

SEQ ID NO: 643407 - DNA, 120 bp, Artificial Sequence
  ENSG00000182095_71 (sequence is synthesized)
agccccaggcgcctcctccgcagcccacacagcctctgcagcccaaggctcaggccggggccaagagccgacccaagaagagagagggcgtccacctccccaccaccaaggagctggcca

SEQ ID NO: 643408 - DNA, 120 bp, Artificial Sequence
  ENSG00000182095_72 (sequence is synthesized)
agcggcagcgcctgccgtccgtggagaaccggcccaagatcgccgccttcctgccagcccggcagctctggaagtggttcggcaagcccacccagcggcgtggcatgaagggcaaggccc

SEQ ID NO: 643409 - DNA, 120 bp, Artificial Sequence
  ENSG00000182095_73 (sequence is synthesized)
gcaagctcttctacaaggccatcgtgcgcggcaaggagatgatccgtatcggggactgtgccgtgttcctctctgccggccgccccaacctgccctacatcggccgcatccagagcatgt

SEQ ID NO: 643410 - DNA, 120 bp, Artificial Sequence
  ENSG00000182095_74 (sequence is synthesized)
gggagtcgtggggcaacaacatggtggtccgcgtcaagtggttctaccaccccgaggagaccagcccgggcaagcagttccaccagggccagcactgggaccagaagtccagccgcagcc

SEQ ID NO: 643411 - DNA, 120 bp, Artificial Sequence
  ENSG00000182095_75 (sequence is synthesized)
tcccggcggccctgcgggtctccagccagaggaaggacttcatggagcgcgcgctataccagtcctcgcatgtggacgaaaatgacgtgcagacggtgtcgcacaagtgcctggtggtgg

SEQ ID NO: 643412 - DNA, 120 bp, Artificial Sequence
  ENSG00000182095_76 (sequence is synthesized)
gcctggagcagtatgagcagatgctgaagaccaagaagtaccaggacagcgagggcctgtactacctcgcgggcacctacgagcccaccacgggcatgatcttctccacggacggcgtgc

SEQ ID NO: 643413 - DNA, 120 bp, Artificial Sequence
  ENSG00000182095_77 (sequence is synthesized)
ccgtgctctgctgagcccgccgggccctgcgggccacctgtgccccgagggcggccagggacccatctccatcactgccatggcgcggagaccacgtgcgttgtgtgcatgcgagcgctc

SEQ ID NO: 643414 - DNA, 120 bp, Artificial Sequence
  ENSG00000182095_78 (sequence is synthesized)
ctgcaggcgtgtgcatggggccaggtgtgcacgtggatgcccgggtgagtgtgtgtgcatgcacgtgtgtgcacgcatgtgcacatgcctccagccccaccttccaacccctcagtgccc

SEQ ID NO: 643415 - DNA, 120 bp, Artificial Sequence
  ENSG00000182095_79 (sequence is synthesized)
ccaggacaggggcccctcttagctatcagggtatggccggaccggcccttcctgcccagcacgttgcaagcacttggccaggccggccctccaggctgctgctgcgtgggggcccgggtg

SEQ ID NO: 643416 - DNA, 120 bp, Artificial Sequence
  ENSG00000182095_80 (sequence is synthesized)
cccccaggtccatgcagactggggattcggtggggaggggcgcttctaaggaaccaaactgacgctcactctgggcttcccaagcacccttagcatggagcccaccccaaggcctcccac

SEQ ID NO: 643417 - DNA, 120 bp, Artificial Sequence
  ENSG00000182095_81 (sequence is synthesized)
cgtgcatgggacagggcagcccgatgccagctggcctacctgactgtgccaggggccctgcccccaccctctcaggatggcctagacttggggaacagagccgggtggggttgcagcccg

SEQ ID NO: 643418 - DNA, 120 bp, Artificial Sequence
  ENSG00000182095_82 (sequence is synthesized)
gagtgtctgtcaaaggcaccaggtggagagggcccggcacaggcccaccctggtccaaaccctcacactacagaaaaccccaatggtgctgaaactgtcgcccggccacgcctggcccct

SEQ ID NO: 643419 - DNA, 120 bp, Artificial Sequence
  ENSG00000182095_83 (sequence is synthesized)
ccccacccaggagggaggtggcacttcttaacctgtacagttttattgtaccaagagactcgccccgcccctgtatcataagcctttaaatggagtcaactttttaattatatatataaa

SEQ ID NO: 643420 - DNA, 120 bp, Artificial Sequence
  ENSG00000182095_84 (sequence is synthesized)
taaatatatatataaactttttaaaactgtgaaaaatagctatgaaattataaaaaaaaacattctgacgtgcagaatattattttttatttcctgttagattatagtgtctagcaccgg

SEQ ID NO: 643421 - DNA, 120 bp, Artificial Sequence
  ENSG00000182095_85 (sequence is synthesized)
gtctagcaccggcttcaccggcctcccagtccccagcacaccccccgcccaccccaccaagtgtactgtactcaccccccaggatagagaagtgtttgttagggagagaagagggagagg

SEQ ID NO: 643422 - DNA, 120 bp, Artificial Sequence
  ENSG00000182095_86 (sequence is synthesized)
caggagccggcccaagcccagggtccctgcttgggccccagaaagcacttaaccaggccccaagccttcaagggaaaccaaggcctcaaccagacaatcttgagggaaggaaaagccaga

SEQ ID NO: 643423 - DNA, 120 bp, Artificial Sequence
  ENSG00000182095_87 (sequence is synthesized)
ctttgggtttgttttttgggggaattattggtttttttttttatgtttcttttggaattttgtttgttggcaaattctgtgtgatcttttttcataaaaaaaaagaaaagatttaattgg

SEQ ID NO: 643424 - DNA, 120 bp, Artificial Sequence
  ENSG00000182095_88 (sequence is synthesized)
gtgggcctccctcctccctggggccagcccccaggctctcctgccccaggtggggcagggctgaagcgggttgatctgggctggtggctactgcagtcttggtcctggttctggtcccag

SEQ ID NO: 643425 - DNA, 120 bp, Artificial Sequence
  ENSG00000182095_89 (sequence is synthesized)
catagcttggaggagactgcagcctcggactctcacctgcctcttttctgcgccgatgggagttccagaacggcggcggtggccacaggtctgatagcccagccgcagtgccaaggacgt

SEQ ID NO: 643426 - DNA, 120 bp, Artificial Sequence
  ENSG00000182095_90 (sequence is synthesized)
aaaaaaaaaacaaaaaaaaacccaaaaccaaaaacgcttgcaggaagagagagaaggggtgttttgttcctcctgggagggcgcacttggggtggcacagaacttgggggtgagtgagtg

SEQ ID NO: 643427 - DNA, 120 bp, Artificial Sequence
  ENSG00000182095_91 (sequence is synthesized)
tggctactaaaacccaactctaactggcttaagaataaagacttgtgggctcacataactgaaaactgtatggccttcaggcatgattggatccaggcaccatttaaacgatgtcatcag

SEQ ID NO: 643428 - DNA, 120 bp, Artificial Sequence
  ENSG00000182095_92 (sequence is synthesized)
cgctgagtccgcagcgcggggcgaaagagcgggcttctcttgttttaattaaaatcttatcactgcagttgctcttcgaggcagcattggaaggatttctgcccctccaagcttcctttc

SEQ ID NO: 643429 - DNA, 86 bp, Artificial Sequence
  ENSG00000182095_93 (sequence is synthesized)
gggttgggggtggcacaggggccttctgagaggcttctggggcctttggcagcatccaggtagcccccagctctgtccaggatgct

SEQ ID NO: 643430 - DNA, 120 bp, Artificial Sequence
  ENSG00000182095_94 (sequence is synthesized)
taggtcactgcagcctcaaactcccaaatgatgcacctgactcagccccccaagtagctgggactgcagacacaccccaccacagccagctgactttttaacttttctgtagaggtggag

SEQ ID NO: 643431 - DNA, 87 bp, Artificial Sequence
  ENSG00000182095_95 (sequence is synthesized)
ggcttgtggcctaagatgcttttttgagacctgagtccctaagaccccccacaggctccttgggcccacccacagccctgggtgcct

SEQ ID NO: 643432 - DNA, 120 bp, Artificial Sequence
  ENSG00000182095_96 (sequence is synthesized)
cccacaggctccttgggcccacccacagccctgggtgccttctggtcacactgtcctcttaggggccctgctaggccttccgggcaactttgaaaacaaaccctggtctctccttttaca

SEQ ID NO: 643433 - DNA, 120 bp, Artificial Sequence
  ENSG00000182095_97 (sequence is synthesized)
gatgaggaaactgaggcttgggaagggtagatttaaacttggttgtaggtatttccagagcctgcgctctctagggctgggacgcccatttcttcttgccctggggggtgccttgccttg

SEQ ID NO: 643434 - DNA, 120 bp, Artificial Sequence
  ENSG00000182095_98 (sequence is synthesized)
tgccctggggggtgccttgccttggtgtgaaacctcggggctccctgcaccgaaaccgtttaatttccaagaaaaaacactgggtcgagtgcggctcaagcctgtaatcccagcactttg

SEQ ID NO: 643435 - DNA, 120 bp, Artificial Sequence
  ENSG00000182095_99 (sequence is synthesized)
tgaggtcaagagttcaagaccagcctgacgaacatggtgaaaccccacctgtattaaaaatacaataattagccgtgcgtggtggggtgcgcctgtaatcccagctaccggagaggctga

SEQ ID NO: 643436 - DNA, 80 bp, Artificial Sequence
  ENSG00000182103_0 (sequence is synthesized)
cagcgagccaggcccggaactagtaggctgcgccgcgcgcgccgcgccggggcgggagctgggtctgggcggcgggcagg

SEQ ID NO: 643437 - DNA, 120 bp, Artificial Sequence
  ENSG00000182103_1 (sequence is synthesized)
ccgggagccgcggcgatggcggtgcaggcggcgctcctcagcacgcaccctttcgtgcccttcggcttcgggggctccccggacgggctagggggcgccttcggagccctggacaagggc

SEQ ID NO: 643438 - DNA, 120 bp, Artificial Sequence
  ENSG00000182103_2 (sequence is synthesized)
tgctgtttcgaggacgatgagaccggggctccggcgggtgcgctgctgtcgggagccgaaggaggggacgtgcgcgaggccacccgcgatctactcagcttcattgactcggcgtccagc

SEQ ID NO: 643439 - DNA, 120 bp, Artificial Sequence
  ENSG00000182103_3 (sequence is synthesized)
aacatcaagctggcgctggacaagccgggcaagtcgaagcggaaggtgaaccaccgcaagtacctgcagaagcagatcaagcgctgcagcggcctcatgggcgccgcgccccccggcccg

SEQ ID NO: 643440 - DNA, 80 bp, Artificial Sequence
  ENSG00000182103_4 (sequence is synthesized)
gagcgccgccgacacgccagccaaacggccgctggccgcccctagcgccccgacagtcgcggccccggcccacggcaagg

SEQ ID NO: 643441 - DNA, 120 bp, Artificial Sequence
  ENSG00000182103_5 (sequence is synthesized)
gcggccgccagcttgcaaagccgaagtctggccgcgctcttcgactcgctgcgccacgtccccgggggtgccgagccggcggggggtgaggtggctgcgccggcggccgggctaggaggt

SEQ ID NO: 643442 - DNA, 120 bp, Artificial Sequence
  ENSG00000182103_6 (sequence is synthesized)
gcgggcactgggggcgcgggaggggacgtggcaggccccgcgggggccacggcgatcccaggggccaggaaggtcccgctgcgggcacgcaatctgcctccgtccttcttcacggagccg

SEQ ID NO: 643443 - DNA, 120 bp, Artificial Sequence
  ENSG00000182103_7 (sequence is synthesized)
tcccgggcaggcggcggcgggtgtggcccgtcggggccggacgtgagcttgggcgacctggagaagggcgcggaggccgtggagttctttgagctgctggggcccgactacggcgccggc

SEQ ID NO: 643444 - DNA, 120 bp, Artificial Sequence
  ENSG00000182103_8 (sequence is synthesized)
acggaggcggcagtcttgcttgccgccgagcctctcgacgtgttccccgccggagcctccgtactgcggggacccccggagctggagcccggcctctttgagccgccgccggcagtggtg

SEQ ID NO: 643445 - DNA, 120 bp, Artificial Sequence
  ENSG00000182103_9 (sequence is synthesized)
ggaaacctactgtaccccgagccctggagcgtcccgggctgctccccgaccaaaaagagccccctgactgccccccgcggcggcttgaccttgaacgagcccttgagccccctgtacccc

SEQ ID NO: 643446 - DNA, 120 bp, Artificial Sequence
  ENSG00000182103_10 (sequence is synthesized)
gccgctgcggattctcccggcggggaggacgggcggggccatttggcctctttcgcccccttctttccagactgcgccctgcccccgccgccgccgccccatcaggtgtcctacgattac

SEQ ID NO: 643447 - DNA, 120 bp, Artificial Sequence
  ENSG00000182103_11 (sequence is synthesized)
agcgcgggctacagccgcaccgcctattccagcctttggagatccgacggggtttgggaaggggcgccgggggaggagggggcgcaccgggactgacttcgaggcacgcttcccttcatt

SEQ ID NO: 643448 - DNA, 120 bp, Artificial Sequence
  ENSG00000182103_12 (sequence is synthesized)
agagacggctgtggagagcgccgcgcctccgtgggtttctcctaaatctgaagaacgatgggaaaatgcacgtggagatgaaaccagatttttaaaaattcaattaataaaagcaacttc

SEQ ID NO: 643449 - DNA, 120 bp, Artificial Sequence
  ENSG00000182103_13 (sequence is synthesized)
agaaaaaagagatgaagacgagttggggattgtttaatcacaacctcaagtgttaaaacaaaaacaaacaaacacgtttgtaggttcttactggaccagaggagtcaagaaaccaagatg

SEQ ID NO: 643450 - DNA, 120 bp, Artificial Sequence
  ENSG00000182103_14 (sequence is synthesized)
gtttggggtatggggtggggacggcaaaaggggtaagagctggcttctgtagccacctgtcccttctatttttcagcgaaggtcagtgtatttagtgtaattaccccttctaaacagtgt

SEQ ID NO: 643451 - DNA, 120 bp, Artificial Sequence
  ENSG00000182103_15 (sequence is synthesized)
cctagtccctcccttccctctccttgagtgcattttgaattaaagcctatattgaaaagaatggaggtgagacttactgatttgggtgttttcttacaggacggttttccgtctggtcgc

SEQ ID NO: 643452 - DNA, 120 bp, Artificial Sequence
  ENSG00000182103_16 (sequence is synthesized)
tcttctgtcacggtttaactcttttttctgcccgcttcctgcttccatctccctccacccttatcacagtcccagtgcttactttccttctttctttgcctggcctctcattattctatt

SEQ ID NO: 643453 - DNA, 120 bp, Artificial Sequence
  ENSG00000182103_17 (sequence is synthesized)
tctttcggccggcttttcttgcacatctcttttgtaggagacttaaatttggcaaacctgggttccatttctctcctgtcttttccccattttccagccactttgggagggagagggtgg

SEQ ID NO: 643454 - DNA, 120 bp, Artificial Sequence
  ENSG00000182103_18 (sequence is synthesized)
gcaaactgtaacctctttgtatcaattttcgtgatctgagagggtgaagacggtaatgttcttctactcacttcacaactggttgggtagctcagagggaaataagtaaaatgtcttgag

SEQ ID NO: 643455 - DNA, 120 bp, Artificial Sequence
  ENSG00000182103_19 (sequence is synthesized)
gctgtggcagtgcttgattggttctgctgtgtatatataaatggtttctacacacggaaacagagttgtgagtcccatgccttttttggcggggggctatctacttgcctggtgattgcc

SEQ ID NO: 643456 - DNA, 120 bp, Artificial Sequence
  ENSG00000182103_20 (sequence is synthesized)
ctttcccttacaagctgtacatcctctttaccatccctccttctctccttccacagctccccttccacctctgttggtttctgcctccctttgtttcctcagtccttatacccacactct

SEQ ID NO: 643457 - DNA, 120 bp, Artificial Sequence
  ENSG00000182103_21 (sequence is synthesized)
ccccacggaagggcataaagaaaggtgtgaagtttccaaaggaatttctgttccctgaatagcaggtctgatgaatggaatctgaaggggctctgcagggaggagtatgatctgttgtcc

SEQ ID NO: 643458 - DNA, 120 bp, Artificial Sequence
  ENSG00000182103_22 (sequence is synthesized)
gagggagatttggggaaaaagaaatatttttaccagccatgaatgtggcagagaggacacatggcaccaataggttggttaaggggcaggggaggaaagactggtgggaagtgagcagct

SEQ ID NO: 643459 - DNA, 120 bp, Artificial Sequence
  ENSG00000182103_23 (sequence is synthesized)
ggagggaaaagaggagcccttggtgctgtagaactgcggggagaaaggcatgaagagagcaacgcccagaacatctgagtgagaggctgccttctgatgatgctgcaaaggagagctgct

SEQ ID NO: 643460 - DNA, 120 bp, Artificial Sequence
  ENSG00000182103_24 (sequence is synthesized)
tggcttcaaggcacccaggattgattgcaggaatatctggatgtgagttagttgaaaaccgagtgttaccgcaagaggtgtaaaaatccaggttcatgtttgcacacatcaaaagtattg

SEQ ID NO: 643461 - DNA, 120 bp, Artificial Sequence
  ENSG00000182103_25 (sequence is synthesized)
tgatattttcataaaagaatttctggaaaaaatgagtattaaccaatggtagatgcaactttaaatgctatcagtaagtcattttcttctgaataaagcctttcttaagaaagcaccaca

SEQ ID NO: 643462 - DNA, 120 bp, Artificial Sequence
  ENSG00000182103_26 (sequence is synthesized)
ggaaatagaacgagtactgttaatgatgaaaagaacttttgcaactccagaaagctaatgtctattggatttcttccaaagtggttaaaggtgattaattccattgtgctaacagaatat

SEQ ID NO: 643463 - DNA, 120 bp, Artificial Sequence
  ENSG00000182103_27 (sequence is synthesized)
tacttaataacgatttaatttgtctaaactgttgtgaatacaatccaggatacacttgcacagtaggaaaacattaataaccctgtgactgttactaagactatagtgtcattgtaatgt

SEQ ID NO: 643464 - DNA, 120 bp, Artificial Sequence
  ENSG00000182103_28 (sequence is synthesized)
ttcttaattctcctctcctttcttacctagtgtagtaaaacaggttatctctctcctactgttttgcttgctatacgtttaattaataataatatcaacattgtttccgcatcccaggca

SEQ ID NO: 643465 - DNA, 120 bp, Artificial Sequence
  ENSG00000182103_29 (sequence is synthesized)
tttaagctaactcactgagcctcttaatattgccatgatgtaggtgcttgatactgtttggatctgtgtccctagccaaatgtcatctctaattgtaatccccacatgtcgagggaggtc

SEQ ID NO: 643466 - DNA, 79 bp, Artificial Sequence
  ENSG00000182103_30 (sequence is synthesized)
tggttataaagtgtggcacttccttgctatctctctctcctgccaccatgtaagacgtgccttcctgctgcttcacctt

SEQ ID NO: 643467 - DNA, 89 bp, Artificial Sequence
  ENSG00000182103_31 (sequence is synthesized)
atggttataaagtgtggcacttccttgctatctctctctcctgccaccatgtaagacgtgccttcctgcatgaggcctcccagccatgt

SEQ ID NO: 643468 - DNA, 120 bp, Artificial Sequence
  ENSG00000182107_0 (sequence is synthesized)
actgctcgtagggcctggaactaaactcacctgtgacggaggcagaggaggggcccgggcaaaaacccacctgagctggcgggaaacccgacccgcgagcagtccccgggcttgcgcggc

SEQ ID NO: 643469 - DNA, 120 bp, Artificial Sequence
  ENSG00000182107_1 (sequence is synthesized)
cactcggtcagcccgcgcgtcggtccccgcgcggccgccatgacctggagcgccacggcccggggcgcccaccagcccgacaacaccgccttcactcagcagcgcctccccgcctggcag

SEQ ID NO: 643470 - DNA, 120 bp, Artificial Sequence
  ENSG00000182107_2 (sequence is synthesized)
ccttcactcagcagcgcctccccgcctggcagccgctgctgtcggccagcatcgcgctgccgctcttcttctgcgcgggcctggccttcatcggcctgggcctgggcctctactactcct

SEQ ID NO: 643471 - DNA, 120 bp, Artificial Sequence
  ENSG00000182107_3 (sequence is synthesized)
ccaacggcatcaaggagctggagtacgactatacaggcgacccgggcaccggtaactgctcggtgtgcgccgcggctggccagggccgggcgctgccgcccccctgctcgtgcgcctggt

SEQ ID NO: 643472 - DNA, 120 bp, Artificial Sequence
  ENSG00000182107_4 (sequence is synthesized)
acttctcgctgcccgagctcttccagggcccagtgtacctctactacgagctgaccaacttctaccagaacaaccggcgctacggcgtgtcccgcgacgacgcgcagctgagcggactcc

SEQ ID NO: 643473 - DNA, 120 bp, Artificial Sequence
  ENSG00000182107_5 (sequence is synthesized)
ccagcgcgctgcgccaccctgtcaacgagtgcgccccctaccagcgcagcgcggccggcctgcccatcgcgccctgcggcgccatcgccaacagcctcttcaacgactccttctcgcttt

SEQ ID NO: 643474 - DNA, 120 bp, Artificial Sequence
  ENSG00000182107_6 (sequence is synthesized)
ggcaccagcgccagcccggcgggccctacgtcgaggtgccgctcgaccgctccggcatcgcctggtggaccgactaccacgtcaagttccgcaacccgccgctggtcaacggcagcctgg

SEQ ID NO: 643475 - DNA, 120 bp, Artificial Sequence
  ENSG00000182107_7 (sequence is synthesized)
cgttggccttccagggcacggcgcccccgcccaactggcgccggccagtctacgagctcagccccgaccccaacaacaccggcttcatcaatcaggacttcgtggtgtggatgcgcacgg

SEQ ID NO: 643476 - DNA, 120 bp, Artificial Sequence
  ENSG00000182107_8 (sequence is synthesized)
cggcgctgcccacgttccgcaaactgtacgcgcgcatccgccagggcaactactcggccgggctgccgcggggcgcctaccgcgtcaacatcacctacaactacccggtgcgcgcgttcg

SEQ ID NO: 643477 - DNA, 120 bp, Artificial Sequence
  ENSG00000182107_9 (sequence is synthesized)
gcggccacaagctcctcatcttcagcagcatctcgtggatgggtggcaagaaccccttcctgggcatcgcctacctggtcgtcggctccctctgcatcctcaccggctttgtcatgctgg

SEQ ID NO: 643478 - DNA, 120 bp, Artificial Sequence
  ENSG00000182107_10 (sequence is synthesized)
tcgtctacattcgctaccaggaccaggacgacgacgacgaggagtgattccggctttccagggatccctcctgcttcttgccaaaactcttgcaaggtgcttttggcatctcctcctcgc

SEQ ID NO: 643479 - DNA, 120 bp, Artificial Sequence
  ENSG00000182107_11 (sequence is synthesized)
ccgtcacccaattccaacctcgcctagcttttcctccctttgtgaatgaggggaccagataagggaattaccccccttgctcttggggggctgctagactgtcttgccgcggggagggat

SEQ ID NO: 643480 - DNA, 120 bp, Artificial Sequence
  ENSG00000182107_12 (sequence is synthesized)
gttgactgcagagtgaaacatccttgcaaactcttcccacctccttcacgacactgagttgccatgtgaggttcttcaagtctgagagtggaagggatccctatggagactcctattaaa

SEQ ID NO: 643481 - DNA, 120 bp, Artificial Sequence
  ENSG00000182107_13 (sequence is synthesized)
cccctattagaggaagagattgagagacctagcaatgtgaagtaacaaagatcaggcagctgcaagtgactcctgaatcttgagtccagggctttcgccactacagtacagtggttttct

SEQ ID NO: 643482 - DNA, 120 bp, Artificial Sequence
  ENSG00000182107_14 (sequence is synthesized)
tttctttggtcggggagagtgggctggaatggagagtgaggcccacaaattacctgcagagacgtggaggcgtgagggagaacatgcttgttaaatatgcaggtagattaggagacacca

SEQ ID NO: 643483 - DNA, 120 bp, Artificial Sequence
  ENSG00000182107_15 (sequence is synthesized)
aacagagattcagacacagtaaggctgggatgagatcctcgaagctgtgttttaacaaactccactggagagtcccatattccctcaaatttgggaatcacgaccctgaaccaggttggg

SEQ ID NO: 643484 - DNA, 120 bp, Artificial Sequence
  ENSG00000182107_16 (sequence is synthesized)
gtcaactgaattcactttttcggatagtaatttgttcccaggggcagtgacaaccatgatgttccaggtttggtctggcactctgccttgaacgtaggaagctcttgatgatttgtggaa

SEQ ID NO: 643485 - DNA, 120 bp, Artificial Sequence
  ENSG00000182107_17 (sequence is synthesized)
tgaatttttaaaaaattactatctggggaaaactagttggcatacagagttgtaggacagggtttatgtgattcatttgatattttagtattttggtgtaaaagccaacaggcaaacttt

SEQ ID NO: 643486 - DNA, 120 bp, Artificial Sequence
  ENSG00000182107_18 (sequence is synthesized)
gccaggtactgtgtagaaactcgaaaatgtgaggccagtttgtacagttcagaggaaatgctttaacgtagaatcagatagctggaagagatcttcgagggaaagtaagttccctaaagt

SEQ ID NO: 643487 - DNA, 82 bp, Artificial Sequence
  ENSG00000182107_19 (sequence is synthesized)
gaaagggcttcattcataccttttcccttggacctggaaaaaaaattttttttatcttttcaaatgaaatctattgatttct

SEQ ID NO: 643488 - DNA, 120 bp, Artificial Sequence
  ENSG00000182107_20 (sequence is synthesized)
tttatcttttcaaatgaaatctattgatttctagtaatcatatttgaatcaatgttaaagcatatatagtcttatatgtaaactagattcttaagattatttgaacctttgagatgaagt

SEQ ID NO: 643489 - DNA, 120 bp, Artificial Sequence
  ENSG00000182107_21 (sequence is synthesized)
gatgaagtttacactcaactaaaatcattccattgattttattgattaacatcaatcagtatgtttaaagttattctaagaagcaatagtttatttttaaaaaccttgtatagcaaaata

SEQ ID NO: 643490 - DNA, 120 bp, Artificial Sequence
  ENSG00000182107_22 (sequence is synthesized)
acttaaaaccctttgtgatatcatcttaccagtttatttggtaaaaacaaacagttatttggtatttgtcagaattcttcagtgcctgctattacagctattttccaattactaacttga

SEQ ID NO: 643491 - DNA, 120 bp, Artificial Sequence
  ENSG00000182107_23 (sequence is synthesized)
ttatactcactcaaggcagtgcaagatcttgaagtactttttagcagttaagtaatattgaattgtattgaatagtttacatagtttattctagtctttgaaaattactgaacatggaca

SEQ ID NO: 643492 - DNA, 120 bp, Artificial Sequence
  ENSG00000182107_24 (sequence is synthesized)
atgtgcatgtcattgacatctgccttagaacttctgggacaatcctgattcgagagattctatcccattatttacatataccaaaaatactttgttaatttaatgtgttggcttcccaac

SEQ ID NO: 643493 - DNA, 120 bp, Artificial Sequence
  ENSG00000182107_25 (sequence is synthesized)
tcctgaacacgacacaattttattattagattttgtatggtgattttaggctatgaaaacatgatcattatatgtatatagatacatttttatttgttacaaatgtttgagcagctcact

SEQ ID NO: 643494 - DNA, 120 bp, Artificial Sequence
  ENSG00000182107_26 (sequence is synthesized)
agcccacccctcctctattttgggtaagagaatttactaccttttttaactatgtagttgagagcaacatgtattttgttatttttagaatggtcagtatattgctataaaattttaaat

SEQ ID NO: 643495 - DNA, 120 bp, Artificial Sequence
  ENSG00000182107_27 (sequence is synthesized)
gagactatgaaagttaaagtattctgattctggttaaattaacgaatatggttccaggccctgttctctgggtttttgagagagaataaaggttatgtttgtcttacctttgttatcgag

SEQ ID NO: 643496 - DNA, 120 bp, Artificial Sequence
  ENSG00000182107_28 (sequence is synthesized)
tttgctgaattcttttgaacgatgatcttaaaggcacaaacaccaccagccactttgctaatttcttaatagcagatttacattgcagcaagaaaaccatcttttatagtaacattcagt

SEQ ID NO: 643497 - DNA, 120 bp, Artificial Sequence
  ENSG00000182107_29 (sequence is synthesized)
taaaatgaactcaattcattgttaacttcctaaaacagaatttgaactttatcaacctcaacgtgtatataaactagatagtcctcaatactttatcaacctcaacatgtatataaacta

SEQ ID NO: 643498 - DNA, 120 bp, Artificial Sequence
  ENSG00000182107_30 (sequence is synthesized)
gatagtcctcaaatactgtttgaatttaataaatgtcaatttaaaaatttttgtagtagtcttctgcattttacttcaattataaattgcaattatttattggatattttggacttcaaa

SEQ ID NO: 643499 - DNA, 120 bp, Artificial Sequence
  ENSG00000182107_31 (sequence is synthesized)
gcagcagaaactttaaaactgaaatgggaaacgttttcctgcaatgatccctgtgctgtaacattttgtctggtgtctcaggcttccaggttcttgttggcctgaattcccttgttgccc

SEQ ID NO: 643500 - DNA, 120 bp, Artificial Sequence
  ENSG00000182107_32 (sequence is synthesized)
agtaaatgttcactagctagaagtatcttcaggaagtgagatagaaaagagtgaacctcaacaattggactggaaatgagctttgacctaactttgtaaaataaaagcataaaagagaaa

SEQ ID NO: 643501 - DNA, 120 bp, Artificial Sequence
  ENSG00000182107_33 (sequence is synthesized)
aaacgcgagactgagtctaccaggtgaggtaaaaaacacccacctgctcacctcggaaggggcgggcgaggtgcggctcccggtgacccgcgggggtgcagcgcacctgggcggaggcgg

SEQ ID NO: 643502 - DNA, 120 bp, Artificial Sequence
  ENSG00000182107_34 (sequence is synthesized)
aacctaaaagacaaaatggtctagagccaccttttccccgcaaataacagaggattaaggatctgaaatcttcaagcctccaggaccacggtgcaagccctcagcaaaaatttctgctgg

SEQ ID NO: 643503 - DNA, 120 bp, Artificial Sequence
  ENSG00000182107_35 (sequence is synthesized)
aggccggagcgccttttgatttcgggagactggcccaggaactctagtcacttggaaggcggaagagaaggtggtacctgagccaggtaggagccactcagaggcagcccggggccgcca

SEQ ID NO: 643504 - DNA, 80 bp, Artificial Sequence
  ENSG00000182108_0 (sequence is synthesized)
cctgcgggggcgcggggggtgcgcgaggacctgcggggcggggcgggagagaaggctgccgggaccggccctagacactg

SEQ ID NO: 643505 - DNA, 120 bp, Artificial Sequence
  ENSG00000182108_1 (sequence is synthesized)
aggctgccgggaccggccctagacactgagccgcggtgggatccccaccggctctgcgaggccctgcgagcgccagggaggcgccacgagggagccgggcagccgcgggccacttcaggg

SEQ ID NO: 643506 - DNA, 120 bp, Artificial Sequence
  ENSG00000182108_2 (sequence is synthesized)
gcggtcgagagatccttgggggcacatctcggggtgcggtgacccgcccggcgcatttcgggggtcggggcgcaattgccaggggacatctggagcccggccctgcttctgtcgggctcc

SEQ ID NO: 643507 - DNA, 120 bp, Artificial Sequence
  ENSG00000182108_3 (sequence is synthesized)
gacatctggagcccggccctgcttctgtcgggctccagggtacccctggatggctgcgctgtgccctcgccggccgcccgggcgccgcagcggctgagttcgccgggatcgccgggccgc

SEQ ID NO: 643508 - DNA, 120 bp, Artificial Sequence
  ENSG00000182108_4 (sequence is synthesized)
cgcggcccacctggacgcactgggccccctggtcccctacgtgccgccgccgctgctgccctctatgttctacgtgggcctgttcttcgtcaatgtgctgatcctgtactacgccttcct

SEQ ID NO: 643509 - DNA, 120 bp, Artificial Sequence
  ENSG00000182108_5 (sequence is synthesized)
catggagtacatcgtcctcaacgtgggcctcgtcttcctgcccgaggacatggaccaggcgctcgtggacctcggcgtgctctccgaccccggctcgggcctttacgatgctgactcgga

SEQ ID NO: 643510 - DNA, 120 bp, Artificial Sequence
  ENSG00000182108_6 (sequence is synthesized)
ctttgatgcgtacttggagtagggtctcgactgctgttcccctcttccctacacgatccgcaacccatgccctggaccagccgcccagatcatgccgccgcagctggttgggggcaccat

SEQ ID NO: 643511 - DNA, 120 bp, Artificial Sequence
  ENSG00000182108_7 (sequence is synthesized)
ctggacggggatggttccccaggaggagaccctcccctgcctccgaggcctacctgctcccctcaaaagcttcgtgccaacagagaggttcctgtttgaacccaggagagtggaagagag

SEQ ID NO: 643512 - DNA, 120 bp, Artificial Sequence
  ENSG00000182108_8 (sequence is synthesized)
attgggactgagtgctgaggttgggaaggcacctgctcccacagaagggggaacgcaagaggcatcccaagacctcatctgcctgcagtgtcaaatcgatggcctggccttggcttctga

SEQ ID NO: 643513 - DNA, 120 bp, Artificial Sequence
  ENSG00000182108_9 (sequence is synthesized)
ttatttgcagctgcgatggatgtttacaggaacccagccagagtttgcctccctgcacttcatcccggagcgcacctgcttcccccacttcaccttcggagaggacacttcaaactgcgg

SEQ ID NO: 643514 - DNA, 120 bp, Artificial Sequence
  ENSG00000182108_10 (sequence is synthesized)
acacacgcaaaagcgactcccagctccgtttgatgtgagttgagccttcaggccagctgggtttagcccgaggctggtcttagatgcagcgactgtttcaggggtgactcagaagaaaaa

SEQ ID NO: 643515 - DNA, 120 bp, Artificial Sequence
  ENSG00000182108_11 (sequence is synthesized)
gaagctgaggaagctgttggggggctgagggtgggattctcgctccttcatttcaggttactcgttcttcagcaagttggcaaaacagacatcatgctggtgagtgccacgttactcccc

SEQ ID NO: 643516 - DNA, 120 bp, Artificial Sequence
  ENSG00000182108_12 (sequence is synthesized)
tggctggaaatgcttttctgaaagtatgagtgttgtgcctacttaattctgataaacctgtctaagcaatacttaggaggcttacttctttggattaaaaaaaaatgtatgcaactccaa

SEQ ID NO: 643517 - DNA, 120 bp, Artificial Sequence
  ENSG00000182108_13 (sequence is synthesized)
ggccggatacacacccctccctcaggcttctcctccgttcacctcctccaggtctaactggatgccaggaatggccagactcctcttaagcccttcgtttgggctggaaagcttcctcca

SEQ ID NO: 643518 - DNA, 120 bp, Artificial Sequence
  ENSG00000182108_14 (sequence is synthesized)
gcaaaggggacagctggtgaaaaggaaggagaccccgagactaagttacatttggggtagctctgtgacttacccccaaagcttatggaaaaagccttcgctcccaaatccatttgaggc

SEQ ID NO: 643519 - DNA, 120 bp, Artificial Sequence
  ENSG00000182108_15 (sequence is synthesized)
agagctgtcagctcctcctccagtcctcatcctggcttgatgatgaccttggcttttgggggattctcgcttgtcctagaaggataaagatttaggggtgtcagaagacacagggagcca

SEQ ID NO: 643520 - DNA, 120 bp, Artificial Sequence
  ENSG00000182108_16 (sequence is synthesized)
ggcacgaatcacctttgtactgtggcccttggggtagctgggtggggattaagtgcaggggctctaggccaaagctgtgagaggagaaatcgcaagcaaagaagcccgtacttccttttg

SEQ ID NO: 643521 - DNA, 120 bp, Artificial Sequence
  ENSG00000182108_17 (sequence is synthesized)
gccttgggtttgctgctattttggagtcaggtttcagggtgccccagctcatcagttctgcagctcagaactgcaggggctgccagttttgtaggctcccttcacagaacaggcaggcag

SEQ ID NO: 643522 - DNA, 120 bp, Artificial Sequence
  ENSG00000182108_18 (sequence is synthesized)
ggagctggtgccagggctcgctttgtctgcagtgtttgcaagcgctcagggggctcttaggtcctcgggagaaggcaccacagggtcattgcactgagatggtcaagtcctgtctttggg

SEQ ID NO: 643523 - DNA, 120 bp, Artificial Sequence
  ENSG00000182108_19 (sequence is synthesized)
gctgtgacgagggagctttgcatccagcatccagcccactgtgtatgtgagaggtagggaaatgaaggtccaggaaggagtaagacttggtcatagtcacaaggaagagaggcagctaga

SEQ ID NO: 643524 - DNA, 120 bp, Artificial Sequence
  ENSG00000182108_20 (sequence is synthesized)
ctcaattagagagaacacgtgagccagacaagctgtcaggcagctgccaggtctggtgagggtcacagggcaggcaggaacgccttggctcagcccctgagactggacagtactggagtg

SEQ ID NO: 643525 - DNA, 120 bp, Artificial Sequence
  ENSG00000182108_21 (sequence is synthesized)
tcactgggcacagggtctaagtggcaatgaagaggggatgctgagatatggtgggcaagggctcctttaggaaaatggacactaatgccattcaccgcaagcaggctgagtccacccctc

SEQ ID NO: 643526 - DNA, 120 bp, Artificial Sequence
  ENSG00000182108_22 (sequence is synthesized)
tcctgcattacctggctttgccaagacaaccacaggcagagggtgtcttagttcagtctgctataacagaacaccataggctgggggacttaaacatttatctcttactgttcttataag

SEQ ID NO: 643527 - DNA, 120 bp, Artificial Sequence
  ENSG00000182108_23 (sequence is synthesized)
ggcattaatcccacccatgaaggctctgccttcgtgacctaatcacctccctaaggccgcaccccgcaataccatcatttgggatcagagtttcaacatatgaagtttgaggagacacaa

SEQ ID NO: 643528 - DNA, 120 bp, Artificial Sequence
  ENSG00000182108_24 (sequence is synthesized)
acattgagtctgttgcagatggtggtacagggtggggtaggacctactgacagcatagctggcggcagagggctctcctaatgggttcacagtgagatttctttgaagaaaaagcttcag

SEQ ID NO: 643529 - DNA, 120 bp, Artificial Sequence
  ENSG00000182108_25 (sequence is synthesized)
ttgagctcagtaacatcttagcgagaaccaagtgccagggggagtgtgtgccaggtgctctgcacacctccccagcctgcctgcctgcctgccatccatccgtccgttcttttacagaat

SEQ ID NO: 643530 - DNA, 120 bp, Artificial Sequence
  ENSG00000182108_26 (sequence is synthesized)
gaatgcttgttggttcagtacagtgcctggtgattgaacacagtgaacaagacagaccaagccttggccctttggcacttggtgaggaagactagtaggaacccaaacaagagaatcaga

SEQ ID NO: 643531 - DNA, 120 bp, Artificial Sequence
  ENSG00000182108_27 (sequence is synthesized)
ttttttcggaactatgaaggcaggcaagaaggacatgagcttccctgttgtgttcactgccatgtcctcaacacttaaaactgtgcctggcctctagtagacggtctctgtaggtgtaga

SEQ ID NO: 643532 - DNA, 120 bp, Artificial Sequence
  ENSG00000182108_28 (sequence is synthesized)
catggagtgaaacagaagtgaaacggtaggatagagatggtgggctgctttagctgaggggtcagagaaagcctctctaaggagatgatgcttttgagctgagccttaatttgatagaag

SEQ ID NO: 643533 - DNA, 120 bp, Artificial Sequence
  ENSG00000182108_29 (sequence is synthesized)
atgtggctggagaacagccccaggaaaggtcagtgaggtgggtgggagccataccatggaggacctggaaggccatagccaagagcagtggaaagccattggaaggttctaggcaggaga

SEQ ID NO: 643534 - DNA, 120 bp, Artificial Sequence
  ENSG00000182108_30 (sequence is synthesized)
tgacacaatcccattcccattttgcaaaaatgactctggcaattgtggacagaatgagctgaggggtaagaggggaagcagggccaccacctcagatgctgttagttgtccaggccagag

SEQ ID NO: 643535 - DNA, 120 bp, Artificial Sequence
  ENSG00000182108_31 (sequence is synthesized)
gtgacagaggcttggatgaggggagtttagtgaagatagagaaacatgaacagactgagaacaactctcaaaagtagaacctatggaatccattcaaaatctgtactgagcattgattgt

SEQ ID NO: 643536 - DNA, 120 bp, Artificial Sequence
  ENSG00000182108_32 (sequence is synthesized)
atcgcactcctgtgtctaggccctttgcatatgcactcactcattcaacagactttgaccctgcctgctcttctgccaggccgtgtgctaagggcctgcgatcccaagataaatccctgt

SEQ ID NO: 643537 - DNA, 120 bp, Artificial Sequence
  ENSG00000182108_33 (sequence is synthesized)
ctccaagccaagcatttgactttgaagcagtgtaacttggtgaggaacgtcttattttatctctttaccacatcaacagaaacacttccccttccaaatgaaaacattggcatattctga

SEQ ID NO: 643538 - DNA, 120 bp, Artificial Sequence
  ENSG00000182108_34 (sequence is synthesized)
actaaaaactgaatcccaaatgcttcgacatattttgcagcaaacgctgtttaagcagaaacaccaggaaatatctctcagggacacccttgcaaagctctcggggtgtcagggcctgac

SEQ ID NO: 643539 - DNA, 120 bp, Artificial Sequence
  ENSG00000182108_35 (sequence is synthesized)
cctgggaagtggggaggcctggagaagtggtggaagccatgcacagccttccctcctccccaccctcaaatccaagccaaggaggccttgcccccaagtgccgaggaagctcagaacccc

SEQ ID NO: 643540 - DNA, 120 bp, Artificial Sequence
  ENSG00000182108_36 (sequence is synthesized)
agggtatgagaggggtagctagcagcagggaagccgccaggaaagacctcaagatgatctgaccgagcctcatctccaggcccctttccataagcaggggaacgccggtagtcagtcctg

SEQ ID NO: 643541 - DNA, 120 bp, Artificial Sequence
  ENSG00000182108_37 (sequence is synthesized)
ctctttctcagccattctcatgtggtcacatgtgttccccacacgccaatccaggaaacagtgactaagggcgtggagcatgtcacacagtggggcccaggatgaatctcaagatgaaca

SEQ ID NO: 643542 - DNA, 120 bp, Artificial Sequence
  ENSG00000182108_38 (sequence is synthesized)
ggtgcacctacttttgctccctcttttttttttttttctcttatgtgtggacccacataattcagttcctcaaacatttgctgagcacctacttgaggaggcagtattagggtcatggtt

SEQ ID NO: 643543 - DNA, 120 bp, Artificial Sequence
  ENSG00000182108_39 (sequence is synthesized)
aagagccagggccctgggttcacatcccagggtagctgtgaccttgggcatgctgcttaacctccctgtactttggtttcctcttctagaagatggaaataatgaaaatctcccttgttg

SEQ ID NO: 643544 - DNA, 120 bp, Artificial Sequence
  ENSG00000182108_40 (sequence is synthesized)
tgaggattaggtgagatatacataaagcacttagatctccttgtatatagtaagagatgtattaatattaaccactcatattcatagtcggatacaatggaaagcgtgttatacccatgc

SEQ ID NO: 643545 - DNA, 120 bp, Artificial Sequence
  ENSG00000182108_41 (sequence is synthesized)
ccttgcaaatgtacaaacctgcacctatactcatgcatgaatatttatatcctgtgagcagaagaggacaggctgcctgagtgccagggaggtccaggtctagcctagctgggggagact

SEQ ID NO: 643546 - DNA, 120 bp, Artificial Sequence
  ENSG00000182108_42 (sequence is synthesized)
tcccactctgccttcccagccccaggacccttaggagaactttcttgctgccctgtggtccccagggcaccagaaccctggatagccggctctgtggttttcctagagtgttaattgttg

SEQ ID NO: 643547 - DNA, 120 bp, Artificial Sequence
  ENSG00000182108_43 (sequence is synthesized)
cccaggagcagggaatggggaatcgggagctccctccttcccaggagaaagggctgcagtggctggcctgggagccagggagagtcttcacgtcccagcagttctggtgcagaggcagct

SEQ ID NO: 643548 - DNA, 120 bp, Artificial Sequence
  ENSG00000182108_44 (sequence is synthesized)
cagttggattattcgtcccggttcctaatgaaagtgaaagctgctggtacctgccagccctctcttggcacacagcgagctgaaaatgcagagactggagaacgttgccaccagagtcag

SEQ ID NO: 643549 - DNA, 120 bp, Artificial Sequence
  ENSG00000182108_45 (sequence is synthesized)
cttgtcctggtgcagctcagatttggagctgagggttatcgatgcattggtctatcttattccaggatttcctaggcttcagttatctcccaactaggaaccacagctgctccttcctaa

SEQ ID NO: 643550 - DNA, 120 bp, Artificial Sequence
  ENSG00000182108_46 (sequence is synthesized)
cctggtccctccttgccaatctgtggcctgtgctatcagcagaacccctgtgccggacatagagctgcccaggtcagaaacccaaaccttccacagggacacagtcagatttgagttatg

SEQ ID NO: 643551 - DNA, 120 bp, Artificial Sequence
  ENSG00000182108_47 (sequence is synthesized)
ggagatcccacagccaggggtcagggcggatgcaggaaaccaggccaggaagctgtggctgtcatctaagcaagagacagacaatggtgacacagggaggcaagtatacccccaggcctg

SEQ ID NO: 643552 - DNA, 120 bp, Artificial Sequence
  ENSG00000182108_48 (sequence is synthesized)
gccacctctccagctctgctcctgacatgaggctcacccagaaggtccttggccatagggtacattggtgccagctgcgtcttcagacaggagaaaaccccagtatgtgtctcaagacag

SEQ ID NO: 643553 - DNA, 120 bp, Artificial Sequence
  ENSG00000182108_49 (sequence is synthesized)
tgagatgtcaagagtcctgctctcttagccctgaattatacaaactggagatttcagccaagaaacaggcagggtctgccccacttacagctcatgtgtctgttttgccgaactaagaaa

SEQ ID NO: 643554 - DNA, 120 bp, Artificial Sequence
  ENSG00000182108_50 (sequence is synthesized)
gtgagggcttctctcaatttggatattcatatttctggtttatctgctagctttcctcccagaacttctgaaagcatactcggcttttgggaaacctaagatcacaataaaagtggcaga

SEQ ID NO: 643555 - DNA, 120 bp, Artificial Sequence
  ENSG00000182108_51 (sequence is synthesized)
cctctttatccctgtctcacaaataaatggaggcacagaatggggaagtggaggccgagggaacaaagccaactaagactgccagcccggttccctggccacagcactgagggtttgagg

SEQ ID NO: 643556 - DNA, 120 bp, Artificial Sequence
  ENSG00000182108_52 (sequence is synthesized)
ggtgcctccagtgagggctccccatccccgaccttggaacaccagctcatagtttctgccaggcctatttcatacgcactcttccaactttttcctgaattaaaaacaaacaaacaaaca

SEQ ID NO: 643557 - DNA, 120 bp, Artificial Sequence
  ENSG00000182111_0 (sequence is synthesized)
ctttttgcttctctgcgcccagagctccagtccttctcttcactgctctgcgtcctctgctcctggaggccaagcctctgtggccttgtgtcctgcaagtattcgcagatttatggctaa

SEQ ID NO: 643558 - DNA, 120 bp, Artificial Sequence
  ENSG00000182111_1 (sequence is synthesized)
aagaccgggaccccctggaagccgagaaatgggactgttgacattcagagacatagctatagaattttctctggcggaatggcaatgcctggatcatgctcagcagaatttatatagaga

SEQ ID NO: 643559 - DNA, 120 bp, Artificial Sequence
  ENSG00000182111_2 (sequence is synthesized)
tgtgatgttagagaactacagaaacctggtctccctgggtattgctgtctctaagccagacttgatcacctgtctggagcaaaataaagagccccagaatataaagagaaatgagatggt

SEQ ID NO: 643560 - DNA, 120 bp, Artificial Sequence
  ENSG00000182111_3 (sequence is synthesized)
agccaaacacccagttacatgttctcatttcacccaagaccttcagtcagagcagggcataaaagattcactccaaaaagtgatactgagaagatatggaaaatgtggacaggaggattt

SEQ ID NO: 643561 - DNA, 120 bp, Artificial Sequence
  ENSG00000182111_4 (sequence is synthesized)
acaagtaaaaaaatgctgtaaaagtgtaggtgagtgtgaggtgcacaaaggaggttataattatgttaaccaatgtttgtcagctacccaaaacaaaacatttcagactcataaatgcgt

SEQ ID NO: 643562 - DNA, 120 bp, Artificial Sequence
  ENSG00000182111_5 (sequence is synthesized)
caaagtctttggtaaattttcaaattccaatagacacaagacaagacatactggaaagaaacatttcaaatgtaaaaacgatggcaaatcattttgcatgctttcacgcctaaatcaaca

SEQ ID NO: 643563 - DNA, 120 bp, Artificial Sequence
  ENSG00000182111_6 (sequence is synthesized)
cctaaatcaacatcagataattcatactagggagaagtcttacaaatgtgaagaatgtggcaaatcctttaactgctcttcaacccttactagacataaaagaattcatactggagagaa

SEQ ID NO: 643564 - DNA, 80 bp, Artificial Sequence
  ENSG00000182111_7 (sequence is synthesized)
ccttcatgtgaagaacgtggcaaagtctttagccgctcaacacttactaactacaagagaattcatactggagagaaacc

SEQ ID NO: 643565 - DNA, 74 bp, Artificial Sequence
  ENSG00000182111_8 (sequence is synthesized)
acatgtgaagaatgtggcaaagcctttagccgctcttcaacacttactaaccacaagagaattcatacttatcc

SEQ ID NO: 643566 - DNA, 120 bp, Artificial Sequence
  ENSG00000182111_9 (sequence is synthesized)
aaatgtgaagaatgtggcaaagcctttagcttatcctcaacccttaagaaacataagatagttcatactggggagaaactctacacatgtgaagaatgtgggaaagcctttaccttctcc

SEQ ID NO: 643567 - DNA, 120 bp, Artificial Sequence
  ENSG00000182111_10 (sequence is synthesized)
ctcctcaactctaaatactcataagaggattcatactggagagaaaccctacacttgtgaagaatgtggcaaagcctttagcttaccctcaaccttcacttaccacaagagaactcatac

SEQ ID NO: 643568 - DNA, 89 bp, Artificial Sequence
  ENSG00000182111_11 (sequence is synthesized)
tttaactgctcctcaacccttaagtctacaaatgtaaagaatgtgggaaagcctttaccttctcctcaactctaaatactcataagagg

SEQ ID NO: 643569 - DNA, 79 bp, Artificial Sequence
  ENSG00000182111_12 (sequence is synthesized)
atactggagagaaactctacaaatgtaaagaatgtgggaaagcctttaccttctcctcaactctaaatactcataagag

SEQ ID NO: 643570 - DNA, 120 bp, Artificial Sequence
  ENSG00000182111_13 (sequence is synthesized)
gaatatgcatactggagagaaaccctacaaatatgaataatgtggtaaagtccagccctcaggccttataatacataaaataatttatactggaaaaaatcactacaagtgtggagaatg

SEQ ID NO: 643571 - DNA, 120 bp, Artificial Sequence
  ENSG00000182111_14 (sequence is synthesized)
tggccaattctttaaccagttccaaaccactgctgtccataagataattcatattggacaaaagtcttataaatgtaaaaaaaaaagtaacagcctttaaccacccctcaaaccttaatg

SEQ ID NO: 643572 - DNA, 66 bp, Artificial Sequence
  ENSG00000182111_15 (sequence is synthesized)
aaaaaagtaacagcctttaaccacccctcaaaccttaatgaacccaagagaatttatttaaaaaaa

SEQ ID NO: 643573 - DNA, 120 bp, Artificial Sequence
  ENSG00000182111_16 (sequence is synthesized)
ctgacttcaggtgaaccacctgcctcagcctcccaaagcctaagagaatttatattagagagactctacaaaggtcaaaaatgtgacaaaacatttaagcacatctcaggccttacacaa

SEQ ID NO: 643574 - DNA, 120 bp, Artificial Sequence
  ENSG00000182111_17 (sequence is synthesized)
tatcagataattcattctagagacaaaccctacaaaaacaatgtggtaaagcttttacctagtcttgaacccttattatacactaaaagaattgatactgaagaaaaaccctacaataag

SEQ ID NO: 643575 - DNA, 120 bp, Artificial Sequence
  ENSG00000182111_18 (sequence is synthesized)
gaatatggaaatgtcttttaaaagtcctcaaactttttgtttgaataaatgtaaaataattgatactggagagaacccctgcaattgtaaaaaaaaaaaaaaatgtggcaaagcttttaa

SEQ ID NO: 643576 - DNA, 120 bp, Artificial Sequence
  ENSG00000182111_19 (sequence is synthesized)
ctggttctccatctttattaattaaaatattttatactggagagaaactctacatacataaaaaatgtgacagcatttaaccacacctgacatttttctaaaatagagaaatcatactgg

SEQ ID NO: 643577 - DNA, 120 bp, Artificial Sequence
  ENSG00000182111_20 (sequence is synthesized)
tgcatgttatggtaggtaagataatttatactgaagaaaactcaggcaaatatgaaaaatgtggcaaaacttttaacaaattttcccatcttattgcacaggaagccttttatactagag

SEQ ID NO: 643578 - DNA, 120 bp, Artificial Sequence
  ENSG00000182111_21 (sequence is synthesized)
aaaaattgtaaaaatataaagaatgtgaaaagccattaatgtctgttcacatcttactcaatatcagaaagtttatacttaacaaaagcattataggctagatgtggtggctcatgcctg

SEQ ID NO: 643579 - DNA, 78 bp, Artificial Sequence
  ENSG00000182111_22 (sequence is synthesized)
tcaagatcaccccaccatactccagcctgggtgacagagcaagaatccatcttaaaaaaaaaaaaaaagcgtaaatgt

SEQ ID NO: 643580 - DNA, 120 bp, Artificial Sequence
  ENSG00000182111_23 (sequence is synthesized)
gcaagaatccatcttaaaaaaaaaaaaaaagcgtaaatgtgattactgtaaaaagacctttcagaaaacataggcctttaaagcaaagactatttattctaaagacaaacattaaaacat

SEQ ID NO: 643581 - DNA, 120 bp, Artificial Sequence
  ENSG00000182111_24 (sequence is synthesized)
aaagaggattgtgtagtacctttatttgtattacggattttattgtacacattttatatcaaaggaaaaccctgaaacagatgctcaaactttgttgaacatcggagaatttatattgga

SEQ ID NO: 643582 - DNA, 120 bp, Artificial Sequence
  ENSG00000182111_25 (sequence is synthesized)
gagaaagtgtaaatgaatgtcaaaaaatatttgttcaaaaactacagtttagaaaacactagtttatactaaaaaaatatttttgcagatgcagtaaatggggaaaatatgtttaatcaa

SEQ ID NO: 643583 - DNA, 120 bp, Artificial Sequence
  ENSG00000182111_26 (sequence is synthesized)
aaattaagtctacataaacatttgaggattcacagtagaaagaatgaaggtgctgaaacttcagacattacactaaatcagagtgttgagtgtaaaaaagatataaatctaacaatataa

SEQ ID NO: 643584 - DNA, 120 bp, Artificial Sequence
  ENSG00000182111_27 (sequence is synthesized)
atttaaagaagtagatttatttggagatttataattacattcgaggtatgcttctttctttgtaaaaaaaaatatagattttctgaaaagcaaatagtaatgtaactcacatttcaaatt

SEQ ID NO: 643585 - DNA, 120 bp, Artificial Sequence
  ENSG00000182111_28 (sequence is synthesized)
acttcatgttgatcctttcttcccattgtttctgtgaaagtattggaccaattgttgaatcagagatatgagattgttttttataggtgtccattattcatgaactttcctatggatgag

SEQ ID NO: 643586 - DNA, 120 bp, Artificial Sequence
  ENSG00000182111_29 (sequence is synthesized)
taaggacattaagttgtaagatgcataatgaaaatctaaatggagaggttctttgtggttgacttataacattgttttagtgatgtataaggcgagcgttcagagtaatattctaaattc

SEQ ID NO: 643587 - DNA, 120 bp, Artificial Sequence
  ENSG00000182111_30 (sequence is synthesized)
tagtgaggaaaacctttgaacgtcagtagtaaattattttatcaattgtacctttatgtaaacaaagttgtttttaatgagctaaaactattgtgctttgaaagaagtattaagctgcca

SEQ ID NO: 643588 - DNA, 120 bp, Artificial Sequence
  ENSG00000182111_31 (sequence is synthesized)
ttgactctatcgtgtctcatcttaaggttctgcgtaaaagatggtgacaatatactatttgttaatgtaggggaatgacatcactagtagtctcttttttgccagtgtttttgtttgttt

SEQ ID NO: 643589 - DNA, 72 bp, Artificial Sequence
  ENSG00000182111_32 (sequence is synthesized)
tcactagtagtctcttttttgccagtgtttttgtttgtttgttttgagactaagtcttactctgtcacccag

SEQ ID NO: 643590 - DNA, 120 bp, Artificial Sequence
  ENSG00000182111_33 (sequence is synthesized)
ggcatgagccaccatgcctggcctactagaggttttacacagcaaacaagttgaagaattttgttcccataggacaaatttgtacttttttaccttatttaatttttttttaatttttgt

SEQ ID NO: 643591 - DNA, 120 bp, Artificial Sequence
  ENSG00000182111_34 (sequence is synthesized)
atttaatttttttttaatttttgtgggtagtgtgcatacacacttatggcatatatgagatatgttaacacatgcacataatatttaatgatcacaacagagtaaatgaggcattcatca

SEQ ID NO: 643592 - DNA, 120 bp, Artificial Sequence
  ENSG00000182111_35 (sequence is synthesized)
ccttgagcatgtatttatcctttgtattacaaacaatcccattatacagttttagttatttcaatatgtgcaattgaattactattaaccacagggtcattttatgatcataaaaattac

SEQ ID NO: 643593 - DNA, 120 bp, Artificial Sequence
  ENSG00000182111_36 (sequence is synthesized)
atgagtataattaatacccatacatttctgagtcttgattaaatatttttaaaattttgttttataaattttttgcacatgtggcatctctgctgacaaacaaaaacagacttttagttt

SEQ ID NO: 643594 - DNA, 120 bp, Artificial Sequence
  ENSG00000182111_37 (sequence is synthesized)
caatttacatagagttacatatacaaatatattactctaaagatataccagccgagcacagtggctcccagcattttgggagcctgaggtgggaggatcatttgaggttaggagttcaag

SEQ ID NO: 643595 - DNA, 88 bp, Artificial Sequence
  ENSG00000182111_38 (sequence is synthesized)
aacctcggaggtggaggtagcagtgagctgagatggtgcaaccatctcaaaaaaaaaaataaataaataaaagatataccttaagcat

SEQ ID NO: 643596 - DNA, 120 bp, Artificial Sequence
  ENSG00000182117_0 (sequence is synthesized)
ttccggttatgcaggaaggaaattgacgaacacgtgacgcggtcgggcggaccactgcagactgagcggtggaccgaattgggaccgctggcttataagcgatcatgtttctccagtatt

SEQ ID NO: 643597 - DNA, 120 bp, Artificial Sequence
  ENSG00000182117_1 (sequence is synthesized)
acctcaacgagcagggagatcgagtctatacgctgaagaaatttgacccgatgggacaacagacctgctcagcccatcctgctcggttctccccagatgacaaatactctcgacaccgaa

SEQ ID NO: 643598 - DNA, 120 bp, Artificial Sequence
  ENSG00000182117_2 (sequence is synthesized)
atgtcttttctgccacctgttacccctcggagactccgtaaccaaactcttcggactgtgagccctgatgcctttttgccagccatactctttggcatccagtctctcgtggcgattgat

SEQ ID NO: 643599 - DNA, 120 bp, Artificial Sequence
  ENSG00000182117_3 (sequence is synthesized)
tatgcttgtgtgaggcaatcatggtggcatcacccataaagggaacacatttgacttttttttctcatattttaaattactacaagattattaaagataaaatgatttgaaaaactctta

SEQ ID NO: 643600 - DNA, 120 bp, Artificial Sequence
  ENSG00000182117_4 (sequence is synthesized)
ctgcagactgagcggtggaccgaattgggaccgctggcttataagcgatcatgtttctccagtattacctcaacgagcagggagatcgagtctatacgctgaagatgacaaatactctcg

SEQ ID NO: 643601 - DNA, 80 bp, Artificial Sequence
  ENSG00000182118_0 (sequence is synthesized)
gggccgcgggcaacggcgcggtccgggggctgcgggtggacgggctgcccccgctgccaaagagcttgagcgggctgctg

SEQ ID NO: 643602 - DNA, 120 bp, Artificial Sequence
  ENSG00000182118_1 (sequence is synthesized)
gctgccaaagagcttgagcgggctgctgcactcggcgtcgggcggcggcgcgtctgggggctggcggcacctggagcggctgtacgcgcagaagtcgcgcatccaggacgagctgagccg

SEQ ID NO: 643603 - DNA, 120 bp, Artificial Sequence
  ENSG00000182118_2 (sequence is synthesized)
cgggggcccgggcggcggcggggcccgggcggcagcgctgcccgccaagcctcccaacctggacgccgctctggcgctgctccgcaaagagatggttggtctccgccagctggacatgtc

SEQ ID NO: 643604 - DNA, 120 bp, Artificial Sequence
  ENSG00000182118_3 (sequence is synthesized)
cttgctctgccaactgtacagcctctacgagtcgattcaggagtacaagggggcatgccaggcagcctccagcccagactgcacttacgctctggagaacggcttcttcgatgaagagga

SEQ ID NO: 643605 - DNA, 120 bp, Artificial Sequence
  ENSG00000182118_4 (sequence is synthesized)
ggaatatttccaggagcagaactccctgcacgacaggagggaccgaggccctcctcgggacttgtcactgcctgtctcctccctctccagcagcgactggattctggagtccatctagag

SEQ ID NO: 643606 - DNA, 120 bp, Artificial Sequence
  ENSG00000182118_5 (sequence is synthesized)
ggtcttgggagggatgtgactgttgggaagcccttcctactggacacgctgtcatcatttgctgcttctcttgcaagaaagcacctccgttgtggacggtcctcgggcacaggggatgag

SEQ ID NO: 643607 - DNA, 120 bp, Artificial Sequence
  ENSG00000182118_6 (sequence is synthesized)
tggcagcagtttctgcttaggtgacctagaggtcctcagcagtatcctccacacctatttattgaggtgcacctgctggggattcataatgagaatataacaagaggatctcggtgaaag

SEQ ID NO: 643608 - DNA, 120 bp, Artificial Sequence
  ENSG00000182118_7 (sequence is synthesized)
gccttagtgggtgttttgtgtgaggtggcttgtagctagctacttccttacagatggtagagtattccaatcctctttgtgttagggttcttgcttccagtttgggatgtattaaaacca

SEQ ID NO: 643609 - DNA, 120 bp, Artificial Sequence
  ENSG00000182118_8 (sequence is synthesized)
ccatttcactgcttcccttcctcaatatgctctgcagcttttcttgctgtttaaacctctcgcctcagctttatttatttgtaagctgcattactaactgcccagtgattcggtgaaagc

SEQ ID NO: 643610 - DNA, 120 bp, Artificial Sequence
  ENSG00000182118_9 (sequence is synthesized)
tttttactgaaaaagttaacatttctagtcatcccaatcaactggcttttttcaaccaaaattttatatcattctttgtctatcagatacgagaggaaggaagataatacgaagacatgt

SEQ ID NO: 643611 - DNA, 120 bp, Artificial Sequence
  ENSG00000182118_10 (sequence is synthesized)
tgaatagtgaaaaaaaaaaaaagaacacaaaaactggggcaagccaatgtgatgtatcactcactgtaagatggcaaatgttttcatttttaagattccgaatgtaaactagtgtgctag

SEQ ID NO: 643612 - DNA, 120 bp, Artificial Sequence
  ENSG00000182118_11 (sequence is synthesized)
aaagcaaaccacccgccactcaaaccagtaattaccttaagccttaatatatttattaaaatactttatgagaacattacactttgtaggttaaaaatgaggataaaatgctaaactatc

SEQ ID NO: 643613 - DNA, 120 bp, Artificial Sequence
  ENSG00000182118_12 (sequence is synthesized)
gagggactcagcaggagagtagatctaggattccagatgatcttcttccatggtttttgagcacatactatgtgaccccgagagagtgtggctttctcgattaaagttattatttctttt

SEQ ID NO: 643614 - DNA, 120 bp, Artificial Sequence
  ENSG00000182118_13 (sequence is synthesized)
atgaaatcctagcaaagatagggacgtcagagctggccgagtcagactcctgggggcatgttgatggcatccagatgcaattctgcagaggaatcctggaaaacaggagtaagtctagag

SEQ ID NO: 643615 - DNA, 120 bp, Artificial Sequence
  ENSG00000182118_14 (sequence is synthesized)
gaaaggccacgggtgttagtggacgagaggtcataatgaaaataggggaagggcctgagatatttagcttggagagaagaacacaggtttggtttttgttttagggcatggggtggtgga

SEQ ID NO: 643616 - DNA, 120 bp, Artificial Sequence
  ENSG00000182118_15 (sequence is synthesized)
aagtaaatgaccttcagattaaagggtagtagttaggagagagttaaattagatctgtttggatgctcagctgtcacacccagcatcaagggctctgtggggcctccaggctgggaggct

SEQ ID NO: 643617 - DNA, 120 bp, Artificial Sequence
  ENSG00000182118_16 (sequence is synthesized)
ttgactttgtataaaataatcgtattggtttggagaggagtgcagtggtttggaaggtcctccttttggggtttgagctgagcaatttatccacagtttctcagctggtgagtggcggag

SEQ ID NO: 643618 - DNA, 120 bp, Artificial Sequence
  ENSG00000182118_17 (sequence is synthesized)
gccatggaagctgctgattgttcttgaatttaaagtggagaataagggaccacaaattgcagggtttgagcattccatgtttttcttaaatgagcctgtctgcattttcaaaacgtgtgc

SEQ ID NO: 643619 - DNA, 120 bp, Artificial Sequence
  ENSG00000182118_18 (sequence is synthesized)
tttcaaaagagagctgtattttctgaatccagctgtgaatgtggagaccagccgtcctccaagggcatgcgagaacacaccgttgagatccaggctgcttctgctcggagagtggcttgc

SEQ ID NO: 643620 - DNA, 120 bp, Artificial Sequence
  ENSG00000182132_0 (sequence is synthesized)
gctggcagcaggcagcaggcagcaggcgggcgcgctgtggctccgcgccgcgcggtccgggctctgttcattcatgattggtactcggccctccgagacccagcccgagcgcagggaggg

SEQ ID NO: 643621 - DNA, 80 bp, Artificial Sequence
  ENSG00000182132_1 (sequence is synthesized)
cccgcaccgcacgcggcgctggctcggcagcctcggccgggcggccgctctggccccgtgtccagtgccaggcaggcttc

SEQ ID NO: 643622 - DNA, 120 bp, Artificial Sequence
  ENSG00000182132_2 (sequence is synthesized)
agggcaccgtcctcggccctgggcgagggaaccgccgggccgggtcctcgcgcggggaagcggttccgaaggctcgcggggagcggctagccctgagtccctgcatgtgcggggctgaag

SEQ ID NO: 643623 - DNA, 120 bp, Artificial Sequence
  ENSG00000182132_3 (sequence is synthesized)
aaggaagccagaagcctcctagcctcgcctccacgcttgctgaataccaagctgcaggcgagctgccgggcgcttttctctcctccaattcagagtagacaaaccacggggatttctttc

SEQ ID NO: 643624 - DNA, 120 bp, Artificial Sequence
  ENSG00000182132_4 (sequence is synthesized)
cagggtaggggaggggccgggcccggggtcccaactcgcactcaagtcttcgctgccatgggggccgtcatgggcaccttctcatctctgcaaaccaaacaaaggcgaccctcgaaagat

SEQ ID NO: 643625 - DNA, 120 bp, Artificial Sequence
  ENSG00000182132_5 (sequence is synthesized)
aagattgaagatgagctggagatgaccatggtttgccatcggcccgagggactggagcagctcgaggcccagaccaacttcaccaagagggagctgcaggtcctttatcgaggcttcaaa

SEQ ID NO: 643626 - DNA, 120 bp, Artificial Sequence
  ENSG00000182132_6 (sequence is synthesized)
aatgagtgccccagtggtgtggtcaacgaagacacattcaagcagatctatgctcagtttttccctcatggagatgccagcacgtatgcccattacctcttcaatgccttcgacaccact

SEQ ID NO: 643627 - DNA, 120 bp, Artificial Sequence
  ENSG00000182132_7 (sequence is synthesized)
cagacaggctccgtgaagttcgaggactttgtaaccgctctgtcgattttattgagaggaactgtccacgagaaactaaggtggacatttaatttgtatgacatcaacaaggacggatac

SEQ ID NO: 643628 - DNA, 120 bp, Artificial Sequence
  ENSG00000182132_8 (sequence is synthesized)
agcatgtggacgtcttcttccagaaaatggacaaaaataaagatggcatcgtaactttagatgaatttcttgaatcatgtcaggaggacgacaacatcatgaggtctctccagctgtttc

SEQ ID NO: 643629 - DNA, 120 bp, Artificial Sequence
  ENSG00000182132_9 (sequence is synthesized)
aaaatgtcatgtaactggtgacactcagccattcagctctcagagacattgtactaaacaaccaccttaacaccctgatctgcccttgttctgattttacacaccaactcttgggacaga

SEQ ID NO: 643630 - DNA, 120 bp, Artificial Sequence
  ENSG00000182132_10 (sequence is synthesized)
aacaccttttacactttggaagaattctctgctgaagactttctatggaacccagcatcatgtggctcagtctctgattgccaactcttcctctttcttcttcttgagagagacaagatg

SEQ ID NO: 643631 - DNA, 120 bp, Artificial Sequence
  ENSG00000182132_11 (sequence is synthesized)
aaatttgagtttgttttggaagcatgctcatctcctcacactgctgccctatggaaggtccctctgcttaagcttaaacagtagtgcacaaaatatgctgcttacgtgcccccagcccac

SEQ ID NO: 643632 - DNA, 120 bp, Artificial Sequence
  ENSG00000182132_12 (sequence is synthesized)
tgcctccaagtcaggcagaccttggtgaatctggaagcaagaggacctgagccagatgcacaccatctctgatggcctcccaaaccaatgtgcctgtttctcttcctttggtgggaagaa

SEQ ID NO: 643633 - DNA, 120 bp, Artificial Sequence
  ENSG00000182132_13 (sequence is synthesized)
tgagagttatccagaacaattaggatctgtcatgaccagattgggagagccagcacctaacatatgtgggataggactgaattattaagcatgatattgtctgatgacccaaactgccca

SEQ ID NO: 643634 - DNA, 120 bp, Artificial Sequence
  ENSG00000182132_14 (sequence is synthesized)
tgtcatttgtttccagaaacgaggaccaataattctctcacactggcatttgtgctggtagtacaagtcctttaatatgtccaggaagggagccattgcccagtggtccatatctccacc

SEQ ID NO: 643635 - DNA, 120 bp, Artificial Sequence
  ENSG00000182132_15 (sequence is synthesized)
acatcccctgcttgagcccagcgctgcatgtccctcccaagaagtccagaatgcctgcaaattgctgtaattttataccatgttctaaccaataaacagaactatttcttacactctcaa

SEQ ID NO: 643636 - DNA, 120 bp, Artificial Sequence
  ENSG00000182132_16 (sequence is synthesized)
aagaaagacagtcagcaaagcctgggagagctccagctcctccctccctgctctgctcaacttcactctcctcctcggttcccttggagtaccttgtgccccggcagtgctgtcccggcc

SEQ ID NO: 643637 - DNA, 120 bp, Artificial Sequence
  ENSG00000182132_17 (sequence is synthesized)
ctggcatcctgaggtcctcccgtggtgaggacttaagtggacagcaggagtgggtggagagagggagggagagtttgccctgcaggctctctggatgcagaagccagactcgctgcagag

SEQ ID NO: 643638 - DNA, 120 bp, Artificial Sequence
  ENSG00000182132_18 (sequence is synthesized)
gcagctgtgctgttcccggagcctggcttcaggggtgcatccgtcactcagggttcattcacccaggcaggctccaagttcctggggtgcacaaggtgggcactgtcccttctgggtgct

SEQ ID NO: 643639 - DNA, 120 bp, Artificial Sequence
  ENSG00000182132_19 (sequence is synthesized)
gacagcagagcctggctcccctccgccaccatgagcggctgctccaaaagatgcaagcttgggttcgtgaaatttgcccagaccatctttaagctcatcactgggaccctcagcaaagat

SEQ ID NO: 643640 - DNA, 120 bp, Artificial Sequence
  ENSG00000182132_20 (sequence is synthesized)
tttttccctcatggagccctgccttgtttggaaggttctccctgtgtggaattcctgcccccatcacctgccctccttttctgccttgtagatgccagcacgtatgcccattacctcttc

SEQ ID NO: 643641 - DNA, 120 bp, Artificial Sequence
  ENSG00000182132_21 (sequence is synthesized)
gagtcaaaagtggaactggggcccgcagagccggatagcttgggcagtacgtgtgtgcacctgcaggctgtggagacaggtatttccatggagctcactcgccctgcctctcatccaggc

SEQ ID NO: 643642 - DNA, 120 bp, Artificial Sequence
  ENSG00000182132_22 (sequence is synthesized)
ctgaaaatcatagagcatcccgctggccatctgcatcagcccgacccccacaggatagaagactggcacatccaagttgctccttccacaccctctccccactgaggcctcgtctcctcc

SEQ ID NO: 643643 - DNA, 120 bp, Artificial Sequence
  ENSG00000182132_23 (sequence is synthesized)
gccctgtggccaattgaagactcagcatcatcaagactggagggacagagcatttgaatcatcagacgctgggccagacgtcaccccacgcgttttctcattttatcgtcctaagaagcc

SEQ ID NO: 643644 - DNA, 120 bp, Artificial Sequence
  ENSG00000182132_24 (sequence is synthesized)
ctaccttaaattaatttgttgaaaggacagatggatggatggttgatggaagtagcaggcttccagcagcaggggatggagtgagtgtgtggataccgctggatcagcagaaggttatac

SEQ ID NO: 643645 - DNA, 120 bp, Artificial Sequence
  ENSG00000182132_25 (sequence is synthesized)
gactggtggaaaataaaccgtgcactttagaacagcaggaagggaggcttggaagcctggttttctggctttgaatgaccgcctagcgcttgccggtgcgccagggtgctgtgaggatgt

SEQ ID NO: 643646 - DNA, 120 bp, Artificial Sequence
  ENSG00000182134_0 (sequence is synthesized)
aagcaaacttccgcctgcggagacccgctcccttcctcgcccccacagaaacgccccccgccaccaccccctcccccggcgtaggccttcacgctgtcgcctcgacccgtttcctcgaat

SEQ ID NO: 643647 - DNA, 120 bp, Artificial Sequence
  ENSG00000182134_1 (sequence is synthesized)
ccccagggaagggtgggcccctggcgcccctatggcccgccgcccccttaccaccgcggtcggagcccgggtctcactctcctgccgctgtttcgggccacaccgtgtgtccgtgcctcc

SEQ ID NO: 643648 - DNA, 120 bp, Artificial Sequence
  ENSG00000182134_2 (sequence is synthesized)
gcaaaggaatagaagagtgggtcctcgctctctgcggcgcaccgcttgtcccttgacttcctgtccatctacaaagcctatttcatgttttccagaaagaaaacgttttccgtgtctctt

SEQ ID NO: 643649 - DNA, 120 bp, Artificial Sequence
  ENSG00000182134_3 (sequence is synthesized)
gagtcctcatcgccatatgcggggcgggaccgatctatgcaaaagatcgcaagagaaaactgatggagcatcgcccatcatgaggctgctctcccgatggtcactgagttgtgttgtggc

SEQ ID NO: 643650 - DNA, 120 bp, Artificial Sequence
  ENSG00000182134_4 (sequence is synthesized)
actgtctttgtacaaagacaccaatttttgcgaacggtgccactcatgattcaacgctctcatgcctcggtcccagctgctggagcgcagattttcctccaagggttagaagatagaaaa

SEQ ID NO: 643651 - DNA, 120 bp, Artificial Sequence
  ENSG00000182134_5 (sequence is synthesized)
ctcctcggatataagtcaaagagtacagcagaaaatgtctactgaacggacttcttggacaagcctgtccaccattcagaaaatagccctgggccttgggatcccagccagtgcaacagt

SEQ ID NO: 643652 - DNA, 120 bp, Artificial Sequence
  ENSG00000182134_6 (sequence is synthesized)
tgcctatatcctataccgcaggtatagggaaagcagagaagagcggctgacatttgttggggaagatgacattgagatagagatgcgggttccccaggaggctgtgaaactcatcattgg

SEQ ID NO: 643653 - DNA, 120 bp, Artificial Sequence
  ENSG00000182134_7 (sequence is synthesized)
ccggcaaggagccaatattaaacagctgcggaaacagacaggtgctcggattgatgtggacacagaggatgtaggcgatgagcgagtgctgcttatcagtggttttcctgttcaggtgtg

SEQ ID NO: 643654 - DNA, 120 bp, Artificial Sequence
  ENSG00000182134_8 (sequence is synthesized)
caaggccaaagcagcaatccatcagatcctgacagagaataccccagtgtctgagcagctttcagttccccagagatctgtgggcagaatcatagggagaggcggcgagacaattcgttc

SEQ ID NO: 643655 - DNA, 120 bp, Artificial Sequence
  ENSG00000182134_9 (sequence is synthesized)
tatctgtaaggcatctggagccaaaattacctgtgacaaagaatcagaagggacattactactatcaagacttataaaaatctcaggaacacagaaggaagtggcagcagccaagcattt

SEQ ID NO: 643656 - DNA, 120 bp, Artificial Sequence
  ENSG00000182134_10 (sequence is synthesized)
gatactggagaaagtttcagaagatgaagaacttcggaagagaattgctcattctgcagaaaccagggtcccacgcaaacagccaatcagtgtgagaagagaagacatgacagagccagg

SEQ ID NO: 643657 - DNA, 120 bp, Artificial Sequence
  ENSG00000182134_11 (sequence is synthesized)
tggagctggagagccagcattatggaaaaacaccagttctagcatggagccgactgcacccctggtgactcctccacccaaaggaggaggcgacatggctgtggtagtgtcaaaggaagg

SEQ ID NO: 643658 - DNA, 120 bp, Artificial Sequence
  ENSG00000182134_12 (sequence is synthesized)
cagttttcatgctgatgagtacctagaagtctacgtttctgcttctgagcaccctaaccacttctggatccagatcgttggctcccgcagcctgcaattggataagcttgtcaatgagat

SEQ ID NO: 643659 - DNA, 120 bp, Artificial Sequence
  ENSG00000182134_13 (sequence is synthesized)
gacccagcactatgagaatagtgtgcctgaagacttgactgtgcatgtaggagacattgtagcagcacctttacctacaaatggttcctggtatcgagcccgggtcctcggcaccttgga

SEQ ID NO: 643660 - DNA, 120 bp, Artificial Sequence
  ENSG00000182134_14 (sequence is synthesized)
gaatgggaacttggacctctattttgttgactttggagataatggagattgcccactgaaggacctcagggctctcaggagtgacttcctaagccttccatttcaagcaatagaatgtag

SEQ ID NO: 643661 - DNA, 120 bp, Artificial Sequence
  ENSG00000182134_15 (sequence is synthesized)
tctggcacggattgctccctcaggtgaccagtgggaagaggaagctttggatgagtttgatagactcactcattgtgctgactggaagcctctggtagccaagatctctagctatgtcca

SEQ ID NO: 643662 - DNA, 120 bp, Artificial Sequence
  ENSG00000182134_16 (sequence is synthesized)
gactgggatctcaacttggccaaagatctacttatatgatactagcaatgggaagaaacttgatattgggctagaattagtacacaaaggatacgcaattgagcttcctgaagacataga

SEQ ID NO: 643663 - DNA, 120 bp, Artificial Sequence
  ENSG00000182134_17 (sequence is synthesized)
agaaaacagagctgtcccagacatgttgaaggacatggccacagaaacagatgcctctctcagcacgttgctcactgagaccaaaaagagctctggagagataacacataccctgtcctg

SEQ ID NO: 643664 - DNA, 120 bp, Artificial Sequence
  ENSG00000182134_18 (sequence is synthesized)
cctcagcttatcagaagctgcttccatgtctggtgatgataaccttgaagatgactacttactctgaagtctgggcttcagtttgctcagccatctgctttgctgtgatttggcatagga

SEQ ID NO: 643665 - DNA, 120 bp, Artificial Sequence
  ENSG00000182134_19 (sequence is synthesized)
attggtgcatggaggagaggagtgtatgataaaggatccatgcagtccttcctttattacacatatagtctggcttgctgtggaccaaattaatattctcctcccatcagactacaaaaa

SEQ ID NO: 643666 - DNA, 120 bp, Artificial Sequence
  ENSG00000182134_20 (sequence is synthesized)
aattggactaccacgctacaagtgtgtctcccccattccacctccggatccctccccaaccctccagtgtttgaatactgctgtgttacttccaggccgttcaacgtcaggctcagtccc

SEQ ID NO: 643667 - DNA, 120 bp, Artificial Sequence
  ENSG00000182134_21 (sequence is synthesized)
ctctaccagtcatgattcacattactactaggctgtatcctttttgaggctgggaaacagtcaggctttcgtcattggaagtgattctgcagacttctgactcaccttatcaggtgactc

SEQ ID NO: 643668 - DNA, 120 bp, Artificial Sequence
  ENSG00000182134_22 (sequence is synthesized)
tggttaaggaaagcttttgagtggtgaactcaaagactccagttgaatcaggaggcaaaggcaaaaattagcataattatatttaaaagcctcaggaagtgggaagagaatactgcctcc

SEQ ID NO: 643669 - DNA, 120 bp, Artificial Sequence
  ENSG00000182134_23 (sequence is synthesized)
cagcctcaattgctgatatgttattggagacaggcttttgaaactgctccagctatttctctgtaacctttagttaaaatataagtagaaaggagacaggaggctcaggaaattttctaa

SEQ ID NO: 643670 - DNA, 120 bp, Artificial Sequence
  ENSG00000182134_24 (sequence is synthesized)
attgctagtataatatctatatgtatacacacatatacacccgtggagagagaggaagagtatacagtcctgtttgaatcatttggaggatttttttgctgaataaagttctcaagaaaa

SEQ ID NO: 643671 - DNA, 120 bp, Artificial Sequence
  ENSG00000182134_25 (sequence is synthesized)
gctcactgtggtggtgtgagtgggaggcggcggcgctggtggctgcagctggggtgaggcgcgaggcggcgcactcgacggctgactggagcagcggtaaaggcgaggatggagaccgaa

SEQ ID NO: 643672 - DNA, 120 bp, Artificial Sequence
  ENSG00000182134_26 (sequence is synthesized)
tcccatgccctgtcttaatatacttctctgcagctgctttcctgcagcttaacttgctctcagattgagcactttcaagctttttgtgtatttctgtctttggcaggatttggcatagga

SEQ ID NO: 643673 - DNA, 120 bp, Artificial Sequence
  ENSG00000182134_27 (sequence is synthesized)
gtagggaacctttactctttagaggttccctgatataaatcattcataagacttcctaccctggaaaatgagtaatgtctcattcttacctgcagtttgttactatgtataaaagtcttt

SEQ ID NO: 643674 - DNA, 120 bp, Artificial Sequence
  ENSG00000182134_28 (sequence is synthesized)
ttctttaatatgcctttaagtcttacctgtttacagcccattctgatgggttctttgtcattctgttagtataacccagtacttttcctgctgcctggaatgccctcttctatgttacct

SEQ ID NO: 643675 - DNA, 120 bp, Artificial Sequence
  ENSG00000182134_29 (sequence is synthesized)
attctgtccgttgagatcccccaacttgggccaaagccaagagatctatgtgccttctctggttttctccacatctatagcacctcaactgaaatatatggataaaaacagcctaacaaa

SEQ ID NO: 643676 - DNA, 120 bp, Artificial Sequence
  ENSG00000182134_30 (sequence is synthesized)
gaaacctagtgatgacagctttcagaagtctgaagcccaggccatcccagagatgcccatgtttgaaagtatgtaacaaagagggagcccattaatcattgaagatagaaatactggctt

SEQ ID NO: 643677 - DNA, 120 bp, Artificial Sequence
  ENSG00000182134_31 (sequence is synthesized)
ggtacgtgaaccctatgactgtgtgtgtgaaaatgttcagacatgctcctgccttgttaaattgaaaaaaactctttccttgccaggtattgtgtgtgttttgttttggggttttttgtg

SEQ ID NO: 643678 - DNA, 120 bp, Artificial Sequence
  ENSG00000182134_32 (sequence is synthesized)
tccccttcaccatgtgaggggaaaaaaagggacattgagaccagaggtttactgtttgtagaactggtggtaaaaccaaacctgtttcctcaagaagttgtatgatctgaaccttacaaa

SEQ ID NO: 643679 - DNA, 120 bp, Artificial Sequence
  ENSG00000182134_33 (sequence is synthesized)
gtctggtgatgataaccttgaagatgactacttactcagtctgggcttcagtttgctcagccatctgctttgctgtatgttgcctgcaatgaactcgctgaagcatgctcagccctggaa

SEQ ID NO: 643680 - DNA, 120 bp, Artificial Sequence
  ENSG00000182134_34 (sequence is synthesized)
ttttgaaattgctgaagctcttgaaattggaaggtaggcagtagtagtcttttcagtaataatgtgctcccatgcctctctgctattcataaaaggattggatgaaacctccctcttttc

SEQ ID NO: 643681 - DNA, 120 bp, Artificial Sequence
  ENSG00000182134_35 (sequence is synthesized)
acaccacctgcaggggcttcctcagagtccagttgtaacttgatggaacaagttacaacttcccaccttcgtggtaggtgggaagaaaagaatccctgaaatgcctgagggtgcattttt

SEQ ID NO: 643682 - DNA, 120 bp, Artificial Sequence
  ENSG00000182134_36 (sequence is synthesized)
aaagacaggggaagagggtctcctataaaggaaaaggagttatccagctgcctcagcgcgaaaagcaaggaagaacagcagatccccacctctgtcgttccgatcattctggaagttcac

SEQ ID NO: 643683 - DNA, 120 bp, Artificial Sequence
  ENSG00000182134_37 (sequence is synthesized)
aaacacagagtccacatttgtcttctcttccacgtactccagggttgcagtcaaactaggagccacagaaaaacagttaaaatgtttggccgctccctctccctctccctctccgtctcc

SEQ ID NO: 643684 - DNA, 120 bp, Artificial Sequence
  ENSG00000182134_38 (sequence is synthesized)
attaacaattgatggcacaggatgagaagcccaaacttggaaggaccctccagggaaataagaggaaaccaagagaaagagggcacagaaaccaaggaaagagttttgtggagggagtgg

SEQ ID NO: 643685 - DNA, 120 bp, Artificial Sequence
  ENSG00000182141_0 (sequence is synthesized)
actcagacacgcagctggaccggacagggcggcttccgggtttggcgcggcctttgtctcttgctgcagccggagctccggtctcgtcttcactgctgtttgtcctctgctcctagaggc

SEQ ID NO: 643686 - DNA, 120 bp, Artificial Sequence
  ENSG00000182141_1 (sequence is synthesized)
ccagactctgtggctctgtgacctgcaggtattgggagatccacagctaagactccaggaccctctggaagcctagaaatgggaccattgacatttatggatgtggccatagaattctct

SEQ ID NO: 643687 - DNA, 120 bp, Artificial Sequence
  ENSG00000182141_2 (sequence is synthesized)
ctggaggagtggcagtgcctggacacagcacagcagaatttatataggaatgtcatgttagagaattatagaaacctggtattcctgggtattgctgtgtctaatttagacctgatcacc

SEQ ID NO: 643688 - DNA, 120 bp, Artificial Sequence
  ENSG00000182141_3 (sequence is synthesized)
tgtctggagcaaggaaaagagccctggaatatgaagagacacgagatggcagccaaacccccagctatgtgttctcattttgccaaagaccttaggccagagcaatatataaaaaattct

SEQ ID NO: 643689 - DNA, 120 bp, Artificial Sequence
  ENSG00000182141_4 (sequence is synthesized)
ttccaacaagtgatactgagaagatatggaaaatgtggatatcagaaaggctgtaaaagtgtggatgagcataagttgcacaaaggaggtcacaagggacttaaccggtgtgtgacaact

SEQ ID NO: 643690 - DNA, 120 bp, Artificial Sequence
  ENSG00000182141_5 (sequence is synthesized)
acccagagcaaaatagttcagtgtgacaaatacgtgaaagtctttcataaatattcaaatgcaaagagacataagataagacatactggaaaaaatcctttcaaatgtaaagaatgtggc

SEQ ID NO: 643691 - DNA, 81 bp, Artificial Sequence
  ENSG00000182141_6 (sequence is synthesized)
acatactggaaaaaatcctttcaaatgtaaagaatgtggcaaatcattttgcatgctttcacaactaactcaacatgagat

SEQ ID NO: 643692 - DNA, 68 bp, Artificial Sequence
  ENSG00000182141_7 (sequence is synthesized)
cttacgaaaaagcttttaaccagtcctcaactcttactagacataagataattcatactggagagaaa

SEQ ID NO: 643693 - DNA, 71 bp, Artificial Sequence
  ENSG00000182141_8 (sequence is synthesized)
acataagataattcatagtcctcaaaccttactaaacataagatagttcatactggagagaaaccctacaa

SEQ ID NO: 643694 - DNA, 90 bp, Artificial Sequence
  ENSG00000182141_9 (sequence is synthesized)
agaatgtggcaaagcctttaccctatcttcacaccttactacacataagaggattcatactggtgagaaaccctacaaatgtgaagaatg

SEQ ID NO: 643695 - DNA, 78 bp, Artificial Sequence
  ENSG00000182141_10 (sequence is synthesized)
acataagaggattcatactggtgtattttcaacccttactaaacataagataattcatactgaagagaaaccctacaa

SEQ ID NO: 643696 - DNA, 68 bp, Artificial Sequence
  ENSG00000182141_11 (sequence is synthesized)
aaagcctttaccaagtcctcaactcttacttatcataaggtaattcatactggaaagaaaccctacaa

SEQ ID NO: 643697 - DNA, 89 bp, Artificial Sequence
  ENSG00000182141_12 (sequence is synthesized)
gaaaccctacaaatgtgaagaatgtggtaaagcctttagtatattctcaatccttactaaacataaagtaattcatactgaagaccttt

SEQ ID NO: 643698 - DNA, 120 bp, Artificial Sequence
  ENSG00000182141_13 (sequence is synthesized)
aaaacttttaactactcctcaaattttactaatcataaaaaaattcatactggagagaaaccctataagtgtgaagaatgtggcaaaagctttattctgtcctctcatcttactacacat

SEQ ID NO: 643699 - DNA, 120 bp, Artificial Sequence
  ENSG00000182141_14 (sequence is synthesized)
aatgtggcaaagcctttaaccagtccccaaaccttactaaacataagagaattcataccaaagagaaaccctacaaatgtaaataatgtgtcaaatcctttagtgtattttcaactttta

SEQ ID NO: 643700 - DNA, 120 bp, Artificial Sequence
  ENSG00000182141_15 (sequence is synthesized)
ttcatactggagagaaatcctacaaatgtgataaatgtggcaaagcctttaactggctcttaatccttatgaaacaaaagataattcatactagagagaaaccctacaaatgtaaagaat

SEQ ID NO: 643701 - DNA, 120 bp, Artificial Sequence
  ENSG00000182141_16 (sequence is synthesized)
taaatcttactaaacataaaaaaacttaaactggagagaaactacaaagctggaagacatcacagtaattctgacaacacctcaaacttttctaaacataaaataaatcatactggtgag

SEQ ID NO: 643702 - DNA, 120 bp, Artificial Sequence
  ENSG00000182141_17 (sequence is synthesized)
gaactttaaaaatgcgaaaaatgtgacaaaatctttaaatgattgtcacacttgattgtaggtaagataattcttactagaaaaactcttacaagtgtgaagaatgtggcaaaattttta

SEQ ID NO: 643703 - DNA, 120 bp, Artificial Sequence
  ENSG00000182141_18 (sequence is synthesized)
atgaatactcacaccttattgccaggaaagcatttatacttgagaaaaattgtaccaatataaagactgtgaaaaagccattaatgtctgctcacatcttactcaacatcagagagtact

SEQ ID NO: 643704 - DNA, 120 bp, Artificial Sequence
  ENSG00000182141_19 (sequence is synthesized)
taattactgtcaaaaagtatttcagaaaatataagcttttaaagtatttattttgaagacaaacattacaaataaaagaggattgtaatacctttatttgtatcacagatcttattgtac

SEQ ID NO: 643705 - DNA, 120 bp, Artificial Sequence
  ENSG00000182141_20 (sequence is synthesized)
tatcacagatcttattgtacacattttgtactagagaaaaccctgaagcagttacttaaactttgttcaacatcagggaattcagattggagaaaaaccctgcaaatgtaataaatttga

SEQ ID NO: 643706 - DNA, 120 bp, Artificial Sequence
  ENSG00000182141_21 (sequence is synthesized)
aaaaaaagttttccaaaactacaacttagacaacaccagagggttcatactgagatatatttttgcagatgcagtatatatttaaaacatttaatccaaaataagtctatgtaaatatca

SEQ ID NO: 643707 - DNA, 74 bp, Artificial Sequence
  ENSG00000182141_22 (sequence is synthesized)
atacaaaaattagctgggcgtggcggcacgtgcctgtagtctcagctacttgggacgctgaggcaggaaaatcc

SEQ ID NO: 643708 - DNA, 79 bp, Artificial Sequence
  ENSG00000182141_23 (sequence is synthesized)
agtaaggtatggatgcttcagacattacactatatcaaagtgctgactgttaaaaatgatcccaaactaacggtagata

SEQ ID NO: 643709 - DNA, 120 bp, Artificial Sequence
  ENSG00000182141_24 (sequence is synthesized)
gtgctgactgttaaaaatgatcccaaactaacggtagataaatttatttgtacataactttaaaaggagtagaagattttttggaagtttgtaattacattcaaagtatactttttttgt

SEQ ID NO: 643710 - DNA, 68 bp, Artificial Sequence
  ENSG00000182141_25 (sequence is synthesized)
ttggaagtttgtaattacattcaaagtatactttttttgtttgtttgttttccttgagacagagtctc

SEQ ID NO: 643711 - DNA, 80 bp, Artificial Sequence
  ENSG00000182141_26 (sequence is synthesized)
ctgatcagggtagtcttgaactcctgacctcatgctctgcccagcttggcttcccaaagtgctgtgattacaggcttaag

SEQ ID NO: 643712 - DNA, 120 bp, Artificial Sequence
  ENSG00000182141_27 (sequence is synthesized)
ccagcttggcttcccaaagtgctgtgattacaggcttaagccacagcgcccggcccaaagtgttcttttttccttgaaaagaagtacagattttttaaaaagctaatattgctgtgattc

SEQ ID NO: 643713 - DNA, 120 bp, Artificial Sequence
  ENSG00000182141_28 (sequence is synthesized)
aactctctagttacttgatgctatttcttcatttctattgtattcacatgtgaaagcatgtgatcagttgtcacggcatcaaagataggagagtttctttttttttaggtgggcattatt

SEQ ID NO: 643714 - DNA, 120 bp, Artificial Sequence
  ENSG00000182141_29 (sequence is synthesized)
tatgaccttttctttggaagagtaaggacattaaaatgtaacatgcatgatgaaaatctaagtggagatggtatttgtggttaattatgatattgagtggtgcatgaggtaggtgtttag

SEQ ID NO: 643715 - DNA, 120 bp, Artificial Sequence
  ENSG00000182141_30 (sequence is synthesized)
tgaggtaggtgtttagagtaatattcttttgcattatagtaagaacatttaagttttgttaaaattaaaaaattagtacgttattttactatttgtacttttatgtaataaaatgcagta

SEQ ID NO: 643716 - DNA, 120 bp, Artificial Sequence
  ENSG00000182141_31 (sequence is synthesized)
tacggagtgatgtgtcttcagccacccttcagttttttcctggtcctgggtttcagtactgtctggagtaaaccaagatacacatcatgactttttctgctagagtgtctagtgaatatc

SEQ ID NO: 643717 - DNA, 120 bp, Artificial Sequence
  ENSG00000182149_0 (sequence is synthesized)
attttggatggtgaaccctgaagtcggtgtctgctgcgttcacggcaggattcggttaggaggaacagcacagcatgctgggctctggatttaaagctgagcgcttaagagtgaatttga

SEQ ID NO: 643718 - DNA, 120 bp, Artificial Sequence
  ENSG00000182149_1 (sequence is synthesized)
gattagtcataaatcgccttaaactattggagaaaaagaaaacggaactggcccagaaagcaaggaaggagattgctgactatctggctgctgggaaagatgaacgagctcggatccgtg

SEQ ID NO: 643719 - DNA, 120 bp, Artificial Sequence
  ENSG00000182149_2 (sequence is synthesized)
tggagcacattatccgggaagactacctcgtggaggccatggagatcctggagctgtactgtgacctgctgctggctcggtttggccttatccagtctatgaaggaactagattctggtc

SEQ ID NO: 643720 - DNA, 120 bp, Artificial Sequence
  ENSG00000182149_3 (sequence is synthesized)
tggctgaatctgtgtctacattgatctgggctgctcctcgactccagtcagaagtggctgagttgaaaatagttgctgatcagctctgtgccaagtatagcaaggaatatggcaagctat

SEQ ID NO: 643721 - DNA, 120 bp, Artificial Sequence
  ENSG00000182149_4 (sequence is synthesized)
gtaggaccaaccagattggaactgtgaatgacaggctaatgcacaagctgagtgtggaagccccacccaaaatcctggtggagagatacctgattgaaattgcaaagaattacaacgtac

SEQ ID NO: 643722 - DNA, 120 bp, Artificial Sequence
  ENSG00000182149_5 (sequence is synthesized)
cctatgaacctgactctgtggtcatggcagaagctcctcctggggtagagacagatcttattgatgttggattcacagatgatgtgaagaaaggaggccctggaagaggagggagtggtg

SEQ ID NO: 643723 - DNA, 120 bp, Artificial Sequence
  ENSG00000182149_6 (sequence is synthesized)
gcttcacagcaccagttggtggacctgatggaacggtgccaatgcccatgcccatgcccatgcctatgccatctgcaaatacgcctttctcatatccactgccaaagggaccatcagatt

SEQ ID NO: 643724 - DNA, 120 bp, Artificial Sequence
  ENSG00000182149_7 (sequence is synthesized)
tcaatggactgccaatggggacttatcaggcctttcccaatattcatccacctcagataccagcaactcccccatcgtatgaatctgtagatgacattaatgctgataagaatatctctt

SEQ ID NO: 643725 - DNA, 120 bp, Artificial Sequence
  ENSG00000182149_8 (sequence is synthesized)
ctgcacagattgttggtcctggacccaagccagaagcctctgcaaagcttccttccagacctgcagataactatgacaactttgtcctaccagagttgccatctgtgccagacacactac

SEQ ID NO: 643726 - DNA, 120 bp, Artificial Sequence
  ENSG00000182149_9 (sequence is synthesized)
caactgcatctgctggtgccagcacctcagcatctgaagacattgactttgatgatctttcccggaggtttgaagagctgaaaaagaaaacataggtctcttaaaccaggcaactttcac

SEQ ID NO: 643727 - DNA, 120 bp, Artificial Sequence
  ENSG00000182149_10 (sequence is synthesized)
gttttgggagttgagactgagcaatttctccttgtaacaaagaatctccatgaaattctgtttcatctgttaaccgtcactcagcacaacactccctctgggctctcttcctgctcctcc

SEQ ID NO: 643728 - DNA, 120 bp, Artificial Sequence
  ENSG00000182149_11 (sequence is synthesized)
agattctgctgctttccagttctctgttgatcctgagactaacaattggagactgaggccagagcaactggctcctggcagctgtgcttgtccgtttcctgtcagagtgatcccaggttt

SEQ ID NO: 643729 - DNA, 120 bp, Artificial Sequence
  ENSG00000182149_12 (sequence is synthesized)
cctcctggcccgtcccatggtccctccacaggagtgtgagaggatgggggaagcactgtgggaagaccaccaaagatggctggacagtgggagagagcacgttgtgaagcatcccagcct

SEQ ID NO: 643730 - DNA, 120 bp, Artificial Sequence
  ENSG00000182149_13 (sequence is synthesized)
cgtgttgaggttccagacttagaaacagacccctctgtacagggggattgtggtgagtgagaatcaaggccaccttgtgtgttttctcactctcgaatgcaagtgggagagggaaaatga

SEQ ID NO: 643731 - DNA, 120 bp, Artificial Sequence
  ENSG00000182149_14 (sequence is synthesized)
ctcgggacgccattgtaacggttcctggaagctgggccctctcattggcatatacagtactcctcgctgcagggcactgtcccaccgggatccagttgcaaagtttgtcttgacagttga

SEQ ID NO: 643732 - DNA, 120 bp, Artificial Sequence
  ENSG00000182149_15 (sequence is synthesized)
aggcctcgcttagttgtactggattctcagggagccctctgtggccttttgctttgcgtgctgtttcccttgtaccagagggcggcaccgtggaaattctgttttccctgtagcatattg

SEQ ID NO: 643733 - DNA, 120 bp, Artificial Sequence
  ENSG00000182149_16 (sequence is synthesized)
tgttggattgcattactggcagagaaaggacaaggtgccattcaagtcctagggtgggcttccagctgccttaatagaagtactcaagtcttttgggtagtgagctggaaagcctacagg

SEQ ID NO: 643734 - DNA, 120 bp, Artificial Sequence
  ENSG00000182149_17 (sequence is synthesized)
aaaagaggggtacctgttttcatttgaaaactttgattcatggaacctttaaaactaatctcagaaaaatttttggtgcccatgcagctgtagttgttcactgctttcctggatggatgg

SEQ ID NO: 643735 - DNA, 120 bp, Artificial Sequence
  ENSG00000182149_18 (sequence is synthesized)
gactcttatgtcataacttctgttactcctttggcccatagctaaggtcatccttccccacaggggtggctttgggattggatgatacagcttttgcttctgtgtagtatacctgtacat

SEQ ID NO: 643736 - DNA, 120 bp, Artificial Sequence
  ENSG00000182149_19 (sequence is synthesized)
cttgtttcaggcagcctttctttaatgttttcagttggtttgtattctgtagctcagtagctgctaataaagttaaagatcctgtgtcctgctttctctactgtttggtcagatgatgaa

SEQ ID NO: 643737 - DNA, 120 bp, Artificial Sequence
  ENSG00000182149_20 (sequence is synthesized)
gtataaatctggattttagtggagaatattttaaccaagtgatccatgtaaaccagcccttagtttcaggattcctggagcagtacagagctcattttgatctctgtatttagatagccc

SEQ ID NO: 643738 - DNA, 120 bp, Artificial Sequence
  ENSG00000182149_21 (sequence is synthesized)
agatagcatctgtgaatttccttggtcttcctcagtggcagggctccgcatctgccatgcctcatccttggatgtttatttttagtaagttgcagtgagctcacttctgactgcttcatt

SEQ ID NO: 643739 - DNA, 120 bp, Artificial Sequence
  ENSG00000182149_22 (sequence is synthesized)
tcccgcagccatcctgggccatgggtggtgagttctgttacttgctgcttggcagcagagctagtttgtctcgtagtattcttgcattgttaatcctatcttgacagtgccaagatccat

SEQ ID NO: 643740 - DNA, 120 bp, Artificial Sequence
  ENSG00000182149_23 (sequence is synthesized)
aagaacttgggaccaaggggattttgattcctaacttacagaattaaaaacaaagtatattataattttaaagctatgccatgcaaagataagtagtaatacgctaataaatactaagcc

SEQ ID NO: 643741 - DNA, 120 bp, Artificial Sequence
  ENSG00000182149_24 (sequence is synthesized)
aagtaggagataacaggattaaggtagttcatctaaaacttcagtgtcactgcccactgctgtcgtggctgcttgctcagatgaggttttttggggccaactgattcctaacaaatttga

SEQ ID NO: 643742 - DNA, 120 bp, Artificial Sequence
  ENSG00000182149_25 (sequence is synthesized)
gagcttctgtagcagtgtatctattagtgcagcttctttctgagtattgaagacaaaaagagaaaagtgagaaaattgaaattactgctaatagtggagtaaaaaaagtaccaaagattt

SEQ ID NO: 643743 - DNA, 120 bp, Artificial Sequence
  ENSG00000182149_26 (sequence is synthesized)
ttaaaaaattagtaaatgtaaagatactatttctttaataatttgcagtcaggcattggagtgtttccactaatggttgcgagccaactatttataggacaatggctatagaatattatg

SEQ ID NO: 643744 - DNA, 120 bp, Artificial Sequence
  ENSG00000182149_27 (sequence is synthesized)
tagtcttataaattgggtttcctaggaagatagctggcagagcttttgaaactaataaagggaatatgatactgtgcattataaattatgtcagcccgtcatcttaggggcagttacagt

SEQ ID NO: 643745 - DNA, 120 bp, Artificial Sequence
  ENSG00000182149_28 (sequence is synthesized)
ggagctttcccagtgatataacagcatgctagtttatcttttagttacctaccttaagcgactttctttcttttccaaaggccatgagaatggccgaaacgaaaagattaattaccacaa

SEQ ID NO: 643746 - DNA, 120 bp, Artificial Sequence
  ENSG00000182149_29 (sequence is synthesized)
gtaccatcaagatgacactggtgaggatcagaaaggtgcccaggactgggtctaaagcgaaaacctgggaaaacaataagaacacttgcagtgactgacaatttagtttatactttacaa

SEQ ID NO: 643747 - DNA, 120 bp, Artificial Sequence
  ENSG00000182149_30 (sequence is synthesized)
acataagctatatgctagtgtttgggatcttatcagaagaaaagcttatccgaaggaaacttagggagagagtcaaaagataataagaaggaaaatacttttaaatggacagaagagcag

SEQ ID NO: 643748 - DNA, 120 bp, Artificial Sequence
  ENSG00000182149_31 (sequence is synthesized)
gaatgactcattttaaggaggttaagataattgtgactgcagggctttcacaagaaaacaggtgagttgcagtggaattggaaatgattcaaatgtcacatgagttttggcaaaaaatac

SEQ ID NO: 643749 - DNA, 120 bp, Artificial Sequence
  ENSG00000182149_32 (sequence is synthesized)
atctaatcatggaagctaaaagtgggaggggggtaagcaaacactgaaagattaaatgcataccagaaatgagaatgcacactgtctctgccatatcaagaaactacaaccctaaacaca

SEQ ID NO: 643750 - DNA, 120 bp, Artificial Sequence
  ENSG00000182149_33 (sequence is synthesized)
ggagcattccaataaaagttaacaggttggccacagaaaactggctttttagtatttttttttttccattgtcatttttaaaggtacaagcattgagttctgccattctttacttttctg

SEQ ID NO: 643751 - DNA, 120 bp, Artificial Sequence
  ENSG00000182149_34 (sequence is synthesized)
catacataaatatcaagttctgggcttattggaatggttcccataacaaaaactgttgtttaaaatttagatgttctttttcaacaaatggtatttattttcccttggtattggcccatt

SEQ ID NO: 643752 - DNA, 120 bp, Artificial Sequence
  ENSG00000182149_35 (sequence is synthesized)
cattgttgccactagggcactgtttaaaaatatcccaacagaggggttgattacagtcaatgccaccctgatggaaatctatatggcaaaatattttcaagcaccaaactgttttaccta

SEQ ID NO: 643753 - DNA, 120 bp, Artificial Sequence
  ENSG00000182149_36 (sequence is synthesized)
cttaaaaatgattattataacaatttcaggtcaaccagataatgtgggcaatctctgagtttgtgatacaagacttatttccaataagtttatttttatgtacaattttactgtttattt

SEQ ID NO: 643754 - DNA, 120 bp, Artificial Sequence
  ENSG00000182149_37 (sequence is synthesized)
tttgtttgctctatttgttttttaatgttttttactttatgtttactgtatttttatgtacaattacatccaaagcagaaaagttccttttttatccccaaaaggaggtgtcagcaaaaa

SEQ ID NO: 643755 - DNA, 120 bp, Artificial Sequence
  ENSG00000182149_38 (sequence is synthesized)
acaggcatgtgccaccgcgcctggcatggaacctggttttatcttgaaatgttgcaaacgtttataaagatacagtatttctaaattcacatcaacatcttatgataagggctagctcct

SEQ ID NO: 643756 - DNA, 120 bp, Artificial Sequence
  ENSG00000182149_39 (sequence is synthesized)
acttgtcatatgactgccccggtacaagcattagatgcagcctccacagcagggagcagatgacttccttctggaggcccctttttcttttttccctttttttttttgagacgtttcgct

SEQ ID NO: 643757 - DNA, 87 bp, Artificial Sequence
  ENSG00000182149_40 (sequence is synthesized)
ttcttttttccctttttttttttgagaccgccggatctcggctcactgtaactcgagaatcaagcgattctcctgcctcagcctccg

SEQ ID NO: 643758 - DNA, 120 bp, Artificial Sequence
  ENSG00000182149_41 (sequence is synthesized)
aatttcctctttagtagagacggggttcctctgtgttggccaggctggtctcgaattaccgacttcagcgatgcggtttcactatggtgtccaggctggtctgcaactcccgggctcaag

SEQ ID NO: 643759 - DNA, 120 bp, Artificial Sequence
  ENSG00000182149_42 (sequence is synthesized)
cgatcctcccgccccgcctctcaaagtgctgggaaggtcccttccaggcttaagcagcgataatggttttcaagttaaaaacaaaggaggaacagcacagcatgctgggctctggattta

SEQ ID NO: 643760 - DNA, 90 bp, Artificial Sequence
  ENSG00000182149_43 (sequence is synthesized)
accctcccaaaatgctgggattacagagatactgtttcgaataattggcttgttggggtacaattcacagttgatatattacaggatcta

SEQ ID NO: 643761 - DNA, 120 bp, Artificial Sequence
  ENSG00000182149_44 (sequence is synthesized)
gtgtggatgtaagctttagaaaatgttatagataacaagttggctctgtgaacacactcaggaatcataggttgtcaggagccattagcagtaagaacatttggtattagctggcagtca

SEQ ID NO: 643762 - DNA, 120 bp, Artificial Sequence
  ENSG00000182149_45 (sequence is synthesized)
tcttgtggggaaaaaacacattggattcagagaaggtcttctagttcagctgtaggaaaatctatagagttggtgctagaaaaacacttttcatataggtttactgaatatctttgggat

SEQ ID NO: 643763 - DNA, 120 bp, Artificial Sequence
  ENSG00000182149_46 (sequence is synthesized)
tggcgaaaccctgtctctacccaaaatacaaaaattggccaggcatagtgctgcatgcctgtggtcccagctatgcaggaggctgaggcggggcaatggctggaggccaggaagtggagg

SEQ ID NO: 643764 - DNA, 120 bp, Artificial Sequence
  ENSG00000182149_47 (sequence is synthesized)
ctgtggtgagccgtgattgtatcactgcactccagcctgggtgacaggagaccctgtctcaaaatcaaaggagttcaacatagtatctacctgattggaaaaaatgcaggggcagtttct

SEQ ID NO: 643765 - DNA, 120 bp, Artificial Sequence
  ENSG00000182149_48 (sequence is synthesized)
aacttttggaaacacaggggcttacaccagtactttctccagtgacactattgctgtctcctctggtaacaatctttgtgtttcaggtagatgacattaatgctgataagaatatctctt

SEQ ID NO: 643766 - DNA, 120 bp, Artificial Sequence
  ENSG00000182149_49 (sequence is synthesized)
ttcctctcttctagaatgcctgagcctgccctggcatcgcttacctggagaagcagggaatgcagaggaaagaagatgagatctggtattagaagatctggctttgagccccagctctgc

SEQ ID NO: 643767 - DNA, 120 bp, Artificial Sequence
  ENSG00000182149_50 (sequence is synthesized)
ccgcccgcgcttgttgtgctgaggccgagggagtcgccattttggatggtgaaccctgaagtcggtgtctgctgcgttcacggcaggattcggttagctaatgcacaagctgagtgtgga

SEQ ID NO: 643768 - DNA, 120 bp, Artificial Sequence
  ENSG00000182149_51 (sequence is synthesized)
cattctttgcactaacttaaatttgtgtgagtttaagcctttgtccagttagtacctttatgacaataaatgtgcctgcatatctcacagggtacttaaggaattagatgaatgacaaca

SEQ ID NO: 643769 - DNA, 120 bp, Artificial Sequence
  ENSG00000182149_52 (sequence is synthesized)
ctttgagaaggtcaaaaccttgatacaaatgtaaaatggcactattattgctactttttggtgaacttcaggaattgagaaacctcctgttcatagcaagaaatgccccaagacccaaac

SEQ ID NO: 643770 - DNA, 120 bp, Artificial Sequence
  ENSG00000182149_53 (sequence is synthesized)
ccagcaactcccccatcgtatgaatctctgatgtgttctaccttgggcctgagtttttcttatgctttggttttgcatgcgtcacataacccacagccgttggtaggaatgaggtcgaaa

SEQ ID NO: 643771 - DNA, 120 bp, Artificial Sequence
  ENSG00000182149_54 (sequence is synthesized)
atcttcatcagtatttgaggacttggttcttaagatatattcaagaatgctttccctttgcccaaaggtgaaagtatcattaaagttgtcttagtatggtagatgacattaatgctgata

SEQ ID NO: 643772 - DNA, 120 bp, Artificial Sequence
  ENSG00000182149_55 (sequence is synthesized)
gaggaacagcacagcatgctgggctctggatttaaagctgagcgcttaagagtgaatttgagattagtcataaatcgccttaaactattggagaaaaagaaaagcagaagctcctcctgg

SEQ ID NO: 643773 - DNA, 120 bp, Artificial Sequence
  ENSG00000182149_56 (sequence is synthesized)
cgcccgcgcttgttgtgctgaggccgagggagtcgccattttggatggtgaaccctgaagtcggtgtctgctgcgttcacggcaggattcggttagtcattgtgcttcttctgtttctag

SEQ ID NO: 643774 - DNA, 120 bp, Artificial Sequence
  ENSG00000182149_57 (sequence is synthesized)
ggggggcgctgggtgtggggcggctccggggccggggatggcggcggccgcggttgcggcggctccgggacgagtgagtggatcctgggaagcgctgtgaaatgggctggctcccgagcc

SEQ ID NO: 643775 - DNA, 120 bp, Artificial Sequence
  ENSG00000182149_58 (sequence is synthesized)
tgagcctcttttataagcaacaggagagtgaatgccatgaagagcgagcaaaataatgaccacagggaaggcagagttttgatcaactcctagtactgtcatcatttttgctttgggatt

SEQ ID NO: 643776 - DNA, 120 bp, Artificial Sequence
  ENSG00000182149_59 (sequence is synthesized)
tgtggaaggcagcagtatcatcttttgccagcatctgggtcatgtgtaatgagaatgtgaaagagagacttgggtcctctgatgtgtcttgtgactctgaaaaaaatcatttaactgctc

SEQ ID NO: 643777 - DNA, 120 bp, Artificial Sequence
  ENSG00000182149_60 (sequence is synthesized)
tgaacctttttttccctcaatattacctgtaaaatgagaggagctaacttcgcatagtgaggtgaggattaggctggttggtatacatgcatcttagccctgggtctttttacttacagc

SEQ ID NO: 643778 - DNA, 120 bp, Artificial Sequence
  ENSG00000182149_61 (sequence is synthesized)
aaagtgctggaattacagagacgaggtcttactgtgttactcaggctggtcccttggcctcaaacgatccttctacctcagcctctcaagtagctgaggttataggaggaacagcacagc

SEQ ID NO: 643779 - DNA, 81 bp, Artificial Sequence
  ENSG00000182149_62 (sequence is synthesized)
aagtcggtgtctgctgcgttcacggcaggattcggttagagaatggggtcttgctacattgtccccttggcctcccaaagt

SEQ ID NO: 643780 - DNA, 120 bp, Artificial Sequence
  ENSG00000182150_0 (sequence is synthesized)
aagatttgggggtcgccttgccggcctcctgtcctcctccggcggcggcggagcccgagagaactaggtgaacaccgctttgccagcctcacacagcgtcccctggctctgccgccgctc

SEQ ID NO: 643781 - DNA, 120 bp, Artificial Sequence
  ENSG00000182150_1 (sequence is synthesized)
cggacgtcgccctcccgttctgcttgggtccccttagtcgctacctttgctgggatccccctcctccatcctgtggcttcgggttgccgaagagcgatgctcggagggcggccggaagtg

SEQ ID NO: 643782 - DNA, 120 bp, Artificial Sequence
  ENSG00000182150_2 (sequence is synthesized)
gcgttggccgccattggcctgccggccagccaccttgctgtcctccgccgccttccgggtgttacatgcagccgggctcggcccctccccctggccggatggatccgtcggcgccacagc

SEQ ID NO: 643783 - DNA, 120 bp, Artificial Sequence
  ENSG00000182150_3 (sequence is synthesized)
cccgcgcggaaacctcaggcaaagacatatggcatccaggagaaagatgtcttgccccttctccagataatggaaaactttgtgaagcaagcataaaatctatcacagtggatgaaaatg

SEQ ID NO: 643784 - DNA, 120 bp, Artificial Sequence
  ENSG00000182150_4 (sequence is synthesized)
gcaagtcatttgcagtcgtcttatatgcagattttcaagaaaggaaaatacctcttaaacagcttcaagaagtgaaatttgttaaagattgccctaggaatcttatatttgatgatgaag

SEQ ID NO: 643785 - DNA, 120 bp, Artificial Sequence
  ENSG00000182150_5 (sequence is synthesized)
atttagaaaaaccttatttcccaaaccgaaaatttccatcatcttctgttgcttttaaattatctgacaatggagactctattccttataccatcaataggtatttgagagactaccaaa

SEQ ID NO: 643786 - DNA, 120 bp, Artificial Sequence
  ENSG00000182150_6 (sequence is synthesized)
gagaaggaacccggtttctttatggacactacatccatggaggagggtgcattctgggtgatgacatgggacttggaaaaacagtacaggttatttcatttctggctgcagttttgcata

SEQ ID NO: 643787 - DNA, 120 bp, Artificial Sequence
  ENSG00000182150_7 (sequence is synthesized)
aaaagggaactcgtgaggatattgaaaataacatgccagagtttttactaagaagtatgaaaaaggaacccctttcttctacagcaaaaaagatgttcttaatagttgctcctctttctg

SEQ ID NO: 643788 - DNA, 120 bp, Artificial Sequence
  ENSG00000182150_8 (sequence is synthesized)
tcctctacaactggaaggatgaattggacacctggggatatttcagagtcactgttttacatggaaacagaaaagataatgaattaattcgtgtaaagcagaggaaatgtgaaattgctc

SEQ ID NO: 643789 - DNA, 120 bp, Artificial Sequence
  ENSG00000182150_9 (sequence is synthesized)
taacaacttatgaaacactacgcttatgcctggatgaacttaacagtttggaatggtcagctgtcattgtggatgaagctcatagaatcaagaatccaaaagctagagtaacagaagtta

SEQ ID NO: 643790 - DNA, 120 bp, Artificial Sequence
  ENSG00000182150_10 (sequence is synthesized)
tgaaagctttgaaatgtaatgtccgcattggcctcactggaaccatccttcagaacaacatgaaggaactgtggtgtgttatggactgggctgtgccaggccttttagggagtgggacct

SEQ ID NO: 643791 - DNA, 120 bp, Artificial Sequence
  ENSG00000182150_11 (sequence is synthesized)
acttcaagaagcagttttctgacccagtagaacatggtcagagacacacggcaacaaagagagaactagccactggccgaaaggccatgcaaagacttgccaaaaagatgtctggctggt

SEQ ID NO: 643792 - DNA, 120 bp, Artificial Sequence
  ENSG00000182150_12 (sequence is synthesized)
ttctcaggcgcaccaagactcttatcaaggatcagttgcctaagaaggaagaccggatggtgtattgttctttgacagatttccagaaagctgtctatcaaacagtgttagaaacagagg

SEQ ID NO: 643793 - DNA, 120 bp, Artificial Sequence
  ENSG00000182150_13 (sequence is synthesized)
acgtgactttgatacttcaatcttctgagccttgtacctgtaggagtggccaaaaaaggagaaattgttgttataagaccaattctcatggtgaaacagtgaaaaccttgtatctcagtt

SEQ ID NO: 643794 - DNA, 120 bp, Artificial Sequence
  ENSG00000182150_14 (sequence is synthesized)
accttacagtccttcagaaggtagctaaccatgtcgcgctactgcaagctgctagtacttccaaacaacaggaaacacttatcaaaaggatatgtgatcaggtattttccagattcccag

SEQ ID NO: 643795 - DNA, 120 bp, Artificial Sequence
  ENSG00000182150_15 (sequence is synthesized)
attttgtgcagaaaagcaaagatgcagcctttgaaacactttctgaccctaaatacagtggaaaaatgaaggtccttcagcagcttttaaatcattgcaggaaaaacagagataaagttc

SEQ ID NO: 643796 - DNA, 120 bp, Artificial Sequence
  ENSG00000182150_16 (sequence is synthesized)
ttctcttttctttttccaccaagttgcttgacgtgctacagcagtactgtatggcgtctgggcttgattaccgacgacttgatggaagtacaaaatcagaggaaagactcaagattgtaa

SEQ ID NO: 643797 - DNA, 120 bp, Artificial Sequence
  ENSG00000182150_17 (sequence is synthesized)
aagagttcaacagtacacaagatgttaacatttgccttgtctctacaatggctggtggactaggcctcaattttgtcggtgccaatgttgttgtattatttgatcctacttggaatccag

SEQ ID NO: 643798 - DNA, 120 bp, Artificial Sequence
  ENSG00000182150_18 (sequence is synthesized)
ccaatgatcttcaagccattgacagagcatataggattggacaatgtagagatgtcaaagtgcttaggctgatatccttgggaactgtggaggaaatcatgtatttacgacagatataca

SEQ ID NO: 643799 - DNA, 120 bp, Artificial Sequence
  ENSG00000182150_19 (sequence is synthesized)
gcaacttcactgtgtggtggttggaagtgaaaatgccaaacgatattttgaagcagttcaaggatctaaagagcatcaaggagagctttttgggatccataacctcttcaaatttaggtc

SEQ ID NO: 643800 - DNA, 120 bp, Artificial Sequence
  ENSG00000182150_20 (sequence is synthesized)
ccaagggtcttgtcttacgaaggacatcctggaggtgtgaacttcttctctgaccttttcaataatattttaaatacagtttttcttcctcaggaaatctgaaatacaattgctgttgcc

SEQ ID NO: 643801 - DNA, 120 bp, Artificial Sequence
  ENSG00000182150_21 (sequence is synthesized)
ttttcagagaaacttttggttttctttatcaaaaatgccttggaatttttacttttagagaataagaaatgaattattgtacctctaaactaagattttcccatgcataattacaaataa

SEQ ID NO: 643802 - DNA, 120 bp, Artificial Sequence
  ENSG00000182150_22 (sequence is synthesized)
tgcacacacacaaatgtatatgctgggtagtatgaactccaaggcaattttaaataggcagagagaagtttatagttttgaaaacagctgctgaagtcaggaactaaaaaaagaggtttt

SEQ ID NO: 643803 - DNA, 120 bp, Artificial Sequence
  ENSG00000182150_23 (sequence is synthesized)
cctaaataaacaaaaatataaaatgtgttttaattaaaagttaccaaatactccctgagatgtactctcatgtctcatggagatttttgttttctgttcccaataaaaattccacaccag

SEQ ID NO: 643804 - DNA, 120 bp, Artificial Sequence
  ENSG00000182150_24 (sequence is synthesized)
tattttaaactctccctgttgtgttcatcctcagcatacagatgtttcttattcctcaaacaaaatattttatatccttttttaaaaaaatctttaagttcttttatataccggaatact

SEQ ID NO: 643805 - DNA, 120 bp, Artificial Sequence
  ENSG00000182150_25 (sequence is synthesized)
aaggatattaacctattttctaattgatattcatataggtatcataaaatcctggagtatcatctttttcaacctcctcatggtatagatgaggaaactgagtcttagagaacttcagga

SEQ ID NO: 643806 - DNA, 120 bp, Artificial Sequence
  ENSG00000182150_26 (sequence is synthesized)
tatttctcttgacttccaggactttgtagtaaaatcttaatgtacttcatttattcagtaagtaccataaaggcagttcaaggagcaattggttcctgtccttgaggaacttaaaccatc

SEQ ID NO: 643807 - DNA, 120 bp, Artificial Sequence
  ENSG00000182150_27 (sequence is synthesized)
ttgaccggaggtggaagagaacgtttacataataaccatgcaatgtcaggaatcgtatgctgaacaagttaaacagtagaccatggatggctgggggagaggaaggtatatattatttga

SEQ ID NO: 643808 - DNA, 120 bp, Artificial Sequence
  ENSG00000182150_28 (sequence is synthesized)
atcctataaatgttgttactattatacagtttctgatatatactgctgagtttctattttatagtaactatatttgattctgaattcagtggcccatttggagtcctactttttggggtt

SEQ ID NO: 643809 - DNA, 120 bp, Artificial Sequence
  ENSG00000182150_29 (sequence is synthesized)
ttttccccttgctttttaaatacgctgtttctttcatgaatttgttctttccagtttcccttttcatatcaataactttgtttgccctccagctcccaaacccagctgctacctccatct

SEQ ID NO: 643810 - DNA, 120 bp, Artificial Sequence
  ENSG00000182150_30 (sequence is synthesized)
cagagtactacttgacatgcctatattgatgttaaagtcaattgtctataaaaatattagcattttattatttatcctgttttctgtcatatatgacatagttacctgtttttatcagaa

SEQ ID NO: 643811 - DNA, 120 bp, Artificial Sequence
  ENSG00000182150_31 (sequence is synthesized)
tatcagaataaccacctatttctttgttaaacaagtgttatataagacatatcaggatgacaggttattaagtagaaaaagttcccttgtttatcgtgccactgcactccagcctgggga

SEQ ID NO: 643812 - DNA, 120 bp, Artificial Sequence
  ENSG00000182150_32 (sequence is synthesized)
agagacttgtctcaaaaacaaaaaacaaaaacaaaaaaaagttctcttgttcactggttattctaagaatatcttgtttcaccttcagaagtgtttattaatgacaggaccatccatgtc

SEQ ID NO: 643813 - DNA, 120 bp, Artificial Sequence
  ENSG00000182150_33 (sequence is synthesized)
ttacattttcttttttaaaaatatcttttaagttctttaatataccagaacactaagaatattaacctattttctaattgatattaataaggggtgacaaggccatccatgccctacatt

SEQ ID NO: 643814 - DNA, 120 bp, Artificial Sequence
  ENSG00000182150_34 (sequence is synthesized)
tgtcttgctaggcatatcattggcacttgattattaagttaaattttgaattaaaattactcatttgtcatcaatcagaatgtaaatttattcaggattggttagattcatgctgctttg

SEQ ID NO: 643815 - DNA, 120 bp, Artificial Sequence
  ENSG00000182150_35 (sequence is synthesized)
ggccaaaaggtgcttctaaatattattattagccccatataatgggagtacctatcataaagtaaaaggagtatttcacttcatgtgagacatttttaatttttaaaggttgtataaaat

SEQ ID NO: 643816 - DNA, 120 bp, Artificial Sequence
  ENSG00000182150_36 (sequence is synthesized)
ctcttttaaaatgttttaagatgtaaaaatttgaatatttacacttataatcttatgatttctgggcaatttcattctgttttgcattgactttccattatctatattatggtttctctt

SEQ ID NO: 643817 - DNA, 120 bp, Artificial Sequence
  ENSG00000182150_37 (sequence is synthesized)
caaagatagatattgagagttcattttacaagtatttgttgagcatctgctaaatgtcaggtactgttcatagagctttgcatacataaaagaacaaaataaacaaaacgatcctgtcta

SEQ ID NO: 643818 - DNA, 120 bp, Artificial Sequence
  ENSG00000182150_38 (sequence is synthesized)
agccacttcagtttctctaaacagagccacagaccaagaactataagagacagaactagtttttcttcaaaattgcctagccataataagaaaaatagcacttttattccaagaaaacca

SEQ ID NO: 643819 - DNA, 120 bp, Artificial Sequence
  ENSG00000182150_39 (sequence is synthesized)
atgaaatgttcaaatgagaaagttgttaatcaagagcagtcgtatgaatcaatggataaatttttagatggcgttcaggaagtggcttatattcactcaaaccagaatgtaattggatcg

SEQ ID NO: 643820 - DNA, 120 bp, Artificial Sequence
  ENSG00000182150_40 (sequence is synthesized)
agcaaagctgaaaatcacatgagccgatgggcagcacatgacgtatttgagttgaagcagttttctcagctgcctgctaacatagctgtttgcagttctaagacatataaagaaaaagtg

SEQ ID NO: 643821 - DNA, 120 bp, Artificial Sequence
  ENSG00000182150_41 (sequence is synthesized)
gatgcagatacattgccacacacaaagaaaggccagcaaccgagtgaaggcagcatttcacttcctctttacatttcaaatcctgtaaaccagaagaagaaaaaagtctaccatacaaac

SEQ ID NO: 643822 - DNA, 120 bp, Artificial Sequence
  ENSG00000182150_42 (sequence is synthesized)
cagaccaccttcataattggagaaacaccaaaaggaatccgcagaaaacaatttgaagaaatggcctcttattttaactcgtcttctgtaaacgaatttgctaaacatataaccaatgcc

SEQ ID NO: 643823 - DNA, 120 bp, Artificial Sequence
  ENSG00000182150_43 (sequence is synthesized)
acatcagaagaacgacagaaaatgctaagagacttttatgcttctcaatatccagaggtaaaagaattttttgtggattctgtgtcacaattcaacaattcttcctttgagaaaggagag

SEQ ID NO: 643824 - DNA, 120 bp, Artificial Sequence
  ENSG00000182150_44 (sequence is synthesized)
cagcgcacccggaagaaatctgataaaagagaatctcttataaaaccaaggctgtcagattctgaaaccttgtcatttaaagattctaccaacaaaatttctcaagtttgcagcctaaaa

SEQ ID NO: 643825 - DNA, 120 bp, Artificial Sequence
  ENSG00000182150_45 (sequence is synthesized)
acatataaaagaaaatcagttaagtttcagaatcatatttcctatagagaagaggtgttttttaatgatgcagaaactaagaaatcacctgttagttctactcaagagattgacagtggg

SEQ ID NO: 643826 - DNA, 120 bp, Artificial Sequence
  ENSG00000182150_46 (sequence is synthesized)
aaaaacagccaggcatccgaagatactgtgacatcccgttctctgaacagtgagtctgaaacacgtgagagaaggttagaaaataccatgaaagaccaacaggacctcacaagaacgggc

SEQ ID NO: 643827 - DNA, 120 bp, Artificial Sequence
  ENSG00000182150_47 (sequence is synthesized)
atttcaagaaaagaaccccttctcaaattggaaaacaaaaagatagaaaatccagtgctggaaaatacttctgtgataagcttacttggtgatacctctattcttgatgacctttttaaa

SEQ ID NO: 643828 - DNA, 120 bp, Artificial Sequence
  ENSG00000182150_48 (sequence is synthesized)
agtcatgggaacagtcccacacaactgccaaagaaagttctttcagggcccatggaaaaagcaaaacagagaccaaaagatttctgggacatcttgaatgagcagaatgatgagagtctt

SEQ ID NO: 643829 - DNA, 120 bp, Artificial Sequence
  ENSG00000182150_49 (sequence is synthesized)
caaatgagaaatttttatggaagaaatttagcccaagtgatacagatgaaaacgcaaccaatacacagagtaccacataagcatataaatgaattactgcaccagtaaactgctgccatc

SEQ ID NO: 643830 - DNA, 120 bp, Artificial Sequence
  ENSG00000182150_50 (sequence is synthesized)
actgtttacggcactggattccacactgattctattatcttgaacacagttgttgacatatatttttattaaattattgctttaggattttttgaagtctaaagtattgtcatggatctg

SEQ ID NO: 643831 - DNA, 120 bp, Artificial Sequence
  ENSG00000182150_51 (sequence is synthesized)
tttttcttgatatttgatttgatctttcaagaatatgattgtatttatagtataaacctctgttatgaattagaaaagattctaggtttgttaataggagacctgggacatctttcttac

SEQ ID NO: 643832 - DNA, 120 bp, Artificial Sequence
  ENSG00000182150_52 (sequence is synthesized)
tatattacataatgatgtgacacttgccccggtgagcattgtttcccagtatgaaagatgaagagtctgtaccgaatcagcatgagtgtccttccagtttaaaaaagctttgcttcgctc

SEQ ID NO: 643833 - DNA, 120 bp, Artificial Sequence
  ENSG00000182150_53 (sequence is synthesized)
tcctaatggctcataggctgaatcatgtctgcccctcaaatcaggtgtataccaatgtgttttttactagcacttgggaaagttattaagtattttctttttccctgggcatcatgttct

SEQ ID NO: 643834 - DNA, 120 bp, Artificial Sequence
  ENSG00000182150_54 (sequence is synthesized)
ttattttagaaaaaagtcataattggtactgaatatatggtatatataatattaaaatggtaattttgcaacagctcaaaattaaaaggttaatgttatacactttactatatgagctgt

SEQ ID NO: 643835 - DNA, 120 bp, Artificial Sequence
  ENSG00000182150_55 (sequence is synthesized)
ctgtgattactaccattagccacagataccagtgcctcaactttttatgtacctattgtgatttaatgtaaataaaggtttgtatagtacttttgtagttcttaagtatgaagaaatggg

SEQ ID NO: 643836 - DNA, 120 bp, Artificial Sequence
  ENSG00000182150_56 (sequence is synthesized)
taaactttttattttgttagaaactgttatattttgagtgtaatatttatggtttatagcaaaatgaatgtgcttattgttgaatgcatgtatttagaagcctttactcagcccctgtgt

SEQ ID NO: 643837 - DNA, 120 bp, Artificial Sequence
  ENSG00000182150_57 (sequence is synthesized)
tctgtgctaggagcttgagctctacaggtaaggcagagctaccggtgaatgaaaggaaatcatgtcagtgaaaaatcatggtggaaagcccctggcatcacatgtgcatgctgtaggcag

SEQ ID NO: 643838 - DNA, 120 bp, Artificial Sequence
  ENSG00000182150_58 (sequence is synthesized)
gacctgagctgcctccgctgcaggttcagatgcaccgctgcagctgtccttcagttagttcacagggctgcaagaggaggacacatccctccagaaaacagcctgagccgggaactggct

SEQ ID NO: 643839 - DNA, 120 bp, Artificial Sequence
  ENSG00000182150_59 (sequence is synthesized)
gtgctaaagagcactgctatcaagttgaggagagagggcttccgtgtactcaggatgtagagtcattgctcagaagtgaacaaaaaatcaaaaacaaaagtcttctcaagggactgatcg

SEQ ID NO: 643840 - DNA, 120 bp, Artificial Sequence
  ENSG00000182150_60 (sequence is synthesized)
gccaagtatgcttttctttagagcaatgttttgccctagagaattgtaaaatttatgtcatgactcagtacatatgtgttcgtacatatatgattggaataaaatgtttatgaaatattt

SEQ ID NO: 643841 - DNA, 120 bp, Artificial Sequence
  ENSG00000182150_61 (sequence is synthesized)
atgcagtaccttacccctggtggtgctgtgtcacaggagcctccatttcctgctggagatgtgagatttgcaggatccaagatgtcctcgagtaaaagtccattgtgaggagggacagag

SEQ ID NO: 643842 - DNA, 120 bp, Artificial Sequence
  ENSG00000182150_62 (sequence is synthesized)
tggttgaaagagggacctccagcacacaaactggaaatgcctagacagcctgactgtcaggaatgcagaggtacagaacaagctgcagagccactggcaaaggaagcatgtgatctctgc

SEQ ID NO: 643843 - DNA, 120 bp, Artificial Sequence
  ENSG00000182150_63 (sequence is synthesized)
agtgacttcagtgatgaagagccagtgggagccacaggaataaagactgccaaaaacaaagcacccgattcaagtaaagcttccagctctccaggacagcttaccttactccagtgtggt

SEQ ID NO: 643844 - DNA, 120 bp, Artificial Sequence
  ENSG00000182150_64 (sequence is synthesized)
ttctcgaaattgcttgaaacaaaatgtaaagcagttgaggatagtgatggaaatactgcctctgatgatgaaagttctgatgagcagcccacatgcctttcaacagaagccaaagatgct

SEQ ID NO: 643845 - DNA, 120 bp, Artificial Sequence
  ENSG00000182150_65 (sequence is synthesized)
ggttgtgagaaaaatcaggactctcttggtacttcaaaacatcagaaattagataacatcctaaatccaaaagaaaagcatattttttataaaagtgagaagattttagaacagaatatt

SEQ ID NO: 643846 - DNA, 120 bp, Artificial Sequence
  ENSG00000182150_66 (sequence is synthesized)
tacagaatgtcacagaatcagaagatagtgatgtcatctgtcctacacaatacacaactgagagattccccgacaatagtataaggtttaagccacccttggaaggatctgaggattctg

SEQ ID NO: 643847 - DNA, 120 bp, Artificial Sequence
  ENSG00000182150_67 (sequence is synthesized)
aaacagaacacactgtaaaaacaagaaataatgataatagtcgaaacactgatgacaaaagaaatggaataatttcaaaaaagttaagtcctgagaacacaaccctgaaatctattttga

SEQ ID NO: 643848 - DNA, 120 bp, Artificial Sequence
  ENSG00000182150_68 (sequence is synthesized)
aaagaaaaggcaccagtgatatcagtgatgaatctgatgacattgaaatttcttccaagtcaagagtaagaaagagagctagttcattgaggtttaagagaataaaagaaaccaaaaaag

SEQ ID NO: 643849 - DNA, 120 bp, Artificial Sequence
  ENSG00000182150_69 (sequence is synthesized)
ccaccttcataattggagaaacaccaaaaggaatccgcaggtcacaaagctccttctcaaacttgttctggaggaagccagcagccatgtcataaggaagctcaagcagccatatggaga

SEQ ID NO: 643850 - DNA, 120 bp, Artificial Sequence
  ENSG00000182150_70 (sequence is synthesized)
gcccacatgggaagggacagaggcctcctgcccacagccgtggagatgaaccaccttggagacagctcccccagccccaacacacgcagatgatcatggtcctggctgacatcttcactg

SEQ ID NO: 643851 - DNA, 120 bp, Artificial Sequence
  ENSG00000182150_71 (sequence is synthesized)
caacctcacgagagacccaagccacaacttcccagctgagcccacagatgtggaagctggtggaggttgtgtgtcatcaagcaagaaaacataccaggaatgaggaagatgtaggacaca

SEQ ID NO: 643852 - DNA, 120 bp, Artificial Sequence
  ENSG00000182150_72 (sequence is synthesized)
ggaacaggatatccatcaaaaacgagaactccagggttgatggagaagaaccctaggttgatgacagccctatagctggcctaaggaaacaccagtccatactggaagagaaaagttctg

SEQ ID NO: 643853 - DNA, 120 bp, Artificial Sequence
  ENSG00000182150_73 (sequence is synthesized)
gaaaagatatggaaaagaaatctatggtaaagggagaactgagtagaatacctgatagatttaaacagaaatctctaggaagataatcaccaagaaaaacaggagtcacatagattacct

SEQ ID NO: 643854 - DNA, 120 bp, Artificial Sequence
  ENSG00000182150_74 (sequence is synthesized)
gatgtattggaacgttttgagaaatgtatactcaggctaagaagttgaggatgagtaaatgacaggtacattacacaataggaaatgaaaattaaggcaactagaaactcccagggaaac

SEQ ID NO: 643855 - DNA, 120 bp, Artificial Sequence
  ENSG00000182150_75 (sequence is synthesized)
aaaatagtgatcatgaaagaaaaaaaaaacaaagtacactattgcacttggttgtttatataatcatgatattgtaaaaaccgaactttgatttaaccaaaaattaaactgtagagataa

SEQ ID NO: 643856 - DNA, 120 bp, Artificial Sequence
  ENSG00000182150_76 (sequence is synthesized)
ctatattgggagagtgtggagaggaagtctaaataaaaggagtcaaaatttatatttaatggtgagaagttaattgagatctaaaactgaaaaaattaggaaatagcaacgtaaacttgt

SEQ ID NO: 643857 - DNA, 120 bp, Artificial Sequence
  ENSG00000182150_77 (sequence is synthesized)
tgcttcacagtatggacataaacatcagaagaaggaactaaaagagttaaaatgtttgccataggagtgggaatgagggtgagtggggcgggtgacaagactactttggttttgtgttgt

SEQ ID NO: 643858 - DNA, 120 bp, Artificial Sequence
  ENSG00000182150_78 (sequence is synthesized)
atttaataactagatttttatccaattgtttttgagatttagcataatttttaaaactattactggattaatttttaatggctatgcttatttagaagcagcaaaaatactattatgacc

SEQ ID NO: 643859 - DNA, 120 bp, Artificial Sequence
  ENSG00000182150_79 (sequence is synthesized)
gaaatttcaatgtcttaagttttagctaagcttttctctcatttcctttatcaacattgaattcctcttagaagtctgggtttataaaggtaacaataaaaaaattgatacttcctccta

SEQ ID NO: 643860 - DNA, 120 bp, Artificial Sequence
  ENSG00000182150_80 (sequence is synthesized)
attgtgtttggtagggcagtgggtttgtgtgtgtgttaatcctctcacaacccactgaattgaatttcatggcccatggttaagatccacagtgtgaaaacgctgttttaaattatatga

SEQ ID NO: 643861 - DNA, 120 bp, Artificial Sequence
  ENSG00000182150_81 (sequence is synthesized)
gttcgtcatttgtttgctctgtgcagctgagttgtgtccagacttaccagatggtatgttttgccattgaggggccttctacacaatgagtgcatgatatggtccttgatagacttgact

SEQ ID NO: 643862 - DNA, 120 bp, Artificial Sequence
  ENSG00000182150_82 (sequence is synthesized)
tgtagatgttttcagcctacaatgtgatcagctatctgaggaactccagtaagtagataccacttcatttcagtttatatacaagacaatgtagttcaaacattttaataccttgtaaat

SEQ ID NO: 643863 - DNA, 81 bp, Artificial Sequence
  ENSG00000182150_83 (sequence is synthesized)
cactgcaacctccacctccctcccaaacaactcttaccaccacactcagctaaacatttttttttttttttgagacggagt

SEQ ID NO: 643864 - DNA, 70 bp, Artificial Sequence
  ENSG00000182150_84 (sequence is synthesized)
acctgggaggcagagcttgcagtgagccaggattgtgccacttttatcaatagtagtcaaaatgggagca

SEQ ID NO: 643865 - DNA, 120 bp, Artificial Sequence
  ENSG00000182150_85 (sequence is synthesized)
aggaaacttttatcaatagtagtcaaaatgggagcaaaaatgcagaactggagtttaaaaattagtttccaacagttgtcagtgaaatatttatcactattatgtaggaaagtgtgtcag

SEQ ID NO: 643866 - DNA, 120 bp, Artificial Sequence
  ENSG00000182150_86 (sequence is synthesized)
gtggaatgcagagtccagtatgaaaaggagcctgtttcagaacggaaactgtcaggtggagtggactccctgcaatggagtgatggaaagatttggtacaaccattgatgacctgagaac

SEQ ID NO: 643867 - DNA, 120 bp, Artificial Sequence
  ENSG00000182150_87 (sequence is synthesized)
agacactaggaaggtttgacaagatccttcctacccccactccactggtgatgtgtcaccaagttctgctaactaaatgggtggcctcaagcaaatcccttacctccttttagccttagt

SEQ ID NO: 643868 - DNA, 120 bp, Artificial Sequence
  ENSG00000182150_88 (sequence is synthesized)
ttcccctttaaattggtgatggattagatcagtggtggtcagccattttcttaaagcaactgaactgtatcttaatcagaaacttaactagtaaaacaattaaaatgcaagtctgttgct

SEQ ID NO: 643869 - DNA, 120 bp, Artificial Sequence
  ENSG00000182150_89 (sequence is synthesized)
tcaagcaacaccactgtggctccatggagcactaatttgaaaaccacagagatgagatcatttctaagaaaacctttcaactttgtttccatgatgctacttgccacaatcttttttact

SEQ ID NO: 643870 - DNA, 120 bp, Artificial Sequence
  ENSG00000182150_90 (sequence is synthesized)
taagcaatgataccgtttctggctgaacactcaccacacagctattaatattggaaactgaggcaagataccaagagatttttgcacttgaattcctcagggttctcttacagccctgaa

SEQ ID NO: 643871 - DNA, 120 bp, Artificial Sequence
  ENSG00000182150_91 (sequence is synthesized)
aacacctcttcaaggaaataaataacatctgcaaatggtgcagctgcccctaagtattcaaggcaaagaagccttagtttgcagagatgatgataaacttttcatccttccacagaaaat

SEQ ID NO: 643872 - DNA, 120 bp, Artificial Sequence
  ENSG00000182150_92 (sequence is synthesized)
gagaaagccacaggaaatacacggttattttctaattaaagttcaatgtgtacgcttttaaattctgaagttatccttcttttatgatatcaaaatagccctcttttttgaaatgatggt

SEQ ID NO: 643873 - DNA, 120 bp, Artificial Sequence
  ENSG00000182150_93 (sequence is synthesized)
agatcataccttttggtctttttcattgtccttacataaaagttggtaatcatatgtcagtcccagaagttttatttgacacttactggtctataaaatccaaaggaatggggatcactg

SEQ ID NO: 643874 - DNA, 120 bp, Artificial Sequence
  ENSG00000182150_94 (sequence is synthesized)
cctgccttaaaggtttttttgtgtgtttgtttgtttgtttgtttgcatgtgaaggatttttatgtcacaaatccagctaacagtggatctaggatctaggcctcaccgaggatgtcactg

SEQ ID NO: 643875 - DNA, 120 bp, Artificial Sequence
  ENSG00000182150_95 (sequence is synthesized)
aacctgtcagccccaatgacaggcacacaccttcaaagagcaagagtgcccatcactttctaggctccttgcctgctgctcattccatcatcacggatacagacttgtttctggtttcat

SEQ ID NO: 643876 - DNA, 120 bp, Artificial Sequence
  ENSG00000182150_96 (sequence is synthesized)
cttccaccagagattgcaaagcatcctctgcccagtgcttctaggaggccttactgggatggttcataagccactttcctcttggtgacagcccctgtacactgtggcatgtacggctgg

SEQ ID NO: 643877 - DNA, 120 bp, Artificial Sequence
  ENSG00000182150_97 (sequence is synthesized)
ctccacttggtatttgttgcaggagggaagaacatctcacttttgcttggctaaagggccaccccaggagagctattttgcctcagggtcttgcagggtttctctaggaaaacagtgcat

SEQ ID NO: 643878 - DNA, 120 bp, Artificial Sequence
  ENSG00000182150_98 (sequence is synthesized)
ctgatagttactctctgcccctaggaggaaagacagattcgcccttccttcccaagtcccaggctgtgtggttcccagccccaagggtagcaagtcagaacctccggagaggcttttaag

SEQ ID NO: 643879 - DNA, 120 bp, Artificial Sequence
  ENSG00000182150_99 (sequence is synthesized)
catgcacatgtccagggtcctcatcaagagactgaatcagggggtctagggctcagcacaggcaccctttttgtttttgcagtttcacaggaattctgatgtgccagtgattgtcaggtt

SEQ ID NO: 643880 - DNA, 120 bp, Artificial Sequence
  ENSG00000182150_100 (sequence is synthesized)
tgtccctgggcaggacccacctgcctgaccttctgtccccctgggacacagtatttccagagaggtgcttcagttgccccaccacgacttccagcgccccccatctctgtatgcagctga

SEQ ID NO: 643881 - DNA, 120 bp, Artificial Sequence
  ENSG00000182150_101 (sequence is synthesized)
gctcatgatggagcccactgtgtgctttttgttgttgttacattcctataaaaatgtccacgcatatttgaacatctgtgttcatagtggcattattcacaatggctacaacacgaagaa

SEQ ID NO: 643882 - DNA, 120 bp, Artificial Sequence
  ENSG00000182150_102 (sequence is synthesized)
agcattccaagtacctatcgatgaataagcaaaatattacacacacaggaatattattcagccttgaaaggaaattcggacacgtgctacaacatagatgaatcttgaggacggtatgca

SEQ ID NO: 643883 - DNA, 120 bp, Artificial Sequence
  ENSG00000182150_103 (sequence is synthesized)
aagtgaaataaatcagacacagaaggacaaatactgtatgattccacttatataaagtacctagattagtcagattcatagagacaaagtagaatggtggttgctagacgctggagggag

SEQ ID NO: 643884 - DNA, 120 bp, Artificial Sequence
  ENSG00000182150_104 (sequence is synthesized)
gggagaaaggggagttattaatgggtgtagagtttctgttacacaggatgcaaagtggcctgaagatggatggtcgtgatggttgcacagcaatgtgaatttaatgacactgaagtgtac

SEQ ID NO: 643885 - DNA, 120 bp, Artificial Sequence
  ENSG00000182150_105 (sequence is synthesized)
acttaaaagtcattaaaatgctaaattttgtatgtgttttacaattttaaaaatggaaaaaaagtaagaccaaaagcaacacctctccagaatgtgtgttatataccaaattttgatgta

SEQ ID NO: 643886 - DNA, 120 bp, Artificial Sequence
  ENSG00000182150_106 (sequence is synthesized)
tgtgagattgctgactatattttacttatcaatttgaaattatattgtttttatgttgacactccatataagccattattttgaaaaaaacattttccttattaaaagattggaaaaaaa

SEQ ID NO: 643887 - DNA, 120 bp, Artificial Sequence
  ENSG00000182150_107 (sequence is synthesized)
gattccagccctcatggatgactttgagagattcaagactttagtgggggaactaactgtagatgtggtggaagcagcaagagaactagaattagaaatggagcctgaagatgggactga

SEQ ID NO: 643888 - DNA, 120 bp, Artificial Sequence
  ENSG00000182150_108 (sequence is synthesized)
agttcttgccggtgcccttcgggttggggttttgccctgtagatcctcttcagtgacagctgcagattgtgaacccctccaggcctggaaccaaatctccgattcagtgttgagaacctg

SEQ ID NO: 643889 - DNA, 120 bp, Artificial Sequence
  ENSG00000182150_109 (sequence is synthesized)
gactcgggagtcagcccctgggatctagtgctgcctctgacagttacttgctgagcaactttgggcaggctcctcatctgtaaaactgggttcattactaggttcttgcgattattaaat

SEQ ID NO: 643890 - DNA, 120 bp, Artificial Sequence
  ENSG00000182150_110 (sequence is synthesized)
gacgtggggaatacgcaaagtatttatgtgaccccgcgtgtggcccatattaagcactcagtaaatgttattttcattctttattcttgtatgccccagttgttagtgaatggcagaagt

SEQ ID NO: 643891 - DNA, 120 bp, Artificial Sequence
  ENSG00000182150_111 (sequence is synthesized)
ttgttgtaagtagataaatgaaggttgagatatttagttcagttgagttttattgcctattgagtcagggcattatattctgccttaaataggaggtttaaagaaggtgtgattatctac

SEQ ID NO: 643892 - DNA, 120 bp, Artificial Sequence
  ENSG00000182150_112 (sequence is synthesized)
cacaagtcacctgggatgccttctggcacccaaatgagtagttttcattaataattgtgctgtataacaaaagctaccaggtattgagtgattttcctgagcccagcaatatgctgattg

SEQ ID NO: 643893 - DNA, 120 bp, Artificial Sequence
  ENSG00000182150_113 (sequence is synthesized)
tttacttgctttcctttgaggaagatatcgatctcattaaatagatgaattcagagctaaagttcagagagggcaagttacaagcctgaattctgaggtctaggaattgatgacgctgta

SEQ ID NO: 643894 - DNA, 120 bp, Artificial Sequence
  ENSG00000182150_114 (sequence is synthesized)
attcagggaccaaacatataaatacctataggagactggcagctaaaaatagatgaagctgccgagtggatattgtgactgggaggctcattccttttgataaatctagtcactcttggt

SEQ ID NO: 643895 - DNA, 120 bp, Artificial Sequence
  ENSG00000182150_115 (sequence is synthesized)
atttagggaaattggtggaaggagcagaaagctccagggccccgaggtgggaacacccttgaggaatgcttgaggaggcctttggagtgaaagagggagagagagaccctatcaccagaa

SEQ ID NO: 643896 - DNA, 120 bp, Artificial Sequence
  ENSG00000182150_116 (sequence is synthesized)
acagtggaaaaatgaaggtgagttcatctaaagtatatccttgattggccagcctcaacttttgaggcataaagaataaagcatatgcctacatgacaccttacagccacattttctctt

SEQ ID NO: 643897 - DNA, 120 bp, Artificial Sequence
  ENSG00000182150_117 (sequence is synthesized)
taattctcaaaggaaatgtagctcattagtaaaatatgtaaatacttgaattataaccataactgacatctgaatatttcagaaaaatctgaatttcaaaaataaactgcaaatgtttta

SEQ ID NO: 643898 - DNA, 120 bp, Artificial Sequence
  ENSG00000182154_0 (sequence is synthesized)
gctcttgctgcgacgcagcggtcggaagcggagcaaggtcgaggccgggttggcgccggagccggggccgcttggagctcgtgtggggtctccggtccagggcgcggcatgggcgtcctg

SEQ ID NO: 643899 - DNA, 120 bp, Artificial Sequence
  ENSG00000182154_1 (sequence is synthesized)
gccgcagcggcgcgctgcctggtccggggtgcggaccgaatgagcaagtggacgagcaagcggggcccgcgcagcttcaggggccgcaagggccggggcgccaagggcatcggcttcctc

SEQ ID NO: 643900 - DNA, 120 bp, Artificial Sequence
  ENSG00000182154_2 (sequence is synthesized)
cctgagagcgaggagacgcccctgacggccgcgcagctcttcagcgaagccgtggcgcctgccatcgaaaaggacttcaaggacggtaccttcgaccctgacaacctggaaaagtacggc

SEQ ID NO: 643901 - DNA, 120 bp, Artificial Sequence
  ENSG00000182154_3 (sequence is synthesized)
ttcgagcccacacaggagggaaagctcttccagctctaccccaggaacttcctgcgctagctgggcgggggaggggcggcctgccctcatctcatttctattaaacgcctttgccagcta

SEQ ID NO: 643902 - DNA, 120 bp, Artificial Sequence
  ENSG00000182156_0 (sequence is synthesized)
acgcacgtgaggctgggaccaggggtggcactgacacggctggggagcccactcccgaggttcgacccggggatgtgcacagccacattccaaaggcgcacgggatgagatcagcccggg

SEQ ID NO: 643903 - DNA, 120 bp, Artificial Sequence
  ENSG00000182156_1 (sequence is synthesized)
tgaccctgggactttgtcctcctcggcaggagccagccctgtgcaccctgtgtgcctgtccatctggaaggcccagcatgagaggcccggccgtcctcctcactgtggctctggccacgc

SEQ ID NO: 643904 - DNA, 120 bp, Artificial Sequence
  ENSG00000182156_2 (sequence is synthesized)
tcctggctcccggggccggagcaccggtacaaagtcagggctcccagaacaagctgctcctggtgtccttcgacggcttccgctggaactacgaccaggacgtggacacccccaacctgg

SEQ ID NO: 643905 - DNA, 120 bp, Artificial Sequence
  ENSG00000182156_3 (sequence is synthesized)
acgccatggcccgagacggggtgaaggcacgctacatgacccccgcctttgtcaccatgaccagcccctgccacttcaccctggtcaccggcaaatatatcgagaaccacggggtggttc

SEQ ID NO: 643906 - DNA, 120 bp, Artificial Sequence
  ENSG00000182156_4 (sequence is synthesized)
acaacatgtactacaacaccaccagcaaggtgaagctgccctaccacgccacgctgggcatccagaggtggtgggacaacggcagcgtgcccatctggatcacagcccagaggcagggcc

SEQ ID NO: 643907 - DNA, 120 bp, Artificial Sequence
  ENSG00000182156_5 (sequence is synthesized)
tgagggctggctccttcttctacccgggcgggaacgtcacctaccaaggggtggctgtgacgcggagccggaaagaaggcatcgcacacaactacaaaaatgagacggagtggagagcga

SEQ ID NO: 643908 - DNA, 120 bp, Artificial Sequence
  ENSG00000182156_6 (sequence is synthesized)
acatcgacacagtgatggcgtggttcacagaggaggacctggatctggtcacactctacttcggggagccggactccacgggccacaggtacggccccgagtccccggagaggagggaga

SEQ ID NO: 643909 - DNA, 120 bp, Artificial Sequence
  ENSG00000182156_7 (sequence is synthesized)
tggtgcggcaggtggaccggaccgtgggctacctccgggagagcatcgcgcgcaaccacctcacagaccgcctcaacctgatcatcacatccgaccacggcatgacgaccgtggacaaac

SEQ ID NO: 643910 - DNA, 120 bp, Artificial Sequence
  ENSG00000182156_8 (sequence is synthesized)
tccctaaagaagggaggctggagaaggtgtacgatgccctcaaggacgcccaccccaagctccacgtctacaagaaggaggcgttccccgaggccttccactacgccaacaaccccaggg

SEQ ID NO: 643911 - DNA, 120 bp, Artificial Sequence
  ENSG00000182156_9 (sequence is synthesized)
tcacacccctgctgatgtacagcgaccttggctacgtcatccatgggagaattaacgtccagttcaacaatggggagcacggctttgacaacaaggacatggacatgaagaccatcttcc

SEQ ID NO: 643912 - DNA, 120 bp, Artificial Sequence
  ENSG00000182156_10 (sequence is synthesized)
gcgctgtgggccctagcttcagggcgggcctggaggtggagccctttgagagcgtccacgtgtacgagctcatgtgccggctgctgggcatcgtgcccgaggccaacgatgggcacctag

SEQ ID NO: 643913 - DNA, 120 bp, Artificial Sequence
  ENSG00000182156_11 (sequence is synthesized)
ctactctgctgcccatgctgcacacagaatctgctcttccgcctgatggaaggcctactctcctgcccaagggaagatctgctctcccgcccagcagcaggcccctcctcgtgatgggac

SEQ ID NO: 643914 - DNA, 120 bp, Artificial Sequence
  ENSG00000182156_12 (sequence is synthesized)
tgctggggaccgtgattcttctgtctgaggtcgcataacgccccatggctcaaggaagccgccgggagctgcccgcaggccctgggccggctgtctcgctgcgatgctctgctggtcgcg

SEQ ID NO: 643915 - DNA, 120 bp, Artificial Sequence
  ENSG00000182156_13 (sequence is synthesized)
gacggaccctgcctccccagcttatcccaggccagaggctgcatgccactgtccccggcagcgccaacccctgcttggctgttatggtgctggtaataagcctcgcagcccaggtccaga

SEQ ID NO: 643916 - DNA, 120 bp, Artificial Sequence
  ENSG00000182156_14 (sequence is synthesized)
gcccccggcgagccggtcccataaccggccccctgcccctgcccctgctcctgctcctccccttcgggccccctcctcctgcaaaacccgctcccgaagcggcgctgccgtctgcagcca

SEQ ID NO: 643917 - DNA, 120 bp, Artificial Sequence
  ENSG00000182156_15 (sequence is synthesized)
cgcgggggcgcgcgggagctctgcgggcgctggaacctgcagacccggcctcggtcagctgggaggggcccgccccggcacaaagcacccatgggaataaaggccaagccgcgacagtca

SEQ ID NO: 643918 - DNA, 120 bp, Artificial Sequence
  ENSG00000182156_16 (sequence is synthesized)
cgccccatggctcaaggtcagagacccagaaggcagaggcgggagggtggccccacgctccctgaccctccaccctgatgtcccagctacagtcctaggcaaccagaacagagctgccag

SEQ ID NO: 643919 - DNA, 120 bp, Artificial Sequence
  ENSG00000182156_17 (sequence is synthesized)
gccccgccaagcaggtgactcccactgacctggctgccccagagaggccatcacccctgagatcccgaggctgacccttccagcctctctgctctgggcttggaggaggtctttccagag

SEQ ID NO: 643920 - DNA, 120 bp, Artificial Sequence
  ENSG00000182156_18 (sequence is synthesized)
cagaccacccggaccagtggccagaattcccaccctcccccaaaagccagaactccctcagcctctggccagagctgctgcctcccctccttcctgccatctctgtgctccactgggata

SEQ ID NO: 643921 - DNA, 120 bp, Artificial Sequence
  ENSG00000182156_19 (sequence is synthesized)
gctcggaaaccgtcacctgcggtgcatttgggaggagagctctggggctgtgttcctggaactctccaggagcctcctaggacacgcatgaggtgtgtttggtaggagagcaccagggct

SEQ ID NO: 643922 - DNA, 120 bp, Artificial Sequence
  ENSG00000182156_20 (sequence is synthesized)
tggaactctctggaagcccacctccaaggacacgcgtggggtgcatttgggaggagagctccggggctgcgttcctggaactctctggaagcccacctccaaggacacgcatggggtgcg

SEQ ID NO: 643923 - DNA, 120 bp, Artificial Sequence
  ENSG00000182156_21 (sequence is synthesized)
tttgggaggagagctccggggctgtgttcctggaactccccgggagcctccgaggacagtgctcccttgtctgtctgtgcagccacagcctcctaggccaagcagaagaaagtcattcat

SEQ ID NO: 643924 - DNA, 120 bp, Artificial Sequence
  ENSG00000182156_22 (sequence is synthesized)
tcatcccgaaaatatgtaacgggagccagctccatgccacgctctggtctgggctcaggatatgcagcgaacaagacagtccaggacctgtcatttaaaggtgcaagaaagcagagaaca

SEQ ID NO: 643925 - DNA, 120 bp, Artificial Sequence
  ENSG00000182156_23 (sequence is synthesized)
caaaagcaaatgaatccacgcacagagtgctcagatgcttgtgatggcaaagaagagacggccacaggcagggacgaggcaggcgcgaccttgtcatttgcccggcctggaatggcctct

SEQ ID NO: 643926 - DNA, 120 bp, Artificial Sequence
  ENSG00000182156_24 (sequence is synthesized)
ctgagaaggtggatttagggagaaaaccagaatgacagacacaccagaagaagccagacacaccaggcaggggaaagagccagggacaggcccgcggtgggacaggttcggcgtgtttgg

SEQ ID NO: 643927 - DNA, 120 bp, Artificial Sequence
  ENSG00000182156_25 (sequence is synthesized)
gatgagacagaaggccagtgtgcctgcaggttggcacagagcgaggctctaacaggagctgaccacagccccaaggcaggaggttgtgggatgcacagcggggagccccaagctgaggtt

SEQ ID NO: 643928 - DNA, 120 bp, Artificial Sequence
  ENSG00000182156_26 (sequence is synthesized)
acacagggtctgaggttgatgattaaatgagtggctcccactgctgggccggggacagaaacgggagcaggaagtggccagtttggaggtggctgcaggacccagccggacattccagtg

SEQ ID NO: 643929 - DNA, 120 bp, Artificial Sequence
  ENSG00000182156_27 (sequence is synthesized)
gcggggtggagaagctgcaatgtgcacagattccaaatacctttaagaggcacgacattcgaggtttgtggacagattatgtgggagggtgaagaaaatgcaaaaatgaaagatgggtcc

SEQ ID NO: 643930 - DNA, 120 bp, Artificial Sequence
  ENSG00000182158_0 (sequence is synthesized)
agagccgaggagccctggggtccctcaaagtttgtgtctggagccgtagcggcaagtgggcttgcggctaagggattttcctgggatgagagcgggtcttctgccttcattttggatgca

SEQ ID NO: 643931 - DNA, 120 bp, Artificial Sequence
  ENSG00000182158_1 (sequence is synthesized)
catcccgctttagccccggcagcctttggtccggctcgtgtccctggggattctcggatctccgaggacaccggacgggagcgcttggccatcctctctccggcagaggagcagacgttt

SEQ ID NO: 643932 - DNA, 120 bp, Artificial Sequence
  ENSG00000182158_2 (sequence is synthesized)
gctttccaagtgcaaaactacagacacgcgcgcgcacacacgcaagcacacgcggagagagaggaaccttgccggtccgaggcagctctgcgcgtcccctcctgcgcttagcatcctcgg

SEQ ID NO: 643933 - DNA, 120 bp, Artificial Sequence
  ENSG00000182158_3 (sequence is synthesized)
cccagcgcggcccgcaccgccatggaggtgctggagagcggggagcagggcgtgctgcagtgggaccgcaagctgagcgagctgtcagagcccggggacggcgaggccctcatgtaccac

SEQ ID NO: 643934 - DNA, 120 bp, Artificial Sequence
  ENSG00000182158_4 (sequence is synthesized)
acgcacttctcagaacttctggatgagttttcccagaacgtcttgggtcagctcctgaatgatcctttcctctcagagaagagtgtgtcaatggaggtggaaccttccccgacgtccccg

SEQ ID NO: 643935 - DNA, 120 bp, Artificial Sequence
  ENSG00000182158_5 (sequence is synthesized)
gcgcctctcatccaggctgagcacagctactccctgtgcgaggagcctcgggcccagtcgcccttcacccacattaccaccagtgacagcttcaatgacgatgaggtggaaagtgagaaa

SEQ ID NO: 643936 - DNA, 120 bp, Artificial Sequence
  ENSG00000182158_6 (sequence is synthesized)
tggtacctgtctacagacttcccttcaacatccatcaagacagagccagttacagacgaaccacccccaggactcgttccgtctgtcactctgaccatcacagccatctccaccccgttg

SEQ ID NO: 643937 - DNA, 120 bp, Artificial Sequence
  ENSG00000182158_7 (sequence is synthesized)
gaaaaggaggaacctcctctggaaatgaacactggggttgattcctcgtgccagaccattattcctaaaattaagctggagcctcatgaagtggatcagtttctaaacttctctcctaaa

SEQ ID NO: 643938 - DNA, 120 bp, Artificial Sequence
  ENSG00000182158_8 (sequence is synthesized)
gaagccccagtggaccacctgcatttgccgcccacccctccgagcagtcacggcagtgactcagagggcagcctgagtcccaacccacgcctgcaccccttcagcctgcctcagacccac

SEQ ID NO: 643939 - DNA, 120 bp, Artificial Sequence
  ENSG00000182158_9 (sequence is synthesized)
agcccctccagagctgcaccccgggccccctccgccctctccagctcccctctcctcacggctcctcataaactgcagggatcaggccctctggtcctgacagaggaggagaagaggacc

SEQ ID NO: 643940 - DNA, 120 bp, Artificial Sequence
  ENSG00000182158_10 (sequence is synthesized)
ctgatcgctgagggctatcccatccccaccaaattgcccctgtcaaaatcagaggagaaggccctgaagaaaattcggaggaagatcaagaataagatttctgctcaggaaagtaggaga

SEQ ID NO: 643941 - DNA, 120 bp, Artificial Sequence
  ENSG00000182158_11 (sequence is synthesized)
aagaagaaagaatacatggacagcctggagaaaaaagtggagtcttgttcaactgagaacttggagcttcggaagaaggtagaggttctagagaacactaataggactctccttcagcaa

SEQ ID NO: 643942 - DNA, 120 bp, Artificial Sequence
  ENSG00000182158_12 (sequence is synthesized)
ctccagaagcttcagactttggtgatgggcaaggtttctcgaacctgcaagttagctggcacgcagactggcacctgcctcatggttgtggtgctgtgctttgccgttgcattcggcagc

SEQ ID NO: 643943 - DNA, 120 bp, Artificial Sequence
  ENSG00000182158_13 (sequence is synthesized)
ttctttcaaggctacgggccctatccttctgccaccaagatggctctgcccagccagcattccctgcaggagccctacacagcctccgtggtgagatccagaaacctgctgatctacgag

SEQ ID NO: 643944 - DNA, 120 bp, Artificial Sequence
  ENSG00000182158_14 (sequence is synthesized)
gaacattctcccccagaggagtcatccagcccgggctcggctggggagctggggggctgggatagaggttcctccctgctcagggtgtcagggctggagtccaggccggatgtggatctt

SEQ ID NO: 643945 - DNA, 120 bp, Artificial Sequence
  ENSG00000182158_15 (sequence is synthesized)
ccccatttcattatctcgaatgagaccagcctggagaagtcagtgcttttggagctgcagcagcacctggtcagcgccaaactggaggggaatgaaacactaaaagttgtagaactcgac

SEQ ID NO: 643946 - DNA, 120 bp, Artificial Sequence
  ENSG00000182158_16 (sequence is synthesized)
agaagagtgaacaccactttctaaagaggctgcctgcaccccctccctttcccttaactctacttttacatccccaaaccacctttgtcatcagcttttcctctttgccactggatcttc

SEQ ID NO: 643947 - DNA, 120 bp, Artificial Sequence
  ENSG00000182158_17 (sequence is synthesized)
atggagacatgggcaagcattagtggcttcagattggagaccagcctgggacttccctgcagtgagagagcatctccccctggtccatgcccctcctgtgcagaagggagcctgcatccc

SEQ ID NO: 643948 - DNA, 120 bp, Artificial Sequence
  ENSG00000182158_18 (sequence is synthesized)
tcccttcctttctcttactgccataggaaattattttaggggttggaggtgggacaagcaggcttgtttccaccaatagtgccaaaaagatattgcctaatgtgcacctgtgaggtgtaa

SEQ ID NO: 643949 - DNA, 120 bp, Artificial Sequence
  ENSG00000182158_19 (sequence is synthesized)
ccccccgctttggagacgagatggctcttgttcagtcaagaccccagactctggccacaaaaatgccataatgcctgttggtatttggcaaagcactgacccgtgtcctccgttgctcgc

SEQ ID NO: 643950 - DNA, 120 bp, Artificial Sequence
  ENSG00000182158_20 (sequence is synthesized)
actggggtctctggtgtgaacacccccgacagcagccctccgcccactctgccccctgggagccctcgctggatcgtctcgtctcctgcagcagcactggcaggcgagggctctcgttca

SEQ ID NO: 643951 - DNA, 120 bp, Artificial Sequence
  ENSG00000182158_21 (sequence is synthesized)
tattctcaggccgcaagtgcaatgcctgaggggatcaggcttttctactccaggcaaacctgccccatcttgtcgcttttaggacctcccacaacctggttccccacacatccatagttc

SEQ ID NO: 643952 - DNA, 120 bp, Artificial Sequence
  ENSG00000182158_22 (sequence is synthesized)
tgcctccccagcttctcctccccagttgtaaatagtatttattagcttgccgaggcttcctgctagcaaccacactgaagagatcgatgcctcctttcaagctagccaagttttctgcga

SEQ ID NO: 643953 - DNA, 120 bp, Artificial Sequence
  ENSG00000182158_23 (sequence is synthesized)
gccttcagagctaggagggcaccctaggctctgggatcccgtgtctttccagacaatgttttgtttcctttcctttgttttttcttttaactggaataattaccattgaaaaagaagttc

SEQ ID NO: 643954 - DNA, 120 bp, Artificial Sequence
  ENSG00000182158_24 (sequence is synthesized)
ctttgagcatgtatgtgtctgcctctaggatgagctcagagcgagagatgacacaatgcctcactcaggccccgggctccctggccacaagctttttctatcctgttttcatgacagaga

SEQ ID NO: 643955 - DNA, 120 bp, Artificial Sequence
  ENSG00000182158_25 (sequence is synthesized)
aggggaagccctgttctgacaacagacatttcagacaaccttgctggctttccacacctgcctggccccctcctccctccacacttccactttgtcctcctcgtcccctacctcaacaaa

SEQ ID NO: 643956 - DNA, 120 bp, Artificial Sequence
  ENSG00000182158_26 (sequence is synthesized)
gcagggtggggtaggtgacatttgtgtatccacattcttacctttggtagtcaggtttggctactttgcagctcgcccaaagagatacaacctaatccccaacctacttttagttttttt

SEQ ID NO: 643957 - DNA, 120 bp, Artificial Sequence
  ENSG00000182158_27 (sequence is synthesized)
gttttttttttatggttaaaagtaacttttgtagtttaaaaaaatctttcctctttcatataaataagaagtggaaattgcctttttattgtgtaatgtagaaaaccctcaagtgttttt

SEQ ID NO: 643958 - DNA, 120 bp, Artificial Sequence
  ENSG00000182158_28 (sequence is synthesized)
tccgagcttgggaaagattttgtgtaggaaatgtgcatagagtttgtattttatttttattagcagctgaaatgcctttggttttggcttctctctctccctctctctctctgtctctcc

SEQ ID NO: 643959 - DNA, 120 bp, Artificial Sequence
  ENSG00000182158_29 (sequence is synthesized)
ttctctctctccccccaccacccacccccacacacgtcatctgcattgttattggagcctgtacttagagggattaagcccacaccctggcttccattccatatcaggtacaggatttga

SEQ ID NO: 643960 - DNA, 120 bp, Artificial Sequence
  ENSG00000182158_30 (sequence is synthesized)
tgttattaacatttgtcgtcatacctcataagtcggtccctgccttgtctgtctaggcccatttggggctccctgtgagtgattcccctctctctgctatgctggagacggttccagcct

SEQ ID NO: 643961 - DNA, 120 bp, Artificial Sequence
  ENSG00000182158_31 (sequence is synthesized)
gaaagcggccaagttcatcttctcactgtgagtggaagctggatcgggcccccgtagtcctggcagccctgttgtctggagggttcttgttgtccctcccattagccagggcggagactg

SEQ ID NO: 643962 - DNA, 120 bp, Artificial Sequence
  ENSG00000182158_32 (sequence is synthesized)
tctgagctgtgcaggaggagggttgctagtaggttctgcttctgcttctctctgctccactgtctgcagcccagatcctgttgggcctggctggtgtctggtaaccatgggcctccactg

SEQ ID NO: 643963 - DNA, 120 bp, Artificial Sequence
  ENSG00000182158_33 (sequence is synthesized)
acccatccctctcttttaaactgtcaggtcattatcaggcataggcagcctatagggcccaaagaaggcaaaaagataagatttactcaagtagcatttgggcaatgaggaaggaaaggt

SEQ ID NO: 643964 - DNA, 120 bp, Artificial Sequence
  ENSG00000182158_34 (sequence is synthesized)
ttcaaatttaggggcagaagtgagagaatgagccaacccatgtacctgctgcaactgaaccagactgggttttcaaggctcccagacgtagagtaggaaacgtgctcttctaaatgagga

SEQ ID NO: 643965 - DNA, 120 bp, Artificial Sequence
  ENSG00000182158_35 (sequence is synthesized)
gggagaagataaaggaaacttctagcccctgtccttagtgctttgaggattttattttctcccttactacgcttgcttgacgtcactctctctcgacctccaaacagcaggactctttct

SEQ ID NO: 643966 - DNA, 120 bp, Artificial Sequence
  ENSG00000182158_36 (sequence is synthesized)
ctgggaaaccatccttccaaaacggaatctatgtagacaatgggacgttaggcagagagctcagatggcccttttaagggggctccaagaaccaacatcactgctcttttagataaacct

SEQ ID NO: 643967 - DNA, 120 bp, Artificial Sequence
  ENSG00000182158_37 (sequence is synthesized)
ctgccctccactccttgcttgagtgggttaaaggaactaacagttgtccctttaggaggacaaaatggggtcaagaggacacagaagagttgtatagcaccagattggttccaaatagtt

SEQ ID NO: 643968 - DNA, 120 bp, Artificial Sequence
  ENSG00000182158_38 (sequence is synthesized)
aatggatgtgtgcacattttctgttcagggattaagaccagaatatcagtggatttgttttccccaccaagtggcctcttagactagtcattaacttatgattagctctaaagatttcaa

SEQ ID NO: 643969 - DNA, 120 bp, Artificial Sequence
  ENSG00000182158_39 (sequence is synthesized)
atagtggcagacagtgtcttctgaatgtaagttttgagaaatacgagtctgtcagagcggccataagccataaagagtcaatctcttaattatatttttcatcatgtaaacaagtttccc

SEQ ID NO: 643970 - DNA, 120 bp, Artificial Sequence
  ENSG00000182158_40 (sequence is synthesized)
atttccctttcttagattgcaccagtgaaggagatgttttgcaaagattcagagaactaatttttcactggataagacctgagtaacccagaccccccaccgtggttcttttcacagccc

SEQ ID NO: 643971 - DNA, 120 bp, Artificial Sequence
  ENSG00000182158_41 (sequence is synthesized)
tcgactttgcacttaaaaagggatattgtaaatgaaaggctgcagtgccagttttaagaaagaatttctgtgaagtgtgaggactctggagtctagctcacataaagagagtgttatata

SEQ ID NO: 643972 - DNA, 120 bp, Artificial Sequence
  ENSG00000182158_42 (sequence is synthesized)
aaaatccgacagctgaactaggttgctcttttttggcagggagtggggatgagatttgacaccaatatgggcaaaattagataaccttttggttaatataaatgattttgatttggaggc

SEQ ID NO: 643973 - DNA, 120 bp, Artificial Sequence
  ENSG00000182158_43 (sequence is synthesized)
ctaatttgtagattgtgaaagcagcttttagtttaacttattcacagaccccttataattaccatgtttttttttttcttcctaaatctcttggttcagcttgtgaatcttacgtgcccg

SEQ ID NO: 643974 - DNA, 120 bp, Artificial Sequence
  ENSG00000182158_44 (sequence is synthesized)
taaagttgggatgttgaattggctcttctttgttctggcagtgagtcaagtgtccagcattttttcataagtgttttttaaaattgttctccagcattttatggctcctccctcccatgt

SEQ ID NO: 643975 - DNA, 120 bp, Artificial Sequence
  ENSG00000182158_45 (sequence is synthesized)
cctcagacccagcaaaagcgtagaggcagaattagaggcctctccaggccagctcctctgcccacatgtcatacaaggtgtgaatttgagcacagtccagaaatggagacatcccacccc

SEQ ID NO: 643976 - DNA, 120 bp, Artificial Sequence
  ENSG00000182158_46 (sequence is synthesized)
cagttgaataatggcccattcatgccaaccttgccaacacggagagggcagagatgcactagaagaccttcatcctccccttcctctgccccaagtcactacagttggttctattgaagc

SEQ ID NO: 643977 - DNA, 120 bp, Artificial Sequence
  ENSG00000182158_47 (sequence is synthesized)
cagtctttaagaaacctgggttaaagacaccagcacttctgcttgctgggctggctggacctgtgaagccatgggcaggtagtgccctcttgagagtcattttatttggccaccttcagg

SEQ ID NO: 643978 - DNA, 120 bp, Artificial Sequence
  ENSG00000182158_48 (sequence is synthesized)
tgagactatccatagacacatgctaggataggccccgctgggagggcagttacaggagagagtaggtggtggtgacgtgagggctgtgaaggatccagagacaagacttagatgtttcgt

SEQ ID NO: 643979 - DNA, 120 bp, Artificial Sequence
  ENSG00000182158_49 (sequence is synthesized)
tcattcactcactcattcagttactcctaagacttttcagtttcataaggaagagtgttgcctgaggccctagggaatattggggaatagaagggattgaggaaacattaataatagtta

SEQ ID NO: 643980 - DNA, 78 bp, Artificial Sequence
  ENSG00000182158_50 (sequence is synthesized)
tggggaatagaagggattgaggaaacattaataatagttattcaaaagacccaaatgcttatacttctctctcccttc

SEQ ID NO: 643981 - DNA, 120 bp, Artificial Sequence
  ENSG00000182158_51 (sequence is synthesized)
cttaaatgtgccttataggtaaatccaggatgactgaggaatccctcgtcactgggagattttgtatatattcttttattattagattgagttgggtgtggggaaaaatttttttctgaa

SEQ ID NO: 643982 - DNA, 120 bp, Artificial Sequence
  ENSG00000182158_52 (sequence is synthesized)
ggctcaaaagtggtttcctaaaagtgagccactatcagatttgcacatcaggagaaaagaaatagggttacgtccattaggaaaatcccagtttgcaggagtgcaatcacatcaaaaaaa

SEQ ID NO: 643983 - DNA, 120 bp, Artificial Sequence
  ENSG00000182158_53 (sequence is synthesized)
caaccagccaggattaaaggtattataaatcctcatagcggaacatttctcagggcaaaggaacctggctcatttgaagattaatgttccatgcctttgtggtcaaagggtcagcactta

SEQ ID NO: 643984 - DNA, 120 bp, Artificial Sequence
  ENSG00000182158_54 (sequence is synthesized)
acacaggaaaaaactaggtgttgttttgttttgttattttggacaacataaaattcaggaatgttttatttagccttggtttctagaaggaagggaaataatatttcttgagcatttact

SEQ ID NO: 643985 - DNA, 120 bp, Artificial Sequence
  ENSG00000182158_55 (sequence is synthesized)
agggtgttgcgtgctgtgctaagtaaattttaagtctttcagttttatagatacggaaaacaagggtgactctttaccacaggatgaataaagaactaagtaatatgggaaatgcagcaa

SEQ ID NO: 643986 - DNA, 120 bp, Artificial Sequence
  ENSG00000182158_56 (sequence is synthesized)
tttctggactagctgagccgattccttcctgtgagcacactgtaagctttcaagttctctgggcaggaattacagcacctgtcccctgcaatggccctgctgtgtgatgctcatcgcttc

SEQ ID NO: 643987 - DNA, 120 bp, Artificial Sequence
  ENSG00000182158_57 (sequence is synthesized)
ccttcgtgctggagcagtcccccaggtgtccatctcctatctttttgttccaatcttctgtgagttccagctagcaggctttacatctggggaaaggaaaaccaggggttttagctctgt

SEQ ID NO: 643988 - DNA, 120 bp, Artificial Sequence
  ENSG00000182158_58 (sequence is synthesized)
tctctgctcccatccttcgctcaccagctgagtgagaacatgaactttttgcaccatgtacccatggcttacactacttagaaaatcaccttttcagataaaacagtttatgagttcata

SEQ ID NO: 643989 - DNA, 120 bp, Artificial Sequence
  ENSG00000182158_59 (sequence is synthesized)
gagaacaccagcactctttgacaaaactgtgagtgaccctttttaaacaatgctgagcaggccctgagctataatcaacggtgagctttaatgtctatgctgacagttaggttttgctct

SEQ ID NO: 643990 - DNA, 120 bp, Artificial Sequence
  ENSG00000182158_60 (sequence is synthesized)
cttttgtaacaggttacgtagaccagcagtgtttaaatctaaatacgttgtgagtctgttatctgtcctatcgcgttttttaaatgactttttattctttatcatagctaagtaaatacc

SEQ ID NO: 643991 - DNA, 120 bp, Artificial Sequence
  ENSG00000182158_61 (sequence is synthesized)
aaaaaaaaaaaaaagctttgtaggacacttgtacttagtttgggaaaaaaaaataaattgaaattgttatgcttttgtatttccatttcttgcaaataaatattttttcttaaatagtaa

SEQ ID NO: 643992 - DNA, 120 bp, Artificial Sequence
  ENSG00000182158_62 (sequence is synthesized)
gatgggcccactctggcccgatcctggcaccagcaatgggatgttgacctgtctgctgagtcttggagcccaccactgccaaggacacccagctggagctaatttgctgggctgagtcat

SEQ ID NO: 643993 - DNA, 120 bp, Artificial Sequence
  ENSG00000182158_63 (sequence is synthesized)
gggtctacagagagggaatatggcgagagagctgggatgagtttgtaccacagatgttgtagctggctttatgaaatagctctgttcttaaaaaataaaaattttgcttccaaataaaaa

SEQ ID NO: 643994 - DNA, 120 bp, Artificial Sequence
  ENSG00000182158_64 (sequence is synthesized)
atatgttacataaatagtaaatggatgtacggtccgccctccctgtgcttgggttttgcatcctatgaatactgtattttcaatccacgtttatttgaaaaaaatctgcttgtgagtgga

SEQ ID NO: 643995 - DNA, 120 bp, Artificial Sequence
  ENSG00000182158_65 (sequence is synthesized)
aaaatgctgctcatcattgctgcaagtcagtgcaacaaactgtgcatatgaattactgttgaaagaggtattggtttagcagcacaaatgattgggttatatttctctcaaactaaggga

SEQ ID NO: 643996 - DNA, 120 bp, Artificial Sequence
  ENSG00000182158_66 (sequence is synthesized)
gcatgtggcaagttgggcagggtcttgttttatttccctagagctgggtttctcagtcttccaaaaggaatcttctgtgaaagtccaatgtttaaaaagtggtaaaagtggagcttctcc

SEQ ID NO: 643997 - DNA, 120 bp, Artificial Sequence
  ENSG00000182158_67 (sequence is synthesized)
ctttgaagaggcaagtgggggttcccctggggcccctcatccactggactgcggcatcactgggaattctccagagcttgacagagcacagtttgcaaactgctgttctagactgtgttc

SEQ ID NO: 643998 - DNA, 120 bp, Artificial Sequence
  ENSG00000182158_68 (sequence is synthesized)
cctgatccattctgacatctaatttttgagttctgataagggagagggaagcagatgagggaaagagtctgtcgctttctgtgacgttttaagagaactgctgtgtttctgcctccactg

SEQ ID NO: 643999 - DNA, 120 bp, Artificial Sequence
  ENSG00000182158_69 (sequence is synthesized)
gtttctgcctccactgagtggaattgtatgagtaatgtaatgcaatgtatatagtaagggcttgtaaagtgaaattaaataaacagcaaggtcagggccgggcgtggtggctcacgcctg

SEQ ID NO: 644000 - DNA, 120 bp, Artificial Sequence
  ENSG00000182162_0 (sequence is synthesized)
attcggagacagtcgtgccagccggtgggccacccagcgaagcggccgcctttgcaaggttgctggacagatggaactggaagggcagccgtctgccgcccacgaacaccttctcaagca

SEQ ID NO: 644001 - DNA, 120 bp, Artificial Sequence
  ENSG00000182162_1 (sequence is synthesized)
ctttgagtgaccacggcttgcaagctggtggctggccccccgagtcccgggctctgaggcacggccgtcgacttaagcgttgcatcctgttacctggagaccctctgagctctcacctgc

SEQ ID NO: 644002 - DNA, 120 bp, Artificial Sequence
  ENSG00000182162_2 (sequence is synthesized)
tacttctgccgctgcttctgcacagagcccgggcgaggacccctccaggatgcaggtcccgaacagcaccggcccggacaacgcgacgctgcagatgctgcggaacccggcgatcgcggt

SEQ ID NO: 644003 - DNA, 120 bp, Artificial Sequence
  ENSG00000182162_3 (sequence is synthesized)
ggccctgcccgtggtgtactcgctggtggcggcggtcagcatcccgggcaacctcttctctctgtgggtgctgtgccggcgcatggggcccagatccccgtcggtcatcttcatgatcaa

SEQ ID NO: 644004 - DNA, 120 bp, Artificial Sequence
  ENSG00000182162_4 (sequence is synthesized)
cctgagcgtcacggacctgatgctggccagcgtgttgcctttccaaatctactaccattgcaaccgccaccactgggtattcggggtgctgctttgcaacgtggtgaccgtggcctttta

SEQ ID NO: 644005 - DNA, 120 bp, Artificial Sequence
  ENSG00000182162_5 (sequence is synthesized)
cgcaaacatgtattccagcatcctcaccatgacctgtatcagcgtggagcgcttcctgggggtcctgtacccgctcagctccaagcgctggcgccgccgtcgttacgcggtggccgcgtg

SEQ ID NO: 644006 - DNA, 120 bp, Artificial Sequence
  ENSG00000182162_6 (sequence is synthesized)
tgcagggacctggctgctgctcctgaccgccctgtccccgctggcgcgcaccgatctcacctacccggtgcacgccctgggcatcatcacctgcttcgacgtcctcaagtggacgatgct

SEQ ID NO: 644007 - DNA, 120 bp, Artificial Sequence
  ENSG00000182162_7 (sequence is synthesized)
ccccagcgtggccatgtgggccgtgttcctcttcaccatcttcatcctgctgttcctcatcccgttcgtgatcaccgtggcttgttacacggccaccatcctcaagctgttgcgcacgga

SEQ ID NO: 644008 - DNA, 120 bp, Artificial Sequence
  ENSG00000182162_8 (sequence is synthesized)
ggaggcgcacggccgggagcagcggaggcgcgcggtgggcctggccgcggtggtcttgctggcctttgtcacctgcttcgcccccaacaacttcgtgctcctggcgcacatcgtgagccg

SEQ ID NO: 644009 - DNA, 120 bp, Artificial Sequence
  ENSG00000182162_9 (sequence is synthesized)
cctgttctacggcaagagctactaccacgtgtacaagctcacgctgtgtctcagctgcctcaacaactgtctggacccgtttgtttattactttgcgtcccgggaattccagctgcgcct

SEQ ID NO: 644010 - DNA, 120 bp, Artificial Sequence
  ENSG00000182162_10 (sequence is synthesized)
gcgggaatatttgggctgccgccgggtgcccagagacaccctggacacgcgccgcgagagcctcttctccgccaggaccacgtccgtgcgctccgaggccggtgcgcaccctgaagggat

SEQ ID NO: 644011 - DNA, 120 bp, Artificial Sequence
  ENSG00000182162_11 (sequence is synthesized)
ggagggagccaccaggcccggcctccagaggcaggagagtgtgttctgagtcccgggggcgcagcttggagagccgggggcgcagcttggagatccaggggcgcatggagaggccacggt

SEQ ID NO: 644012 - DNA, 120 bp, Artificial Sequence
  ENSG00000182162_12 (sequence is synthesized)
gccagaggttcagggagaacagctgcgttgctcccaggcactgcagaggcccggtggggaagggtctccaggctttattcctcccaggcactgcagaggcaccggtgaggaagggtctcc

SEQ ID NO: 644013 - DNA, 120 bp, Artificial Sequence
  ENSG00000182162_13 (sequence is synthesized)
aggcttcactcagggtagagaaacaagcaaagcccagcagcgcacagggtgcttgttatcctgcagagggtgcctctgcctctctgtgtcaggggacagcttgtgtcaccacgcccggct

SEQ ID NO: 644014 - DNA, 120 bp, Artificial Sequence
  ENSG00000182162_14 (sequence is synthesized)
aatttttgtattttttttagtagagctgggctgtcacccccgagctccttagacactcctcacacctgtccatacccgagggtggatattcaaccagccccaccgcctacccgactcggt

SEQ ID NO: 644015 - DNA, 120 bp, Artificial Sequence
  ENSG00000182162_15 (sequence is synthesized)
ttctggatatcctccgtgggcgaactgcgagccccattcccagctcttctccctgctgacatcgtcccttagttgtggttctggccttctccattctcctccaggggttctggtctccgt

SEQ ID NO: 644016 - DNA, 120 bp, Artificial Sequence
  ENSG00000182162_16 (sequence is synthesized)
agcccggtgcacgccgaaatttctgtttatttcactcaggggcactgtggttgctgtggttggaattcttctttcagaggagcgcctggggctcctgcaagtcagctactctccgtgccc

SEQ ID NO: 644017 - DNA, 120 bp, Artificial Sequence
  ENSG00000182162_17 (sequence is synthesized)
ctggcttggtgggaccccacccctattctgcttctgtgagtccctgatagagaaggaggtcccatcaggcccctggaacacactcaggcttccctgactcaggacaaggaccacgggagg

SEQ ID NO: 644018 - DNA, 120 bp, Artificial Sequence
  ENSG00000182162_18 (sequence is synthesized)
cccaggtgcggaaaggaggctccgtgagatggggtccagcccatcccaacacaagggtgcagcttgattcgggagttccccacctcctgcccattctccgcgtccttttaccccatggag

SEQ ID NO: 644019 - DNA, 120 bp, Artificial Sequence
  ENSG00000182162_19 (sequence is synthesized)
agcctcagccatggcaagtccatctggagtccaggaagcaggcaactggcctgacccatgagaccgtttggagaccaagcagcagatgcaggtgtggaccccaggaacctacaggggtgt

SEQ ID NO: 644020 - DNA, 120 bp, Artificial Sequence
  ENSG00000182162_20 (sequence is synthesized)
cagccgctgagccccctccctgctgtgtgggtggtgagcaggctgggtctttgtctgtcttcttctacacggcatgtgcctgcaccagccccaacacctgagctggtttagcgcaaagaa

SEQ ID NO: 644021 - DNA, 120 bp, Artificial Sequence
  ENSG00000182162_21 (sequence is synthesized)
gagctctgactctccaggggtgctgggacatcacgtggaattggatcccaggctctcttgggcgagaaagaccattctggaggtgggagtgggagagctgcctgtctgcccacgggctct

SEQ ID NO: 644022 - DNA, 120 bp, Artificial Sequence
  ENSG00000182162_22 (sequence is synthesized)
gcgtctccgcagtgggtggccttggatgcccggcccctccctttctgtgcactggggacgctgatggaggctgaagctgctgttcggaggccctctattggtgcctctctcctgccgtca

SEQ ID NO: 644023 - DNA, 120 bp, Artificial Sequence
  ENSG00000182162_23 (sequence is synthesized)
tcactatggcaggaaaacagagatggtttagtaatgaattatcattcccaaacccgtgtccacctggaacatcaggatgggaccatgtttgaaaatcgggtctttccaaatgtaattaag

SEQ ID NO: 644024 - DNA, 120 bp, Artificial Sequence
  ENSG00000182162_24 (sequence is synthesized)
taaggcgaggccatactgcatttacaatgggcccaatccagtgtccctatgagagacggaagaggagacacagacacaaagcaggaggccacataaagacagaggcagagactgaagtga

SEQ ID NO: 644025 - DNA, 88 bp, Artificial Sequence
  ENSG00000182162_25 (sequence is synthesized)
ctctggagggaactggatacaattgcagagtgcactaaacagttgccccagaaagacatgtcttgttttaaagcccagaacctgaaat

SEQ ID NO: 644026 - DNA, 120 bp, Artificial Sequence
  ENSG00000182162_26 (sequence is synthesized)
cagaaagacatgtcttgttttaaagcccagaacctgaaattattatagattttattcggtaataaggaactttgcatgtgtaattacttaaggatatgaagatgagattgtgctggatta

SEQ ID NO: 644027 - DNA, 89 bp, Artificial Sequence
  ENSG00000182162_27 (sequence is synthesized)
taattacttaaggatatgaagatgagattgtgctggattattaagcaccctaaatgccatgacaggtgtccttcccaggaggacacgtg

SEQ ID NO: 644028 - DNA, 120 bp, Artificial Sequence
  ENSG00000182162_28 (sequence is synthesized)
caggaaggatcctcccctagagcctccagggggaactggaggatgcgtaagagacccagaacttccacagaaggaggaaaattaacctcctgcttctctagactgttccaaagctgaacc

SEQ ID NO: 644029 - DNA, 120 bp, Artificial Sequence
  ENSG00000182162_29 (sequence is synthesized)
cctgcttctctagactgttccaaagctgaaccctagaaagcaaagctgatacagaagcatccaggctgcaggagtacaggtcgcaagtgctgagcgtgggccttgggtgtgtctcatggg

SEQ ID NO: 644030 - DNA, 120 bp, Artificial Sequence
  ENSG00000182162_30 (sequence is synthesized)
ggaaaaaaaactgtgaaaaacctcagagtagcatcttcacagtaacgcacggacgatccctaaactgccttgtaaacaaaaatgagagcttgagtcagaggaagccgagacaatatcctt

SEQ ID NO: 644031 - DNA, 120 bp, Artificial Sequence
  ENSG00000182162_31 (sequence is synthesized)
cctcgacaacgtgcgagaaccctgacgtcccccagcaaaggaagacgttgcaagcaggcaaaatgcgtcgattttttttttttgtcagtatgatgatttttgcagccacttggctatgga

SEQ ID NO: 644032 - DNA, 120 bp, Artificial Sequence
  ENSG00000182162_32 (sequence is synthesized)
gagcagccgacaccccctcttacagccgtggatgtttcctggaagctgactcagtctgttcactggttgagctttgagtgaaaagataacacaggtctattgactcacacacatgtttta

SEQ ID NO: 644033 - DNA, 120 bp, Artificial Sequence
  ENSG00000182162_33 (sequence is synthesized)
agatggaaaactttacttctgttcttggcaggacatggagagagggagggattccaaaaagtctcagcctccatcaaggcgtggcagctcatgccggtaatctcagcactttgggaggct

SEQ ID NO: 644034 - DNA, 120 bp, Artificial Sequence
  ENSG00000182162_34 (sequence is synthesized)
tctcagcactttgggaggctcaggcgggaggactgattgagtccgggtgttcaagggccaacctaggcaacacagtgagaactcatctctgtaaaaaataaaaataaaacattaaaaaaa

SEQ ID NO: 644035 - DNA, 120 bp, Artificial Sequence
  ENSG00000182162_35 (sequence is synthesized)
gagcagcttgctgggtctccggaggctgctggtgtctgtctcaaggtgcggtgcaggcacagccagtgggatttttttcccagcagagcagagagctggccctccactcctgctcctgtg

SEQ ID NO: 644036 - DNA, 120 bp, Artificial Sequence
  ENSG00000182168_0 (sequence is synthesized)
gttatttcttcggactgcttcgcggtgcacggattcagcttctgcccagtggggctttcagctgtttgcgcgtctctctgtccccctcccctccccccggcacacctctgtctacgatga

SEQ ID NO: 644037 - DNA, 120 bp, Artificial Sequence
  ENSG00000182168_1 (sequence is synthesized)
ggaaaggtctgcgggcgacagcggcccgctgcggactgggactgggatacttgctgcaaatgctcgtgctacctgccctggccctgctcagcgccagcggcactggctccgccgcccaag

SEQ ID NO: 644038 - DNA, 120 bp, Artificial Sequence
  ENSG00000182168_2 (sequence is synthesized)
atgatgacttttttcatgaactcccagaaacttttccttctgatccacctgagcctctgccacatttccttattgagcctgaagaagcttatattgtgaagaataagcccgtgaacctgt

SEQ ID NO: 644039 - DNA, 120 bp, Artificial Sequence
  ENSG00000182168_3 (sequence is synthesized)
actgtaaagcaagccctgccacccagatctatttcaagtgtaatagtgaatgggttcatcagaaggaccacatagtagatgaaagagtagatgaaacttccggtctcattgtccgggaag

SEQ ID NO: 644040 - DNA, 120 bp, Artificial Sequence
  ENSG00000182168_4 (sequence is synthesized)
tgagcattgagatttcgcgccagcaagtggaagaactctttggacctgaagattactggtgccagtgtgtggcctggagctccgcgggtaccacaaagagccggaaggcgtatgtgcgca

SEQ ID NO: 644041 - DNA, 120 bp, Artificial Sequence
  ENSG00000182168_5 (sequence is synthesized)
ttgcatatctacggaagacatttgagcaggaacccctaggaaaggaagtgtctttggaacaggaagtcttactccagtgtcgaccacctgaagggatcccagtggctgaggtggaatggt

SEQ ID NO: 644042 - DNA, 120 bp, Artificial Sequence
  ENSG00000182168_6 (sequence is synthesized)
tgaaaaatgaagacataattgatcccgttgaagatcggaatttttatattactattgatcacaacctcatcataaagcaggcccgactctctgatactgcaaattacacctgtgttgcca

SEQ ID NO: 644043 - DNA, 120 bp, Artificial Sequence
  ENSG00000182168_7 (sequence is synthesized)
aaaacattgttgccaagaggaaaagtacaactgccactgtcatagtctatgtcaacggtggctggtccacctggacggagtggtctgtgtgtaacagccgctgtggacgagggtatcaga

SEQ ID NO: 644044 - DNA, 120 bp, Artificial Sequence
  ENSG00000182168_8 (sequence is synthesized)
aacgtacaaggacttgtaccaacccggcaccactcaatgggggtgccttctgtgaagggcagagtgtgcagaaaatagcctgtactacgttatgcccagtggatggcaggtggacgccat

SEQ ID NO: 644045 - DNA, 120 bp, Artificial Sequence
  ENSG00000182168_9 (sequence is synthesized)
ggagcaagtggtctacttgtggaactgagtgcacccactggcgcaggagggagtgcacggcgccagcccccaagaatggaggcaaggactgcgacggcctcgtcttgcaatccaagaact

SEQ ID NO: 644046 - DNA, 120 bp, Artificial Sequence
  ENSG00000182168_10 (sequence is synthesized)
gcactgatgggctttgcatgcagactgctcctgattcagatgatgttgctctctatgttgggattgtgatagcagtgatcgtttgcctggcgatctctgtagttgtggccttgtttgtgt

SEQ ID NO: 644047 - DNA, 120 bp, Artificial Sequence
  ENSG00000182168_11 (sequence is synthesized)
atcggaagaatcatcgtgactttgagtcagatattattgactcttcggcactcaatgggggctttcagcctgtgaacatcaaggcagcaagacaagatctgctggctgtacccccagacc

SEQ ID NO: 644048 - DNA, 120 bp, Artificial Sequence
  ENSG00000182168_12 (sequence is synthesized)
tcacgtcagctgcagccatgtacagaggacctgtctatgccctgcatgacgtctcagacaaaatcccaatgaccaactctccaattctggatccactgcccaacctgaaaatcaaagtgt

SEQ ID NO: 644049 - DNA, 120 bp, Artificial Sequence
  ENSG00000182168_13 (sequence is synthesized)
acaacacctcaggtgctgtcaccccccaagatgacctctctgagtttacgtccaagctgtcccctcagatgacccagtcgttgttggagaatgaagccctcagcctgaagaaccagagtc

SEQ ID NO: 644050 - DNA, 120 bp, Artificial Sequence
  ENSG00000182168_14 (sequence is synthesized)
tagcaaggcagactgatccatcctgtaccgcatttggcagcttcaactcgctgggaggtcaccttattgttcccaattcaggagtcagcttgctgattcccgctggggccattccccaag

SEQ ID NO: 644051 - DNA, 120 bp, Artificial Sequence
  ENSG00000182168_15 (sequence is synthesized)
ggagagtctacgaaatgtatgtgactgtacacaggaaagaaactatgaggccacccatggatgactctcagacacttttgacccctgtggtgagctgtgggcccccaggagctctgctca

SEQ ID NO: 644052 - DNA, 120 bp, Artificial Sequence
  ENSG00000182168_16 (sequence is synthesized)
cccgcccagtcgtcctcactatgcatcactgcgcagaccccaataccgaggactggaaaatactgctcaagaaccaggcagcacagggacagtgggaggatgtggtggtggtcggggagg

SEQ ID NO: 644053 - DNA, 120 bp, Artificial Sequence
  ENSG00000182168_17 (sequence is synthesized)
aaaacttcaccaccccctgctacattcagctggatgcagaggcctgccacatcctcacagagaacctcagcacctacgccctggtaggacattccaccaccaaagcggctgcgaagcgcc

SEQ ID NO: 644054 - DNA, 120 bp, Artificial Sequence
  ENSG00000182168_18 (sequence is synthesized)
tcaagctggccatctttgggcccctgtgctgctcctcgctggagtacagcatccgagtctactgtctggatgacacccaggatgccctgaaggaaattttacatcttgagagacagatgg

SEQ ID NO: 644055 - DNA, 120 bp, Artificial Sequence
  ENSG00000182168_19 (sequence is synthesized)
gaggacagctcctagaagaacctaaggctcttcattttaaaggcagcacccacaacctgcgcctgtcaattcacgatatcgcccattccctctggaagagcaaattgctggctaaatatc

SEQ ID NO: 644056 - DNA, 120 bp, Artificial Sequence
  ENSG00000182168_20 (sequence is synthesized)
aggaaattccattttaccatgtttggagtggatctcaaagaaacctgcactgcaccttcactctggaaagatttagcctgaacacagtggagctggtttgcaaactctgtgtgcggcagg

SEQ ID NO: 644057 - DNA, 120 bp, Artificial Sequence
  ENSG00000182168_21 (sequence is synthesized)
tggaaggagaagggcagatcttccagctcaactgcaccgtgtcagaggaacctactggcatcgatttgccgctgctggatcctgcgaacaccatcaccacggtcacggggcccagtgctt

SEQ ID NO: 644058 - DNA, 120 bp, Artificial Sequence
  ENSG00000182168_22 (sequence is synthesized)
tcagcatccctctccctatccggcagaagctctgtagcagcctggatgccccccagacgagaggccatgactggaggatgctggcccataagctgaacctggacaggtacttgaattact

SEQ ID NO: 644059 - DNA, 120 bp, Artificial Sequence
  ENSG00000182168_23 (sequence is synthesized)
ttgccaccaaatccagcccaactggcgtaatcctggatctttgggaagcacagaacttcccagatggaaacctgagcatgctggcagctgtcttggaagaaatgggaagacatgaaacgg

SEQ ID NO: 644060 - DNA, 120 bp, Artificial Sequence
  ENSG00000182168_24 (sequence is synthesized)
tggtgtccttagcagcagaagggcagtattaaccaccatgctggaaggggaaatgaaggacaaaaatgcacagggagtctgtggccgtccaggtgaatcacagctgaggaggaaatccag

SEQ ID NO: 644061 - DNA, 120 bp, Artificial Sequence
  ENSG00000182168_25 (sequence is synthesized)
atgagaccaatgcacttcacaggcaagactgcagcaggagccagaaggaaaacagatacaactgcccatgtacatgcccactttactcggacatcatcacgggagttaagaaaaattgtg

SEQ ID NO: 644062 - DNA, 120 bp, Artificial Sequence
  ENSG00000182168_26 (sequence is synthesized)
taaatttgtaccttgaatttagctatcaacctaattttcctcttagttgggctgtatgctgtgtggtacaggatcttacagtttcctaggaaacgctttttattgctatccagatatatg

SEQ ID NO: 644063 - DNA, 120 bp, Artificial Sequence
  ENSG00000182168_27 (sequence is synthesized)
gataaactttcttaacaaacccaatttctacaaatgttgtttacatcaaattggacagggatgcagacactgtccatggctcgttctatttttgttcaaatcatttgaagttgaagctgt

SEQ ID NO: 644064 - DNA, 120 bp, Artificial Sequence
  ENSG00000182168_28 (sequence is synthesized)
ggacggtttgttgtgtctatttcagattagtaatttacagagaaatcacagacttttgctacaaatcgtgtgcatcaagtgtctcagataatcctcccatcagtgttctgtttctagaac

SEQ ID NO: 644065 - DNA, 120 bp, Artificial Sequence
  ENSG00000182168_29 (sequence is synthesized)
ttgtagaaccagtgttactgtttgtatcagggaagtggagaatctaagtgtaaaaaagaaataactaagactcctattccttggagggacccttctggtgccctttgggaataaagctgt

SEQ ID NO: 644066 - DNA, 120 bp, Artificial Sequence
  ENSG00000182168_30 (sequence is synthesized)
agcactgcagggaagacagtgattcatgttcaaccccacaaacaagcatttttttcacaacatgtgtgtttgtttgtaatatgcaatatgaagtgtttttttttaaaggtattattatta

SEQ ID NO: 644067 - DNA, 120 bp, Artificial Sequence
  ENSG00000182168_31 (sequence is synthesized)
tttacaggtattctggtaaaatgatttttttaaatttctatttttgttagcagtgctgtttgttagtatttggttattgactagacctgtcccaccttttcacctatcaaggtgggtgtg

SEQ ID NO: 644068 - DNA, 120 bp, Artificial Sequence
  ENSG00000182168_32 (sequence is synthesized)
gtcatcagtttaattcaacatgcatcacttccttgaccttttacctttcccttattccaccccagaaaggtgattgataaatgctgaatggctttgtcagtctgttccttcagcttgctc

SEQ ID NO: 644069 - DNA, 120 bp, Artificial Sequence
  ENSG00000182168_33 (sequence is synthesized)
aggcagggtctttctttctcctctgaggagtcttaaggagacgtgttctctattaagttcacttaatattgccgttgtgtggccccacgtcgactccctatggtgctctactctagaggc

SEQ ID NO: 644070 - DNA, 120 bp, Artificial Sequence
  ENSG00000182168_34 (sequence is synthesized)
agtgtggttggaggaatggactctaaactggagatcaagaaaccagttctcattgtgggtctgtcactgtcttgttgcgccaccttgagaaagtcatttaaccacacgacctcagtgtcc

SEQ ID NO: 644071 - DNA, 120 bp, Artificial Sequence
  ENSG00000182168_35 (sequence is synthesized)
tcactagaaagtgaaagggtgggattagatcatctccaagttctgaaatgctcaacttccaccgtgatgcctccagtctcattcatcagtctgaagaccacaatggactctgacctggat

SEQ ID NO: 644072 - DNA, 120 bp, Artificial Sequence
  ENSG00000182168_36 (sequence is synthesized)
catcatttaaaaatcatcagctggtcttttgcccaggctatgttacgcctttcaagtagttctgacaaggaagatgattattctaaccagcattatgatgttgtttgtttggcctgagtc

SEQ ID NO: 644073 - DNA, 120 bp, Artificial Sequence
  ENSG00000182168_37 (sequence is synthesized)
gctctgcatcattgcattatgctgttcactgagagatgacatccctttattatcattttcttagcctctcttgggatgcccctgcccccagccttcctgactggttgcaaattctgtttt

SEQ ID NO: 644074 - DNA, 120 bp, Artificial Sequence
  ENSG00000182168_38 (sequence is synthesized)
ttattattgtcttggcatcttgatatctagaccactcctacaagtttatctggcagtaggaacttggtgcatttttttctacgctacacccccccacccttaatctttctttgctgtcat

SEQ ID NO: 644075 - DNA, 120 bp, Artificial Sequence
  ENSG00000182168_39 (sequence is synthesized)
aatattcagtagcatttataaaagctgtctagttagctctttaaaaacttttgtcctgcaaaatgtttgttagtcaacacactactttgtgtaaacaactattatgtttccttgggacca

SEQ ID NO: 644076 - DNA, 120 bp, Artificial Sequence
  ENSG00000182168_40 (sequence is synthesized)
aggtggggattaaagaatcaaagcccagtagcaaaaccaaaactgaagaacaagcagacatgtgtatgaatcggaacctttagaacatgactgtggtttacttttaggctggaggcacac

SEQ ID NO: 644077 - DNA, 120 bp, Artificial Sequence
  ENSG00000182168_41 (sequence is synthesized)
aagttgctgaacagacttgaattatacatgtgcttccatctttccatgtttccgctcctattttggtagcatcttgagattccttgatgcctccgccatcctcatccctgaggaactgct

SEQ ID NO: 644078 - DNA, 120 bp, Artificial Sequence
  ENSG00000182168_42 (sequence is synthesized)
gataccttgctatggaacctcttctttctttcatgctttttattccgtatcttctgttttggacatacatacatatattctataaaatctctctcagcccaccccctgcattaggatttc

SEQ ID NO: 644079 - DNA, 120 bp, Artificial Sequence
  ENSG00000182168_43 (sequence is synthesized)
catatttaaaatatttgtacactgactggggaagggagagattgcactataaacaagttcagtggatgtttgtagcaatgagtaaaactgtattctaaattaaaaatcaaatatatatac

SEQ ID NO: 644080 - DNA, 120 bp, Artificial Sequence
  ENSG00000182168_44 (sequence is synthesized)
acgcagttatacacacacattttttaaaaggaggaggaggaaagagagctattgtccattcctacattttgaaataaacttgtcaagattacgcatcagtaccagggttgtggaatcatc

SEQ ID NO: 644081 - DNA, 120 bp, Artificial Sequence
  ENSG00000182168_45 (sequence is synthesized)
tatggaaatcaagaactagaatctgaactgaatggtcaaagaaacttctatgcctagtgaaaactagaggggagcaactatgtagctatgaacatgaatcaattccataactgttactaa

SEQ ID NO: 644082 - DNA, 120 bp, Artificial Sequence
  ENSG00000182168_46 (sequence is synthesized)
aaacttattttgactaaaaagtcaccaacacagaactattgaacacaaacaggaattgtttgtcttactgaagtcactgagaacccttggggttcacttcagatgcttttttggttcaac

SEQ ID NO: 644083 - DNA, 120 bp, Artificial Sequence
  ENSG00000182168_47 (sequence is synthesized)
ttcccaccaccagaaaagggaaaagtgattgatttcgtgtgtgaggtactcatctgtcagaacccttaatgtttcctattaagtgaatgacaacttccatacatacactatttataccaa

SEQ ID NO: 644084 - DNA, 120 bp, Artificial Sequence
  ENSG00000182168_48 (sequence is synthesized)
ataattttcactacaaattctgatttccttctcctttggagtaaagtaatagctgttagattgctttcaaacttagaaggtccagatataacagttcatttcataggaagccacttcatc

SEQ ID NO: 644085 - DNA, 120 bp, Artificial Sequence
  ENSG00000182168_49 (sequence is synthesized)
aaccattctatgtgatacatcctgcttctttctacaccgctggagaggcagtttggctggtttcatttggatagaaaaaactatcatttgtgcatgctgccatctagtggtgtacaacac

SEQ ID NO: 644086 - DNA, 120 bp, Artificial Sequence
  ENSG00000182168_50 (sequence is synthesized)
aatctaacctgagtttaatattcactagaatgtgtttgacgaagggaatgaaaacctgtagagttcaaggacctttatgacaaacagatgtagggaaattttcacttcaaatttataatt

SEQ ID NO: 644087 - DNA, 120 bp, Artificial Sequence
  ENSG00000182168_51 (sequence is synthesized)
ttcttattctcacttttttttcatttgcatcactcatctcaatattaggtcactgtgagcccagtacatcaactcattcatacacaacatatcttcagttgcttcttgtaacagaactat

SEQ ID NO: 644088 - DNA, 120 bp, Artificial Sequence
  ENSG00000182168_52 (sequence is synthesized)
gtaaaatctatataaaacagtctttgaagagttgtcatttttaacacttatggttttcattggggtttgtatactttaaatctccttttagttccttaatatttatctttggaaatgtaa

SEQ ID NO: 644089 - DNA, 120 bp, Artificial Sequence
  ENSG00000182168_53 (sequence is synthesized)
gaagtatctgcttagaaagaaataagtcttatatatgcgaatggaatactatgtctagggaagagaaaattggggttgttaatcaaagggaagaaagcagcttcttttctgctgaatttg

SEQ ID NO: 644090 - DNA, 120 bp, Artificial Sequence
  ENSG00000182168_54 (sequence is synthesized)
ggaatccaaaggcagaggtttcatcctgtttttattttcttcttatcacactctttcaagtttccttaatgtatctggaaggaatagaagttggattcagaattgataactggcatggtg

SEQ ID NO: 644091 - DNA, 120 bp, Artificial Sequence
  ENSG00000182168_55 (sequence is synthesized)
atgacaaacctgtgtaacaccaaggttctcacagctaacagctgtttcacaaacggcatcttccaaatgaacagtcacctctgctatgcagaaaacccccatcctgctgtgagcaagtta

SEQ ID NO: 644092 - DNA, 120 bp, Artificial Sequence
  ENSG00000182168_56 (sequence is synthesized)
ggctcttcaagaactggacaacttttgggtgaggtgttcaatatcaaactgcataatcattagccattttcatatatactattttatagatttaagtctctcaactatcaaaaagtagag

SEQ ID NO: 644093 - DNA, 120 bp, Artificial Sequence
  ENSG00000182168_57 (sequence is synthesized)
cgattttcaggagaaaaaagtcgtggggactgagttcaggacaccctgaaactatgcgaccagtaatttttttaaggtattttttcctacaagtaaggtatctgaaaagtcaacgttttg

SEQ ID NO: 644094 - DNA, 120 bp, Artificial Sequence
  ENSG00000182168_58 (sequence is synthesized)
agggtggaatcaagacttttcacttctcctggcaaagagcaacaaggctcttgtctcgtgtccttctgtgtgtctctgtcaggatcacagcagctgtgctcttggtctgcttactcctct

SEQ ID NO: 644095 - DNA, 120 bp, Artificial Sequence
  ENSG00000182168_59 (sequence is synthesized)
gtaatccacgtatgcagaagggagttaataaggtgatcaccatctccccagaattcaaaggtctttgcctctataaggtctgcccctatggggccaggaaaatataaacctatataagga

SEQ ID NO: 644096 - DNA, 120 bp, Artificial Sequence
  ENSG00000182168_60 (sequence is synthesized)
cttgcaagagagcataaagaaggtagaaaaggtttacttgttgggttttcaagccttcaagttgaatgagtcttagcttttgctgggcagttgttctggacaagtcatcagtttcatgtg

SEQ ID NO: 644097 - DNA, 120 bp, Artificial Sequence
  ENSG00000182168_61 (sequence is synthesized)
gagaactcagtgtaagcccaaggctaatgaatgagaggggtcccatggaaacacagctgaaatgaaatgggactttatccatcttctttgagaatggaagagcttttgtgaagcagtaca

SEQ ID NO: 644098 - DNA, 120 bp, Artificial Sequence
  ENSG00000182168_62 (sequence is synthesized)
tcattgctcaagataatggttgataagcattagattttatagatctaataaggaaaatattttattatctcaagttaacaaaacatttttttacctctcgagtgcctcataggaccaact

SEQ ID NO: 644099 - DNA, 120 bp, Artificial Sequence
  ENSG00000182168_63 (sequence is synthesized)
attactctttggcttttatttttctttttgtattatttttatatattctttaaccttgctgagctagtattgactgaaatctttagaactttgcctctgggcaatgaagtaatgtttctc

SEQ ID NO: 644100 - DNA, 120 bp, Artificial Sequence
  ENSG00000182168_64 (sequence is synthesized)
taccctaagatatctatttgtataatctctggctgtaatgatcactttggaagatttcctttgcatctctaattatttctttttaatggaataaggcataagggggaataaatatattgt

SEQ ID NO: 644101 - DNA, 120 bp, Artificial Sequence
  ENSG00000182168_65 (sequence is synthesized)
aaccaatgttatgtaaacccatatccatacaggccaggaaagccaaatgaagtcatttccagaattctagtgtgaaaaacctatttttgaaaagtggggagatggctttgtgtagaactg

SEQ ID NO: 644102 - DNA, 120 bp, Artificial Sequence
  ENSG00000182168_66 (sequence is synthesized)
ggtgggttttctctgcagactaagtctagccatgagcttccagatcctttagttttatcagccttgtgcttaccccattttcataaatgctactttaacagccagtcttcataagtcatg

SEQ ID NO: 644103 - DNA, 120 bp, Artificial Sequence
  ENSG00000182168_67 (sequence is synthesized)
gttcctaggttttcctgtcacctcattgtattcatctgtggtaggatattaacgggctcattcaaccaaatgtaatgtgtgcctcagacctatttagcatggttggggggcatcagcagg

SEQ ID NO: 644104 - DNA, 120 bp, Artificial Sequence
  ENSG00000182168_68 (sequence is synthesized)
acaaaccaacaggtactccgcaagtgtactggcacagcaagcccaccaattattagcagctcttcatcagcctgctgtctactcagacgcttgcctactgaagggacctgtccagagatc

SEQ ID NO: 644105 - DNA, 120 bp, Artificial Sequence
  ENSG00000182168_69 (sequence is synthesized)
ttctggaatcccaggttgggaatctctgcagaatgtcgtgacagttgtggcccaactagcttctgagtagaaacaaggaagctaccctgagatatagtcagctgcccacctgccatagta

SEQ ID NO: 644106 - DNA, 120 bp, Artificial Sequence
  ENSG00000182168_70 (sequence is synthesized)
tttgctactgaatgccagccttttaacataccatttcagatttgtccttcaacaaaaatataaattgcaagtcataccatttaagggtcttttacaaatatgtctaaattgtgtgtcatt

SEQ ID NO: 644107 - DNA, 120 bp, Artificial Sequence
  ENSG00000182168_71 (sequence is synthesized)
tttaagttccaaaggtctactggactaagtactatcagaccagctgtagaacctgatggcgctgatccggggtggaataaccctcagtactggtgtgtagaagatgaattgtaggcaggt

SEQ ID NO: 644108 - DNA, 120 bp, Artificial Sequence
  ENSG00000182168_72 (sequence is synthesized)
tttgctgatcagcagcctaaggattgatgggctctcttttggcctctgatcctgagcactatggaggcagcatcagagaatggggacctgagctacataggttctcaatgttaaaacaac

SEQ ID NO: 644109 - DNA, 120 bp, Artificial Sequence
  ENSG00000182168_73 (sequence is synthesized)
tctgttcggagtgacatataagagcaagaaatctacagctggtgtaaaatacctttgccttttctatcccgaaagtaacaaatggcatctgtacatgtaggggtaaaaactcagatgtct

SEQ ID NO: 644110 - DNA, 120 bp, Artificial Sequence
  ENSG00000182168_74 (sequence is synthesized)
actcctccaggccatggacaagaaaaagtacagcagtcagaacagtggaacaagtgatttgcattctcttcttcacgctttcctagatctgccattggtagcgcagccctcgccctccag

SEQ ID NO: 644111 - DNA, 120 bp, Artificial Sequence
  ENSG00000182168_75 (sequence is synthesized)
acataatgcatcgagcccagttgcagggaacatcactgtgtgtgtgtgatgtcatggtgttatatgtgttgagtttaatgttgagctgaagcaagttggtgaccttcctctttgctcttt

SEQ ID NO: 644112 - DNA, 120 bp, Artificial Sequence
  ENSG00000182168_76 (sequence is synthesized)
gtaaagaagacaccaatgtttgtcagagaaaaatccccagcagtcgtgttgaagaggcagtgtcatccacctactgtcccctttggaacagttcaactgcagaaaggtcggattgaggtt

SEQ ID NO: 644113 - DNA, 120 bp, Artificial Sequence
  ENSG00000182168_77 (sequence is synthesized)
ttgtgctttgtcgtttttcttttttaaacaaaacatgacaaccttggcttttccgatatggaacacttttgttgttgtggagttccctcttgctgtatcttctatgcaattccttttcta

SEQ ID NO: 644114 - DNA, 120 bp, Artificial Sequence
  ENSG00000182168_78 (sequence is synthesized)
aaaaaaccccccggcagaggcagagtgccctccggatatctgtccggcgccttgctgagtggtggaggtgagggataccagctccgggtgtgcctcttttctctccctggctgccaatcc

SEQ ID NO: 644115 - DNA, 120 bp, Artificial Sequence
  ENSG00000182168_79 (sequence is synthesized)
tgattttccctgcagtccccttggtttgtaaattgcctgcatttattctgtcagccaacatgtacaaaatgtaagaaagaatttttaaacaggtaataaattatatttataagcaacaaa

SEQ ID NO: 644116 - DNA, 120 bp, Artificial Sequence
  ENSG00000182168_80 (sequence is synthesized)
cagacttcggcgtgcggcggagctgcggctgctcctgctgctggggggagcggcggaggtggccgccttgcgcctccctggacttcccaagtgggggcagagcagtcgctcgcgggagac

SEQ ID NO: 644117 - DNA, 120 bp, Artificial Sequence
  ENSG00000182168_81 (sequence is synthesized)
cgaaatgtatgtgactgtacacaggaaagaaactatgaggtaaatatgctttttctggtgcactgactttaccaatgtctaacttggaggagaattgtacaatagacacaataaacccaa

SEQ ID NO: 644118 - DNA, 120 bp, Artificial Sequence
  ENSG00000182168_82 (sequence is synthesized)
aacattgttgccaagaggaaaagtacaactgccactgtcatagtctatggtccttgagaaacagcgggctcaagatcactctgctagtcctgtctcttaaaagcaggagaggagattttc

SEQ ID NO: 644119 - DNA, 120 bp, Artificial Sequence
  ENSG00000182168_83 (sequence is synthesized)
agctgaaagatggcttccctataccagaaggaaagtaacattcttatcctcaaggacaggaagttgagaccacggggaagttacgatccagataattctgtatcgatcttattaaaataa

SEQ ID NO: 644120 - DNA, 120 bp, Artificial Sequence
  ENSG00000182168_84 (sequence is synthesized)
ctcttaatcttcttttagccttaacacataattgactttttcataacttgctactctttgtccaattcaatatataagcattcaactataactgcatctttgggtcttcattttcttagg

SEQ ID NO: 644121 - DNA, 120 bp, Artificial Sequence
  ENSG00000182168_85 (sequence is synthesized)
ccatgtaaaagttatattaagtaaatttacatgtttttctcctgttgatttgtgttacaccaatttaattcttaggcccagccaaaaaaaaaatcctaaaagagtggaagtaaaatattg

SEQ ID NO: 644122 - DNA, 120 bp, Artificial Sequence
  ENSG00000182168_86 (sequence is synthesized)
cctaccccacagtaccattcagatggatgtgtgtttatgagaagagaaaccactatgctgttccaaaggatgaatgtagtgctgctttaaaaatgtcattttaattacaggaaaaatggc

SEQ ID NO: 644123 - DNA, 120 bp, Artificial Sequence
  ENSG00000182168_87 (sequence is synthesized)
acaaaaattttttgatcctctgattaccctgaggtttaatttcctagtccagataatggctgtgttgaattgtatgcaattgcctttcttaaatcacaataaaatgttttcttcttctta

SEQ ID NO: 644124 - DNA, 120 bp, Artificial Sequence
  ENSG00000182170_0 (sequence is synthesized)
atgtttgggctgttcggcctctggagaaccttcgacagtgtggtcttctacctgacgctgatcgtgggcctcgggggaccggtaggtaacgggctggtgctctggaacctcggcttccgc

SEQ ID NO: 644125 - DNA, 120 bp, Artificial Sequence
  ENSG00000182170_1 (sequence is synthesized)
atcaagaagggccccttctccatctacctgctgcacctggccgccgccgacttcctgttcctctcctgccgtgtgggcttctccgtggctcaggctgccctgggcgcccaggacacactc

SEQ ID NO: 644126 - DNA, 120 bp, Artificial Sequence
  ENSG00000182170_2 (sequence is synthesized)
tacttcgtgctcaccttcctgtggttcgcggtggggctctggctgctggcggccttcagcgtggagcgctgcctctccgacctcttccccgcctgctaccagggctgccggcccagacac

SEQ ID NO: 644127 - DNA, 120 bp, Artificial Sequence
  ENSG00000182170_3 (sequence is synthesized)
accccgaccctgccggccgtgccgctgcccgccaacgcctgcggcctgctgcgcaacagcgcgtgccccctggtctgcccgcgctaccacgtggccagcgtcacctggttcctggtgctg

SEQ ID NO: 644128 - DNA, 120 bp, Artificial Sequence
  ENSG00000182170_4 (sequence is synthesized)
gcccgcgtcgcctggacggctggcgtggtcctctttgtctgggtgacctgctgctccactcgcccgcggcccaggctctacggcatcgtcctgggcgcgctgctcctgctcttcttctgt

SEQ ID NO: 644129 - DNA, 120 bp, Artificial Sequence
  ENSG00000182170_5 (sequence is synthesized)
ggcctgccctcggtcttctactggagcctgcagcccctgctgaacttcctgctgcccgtgttttccccgctggccacgctgctggcctgcgtcaacagcagctccaagcccctcatctac

SEQ ID NO: 644130 - DNA, 120 bp, Artificial Sequence
  ENSG00000182170_6 (sequence is synthesized)
tcggggttgggccgacagcccgggaagcgggagccgctgaggtcggtactgcggagggccctgggggagggcgccgagctgggtgccaggggacagtccctgcccatgggtctcctataa

SEQ ID NO: 644131 - DNA, 120 bp, Artificial Sequence
  ENSG00000182173_0 (sequence is synthesized)
gcgggatggagcccgagcccgagcccgcggccgtggaggttcccgcggggcgcgtgctcagcgcccgggagctcttcgccgcccgctcgcggtcgcagaagctgccccagcgctcgcatg

SEQ ID NO: 644132 - DNA, 120 bp, Artificial Sequence
  ENSG00000182173_1 (sequence is synthesized)
tcgcagaagctgccccagcgctcgcatggccccaaggactttctgcccgacggctcggcagctcaggccgagcggctgcgccggtgccgggaagagctctggcagctgctggcagagcag

SEQ ID NO: 644133 - DNA, 120 bp, Artificial Sequence
  ENSG00000182173_2 (sequence is synthesized)
cgcgtggagcgcctgggcagcttggtggctgccgagtggaggccagaagagggcttcgtggagttgaagtctcccgcgggcaaattctggcagaccatgggcttctcagagcagggccgg

SEQ ID NO: 644134 - DNA, 120 bp, Artificial Sequence
  ENSG00000182173_3 (sequence is synthesized)
cagcgccttcacccggaagaggccttgtatcttctggagtgtggctccatccacctcttccaccaagacctgccactgtctatccaggaagcttaccagctgctgctgaccgaccacact

SEQ ID NO: 644135 - DNA, 120 bp, Artificial Sequence
  ENSG00000182173_4 (sequence is synthesized)
gtgaccttcctgcagtaccaggtcttcagccacctgaagaggttgggttatgtggttcgacgattccaaccaagctctgtcctgtccccgtatgagaggcagcttaacctggatgccagc

SEQ ID NO: 644136 - DNA, 120 bp, Artificial Sequence
  ENSG00000182173_5 (sequence is synthesized)
gtgcagcacttggaggatggagatggcaagagaaagaggagcagctccagccctcggtccattaataagaaggccaaggccctggacaactccctgcaacccaagagtctggcagcctcc

SEQ ID NO: 644137 - DNA, 120 bp, Artificial Sequence
  ENSG00000182173_6 (sequence is synthesized)
agcccacctccctgcagccagcccagccaatgcccagaggagaaaccccaggagtcaagccccatgaagggcccagggggcccctttcagcttctggggtccctgggccccagccctggc

SEQ ID NO: 644138 - DNA, 120 bp, Artificial Sequence
  ENSG00000182173_7 (sequence is synthesized)
ccggccagggagggggtggggtgcagctgggagagtggcagagccgagaacggagtcacgggagccggtaagcggcgctggaacttcgagcagatctccttccccaacatggcttcagac

SEQ ID NO: 644139 - DNA, 120 bp, Artificial Sequence
  ENSG00000182173_8 (sequence is synthesized)
gcgcgccccagccccagagctgctcccggccaacgtggctgggcgggagacagacgctgagtcctggtgccagaagctgaaccagcgcaaggagaagctctccaggcgggaacgggagca

SEQ ID NO: 644140 - DNA, 120 bp, Artificial Sequence
  ENSG00000182173_9 (sequence is synthesized)
ccacgcggaggccgcgcagttccaggaagatgtcaacgccgatcccgaggtgcagcggtgctccagctggcgggagtacaaggagctgctgcagcggcggcaggtgcagaggagccagcg

SEQ ID NO: 644141 - DNA, 120 bp, Artificial Sequence
  ENSG00000182173_10 (sequence is synthesized)
ccgggcccctcacctgtggggccagcccgtcaccccgctgctgagtcctggccaggccagctccccagccgtggtccttcagcatatctctgtgctgcagacaacacaccttcctgatgg

SEQ ID NO: 644142 - DNA, 120 bp, Artificial Sequence
  ENSG00000182173_11 (sequence is synthesized)
aggtgcccggctgttggagaagtctgggggcttggaaatcatctttgatgtttaccaggccgacgctgtggccacattccgaaagaataaccctggcaaaccctatgcccggatgtgcat

SEQ ID NO: 644143 - DNA, 120 bp, Artificial Sequence
  ENSG00000182173_12 (sequence is synthesized)
tagtggatttgatgagcctgtcccagacctctgcagcctcaagcggttgtcttaccagagtggggatgtccctctgatctttgccctggtggatcatggtgacatctccttctacagctt

SEQ ID NO: 644144 - DNA, 120 bp, Artificial Sequence
  ENSG00000182173_13 (sequence is synthesized)
cagggacttcacgttgccccaggatgtggggcactgacctcacagctctgcagaggatggagcttgctccgggggaccgggactgtctgttctcagggaccatctcggctgcctcctgta

SEQ ID NO: 644145 - DNA, 120 bp, Artificial Sequence
  ENSG00000182173_14 (sequence is synthesized)
cccagactctaacctgtagcttcagaggccagtctgggccttggccctgggtgtctgatactcacagagtgaaactgtgaccctctcccttccctgctgccttgcagtgacccctctgga

SEQ ID NO: 644146 - DNA, 120 bp, Artificial Sequence
  ENSG00000182173_15 (sequence is synthesized)
actcaggactcgattttaaggacccaggaggtggggcagaagagaggactgtgtgcctttaacgagagggtgcctgcttcgtgctataaagccaaagccattaaaaatagatttcttttc

SEQ ID NO: 644147 - DNA, 120 bp, Artificial Sequence
  ENSG00000182173_16 (sequence is synthesized)
catcttcgagggccactggcagctgaggaatcacaggactttggaaagggcatggatgaactgggatggattgaggcttaaggaagatgtgggaggagggagtggacccacaagcacggt

SEQ ID NO: 644148 - DNA, 120 bp, Artificial Sequence
  ENSG00000182173_17 (sequence is synthesized)
ctggagtgtgtaagtggggcccgggaggtggggaaggagttgggaccaaagaacgggaaggacacgttttatcggagaaaaagcacacacaacccggtctttagagaactgataaccaaa

SEQ ID NO: 644149 - DNA, 120 bp, Artificial Sequence
  ENSG00000182173_18 (sequence is synthesized)
cttctaaagcaggaggtggtacgttgcagggagcagggattccagtccacattagtgatgctgccccactttcctggttggccacattcttgatgcgctgctgagagggggagggggagg

SEQ ID NO: 644150 - DNA, 120 bp, Artificial Sequence
  ENSG00000182173_19 (sequence is synthesized)
ggactttctgcccgacggctcggcagctcaggccgagcggctgcgccggtgccgggaagagctctggcagctgctggcagagcagcgcgtggagcgcctcttggtggctgccgagtggag

SEQ ID NO: 644151 - DNA, 120 bp, Artificial Sequence
  ENSG00000182173_20 (sequence is synthesized)
gccagaagagggcttcgtggagttgaagtctcccgcggtgagcggcgggctcggggaccggggaccgccctccctgccctccctgccctccctcccttgtgacacttgctctgggcccca

SEQ ID NO: 644152 - DNA, 120 bp, Artificial Sequence
  ENSG00000182173_21 (sequence is synthesized)
ggacggaagacaccgaaggaatggcgaacctccccggaccgctcctgacagttcccgggtggccttcggcctgcaaagtcggaatttgcacaccctccgctcgtccttccctgagccctt

SEQ ID NO: 644153 - DNA, 120 bp, Artificial Sequence
  ENSG00000182173_22 (sequence is synthesized)
ctgccctccttgcccagcccgggcggtggggactaagcagcgcgaggctgcagaggggcggtcacaagtgtgaccattcgcactgcactccagacgccggctcctcaggctttactggag

SEQ ID NO: 644154 - DNA, 84 bp, Artificial Sequence
  ENSG00000182173_23 (sequence is synthesized)
ataatttttcagtatatgttccaaaaattgcatgggatatgcttatactaaaaaaaaaaaaaaaatgttgctaggctggacacg

SEQ ID NO: 644155 - DNA, 60 bp, Artificial Sequence
  ENSG00000182173_24 (sequence is synthesized)
gaggcagaggtcaaaaaaaaaagttgctaaatctggccgtcctaaactagatggcagact

SEQ ID NO: 644156 - DNA, 80 bp, Artificial Sequence
  ENSG00000182175_0 (sequence is synthesized)
agttgtctcccgagcgctggctgcgccgcccgagccgctgggccggggaagcactggccgttcgctcccgggccggctcc

SEQ ID NO: 644157 - DNA, 80 bp, Artificial Sequence
  ENSG00000182175_1 (sequence is synthesized)
cagcgccagcggagcccctcccaccttgccccggggcagacgagcggcgccccgacaccccctcttctcccgcagccccg

SEQ ID NO: 644158 - DNA, 120 bp, Artificial Sequence
  ENSG00000182175_2 (sequence is synthesized)
ccagcgccaccccccgcgggccgcaggggctcatgcagccgccaagggagaggctagtggtaacaggccgagctggatggatgggtatggggagaggggcaggacgttcagccctgggat

SEQ ID NO: 644159 - DNA, 120 bp, Artificial Sequence
  ENSG00000182175_3 (sequence is synthesized)
tctggccgaccctcgccttccttctctgcagcttccccgcagccacctccccgtgcaagatcctcaagtgcaactctgagttctggagcgccacgtcgggcagccacgccccagcctcag

SEQ ID NO: 644160 - DNA, 120 bp, Artificial Sequence
  ENSG00000182175_4 (sequence is synthesized)
acgacacccccgagttctgtgcagccttgcgcagctacgccctgtgcacgcggcggacggcccgcacctgccggggtgacctggcctaccactcggccgtccatggcatagaggacctca

SEQ ID NO: 644161 - DNA, 120 bp, Artificial Sequence
  ENSG00000182175_5 (sequence is synthesized)
tgagccagcacaactgctccaaggatggccccacctcgcagccacgcctgcgcacgctcccaccggccggagacagccaggagcgctcggacagccccgagatctgccattacgagaaga

SEQ ID NO: 644162 - DNA, 120 bp, Artificial Sequence
  ENSG00000182175_6 (sequence is synthesized)
gctttcacaagcactcggccacccccaactacacgcactgtggcctcttcggggacccacacctcaggactttcaccgaccgcttccagacctgcaaggtgcagggcgcctggccgctca

SEQ ID NO: 644163 - DNA, 120 bp, Artificial Sequence
  ENSG00000182175_7 (sequence is synthesized)
tcgacaataattacctgaacgtgcaggtcaccaacacgcctgtgctgcccggctcagcggccactgccaccagcaagctcaccatcatcttcaagaacttccaggagtgtgtggaccaga

SEQ ID NO: 644164 - DNA, 120 bp, Artificial Sequence
  ENSG00000182175_8 (sequence is synthesized)
aggtgtaccaggctgagatggacgagctcccggccgccttcgtggatggctctaagaacggtggggacaagcacggggccaacagcctgaagatcactgagaaggtgtcaggccagcacg

SEQ ID NO: 644165 - DNA, 120 bp, Artificial Sequence
  ENSG00000182175_9 (sequence is synthesized)
tggagatccaggccaagtacatcggcaccaccatcgtggtgcgccaggtgggccgctacctgacctttgccgtccgcatgccagaggaagtggtcaatgctgtggaggactgggacagcc

SEQ ID NO: 644166 - DNA, 120 bp, Artificial Sequence
  ENSG00000182175_10 (sequence is synthesized)
agggtctctacctctgcctgcggggctgccccctcaaccagcagatcgacttccaggccttccacaccaatgctgagggcaccggtgcccgcaggctggcagccgccagccctgcaccca

SEQ ID NO: 644167 - DNA, 120 bp, Artificial Sequence
  ENSG00000182175_11 (sequence is synthesized)
cagcccccgagaccttcccatacgagacagccgtggccaagtgcaaggagaagctgccggtggaggacctgtactaccaggcctgcgtcttcgacctcctcaccacgggcgacgtgaact

SEQ ID NO: 644168 - DNA, 120 bp, Artificial Sequence
  ENSG00000182175_12 (sequence is synthesized)
tcacactggccgcctactacgcgttggaggatgtcaagatgctccactccaacaaagacaaactgcacctgtatgagaggactcgggacctgccaggcagggcggctgcggggctgcccc

SEQ ID NO: 644169 - DNA, 120 bp, Artificial Sequence
  ENSG00000182175_13 (sequence is synthesized)
tggccccccggcccctcctgggcgccctcgtcccgctcctggccctgctccctgtgttctgctagacgcgtagatgtggagggaggcgcgggctccgtcctctcggcttccccatgtgtg

SEQ ID NO: 644170 - DNA, 120 bp, Artificial Sequence
  ENSG00000182175_14 (sequence is synthesized)
ggctgggaccgcccacggggtgcagatctcctggcgtgtccaccatggccccgcagaacgccagggaccgcctgctgccaagggctcaggcacggacccctccccttctagtgcacgtga

SEQ ID NO: 644171 - DNA, 120 bp, Artificial Sequence
  ENSG00000182175_15 (sequence is synthesized)
caaggttgtggtgactggtgccatgatgtttgacagtagagctgtgtgagagggagagcagctcccctcgccccgcccctgcagtgtgaatgtgtgaaacatcccctcaggctgaagccc

SEQ ID NO: 644172 - DNA, 120 bp, Artificial Sequence
  ENSG00000182175_16 (sequence is synthesized)
cccacccccaccagagacacactgggaaccgtcagagtcagctccttccccctcgcaatgcactgaaaggcccggccgactgctgctcgccgatccgtggggccccctgtgcccgccaca

SEQ ID NO: 644173 - DNA, 120 bp, Artificial Sequence
  ENSG00000182175_17 (sequence is synthesized)
cgcacgcacacactcttacacgagagcacactcgatccccctaggccagcggggacaccccagccacacagggaggcatccttggggcttggccccaggcagggcaaccccggggcgctg

SEQ ID NO: 644174 - DNA, 120 bp, Artificial Sequence
  ENSG00000182175_18 (sequence is synthesized)
cttggcaccttagcagactgctggaaccttttggccagtaggtcgtgcccgcctggtgccttctggcctgtggcctccctgcccatgttcacctggctgctgtgggtaccagtgcaggtc

SEQ ID NO: 644175 - DNA, 120 bp, Artificial Sequence
  ENSG00000182175_19 (sequence is synthesized)
ccggttttcaggcacctgctcagctgcccgtctctggcctgggcccctgccccttccaccctgtgcttagaaagtcgaagtgcttggttctaaatgtctaaacagagaagagatccttga

SEQ ID NO: 644176 - DNA, 120 bp, Artificial Sequence
  ENSG00000182175_20 (sequence is synthesized)
cttctgttcctctctctcctgcagatgcaagagctcctgggcaggggtgcctgggccccagggtgtggcaggagacccagtggatggggccagctggcctgccctgatcctctgcttcct

SEQ ID NO: 644177 - DNA, 120 bp, Artificial Sequence
  ENSG00000182175_21 (sequence is synthesized)
cctcacaaccccaagagcccccagcccggtccatccacgtctggagtctggggagaggagcagggtcttaggactctcagctctgagcatccctggcagggtcttcaacctctaatctct

SEQ ID NO: 644178 - DNA, 120 bp, Artificial Sequence
  ENSG00000182175_22 (sequence is synthesized)
tcccttaagccctgtggccacacagccaggagagacttgccgctggctcccgcctcatttcagcccagggtgctcatccaggggcccagaacagtcccacctgtgctgctgtgcccacag

SEQ ID NO: 644179 - DNA, 120 bp, Artificial Sequence
  ENSG00000182175_23 (sequence is synthesized)
cacaaagccaggcttcactcccaaaagtgcagccaggccctggagggtgatcctgccagcagccctacagctccacaccctacccacccatcggcagcccctctgctgttccccagggac

SEQ ID NO: 644180 - DNA, 120 bp, Artificial Sequence
  ENSG00000182175_24 (sequence is synthesized)
ctctcatacactggccaggaggctgcagaacgtgtgtctccccctccctccaagaggtcctgctccctctgccagaaccgtgtgtgggcgggtgggagggcgctcggggcccggcccctc

SEQ ID NO: 644181 - DNA, 120 bp, Artificial Sequence
  ENSG00000182175_25 (sequence is synthesized)
cctctccctgctggttttagttggtccctatgttggaagtaaaaagtgaagcactttattttggttgtgtttgctcacgttctgcttggaagtggggacccctcactgcgtccacgtgtc

SEQ ID NO: 644182 - DNA, 120 bp, Artificial Sequence
  ENSG00000182175_26 (sequence is synthesized)
tgcgacctgtgtggagtgtcaccgcgtgtacatactgtaaattatttattaatggctaaatgcaagtaaagtttggtttttttgttattttcttttagacgtgttggagtttgttttctg

SEQ ID NO: 644183 - DNA, 120 bp, Artificial Sequence
  ENSG00000182175_27 (sequence is synthesized)
aacagactttggctcccttgaggcgggtggaggatggactttggtggtgggatcccctgcagcaagtgtgtgtgtgtgcgcgcatgtgtgtgtgcgcgcatgtgtgtatgcatgcctgtg

SEQ ID NO: 644184 - DNA, 120 bp, Artificial Sequence
  ENSG00000182175_28 (sequence is synthesized)
tgtgtgcgtgcctgtgtgcgtgcatgtacgcatgtgtgcgcatgcctgtgtgtgcgcccatgcctatgtgtgtgcatgtaggcatgtgtgtgcgcatgtgtatgtgcgtgagaatggtgt

SEQ ID NO: 644185 - DNA, 120 bp, Artificial Sequence
  ENSG00000182175_29 (sequence is synthesized)
gaaggcggatagaagatgcagcagtttaacagccaccacacattgcttttgtaaagtcacttttcctcctcacgatgagctgtctttggagcttggcaggcccagatcctcttgttctag

SEQ ID NO: 644186 - DNA, 120 bp, Artificial Sequence
  ENSG00000182175_30 (sequence is synthesized)
tgacagtggaacacagtcagggagacaggtgactatgtggtggagagacatatggtgccctctgggatgagatgggtgggatagcctgagatctgggatgactccctctcagccactgct

SEQ ID NO: 644187 - DNA, 120 bp, Artificial Sequence
  ENSG00000182175_31 (sequence is synthesized)
atcagcctggagccccagctgttgggactgcctgccaccctccctgccagtgcccatcttctcatagcccgggcggagcagtggtgctgcaggaggctgctgtccacgtcactgtgggac

SEQ ID NO: 644188 - DNA, 120 bp, Artificial Sequence
  ENSG00000182175_32 (sequence is synthesized)
caggtttattggcagctgtgatcacatttcatctgtacaaactacccagtgaatcaggaagaaattcaggcccattttgccgatgaaacagactctgagattaactgacttgcctagggc

SEQ ID NO: 644189 - DNA, 120 bp, Artificial Sequence
  ENSG00000182175_33 (sequence is synthesized)
tccttagcaacgggaaggacaacctgtgcacctaggttagtattgtcctgaagccccttctcttcaaactaaatgccatgaggcagaatagcagcacagttaagccagcctacatcctgg

SEQ ID NO: 644190 - DNA, 120 bp, Artificial Sequence
  ENSG00000182175_34 (sequence is synthesized)
cttctccacctccccagcagtgtgaccatgggcaagtcacttcacctctctgagcctgcatgctgttctctggaagatgggggggtgcctgtcccatacagttgtttggagagtcaggag

SEQ ID NO: 644191 - DNA, 120 bp, Artificial Sequence
  ENSG00000182175_35 (sequence is synthesized)
ttcattcctgtaaattgcttaggagagggcggggcacacatggcttgtctggtcgtggggagggagggggtggtattatcccaaagcaagataaatcagttaaggggagaaggaaagggg

SEQ ID NO: 644192 - DNA, 120 bp, Artificial Sequence
  ENSG00000182175_36 (sequence is synthesized)
cgatacagaccctggactcttgggagaggtgaacctgcaggctagcaaggggaggagtcccaagagtggccaagttcattaatcccaggcagaccaggaaggctgaagaaaaaggagaac

SEQ ID NO: 644193 - DNA, 79 bp, Artificial Sequence
  ENSG00000182175_37 (sequence is synthesized)
aatcccaggcagaccaggaaggctgaagaaaaaggagaactttattttatttttgaaatggagtctggccagctcactg

SEQ ID NO: 644194 - DNA, 120 bp, Artificial Sequence
  ENSG00000182175_38 (sequence is synthesized)
gggattacaggcgtgagccaccaccgtgcccggccaaaaaaggagaacgttctaaagccctgttcttgcagggctcccagagagaacacgggagttgggtttgggaggcaggaaccagac

SEQ ID NO: 644195 - DNA, 120 bp, Artificial Sequence
  ENSG00000182175_39 (sequence is synthesized)
agttgggtttgggaggcaggaaccagactggaaaggacaaaacgtacccagcatcttccctggcggccggaaccgtcactacaggccccgtgcccttagcagtcccagggacagagcgac

SEQ ID NO: 644196 - DNA, 120 bp, Artificial Sequence
  ENSG00000182175_40 (sequence is synthesized)
tcagggaggcagcaaggaggagcggagccattggtgctcgtccggcacagagaacagttcctgagaagccagggcacacagaagaaaaagaaaaaagaaatctctactagacgaaaatgc

SEQ ID NO: 644197 - DNA, 120 bp, Artificial Sequence
  ENSG00000182175_41 (sequence is synthesized)
taaatggcactagccacaaagtattcttggtttggaattttttttccaggaccctaaatgtaaccggctggaattctttcccaagtgccatgctacttactactggttgccctcacgagc

SEQ ID NO: 644198 - DNA, 120 bp, Artificial Sequence
  ENSG00000182175_42 (sequence is synthesized)
atggaaatgccgtcgtgaatatggaacacagcatcctgagctaaaagattcccaagaagcagcttcatcttgcaggacgggctaggttgggagcctctggaggttcctggctgccagctc

SEQ ID NO: 644199 - DNA, 120 bp, Artificial Sequence
  ENSG00000182175_43 (sequence is synthesized)
cgcggaggcctgcggcctggaggtaaatgcattagcacacggaggtgggcgcctctccccgccccatcctgtctcactgatgtgttgccgagaactggagttcttgtttagctaaccaga

SEQ ID NO: 644200 - DNA, 120 bp, Artificial Sequence
  ENSG00000182175_44 (sequence is synthesized)
atgtgcaaggctataggacaggagagaaatggcctttaaaacaaatgaatgagagtcacgatgaagggggcagacgggggggtgaaaatcattaccagaacacttgggcagagacccgtc

SEQ ID NO: 644201 - DNA, 120 bp, Artificial Sequence
  ENSG00000182175_45 (sequence is synthesized)
agagccaggcaggagacagtcatcagagctgtgccagcaagtggcatggagcaggggtggcacttgggctcgggctgcaggcaaacttggcgtcaaaactggctcaacccgtcgcgagct

SEQ ID NO: 644202 - DNA, 120 bp, Artificial Sequence
  ENSG00000182175_46 (sequence is synthesized)
cccgaggtcagtatggaaatccagtgagctaacactcgtcaatggcctcgcacatggccctggcaccacgcatggaggccgccaaaagtggccgcctcctctctgcaattgcatttattt

SEQ ID NO: 644203 - DNA, 120 bp, Artificial Sequence
  ENSG00000182175_47 (sequence is synthesized)
atccatttgataactctattgggtgtctacccagcattgttcaggggggtgtgaggggctaccgcaatgacccagacagactgctgtgcattcttattggaaagacaaggcaataaacca

SEQ ID NO: 644204 - DNA, 120 bp, Artificial Sequence
  ENSG00000182175_48 (sequence is synthesized)
cagttacaaaacccagggtcccatggtaacgagctccacagagaaaagggaagtgggccagaggttccgagagacacacattttggattgcaggagggtgagaaggggcattcatctgtg

SEQ ID NO: 644205 - DNA, 120 bp, Artificial Sequence
  ENSG00000182175_49 (sequence is synthesized)
gtggggttaaggggaggcctccgactagctcacctgcatgaatttcaggaacaagccatgcagagccggacagagcattctgtgcagagaaaacagtgtaacagccctagagcagcagca

SEQ ID NO: 644206 - DNA, 120 bp, Artificial Sequence
  ENSG00000182175_50 (sequence is synthesized)
gcaaagggggagtttaagggatggtgggaagccactgtcactggacagtagcaagtggacagaccaggggtcccaggtgaggccacagagcagccaaagtactgcagggctctccggctc

SEQ ID NO: 644207 - DNA, 120 bp, Artificial Sequence
  ENSG00000182175_51 (sequence is synthesized)
cgggaggacttgatgtttgactccagttgccagaggaagccgttcacgggctttgagtgtaggaatgatgtgtccgacttgggtctttttattgttcttttttagagacagggtctcact

SEQ ID NO: 644208 - DNA, 63 bp, Artificial Sequence
  ENSG00000182175_52 (sequence is synthesized)
ctttttattgttacagctcactgcagcctccacttcctgggctcaagcaatcctcccacttca

SEQ ID NO: 644209 - DNA, 90 bp, Artificial Sequence
  ENSG00000182175_53 (sequence is synthesized)
ttcagccagtcacacccggctaattgttaaatttttttggagagacaggatcttgctgttttcccaggctgatcttgaactcctgggctc

SEQ ID NO: 644210 - DNA, 120 bp, Artificial Sequence
  ENSG00000182175_54 (sequence is synthesized)
acaggtgtgagccactgggcctgccttggcttgggtattaaaggaattgttctagttactatatggaggtgacttggggccgctggggaagaaagaggaagtcaggagccagtctgaggc

SEQ ID NO: 644211 - DNA, 73 bp, Artificial Sequence
  ENSG00000182175_55 (sequence is synthesized)
cgctggggaagaaagaggaagtcaggagccagtctgaggcagtggcaatgcagcgattatcagaaataatggg

SEQ ID NO: 644212 - DNA, 90 bp, Artificial Sequence
  ENSG00000182175_56 (sequence is synthesized)
ggaacatcacacactggggcctgtcagtgggtggggggctgggggagggagagcatcaggagaaatacccaatgtagatgatgacgggtt

SEQ ID NO: 644213 - DNA, 120 bp, Artificial Sequence
  ENSG00000182175_57 (sequence is synthesized)
ggcacgtgtatacctatgtaacaaacttgtgcgttctgcacgtgtaccccataactgaaagtataatcataattttaagaaaagaaatgatggcctttggggtctaataagaaggtgggg

SEQ ID NO: 644214 - DNA, 120 bp, Artificial Sequence
  ENSG00000182175_58 (sequence is synthesized)
ctgacagggcttggggagagagcgagcttgacaggagaccacgatgtcttccccaggggtctgagcacctggggaaatggtggtgccatttaccatgactggaaagatcatgggaggagc

SEQ ID NO: 644215 - DNA, 83 bp, Artificial Sequence
  ENSG00000182175_59 (sequence is synthesized)
tggtgccatttaccatgactggaaagatcatgggaggagcaggtttgggacactgaaggcccgagagcccctggcaaaccacc

SEQ ID NO: 644216 - DNA, 120 bp, Artificial Sequence
  ENSG00000182175_60 (sequence is synthesized)
aagatgaaggccagaagactcgtccagtctagcccttccacattcctctgcccgcttttatcctagcctcgctggcaggtgattagatggtgcccacccaggttaagcgtgggtctctgt

SEQ ID NO: 644217 - DNA, 120 bp, Artificial Sequence
  ENSG00000182175_61 (sequence is synthesized)
ctcccagttcactgactcaaatgttaatttcctttggcgacagcctcacagacacacccaggaacgatactttgcatcctccaatccaatcaagttggcactcaatattaaacagtttcg

SEQ ID NO: 644218 - DNA, 120 bp, Artificial Sequence
  ENSG00000182175_62 (sequence is synthesized)
gacaccgtctcaaaaaaaaaaaaaaaacaactaacagtttcgttcattaaggcaatgtccatggggcagctcctgcatgccacgccacccctgccctgacatactcccaggctgaccagc

SEQ ID NO: 644219 - DNA, 120 bp, Artificial Sequence
  ENSG00000182175_63 (sequence is synthesized)
ccacccctgccctgacatactcccaggctgaccagccagaactggggagagggcatcttgaagaaacagtccaccctccgccctcgcatacctgtgtctcccagcagacaagacacacaa

SEQ ID NO: 644220 - DNA, 120 bp, Artificial Sequence
  ENSG00000182175_64 (sequence is synthesized)
gggcagggactgcactttcctgtgtgcaaatctcaggtatggtccagaaatcacatctctttggtctgattggccttacttaccaaacccttgaaacaatggaaagaagcttgctgcaat

SEQ ID NO: 644221 - DNA, 120 bp, Artificial Sequence
  ENSG00000182175_65 (sequence is synthesized)
gggaagacccctgccccccaaaccctctaaccaggagtctacagacctcattccgtggaagttcccattgtcccctgggaaaccaccaccttctgaatcggcacagccaaggcccccaac

SEQ ID NO: 644222 - DNA, 120 bp, Artificial Sequence
  ENSG00000182175_66 (sequence is synthesized)
cctgctatcaacagctttccttagccaccttccccatcctgcagggcttttcaacatttcgactttttaatccttccctccctaagatatagacatggtgttagtagcagaaccctgaag

SEQ ID NO: 644223 - DNA, 120 bp, Artificial Sequence
  ENSG00000182175_67 (sequence is synthesized)
gcaaaggaacagaaactaacactctcagaaagtcctagcaggatggtctgaattaatagacagctgcaggcagccagtgtgcaaggcacgctcgtaatgtcagtggcgttccggaatgag

SEQ ID NO: 644224 - DNA, 120 bp, Artificial Sequence
  ENSG00000182175_68 (sequence is synthesized)
ggctgtgatcccaggcagcccagatcccaaggcgaaaacattcatgtcgcccagcatcaccctgtccttgcccagggtgaccctgagacggcacttggattcttccacatctgaactcaa

SEQ ID NO: 644225 - DNA, 120 bp, Artificial Sequence
  ENSG00000182175_69 (sequence is synthesized)
acctgctccctcagctctccccagcaggaattggagccctctccaggccgttcagccaaagcagaatgtgtctggccaagcagatctgcccagagaagaacaaagacgtgttcagacact

SEQ ID NO: 644226 - DNA, 120 bp, Artificial Sequence
  ENSG00000182175_70 (sequence is synthesized)
gtctggggaattggttttgagctcactctgagctccatctgtgcaacaaggccagcgtcagctgttacagagaaggggcttgtggcagtttattaccctggtgagctggctcggggccat

SEQ ID NO: 644227 - DNA, 120 bp, Artificial Sequence
  ENSG00000182175_71 (sequence is synthesized)
gctgaccgcaggactgtaaaggacataaggcagttggcaatatgggaagcagcagtccccaaagcaccccgtcaaggaaacgatgcaagagctctgtccactggaccagccccaccctac

SEQ ID NO: 644228 - DNA, 120 bp, Artificial Sequence
  ENSG00000182175_72 (sequence is synthesized)
cccgccacgccctggcctagggggagggaccttgtgtttcacgggcctggatggccagggatggacagtggcatgggcacagacacacccagaccgaaggaagggcccgggctccagaac

SEQ ID NO: 644229 - DNA, 120 bp, Artificial Sequence
  ENSG00000182175_73 (sequence is synthesized)
cagacccgatccaggctcccagctctgtcacctactggctgcatgaaaagggtgggttttccttgttttgcagcctcagctatctcagctgtgagggaacaatgacgccacctccctcac

SEQ ID NO: 644230 - DNA, 120 bp, Artificial Sequence
  ENSG00000182175_74 (sequence is synthesized)
gtggcggtcctgaagatgaaatgtaatgcatgcagcgcggcggccggcccaccgtgtgctcttagtaactggccgctgttctcttcagccctcccgttactgaccacctcgagggcaccg

SEQ ID NO: 644231 - DNA, 120 bp, Artificial Sequence
  ENSG00000182175_75 (sequence is synthesized)
ttcctccaagctgaccatttcctgccagtcacccactgcccagctcgcccagccatggagtgggctctggtccacgtgcatggtgagctgccatctttgtcgtcctctggacaccacgtc

SEQ ID NO: 644232 - DNA, 120 bp, Artificial Sequence
  ENSG00000182175_76 (sequence is synthesized)
tacctccttgggaaatagaaacgagtcctgcattgctttgtcaaatttcacaaaaaccctagaaagcagatattgccctggtttacagacggacagacagaagcaaagagaagccaactg

SEQ ID NO: 644233 - DNA, 120 bp, Artificial Sequence
  ENSG00000182175_77 (sequence is synthesized)
acccactccaggttacaagcagggtctggtaggagagcacgcgtccaccccaccgctcactgcgcccacctactcctcgcttgagggcagagaacgagctggggcggggcgctccagggg

SEQ ID NO: 644234 - DNA, 120 bp, Artificial Sequence
  ENSG00000182175_78 (sequence is synthesized)
gcacaggcagcctgtgttcaaggcatgctcgtgagccccacagcaggggcggagtcaaaccagggctctggttctggggtgagcagagggtggggccaggcccccactgggaggctgact

SEQ ID NO: 644235 - DNA, 120 bp, Artificial Sequence
  ENSG00000182175_79 (sequence is synthesized)
gaggaggggctcaaagggcaggcaggctccatcagagcggtttgatgagcagggccgctgagtggccctcaggtcaaggctggggccgggaccaccagggaccaggtctgcggggccagg

SEQ ID NO: 644236 - DNA, 120 bp, Artificial Sequence
  ENSG00000182175_80 (sequence is synthesized)
ggtccctccccagggtggagcaggaaaactccggcaaccgccttcttgagtggacttgaccttccctttctctgctaatgatctcagattaatcccttaaggcaagtgccccagggtggg

SEQ ID NO: 644237 - DNA, 120 bp, Artificial Sequence
  ENSG00000182175_81 (sequence is synthesized)
tgttggttgcataaaacaagaggagtccttcttcccttccttcctggcacaaacatttgtaggccacccccgatgtggctggtcgtagtctggatttgggggcacattcaggcattcaac

SEQ ID NO: 644238 - DNA, 120 bp, Artificial Sequence
  ENSG00000182175_82 (sequence is synthesized)
aaatacgtcatgaggccccgtgatgagctggggggctatgcttgatgtcggcagtacagctgtggtcgctcgaatgaatgtgcccgccctcacgggactgacctctagtggtgagagaca

SEQ ID NO: 644239 - DNA, 120 bp, Artificial Sequence
  ENSG00000182175_83 (sequence is synthesized)
gacactaaccgagtcacatgtgtgattacacgtgtaatcatacttacatatgtaacaacacgagttacacgtgcagtgtggggagggggcccttcacggtgaccagcccatcagggaagg

SEQ ID NO: 644240 - DNA, 120 bp, Artificial Sequence
  ENSG00000182175_84 (sequence is synthesized)
ggatgcgggtggcagaaggaagcggcacacccttgtcctcacggagctcacaggaggttctctgaccctcatcttaagccacaggctgtgtctgagcctcactgccctagctatcaactg

SEQ ID NO: 644241 - DNA, 120 bp, Artificial Sequence
  ENSG00000182175_85 (sequence is synthesized)
ggtgcaggactaggccttaatcactgggcagcgggaagaactacataagctcatactggcgcaaagccccttgggagaccgcagggaaagccattgcatgaggtggtgacaggctcggcc

SEQ ID NO: 644242 - DNA, 120 bp, Artificial Sequence
  ENSG00000182175_86 (sequence is synthesized)
ttcagagtcgggctagaatctgagttctgacaatgatccccgccttgacccatctctcctcaggccgccctgagccttccagttaggcctgggctttgggcttccgtgtttgtctctgga

SEQ ID NO: 644243 - DNA, 120 bp, Artificial Sequence
  ENSG00000182175_87 (sequence is synthesized)
ttgttcggttttagcaagagtcctgctaaattggtcttgctggaatcctccgccctccacatctgattgcccttcctgtctgatcgtggtcttcatgccccacggcctccaggggacgtc

SEQ ID NO: 644244 - DNA, 120 bp, Artificial Sequence
  ENSG00000182175_88 (sequence is synthesized)
tgatcacctggcctgccttcagcaagaatccccccaggtgtttcctcttaagaggttttccatccactgagcccaccctgctccttggccatcaattcccacttgcctgtactgtattca

SEQ ID NO: 644245 - DNA, 120 bp, Artificial Sequence
  ENSG00000182175_89 (sequence is synthesized)
gaggggaccccaatctctcttcccagctgcagcggtccctgtccaacactgccccccacctcaaataaagtctttcttactgtctttaacatatgccgtcaataaagttttagcagatcc

SEQ ID NO: 644246 - DNA, 120 bp, Artificial Sequence
  ENSG00000182175_90 (sequence is synthesized)
gtagctgagatgcagagagccatcctgcccagacctagacaactcggaagtgggtttttcagcctcctgcaccggtgtcgcgtctgagtgcgactgatgagccagggggcgtcggtggaa

SEQ ID NO: 644247 - DNA, 120 bp, Artificial Sequence
  ENSG00000182175_91 (sequence is synthesized)
cgcccgcggccgaggtggacggagcctcccggctcgctgctcccgccggcggagcgaggctgccctttcttcgcagcgtgatttattttcttctttttttctgaactcttcttccaggga

SEQ ID NO: 644248 - DNA, 120 bp, Artificial Sequence
  ENSG00000182175_92 (sequence is synthesized)
ctcccgctcgacgcccggctgcggagctgcctggccatctcctgccctcggggatgtcggcgcagtgcaccgcgtgggctcgcgtcccggcggccctttgcctcggcgcgccggcgtacg

SEQ ID NO: 644249 - DNA, 120 bp, Artificial Sequence
  ENSG00000182175_93 (sequence is synthesized)
ggaaggtgcggaccttggattgagggccgaggatgcccattgccaagccgccccggctttcctaagtggacgggagggcacggcgacgattcagcgccggctcgcgccgcagctcaaccc

SEQ ID NO: 644250 - DNA, 120 bp, Artificial Sequence
  ENSG00000182175_94 (sequence is synthesized)
gtttcatccaaaagatgtctctcaggggaagttaccagtcccttaaatatcacaacggcagcagaactgcagggcccagggaaccttgggaaggagatgtttctttcccagaaaaataag

SEQ ID NO: 644251 - DNA, 120 bp, Artificial Sequence
  ENSG00000182175_95 (sequence is synthesized)
cgacagagttaggaaaggtcaccatactgaagccctcccaagtgcagccttgcgggcctcgcagagagcgccaaaccatccggccctgcgcgccacgcggaccggcatagccatctctct

SEQ ID NO: 644252 - DNA, 120 bp, Artificial Sequence
  ENSG00000182175_96 (sequence is synthesized)
ggagtggcagctgtgccaaggtggcaaggttaggcccgcaggccctcagcacgggggcgcagccggggcaagtcttcaggaagcagcgaggtgcttgaagggggtgctggaggcaggcca

SEQ ID NO: 644253 - DNA, 120 bp, Artificial Sequence
  ENSG00000182175_97 (sequence is synthesized)
agtgttctgatcacgccctgggtgctcactgaaaatgcttcaggggctccctgccatctattggaaaaaagcagaaatccttaggctggtgtgccagggtccaatcagaaaagcaaaacc

SEQ ID NO: 644254 - DNA, 120 bp, Artificial Sequence
  ENSG00000182175_98 (sequence is synthesized)
cacccgggatgtttccgcagaggggacttcgtgtagggcattgttatgggcatgggaagactgaaagggcaaagagggaccgctgggacacagagtggcagaagcagcttccacccctgc

SEQ ID NO: 644255 - DNA, 120 bp, Artificial Sequence
  ENSG00000182175_99 (sequence is synthesized)
aagcccaggaagtttctgcgcagcgttggagatgaggagactgtggaatttgatgtcgtggaaggagagaagggtgcagaagccgctaatgtaactgggcccggggaggtgcccgtgaag

SEQ ID NO: 644256 - DNA, 120 bp, Artificial Sequence
  ENSG00000182175_100 (sequence is synthesized)
ggcagctgttatgcccccaacctacgtaagtttcgccgattcatcccccggcctccctcagttgccccaccacccatggtggcagagatcccttcagcggggacagaacctggcagagaa

SEQ ID NO: 644257 - DNA, 120 bp, Artificial Sequence
  ENSG00000182175_101 (sequence is synthesized)
acacgtcccttacaccgtgtgcgggctgggagctccttccctcagcccggctcgcggagccccggacggagccggccacccgactgtcccgccgtgaacccccattggcccgcgccgccc

SEQ ID NO: 644258 - DNA, 120 bp, Artificial Sequence
  ENSG00000182175_102 (sequence is synthesized)
aagtgggtttttcagcctcctgcaccggtgtcgcgtctgagtgcgactgatgagccagggggcgtcggtggaagcttgggggagaggctagtggtaacaggccgagctggatggatgggt

SEQ ID NO: 644259 - DNA, 120 bp, Artificial Sequence
  ENSG00000182175_103 (sequence is synthesized)
cccagacgacggcgccccccacccttcttctaccgacggtggtttgtgcgagtccctcggccccccagccagcaacagcctacagagagcactgacggggtagagcccaaagagccccat

SEQ ID NO: 644260 - DNA, 120 bp, Artificial Sequence
  ENSG00000182177_0 (sequence is synthesized)
atgtccaactcggattaccttcccgactacccactcaactcagatttagtgaagagattaaagtctgccctggatgccaaagatgaggagagagtgagggatttaatctgcactgaaatc

SEQ ID NO: 644261 - DNA, 120 bp, Artificial Sequence
  ENSG00000182177_1 (sequence is synthesized)
acgcctgtggacgctgtgatagaactggccaatgacgactggatgaaagacccctcggctcagctgcccaccggcatgctgctaggggacctcgaccatctgaagcccctcatggaccag

SEQ ID NO: 644262 - DNA, 120 bp, Artificial Sequence
  ENSG00000182177_2 (sequence is synthesized)
ttcttccaggatgccaacgtggtgtttgagatcaataaggatgagatggaatggcaggtgaaatctccagccacgtttggactatcaggcctctggaccctggagtacaagcgtgagctc

SEQ ID NO: 644263 - DNA, 120 bp, Artificial Sequence
  ENSG00000182177_3 (sequence is synthesized)
gtacaagcgtgagctcaccacgcccctgtgcatcgccgcggcccacggccacaccgcctgcgtgcgacacctgctcggccgcggcgcagacccagacgccagccccggcggccgcggcgc

SEQ ID NO: 644264 - DNA, 120 bp, Artificial Sequence
  ENSG00000182177_4 (sequence is synthesized)
cctgcacgaggcctgcctcgggggccacaccgcctgcgtccgcctgctgctgcagcaccgcgccgaccccgacctgctcagcgccgagggcctggcgcctctgcacctctgccgcacggc

SEQ ID NO: 644265 - DNA, 120 bp, Artificial Sequence
  ENSG00000182177_5 (sequence is synthesized)
cagcgcggcctggacgagcacgcgcgcctgtacctgggccgcggggcgcacgtggacgcgaggaacggccgcggagagacggctctgagcgcggcctgcggtgcggcgcggaggcccgac

SEQ ID NO: 644266 - DNA, 120 bp, Artificial Sequence
  ENSG00000182177_6 (sequence is synthesized)
tgcgcctgtgcgcgctgctgctgcggcgcggggcggaggcggacgcgcgcgacgaggacgagcgcagcccgctgcacaaagcctgcggccacgcgagccacagcctggcgcgcctcctac

SEQ ID NO: 644267 - DNA, 120 bp, Artificial Sequence
  ENSG00000182177_7 (sequence is synthesized)
ctggcgcgcctcctactgcggcacggcgccgacgcgggcgcgctcgactatggcggggcctcgccgctgggccgcgtgctccagaccgcatcctgcgctctccaggcctcaccgcagcgc

SEQ ID NO: 644268 - DNA, 120 bp, Artificial Sequence
  ENSG00000182177_8 (sequence is synthesized)
acggtgcaggcgctgctcaaccacggctctcccaccgtgtggcccgacgccttccccaaggtgctgaagacctgtgcatctgtccccgcagtcatcgaggtgcttttcaactcctaccct

SEQ ID NO: 644269 - DNA, 120 bp, Artificial Sequence
  ENSG00000182177_9 (sequence is synthesized)
cagctctgcttgtcagagtcctggaaggaagtgattcctgaggaagtattccagatgcacaagccgttctaccagtccctctttgccttggccctcaccccacgctgcctgcagcatctt

SEQ ID NO: 644270 - DNA, 120 bp, Artificial Sequence
  ENSG00000182177_10 (sequence is synthesized)
tgccgctgtgctcttcgcagactgtttggcaaaaggtgctttgacctcatccccctgttacccttgccaaagcccctgcagaattacctacttttggagccacagggtgttttgcactga

SEQ ID NO: 644271 - DNA, 120 bp, Artificial Sequence
  ENSG00000182177_11 (sequence is synthesized)
atggagagacagccagggccagtgagaggaaaacttcaaatatttcaaaagacagagaaggatcctcaagctagagcagggtccccggtgcaggagtaccacactgccctggtcgcaggg

SEQ ID NO: 644272 - DNA, 120 bp, Artificial Sequence
  ENSG00000182177_12 (sequence is synthesized)
tttattggaactcagccacctccttcatttacatattctttatggctgctttcatgtgagcgtggcagaattgggcagttgccacagagaccatatgacctgcaaaatgtaaaatattta

SEQ ID NO: 644273 - DNA, 120 bp, Artificial Sequence
  ENSG00000182177_13 (sequence is synthesized)
ctgtctggcactttatggaaaaagtttggtgactcctgtcaccaaaacacagtttaaattttataacaggcatccaaaggcctaaagatgtaccctgagctaactctggcatccctgcca

SEQ ID NO: 644274 - DNA, 120 bp, Artificial Sequence
  ENSG00000182177_14 (sequence is synthesized)
taggaggtgggagtcactctgggaagtgtttgaccgaaattgacagaagtggggtgaaggaaaggtggctttagacattaaaacaggaagaataaagaccagaagagggtgtgaaagtaa

SEQ ID NO: 644275 - DNA, 120 bp, Artificial Sequence
  ENSG00000182177_15 (sequence is synthesized)
ctccactggaaggcctggggctgctgcaccagttggtagtgatgttattatcctagagtccagtcagacttagtacatggccatttacagaaaccctccaggtaaaaaaaggggtgaagg

SEQ ID NO: 644276 - DNA, 120 bp, Artificial Sequence
  ENSG00000182177_16 (sequence is synthesized)
ccacaagagtaatgacttcctgcccctgtctgtccacttggacacttccagaaggaagccagacatttgccaatgacctaggaaagaatctgaacatttgccattccccaagaacaagag

SEQ ID NO: 644277 - DNA, 120 bp, Artificial Sequence
  ENSG00000182177_17 (sequence is synthesized)
aaaatggcagggtgtcctgcagcctcaaaaattctacctcttggcttgaaggcatggaaagttgtggccatggagaataagcctggccctgccacaaagcccaccagctccaggtttcag

SEQ ID NO: 644278 - DNA, 120 bp, Artificial Sequence
  ENSG00000182177_18 (sequence is synthesized)
cctcagctggattaatccttggaggcttctggggaaaagaaaatcactagtcaactcaatggcaagaagaaaagatcccaatgtcacatgaaaataatagttaccattcaaacactacca

SEQ ID NO: 644279 - DNA, 120 bp, Artificial Sequence
  ENSG00000182177_19 (sequence is synthesized)
tgtggataccccattataatttcaaggtggattttacccttttcatctcatttgatccagaggcaaaaactccttctcattagctacctacactataggactcaattataaagaactcat

SEQ ID NO: 644280 - DNA, 120 bp, Artificial Sequence
  ENSG00000182177_20 (sequence is synthesized)
gtttgtgtctccactataggactcaattataaagaactcatgtttgtgtctcctgcagacaaaacatcatgcttattatttaagtctccaaaatattctttgcaaaagtatattttaatc

SEQ ID NO: 644281 - DNA, 120 bp, Artificial Sequence
  ENSG00000182177_21 (sequence is synthesized)
cagttgactacctggctagtattagagaaattcagtctattcactcagttagccagacacaagccgggcctcctctcctgcttggattcttgccttccttttcctaaattcacttcatgg

SEQ ID NO: 644282 - DNA, 120 bp, Artificial Sequence
  ENSG00000182177_22 (sequence is synthesized)
tctgcagcaaaagaccacagaaattacatttgtttagtattctgccacggtccacccacacaaataagcttcctctgtcaaataagtacaccatttgaaaaactaaaaatactaaatgta

SEQ ID NO: 644283 - DNA, 120 bp, Artificial Sequence
  ENSG00000182177_23 (sequence is synthesized)
ctggcttggagaaaattatattcatcagaatccctctctttcaagaagggcattgtatttgttcagaagcatttccttgaccaacaccctggaatagacgttgaaaccccatgggcccta

SEQ ID NO: 644284 - DNA, 120 bp, Artificial Sequence
  ENSG00000182177_24 (sequence is synthesized)
gcagtgcacagaacaacactgaagaaaaaagggggaggatttccatggctgtaccagagagaatggaaacagaaatggaagtgaagagtggaataaggctgtgcaaactgtgacagaccc

SEQ ID NO: 644285 - DNA, 120 bp, Artificial Sequence
  ENSG00000182177_25 (sequence is synthesized)
cttcacatcctcagtgtgattgccagatacactaagtgatgctgttagtgggctagcttgaaaacaaaccaaccaaccaagaaaaatcaaagaagccaattgtggccgccattgtgggag

SEQ ID NO: 644286 - DNA, 120 bp, Artificial Sequence
  ENSG00000182177_26 (sequence is synthesized)
gagagcagaaggtacacaatgcaagcaaacatagagatcaaggacaacaccaggaagcaaagcacaggggctctctggagttctcagagggactctcagttctacaaagccaagagtccc

SEQ ID NO: 644287 - DNA, 120 bp, Artificial Sequence
  ENSG00000182177_27 (sequence is synthesized)
ctgtctgacacgagttactcttactgtacagacatgctttgaatgttttcaaataatttgctgcatttatgccatctaaatttgggtataaatatcaatgcatcaaaacaaccaacaacc

SEQ ID NO: 644288 - DNA, 120 bp, Artificial Sequence
  ENSG00000182177_28 (sequence is synthesized)
tcttaacttaaaaacaagagaaagaaacttctagtgccccaaacggggaacccatagtagtgaatagctgtttcagtcattcgattcacaaggacaacagattcctatgggtctgcagtt

SEQ ID NO: 644289 - DNA, 120 bp, Artificial Sequence
  ENSG00000182177_29 (sequence is synthesized)
tgaatgctgcctggtggcattgattgaatcggcctgttgctctgacctgtggagaccttttggaatcttggctgtgtcatgctccatgccacgcatctgatagctacccttccacaaatt

SEQ ID NO: 644290 - DNA, 120 bp, Artificial Sequence
  ENSG00000182177_30 (sequence is synthesized)
cattcaaatcacgatatgtatcacacaaaatggggtaagtccagggataaaaggcattccacaccacattgcaagggtcacggattccatggttgcctttcacagcaatggttctcaacc

SEQ ID NO: 644291 - DNA, 72 bp, Artificial Sequence
  ENSG00000182177_31 (sequence is synthesized)
cggattccatggttgcctttcacagcaatggttctcaaccttggctgcatgttagaagtacctggggactct

SEQ ID NO: 644292 - DNA, 61 bp, Artificial Sequence
  ENSG00000182177_32 (sequence is synthesized)
cctggggactttttaacagtcctgttgcccaggctgcacctccaacccattatgcctgaaa

SEQ ID NO: 644293 - DNA, 120 bp, Artificial Sequence
  ENSG00000182177_33 (sequence is synthesized)
ctgttgcccaggctgcacctccaacccattatgcctgaaactaccaggtgggctccaggcatcgtgttttttaaagttcctcaggtgattcatttttgtagccaacgtttgaaccactgc

SEQ ID NO: 644294 - DNA, 120 bp, Artificial Sequence
  ENSG00000182177_34 (sequence is synthesized)
tgttggggcatcacgtgtattatttctccagttcacattatttagccagagtttcctaaagaaagactcgcactgtttccatcttttccaagaggctgtcatgaaactggcattgcatgt

SEQ ID NO: 644295 - DNA, 120 bp, Artificial Sequence
  ENSG00000182177_35 (sequence is synthesized)
tgctgcctacaccccgtctgcatatttatgataaccctgtcacaaaagaaaattctagtccaccctgacgtgttcctagtgacttgtggagctccaggtgactccactctgttttctaaa

SEQ ID NO: 644296 - DNA, 120 bp, Artificial Sequence
  ENSG00000182177_36 (sequence is synthesized)
tactcccaaacaatctttttcacaatccatgtagggatcttgcccaggtctaatgtcaagatcacgagtctgtccgaagtctctttccatttgaaaactaaacctctagtcttctggtcc

SEQ ID NO: 644297 - DNA, 120 bp, Artificial Sequence
  ENSG00000182177_37 (sequence is synthesized)
ttcttttgttttatcacaattcctcaaagactttgacaattgttcagcaacttcatacacaaattcactcttgaaagaagttgcattggatacgtactaaagttggcagagaagataaaa

SEQ ID NO: 644298 - DNA, 120 bp, Artificial Sequence
  ENSG00000182177_38 (sequence is synthesized)
cctgaattgtatcttgaggctatgtattggctttgactaagctgagaagggtgaggaccaagaaaataatgagattaaaatgacttgacccaagcaagctatagataaatgtgaaggcag

SEQ ID NO: 644299 - DNA, 120 bp, Artificial Sequence
  ENSG00000182177_39 (sequence is synthesized)
caggcaacaaagagcacagtcaagagcactgggtcagaaaacagtgttattcatgtaactacagggcatcattcagctgctgggaaagaaacctaaagaacttctgtcttctggagtcct

SEQ ID NO: 644300 - DNA, 120 bp, Artificial Sequence
  ENSG00000182177_40 (sequence is synthesized)
ccgctccttgctttctcctgtttgatccttgcaggcaggggtattgttaggttttttgcctccaaaccctcaaaccttaagattcaccctaaaacataataaagattacataaatgctta

SEQ ID NO: 644301 - DNA, 120 bp, Artificial Sequence
  ENSG00000182177_41 (sequence is synthesized)
aagtgattcctgaggaagtattccaggcaagagggctgcctttctgcccatctttagtacaaaacttttgtctgtttttgcttctttgcatggggagttttgcactgatattcggctaag

SEQ ID NO: 644302 - DNA, 120 bp, Artificial Sequence
  ENSG00000182177_42 (sequence is synthesized)
tattatacatctgaaaaaggaagaatgggaaatgagggtgtatttgcacgtttctggttttttctggaggctccataatcacacagccaggagcttgttatagtagttgcggtgccatgg

SEQ ID NO: 644303 - DNA, 120 bp, Artificial Sequence
  ENSG00000182179_0 (sequence is synthesized)
cttttctccaggaagagagctgtgaccagcagcgtcccttattcgcttggccttggttcctgtttgcactggctacagcagggcactggcccctactgtcaccgccacctacacaaagac

SEQ ID NO: 644304 - DNA, 120 bp, Artificial Sequence
  ENSG00000182179_1 (sequence is synthesized)
cctatctctgagcgctgcagcctactgttcagccccaggtttgaggatggatgccctggacgcttcgaagctactggatgaggagctgtattcaagacagctgtatgtgctgggctcacc

SEQ ID NO: 644305 - DNA, 120 bp, Artificial Sequence
  ENSG00000182179_2 (sequence is synthesized)
tgccatgcagaggattcagggagccagggtcctggtgtcaggcctgcagggcctgggggccgaggtggccaagaacttggttctgatgggtgtgggcagcctcactctgcatgatcccca

SEQ ID NO: 644306 - DNA, 120 bp, Artificial Sequence
  ENSG00000182179_3 (sequence is synthesized)
ccccacctgctggtccgacctggctgcccagtttctcctctcagagcaggacttggaaaggagcagagccgaggcctctcaagagctcttggctcagctcaacagagctgtccaggtcgt

SEQ ID NO: 644307 - DNA, 120 bp, Artificial Sequence
  ENSG00000182179_4 (sequence is synthesized)
cgtgcacacgggtgacatcactgaggacctgctgttggacttccaggtggtggtgctgactgctgcaaagctggaggagcagctgaaggtgggcaccttgtgtcataagcatggagtttg

SEQ ID NO: 644308 - DNA, 120 bp, Artificial Sequence
  ENSG00000182179_5 (sequence is synthesized)
ctttctggcggctgacacccggggcctcgtggggcagttgttctgtgactttggtgaggacttcactgtgcaggaccccacagaggcagaacccctgacagctgccatccagcacatctc

SEQ ID NO: 644309 - DNA, 120 bp, Artificial Sequence
  ENSG00000182179_6 (sequence is synthesized)
ccagggctcccctggcattctcactctgaggaaaggggccaatacccactacttccgtgatggagacttggtgactttctcgggaattgagggaatggttgagctcaacgactgtgatcc

SEQ ID NO: 644310 - DNA, 120 bp, Artificial Sequence
  ENSG00000182179_7 (sequence is synthesized)
ccggtctatccacgtgcgggaggatgggtccctggagattggagacacaacaactttctctcggtacttgcgtggtggggctatcactgaagtcaagagacccaagactgtgagacataa

SEQ ID NO: 644311 - DNA, 120 bp, Artificial Sequence
  ENSG00000182179_8 (sequence is synthesized)
gtccctggacacagccctgctccagccccatgtggtggcccagagctcccaggaagttcaccatgcccactgcctgcatcaggccttctgtgcactgcacaagttccagcacctccatgg

SEQ ID NO: 644312 - DNA, 120 bp, Artificial Sequence
  ENSG00000182179_9 (sequence is synthesized)
ccggccaccccagccctgggatcctgttgatgcagagactgtggtgggcctggcccgggacctggaaccactgaagcggacagaggaagagccactggaagagccactggatgaggccct

SEQ ID NO: 644313 - DNA, 120 bp, Artificial Sequence
  ENSG00000182179_10 (sequence is synthesized)
agtgcggacagtcgccctaagcagtgcaggtgtcttgagccctatggtggccatgctgggtgcagtagctgcccaggaagtgctgaaggcaatctccaggaagttcatgcctctggacca

SEQ ID NO: 644314 - DNA, 120 bp, Artificial Sequence
  ENSG00000182179_11 (sequence is synthesized)
gtggctttactttgatgccctcgattgtcttccggaagatggggagctccttcccagtcctgaggactgtgccctgagaggcagccgctatgatgggcaaattgcagtgtttggggctgg

SEQ ID NO: 644315 - DNA, 120 bp, Artificial Sequence
  ENSG00000182179_12 (sequence is synthesized)
ttttcaggagaaactgagacgccagcactacctcctggtgggcgctggtgccattggttgtgagctgctcaaagtctttgccctagtgggactgggggccgggaacagcgggggcttgac

SEQ ID NO: 644316 - DNA, 120 bp, Artificial Sequence
  ENSG00000182179_13 (sequence is synthesized)
gacgttggtagacccaaggcagaggtggctgcagcagctgcccggggcctgaacccagacttacaggtgatcccgctcacctacccactggatcccaccacagagcacatctatggggat

SEQ ID NO: 644317 - DNA, 120 bp, Artificial Sequence
  ENSG00000182179_14 (sequence is synthesized)
aactttttctcccgtgtggatggtgtggctgctgccctggacagtttccaggcccggcgctatgtggctgctcgttgcacccactatctgaagccactgctggaggcaggcacatcgggc

SEQ ID NO: 644318 - DNA, 120 bp, Artificial Sequence
  ENSG00000182179_15 (sequence is synthesized)
acctggggcagtgctacagtattcatgccacatgtgactgaggcctacagagcccctgcctcagctgcagcttctgaggatgccccctaccctgtctgtaccgtgcggtacttccctagc

SEQ ID NO: 644319 - DNA, 120 bp, Artificial Sequence
  ENSG00000182179_16 (sequence is synthesized)
acagccgagcacaccctgcagtgggcccggcatgagtttgaagaactcttccgactgtctgcagagaccatcaaccaccaccaacaggcacacacttccctggcagacatggatgagcca

SEQ ID NO: 644320 - DNA, 120 bp, Artificial Sequence
  ENSG00000182179_17 (sequence is synthesized)
cagacactcaccttactgaagccagtgcttggggtcctgagagtgcgtccacagaactggcaagactgtgtggcgtgggctcttggccactggaaactctgctttcattatggcatcaaa

SEQ ID NO: 644321 - DNA, 120 bp, Artificial Sequence
  ENSG00000182179_18 (sequence is synthesized)
cagctgctgaggcacttcccacctaataaagtgcttgaggatggaactcccttctggtcaggtcccaaacagtgtccccagcccttggagtttgacaccaaccaagacacacacctcctc

SEQ ID NO: 644322 - DNA, 120 bp, Artificial Sequence
  ENSG00000182179_19 (sequence is synthesized)
tacgtactggcagctgccaacctgtatgcccagatgcatgggctgcctggctcacaggactggactgcactcagggagctgctgaagctgctgccacagcctgacccccaacagatggcc

SEQ ID NO: 644323 - DNA, 120 bp, Artificial Sequence
  ENSG00000182179_20 (sequence is synthesized)
cccatctttgctagtaatctagagctggcttcggcttctgctgagtttggccctgagcagcagaaggaactgaacaaagccctggaagtctggagtgtgggccctcccctgaagcctctg

SEQ ID NO: 644324 - DNA, 120 bp, Artificial Sequence
  ENSG00000182179_21 (sequence is synthesized)
atgtttgagaaggatgatgacagcaacttccatgtggactttgtggtagcggcagctagcctgagatgtcagaactacgggattccaccggtcaaccgtgcccagagcaagcgaattgtg

SEQ ID NO: 644325 - DNA, 120 bp, Artificial Sequence
  ENSG00000182179_22 (sequence is synthesized)
ggccagattatcccagccattgccaccactacagcagctgtggcaggcctgttgggcctggagctgtataaggtggtgagtgggccacggcctcgtagtgcctttcgccacagctaccta

SEQ ID NO: 644326 - DNA, 120 bp, Artificial Sequence
  ENSG00000182179_23 (sequence is synthesized)
catctggctgaaaactacctcatccgctatatgccttttgccccagccatccagacgttccatcacctgaagtggacctcttgggaccgtctgaaggtaccagctgggcagcctgagagg

SEQ ID NO: 644327 - DNA, 120 bp, Artificial Sequence
  ENSG00000182179_24 (sequence is synthesized)
accctggagtcgctgctggctcatcttcaggagcagcacgggttgagggtgaggatcctgctgcacggctcagccctgctctatgcggccggatggtcacctgaaaagcaggcccagcac

SEQ ID NO: 644328 - DNA, 120 bp, Artificial Sequence
  ENSG00000182179_25 (sequence is synthesized)
ctgcccctcagggtgacagaactggttcagcagctgacaggccaggcacctgctcctgggcagcgggtgttggtgctagagctgagctgtgagggtgacgacgaggacactgccttccca

SEQ ID NO: 644329 - DNA, 120 bp, Artificial Sequence
  ENSG00000182179_26 (sequence is synthesized)
cctctgcactatgagctgtgacaaggcagccaccctgtcacctagctcaatggagccccggatcccaagccctgcattgtaagcccacagtaggcactcaataaatgcttgttaaaggaa

SEQ ID NO: 644330 - DNA, 120 bp, Artificial Sequence
  ENSG00000182179_27 (sequence is synthesized)
gtgccaggcacacatcctggggactcctgctacaccccgacccctcagatctgtgctggaagctgcactcagattagtgaagcctcctggactgctgtctggtactgggcatcctctggt

SEQ ID NO: 644331 - DNA, 120 bp, Artificial Sequence
  ENSG00000182179_28 (sequence is synthesized)
ggtgctgtgcaggctggcagcagggccaggccttcccacccaggcttctgcttcctcttctgtggaacagggtggatggagggtggctggaaggatttgagtcaggagtagagctcaggc

SEQ ID NO: 644332 - DNA, 120 bp, Artificial Sequence
  ENSG00000182179_29 (sequence is synthesized)
ggctgacacccggggcctcgtgggggctcccctggcattctcactctgaggaaaggggccaatacccactacttccgtgatggagacttggtgactttctcgggaattgagggaatggtt

SEQ ID NO: 644333 - DNA, 120 bp, Artificial Sequence
  ENSG00000182179_30 (sequence is synthesized)
ctccaagatagagatgtggcccctcagagcagaggtaggcatttctgcattctgcagagatgcacagatgcccagagagagccatgcttgtgcatatatgggtgtctacatgtgaggcaa

SEQ ID NO: 644334 - DNA, 120 bp, Artificial Sequence
  ENSG00000182179_31 (sequence is synthesized)
atggaccacatagagcgctccaatctcagccgtcagttcctcttcaggtcccaggacgttggtgtgagtgctgacccctctccacactcctgcatcccagaccgtcctcccatacagctt

SEQ ID NO: 644335 - DNA, 120 bp, Artificial Sequence
  ENSG00000182179_32 (sequence is synthesized)
accccccaccccctggctcctgtttcctgctagtccagctcttcccctaggaaaggctgctggtaactgggatgggggttggggggaggtaagaagtctctgactcctcctctacctcat

SEQ ID NO: 644336 - DNA, 120 bp, Artificial Sequence
  ENSG00000182179_33 (sequence is synthesized)
cccagttccatcacctgaagtggacctcttgggaccgtctgaaggtaccagctgggcagcctgagaggaccctggagtcgctgctggctcatcttcaggtgtgccctgttgctaccccaa

SEQ ID NO: 644337 - DNA, 120 bp, Artificial Sequence
  ENSG00000182179_34 (sequence is synthesized)
tgtggagatcagtgtgtgtgtcagagggcacccagcgctagagagcagccctggagccttcaccaacctgggtgaagcctccagccaggatctgaggggggtcaggaggtggcaggagtg

SEQ ID NO: 644338 - DNA, 120 bp, Artificial Sequence
  ENSG00000182180_0 (sequence is synthesized)
atccgcttccggagtcgaggttttcgggcttgtaccgcttggcggtgcggcctggtgtcggcttgcaggttctttctgtgtttgttctctgccctgccaaggccgtagagctggtgcgtg

SEQ ID NO: 644339 - DNA, 120 bp, Artificial Sequence
  ENSG00000182180_1 (sequence is synthesized)
cgggtagcggggctctccgaggagccgcacgccggcggcaccatggtccacctcactactctcctctgcaaggcctaccgtgggggccacttaaccatccgccttgccctgggtggctgc

SEQ ID NO: 644340 - DNA, 120 bp, Artificial Sequence
  ENSG00000182180_2 (sequence is synthesized)
accaatcggccgttctaccgcattgtggctgctcacaacaagtgtcccagggatggccgtttcgtagagcagctgggctcctatgatccattgcccaacagtcatggagaaaaactcgtt

SEQ ID NO: 644341 - DNA, 120 bp, Artificial Sequence
  ENSG00000182180_3 (sequence is synthesized)
gccctcaacctagacaggatccgtcattggattggctgcggggcccacctctctaagcctatggaaaagcttctgggtcttgctggctttttccctctgcatcctatgatgatcacaaat

SEQ ID NO: 644342 - DNA, 120 bp, Artificial Sequence
  ENSG00000182180_4 (sequence is synthesized)
gctgagagactgcgaaggaaacgggcacgtgaagtcctgttagcttctcagaaaacagatgcagaagctacagatacagaggctacagaaacataaatgagctgactttagtgagcatag

SEQ ID NO: 644343 - DNA, 120 bp, Artificial Sequence
  ENSG00000182180_5 (sequence is synthesized)
cagtgggaacaaggtcaaggtccttttgaaacactgcagcgatcttaattttgttagatttggagttcaataaatggagtatcctgagttgcccttgctcttctggcctggcctgcacag

SEQ ID NO: 644344 - DNA, 120 bp, Artificial Sequence
  ENSG00000182180_6 (sequence is synthesized)
ggcccagggagagatttgttcttgtgtgacttagagctgggtgtgggtactaattagcttttttcgactttgtcttgggatagacagtggctatgggaggattggacttttgagttgggc

SEQ ID NO: 644345 - DNA, 120 bp, Artificial Sequence
  ENSG00000182180_7 (sequence is synthesized)
tctgggtctcttggacaactttacaatttactggcttccaagacttcctgcttcaaaacccccagccagactattcatggcccattcagatcttcatgttcatcccacaagtgcaagaac

SEQ ID NO: 644346 - DNA, 120 bp, Artificial Sequence
  ENSG00000182180_8 (sequence is synthesized)
gatcttcatgttcatcccacaagtgcaagaacagttaacctttcttaattgatttttgtaattggaggtttatattgtcttgcctaatgcatattctctttttttttttttttttgagac

SEQ ID NO: 644347 - DNA, 120 bp, Artificial Sequence
  ENSG00000182180_9 (sequence is synthesized)
accactcctagccttaatgcatattcttaaatatacaaaggtagatttgttatgaaaattgctttggggctctaataacctaccttttaagaatgagaaactgctgggcttaagggagtt

SEQ ID NO: 644348 - DNA, 120 bp, Artificial Sequence
  ENSG00000182180_10 (sequence is synthesized)
cagtatgaatcaagattgaaccattcaaatgtggctgtgatttctgcatatatcatagatgggatccttctgagaatactggaatagggaattaggacaccaagccaattcagctgtgaa

SEQ ID NO: 644349 - DNA, 120 bp, Artificial Sequence
  ENSG00000182180_11 (sequence is synthesized)
ccttattcttgtacttttctttcttgctggtaattttatggagcaggttaagaaggctgctctgtgttaggataaactgtataccaataatgttgacaacctgtaatgagtgttgcattt

SEQ ID NO: 644350 - DNA, 120 bp, Artificial Sequence
  ENSG00000182180_12 (sequence is synthesized)
tacttcttgtatcttttccttcctaccttgatgccagtaatctataagggatctttatagtttgaatgtatttgaataacttcagtatactttagttctacttttttatttgactcacaa

SEQ ID NO: 644351 - DNA, 120 bp, Artificial Sequence
  ENSG00000182180_13 (sequence is synthesized)
ccattcttaggtctcaagtattcccatgtgttttaaaagcctgaagtcagtgagatgaaattcaacatcaagaatttgaagtaacttgtaaggaaaaataatataaagataccattgggg

SEQ ID NO: 644352 - DNA, 120 bp, Artificial Sequence
  ENSG00000182180_14 (sequence is synthesized)
ggaggctgaggtggaaggatcacttgaagccagagtttgagaccagcctgtgcaacacagcaagaccccgtctctacaaaaacttaaaaaattagctggctgtggtgttgctcacccata

SEQ ID NO: 644353 - DNA, 120 bp, Artificial Sequence
  ENSG00000182180_15 (sequence is synthesized)
gttccagctactcgggaagctgaggcagtaagatcacttgagcccaggaggccgatgctgcagtgaactgtgattgttccactacagtccagcctgggtgacagagaaaagaaaaagaaa

SEQ ID NO: 644354 - DNA, 120 bp, Artificial Sequence
  ENSG00000182180_16 (sequence is synthesized)
ccagcctgggtgacagagaaaagaaaaagaaaacattacataatttggctagagcataataatttgattttctggtttttgaaaatttgagttgcaataaaaggatatttcagtgtgcga

SEQ ID NO: 644355 - DNA, 120 bp, Artificial Sequence
  ENSG00000182180_17 (sequence is synthesized)
ggagtcgaggttttcgggcttgtaccgcttggcggtgcggcctggtgtcggcttgcaggttctttctgtgtttgttctctgccctgccaaggccgtagagctgctactctcctctgcaag

SEQ ID NO: 644356 - DNA, 120 bp, Artificial Sequence
  ENSG00000182180_18 (sequence is synthesized)
ggggagagctctcccaggcgcgatggaggcaacccgaacctgaagcagccacactgccttacatttgatccttctctcagttttttccccacttaatcaccgctgaaaaatttccacccc

SEQ ID NO: 644357 - DNA, 80 bp, Artificial Sequence
  ENSG00000182183_0 (sequence is synthesized)
agagccaggcgagcacgcggctcccggcccagctccccgcgtccgctccggctcctgccgcgttccagcagccgtcactc

SEQ ID NO: 644358 - DNA, 120 bp, Artificial Sequence
  ENSG00000182183_1 (sequence is synthesized)
cctccgcgcgggccgggcacctggccgccgctcggtcctcggggccccgcgctgctgtctctgtctcggcttctctcggcccctgggtctcttcgtctctgccgttctcaggctcagctc

SEQ ID NO: 644359 - DNA, 120 bp, Artificial Sequence
  ENSG00000182183_2 (sequence is synthesized)
cgtctcgctcggtccctcgcttccccgccgggctctagccggccgtctggtggcccgaggtggcggcgggctgggcgcggggcgcgatgagcggcgcctgcacgagctacgtgagcgcag

SEQ ID NO: 644360 - DNA, 120 bp, Artificial Sequence
  ENSG00000182183_3 (sequence is synthesized)
agtactgctgcgacgacccgcacagcttcttcccctacgagcacagctacatgtggtggctcagcattggcgctctcataggcctgtccgtagcagcagtggttcttctcgccttcattg

SEQ ID NO: 644361 - DNA, 120 bp, Artificial Sequence
  ENSG00000182183_4 (sequence is synthesized)
ttaccgcctgtgtgctctgctacctgttcatcagctctaagccccacacaaagttggacctgggcttgagcttacagacagcaggccctgaggaggtttctcctgactgccaaggtgtga

SEQ ID NO: 644362 - DNA, 120 bp, Artificial Sequence
  ENSG00000182183_5 (sequence is synthesized)
acacaggcatggcggcagaagtgccaaaagtgagccctctccagcagagttactcctgcttgaacccgcagctggagagcaatgaggggcaggctgtgaactccaaacgcctcctccatc

SEQ ID NO: 644363 - DNA, 120 bp, Artificial Sequence
  ENSG00000182183_6 (sequence is synthesized)
attgcttcatggccacagtgaccaccagtgacattccaggcagccctgaggaagcctctgtacccaaccctgacctatgtggaccagtcccataaacattcaataaatgtctccatacca

SEQ ID NO: 644364 - DNA, 120 bp, Artificial Sequence
  ENSG00000182183_7 (sequence is synthesized)
attgactgctgtggagacagatcatcaccatcaccatcaccatcaccatcaccaccaccaccatcatcatcattgtcatcgtcatcattatgttgcttttagctcactggagcctcacag

SEQ ID NO: 644365 - DNA, 120 bp, Artificial Sequence
  ENSG00000182183_8 (sequence is synthesized)
aaccctgtgaggtaggtattacctcagtttaccaaatgagaaaactggggctcggagggggtttcatggctgtcccagacttacaaagcaagtcagaaccagaatcatatctaaatcttc

SEQ ID NO: 644366 - DNA, 120 bp, Artificial Sequence
  ENSG00000182183_9 (sequence is synthesized)
caggttgccacaaacaagaggaatcagacagttctcaccctcaaggggctcacatggaggacaaggcaggcacacaaatggccaggaggcccagtggtggcccttcatggggctttaggg

SEQ ID NO: 644367 - DNA, 120 bp, Artificial Sequence
  ENSG00000182183_10 (sequence is synthesized)
tcattttctatgtgtccatctcgccattatggactgttaattccagggcatggacagatcttcctcagaggaggcctcagcaagtgtcagccacacgaatgagtgtatggagcaaaggag

SEQ ID NO: 644368 - DNA, 120 bp, Artificial Sequence
  ENSG00000182183_11 (sequence is synthesized)
gagtgaacgtctaggagaccagccgttaccccaactcctccccatccgctcctactctggactccaatctatgccctaccccagctcttggatttggcctttggatcaggttcttctggt

SEQ ID NO: 644369 - DNA, 120 bp, Artificial Sequence
  ENSG00000182183_12 (sequence is synthesized)
aatgaagcctcacctttcccccaactaactctgatctggcctaccctgctcctgactaacctcaaggatcctgagtctccttcagcctaacagctccagaagctgaactccagccctaag

SEQ ID NO: 644370 - DNA, 120 bp, Artificial Sequence
  ENSG00000182183_13 (sequence is synthesized)
agccccagctgcagacaggcctctggccaagagcttagtcaggctaccctgactaagccacagggttggcatgccctctgggcagcccctgaaccgggctctgaaaacacaggaatggac

SEQ ID NO: 644371 - DNA, 120 bp, Artificial Sequence
  ENSG00000182183_14 (sequence is synthesized)
aaggtaatctacccgagtcctgagcctgcaaggtagttgagacagatcttgaaggagagtgggcacagtcagaaaggaaaaagtggctcagtgtaaaataaaactgacacaagcccatgt

SEQ ID NO: 644372 - DNA, 79 bp, Artificial Sequence
  ENSG00000182183_15 (sequence is synthesized)
gcggcttccgcgaccacaagtactgctgcgacgacccgcacagcttcttcccctacgagcacagctacatgtggtggct

SEQ ID NO: 644373 - DNA, 120 bp, Artificial Sequence
  ENSG00000182183_16 (sequence is synthesized)
tgctgggattacaggcgtgaaccaccaattggatctttactggacccctacagggcactgagctagggaatgttggagattcagaggctgaatcagatagcagcccaaccctgagataca

SEQ ID NO: 644374 - DNA, 120 bp, Artificial Sequence
  ENSG00000182183_17 (sequence is synthesized)
gggcactgagctagggaatgttggagattcagaggctgaatcagatagcagcccaaccctgagatacaactgagctacaggcaagaggatactaccgggcgcagtggctcacacctgtaa

SEQ ID NO: 644375 - DNA, 64 bp, Artificial Sequence
  ENSG00000182183_18 (sequence is synthesized)
atgttggtggcacatgcctgtaaacctagctacttgagaggctgagacacgagaatcacttgaa

SEQ ID NO: 644376 - DNA, 65 bp, Artificial Sequence
  ENSG00000182183_19 (sequence is synthesized)
gggttggtggcacatgcctgtaaacctagctacttgatgatcacgccactgcaccccagcctggg

SEQ ID NO: 644377 - DNA, 120 bp, Artificial Sequence
  ENSG00000182185_0 (sequence is synthesized)
ctgtgtaaagggtggggaaacttgaaagttggatgctgcagacccggcatgggtagcaagaaactaaaacgagtgggtttatcacaagagctgtgtgaccgtctgagtagacatcagatc

SEQ ID NO: 644378 - DNA, 120 bp, Artificial Sequence
  ENSG00000182185_1 (sequence is synthesized)
cttacctgtcaggactttttatgtctttccccactggagcttatgaaggtgactggtctgagttatcgaggtgtccatgaacttctatgtatggtcagcagggcctgtgccccaaagatg

SEQ ID NO: 644379 - DNA, 120 bp, Artificial Sequence
  ENSG00000182185_2 (sequence is synthesized)
caaacggcttatgggataaaagcacaaaggtctgctgatttctcaccagcattcttatctactaccctttctgctttggacgaagccctgcatggtggtgtggcttgtggatccctcaca

SEQ ID NO: 644380 - DNA, 120 bp, Artificial Sequence
  ENSG00000182185_3 (sequence is synthesized)
gagattacaggtccaccaggttgtggaaaaactcagttttgtataatgatgagcattttggctacattacccaccaacatgggaggattagaaggagctgtggtgtacattgacacagag

SEQ ID NO: 644381 - DNA, 120 bp, Artificial Sequence
  ENSG00000182185_4 (sequence is synthesized)
tctgcatttagtgctgaaagactggttgaaatagcagaatcccgttttcccagatattttaacactgaagaaaagttacttttgacaagtagtaaagttcatctttatcgggaactcacc

SEQ ID NO: 644382 - DNA, 120 bp, Artificial Sequence
  ENSG00000182185_5 (sequence is synthesized)
tgtgatgaagttctacaaaggattgaatctttggaagaagaaattatctcaaaaggaattaaacttgtgattcttgactctgttgcttctgtggtcagaaaggagtttgatgcacaactt

SEQ ID NO: 644383 - DNA, 120 bp, Artificial Sequence
  ENSG00000182185_6 (sequence is synthesized)
caaggcaatctcaaagaaagaaacaagttcttggcaagagaggcatcctccttgaagtatttggctgaggagttttcaatcccagttatcttgacgaatcagattacaacccatctgagt

SEQ ID NO: 644384 - DNA, 120 bp, Artificial Sequence
  ENSG00000182185_7 (sequence is synthesized)
ggagccctggcttctcaggcagacctggtgtctccagctgatgatttgtccctgtctgaaggcacttctggatccagctgtgtgatagccgcactaggaaatacctggagtcacagtgtg

SEQ ID NO: 644385 - DNA, 120 bp, Artificial Sequence
  ENSG00000182185_8 (sequence is synthesized)
aatacccggctgatcctccagtaccttgattcagagagaagacagattcttattgccaagtcccctctggctcccttcacctcatttgtctacaccatcaaggaggaaggcctggttctt

SEQ ID NO: 644386 - DNA, 120 bp, Artificial Sequence
  ENSG00000182185_9 (sequence is synthesized)
ctcatttgtctacaccatcaaggaggaaggcctggttcttcaagagacaacattttgctctgtcacccaagctgaactgaactgggctccagaaatcctcccacctcagcctcctgagca

SEQ ID NO: 644387 - DNA, 120 bp, Artificial Sequence
  ENSG00000182185_10 (sequence is synthesized)
cctcagcctcccaaagcgctaggattacaagtatgagactttgccattccaatgagaattttgtccttagcaatctcatccaatggccactggagatgtgtgtagggccacaagaatgag

SEQ ID NO: 644388 - DNA, 120 bp, Artificial Sequence
  ENSG00000182185_11 (sequence is synthesized)
aaagggggcaatggagtgacaggtgacctgctcaggtgcccctccccagaccaaatgtcccaggcacacagcccatgccctccaccatggagtacattttctccctggcttgctgctgag

SEQ ID NO: 644389 - DNA, 120 bp, Artificial Sequence
  ENSG00000182185_12 (sequence is synthesized)
ctaaaggaccagggacgtggaaacaggaggtgaactaaggcaccccgccacccactgtggcagcttgaatttcttgaggctgagacaaactaggatccagtagcctagattttgccccag

SEQ ID NO: 644390 - DNA, 120 bp, Artificial Sequence
  ENSG00000182185_13 (sequence is synthesized)
tttctccactgagtatttactcagtgctcctgagccgatgccttcccctctgcctagatgaaccacagcattttggtaaatgcctcagcatgttaggagcgctggaacgtttattctctt

SEQ ID NO: 644391 - DNA, 120 bp, Artificial Sequence
  ENSG00000182185_14 (sequence is synthesized)
ccctcccaattatccactctaatggagcagaacacttacatggaaaatcctaaacatggaagatgatttaaaaatgattcaccctggaatacatgcttccagttgcttctacaggtttac

SEQ ID NO: 644392 - DNA, 120 bp, Artificial Sequence
  ENSG00000182185_15 (sequence is synthesized)
cttgctaaaggcatttcgcttcctttgctgttacaataagcttgcctgccttgaagaaaagaagaccagggccaaagggaaatcagtcaagggagcctgttttgtctgaaataatgcatc

SEQ ID NO: 644393 - DNA, 120 bp, Artificial Sequence
  ENSG00000182185_16 (sequence is synthesized)
catgaacaaatgaattgagtataactgtctttttacatcagtgtttctgtggaattaagagaacatccaaggccactcctagcttgagtagattaaatttgtccttgtgtttggagcaag

SEQ ID NO: 644394 - DNA, 120 bp, Artificial Sequence
  ENSG00000182185_17 (sequence is synthesized)
ggttgtgaagtctgtctggcccatcaaatgaccaatggcttttaaggaaggactaagtgacttatgaccagaacaagggagcagcctgagtcagtctccccaatgtctacattgtgttat

SEQ ID NO: 644395 - DNA, 120 bp, Artificial Sequence
  ENSG00000182185_18 (sequence is synthesized)
ttatactagcaaaaaaatagacacaactaaatgttcgaccatatggtattggttaaattaacatctatacgatggaatactagatggtcattaaaattatgtgtcagaagaaggcttaat

SEQ ID NO: 644396 - DNA, 120 bp, Artificial Sequence
  ENSG00000182185_19 (sequence is synthesized)
ctcatgggaaagtgttcacaccatattattaaagagaaaaaacagattataaagcaatatgcatacaatgtagtagttctgtaagaaaaaagtattatgtgcattttaactggaaaaata

SEQ ID NO: 644397 - DNA, 120 bp, Artificial Sequence
  ENSG00000182185_20 (sequence is synthesized)
tgtataaaaatgttaacagtgcaatctctgggcaataagattatacttgacttttatttcttttttggaattgtcttttttttttttttttcaagtttcctcccattaacatgcatgttc

SEQ ID NO: 644398 - DNA, 120 bp, Artificial Sequence
  ENSG00000182185_21 (sequence is synthesized)
aggaaacggaagctgacataatggggattaattagttgattgctgttgagatggtaacagatttgctcctaaaccattgagctagcgatttcagacctagcagggaaggtgaagatgaag

SEQ ID NO: 644399 - DNA, 120 bp, Artificial Sequence
  ENSG00000182185_22 (sequence is synthesized)
aagcctttgttcaggtctctagatgtgtagggctgagggctttgccgccatgggatgtcaacagccataataataatttgcacttatatagcacctttcaaccaggcacctcaaagcggt

SEQ ID NO: 644400 - DNA, 120 bp, Artificial Sequence
  ENSG00000182185_23 (sequence is synthesized)
ttaaccacattaattaattaaagcccacaatcctcctggggagaggaggaggatgactaacaagatttgtaattacaggagggaacatttccgaataaagtattgtctaccagataaaaa

SEQ ID NO: 644401 - DNA, 120 bp, Artificial Sequence
  ENSG00000182185_24 (sequence is synthesized)
atacctgatgtggtgctcagaaaaacaaggaatcccaggctgttacccagtgtctccatgtgccctccacagatgcactcaactgtcctctcttctgctcttcctcctacaaactgggca

SEQ ID NO: 644402 - DNA, 120 bp, Artificial Sequence
  ENSG00000182185_25 (sequence is synthesized)
actggaatcagaacagagactttggatgagcatccagtgtaacccagcctagtttttcaccacgacttccagatctacatttaacatccgacagcaactataattctactttctgaacct

SEQ ID NO: 644403 - DNA, 120 bp, Artificial Sequence
  ENSG00000182185_26 (sequence is synthesized)
ccagggaagttgcttccttgtccctttcagcaaaggatgtcatggttttacaatgtctccagtgaaaaagttcttcttctctacatcttcctcccactcctacaacccttgatccccacg

SEQ ID NO: 644404 - DNA, 120 bp, Artificial Sequence
  ENSG00000182185_27 (sequence is synthesized)
tgagatctcatttcctccagctgggtcttctgcagagtgattagagcttctgccctccttgcagcatctctattgtaaaaggattgctgaagcttattaagccttgcagctcctaggagg

SEQ ID NO: 644405 - DNA, 120 bp, Artificial Sequence
  ENSG00000182185_28 (sequence is synthesized)
gcacatttgcatatctggtttctcaatccagaacagactaaaagaaaatgagtcctgagattgctacagatgagacccacccatcggagccaggctttgaaggaactgaccgcagtgtgc

SEQ ID NO: 644406 - DNA, 120 bp, Artificial Sequence
  ENSG00000182185_29 (sequence is synthesized)
atgaggaagtacttcacggtgatgaccctcgccaccctctcaggaaaacacagtgacctctcccccaacatccccttcccactcccaggtcccccggcaaaggcagaagaaccaagcaag

SEQ ID NO: 644407 - DNA, 120 bp, Artificial Sequence
  ENSG00000182185_30 (sequence is synthesized)
cctttccaccaaagcagccatgaaccccattctcatcctttccaagaactctctgctataccagataggggtttggggttctgttttccattttttaaaaaaatcatttcaagactcttg

SEQ ID NO: 644408 - DNA, 120 bp, Artificial Sequence
  ENSG00000182185_31 (sequence is synthesized)
aacagtgtgtcggtttacactattctatcttcttaagccaccatatcaacatattcactctgcttcctttcttttcatttggcagatgccacacttttaatggcagcaataaaaggtgtt

SEQ ID NO: 644409 - DNA, 120 bp, Artificial Sequence
  ENSG00000182185_32 (sequence is synthesized)
cttggatccatgaagagttcctgtttcagttcgttccagaggatacttctttaccatctcaatgagatatacagcttctcctttgtatgcattaagagactcacagtaattcttttttag

SEQ ID NO: 644410 - DNA, 120 bp, Artificial Sequence
  ENSG00000182185_33 (sequence is synthesized)
agtctcagtgcccactaagtgaaaaagctcagcagtttggctagcctcttagagtgatgctcaagtgtgctggggcctagtggagaggccaagagaagccatagggatactgtgaccttt

SEQ ID NO: 644411 - DNA, 120 bp, Artificial Sequence
  ENSG00000182185_34 (sequence is synthesized)
gctgaattgcttttctctgttatctgcttctttgggattatgaccaccagctccatccatgttcctgcaaaatgacatgatctcacttttttaatagctgcatagtattccatggttatc

SEQ ID NO: 644412 - DNA, 120 bp, Artificial Sequence
  ENSG00000182185_35 (sequence is synthesized)
tagagacagataaatgtgcaaacctgttcatcttgccaagaaaaatccgcttttctgccacagaaacaaaatattgggaaagagtcttgtggtgaaacacccatcgttctctgctaaaac

SEQ ID NO: 644413 - DNA, 120 bp, Artificial Sequence
  ENSG00000182185_36 (sequence is synthesized)
tgagcaagtgcgggatctggccagcacagctcggagtgccagcaggagcaagctctgtgtgggatccgcggccagaccaggcatgagctagcgagtgtgggatccggccagccactctgg

SEQ ID NO: 644414 - DNA, 120 bp, Artificial Sequence
  ENSG00000182185_37 (sequence is synthesized)
gcctgttatttttttctgtcagaaaaaaaatggggcctgccaaaacgtactgtaaaaaaaaaaaaaatctggtgtcttaggcccagagagggaaaagaaaataaagaagaaagagtcata

SEQ ID NO: 644415 - DNA, 120 bp, Artificial Sequence
  ENSG00000182185_38 (sequence is synthesized)
ggatcaagaacaagcccaacagtaatctgcatcataagctgatttgataccatggcactgacaatgggcactgatttgataccatggcactgacaatgggcacacagggaacaggaaatg

SEQ ID NO: 644416 - DNA, 120 bp, Artificial Sequence
  ENSG00000182185_39 (sequence is synthesized)
ggaatgagagcaagggttgggttgtgttcgtggaacacataggttttttttttttaactttctctttctaaaatatttcattttgatggaggtgaaatttatataagatgaaattaacca

SEQ ID NO: 644417 - DNA, 120 bp, Artificial Sequence
  ENSG00000182185_40 (sequence is synthesized)
aagtttttctttttttctcttttttcttttcctttcttttgtttcttttatattacattcactgacttatggtatcaaataataaaattagaggaaaatgtaaaacagatgactttttaa

SEQ ID NO: 644418 - DNA, 120 bp, Artificial Sequence
  ENSG00000182185_41 (sequence is synthesized)
caccccaaaagcaagacccataaccattatgcaagtgttcctatttccccctcctcccagctcctggaaacccaccaatctactttgttgctatggctttacctattctggatatttcat

SEQ ID NO: 644419 - DNA, 120 bp, Artificial Sequence
  ENSG00000182185_42 (sequence is synthesized)
ataaatggaatcatatagtgtctgtcttctttcactagtatgttttcaagtctcctccatggtgtagcgtgcatcagtacttcattctttttatggctgaataatattgcattgtcagga

SEQ ID NO: 644420 - DNA, 120 bp, Artificial Sequence
  ENSG00000182185_43 (sequence is synthesized)
accacaagtagttttaccccagaattggagcgttaacattatcttaggagaatcaaggaattctgaaactacacagaaacagtttgctctgtttccagaaaagattgaatctttggaaga

SEQ ID NO: 644421 - DNA, 120 bp, Artificial Sequence
  ENSG00000182185_44 (sequence is synthesized)
atattaagccattttgcttatacctgctctattgataaggcttaggagtttctcaagtaaaattaattagagattcagcaatgtggctttaagtagaattgactgttttcgtttgtgcta

SEQ ID NO: 644422 - DNA, 120 bp, Artificial Sequence
  ENSG00000182185_45 (sequence is synthesized)
taaacgatgtttttaaaagttcctatagtccctccttttcttccttctcattgtttactctttgtgtgtgctttgtatcacatttctcacactgcagtaaatataaagtagtaaaacttc

SEQ ID NO: 644423 - DNA, 120 bp, Artificial Sequence
  ENSG00000182185_46 (sequence is synthesized)
gattcagagagaagacagattcttattgccaagtcccctctggctcccttcacctcatttgtctacaccatcaaggaggaaggcctggttcttcaagctggaaaatgaaaacattaacct

SEQ ID NO: 644424 - DNA, 120 bp, Artificial Sequence
  ENSG00000182185_47 (sequence is synthesized)
attgatgaatcacaaccagcatttgaaaacagagagagagagaagacagaagaaagagtgaagaaaaaatatcagattatatcacacatattgtttcatttcataaaatatttcttgtgt

SEQ ID NO: 644425 - DNA, 120 bp, Artificial Sequence
  ENSG00000182185_48 (sequence is synthesized)
cttcagagaagagtgggtggctagggctgaccttaagggaaaggtggaacttgggaaaaatagatgagatttagacaggattagggaagcaattccaagtattacaaatggtatcaacaa

SEQ ID NO: 644426 - DNA, 120 bp, Artificial Sequence
  ENSG00000182185_49 (sequence is synthesized)
aaaacatgatagcagaaaaagtgtacttttttgttttttaggatttctgtgagtaaattagcttacttggagcaggagttttgtttttttttttttaactgaggatgggagattaggtta

SEQ ID NO: 644427 - DNA, 120 bp, Artificial Sequence
  ENSG00000182185_50 (sequence is synthesized)
aagggaaaataaggactggattaaggtccttggaagccagagagacatttgtttttttattttgtagctagttaggaactgctagaagttttcatagagagtagtgtggccacagcagta

SEQ ID NO: 644428 - DNA, 120 bp, Artificial Sequence
  ENSG00000182185_51 (sequence is synthesized)
ccatttcttgtgtgccttcaagcaccttctgtggtttcctgacagctgcctgcaagggggcagtaaacaagagctctgaaaggggaaggaagccaggagaaagccagctccattagtcac

SEQ ID NO: 644429 - DNA, 120 bp, Artificial Sequence
  ENSG00000182187_0 (sequence is synthesized)
acacagcaaccagaaaacatctgctcacttccttcaaaatgggaaagatcaccttctacgaggacagggccttccagggccgcagctacgaatgcaccactgactgccccaacctacaac

SEQ ID NO: 644430 - DNA, 120 bp, Artificial Sequence
  ENSG00000182187_1 (sequence is synthesized)
cctatttcagccgctgcaactccatcagggtggagagcggctgctggatgatctatgagcgccccaactaccagggccaccagtacttcctgcggcgtggggagtaccctgactaccagc

SEQ ID NO: 644431 - DNA, 120 bp, Artificial Sequence
  ENSG00000182187_2 (sequence is synthesized)
ctgctgcctcatccccccgcactctggcgcttacagaatgaagatctacgacagagatgaattgaggggacaaatgtcagagctcacagacgactgtatctctgttcaggaccgcttcca

SEQ ID NO: 644432 - DNA, 120 bp, Artificial Sequence
  ENSG00000182187_3 (sequence is synthesized)
cctcactgaaattcactccctcaatgtgctggagggcagctggatcctctatgagatgcccaactacagggggaggcagtatctgctgaggccgggggagtacaggaggtttcttgattg

SEQ ID NO: 644433 - DNA, 120 bp, Artificial Sequence
  ENSG00000182187_4 (sequence is synthesized)
gggggctccaaatgccaaagttggctctcttagacgagtcatggatttgtactgaagtatttacgttttccacttttctcctttaaaatctaataaaatatttagcttgtgtttctggca

SEQ ID NO: 644434 - DNA, 120 bp, Artificial Sequence
  ENSG00000182195_0 (sequence is synthesized)
gcccctggccaccaagcgcctccgtggacacgcacttcctgcgagggctccgtgcgcaccttggccgagccgaaccgagccgagtcctgtccttccaggccgttcgcaatggtggatgag

SEQ ID NO: 644435 - DNA, 120 bp, Artificial Sequence
  ENSG00000182195_1 (sequence is synthesized)
ttggtgctgctgctgcacgcgctcctgatgcggcaccgcgccctgagcatcgagaacagccagctcatggaacagctgcggctgctggtgtgcgagagggccagcctgctgcgccaggta

SEQ ID NO: 644436 - DNA, 120 bp, Artificial Sequence
  ENSG00000182195_2 (sequence is synthesized)
cgtccgccgagctgcccggtgcccttccccgaaacgtttaatggcgagagctcccggctccccgagtttatcgtgcagacggcgtcttacatgctcgtgaacgagaaccgattctgcaac

SEQ ID NO: 644437 - DNA, 120 bp, Artificial Sequence
  ENSG00000182195_3 (sequence is synthesized)
gacgccatgaaggtggcattcctaatcagcctcctcaccggggaagccgaggagtgggtggtgccctacatcgagatggatagccccatcctaggtgattaccgggccttcctcgatgag

SEQ ID NO: 644438 - DNA, 120 bp, Artificial Sequence
  ENSG00000182195_4 (sequence is synthesized)
atgaaacagtgctttggctgggatgacgacgaagacgacgacgacgaagaagaggaggatgattattaggccctcgaccctcgggcctcgggggggagggccctgcacgccgccaccccc

SEQ ID NO: 644439 - DNA, 120 bp, Artificial Sequence
  ENSG00000182195_5 (sequence is synthesized)
tccccgcagccctcaccccgccaggagccactgctctcccccttgccctccggtccccttacctacccgcgcccgtctgctctctctcttcatttctccgtagtgcttgtctttgttcca

SEQ ID NO: 644440 - DNA, 120 bp, Artificial Sequence
  ENSG00000182195_6 (sequence is synthesized)
ggaatagcgctccagttacctgctgctggggtcggggctggagcctcactcactcggaagtgcttggaagtgtcatctaccctggccatccccgggatccctcccctgctaatctgaact

SEQ ID NO: 644441 - DNA, 120 bp, Artificial Sequence
  ENSG00000182195_7 (sequence is synthesized)
gtgtcctgaaccccagctattggccaggcccctgttacaaactgcgcagaccacccgtagccctgctgctgccacctgccctgctgccaggcttacatcttcccagagaactatgctgcc

SEQ ID NO: 644442 - DNA, 120 bp, Artificial Sequence
  ENSG00000182195_8 (sequence is synthesized)
acttcacatccactcaccacatcccacctacagactaccacctttcgagatcaggaccaacctggaaaatgccagagttggctatgccttttcagacattgatttggacagctcaccaac

SEQ ID NO: 644443 - DNA, 120 bp, Artificial Sequence
  ENSG00000182195_9 (sequence is synthesized)
ccctgaaggggccgttcagcctggttagttttctacctactccgagtgtcctcccctgccccaccagattgctgcaggggcgcggtgtgcctggcagccaaattgttgacacttcttttt

SEQ ID NO: 644444 - DNA, 120 bp, Artificial Sequence
  ENSG00000182195_10 (sequence is synthesized)
tcctatgcactggttttacacagctgtcatttttctttcaaaattgcagcagtcccacagatgtgtgcatttggacaaatagtacttaaaaacaaaacaaacaagcactcagcccagctc

SEQ ID NO: 644445 - DNA, 120 bp, Artificial Sequence
  ENSG00000182195_11 (sequence is synthesized)
ctcaatactacctggaaaaagcattggcattattttcaataaatatcaagcactaaaaaaagaaatgattgtcttttaatggttaagtgctatcactggcctctaccactgtcactctga

SEQ ID NO: 644446 - DNA, 120 bp, Artificial Sequence
  ENSG00000182195_12 (sequence is synthesized)
ctaccattattcccgtggaaatcagggaatacaaccaatcctagtattccccgctgtcatctccaggctgctggggacagctacctcagggctttgtcagggttctgatgctcccttcac

SEQ ID NO: 644447 - DNA, 120 bp, Artificial Sequence
  ENSG00000182195_13 (sequence is synthesized)
caacgcatttcttaaagccctggcaaagggtgtgttctctgggtcctccagggtggcgtggttaagggttggctgagcagacggcaaagagagcagtattaataattagaccataacaat

SEQ ID NO: 644448 - DNA, 120 bp, Artificial Sequence
  ENSG00000182195_14 (sequence is synthesized)
aggcgtaaacctggacatatatatgtaatgctcctaattctctgagcttttggattccttaacactgtgccagggaagttctgccccttaatccttattgcctatgtgcagctgttgagt

SEQ ID NO: 644449 - DNA, 120 bp, Artificial Sequence
  ENSG00000182195_15 (sequence is synthesized)
tcagactccagagagccaacatagtagattgtcactttcaaactccaaatagccaacatgtcactttcaggtgctccagctaacattaagtcccggatcctgggcaagtgcacccataaa

SEQ ID NO: 644450 - DNA, 120 bp, Artificial Sequence
  ENSG00000182195_16 (sequence is synthesized)
ttcccactcatagatgtgtcccagattcctccctatggaaattagcaagatgcttggttatctcttaaatcagaccttgtactgctatctaggggctatgctgagatctctgggcctgga

SEQ ID NO: 644451 - DNA, 120 bp, Artificial Sequence
  ENSG00000182195_17 (sequence is synthesized)
gggttcagagcagtgaagggggtggctgctgagaagaagctgcatacctgtgtgaggccattgctccaggttaagtcattgaaatgtttaatgcagagcagcttggttggggatttgaga

SEQ ID NO: 644452 - DNA, 120 bp, Artificial Sequence
  ENSG00000182195_18 (sequence is synthesized)
ggactgcctcttagaaaggtttaggaggatatgaggggttcagagttctcttttatatctgtccagatgtcctcattgtaccatgtctggagccaacttgactttataacctttaattaa

SEQ ID NO: 644453 - DNA, 120 bp, Artificial Sequence
  ENSG00000182195_19 (sequence is synthesized)
tttagataacacatttccgtactgtttaaggccttttgaggcaagatattgtatttgtactggtaaacctcagtgttgattaaatgagatatgggtcttcatattaatcacctcataggt

SEQ ID NO: 644454 - DNA, 120 bp, Artificial Sequence
  ENSG00000182195_20 (sequence is synthesized)
gcggattaaatgagatcatacccatgaagcatttagaactttccctgctacatggtgagcactcagcaaaccatgggctgttactcctgggccagggaacagaagtctcagaaagcaagt

SEQ ID NO: 644455 - DNA, 120 bp, Artificial Sequence
  ENSG00000182195_21 (sequence is synthesized)
ctctgactctgagcctggctttagtaggaaaatgtcagcgtgaagaggagcagagcaggttcagggagaatggaaatgagagcatgataagaccccatttactttttggagtcttatatg

SEQ ID NO: 644456 - DNA, 120 bp, Artificial Sequence
  ENSG00000182195_22 (sequence is synthesized)
aagcaagaaacaaagctgttttacgtggtggacaggcaaagttcagggtaggagttatatctcacccctaggatagctgtttctggagggtggggacagggttgcgtatgacttaataaa

SEQ ID NO: 644457 - DNA, 120 bp, Artificial Sequence
  ENSG00000182195_23 (sequence is synthesized)
agaggctgaggcttgggtggaaatgagatctggggctcttcagggagctgccgcctccaaatctgaatcaaggagacagctggttatttagaattcattgatcacttctcccagtctcct

SEQ ID NO: 644458 - DNA, 120 bp, Artificial Sequence
  ENSG00000182195_24 (sequence is synthesized)
tggaaaatatacaaaaccccttggaagagagagattatatttgagacataatatgtgtgaggccagataattacactttcttcctaactagaaaggccttgaattggggataaatgtgga

SEQ ID NO: 644459 - DNA, 120 bp, Artificial Sequence
  ENSG00000182195_25 (sequence is synthesized)
aaagtgagcaagatctaaaaggtaaaggatccagtgagaccaaaagtcatttattccaaactgattatggcccagttatgctgagtggagttacagaaacatctttgaataaaatgtgat

SEQ ID NO: 644460 - DNA, 120 bp, Artificial Sequence
  ENSG00000182195_26 (sequence is synthesized)
ctctgccttcatagcgagtccagtctgctgcttttactgtgccctgggtcagaactttgatgattagttacaggaaagggccaggaagagaatctgggctgtgattagatctgggaatga

SEQ ID NO: 644461 - DNA, 120 bp, Artificial Sequence
  ENSG00000182195_27 (sequence is synthesized)
cctttctggggtggaagttgaggacatatgagtaggtgttctgtggaggaagggaggttcagtaaggatgccatgccaaggcagcatctgaatggcatctgggagaactaggccagggag

SEQ ID NO: 644462 - DNA, 120 bp, Artificial Sequence
  ENSG00000182195_28 (sequence is synthesized)
cttctgtgatctgaagtgtacatttcctgagtatgtgtgcatgtgcacatgagcttgctgtgacccagtatgtgtgtgctctgtgtgtgtgtgtgttaagtgatgtccttcttacatcat

SEQ ID NO: 644463 - DNA, 120 bp, Artificial Sequence
  ENSG00000182195_29 (sequence is synthesized)
ggacaaacaggttatgctgtgagatgcagaaaagggattctggttactttgggggcagattctgcaataaaagcgcagatactggcaagggctccaccacccagggaggaattcatgata

SEQ ID NO: 644464 - DNA, 120 bp, Artificial Sequence
  ENSG00000182195_30 (sequence is synthesized)
atggcataaagcatggcaaaaaagaaggaagaagtagaagtatgtctaaggataaaagtgccactttgatcaaaactattaaaaataggtaggaatgctgaataaatatgaacttagacc

SEQ ID NO: 644465 - DNA, 120 bp, Artificial Sequence
  ENSG00000182195_31 (sequence is synthesized)
ctgaattctcattttgggcgtaatagacttgaaatggccgctgaaattatactatcaatgaaatgaaattagtcatattaaatgtcgtaatcatttaatcgtattaaatataccaatata

SEQ ID NO: 644466 - DNA, 120 bp, Artificial Sequence
  ENSG00000182195_32 (sequence is synthesized)
taatatcttagacaaagtgtgcaaccctcactacacaccaagcctgctggtatcttgatcttggacttcccagcctctggaattacaaaagggtcttgctctgtcgcccaggctgcagtg

SEQ ID NO: 644467 - DNA, 89 bp, Artificial Sequence
  ENSG00000182195_33 (sequence is synthesized)
gaattcctggaaacgttgggattgcaggcatgagctgctgcgtttggcctacataaatattttgacataaatgagatattaagtacttt

SEQ ID NO: 644468 - DNA, 120 bp, Artificial Sequence
  ENSG00000182195_34 (sequence is synthesized)
catacatatctatgtcaatattttaattgtctgcatataacttcatagtatggatacatcatttttaaatgtaggtatttctctattgatgtacaaatgtttttcaccagtttttctgtt

SEQ ID NO: 644469 - DNA, 120 bp, Artificial Sequence
  ENSG00000182195_35 (sequence is synthesized)
taacaaatgttacaatgaacatttttgaatcatatgttttcgtgcacatgtgtagcatttctaaaaggaaaattcttaaaaatttaatgagcattttaaagtttgctagaaattgccaaa

SEQ ID NO: 644470 - DNA, 120 bp, Artificial Sequence
  ENSG00000182195_36 (sequence is synthesized)
atatcctgcaaagtacttgtactttgttctaacagtattaggatttcctattccctcatgatttttgttgtcaatccaatggaagaaaattgcttctttgttttaatttatatttacttt

SEQ ID NO: 644471 - DNA, 120 bp, Artificial Sequence
  ENSG00000182195_37 (sequence is synthesized)
acgaatagtaaagttgaatatcttttgttatctatttgtagttattaatctgtgaattgttgccatatttttctattgggttgtttgattttttatttatagaaaaaatttgtatagtca

SEQ ID NO: 644472 - DNA, 120 bp, Artificial Sequence
  ENSG00000182195_38 (sequence is synthesized)
tttgtttgttatacatatcacaagtattttctcctaatctcttctttatattttaactttgtataagaaataatttgccgtatagaaatagtgctggaaaacatgtcttttgagaaagaa

SEQ ID NO: 644473 - DNA, 120 bp, Artificial Sequence
  ENSG00000182196_0 (sequence is synthesized)
ctgtcattgtggaagagttgcaacttgggggcccgagattggatgaagcgcacagccacgctttgggttacacatttgaaactcagggggcttccatattgcagtcttgagtttggtctc

SEQ ID NO: 644474 - DNA, 120 bp, Artificial Sequence
  ENSG00000182196_1 (sequence is synthesized)
cctgggaaggtggggcaccagccccatgccacgttgcacgtatcagctggagcagaatcctggcttccttccggatgggcctggggtccatgcccgcgctcactgccaagatctttctgg

SEQ ID NO: 644475 - DNA, 120 bp, Artificial Sequence
  ENSG00000182196_2 (sequence is synthesized)
cccctacggacacgagtttgcgacctctgagtcactgggtgggcgcgtcggaaagaccagggcgcctcagtctggagctcgcagtcgtatggagagggcaggaccagccggggaggaggg

SEQ ID NO: 644476 - DNA, 120 bp, Artificial Sequence
  ENSG00000182196_3 (sequence is synthesized)
cggcgcgcgcgagggtcgccttcttcccagggcaccgggggcgtgggtgctgcgggcgtgcgccgagagggcagccttggaagtgggcgcagcttcggcagacacaggcgtgaggggctg

SEQ ID NO: 644477 - DNA, 120 bp, Artificial Sequence
  ENSG00000182196_4 (sequence is synthesized)
cggagctcgagggccggcgcccctgcttgcctctgcgggaggtgggcgcgcccgggacggaacctggggcgtcagaacgaaaggcagcggcgccgcgcttcccagccggccagcctcccg

SEQ ID NO: 644478 - DNA, 120 bp, Artificial Sequence
  ENSG00000182196_5 (sequence is synthesized)
gccggaagcctcctcgccgccgcttcctctcgagaaggcgcggggcgggctgtccggcccgcagggcggtcgagcccgcggcgccatggctcacgtcggctcccgcaagcgctcgaggag

SEQ ID NO: 644479 - DNA, 120 bp, Artificial Sequence
  ENSG00000182196_6 (sequence is synthesized)
ctcggcctccacatcccaaggtcgcaaggccagcacggcccctggggcggaggcctcaccttctccctgcatcacagagagaagcaagcagaaggcccggaggagaacaagatccagctc

SEQ ID NO: 644480 - DNA, 120 bp, Artificial Sequence
  ENSG00000182196_7 (sequence is synthesized)
ctcctcctcttcttccagttcttctagctcctcttcttcctcctcgtcctcctcctcttcctccagtgatggccggaagaagcgggggaagtacaaggacaagaggaggaagaagaagaa

SEQ ID NO: 644481 - DNA, 120 bp, Artificial Sequence
  ENSG00000182196_8 (sequence is synthesized)
gaagaggaagaagctgaagaagaagggcaaggagaaggcggaagcacagcaggtggaggctctgccgggcccctcgctggaccagtggcaccgatcagctggggaggaagaggatggccc

SEQ ID NO: 644482 - DNA, 120 bp, Artificial Sequence
  ENSG00000182196_9 (sequence is synthesized)
agtcctgacggatgagcagaagtcccgaatccaggccatgaagcccatgaccaaggaggagtgggatgcccggcagagcatcatccgcaaggtggtggaccctgagacggggcgcaccag

SEQ ID NO: 644483 - DNA, 120 bp, Artificial Sequence
  ENSG00000182196_10 (sequence is synthesized)
gcttattaagggagatggcgaggtcctagaggaaatcgtaaccaaagaacgacacagagagatcaacaagcaagccacccgaggggactgcctggccttccagatgcgagctgggttgct

SEQ ID NO: 644484 - DNA, 120 bp, Artificial Sequence
  ENSG00000182196_11 (sequence is synthesized)
tccctgagggcccccgctggccaaggcctgtggacgacgctggcggcccagcctgggcaggtttcagggtgccagtgggaagcctgatgggtgctggtggcctttcccccgtggattggt

SEQ ID NO: 644485 - DNA, 120 bp, Artificial Sequence
  ENSG00000182196_12 (sequence is synthesized)
ctctggcccagcccagtctcttctcaggggcagggggtggaggttggggtcaccggcctgcttggcacccccatctgaaagagcagcacttctcagctattaaaggccccctggatagac

SEQ ID NO: 644486 - DNA, 120 bp, Artificial Sequence
  ENSG00000182196_13 (sequence is synthesized)
cccttgaggcggcgaggccgcgaagggcgcggggctggaggcccgcggcgccatggctcacgtcggctcccgcaagcgctcgaggagtcgcagccggtcccggggacgggggtcggaaaa

SEQ ID NO: 644487 - DNA, 120 bp, Artificial Sequence
  ENSG00000182196_14 (sequence is synthesized)
gggcggtcgaggtgggaacggagcagccccgggggcccccttgaggcggcgaggccgcgaagggcgcggggctggagggtaggagagcgcgggaaagcgccccagacgccactcgcggcg

SEQ ID NO: 644488 - DNA, 120 bp, Artificial Sequence
  ENSG00000182196_15 (sequence is synthesized)
tcctagaggaaatcgtaaccaaagaacgacacagagagatcaacaaggtgggtgtggcccctctgcctgccatccgcccccagctctgtttgtgatgtacccctcctcctgtgtgctttc

SEQ ID NO: 644489 - DNA, 120 bp, Artificial Sequence
  ENSG00000182196_16 (sequence is synthesized)
agaaaaccggggtccccagcgctgggggtgggtgagggtcgctcattttcccgggacggtgacgggtactgggcgtcgccaggccccggccccgctagagccacccttggagcccgcccg

SEQ ID NO: 644490 - DNA, 120 bp, Artificial Sequence
  ENSG00000182196_17 (sequence is synthesized)
gaccacaggcatcggggagaggaggcgcagttactacccggggaagtcgggcgagcagtggtcggggacgctcagtcatgcctctgtgcagccgggcctgagatgtgagggccaggcgcc

SEQ ID NO: 644491 - DNA, 120 bp, Artificial Sequence
  ENSG00000182196_18 (sequence is synthesized)
gcaggagccaggaaggggctcctctgggaagctccatctctgttctggaaagcccctcaggaagcgctcaccctgtagccggtctgtgcctgccccaggccagagcaggggacgaaggtt

SEQ ID NO: 644492 - DNA, 120 bp, Artificial Sequence
  ENSG00000182196_19 (sequence is synthesized)
ggatctgggagtgttggctgaagatgtgtgctctcgggaggagtggggccgggcggggttcctggtgcctgaaaaaggccaaatgtgggcaaaaatacggtcacttggagtaagtagttg

SEQ ID NO: 644493 - DNA, 120 bp, Artificial Sequence
  ENSG00000182196_20 (sequence is synthesized)
caggggctggaagggcctggaggaggctcttgaaagggctgttgttggccgggctgaggctggcaaggcagagcccagctccactgccttcatcagggagagtgggtgaggccccagggt

SEQ ID NO: 644494 - DNA, 120 bp, Artificial Sequence
  ENSG00000182196_21 (sequence is synthesized)
ctgtccactcaaggctgcggggtgggagccctgggacccctctgccggctgcttgtggttctgctcctctggcattaggggacctgcctattccttgctgaacggagaccctcccacccc

SEQ ID NO: 644495 - DNA, 120 bp, Artificial Sequence
  ENSG00000182196_22 (sequence is synthesized)
aacaggcaccgctgcggggactggagtcggcggagaaaaccggggtccccagcgctggggcccgcggcgccatggctcacgtcggctcccgcaagcgctcgaggagtcgcagccggtccc

SEQ ID NO: 644496 - DNA, 120 bp, Artificial Sequence
  ENSG00000182197_0 (sequence is synthesized)
gtgtaagtgtaacattcagaaccgggtaacattcggcgaccgaacgcggcggtcggcagcgttcgcgcgggggcctgcgaagcgctgctcggggccggcactgcccgcggggaggacgcg

SEQ ID NO: 644497 - DNA, 120 bp, Artificial Sequence
  ENSG00000182197_1 (sequence is synthesized)
cccagcgccgccgccgccgccgcctccagccgggccgccgcgcgtcccgggggccggccccgcgagcgcaggagtaaacaccgccggagtcttggagccgctgcagaagggaataaagag

SEQ ID NO: 644498 - DNA, 120 bp, Artificial Sequence
  ENSG00000182197_2 (sequence is synthesized)
gggaataaagagagatgcagggatttgtgaggttacggcgccccagctgcaagatgcactagccggctgaacccgggatcggctgacttgttggaaccggagtgctctgcacggagagtg

SEQ ID NO: 644499 - DNA, 120 bp, Artificial Sequence
  ENSG00000182197_3 (sequence is synthesized)
gtggatgagttgaagttgccttcccggggctcattttccacgctgccgagaggaatccgagaggcaaggcaatcacttcgtcttgccattgattgggtatcgggagctttttttttctcc

SEQ ID NO: 644500 - DNA, 120 bp, Artificial Sequence
  ENSG00000182197_4 (sequence is synthesized)
cctctctctttcttttcctccgtcttgttgcatgcaagaaaattacagtccgctgctcgcccgccctgggtgcgagatattcagccccgctctctcccgtgcattgtgcaacccaaagat

SEQ ID NO: 644501 - DNA, 120 bp, Artificial Sequence
  ENSG00000182197_5 (sequence is synthesized)
gaaagaccgaaggggagaaagttaaagaaatcgcccacatgcgctggatcagtccacggcttggggaaaggcatccagagaaggtgggagcggagagtttgaagtctttacaggcgggaa

SEQ ID NO: 644502 - DNA, 120 bp, Artificial Sequence
  ENSG00000182197_6 (sequence is synthesized)
gatggcggactggagctgaaagtgttgattgggaaacttgggtgattcttgtgtttatttacaatcctcttgacccaggcaggacacatgcaggccaaaaaacgctatttcatcctgctc

SEQ ID NO: 644503 - DNA, 120 bp, Artificial Sequence
  ENSG00000182197_7 (sequence is synthesized)
tcagctggctcttgtctcgcccttttgttttatttcggaggcttgcagtttagggcatcgaggagccacagccggagagaagaacacagcggtaggaatggcttgcaccaccccagtccg

SEQ ID NO: 644504 - DNA, 120 bp, Artificial Sequence
  ENSG00000182197_8 (sequence is synthesized)
gatcatttctggccccgcttcccggacgctctgcgccccttcgttccttgggatcaattggaaaacgaggattccagcgtgcacatttccccccggcagaagcgagatgccaactccagc

SEQ ID NO: 644505 - DNA, 120 bp, Artificial Sequence
  ENSG00000182197_9 (sequence is synthesized)
atctacaaaggcaagaagtgccgcatggagtcctgcttcgatttcaccctttgcaagaaaaacggcttcaaagtctacgtatacccacagcaaaaaggggagaaaatcgccgaaagttac

SEQ ID NO: 644506 - DNA, 120 bp, Artificial Sequence
  ENSG00000182197_10 (sequence is synthesized)
caaaacattctagcggccatcgagggctccaggttctacacctcggaccccagccaggcgtgcctctttgtcctgagtctggatactttagacagagaccagttgtcacctcagtatgtg

SEQ ID NO: 644507 - DNA, 120 bp, Artificial Sequence
  ENSG00000182197_11 (sequence is synthesized)
cacaatttgagatccaaagtgcagagtctccacttgtggaacaatggtaggaatcatttaatttttaatttatattccggcacttggcctgactacaccgaggacgtggggtttgacatc

SEQ ID NO: 644508 - DNA, 120 bp, Artificial Sequence
  ENSG00000182197_12 (sequence is synthesized)
ggccaggcgatgctggccaaagccagcatcagtactgaaaacttccgacccaactttgatgtttctattcccctcttttctaaggatcatcccaggacaggaggggagagggggtttttg

SEQ ID NO: 644509 - DNA, 120 bp, Artificial Sequence
  ENSG00000182197_13 (sequence is synthesized)
aagttcaacaccatccctcctctcaggaagtacatgctggtattcaaggggaagaggtacctgacagggataggatcagacaccaggaatgccttatatcacgtccataacggggaggac

SEQ ID NO: 644510 - DNA, 120 bp, Artificial Sequence
  ENSG00000182197_14 (sequence is synthesized)
gttgtgctcctcaccacctgcaagcatggcaaagactggcaaaagcacaaggattctcgctgtgacagagacaacaccgagtatgagaagtatgattatcgggaaatgctgcacaatgcc

SEQ ID NO: 644511 - DNA, 120 bp, Artificial Sequence
  ENSG00000182197_15 (sequence is synthesized)
actttctgtctggttcctcgtggtcgcaggcttgggtccttcagattcctggaggctttgcaggctgcctgcgtccctgtgatgctcagcaatggatgggagttgccattctctgaagtg

SEQ ID NO: 644512 - DNA, 120 bp, Artificial Sequence
  ENSG00000182197_16 (sequence is synthesized)
attaattggaaccaagctgccgtcataggcgatgagagattgttattacagattccttctacaatcaggtctattcatcaggataaaatcctagcacttagacagcagacacaattcttg

SEQ ID NO: 644513 - DNA, 120 bp, Artificial Sequence
  ENSG00000182197_17 (sequence is synthesized)
tgggaggcttatttttcttcagttgagaagattgtattaactacactagagattattcaggacagaatattcaagcacatatcacgtaacagtttaatatggaacaaacatcctggagga

SEQ ID NO: 644514 - DNA, 120 bp, Artificial Sequence
  ENSG00000182197_18 (sequence is synthesized)
ttgttcgtactaccacagtattcatcttatctgggagattttccttactactatgctaatttaggtttaaagcccccctccaaattcactgcagtcatccatgcggtgacccccctggtc

SEQ ID NO: 644515 - DNA, 120 bp, Artificial Sequence
  ENSG00000182197_19 (sequence is synthesized)
tctcagtcccagccagtgttgaagcttctcgtggctgcagccaagtcccagtactgtgcccagatcatagttctatggaattgtgacaagcccctaccagccaaacaccgctggcctgcc

SEQ ID NO: 644516 - DNA, 120 bp, Artificial Sequence
  ENSG00000182197_20 (sequence is synthesized)
actgctgtgcctgtcgtcgtcattgaaggagagagcaaggttatgagcagccgttttctgccctacgacaacatcatcacagacgccgtgctcagccttgacgaggacacggtgctttca

SEQ ID NO: 644517 - DNA, 120 bp, Artificial Sequence
  ENSG00000182197_21 (sequence is synthesized)
acaacagaggtggatttcgccttcacagtgtggcagagcttccctgagaggattgtggggtaccccgcgcgcagccacttctgggataactctaaggagcggtggggatacacatcaaag

SEQ ID NO: 644518 - DNA, 120 bp, Artificial Sequence
  ENSG00000182197_22 (sequence is synthesized)
tggacgaacgactactccatggtgttgacaggagctgctatttaccacaaatattatcactacctatactcccattacctgccagccagcctgaagaacatggtggaccaattggccaat

SEQ ID NO: 644519 - DNA, 120 bp, Artificial Sequence
  ENSG00000182197_23 (sequence is synthesized)
tgtgaggacattctcatgaacttcctggtgtctgctgtgacaaaattgcctccaatcaaagtgacccagaagaagcagtataaggagacaatgatgggacagacttctcgggcttcccgt

SEQ ID NO: 644520 - DNA, 120 bp, Artificial Sequence
  ENSG00000182197_24 (sequence is synthesized)
tgggctgaccctgaccactttgcccagcgacagagctgcatgaatacgtttgccagctggtttggctacatgccgctgatccactctcagatgaggctcgaccccgtcctctttaaagac

SEQ ID NO: 644521 - DNA, 120 bp, Artificial Sequence
  ENSG00000182197_25 (sequence is synthesized)
caggtctctattttgaggaagaaataccgagacattgagcgactttgaggaatccggctgagtgggggaggggaagcaagaagggatgggggtcaagctgctctctcttcccagtgcaga

SEQ ID NO: 644522 - DNA, 120 bp, Artificial Sequence
  ENSG00000182197_26 (sequence is synthesized)
tccactcatcagcagagccagattgtgccaactatccaaaaacttagatgagcagaatgacaaaaaaaaaaaggccaatgagaactcaactcctggctcctgggactgcaccagactgct

SEQ ID NO: 644523 - DNA, 120 bp, Artificial Sequence
  ENSG00000182197_27 (sequence is synthesized)
ccaaactcacctcactggcttctgtgtcccaagactaggttgtgtacagtttaattatggaacattaaataattatttttgaaatgattgctatgcaggtttaaacttttttaatgatca

SEQ ID NO: 644524 - DNA, 120 bp, Artificial Sequence
  ENSG00000182197_28 (sequence is synthesized)
aaactattaaaaaccagagttctttgtttaatcaaaattgtgttggttgtgaatatttcaaagctgctattccttttcccacagacatcattgtcatggccatgtagggtgccctgcagt

SEQ ID NO: 644525 - DNA, 120 bp, Artificial Sequence
  ENSG00000182197_29 (sequence is synthesized)
ttcaaaagctcaaacttcgtggaaaacacaataagtcactctacccattatcaagaaataactgagcataagttgtaacttcattattcaactttgccagtgcaaattgttttccacttc

SEQ ID NO: 644526 - DNA, 120 bp, Artificial Sequence
  ENSG00000182197_30 (sequence is synthesized)
gaatcttcaaatccacttgaacttttatctctaaaatgtcgctgcatgaaagaaagtattacgacttccaggtaggcagttctaactgaaatctctatgtttgagatagatatatatgat

SEQ ID NO: 644527 - DNA, 120 bp, Artificial Sequence
  ENSG00000182197_31 (sequence is synthesized)
aatcgtttttcattgggggggtggggggaattagtaccaagaaaacactagtataattaagaaatgttcagtttgcacaaagaactatccagataacccaccagcatgttagtgagatgg

SEQ ID NO: 644528 - DNA, 120 bp, Artificial Sequence
  ENSG00000182197_32 (sequence is synthesized)
aaatacagacccacaacagtaacccaatacttgcaggggttgggggcacggttatagattcaaccattgacctaagtctgcgtagcactgggaagaggctttggtttagaagccaaggaa

SEQ ID NO: 644529 - DNA, 120 bp, Artificial Sequence
  ENSG00000182197_33 (sequence is synthesized)
taatgagtatattggggagaacagattatttacaagatgaactctttaatgtttgtgagaatctcaagtttcagagtttctcttttgagaaagaaaaaggggtaataaggtagaaattca

SEQ ID NO: 644530 - DNA, 120 bp, Artificial Sequence
  ENSG00000182197_34 (sequence is synthesized)
aataatcaacaacaaatgtgaatatagtttcatttacttttaatttttaaatctgtggaaaagtttagttgtgcttcttgttaaaaagaacatttctatccctgaaaatgctatcttggg

SEQ ID NO: 644531 - DNA, 120 bp, Artificial Sequence
  ENSG00000182197_35 (sequence is synthesized)
cttatgattattgttaaactccaagtataaactgaaaaaaaaaacatatccctaactctgttatgaaaaatggagacttctgatattaaatgctttcttctacttggaagaggccagaga

SEQ ID NO: 644532 - DNA, 120 bp, Artificial Sequence
  ENSG00000182197_36 (sequence is synthesized)
aaacagggaagagaaagacattattgagtttgaccatgtattatgctgaataaacaataagcactttagagtccctccctcaaactctcatacatttcatatttcttttccatttatttt

SEQ ID NO: 644533 - DNA, 120 bp, Artificial Sequence
  ENSG00000182197_37 (sequence is synthesized)
cagttttgttttagaagaaaagttcatcagagaattttgttctgataatttcaagtggccatcttaggtcagtggaaaccgtaagtccattggactttacctcatcctttctttgtagac

SEQ ID NO: 644534 - DNA, 120 bp, Artificial Sequence
  ENSG00000182197_38 (sequence is synthesized)
atctgggagaggaagaggagcttgtaatgatagcacggggatggtgctgtaaacaggagtgaaagtgtttgtggaagtccagagaagtgactcaacaggctacctagctgcagaacaagg

SEQ ID NO: 644535 - DNA, 120 bp, Artificial Sequence
  ENSG00000182197_39 (sequence is synthesized)
agtagagcccacatatccagatggtgttttgagaggtgcgtagacagtgaaattcaattaaagagaggattttctcctcagcctcatgactcagaacagctccctaaatacctctctcat

SEQ ID NO: 644536 - DNA, 120 bp, Artificial Sequence
  ENSG00000182197_40 (sequence is synthesized)
ctaattggacccatccatagtccattctcaaacatgtgacattttcccctaagtagatgtgattatctcttaggcatttgttgaaaaataattcttaggtccatggtgcttgcacttgtg

SEQ ID NO: 644537 - DNA, 120 bp, Artificial Sequence
  ENSG00000182197_41 (sequence is synthesized)
tcttttctataaaatgtttggtcttacaggtttcatgtcatttaagctgcacttctcagcaagttaaaagattagcagttaatctttattcatttggcctttgtgaatttgtatttaaat

SEQ ID NO: 644538 - DNA, 120 bp, Artificial Sequence
  ENSG00000182197_42 (sequence is synthesized)
tatttttttcaggattggcaaattattcttgtttctcctttaccaaaaaataaatgcgatattttgttcaatgaccccaaaaccaacttgaaacttaggtggtcatattggcttgcaaag

SEQ ID NO: 644539 - DNA, 120 bp, Artificial Sequence
  ENSG00000182197_43 (sequence is synthesized)
caatgtccctaattgtaccagtcagtcacacaagtggattcaaggacctgctttgccagattgacctgtcaccaagctcacaacacatatcctccacaaacaacatgtgttatgtgaaga

SEQ ID NO: 644540 - DNA, 120 bp, Artificial Sequence
  ENSG00000182197_44 (sequence is synthesized)
aaaatggtaattataaataagaacaggatataacacacctttcatccactttaaatctccacagtttcattttatgtcattctctgagcaaatctctttgggatgtgagctagcgtgttc

SEQ ID NO: 644541 - DNA, 120 bp, Artificial Sequence
  ENSG00000182197_45 (sequence is synthesized)
ttctcccatttggaatataaggctgggaatagaacaatgcttaacaaatcagtgaagctcgacagtaatatgtaattttaattcagttaggaaagagttgtattgcattgcaacaagttg

SEQ ID NO: 644542 - DNA, 120 bp, Artificial Sequence
  ENSG00000182197_46 (sequence is synthesized)
acaaatcatagccatctctgtagggtgtcaggaattatctcctggtcaactttaatgataactaggggtccctaagtgggctaacatgtgctgcattggagagaagccaagggctgagag

SEQ ID NO: 644543 - DNA, 120 bp, Artificial Sequence
  ENSG00000182197_47 (sequence is synthesized)
tacagtgccaaccacgtaatgaattgcttgcagaaattccaaagaggactcagccacttatggatttccacacagcatcttttcccagctccacattaagacacaggatcttaaaagtaa

SEQ ID NO: 644544 - DNA, 120 bp, Artificial Sequence
  ENSG00000182197_48 (sequence is synthesized)
ttttttaaaagctggctgtgtatttatttatatgaaagtgttataaatatcaaagcttacaaatacattaatacatatcacctttgttgaagctagcaaaatggctcaaaattgagactg

SEQ ID NO: 644545 - DNA, 120 bp, Artificial Sequence
  ENSG00000182197_49 (sequence is synthesized)
tagagaaaaatccatgaaataatcacgatagtcataccacaaaagatagcatagctaggtgggcctacctggtcgtatcaacacactttcagatagatgcttcaaaaaaaaagggaaagc

SEQ ID NO: 644546 - DNA, 120 bp, Artificial Sequence
  ENSG00000182197_50 (sequence is synthesized)
ttgttactggaatcttatgtgcattacagtttaatttcttcttgtgacaaatggtgctcaaagaaggatcaatccggttgcatccttcaatttcccttttagaatgacttttggttttca

SEQ ID NO: 644547 - DNA, 120 bp, Artificial Sequence
  ENSG00000182197_51 (sequence is synthesized)
ttacagtaggctatgttagcctttattttggtggttctcaaatacctggtgacttgaaagagtattatgctggtggcctttcataaaggttactgaactttaatcaggggtgagatgaat

SEQ ID NO: 644548 - DNA, 120 bp, Artificial Sequence
  ENSG00000182197_52 (sequence is synthesized)
gaatgtgaataggcctatatactattttttttaattaaaaaaaaaaaaaacagggcacttgatttaagaacaaacctgtttaaagggcaggatcagggggaagacagccttactaggttg

SEQ ID NO: 644549 - DNA, 120 bp, Artificial Sequence
  ENSG00000182197_53 (sequence is synthesized)
gaatctgaatgagattcttgctggacaaggctgaattatggatgcaaaagccaagcaaacttcccagacctggaagtgtcttgtgttcccttgggtctcttgagatctccagtatttaaa

SEQ ID NO: 644550 - DNA, 120 bp, Artificial Sequence
  ENSG00000182197_54 (sequence is synthesized)
agtagcagttattgccatgaactctcaaataaaaatgctcctgcctcttacttgtgaatataatcaacatgcagccagtacatcaggaccgcagttgctgaattcatttacctagttccc

SEQ ID NO: 644551 - DNA, 120 bp, Artificial Sequence
  ENSG00000182197_55 (sequence is synthesized)
ctttacagcgactatggacaagaacctttcagttggttttgtcattcttggccagatttaaccaagaaatttctttcactatcagcctcattttctcaggcatgcttacagggacaaagt

SEQ ID NO: 644552 - DNA, 120 bp, Artificial Sequence
  ENSG00000182197_56 (sequence is synthesized)
tgttttgagttgagttctcagcaaataagcattaatatcaaactgtgctaaacttgtctcacttggtataagaacttcagcataaagagattagtttatcctttgacaccaagtcttttt

SEQ ID NO: 644553 - DNA, 78 bp, Artificial Sequence
  ENSG00000182197_57 (sequence is synthesized)
agtttatcctttgacaccaagtcttttttttttttggtgtgatctcagctcagtcactgcaacctccgcctccccggt

SEQ ID NO: 644554 - DNA, 120 bp, Artificial Sequence
  ENSG00000182197_58 (sequence is synthesized)
tccccggttcaagcaattctcctgcctcaccctgcttagtagttgggattacaggcatgtgctaccacactgggctaatttttgtatatttattagagacagggttttgctatgttggcc

SEQ ID NO: 644555 - DNA, 120 bp, Artificial Sequence
  ENSG00000182197_59 (sequence is synthesized)
tacaggtgtaagccactgcgcctggccccccttttttttttctttaaaaaaaaaaaaaagcttgggggattaagtaccctaagatagtggtctctcccatcagttcaataatgctgtaca

SEQ ID NO: 644556 - DNA, 120 bp, Artificial Sequence
  ENSG00000182197_60 (sequence is synthesized)
tctcccatcagttcaataatgctgtacagaacctctggataaaaaagctgttatttacaccataattgtgatgatggatttgactcctcaaaaccatctctcccctttttgccctttcca

SEQ ID NO: 644557 - DNA, 120 bp, Artificial Sequence
  ENSG00000182197_61 (sequence is synthesized)
aaaatcaaaggcttttgtctccatgagttttacctagtagggattgtagttgtcactggtctagagttccaatacattttatatcaggaacctcagtgagctacccagaattggaactta

SEQ ID NO: 644558 - DNA, 120 bp, Artificial Sequence
  ENSG00000182197_62 (sequence is synthesized)
acatggcccagcaactaggagaagaaggcaaaccttgagaaagctgagccctcaggatagcacagtctcacccttgtttaaaatcaagtcaggctagcctttcagtcactctggttttgt

SEQ ID NO: 644559 - DNA, 120 bp, Artificial Sequence
  ENSG00000182197_63 (sequence is synthesized)
aatgatttgccttttaggcctcaggccatttgatttctgcaatagttttctgttcttctcctacaggaatacatccctgtcctttcggttgtaactattactaaaactagggctatgcaa

SEQ ID NO: 644560 - DNA, 120 bp, Artificial Sequence
  ENSG00000182197_64 (sequence is synthesized)
atgacctggttaccatgtaatgaaccttgtgtacttattttgagagaacaatatgtataggatatgttgaggggcagaaagaaagacatcaaaaactggaactattttaggtggcaaatt

SEQ ID NO: 644561 - DNA, 120 bp, Artificial Sequence
  ENSG00000182197_65 (sequence is synthesized)
gtaacgcaaaaaacaaaagtataccttattttgtatacgatgtacacttgggacagagttttctaatatgttgccaatgtttttgtagtgtcaccacaggtcttttctgaagtgtttttc

SEQ ID NO: 644562 - DNA, 120 bp, Artificial Sequence
  ENSG00000182197_66 (sequence is synthesized)
ccatttgttatagagtattaatgacttagcgtaattaagccctcaagtatgtgtgagagagcgcgtgtgagaaaatacaaagccatagatattgatttacttcactgacctgtgtaactt

SEQ ID NO: 644563 - DNA, 120 bp, Artificial Sequence
  ENSG00000182197_67 (sequence is synthesized)
tatgtctgggtttcgccatccaagatagattgttttatagagagtgtcaccaaagactttttccttccaatttatagaagaaaaaaaaaagaaattattaataaatgacatgacttttca

SEQ ID NO: 644564 - DNA, 120 bp, Artificial Sequence
  ENSG00000182199_0 (sequence is synthesized)
cttcttccgacagcttgctgccctagaccagagttggtggctggacctcctgcgacttccgagttgcgatgctgtacttctctttgttttgggcggctcggcctctgcagagatgtgggc

SEQ ID NO: 644565 - DNA, 120 bp, Artificial Sequence
  ENSG00000182199_1 (sequence is synthesized)
agctggtcaggatggccattcgggctcagcacagcaacgcagcccagactcagactggggaagcaaacaggggctggacaggccaggagagcctgtcggacagtgatcctgagatgtggg

SEQ ID NO: 644566 - DNA, 120 bp, Artificial Sequence
  ENSG00000182199_2 (sequence is synthesized)
agttgctgcagagggagaaggacaggcagtgtcgtggcctggagctcattgcctcagagaacttctgcagccgagctgcgctggaggccctggggtcctgtctgaacaacaagtactcgg

SEQ ID NO: 644567 - DNA, 120 bp, Artificial Sequence
  ENSG00000182199_3 (sequence is synthesized)
agggttatcctggcaagagatactatgggggagcagaggtggtggatgaaattgagctgctgtgccagcgccgggccttggaagcctttgacctggatcctgcacagtggggagtcaatg

SEQ ID NO: 644568 - DNA, 120 bp, Artificial Sequence
  ENSG00000182199_4 (sequence is synthesized)
tccagccctactccgggtccccagccaacctggccgtctacacagcccttctgcaacctcacgaccggatcatggggctggacctgcccgatgggggccatctcacccacggctacatgt

SEQ ID NO: 644569 - DNA, 120 bp, Artificial Sequence
  ENSG00000182199_5 (sequence is synthesized)
ctgacgtcaagcggatatcagccacgtccatcttcttcgagtctatgccctataagctcaaccccaaaactggcctcattgactacaaccagctggcactgactgctcgacttttccggc

SEQ ID NO: 644570 - DNA, 120 bp, Artificial Sequence
  ENSG00000182199_6 (sequence is synthesized)
cacggctcatcatagctggcaccagcgcctatgctcgcctcattgactacgcccgcatgagagaggtgtgtgatgaagtcaaagcacacctgctggcagacatggcccacatcagtggcc

SEQ ID NO: 644571 - DNA, 120 bp, Artificial Sequence
  ENSG00000182199_7 (sequence is synthesized)
tggtggctgccaaggtgattccctcgcctttcaagcacgcggacatcgtcaccaccactactcacaagactcttcgaggggccaggtcagggctcatcttctaccggaaaggggtgaagg

SEQ ID NO: 644572 - DNA, 120 bp, Artificial Sequence
  ENSG00000182199_8 (sequence is synthesized)
tggccctaaagcaggcctgcacccccatgttccgggagtactccctgcaggttctgaagaatgctcgggccatggcagatgccctgctagagcgaggctactcactggtatcaggtggta

SEQ ID NO: 644573 - DNA, 120 bp, Artificial Sequence
  ENSG00000182199_9 (sequence is synthesized)
ctgacaaccacctggtgctggtggacctgcggcccaagggcctggatggagctcgggctgagcgggtgctagagcttgtatccatcactgccaacaagaacacctgtcctggagaccgaa

SEQ ID NO: 644574 - DNA, 120 bp, Artificial Sequence
  ENSG00000182199_10 (sequence is synthesized)
gtgccatcacaccgggcggcctgcggcttggggccccagccttaacttctcgacagttccgtgaggatgacttccggagagttgtggactttatagatgaaggggtcaacattggcttag

SEQ ID NO: 644575 - DNA, 120 bp, Artificial Sequence
  ENSG00000182199_11 (sequence is synthesized)
aggtgaagagcaagactgccaagctccaggatttcaaatccttcctgcttaaggactcagaaacaagtcagcgtctggccaacctcaggcaacgggtggagcagtttgccagggccttcc

SEQ ID NO: 644576 - DNA, 120 bp, Artificial Sequence
  ENSG00000182199_12 (sequence is synthesized)
ccatgcctggttttgatgagcattgaaggcacctgggaaatgaggcccacagactcaaagttactctccttccccctacctgggccagtgaaatagaaagcctttctattttttggtgcg

SEQ ID NO: 644577 - DNA, 120 bp, Artificial Sequence
  ENSG00000182199_13 (sequence is synthesized)
ggagggaagacctctcacttagggcaagagccaggtatagtctcccttcccagaatttgtaactgagaagatcttttctttttcctttttttggtaacaagacttagaaggagggcccag

SEQ ID NO: 644578 - DNA, 120 bp, Artificial Sequence
  ENSG00000182199_14 (sequence is synthesized)
gcactttctgtttgaacccctgtcatgatcacagtgtcagagacgcgtcctctttcttggggaagttgaggagtgcccttcagagccagtagcaggcaggggtgggtaggcaccctcctt

SEQ ID NO: 644579 - DNA, 120 bp, Artificial Sequence
  ENSG00000182199_15 (sequence is synthesized)
cctgtttttatctaataaaatgctaacctgccctgagtttccattactgtgggtggggttcccctgggccaaacagtgatttgtctccctcaatgtgtacaccgctccgctcccaccacc

SEQ ID NO: 644580 - DNA, 120 bp, Artificial Sequence
  ENSG00000182199_16 (sequence is synthesized)
gctaccacaaggacccccggggctgcagcctcctctttctgtctctgatcagagccgacaccagacgtgattagcaggcgcagcaaattcaatttgttaaatgaaattgtattttgccca

SEQ ID NO: 644581 - DNA, 120 bp, Artificial Sequence
  ENSG00000182199_17 (sequence is synthesized)
gcggacccggtgctggcaaatgagcggagttttcggcctggtctcacaagctgagcctttccggccagctctgagccctgcagatgatgcaaccgagcttcactgcttgcatcaggcagg

SEQ ID NO: 644582 - DNA, 120 bp, Artificial Sequence
  ENSG00000182199_18 (sequence is synthesized)
attgctctacaatctgtggcctcagcccttgccaactctgcctcttcccccgctgactggggtatcagtttatggtgccctgcaggaagaccctcttgttcctgtgggtgggaaggttct

SEQ ID NO: 644583 - DNA, 120 bp, Artificial Sequence
  ENSG00000182199_19 (sequence is synthesized)
ggaatctcagttgccctctctggagttggggagacataggcttttggaggacaagctttgcagagtggttcatggagtgaggtggtgggagatttctgaggtgcggtgcggtgaatggag

SEQ ID NO: 644584 - DNA, 120 bp, Artificial Sequence
  ENSG00000182199_20 (sequence is synthesized)
cgtgtgtgatgaagtcaaagcacacctgctggcagacatggcccacatcagtggcctggtggctgccaaggtgattccctcgcctttcaagcacgcggacatcgtcaccaccactactca

SEQ ID NO: 644585 - DNA, 120 bp, Artificial Sequence
  ENSG00000182199_21 (sequence is synthesized)
attgctctacaatctgtggcctcagcccttgccaactctgcctcttcccccgctgactggggtatcagtttatggtgccctgcaggaagaccctcttgttcctcctctgcagagatgtgg

SEQ ID NO: 644586 - DNA, 120 bp, Artificial Sequence
  ENSG00000182199_22 (sequence is synthesized)
cagtttatggggttgggacatttagggagcctccagggtccctacagtttcatctgatcccttccttccttcctcctatgaggaaggaggagcctagaagcacaagtttgagtgggtagg

SEQ ID NO: 644587 - DNA, 120 bp, Artificial Sequence
  ENSG00000182199_23 (sequence is synthesized)
tggcattgaggggccactgctcatggcagatgggtttctgagaatgctgcctctggctttgccccaggcctggtgctgagtgaatggagctttctgcagggagtactcccgctttcagct

SEQ ID NO: 644588 - DNA, 120 bp, Artificial Sequence
  ENSG00000182199_24 (sequence is synthesized)
ctggctctggcagggagggactgtgggagtccaggggaaggggctcaataccttctgacattgccccccaccaccccagaacttctgcagccgagctgcgctggaggccctggggtcctg

SEQ ID NO: 644589 - DNA, 120 bp, Artificial Sequence
  ENSG00000182199_25 (sequence is synthesized)
ctataagctcaacgtgagtgctctagggtgtggggaggggctcttggccctggtggtggtcctcccctggagaagctgagggcctggagcgccgggccgtccttagggttaaggaggaga

SEQ ID NO: 644590 - DNA, 120 bp, Artificial Sequence
  ENSG00000182199_26 (sequence is synthesized)
aggagccccgggccagccagttcccactcactgtctgctccctcccccagctgatctcactgccttccctagagctctgaccacttgtttcctcaccctctctctctagccaagctccag

SEQ ID NO: 644591 - DNA, 120 bp, Artificial Sequence
  ENSG00000182199_27 (sequence is synthesized)
ctggagggcagtgtcagggatggtgctcccagtgggggaacccacctgtaccttcccagtgttcattgaggagtgaacttcccagtcctttgctgatggttgagagtcctttctctgtgc

SEQ ID NO: 644592 - DNA, 120 bp, Artificial Sequence
  ENSG00000182199_28 (sequence is synthesized)
gtcaagcggatatcagccacgtccatcttcttcgagtctatgccctataagctcaacggctttagctgtttgtgtgtctgtccagcccaaaactggcctcattgactacaaccagctggc

SEQ ID NO: 644593 - DNA, 120 bp, Artificial Sequence
  ENSG00000182199_29 (sequence is synthesized)
ggcttactctcgggcagatccccacccccaccactcccacacagctcttcctcacggactgctaaaggtctcccctcccacctgcattgctctacaatctgtggcctcagcccttgccaa

SEQ ID NO: 644594 - DNA, 120 bp, Artificial Sequence
  ENSG00000182199_30 (sequence is synthesized)
agttgctgcagagggagaaggacaggcagtgtcgtggcctggagctcattgcctcagaggtgggacctggggagatgggcaggggttgggccaccatgggtacaggaagtaacaaagtta

SEQ ID NO: 644595 - DNA, 120 bp, Artificial Sequence
  ENSG00000182199_31 (sequence is synthesized)
ggccttgcctttccctgccttcaggcctattcctggggcactgttggcctggacctgagaggaattcattcccacctgcagcccttaagactcctgcccagtctgtgagagttctccttc

SEQ ID NO: 644596 - DNA, 120 bp, Artificial Sequence
  ENSG00000182199_32 (sequence is synthesized)
tcttgcccatggtggccatgccctggcaggggatttgtggatgggattgaggggctgattccctctaccactggaatccagtgtaccaagcccacgtgagctgtgcccttggggcccagg

SEQ ID NO: 644597 - DNA, 120 bp, Artificial Sequence
  ENSG00000182199_33 (sequence is synthesized)
tccgccagcttcctctgccttctctgtcccttgtccttcttttcagcttagactctgaccatccacctctcacacaggtcagggctcatcttctaccggaaaggggtgaaggctgtggac

SEQ ID NO: 644598 - DNA, 120 bp, Artificial Sequence
  ENSG00000182199_34 (sequence is synthesized)
caggttggggatcctgtctttgtagggtgtgggggggcaatggcctggaggcttagaccctgcaccttgctaactgatgctggggctgatggaagggaaatgccaggatggaaggagtca

SEQ ID NO: 644599 - DNA, 120 bp, Artificial Sequence
  ENSG00000182199_35 (sequence is synthesized)
ataaagaaaaaagcggtgagtgggcgaactacaattcccaaaaggccacaaaggggccaccactacgcatgcgtagatccctcccgttagctttggcgcctcagcgagctcttctcgcgc

SEQ ID NO: 644600 - DNA, 120 bp, Artificial Sequence
  ENSG00000182199_36 (sequence is synthesized)
acaactggcagcttggtgtggccttagaagcatgagtgagggtggccgggagacgatttgtctggactgttgtgatttcaccctgacttttcctgccttcagcctctgcagagatgtggg

SEQ ID NO: 644601 - DNA, 120 bp, Artificial Sequence
  ENSG00000182199_37 (sequence is synthesized)
acctgcattgctctacaatctgtggcctcagcccttgccaactctgcctcttcccccgctgactggggtatcagtttatggtgccctgcaggaagaccctcttgttcctgtgggtgggaa

SEQ ID NO: 644602 - DNA, 120 bp, Artificial Sequence
  ENSG00000182208_0 (sequence is synthesized)
ctcttctggcagccatgccacttggaaaaggccaattcagacgctccctcgtttcaccagccttggccagcccttgcctctggaaagggggcagctgtttgtctctgccaggcgtcccat

SEQ ID NO: 644603 - DNA, 120 bp, Artificial Sequence
  ENSG00000182208_1 (sequence is synthesized)
tggccagggagtgaggctggagggcccggcagcaggcatttgcgagtgctggccagccggcaccccgccccgcttctcctccccaccttcccgtcgcccactcatgctgggagaccactg

SEQ ID NO: 644604 - DNA, 120 bp, Artificial Sequence
  ENSG00000182208_2 (sequence is synthesized)
cagtctccctgaagaccaagcccggcccggccagtccctgcaaagtggactctgctgcaaaatggtgcttcaggctgtcagcaaagtgctcaggaagtccaaagccaagcctaatggcaa

SEQ ID NO: 644605 - DNA, 120 bp, Artificial Sequence
  ENSG00000182208_3 (sequence is synthesized)
gaagcccgctgcggaggagaggaaggcctacctggagcctgagcacaccaaggccaggatcaccgacttccagttcaaggagctggtggtgctgccccgcgagattgaccttaacgagtg

SEQ ID NO: 644606 - DNA, 120 bp, Artificial Sequence
  ENSG00000182208_4 (sequence is synthesized)
gctggccagcaacaccacgacgtttttccaccacatcaacctgcagtatagcaccatctccgagttctgcacaggagagacgtgtcagacgatggccgtgtgcaacacacagtactactg

SEQ ID NO: 644607 - DNA, 120 bp, Artificial Sequence
  ENSG00000182208_5 (sequence is synthesized)
gtatgacgagcgggggaagaaggtcaagtgcacggccccacagtacgttgacttcgtcatgagctccgtgcagaagctggtgacggatgaggacgtgttccccacaaaatacggcagaga

SEQ ID NO: 644608 - DNA, 120 bp, Artificial Sequence
  ENSG00000182208_6 (sequence is synthesized)
attccccagctcctttgagtccctggtgaggaagatctgcagacacctgttccacgtgctggcacacatctactgggcccacttcaaggagacgctggccctggagctgcacggacactt

SEQ ID NO: 644609 - DNA, 120 bp, Artificial Sequence
  ENSG00000182208_7 (sequence is synthesized)
ccgccatcatggacgacctcaccgaggtgctatgcagcggggccggcggggtccacagtgggggcagtggggatggggccggcagcgggggcccgggagcacagaaccacgtgaaggaga

SEQ ID NO: 644610 - DNA, 120 bp, Artificial Sequence
  ENSG00000182208_8 (sequence is synthesized)
gatgagccccccgggccggacaggggcacacgtgtgcaaagagacggtggtgtgtgttctctcctgcatctgcgtgtgcacacatgtgctgggcacgcgtgtggtgaggtctgagagggc

SEQ ID NO: 644611 - DNA, 120 bp, Artificial Sequence
  ENSG00000182208_9 (sequence is synthesized)
cccgggctgcactggtgtgggctgcacaggcacagacgcagacggccccggccgtgtcctgtggccccctgtcggatggatgcgtgccgtttgtagagaagagcctttgggcccattcac

SEQ ID NO: 644612 - DNA, 120 bp, Artificial Sequence
  ENSG00000182208_10 (sequence is synthesized)
tcgttcagcagacacgcatgggactgatgctttgagttttcttctgtggggttttcctttctctggtctccgtgcagcccctgccctccctcgggtgctgctggcctcaaaggaggaact

SEQ ID NO: 644613 - DNA, 120 bp, Artificial Sequence
  ENSG00000182208_11 (sequence is synthesized)
cgtggggggagggtgtgatttgcagacctgggtctctgctctgctctgggggtggggcttgctttcacagagaccctccttccctctcacccctcctctcccggcctcgccaggagtctt

SEQ ID NO: 644614 - DNA, 120 bp, Artificial Sequence
  ENSG00000182208_12 (sequence is synthesized)
ggctgttggcagctcagaggtgggggaggcctgtggtgtgaggtgccctgcacctgctcctgctcctgtcaccccttcctgctgcctcctccatgcccaaggaacacccatggtgcagtc

SEQ ID NO: 644615 - DNA, 120 bp, Artificial Sequence
  ENSG00000182208_13 (sequence is synthesized)
ctcaggcaaggccaggacggggctgaggccctgcgtggagatgctgcaccagcggaaggctgagacccgcttaccttagttcatctgttcactcgtaataaaaagaattctctcaggtca

SEQ ID NO: 644616 - DNA, 120 bp, Artificial Sequence
  ENSG00000182208_14 (sequence is synthesized)
tcagcagccccctgccgcgaggggagaatgtggcccgtggacgggcagagctcacccagccgagctcctgcacctgttgctggaagcaggggtggacggggcggctcagctctggcgttt

SEQ ID NO: 644617 - DNA, 120 bp, Artificial Sequence
  ENSG00000182208_15 (sequence is synthesized)
caaatattgactgcctgctgtccccctgttccgggtgccgggaatatagtggacacaagacccctgccctcctgttccgggtgccgggaatatagtggacacaagaggccttacattgta

SEQ ID NO: 644618 - DNA, 120 bp, Artificial Sequence
  ENSG00000182208_16 (sequence is synthesized)
cctcccctacaccatctgggaaccccaggacagtggggatacgtgcgtcctctacatcattctcgaggagcagatgctgaaaggactgttgtctctgcattctcagagggtctgacagcc

SEQ ID NO: 644619 - DNA, 120 bp, Artificial Sequence
  ENSG00000182208_17 (sequence is synthesized)
tggtggcgatgcccacggtgaggcctgcagcctgggaaggtgggcgtgaaggtcatgcagagctgtcccagggggaggacagcacctgagaggcaggtgtgggcactgcatccccgtcct

SEQ ID NO: 644620 - DNA, 120 bp, Artificial Sequence
  ENSG00000182208_18 (sequence is synthesized)
catggcctgtccattttggggctgcacttccccttcgggtgggctgagtcagccccgcacagggcacacatgagagctcctggtttgcattctggaggtgggtgctgggagggggttgtc

SEQ ID NO: 644621 - DNA, 120 bp, Artificial Sequence
  ENSG00000182208_19 (sequence is synthesized)
ctagggccctggtggtgctgggaggtggcctgatggctgtttctgttgcagagggcagggtgccagcatgcagggcttgcagtgtcatcctctagcttcttggtaactctggtgactccc

SEQ ID NO: 644622 - DNA, 120 bp, Artificial Sequence
  ENSG00000182208_20 (sequence is synthesized)
cccgggatctgcagtgcacaggctgaggggcttcttggacacagcagaggggtgcccagagacgctggaggccctgtgcccagagatgctggaggccctgtgcccggagacgctggaggc

SEQ ID NO: 644623 - DNA, 120 bp, Artificial Sequence
  ENSG00000182208_21 (sequence is synthesized)
cctgtgcccggagacactggaggccctgtgcccagctgggaggatggcttctctggctgcgcaggaagtgggcgagccccccgtggccctgtctcagcccttggggcgtctccccaggtg

SEQ ID NO: 644624 - DNA, 120 bp, Artificial Sequence
  ENSG00000182208_22 (sequence is synthesized)
ccttggtgggctctggaacccagggcacgatgcttggagctggccaagagaagagtggcctccagagtggagcctgggtccatccttttcagcactgccccacccagggccattccaaga

SEQ ID NO: 644625 - DNA, 120 bp, Artificial Sequence
  ENSG00000182208_23 (sequence is synthesized)
ggaaccgtgactggatgaggagggtgggagcggttcatgtggagcctggtactggcagactgcctgttggtctagctggggcagtggaggcgatggtggttgtggccatggtgtggaggg

SEQ ID NO: 644626 - DNA, 120 bp, Artificial Sequence
  ENSG00000182208_24 (sequence is synthesized)
ggcgtttgctcagtggccagtactgctctgtgctgtgtggcccattcccacctgtggtgagctgggagctggctctcagggaggaaatcccgacccatagtgttggctgtgtctcaggtg

SEQ ID NO: 644627 - DNA, 120 bp, Artificial Sequence
  ENSG00000182208_25 (sequence is synthesized)
tgagcactcccaccacagcactctccactgcctgtgggtggggctgcggcatcggccccagcatgccctggttcaggcctgcgggggcggccgctgtgggcatggccttggaggactgag

SEQ ID NO: 644628 - DNA, 120 bp, Artificial Sequence
  ENSG00000182208_26 (sequence is synthesized)
acccagcaccgtggcagggggagaggggtggtggctgccaggtgggtgccctgggttttggtgttgtgctgggggaggaggggtgttaggggctgggggtcaccttatattaacatgaac

SEQ ID NO: 644629 - DNA, 120 bp, Artificial Sequence
  ENSG00000182208_27 (sequence is synthesized)
tagagcacacccttgtcatggctggacccaacagtaagaggcaaacccagggtgtccatgtccctaggatgctccagcctgctctggggccacgagtctcacatgaggactggccgccct

SEQ ID NO: 644630 - DNA, 120 bp, Artificial Sequence
  ENSG00000182208_28 (sequence is synthesized)
tgtgtacaggggcaagagggggccaggtccctgtcctggccaggctgttagccgcaggtacccacagagaccaccgccctcctctgctttccccggagaggggcttggcttctagcagtc

SEQ ID NO: 644631 - DNA, 120 bp, Artificial Sequence
  ENSG00000182208_29 (sequence is synthesized)
cctgggaagagaaggagcctctgtgtgctttcaaaatacaacagaaaaacagcagcacgcacttgtgtaaacgaatacaactgaagccatgtagaagcggagaaaacgaagatgacccct

SEQ ID NO: 644632 - DNA, 120 bp, Artificial Sequence
  ENSG00000182208_30 (sequence is synthesized)
tcatttaatcacacacctgtacagccatgtggctggcaggctccccagcgtgatcctggcgtagttctaagtcagcgcaggcagacccctccatagagtgcagtgtggtccccgcagaca

SEQ ID NO: 644633 - DNA, 120 bp, Artificial Sequence
  ENSG00000182208_31 (sequence is synthesized)
gtgtgtggggacagtgtgcatgtccagggagggagacacctgggtctgccacacctccgctgctggcgccacctctgcccgcagatgacctgagcgggtgggacccagtggctgggtggg

SEQ ID NO: 644634 - DNA, 120 bp, Artificial Sequence
  ENSG00000182208_32 (sequence is synthesized)
gagcatttttcctttctctttctcttaaataaaccattagcaacttttcaaaacaagaaagaaaaaaaataaggacagggtcaggttgccacaaagacctttggcccccatcctcatcac

SEQ ID NO: 644635 - DNA, 120 bp, Artificial Sequence
  ENSG00000182208_33 (sequence is synthesized)
cctgtggcctccccaggcctggtggacaacagggatactggagctgcaggccaggctgccgcctgatgccaggggccccgtgctctcaggctggccaggaaggcaggtgccctgcacaag

SEQ ID NO: 644636 - DNA, 80 bp, Artificial Sequence
  ENSG00000182218_0 (sequence is synthesized)
ggggctgccgtccctccgcctcttcccccgcggggcgtagcgatggcccgggccagggccggggcgctgctggcgctttg

SEQ ID NO: 644637 - DNA, 120 bp, Artificial Sequence
  ENSG00000182218_1 (sequence is synthesized)
cgctgctggcgctttgggtgctcggggccgccgcgcatccgcagtgcctggacttcaggccgcccttccggccgacgcagccgctgcgcctctgcgcgcagtactcggacttcggctgct

SEQ ID NO: 644638 - DNA, 120 bp, Artificial Sequence
  ENSG00000182218_2 (sequence is synthesized)
gcgatgaggggcgcgacgccgagctgacccgccgcttctgggccctggcgagccgcgtggacgccgccgagtgggccgcgtgcgccggctacgcgagggacctgctgtgccaggaatgct

SEQ ID NO: 644639 - DNA, 120 bp, Artificial Sequence
  ENSG00000182218_3 (sequence is synthesized)
cgccgtatgcagcccacctctatgacgccgaggacccattcacgcccctgcgcacggtgcccgggctctgccaggattactgcctggacatgtggcataagtgccgggggctgttccgtc

SEQ ID NO: 644640 - DNA, 120 bp, Artificial Sequence
  ENSG00000182218_4 (sequence is synthesized)
acctgtcaactgaccaggagctctgggcgctggagggcaaccttgccaggttctgccgctacctgtccctggatgacacggactactgcttcccttacctgctggtcaacaagaacctca

SEQ ID NO: 644641 - DNA, 120 bp, Artificial Sequence
  ENSG00000182218_5 (sequence is synthesized)
actcaaacctgggccacgtggtagccgatgccaagggctgcctgcagctgtgcctggaggaggtggccaacgggctgcgcaaccccgtggccatggtccatgccagggatggcacccacc

SEQ ID NO: 644642 - DNA, 120 bp, Artificial Sequence
  ENSG00000182218_6 (sequence is synthesized)
gcttcttcgtggccgagcaggtggggctggtgtgggcctacctgcccgaccgctcgaggctggggaagcctttcctgaacatcagccgggtggtgctcacctcgccctgggagggtgacg

SEQ ID NO: 644643 - DNA, 120 bp, Artificial Sequence
  ENSG00000182218_7 (sequence is synthesized)
agcgtggcttcctgggcattgccttccaccccagcttccagcacaaccgcaggctctacgtctactactcagtgggtatccgcagcagtgagtggatccgcatcagcgagttcagagtct

SEQ ID NO: 644644 - DNA, 120 bp, Artificial Sequence
  ENSG00000182218_8 (sequence is synthesized)
ccgaggatgacgagaacgccgtggaccacagctctgagaggataatcctggaggtcaaagaaccagcctcaaaccacaacgggggccagctgcttttcggggatgacgggtacctctaca

SEQ ID NO: 644645 - DNA, 120 bp, Artificial Sequence
  ENSG00000182218_9 (sequence is synthesized)
tcttcactggagatggcgggatggccggagacccctttgggacatttggaaatgcccaaaacaagtcggcgctgctgggcaaggtgctgcgcatcgacgtggaccgtaaggagcgcggcc

SEQ ID NO: 644646 - DNA, 120 bp, Artificial Sequence
  ENSG00000182218_10 (sequence is synthesized)
tgccctacggcatcccgcccgacaacccgttcgtgggcgaccccgcggcgcagcccgaggtctacgccctgggcgtgcgcaacatgtggcgctgctccttcgaccgtggcgacccctcct

SEQ ID NO: 644647 - DNA, 120 bp, Artificial Sequence
  ENSG00000182218_11 (sequence is synthesized)
cgggcactggccgcgggcgcctcttctgcggcgacgtgggccagaacaagttcgaggaggtggacgtggtggagcgcggcggcaactatggctggcgcgcgcgcgaagggttcgagtgct

SEQ ID NO: 644648 - DNA, 120 bp, Artificial Sequence
  ENSG00000182218_12 (sequence is synthesized)
acgaccgcagcctgtgcgccaacacctctctcaatgacttgctgccgattttcgcctacccgcacacggttggcaagtcggtcacagggggctacgtgtaccggggctgcgagtacccca

SEQ ID NO: 644649 - DNA, 120 bp, Artificial Sequence
  ENSG00000182218_13 (sequence is synthesized)
acctgaacggcctctacatttttggggatttcatgagcgggcgtctgatgtccctccaagagaacccagggacaggccagtggcagtacagtgagatctgcatgggccacggccagacct

SEQ ID NO: 644650 - DNA, 120 bp, Artificial Sequence
  ENSG00000182218_14 (sequence is synthesized)
gtgagttcccaggcctcatcaacaactactacccgtacatcatctccttcggggaggacgaggccggggagctgtacttcatgtcgacaggggagccgagtgccacagctccacgcggag

SEQ ID NO: 644651 - DNA, 120 bp, Artificial Sequence
  ENSG00000182218_15 (sequence is synthesized)
ttgtctacaaaataattgacgcatccaggcgggcaccacctggcaaatgtcagatccagcctgctcaggtgaagatcagaagccgtctcatcccctttgtgcccaaagaaaagttcatcc

SEQ ID NO: 644652 - DNA, 120 bp, Artificial Sequence
  ENSG00000182218_16 (sequence is synthesized)
ttgtgcccaaagaaaagttcatcccgaagacacggagcaccccgcggcctacagcgcgggcgcccacgcgggcgccccgccgagggcgccccacggccgctccccccgcgccaaccccgc

SEQ ID NO: 644653 - DNA, 120 bp, Artificial Sequence
  ENSG00000182218_17 (sequence is synthesized)
gggcggctgaactcggcgagccgggcgttccgggatggcgaggtgcgcctggtgcggcccgcgggcctgagctctggcagcgggcgcgtggaggtgttcgtgggcggacgctggggcacc

SEQ ID NO: 644654 - DNA, 120 bp, Artificial Sequence
  ENSG00000182218_18 (sequence is synthesized)
tggaggtgttcgtgggcggacgctggggcaccgtgtgcgacgactcctggaacatcagcggcgccgccgtcgtgtgtcgccagctggggtttgcctacgccgtgcgcgccgtcaagagag

SEQ ID NO: 644655 - DNA, 120 bp, Artificial Sequence
  ENSG00000182218_19 (sequence is synthesized)
ccgagttcggccagggcggctcgctgcccattctgctggacgatgtgcgctgcgcgggctgggagcggaacctgctggagtgccagcacaacggcgtgggcacccacaactgcgagcacg

SEQ ID NO: 644656 - DNA, 120 bp, Artificial Sequence
  ENSG00000182218_20 (sequence is synthesized)
acgaggatgcgggcgtcgtgtgcagccaccagaaccccgacctgtaggcaacacgccgctgccccaggccatcccgccggcgggggagcctggcaggggccgctccgccctgtgtgcgcc

SEQ ID NO: 644657 - DNA, 120 bp, Artificial Sequence
  ENSG00000182218_21 (sequence is synthesized)
cagcgggtgcacacgtgttctagagtgaagggggtgcgggtgtgtgctgtcctggggacatgtgtgaggcgctgcagtgcatgtgtgtcctctgcagacccaaggcaggagtgtgtgttg

SEQ ID NO: 644658 - DNA, 120 bp, Artificial Sequence
  ENSG00000182218_22 (sequence is synthesized)
ggggcggtgtgggctctggaagtgcatggtccatcatgggcgggaggagttcctttcttacctccaagcgtttcagacaccagcaggaacagcagccgggctgtgggaccctgaggaggg

SEQ ID NO: 644659 - DNA, 120 bp, Artificial Sequence
  ENSG00000182218_23 (sequence is synthesized)
agggcagccaggcttcgaggacggacatggcccctggctgtgctaacagaggcacagcttgcagactgagggcggtggggagaaccaggcttgtcctgcccacagctggaatggaaggtg

SEQ ID NO: 644660 - DNA, 120 bp, Artificial Sequence
  ENSG00000182218_24 (sequence is synthesized)
caagaacagccggagggtggcctgaggaatgtggcccggacagcatggcctggtgcccgcatcccccccaccccctggcagtcagaggcgctggagagaaccggaaggcatccagtgggg

SEQ ID NO: 644661 - DNA, 120 bp, Artificial Sequence
  ENSG00000182218_25 (sequence is synthesized)
aagggaaagccttctggaaggtgggagcagggtgagctgcaggcctggggccccactggaggggcaggctgcgtggaggagccagcacctgctcagggaggatggctgtgaggactggat

SEQ ID NO: 644662 - DNA, 120 bp, Artificial Sequence
  ENSG00000182218_26 (sequence is synthesized)
gacctccaaggccgtatgctggagaagccactcagcagcatactcagtccttgtgggtgctcctgggatgggaccagcctcctccaaccctgaggcctgattctctcttgctcttggggc

SEQ ID NO: 644663 - DNA, 120 bp, Artificial Sequence
  ENSG00000182218_27 (sequence is synthesized)
agaagccacccacactagctgggcagagctttcaccctggccctccagtgagtcggtgggcctccactactttcaaagctgtgtttgggccctggggccacctctgtcctttccatcccc

SEQ ID NO: 644664 - DNA, 120 bp, Artificial Sequence
  ENSG00000182218_28 (sequence is synthesized)
atccctgctcagtgtaaacccaggagacctgattcctccagccctacctcggggctgaccaggctgggggtccagtgaaactactgacactttttcacccagggctatgccaataatgtg

SEQ ID NO: 644665 - DNA, 120 bp, Artificial Sequence
  ENSG00000182218_29 (sequence is synthesized)
gctgtttacacaccactttcctgcctcctctctgacctgcacctgtgtgggagccggggtgggaaccaggagaaaggggtgaggcctcccgcttcccacctgcatcacaggtggaagctc

SEQ ID NO: 644666 - DNA, 120 bp, Artificial Sequence
  ENSG00000182218_30 (sequence is synthesized)
agcctcggatgggagcacgggtggggggtgggtaagcagatgagtcaccaggcagtgaagacaggatgtggcccatgtcgggggttggaagaggtctgggtggggcacccaaacccaacc

SEQ ID NO: 644667 - DNA, 120 bp, Artificial Sequence
  ENSG00000182218_31 (sequence is synthesized)
tatgggggggctttgggagggggtgatgctgtgccaagttctgggagctggcaccaggggtggctgggcaggccttggggcaggcatgagtctggcagggtctcctagctgctagtatag

SEQ ID NO: 644668 - DNA, 120 bp, Artificial Sequence
  ENSG00000182218_32 (sequence is synthesized)
ggtctcctagccactagtataggatcctgggctgcagcagaaagctttaggtcactgtcttggactcctcatactctgtgctttacagaatgggaaactgaggcacacagaggttagata

SEQ ID NO: 644669 - DNA, 120 bp, Artificial Sequence
  ENSG00000182218_33 (sequence is synthesized)
tcttagggcaccaagccagggaagggagaagtcaagtttgaatacagcagcttagtttagagtccccgcaccctaaccactgccctccccagctacactatgcctgcagagagcggtgtg

SEQ ID NO: 644670 - DNA, 120 bp, Artificial Sequence
  ENSG00000182218_34 (sequence is synthesized)
ctggggctcctgcctggtgtgggagtgccagcctggctgggaagcagctgatggagatccctgggggctcctcttgcctggcaggtgcccccgctgctggcctcatgctcctctcgggcc

SEQ ID NO: 644671 - DNA, 120 bp, Artificial Sequence
  ENSG00000182218_35 (sequence is synthesized)
tccagtggcccaggggaggttgagtgggcatcttcctgggatgcaggggagttctgagctctgacgccgggcgtgttaggagatagcaggccgttaatgaccatcccagccgaattcctc

SEQ ID NO: 644672 - DNA, 120 bp, Artificial Sequence
  ENSG00000182218_36 (sequence is synthesized)
actgtgcagatgaggaagtgagctcagggaggctgagtgtcccaggcctgttgccagatgaggccacgctgagactggagccagggaaggtgcagcaagccttgaggccctcaagaatgc

SEQ ID NO: 644673 - DNA, 120 bp, Artificial Sequence
  ENSG00000182218_37 (sequence is synthesized)
agccgagccagggccctgcttgcctggccccagaagctgttttgctcagagctggattaggagggttggcaaagggagctctgggtgcggcctcaggccctccagtacttctctgggcag

SEQ ID NO: 644674 - DNA, 120 bp, Artificial Sequence
  ENSG00000182218_38 (sequence is synthesized)
ttcgggctttggccttcagtcttccaggccaggcgctcttcctccccagcctccaactcatcacctctcaggccccaaaccaggcctgggctaggctgcagcctgcctcctggggactca

SEQ ID NO: 644675 - DNA, 120 bp, Artificial Sequence
  ENSG00000182218_39 (sequence is synthesized)
ctccacagtccccaggtcagtggtccccaacctttttggcatcatggactggtttcatgtaagacaatttttccatggatgggggttggggggatggttttgggatgaaatgtcccacct

SEQ ID NO: 644676 - DNA, 120 bp, Artificial Sequence
  ENSG00000182218_40 (sequence is synthesized)
tcatcaggcattagattctcataaggagttcacagcctagatccctcgcatgcacagttcatagtaggtttcatgttcctatgcggatctaatgccactgctgatctggcaggaggcaga

SEQ ID NO: 644677 - DNA, 90 bp, Artificial Sequence
  ENSG00000182218_41 (sequence is synthesized)
tcctatgcggatctaatgccactgctgatctggcaggaggcagagctcaggtgggaatgcttgctccccacactaccctgccccactgcc

SEQ ID NO: 644678 - DNA, 120 bp, Artificial Sequence
  ENSG00000182218_42 (sequence is synthesized)
ggagacctctgccctaggtagtaataagagtggacagctgttatatgtaaatacttgttccccgatgctggaaagaaatagcactaaaacataaatttaattctttcagcaaggcaattt

SEQ ID NO: 644679 - DNA, 120 bp, Artificial Sequence
  ENSG00000182218_43 (sequence is synthesized)
tactttctgcagaaagggtgctcatcgcagatggaacaatagtgagaggacacctgaacaaaggagggaagcaattgttagcccttatgcagtttgtccctgctactgtgtcctatgtcc

SEQ ID NO: 644680 - DNA, 120 bp, Artificial Sequence
  ENSG00000182218_44 (sequence is synthesized)
attggcagaagccagaccgcacaatctaaactaaaacccgattggctgtttaaaatttttctaaataggtaaaagtaatggaaggataaaggaaaagaggaagttgcttacgaaaggact

SEQ ID NO: 644681 - DNA, 120 bp, Artificial Sequence
  ENSG00000182218_45 (sequence is synthesized)
tagaaaagtaataatattcccaaataaggaaggggtataggctgtgagctgggacatgcctgtgagcacgtccagcacagatatcttggttaaagtataaggacatagaacgtactatgt

SEQ ID NO: 644682 - DNA, 120 bp, Artificial Sequence
  ENSG00000182218_46 (sequence is synthesized)
gcctgtgagcacgtctaacagttacatagaatagggcttgacaaagagttattagcataaagcaaggaggtttgaaggaagttcgtctttaaaagaaaccattatttctaacacttacga

SEQ ID NO: 644683 - DNA, 120 bp, Artificial Sequence
  ENSG00000182218_47 (sequence is synthesized)
tttattctttaacaagaagggaaactttcaagaggaacttttactttctacaacagctgacctctgctgagcgcttactacatgccaagcactgctctgaaagtttaacataccattcac

SEQ ID NO: 644684 - DNA, 120 bp, Artificial Sequence
  ENSG00000182218_48 (sequence is synthesized)
tcatgtaatcctcatattaatgcacatttactcacgtggaagccgagttccagggcatttgtcacttaccaaatgtcacatagccaaaatttgaatttgagcccaggtagtccagctctg

SEQ ID NO: 644685 - DNA, 120 bp, Artificial Sequence
  ENSG00000182218_49 (sequence is synthesized)
ggaccctgctgtgggccttcctgctgggccacctcaagggcattgaaagccagccccaccccactgggacacaagttcagagaagggcagagctggctgcctgtccagtgcttctttcac

SEQ ID NO: 644686 - DNA, 120 bp, Artificial Sequence
  ENSG00000182218_50 (sequence is synthesized)
tccaccacctacagctggccgctgagggagcattcacatgtgactctgtccccagggactccgatcttgccttaaagtcctccagggcctctgaggatgggggcacagccttcaccctca

SEQ ID NO: 644687 - DNA, 120 bp, Artificial Sequence
  ENSG00000182218_51 (sequence is synthesized)
ccccctctaatccaacctctagtcaatagccaggatcagattctcagagaggggctgccctgcccagtgccacacagcttagtgctggagcctcagggtcaatgctgcaggggtggccca

SEQ ID NO: 644688 - DNA, 120 bp, Artificial Sequence
  ENSG00000182218_52 (sequence is synthesized)
gtgtccaggactgtgttcaagacatcagtcagaggtcacaacatcccaggccctagactgagcctaggggtcaccatgttgataccttagaaatgtttgggaggttcaaggaagctggaa

SEQ ID NO: 644689 - DNA, 120 bp, Artificial Sequence
  ENSG00000182218_53 (sequence is synthesized)
actgggttccagtcctggctctgtgcctctctgagtctcattgcaaaatagaggtcaccagaaggattactggatgaaaaatgaggtagcattgcagacgtgcatggcacgtacactcta

SEQ ID NO: 644690 - DNA, 120 bp, Artificial Sequence
  ENSG00000182218_54 (sequence is synthesized)
ggttgcttcctagacagaaagctcagttcgaggctggtggcatccatgctggcagcagccaactgtctgcgacagagtgaggaggggcatgccacgtgaaggaccagcatcagaatgaca

SEQ ID NO: 644691 - DNA, 120 bp, Artificial Sequence
  ENSG00000182218_55 (sequence is synthesized)
tgggaagaaactctcacaatagcagaagaaagagctccttcagcctaacatgtagaactcaagtcttcttgtcgcgcttctgtcccctcgcccctcctcccccactgagaactagctttt

SEQ ID NO: 644692 - DNA, 120 bp, Artificial Sequence
  ENSG00000182218_56 (sequence is synthesized)
actgagcagttattacatgccagctacctcgggtgtgtcagctcatttaatcttgacaacagctccacgagacaccctcaatatcactgtccctgttttccagatgaggggacagattcc

SEQ ID NO: 644693 - DNA, 120 bp, Artificial Sequence
  ENSG00000182218_57 (sequence is synthesized)
tagggtgttatgtaagtggtccccggggctttagaggcaggtttgcaccaaggcccattctcccagagccggatccttctccttccctgggatacagcacctccaccctgccaggccacc

SEQ ID NO: 644694 - DNA, 120 bp, Artificial Sequence
  ENSG00000182218_58 (sequence is synthesized)
catgtaaaggcagccaattcagagccacctcttatgcctgcatctccccaacaattcctgctgggaaaccactcctcgtatggtgtcatctacaccagtgggtttcaagcttgagaagaa

SEQ ID NO: 644695 - DNA, 120 bp, Artificial Sequence
  ENSG00000182218_59 (sequence is synthesized)
tcaagttctacagggctgcttaaaacacaggttgctgggtcctgtctctcagagtttttgactcagtcttggttgagaattttcagttctagaagctcctgggtaatgctaatcctcctg

SEQ ID NO: 644696 - DNA, 120 bp, Artificial Sequence
  ENSG00000182218_60 (sequence is synthesized)
ttctaggggccatagtcattgtccatactggtgctatccaatagaaacataatgtgagccaaataggtaatttaaaatctgcttgtagccatgttaaaaaagtaaaacaggtaaaattaa

SEQ ID NO: 644697 - DNA, 120 bp, Artificial Sequence
  ENSG00000182218_61 (sequence is synthesized)
ggtggaaatgagcacaaagacacgaagtcatgggcctggggcccagggccagggtggggcccaggccactggctccagagccctgccctaaccccttggctgtgtgccttcacctcaccc

SEQ ID NO: 644698 - DNA, 120 bp, Artificial Sequence
  ENSG00000182218_62 (sequence is synthesized)
tcttcaagcaccttccccaacccacgttgccctccaggcctctgtccagcccttcctcagctctcatcactcagacttggtaatccctgggctacacgactgactctctcccagctgctc

SEQ ID NO: 644699 - DNA, 120 bp, Artificial Sequence
  ENSG00000182218_63 (sequence is synthesized)
tgggagtctcagggccaagcctgtatctcttcactctgcagaggccgcccaggtgctgggaatggcacggagcagagactcaggaacacttgatgaataaatgagtgatcagctttctaa

SEQ ID NO: 644700 - DNA, 120 bp, Artificial Sequence
  ENSG00000182220_0 (sequence is synthesized)
gagtccgagcgcgtcacctcctcacgctgcggctgtcgcccgtgtcccgccggcccgttccgtgtcgccccgcagtgctgcggccgccgcggcaccatggctgtgtttgtcgtgctcctg

SEQ ID NO: 644701 - DNA, 120 bp, Artificial Sequence
  ENSG00000182220_1 (sequence is synthesized)
gcgttggtggcgggtgttttggggaacgagtttagtatattaaaatcaccagggtctgttgttttccgaaatggaaattggcctataccaggagagcggatcccagacgtggctgcattg

SEQ ID NO: 644702 - DNA, 120 bp, Artificial Sequence
  ENSG00000182220_2 (sequence is synthesized)
tccatgggcttctctgtgaaagaagacctttcttggccaggactcgcagtgggtaacctgtttcatcgtcctcgggctaccgtcatggtgatggtgaagggagtgaacaaactggctcta

SEQ ID NO: 644703 - DNA, 120 bp, Artificial Sequence
  ENSG00000182220_3 (sequence is synthesized)
cccccaggcagtgtcatttcgtaccctttggagaatgcagttccttttagtcttgacagtgttgcaaattccattcactccttattttctgaggaaactcctgttgttttgcagttggct

SEQ ID NO: 644704 - DNA, 120 bp, Artificial Sequence
  ENSG00000182220_4 (sequence is synthesized)
cccagtgaggaaagagtgtatatggtagggaaggcaaactcagtgtttgaagacctttcagtcaccttgcgccagctccgtaatcgcctgtttcaagaaaactctgttctcagttcactc

SEQ ID NO: 644705 - DNA, 120 bp, Artificial Sequence
  ENSG00000182220_5 (sequence is synthesized)
cccctcaattctctgagtaggaacaatgaagttgacctgctctttctttctgaactgcaagtgctacatgatatttcaagcttgctgtctcgtcataagcatctagccaaggatcattct

SEQ ID NO: 644706 - DNA, 120 bp, Artificial Sequence
  ENSG00000182220_6 (sequence is synthesized)
cctgatttatattcactggagctggcaggtttggatgaaattgggaagcgttatggggaagactctgaacaattcagagatgcttctaagatccttgttgacgctctgcaaaagtttgca

SEQ ID NO: 644707 - DNA, 120 bp, Artificial Sequence
  ENSG00000182220_7 (sequence is synthesized)
gatgacatgtacagtctttatggtgggaatgcagtggtagagttagtcactgtcaagtcatttgacacctccctcattaggaagacaaggactatccttgaggcaaaacaagcgaagaac

SEQ ID NO: 644708 - DNA, 120 bp, Artificial Sequence
  ENSG00000182220_8 (sequence is synthesized)
ccagcaagtccctataaccttgcatataagtataattttgaatattccgtggttttcaacatggtactttggataatgatcgccttggccttggctgtgattatcacctcttacaatatt

SEQ ID NO: 644709 - DNA, 120 bp, Artificial Sequence
  ENSG00000182220_9 (sequence is synthesized)
cagaattagaaaagggggttggaaattggctgttttgttaaaatatatcttttagtgtgctttaaagtagatagtatactttacatttataaaaaaaaatcaaattttgttctttatttt

SEQ ID NO: 644710 - DNA, 120 bp, Artificial Sequence
  ENSG00000182220_10 (sequence is synthesized)
gtgtgtgcctgtgatgtttttctagagtgaattatagtattgacgtgaatcccactgtggtatagattccataatatgcttgaatattatgatatagccatttaataacattgatttcat

SEQ ID NO: 644711 - DNA, 120 bp, Artificial Sequence
  ENSG00000182220_11 (sequence is synthesized)
tctgtttaatgaatttggaaatatgcactgaaagaaatgtaaaacatttagaatagctcgtgttatggaaaaaagtgcactgaatttattagacaaacttacgaatgcttaacttcttta

SEQ ID NO: 644712 - DNA, 120 bp, Artificial Sequence
  ENSG00000182220_12 (sequence is synthesized)
cacagcataggtgaaaatcatatttgggctattgtatactatgaacaatttgtaaatgtcttaatttgatgtaaataactctgaaacaagagaaaaggtttttaacttagagtagcccta

SEQ ID NO: 644713 - DNA, 120 bp, Artificial Sequence
  ENSG00000182220_13 (sequence is synthesized)
aaatatggatgtgcttatataatcgcttagttttggaactgtatctgagtaacagaggacagctgttttttaaccctcttctgcaagtttgttgacctacatgggctaatatggatacta

SEQ ID NO: 644714 - DNA, 120 bp, Artificial Sequence
  ENSG00000182220_14 (sequence is synthesized)
aaaatactacattgatctaagaagaaactagccttgtggagtatatagatgcttttcattatacacacaaaaatccctgagggacattttgaggcatgaatataaaacatttttatttca

SEQ ID NO: 644715 - DNA, 120 bp, Artificial Sequence
  ENSG00000182220_15 (sequence is synthesized)
gtaacttttccccctgtgtaagttactatggtttgtggtacaacttcattctatagaatattaagtggaagtgggtgaattctactttttatgttggagtggaccaatgtctatcaagag

SEQ ID NO: 644716 - DNA, 120 bp, Artificial Sequence
  ENSG00000182220_16 (sequence is synthesized)
tgacaaataaagttaatgatgattccaaatttgtgtcattgcagtactaaatctattttatattgtaaaaacctaacaaaacaggcttttctttcatcaggattggctgttttgttgtac

SEQ ID NO: 644717 - DNA, 120 bp, Artificial Sequence
  ENSG00000182220_17 (sequence is synthesized)
agataatttcatggtgtttcttttacacttgtttattctcgctgcctcctgagatttagtactaatgtaaggaaggcattttaattaccattcttgttactgaatttatataggatatat

SEQ ID NO: 644718 - DNA, 120 bp, Artificial Sequence
  ENSG00000182220_18 (sequence is synthesized)
taaaaaattaaagggatgcattttacattttcccttgtcagctgtcattatgaattgcattctaaacatacttctcttatctgtttttgatgcacagtttcttttgaaattctttgacaa

SEQ ID NO: 644719 - DNA, 120 bp, Artificial Sequence
  ENSG00000182220_19 (sequence is synthesized)
acacaatttctttttaagaaaattacatgatgattgtaattaactgaggcttggctgttctctgtggatgagagtactgtttaagataagagatagagaaattgccccactcagaatagc

SEQ ID NO: 644720 - DNA, 120 bp, Artificial Sequence
  ENSG00000182220_20 (sequence is synthesized)
ggttgtatcctgctactgtttttttggccattgtcttgtcatcttccctgcaggattttacctcttttcgtgtgtaaggacactggaggctgcttgctggctcacttactccttcactgg

SEQ ID NO: 644721 - DNA, 120 bp, Artificial Sequence
  ENSG00000182220_21 (sequence is synthesized)
ctattcaggcaatgtgggtgactgtgctgatctaagaggccctccttccattataagcatatagaagtgcttgaaagaatgtcacaaaaaacatttttactagcataactaaatttgaat

SEQ ID NO: 644722 - DNA, 120 bp, Artificial Sequence
  ENSG00000182220_22 (sequence is synthesized)
gcaagagggggtgatatacacaggtgttacatatggatggaaaactcagaagccatagtggtgagcagaagctgacgctgaaactgtgtttcctgcagaaagccagggactagaaatgct

SEQ ID NO: 644723 - DNA, 120 bp, Artificial Sequence
  ENSG00000182220_23 (sequence is synthesized)
gtcaacttgttcttgaaaagcagactagtaaaactagtaaagctggcttgctgcccttggctgttggacccaaagagtcccctgagataaattagaattagaattataggcttatgctgt

SEQ ID NO: 644724 - DNA, 120 bp, Artificial Sequence
  ENSG00000182220_24 (sequence is synthesized)
gcagagtggttctttgcaaattcacatgacctgccccatagggacatctccatagccaagggctcctttggtcaaatacggaagatgagtggaatttacaaagcacctgaaggaaaaaaa

SEQ ID NO: 644725 - DNA, 120 bp, Artificial Sequence
  ENSG00000182220_25 (sequence is synthesized)
atgccatgagaaacaggtgcaacaaacagaattcatctccttagaactacggagaataggccaatttccaagagatctaaaaatacatacattaaaattgtgaaaaaaagggccaggcat

SEQ ID NO: 644726 - DNA, 62 bp, Artificial Sequence
  ENSG00000182220_26 (sequence is synthesized)
ggtggctcacgcctgtaatcccatcaacatagcaagaccctatctctagggggaaaaaaaaa

SEQ ID NO: 644727 - DNA, 63 bp, Artificial Sequence
  ENSG00000182220_27 (sequence is synthesized)
atttcacagaatcataaaattgatcacttaatattgatgctgtcttgaactcctggcctcaag

SEQ ID NO: 644728 - DNA, 120 bp, Artificial Sequence
  ENSG00000182220_28 (sequence is synthesized)
ggcctcccaaagtgctgggatcacaggcttgagccactgcatctggcctcccattccttatactacttgaaattttggaaattttgctattttagaaaatgaaagattgtgcacatttac

SEQ ID NO: 644729 - DNA, 120 bp, Artificial Sequence
  ENSG00000182220_29 (sequence is synthesized)
gtgcacatttactgctggggtagattcttctttagtgtaattttcttatgactctcatgaataaactgatcctttttgtgagttgagctgtggtaaataacatcacattttagcacgagg

SEQ ID NO: 644730 - DNA, 120 bp, Artificial Sequence
  ENSG00000182220_30 (sequence is synthesized)
gttgccacctattaattcaaacaagccagaggtcatagatctacttggtgactggtggagctgtgtggatctggtaacttggaagccattgttcactgcctctgctgatttgttgccaca

SEQ ID NO: 644731 - DNA, 120 bp, Artificial Sequence
  ENSG00000182220_31 (sequence is synthesized)
ctgtccttcagtttctccatctgctcatgcgccctcttaaccatgtggcatgccactttcgtggtggcctcccctttttatttgctgtggatgaccagggccatcatcctttattctctg

SEQ ID NO: 644732 - DNA, 120 bp, Artificial Sequence
  ENSG00000182220_32 (sequence is synthesized)
atgtggaaactattcaagggaagtgagcaaactgggccaatggtaggatgtcattgcagagtgccaggatatcctgatgctttgaaggaaaaccactggagaacttggatgctttatcat

SEQ ID NO: 644733 - DNA, 120 bp, Artificial Sequence
  ENSG00000182220_33 (sequence is synthesized)
ggttttgccaaaaatatagctattgagtggcagtcactgtgctagggaatggccatcacctttttgttaggaaataatgttttatatgcattttcaattgaagcaaacataccaaatgga

SEQ ID NO: 644734 - DNA, 120 bp, Artificial Sequence
  ENSG00000182220_34 (sequence is synthesized)
agataattatataaattcacttatatgatcaacatttgtaatatcctgtgccttgcttggtaaatggcaaataaagatctctggtgcacatttaaaagaatgctctttttttttgggctc

SEQ ID NO: 644735 - DNA, 120 bp, Artificial Sequence
  ENSG00000182220_35 (sequence is synthesized)
attcttatacatgtctcttggtacacatatagaaattttccctagcgtatggacttactggatcacaggatatgcacaccttcaactttattaggtattgtccagttttcccaagcattt

SEQ ID NO: 644736 - DNA, 120 bp, Artificial Sequence
  ENSG00000182220_36 (sequence is synthesized)
cctcctagtataagtagctgttatgccacttatgaagaaatgtttgttagacaaatgaatcacagtcactagactgggataatttcctattttaaaattcttccctcttgatttttcttt

SEQ ID NO: 644737 - DNA, 120 bp, Artificial Sequence
  ENSG00000182220_37 (sequence is synthesized)
cttttctatattgtagaagaacccagcaagtccctataaccttgcatataagtataattttgaatattccgtggttttcaacatggtactttggataatgatcgccttggccttggctgt

SEQ ID NO: 644738 - DNA, 120 bp, Artificial Sequence
  ENSG00000182220_38 (sequence is synthesized)
ctgttctcagttcactccccctcaattctctgagtaggaacaatgaagttgacctgctctttctttctgaactgcaagtgctacatgatatttcaagcttggtaagtaggctgctctaat

SEQ ID NO: 644739 - DNA, 120 bp, Artificial Sequence
  ENSG00000182220_39 (sequence is synthesized)
tttttaattccatttattttggtttctagagaatccttgaataatagtaaaggcagttgaaaagtttgattaagtatgccctagatttatgatcccatgaaaattgaaaaattagtggca

SEQ ID NO: 644740 - DNA, 120 bp, Artificial Sequence
  ENSG00000182220_40 (sequence is synthesized)
atattgggaattttgaacacatccatgttatagtcaaattattttgcatttctgctttttagggagagacaacatatcttccaagaacacaagcctgggcgtaagaacaccctggccata

SEQ ID NO: 644741 - DNA, 120 bp, Artificial Sequence
  ENSG00000182220_41 (sequence is synthesized)
gtcctaacttggctgttgatttcttgtgagacttaattcctatctatatctttgggcctaaaatagaaataatagtttggactaataatgctgtcagtcaagtcaagaagggacgaaatc

SEQ ID NO: 644742 - DNA, 120 bp, Artificial Sequence
  ENSG00000182220_42 (sequence is synthesized)
tttttcaacaggtgttggttcggggagtctggaagtgtagtgcattcctgggatcaaactggtccagccatctgttctttcatacgttggcccatacctgagtttttaaaactgaggaat

SEQ ID NO: 644743 - DNA, 120 bp, Artificial Sequence
  ENSG00000182220_43 (sequence is synthesized)
tttgttgaaagcttttattaaatatccaaggagtcttgtactgctcctaaacatgagattcgtgttggatttatcagaaacgcttattcaaaccagtttcttttgccaccattttagact

SEQ ID NO: 644744 - DNA, 120 bp, Artificial Sequence
  ENSG00000182220_44 (sequence is synthesized)
atttgcatgttgtggtacactggtatggtttagtttagcctagtttagttaggcataaaactttaactggctgtgtttgacgtctttcatcttactttatccgctacctttttttgtttg

SEQ ID NO: 644745 - DNA, 120 bp, Artificial Sequence
  ENSG00000182220_45 (sequence is synthesized)
tttgttctcctaagctgtctcgtcataagcatctagccaaggatcattctcctgatttatattcactggagctggcaggtttggatgaaattgggaagcgttatggggaagactctgaac

SEQ ID NO: 644746 - DNA, 120 bp, Artificial Sequence
  ENSG00000182220_46 (sequence is synthesized)
gcacatttagtcaatattgaaaccaaatgtattgctgcttcaaatacatgaatgaccaccagaaaatggtttgtgctagatatagtgttgtgtccatcaggtttaagttattttccactg

SEQ ID NO: 644747 - DNA, 120 bp, Artificial Sequence
  ENSG00000182220_47 (sequence is synthesized)
aggcatgatgggagatacagacttggcttaccagggggctgtttaatcttctgtgccctcaaaagggcttgtttggaaatgatttcgggcttctaaatttccatagaaagtgctggaaaa

SEQ ID NO: 644748 - DNA, 120 bp, Artificial Sequence
  ENSG00000182220_48 (sequence is synthesized)
tttcatcgtcctcgggctaccgtcatggtgatggtgaagggagtgaacaaactggctctacccccaggcagtgtcatttcgtaccctttggagaatctgtctcgtcataagcatctagcc

SEQ ID NO: 644749 - DNA, 120 bp, Artificial Sequence
  ENSG00000182220_49 (sequence is synthesized)
aaggtaaatatcaatgcgacatgagaggttggagtatgaccatttcacttttagcctcttaatagaaaaatctgctgtttcaaacactgttgattgaactcttatttgccttctttgggg

SEQ ID NO: 644750 - DNA, 120 bp, Artificial Sequence
  ENSG00000182220_50 (sequence is synthesized)
ctcctctaattatactggccaaggatggagtagggtcaaaaatgtatattgatatatttcttcctaatgctagaaagaacagcattaggaaaagttatctcacacaaagctttacaaaat

SEQ ID NO: 644751 - DNA, 120 bp, Artificial Sequence
  ENSG00000182220_51 (sequence is synthesized)
acagtctttatggtgggaatgcagtggtagagttagtcactgtcaagtcatttgacacctccctcattaggaagacaaggactatccttgaggcaaaacaagcggaaaaagaacatgttt

SEQ ID NO: 644752 - DNA, 120 bp, Artificial Sequence
  ENSG00000182220_52 (sequence is synthesized)
acctttcagtcaccttgcgccagctccgtaatcgcctgtttcaagaaaactctgttctcagttcactccccctcaattctctgagtaggaacaatgaagtaagtgcagttattcaatgaa

SEQ ID NO: 644753 - DNA, 120 bp, Artificial Sequence
  ENSG00000182220_53 (sequence is synthesized)
tgtacagttcagtggtattaagtgcaagtacgttcacatgttgtacaaccatcaccatcttctatttctagaactttttcttcttccccaactgaaactctgtactccttaaacactatg

SEQ ID NO: 644754 - DNA, 120 bp, Artificial Sequence
  ENSG00000182220_54 (sequence is synthesized)
agataactgaagtagaacacccagcacagtaccagacagtagatgcataataaatgctagttcccctctgcccttgaagttcttcacctgcatcctttcagtgaggcttcatattttaat

SEQ ID NO: 644755 - DNA, 120 bp, Artificial Sequence
  ENSG00000182220_55 (sequence is synthesized)
ctttatagatgtttgtgattaaccagagaccacttaggaagatttcatttctctttccaacttcccttcctccaatttatatgctgacaaattcagtctcttcttaaagtaattttagtc

SEQ ID NO: 644756 - DNA, 120 bp, Artificial Sequence
  ENSG00000182220_56 (sequence is synthesized)
taaacatttgaatatatgttaaagcttaacacttttctgtatagttgagcaaaatcaaaacctttaagacttgcttattgtaagatgtagtatatttcatgagccaggaggtaagtgtac

SEQ ID NO: 644757 - DNA, 120 bp, Artificial Sequence
  ENSG00000182220_57 (sequence is synthesized)
attgttcttgtagctgcacaaaagctttaaaaataattttaataagtatgtatttgactcactgcataaaatgataagtaggaggtaatgcatatgttaattagccaatgtggacttaag

SEQ ID NO: 644758 - DNA, 120 bp, Artificial Sequence
  ENSG00000182220_58 (sequence is synthesized)
tatgtatatattttttaaatgtttggagctgcttttaagaacatttttactgatttctgctaatagcccaaaaaagcatcaaacgaacgtaggtacgtttggtacagattacaaaagtta

SEQ ID NO: 644759 - DNA, 89 bp, Artificial Sequence
  ENSG00000182220_59 (sequence is synthesized)
gtggctcacgcctgtaatcccggcactctgggaggccgaggtgggaggctcagttgaacccaggaatcccatctcaaaaataaatgaat

SEQ ID NO: 644760 - DNA, 120 bp, Artificial Sequence
  ENSG00000182220_60 (sequence is synthesized)
ctcccatctcaaaaataaatgaattaattttttaaaaacccatttgtagttgggaagattttggatgagtgcttcaagcttggcttctgaaacaaatcattagaaatcattaactatata

SEQ ID NO: 644761 - DNA, 120 bp, Artificial Sequence
  ENSG00000182220_61 (sequence is synthesized)
attatttattcatagtagtgaaattctttgtatattagagaatgcatctgtcctactcttaataggatatctactttctggttttttttttttagtataggcgatagattcactatgaat

SEQ ID NO: 644762 - DNA, 120 bp, Artificial Sequence
  ENSG00000182220_62 (sequence is synthesized)
gataaaatatatatgcattatgcctgaggttaggaaaataatgtggtcagtagccatggggcagccaaggaccttggtttcctagaatggagctatgacctgttgtagtaattggctgct

SEQ ID NO: 644763 - DNA, 120 bp, Artificial Sequence
  ENSG00000182220_63 (sequence is synthesized)
tatgtgattgtagggggcgggagggtctagatccagtcaatgtgagagatcgaaaggtaagggctcagaagaaaggaaatacagcttgctcggtgctatcatctccttctctttgtaagt

SEQ ID NO: 644764 - DNA, 120 bp, Artificial Sequence
  ENSG00000182220_64 (sequence is synthesized)
ctggtgcttttgatgtggtctctagatatatatcatcagtcactgaaaggaacttttctccaaatcctgagcacccttgaaaacagaaactctacctgggaactgcttcactgccaggcc

SEQ ID NO: 644765 - DNA, 120 bp, Artificial Sequence
  ENSG00000182220_65 (sequence is synthesized)
taagggcagagcccctgagctttttgtagtctttgggcaaccaaagtgaacaggattggttgtttacatttaaggatgaaatttgtacctagttatttttttagagacagggtctggctg

SEQ ID NO: 644766 - DNA, 120 bp, Artificial Sequence
  ENSG00000182220_66 (sequence is synthesized)
agggtctggctgtgtcacccaagctgagtttgagtctgcatgactcactgcagcctcaaactccagggcccaagtgatcttcctgcctcagcctcctgcctcagccttctgagtagctag

SEQ ID NO: 644767 - DNA, 90 bp, Artificial Sequence
  ENSG00000182220_67 (sequence is synthesized)
acgcctagctgagctatgttgtccaggctggtaggtctttaactcctggcctcaagcaatcctttctgcgtcagcctcccaaagtgctgg

SEQ ID NO: 644768 - DNA, 87 bp, Artificial Sequence
  ENSG00000182220_68 (sequence is synthesized)
acacccagcctgtacctaactacagggtcccgctctatcacccaagctagagtgcagtggcctgatctcggcttactgcaacctcca

SEQ ID NO: 644769 - DNA, 89 bp, Artificial Sequence
  ENSG00000182220_69 (sequence is synthesized)
tccacctcccacggtagctgggaccacaggcgtacaacaccatgcccagatcatttttatattttttgtagagacaggattttgccatg

SEQ ID NO: 644770 - DNA, 120 bp, Artificial Sequence
  ENSG00000182220_70 (sequence is synthesized)
cctgaccatctagttctttacaaccttaaacttgactactgatggctattaaaataactgagaaataattattagtaaactaatgatagttacttttagtaggaattgttttatttataa

SEQ ID NO: 644771 - DNA, 120 bp, Artificial Sequence
  ENSG00000182220_71 (sequence is synthesized)
agatcttagtctaaagaggatgttttaatgaccatcttgctatgtctctgtgaaagataaaagtgatgctgtatatgagggcaaaaaatgatgtgggggaagaaaatttccatggctaca

SEQ ID NO: 644772 - DNA, 120 bp, Artificial Sequence
  ENSG00000182220_72 (sequence is synthesized)
tgaagaaaatattttgtgatctgaaatttgaaaggtacctatgttttgtttacttgcttgcttttttccacaaaaggtgtcagatgacttactattggactttatttcaaatctgtaaaa

SEQ ID NO: 644773 - DNA, 120 bp, Artificial Sequence
  ENSG00000182220_73 (sequence is synthesized)
ttttaagaaaatgaagagggtagaaatcagcattcttgattaggggattgcaacgactgccacaaataaaatgtttactttccctgtgaattttccttgtcagtgtcatctcagaacccc

SEQ ID NO: 644774 - DNA, 120 bp, Artificial Sequence
  ENSG00000182223_0 (sequence is synthesized)
gcctatttagggtgcggcggcgggcgggagcagtgcgcccatggcggccctgggggacgaggtgctggacggttacgtgttcccggcgtgccccccctgctcgtaccggtacccataccc

SEQ ID NO: 644775 - DNA, 120 bp, Artificial Sequence
  ENSG00000182223_1 (sequence is synthesized)
ggcggcagctggcagcagcgcggcaggggctgccttcccgcctcctccccctgctcggcgggcgcggcctcgttgtccttcccgggctgcgggcggctgacggccgccgagtacttcgac

SEQ ID NO: 644776 - DNA, 120 bp, Artificial Sequence
  ENSG00000182223_2 (sequence is synthesized)
gcggctgacggccgccgagtacttcgacagctaccagcgggagcggctcatggctctcctggcgcaggtggggccgggtctcgggccgcgcgcccgcagggccggcagctgcgacgtggc

SEQ ID NO: 644777 - DNA, 80 bp, Artificial Sequence
  ENSG00000182223_3 (sequence is synthesized)
ggtgcaggtgagcccgcgcatcgacgccgcggtacagtgctcgctggggaggcgcacgctgcagcgccgggcccgcgacc

SEQ ID NO: 644778 - DNA, 120 bp, Artificial Sequence
  ENSG00000182223_4 (sequence is synthesized)
tggcggctctttctcccagcagccatcccgtcgaggcctggagcagggcagcccccagaacggcgccccgcggcccatgcgcttcccgcgcaccgtcgccgtgtactcgcccctggcctt

SEQ ID NO: 644779 - DNA, 120 bp, Artificial Sequence
  ENSG00000182223_5 (sequence is synthesized)
ttcctggaggggcccgggcccgcggcgggcgagcagaggtccggggcgtcggacggagagagggggccgccgcccgcgcggcttcaaggcccagaggagggggaggtgtggacgaagaag

SEQ ID NO: 644780 - DNA, 120 bp, Artificial Sequence
  ENSG00000182223_6 (sequence is synthesized)
ccgcagtccgacgacgacggcgaggcccaggccgcagtccgagcgagctgggagcagccggccgacggtcccgagctgccgccgcgagaggcccaggagggcgaggcggctccgcggtcg

SEQ ID NO: 644781 - DNA, 120 bp, Artificial Sequence
  ENSG00000182223_7 (sequence is synthesized)
acctccgtcggcggggagggcccgagacggcggcgacggacgggaggcggccgtcgcgggagaggggccgtcgccacggagcccggagctgggcaaggagcggctgcgcttccagttctt

SEQ ID NO: 644782 - DNA, 120 bp, Artificial Sequence
  ENSG00000182223_8 (sequence is synthesized)
gcaaggagcggctgcgcttccagttcttagagcagaaatatggctattaccactgcaaggactgcaacatccgctgggagagtgcttatgtgtggtgtgtacagggaactaacaaggttt

SEQ ID NO: 644783 - DNA, 120 bp, Artificial Sequence
  ENSG00000182223_9 (sequence is synthesized)
acttcaaacagttttgcagaacttgtcagaagtcttataacccttaccgagtggaggatatcacctgtcaaagttgtaaacaaacgagatgttcctgcccagtaaaacttcgccacgtgg

SEQ ID NO: 644784 - DNA, 120 bp, Artificial Sequence
  ENSG00000182223_10 (sequence is synthesized)
accctaaacggccccaccgtcaagatttgtgcggtagatgcaaaggcaaacgcctgtcctgtgacagcactttcagcttcaaatacatcatttaggtgaaagtcagtgttgctgtgcatg

SEQ ID NO: 644785 - DNA, 120 bp, Artificial Sequence
  ENSG00000182223_11 (sequence is synthesized)
cgctgatggagtagacgagtgagcttttccgtgcctctcctccacctctcccttctcaaaatacttcatgaaaggcagtgtattctgaaaaagccttcaaataaaggtattgcaacacga

SEQ ID NO: 644786 - DNA, 120 bp, Artificial Sequence
  ENSG00000182224_0 (sequence is synthesized)
aatggtttccatgtcagcggataaacgctctcccctcggctcccggacgcgacggaggtcgtagtagtagtgagtacgtgctgaggagcaaaggagtaaccaagagatccagtgaccgac

SEQ ID NO: 644787 - DNA, 120 bp, Artificial Sequence
  ENSG00000182224_1 (sequence is synthesized)
agagcaagagccatgccgcgccggggcctggtggctgggccagacttggagtattttcagcgtcgctatttcacgccggcggaggtggcccaacataacaggcccgaagacctctgggta

SEQ ID NO: 644788 - DNA, 120 bp, Artificial Sequence
  ENSG00000182224_2 (sequence is synthesized)
tcttacctgggacgcgtgtacgacctaacgtcattggcacaggaatacaaggggaacctgctgctgaaacccatcgtggaagttgcaggccaggatatcagccactggtttgatccaaag

SEQ ID NO: 644789 - DNA, 120 bp, Artificial Sequence
  ENSG00000182224_3 (sequence is synthesized)
accagagacatccgcaagcacatagatccgctgaccggctgcctgaggtactgcaccccgcggggccgctttgtgcacgttccgcctcagctgccctgttcggactgggccaacgatttt

SEQ ID NO: 644790 - DNA, 120 bp, Artificial Sequence
  ENSG00000182224_4 (sequence is synthesized)
gggaagccctggtggcaggggtcgtattatgaggtggggcggctgtctgccaagacccggagcatccgcatcattaacacgctcacgtcgcaggagcacacactggaggtgggggttctg

SEQ ID NO: 644791 - DNA, 120 bp, Artificial Sequence
  ENSG00000182224_5 (sequence is synthesized)
gagtccatatgggaaatcctacaccgctatctcccctataactcacatgctgccagctacacgtggaaatatgaagggaagaacctgaacatggattttaccctggaagagaatgggatc

SEQ ID NO: 644792 - DNA, 120 bp, Artificial Sequence
  ENSG00000182224_6 (sequence is synthesized)
cgggatgaggaggaagaatttgactatctcagtatggacggtacacttcacacacctgcaatacttctgtacttcaatgatgatctcacggagttgtaggcaaggagatgtacactcgtg

SEQ ID NO: 644793 - DNA, 120 bp, Artificial Sequence
  ENSG00000182224_7 (sequence is synthesized)
tagactcaagacgtatttcgagtttggctttttctgtgccttgaggaaaagtggtggggccgaggggtgcctggacccagatctccactcctctccaggagctagcctgtgcccttctga

SEQ ID NO: 644794 - DNA, 120 bp, Artificial Sequence
  ENSG00000182224_8 (sequence is synthesized)
agtgtaaaggccctattccctgccttcattacagtttgctctgagaaaattagtgaattaatctttgggaatgatacaagaagatcaagtaccttggtttagggagatgtagaagaggat

SEQ ID NO: 644795 - DNA, 120 bp, Artificial Sequence
  ENSG00000182224_9 (sequence is synthesized)
agtcagagttcaggcagaactgtttgatagttaagagagagtagttctacaggggtgagggatggaaggacttttttggcaatgatggaaatgagatgtctgcaggaagatgggatttac

SEQ ID NO: 644796 - DNA, 120 bp, Artificial Sequence
  ENSG00000182224_10 (sequence is synthesized)
aaagaaataggaaatgtttatcattgaccatacaaagctggcttatcttacttgtagaagagtgtttggcagctgaaacccaagggaaagaaaggaagtgcgtcattataggcaattcag

SEQ ID NO: 644797 - DNA, 120 bp, Artificial Sequence
  ENSG00000182224_11 (sequence is synthesized)
aggaagtgcgtcattataggcaattcaggctagatattatactaggtacttcatataccctcttttttttttttgcccccaacaaagagaaggggtcttgctctgtcacccagtctggag

SEQ ID NO: 644798 - DNA, 120 bp, Artificial Sequence
  ENSG00000182224_12 (sequence is synthesized)
gcctggagctcctgggcacaagtgatcctcccatctctgccttgagtagctgggacttcaggtgcacgccacaatgcctaattttttaattttttgtagacacagggtctcgctgtgttg

SEQ ID NO: 644799 - DNA, 120 bp, Artificial Sequence
  ENSG00000182224_13 (sequence is synthesized)
aagtgatcctcttgcctcagcctcccaaatagcctcttcaagacaactaccccataaggtggattaccattactatgttacagataagtccttcgaaactttggaaagtttaatagctca

SEQ ID NO: 644800 - DNA, 120 bp, Artificial Sequence
  ENSG00000182224_14 (sequence is synthesized)
tggaaagtttaatagctcaaagccacactaggtagtaaccactagagccagaatgcaaattcaagtctgcccaactccaaagtccatgttctctcaatataaagggaccatctcaatgtc

SEQ ID NO: 644801 - DNA, 120 bp, Artificial Sequence
  ENSG00000182224_15 (sequence is synthesized)
taatctcatgttaacatttgtagccactgctctcagcaagtatttgggatgtggctttgtcctaggatccctgcacaataggaaattgtggtcctattgtatagtttgcagttattgtct

SEQ ID NO: 644802 - DNA, 120 bp, Artificial Sequence
  ENSG00000182224_16 (sequence is synthesized)
ctggaagggagtttgcagagttctcctgtggcgaagaggaggcaaggaaggctaagtgtcagttaagcaatagctattggggctacttctttgttaatcccataccccagatttctctcc

SEQ ID NO: 644803 - DNA, 120 bp, Artificial Sequence
  ENSG00000182224_17 (sequence is synthesized)
tgaccttttggggcaaagaggtgggtatttactaacttgaaggaaaactagagtggggaaaaggccggcaaattagtgacactttggcgagggagaaaaaggaggcagtttgccacttgg

SEQ ID NO: 644804 - DNA, 120 bp, Artificial Sequence
  ENSG00000182224_18 (sequence is synthesized)
agaagatgaggaagacagggttgcaagacggtgactccaaaagagggagctcgacaggggtaatgtaaacagagatgctaactaagtcagaaaactctcctggtgaccaaaagagaacca

SEQ ID NO: 644805 - DNA, 120 bp, Artificial Sequence
  ENSG00000182224_19 (sequence is synthesized)
ctattgggggtaatggctagatttggtctcctttaacttaaggaggggagatttgagaatgacagacagttgaacttcctggcagcagcaagcaaaaaacaaatcaggaagagtttagtg

SEQ ID NO: 644806 - DNA, 120 bp, Artificial Sequence
  ENSG00000182224_20 (sequence is synthesized)
tgtcttctggcaggggacaccagggcccagcacaggagaaggtggcccctgtgagatactggtgggctatataggcattttctgaggggctttgggaggcatgaacaaaggtggaaacat

SEQ ID NO: 644807 - DNA, 120 bp, Artificial Sequence
  ENSG00000182224_21 (sequence is synthesized)
tgctgttggcttcggcagtatctgaatttactgtgagatggagggtttaaatctaaccccatggaatgcaggagtccatgaattatctaaatcgatcattttgatctttaatcaactctg

SEQ ID NO: 644808 - DNA, 120 bp, Artificial Sequence
  ENSG00000182224_22 (sequence is synthesized)
caattatgtgtaccttgtttgctcaattaaaccctgaactatttgagaatgaaagctatgctgttcctctagtgcaagcctcagggcctgtcctgtgcctacaggatgtccccattctgc

SEQ ID NO: 644809 - DNA, 120 bp, Artificial Sequence
  ENSG00000182224_23 (sequence is synthesized)
caaaacctgtccctcttccagagactcctacttcaatgtctcttgctagaaacacatccctttcctcacacatccagtcactcatcaagtgtaatctgtctcctaaatatctctggaacc

SEQ ID NO: 644810 - DNA, 120 bp, Artificial Sequence
  ENSG00000182224_24 (sequence is synthesized)
tatcttcttttctccaagttaccatcacctcttgtctaaactgctacggaaacttcctaacctgttctcccatttccacttctgacttccatgctgcaatgagagtcagctatgaaaaac

SEQ ID NO: 644811 - DNA, 120 bp, Artificial Sequence
  ENSG00000182224_25 (sequence is synthesized)
aaacctaaacatcgaactttccttagcttcttcagtggcttccaactgcttttggaataaagtcctaaattcaaagatcttgtataaatcaggctcatctcgcaacacccctctttgttc

SEQ ID NO: 644812 - DNA, 120 bp, Artificial Sequence
  ENSG00000182224_26 (sequence is synthesized)
tctatggcctagacacactggctttcagttcattacatgtcttgcctcagaccctcacacactgtcctctctgcctgcaacactcttcctttcactttccacctagctgatcctaaatgt

SEQ ID NO: 644813 - DNA, 120 bp, Artificial Sequence
  ENSG00000182224_27 (sequence is synthesized)
tccttcctcagggaggtcttttctgatttcttggtgggtcaagactttctgataaatcagttagcaccatgcattttccagagtttttattacaattgtaaaattatggctgtaataggc

SEQ ID NO: 644814 - DNA, 120 bp, Artificial Sequence
  ENSG00000182224_28 (sequence is synthesized)
tggctgcgctgctagattgtaagctcacgagggcagagatcttgttcacatcttgctcactgctatattctcattgctgagcacacagttgcagctcaataaattttgaatgaactccaa

SEQ ID NO: 644815 - DNA, 120 bp, Artificial Sequence
  ENSG00000182224_29 (sequence is synthesized)
ctttcatactgcctcctcccttgtttttctgtctcagagagatagtctgtcctaaatatcccatgtagcccaggccactgaattaaaacggagcgtattcgttctctgccccaccccgca

SEQ ID NO: 644816 - DNA, 120 bp, Artificial Sequence
  ENSG00000182224_30 (sequence is synthesized)
actcctgaaagcggcgcaactcaattacttgatccttatatgccccacgcgggactcatactacgtttcccgtgaacacgtgcagtccaaaccccgcccctgatatttatctcagtggac

SEQ ID NO: 644817 - DNA, 120 bp, Artificial Sequence
  ENSG00000182224_31 (sequence is synthesized)
gaatacaagggtaagggccacacgttgggccggggccggagtgtgtgtgtgtgcacgcgcgcgtttgcctggttctcgaagggctggcattgacagtggctgtgctgctcttttcaaggg

SEQ ID NO: 644818 - DNA, 120 bp, Artificial Sequence
  ENSG00000182230_0 (sequence is synthesized)
agcaaagtcaggcggtcggcttcgccagcagccgatgagtctcatcctgtggattgcccagcgccagggatcaggatccggagaggtgtccaggaggagcagaccctcagaccagaattc

SEQ ID NO: 644819 - DNA, 120 bp, Artificial Sequence
  ENSG00000182230_1 (sequence is synthesized)
gacaccaaattttggaacttaaaaagaagattcttaaaacttacaatccagcccagggcttcccagctgtcttcatccaggcctgcgccggtgttcacagtggtcctcatctaagccagc

SEQ ID NO: 644820 - DNA, 120 bp, Artificial Sequence
  ENSG00000182230_2 (sequence is synthesized)
caagaagatctctgtcatccacgtgacagccagcccagatgtccctagccgtcctcatcaaggccagccagtttgcttacacgtgtgctaattggagccagccaccctcatagaggccat

SEQ ID NO: 644821 - DNA, 120 bp, Artificial Sequence
  ENSG00000182230_3 (sequence is synthesized)
cccagattacgatgaggacctggtgcaggaagcttcatctgaagatgtcctgggcgttcatatggtggacaaagacacagagagagacattgagatgaaacggcaactacggcgactacg

SEQ ID NO: 644822 - DNA, 120 bp, Artificial Sequence
  ENSG00000182230_4 (sequence is synthesized)
ggagctccacctatacagcacatggaagaagtaccaagaggcgatgaagacatccttgggagttccacaatgtgagcgtgacgaaggctccttgggcaagccattgtgtccacccgagat

SEQ ID NO: 644823 - DNA, 120 bp, Artificial Sequence
  ENSG00000182230_5 (sequence is synthesized)
actctcggagacgttgccaggctctgtgaagaaaagggtatgctttccatcagaagatcatctagaggagtttatagcagaacatctccctgaagcatccaatcagagtctcctcactgt

SEQ ID NO: 644824 - DNA, 120 bp, Artificial Sequence
  ENSG00000182230_6 (sequence is synthesized)
ggaagccacagaagttcacatgatggagggggacccagacacactggccgaacttctgatcagggatgtacttcaggagctgtccagttacaacggcgaggaggaggacccagaggaggt

SEQ ID NO: 644825 - DNA, 120 bp, Artificial Sequence
  ENSG00000182230_7 (sequence is synthesized)
gaagacatccttgggagttccacaacgtggtgacctggaagacctggaggagcatgtgccagggcagacagtctctgaggaagccacaggggttcacatgatgcaggtggacccagccac

SEQ ID NO: 644826 - DNA, 120 bp, Artificial Sequence
  ENSG00000182230_8 (sequence is synthesized)
gccggcaaagagtgacctggaagacctggaggagcatgtgccagggcagacagtctctgaggaagccacaggggttcacatgatgcaggtggacccagccacactggcaaagcaattgga

SEQ ID NO: 644827 - DNA, 120 bp, Artificial Sequence
  ENSG00000182230_9 (sequence is synthesized)
agactccaccattacaggcagccaccagcagatgtcagcaagtccttcctctgcacctgcagaagaagcaacagaaaagaccaaagtggaagaggaagtgaaaaccagaaagcccaagaa

SEQ ID NO: 644828 - DNA, 120 bp, Artificial Sequence
  ENSG00000182230_10 (sequence is synthesized)
gaaaaccaggaagcccagcaagaaaagccggtggaatgtcctgaaatgttgggacatttttaatatattttagagacctctgaagattcctcgaccaccaggaagggccccgacgtgggg

SEQ ID NO: 644829 - DNA, 120 bp, Artificial Sequence
  ENSG00000182230_11 (sequence is synthesized)
atgtcaacatggctcagacttgatgtggatcgtgatcatttcgggaaatgtgttactccaaaaacttttataatctttgcttaatttgtttttaaatactttcctggctgggcgtggtgg

SEQ ID NO: 644830 - DNA, 120 bp, Artificial Sequence
  ENSG00000182230_12 (sequence is synthesized)
aggtgacaatagatatagaagtacgttgatgtgcgaagatgtattttgttttagccagcgaggaaaaaagaatcagtttgattatacatttaccaaacattaagaatttaatatggtaac

SEQ ID NO: 644831 - DNA, 120 bp, Artificial Sequence
  ENSG00000182230_13 (sequence is synthesized)
tgagaacatgctccaggaaacagacacccactccatagcagcccctgagcctgctgggctgagccctccacaggctgcttagtgagggagacactgaggtgctggtcgcacccccatgtg

SEQ ID NO: 644832 - DNA, 120 bp, Artificial Sequence
  ENSG00000182230_14 (sequence is synthesized)
caggactccaagggctttgcactgtgttgtctgcagtaactcttcagctcaccaacatctcatttggggggacctagctctgtcttcccagccccttgaggacaacagggagcatcacta

SEQ ID NO: 644833 - DNA, 120 bp, Artificial Sequence
  ENSG00000182230_15 (sequence is synthesized)
gttcatcctgaggagacactagggttgacatgaatccccctggttcaggcctcctgggaaaggtgtgagagggatggaggcacccccaggctccttgtcacacaagcgagcagcccaccc

SEQ ID NO: 644834 - DNA, 120 bp, Artificial Sequence
  ENSG00000182230_16 (sequence is synthesized)
gacccagtattgcaggccagcaggccctcagtaggtcctggtgtcaagcaggggacacggcaggatccaagaagcactgaaatgtgtccagtcccaggagtccttcagcctctggggggt

SEQ ID NO: 644835 - DNA, 120 bp, Artificial Sequence
  ENSG00000182230_17 (sequence is synthesized)
ctgggggcctccagttccaggggtccttcagcctctgtgggggcctggggtggcctcatggccccatttttcaagatgaggttggaggcttctgtatgtagagggcactggcttgggcca

SEQ ID NO: 644836 - DNA, 120 bp, Artificial Sequence
  ENSG00000182230_18 (sequence is synthesized)
aatgccaacaaaacaaacccttgaagacatttcagggccatgctcacttgggagggtttgaggacatgatttagcgagcctctgttttttaaatatattttccaatcttgaaataaggta

SEQ ID NO: 644837 - DNA, 120 bp, Artificial Sequence
  ENSG00000182230_19 (sequence is synthesized)
atgggatgtgcttatagttgttgcctcgaagtgtgttgtggcgaggatgaaatagtgtatcctaggatgccaggggaatccaccgtctgccaccgcgagcgtgagaagccaatcacctat

SEQ ID NO: 644838 - DNA, 120 bp, Artificial Sequence
  ENSG00000182230_20 (sequence is synthesized)
actaggtctgagaggtcggaggccgccagtgtcgctgctgaagggtggaccaggcgggatcgcggattctgggctagatcgcagacttgaattcgacaccaaattttggaacttaaaaag

SEQ ID NO: 644839 - DNA, 120 bp, Artificial Sequence; identical to SEQ ID NO: 565388
  ENSG00000182230_21 (sequence is synthesized)

SEQ ID NO: 644840 - DNA, 120 bp, Artificial Sequence; identical to SEQ ID NO: 565408
  ENSG00000182230_22 (sequence is synthesized)

SEQ ID NO: 644841 - DNA, 120 bp, Artificial Sequence
  ENSG00000182230_23 (sequence is synthesized)
cttaaaacttacaatccaggttgttcaggctgagaaggaagagaggttggtcttgctgtctctgggttgcagaggcagaagaaaatctgcatataaatgaactcctgcagttcaaaccct

SEQ ID NO: 644842 - DNA, 120 bp, Artificial Sequence; identical to SEQ ID NO: 565410
  ENSG00000182230_24 (sequence is synthesized)

SEQ ID NO: 644843 - DNA, 120 bp, Artificial Sequence
  ENSG00000182230_25 (sequence is synthesized)
tggacaaagacacagagagagacagtacgtattctggaatcacccctatgctgaggaaaaattctagtgttgacaaaggtgacactttcttgcctcattttttctggagagccactctgg

SEQ ID NO: 644844 - DNA, 120 bp, Artificial Sequence
  ENSG00000182230_26 (sequence is synthesized)
tttgaacttcctgccagaaatgtggttcaagcacttttgtcttgacaagtgaagaacctggtcaagaaatgtgaccgttgactctggtgcttggaaggaacagggtcatttggatagaag

SEQ ID NO: 644845 - DNA, 120 bp, Artificial Sequence
  ENSG00000182230_27 (sequence is synthesized)
tctgcgagtttgtgtgcttttccccagaaaatacgttcccatatgcaaagcacaacacaaagattgatattctagaaacaaaatttgatcaccactgcatttttgcaaaaaatcaaccca

SEQ ID NO: 644846 - DNA, 120 bp, Artificial Sequence; identical to SEQ ID NO: 565401
  ENSG00000182230_28 (sequence is synthesized)

SEQ ID NO: 644847 - DNA, 120 bp, Artificial Sequence
  ENSG00000182230_29 (sequence is synthesized)
gtgggccgcgcgcctgcgattttccgtccgtggtcctggggcagcccgggccagccaggagaacccgcgagcccagcggcgcctgcacctgcggcttccgggagccgggcggctttgcga

SEQ ID NO: 644848 - DNA, 120 bp, Artificial Sequence
  ENSG00000182230_30 (sequence is synthesized)
ctttgcgaggctcactaggtctgagagaattcgacaccaaattttggaacttaaaaagaagattcttaaaacttacaatccagattctgggagttctgatgaatatgcagtcagcccagg

SEQ ID NO: 644849 - DNA, 120 bp, Artificial Sequence
  ENSG00000182230_31 (sequence is synthesized)
agcacagaggaaatgatacaggctgtggagaaggctccagaaatgagcacatcagaggctctggggttggctccacagccccaggacagcggggtctgagtggttctctcgactctaact

SEQ ID NO: 644850 - DNA, 120 bp, Artificial Sequence
  ENSG00000182230_32 (sequence is synthesized)
cttcacctgcttttgctcaagggccactctggtttgagctttctgccagaaatgagatttgggaattttggtttaaaaactactaagagtcacaccgggcacagtggctcacgcctgtaa

SEQ ID NO: 644851 - DNA, 88 bp, Artificial Sequence
  ENSG00000182230_33 (sequence is synthesized)
tcagcagatgagaaaccccaccgctcctaaaaatacaaaattacctgggtgtggtgtcacatgcctgcaatcccagctactcaggagg

SEQ ID NO: 644852 - DNA, 120 bp, Artificial Sequence
  ENSG00000182230_34 (sequence is synthesized)
ccaggtgtccacacctgtccccattgagcctagccctggtgttcatggcttttgtcacaggacttctcccagttgtttccagcagtttccatggtcccaggccagggtttcacagacatc

SEQ ID NO: 644853 - DNA, 120 bp, Artificial Sequence
  ENSG00000182230_35 (sequence is synthesized)
ctcaatggggacagcccagctgttcaccattgtcttaattaggcccagtgcagatgttcacacgtgtcttcctttggctcagccaaaatgaacagaactcctgagcgcataccagcggtt

SEQ ID NO: 644854 - DNA, 120 bp, Artificial Sequence
  ENSG00000182230_36 (sequence is synthesized)
tctagctgtccacattggggccagcccaggtgttcgtagccctacgttctgggcccatcccagttattccaagctgtcctcttgggcctagcccaggtgtccacagccatcctccttggt

SEQ ID NO: 644855 - DNA, 80 bp, Artificial Sequence
  ENSG00000182240_0 (sequence is synthesized)
atccctgcccgcagccccgcgcgccggccgagtcgctgagccgcggctgccggacgggacgggaccggctaggctgggcg

SEQ ID NO: 644856 - DNA, 80 bp, Artificial Sequence
  ENSG00000182240_1 (sequence is synthesized)
gggcgctgctgctgcctctgctggcccagtggctcctgcgcgccgccccggagctggcccccgcgcccttcacgctgccc

SEQ ID NO: 644857 - DNA, 120 bp, Artificial Sequence
  ENSG00000182240_2 (sequence is synthesized)
ccccgggacccgggacccctgccgagcgccacgccgacggcttggcgctcgccctggagcctgccctggcgtcccccgcgggcgccgccaacttcttggccatggtagacaacctgcagg

SEQ ID NO: 644858 - DNA, 120 bp, Artificial Sequence
  ENSG00000182240_3 (sequence is synthesized)
gggactctggccgcggctactacctggagatgctgatcgggacccccccgcagaagctacagattctcgttgacactggaagcagtaactttgccgtggcaggaaccccgcactcctaca

SEQ ID NO: 644859 - DNA, 120 bp, Artificial Sequence
  ENSG00000182240_4 (sequence is synthesized)
tagacacgtactttgacacagagaggtctagcacataccgctccaagggctttgacgtcacagtgaagtacacacaaggaagctggacgggcttcgttggggaagacctcgtcaccatcc

SEQ ID NO: 644860 - DNA, 120 bp, Artificial Sequence
  ENSG00000182240_5 (sequence is synthesized)
ccaaaggcttcaatacttcttttcttgtcaacattgccactatttttgaatcagagaatttctttttgcctgggattaaatggaatggaatacttggcctagcttatgccacacttgcca

SEQ ID NO: 644861 - DNA, 120 bp, Artificial Sequence
  ENSG00000182240_6 (sequence is synthesized)
agccatcaagttctctggagaccttcttcgactccctggtgacacaagcaaacatccccaacgttttctccatgcagatgtgtggagccggcttgcccgttgctggatctgggaccaacg

SEQ ID NO: 644862 - DNA, 120 bp, Artificial Sequence
  ENSG00000182240_7 (sequence is synthesized)
gaggtagtcttgtcttgggtggaattgaaccaagtttgtataaaggagacatctggtatacccctattaaggaagagtggtactaccagatagaaattctgaaattggaaattggaggcc

SEQ ID NO: 644863 - DNA, 120 bp, Artificial Sequence
  ENSG00000182240_8 (sequence is synthesized)
aaagccttaatctggactgcagagagtataacgcagacaaggccatcgtggacagtggcaccacgctgctgcgcctgccccagaaggtgtttgatgcggtggtggaagctgtggcccgcg

SEQ ID NO: 644864 - DNA, 120 bp, Artificial Sequence
  ENSG00000182240_9 (sequence is synthesized)
catctctgattccagaattctctgatggtttctggactgggtcccagctggcgtgctggacgaattcggaaacaccttggtcttacttccctaaaatctccatctacctgagagacgaga

SEQ ID NO: 644865 - DNA, 120 bp, Artificial Sequence
  ENSG00000182240_10 (sequence is synthesized)
actccagcaggtcattccgtatcacaatcctgcctcagctttacattcagcccatgatgggggccggcctgaattatgaatgttaccgattcggcatttccccatccacaaatgcgctgg

SEQ ID NO: 644866 - DNA, 120 bp, Artificial Sequence
  ENSG00000182240_11 (sequence is synthesized)
tgatcggtgccacggtgatggagggcttctacgtcatcttcgacagagcccagaagagggtgggcttcgcagcgagcccctgtgcagaaattgcaggtgctgcagtgtctgaaatttccg

SEQ ID NO: 644867 - DNA, 120 bp, Artificial Sequence
  ENSG00000182240_12 (sequence is synthesized)
ggcctttctcaacagaggatgtagccagcaactgtgtccccgctcagtctttgagcgagcccattttgtggattgtgtcctatgcgctcatgagcgtctgtggagccatcctccttgtct

SEQ ID NO: 644868 - DNA, 120 bp, Artificial Sequence
  ENSG00000182240_13 (sequence is synthesized)
taatcgtcctgctgctgctgccgttccggtgtcagcgtcgcccccgtgaccctgaggtcgtcaatgatgagtcctctctggtcagacatcgctggaaatgaatagccaggcctgacctca

SEQ ID NO: 644869 - DNA, 120 bp, Artificial Sequence
  ENSG00000182240_14 (sequence is synthesized)
agcaaccatgaactcagctattaagaaaatcacatttccagggcagcagccgggatcgatggtggcgctttctcctgtgcccacccgtcttcaatctctgttctgctcccagatgccttc

SEQ ID NO: 644870 - DNA, 120 bp, Artificial Sequence
  ENSG00000182240_15 (sequence is synthesized)
tagattcactgtcttttgattcttgattttcaagctttcaaatcctccctacttccaagaaaaataattaaaaaaaaaacttcattctaaaccaaaacagagtggattgggctgcaggct

SEQ ID NO: 644871 - DNA, 120 bp, Artificial Sequence
  ENSG00000182240_16 (sequence is synthesized)
ctatggggttcgttatgccaaagtgtctacatgtgccaccaacataaaacaaaaccaagccttggctcgttctcttctctcttcaatctctggaaaaataagtacatatagttgataacc

SEQ ID NO: 644872 - DNA, 120 bp, Artificial Sequence
  ENSG00000182240_17 (sequence is synthesized)
cctcttagcttacaggaagctttttgtattaattgcctttgaggttattttccgccagacctcaacctgggtcaaagtggtacaggaaggcttgcagtatgatggcaggagaatcagcct

SEQ ID NO: 644873 - DNA, 120 bp, Artificial Sequence
  ENSG00000182240_18 (sequence is synthesized)
ggggcctggggatgtaaccaagctgtacccttgagacctggaaccagagccacaggccccttttgtgggtttctctgtgctctgaatgggagccagaattcactaggaggtcatcaaccg

SEQ ID NO: 644874 - DNA, 120 bp, Artificial Sequence
  ENSG00000182240_19 (sequence is synthesized)
atggtcctcacaagcctcttctgaagatggaaggccttttgcccgttgaggtagaggggaaggaaatctcctcttttgtacccaatacttatgttgtattgttggtgcgaaagtaaaaac

SEQ ID NO: 644875 - DNA, 120 bp, Artificial Sequence
  ENSG00000182240_20 (sequence is synthesized)
actacctcttttgagactttgcccagggtcctgtgcctggatgggggtgcaggcagccttgaccacggctgttcccctcacccaaaagaattatcatcccaacagccaagacccaacagg

SEQ ID NO: 644876 - DNA, 120 bp, Artificial Sequence
  ENSG00000182240_21 (sequence is synthesized)
tgctgaactgtgcatcaaccaggaagagttctatccccaagctggccactatcacatatgcttactcttgcttaaaattaataaatcatgttttgatgagaaaaaactattctatttcac

SEQ ID NO: 644877 - DNA, 120 bp, Artificial Sequence
  ENSG00000182240_22 (sequence is synthesized)
tagcttagttgtctctttttccaaatcttctctggaagtaggttggctattaccctgttgggaaacagggaaatggcctgatgcccctatttctgaccagctgtcagggaaggaagatgc

SEQ ID NO: 644878 - DNA, 120 bp, Artificial Sequence
  ENSG00000182240_23 (sequence is synthesized)
aagatgtgcagaagacacaaggtaacgtctacttatccccgtgcttcgaaaccgtgtgtttccctttgcagaactggttagcctcaagcatacccatccaatcagcttaaattgttcagc

SEQ ID NO: 644879 - DNA, 120 bp, Artificial Sequence
  ENSG00000182240_24 (sequence is synthesized)
agttgacctctgtgcttcttcctttgggggtgtttaatctttggtaacagttgtgcagtggtagccttatttcggggggcagtccctactttctgtcacttatcgaggcctttgccaaag

SEQ ID NO: 644880 - DNA, 120 bp, Artificial Sequence
  ENSG00000182240_25 (sequence is synthesized)
aaaagtggaagccgtttccttgacatagccttatatgacctgatgtcattaggagaagagttaaaagacagtatcccctctctcctgcttgtgtgccaagttcagtgttccctttgcatt

SEQ ID NO: 644881 - DNA, 120 bp, Artificial Sequence
  ENSG00000182240_26 (sequence is synthesized)
tttttggggtgggttggctatattacagaattccaccaaaagtgctaagtgtcccctcctgcagaagtatcgtttgtattcacagtaggctacgtgtggatgtttcagccatctgctctg

SEQ ID NO: 644882 - DNA, 120 bp, Artificial Sequence
  ENSG00000182240_27 (sequence is synthesized)
ctccctgggtccccgggtcaccaccatactgagaaatataggactctgccaaagagacgtggaggccacgtcggcttgtcatggtgtcctggaagactctccagcagccagaagaacctt

SEQ ID NO: 644883 - DNA, 120 bp, Artificial Sequence
  ENSG00000182240_28 (sequence is synthesized)
ctgtgctgttttcactagagaagatttgagttgcagcctcttggaaagaacatgacggcacggaacgggaggagggggctcttgtatcagggcccgttgtcacatccgctctcagcttgt

SEQ ID NO: 644884 - DNA, 120 bp, Artificial Sequence
  ENSG00000182240_29 (sequence is synthesized)
tgaaaactcataatctcagaatgcatttcacacggagagatgtctggaagtccaattctcatcccattggctttttccgtggttgctgttttgtgggccgctttgcacaggagtgaagcc

SEQ ID NO: 644885 - DNA, 120 bp, Artificial Sequence
  ENSG00000182240_30 (sequence is synthesized)
aacacccctagattgtgccttcacccttgctgtgaaaaattcaaagccctgaaataagaggagggaatcgcagacatgccctgattagttttcctgcttatttcttcatacaggcatctt

SEQ ID NO: 644886 - DNA, 120 bp, Artificial Sequence
  ENSG00000182240_31 (sequence is synthesized)
ctgttccgttgtattgtgttaggtttcagaggcggggagcttcctcctgcagcagatgaacaggcatagttcttaaaatacaggaaagtaacaagtgaggtttccaggtagagtaggtga

SEQ ID NO: 644887 - DNA, 120 bp, Artificial Sequence
  ENSG00000182240_32 (sequence is synthesized)
atgaagtttgccgtcatgctctgtatttcatatcagatttctttatcttttcatatcgcatgtcattggatgtgacattttgatgaaaatactgaaactacaaaagcataacttcgcaac

SEQ ID NO: 644888 - DNA, 120 bp, Artificial Sequence
  ENSG00000182240_33 (sequence is synthesized)
aagaatgagatagacaattgaatgtgggacatttttctggcatgtcttgctgctgagaatcggacttccagtcaaaaccctgttagtgacacccacctcctccagttatgcaaattgatg

SEQ ID NO: 644889 - DNA, 120 bp, Artificial Sequence
  ENSG00000182240_34 (sequence is synthesized)
cttagcttggcaagctttcaaggaggtttgcttggaacaggaaaggaattaacaaccctttgagggtgtcatttttaccttgtaatacactgtggaaaattctggaagacggtccttgcc

SEQ ID NO: 644890 - DNA, 120 bp, Artificial Sequence
  ENSG00000182240_35 (sequence is synthesized)
gtctgatgggaaatgaatagatgctgctttatttccttgataacttctttggaagtctgaaataaatcctgccttcagtaactgaaaccatttattaaaaatagcaagaaacaagatggg

SEQ ID NO: 644891 - DNA, 120 bp, Artificial Sequence
  ENSG00000182240_36 (sequence is synthesized)
gaccaattctatttttattcttgggaatttgaaagagccacaagtgattggtgtccgatctcccagcatatactgtacactattttgtatttctcctgaaccaaaaccaagtacttagca

SEQ ID NO: 644892 - DNA, 120 bp, Artificial Sequence
  ENSG00000182240_37 (sequence is synthesized)
ctcaagaaacagatgccctgtgtgtgaccgaggggagtgtttttccacaacaggttccacttctgaacacttggaaggaccttgcctgattcatggtgaaacacagaggttttggttgga

SEQ ID NO: 644893 - DNA, 120 bp, Artificial Sequence
  ENSG00000182240_38 (sequence is synthesized)
gataaatttggggtcagttactgttcaaaattgtgaaagtagttcccaggaagacagcattagtgactccgcagtgctttgggtaatagattttgaaaagcaattgtgagttggggattc

SEQ ID NO: 644894 - DNA, 120 bp, Artificial Sequence
  ENSG00000182240_39 (sequence is synthesized)
catcatttcatttaagaggtgaagagggatttaattatttaatacgccgggtgcaaacttgttaaattcctctttccctgtccctgcttggtggagctgccacgtgtggttcagttctaa

SEQ ID NO: 644895 - DNA, 120 bp, Artificial Sequence
  ENSG00000182240_40 (sequence is synthesized)
gttctggactagtgccactcgatatcattgggaataaatcgttgttcaacagtctgttccacaaacaacagtaattgaatttcacagactttatcctgattagtggaaatcaaataatgg

SEQ ID NO: 644896 - DNA, 120 bp, Artificial Sequence
  ENSG00000182240_41 (sequence is synthesized)
agtggaatccccatgtgttttctcttgcacaaacttattagacttgattagaaaactgtttggaggaaaaacttgccagtaagttttttggttgttgttttgttttttttgaaaaacgac

SEQ ID NO: 644897 - DNA, 120 bp, Artificial Sequence
  ENSG00000182240_42 (sequence is synthesized)
gcaacaccataaagtgtaaaattaggggttctggccaagagaggtactagatttttttaatgccgagaaaagtccatgccacagaagttattgtgtatgtctctagggagctttaagaat

SEQ ID NO: 644898 - DNA, 120 bp, Artificial Sequence
  ENSG00000182240_43 (sequence is synthesized)
ttcacgtttgaactttacagctgtttaccaattaaatggcaagctggaaaaatacattttgagaggggtagaaagaataagaatataattaaaagtatgctaacaaaataagcagtacat

SEQ ID NO: 644899 - DNA, 76 bp, Artificial Sequence
  ENSG00000182240_44 (sequence is synthesized)
gaatataattaaaagtatgctaacaaaataagcagtacatatttttttagaaaatgcagtttaggccaggcacggt

SEQ ID NO: 644900 - DNA, 87 bp, Artificial Sequence
  ENSG00000182240_45 (sequence is synthesized)
gaaagaaaatgcagtttcattccagccatccttagatttcttttccccttaaagtggctgaatccattggagatgtgatttattttg

SEQ ID NO: 644901 - DNA, 120 bp, Artificial Sequence
  ENSG00000182240_46 (sequence is synthesized)
cttaaagtggctgaatccattggagatgtgatttattttgcagatccaccaattccaaacttcaggaatattcaagcgggagtcatgtgtaagtgacagctttgacaaagagagactgtg

SEQ ID NO: 644902 - DNA, 120 bp, Artificial Sequence
  ENSG00000182240_47 (sequence is synthesized)
gctgggtggcccgggtgttgcccacgcggagcaaggattggttcattcaacggatggagagtacaggatggctgggacctgggaagttccagaatctgaaaagagggcagggcaagaagg

SEQ ID NO: 644903 - DNA, 120 bp, Artificial Sequence
  ENSG00000182240_48 (sequence is synthesized)
agccagaagagaggtcccacccctcagttggcagtggggcacggaggtccgcatcagccaagaacgtccccaggatgccgtgggcacctcatttcaccccacgtttttggcacagtctac

SEQ ID NO: 644904 - DNA, 120 bp, Artificial Sequence
  ENSG00000182240_49 (sequence is synthesized)
tttttaggtattttgtaaaggaacttctcaggattgattatttgccagaggaacaattaggccaagagaaacttgcttgacagccatgtgtaaaacacgtctgtcctaatcaaactagag

SEQ ID NO: 644905 - DNA, 120 bp, Artificial Sequence
  ENSG00000182240_50 (sequence is synthesized)
atgcctcaaggcccacgcaggacacaggcaggttcaaggtcatgcacctggaaatttgtaggggagggtcaagcaactgaggccaaagggggccggtaaagtggcttctggggtctgagc

SEQ ID NO: 644906 - DNA, 120 bp, Artificial Sequence
  ENSG00000182240_51 (sequence is synthesized)
atctggaaggctcctggcagcagttacctgacagtgtcgttgaggggcacggcagctgggccctcaccgtttccgccagctctgctgagccagcccagcccatgcattccgaacatccga

SEQ ID NO: 644907 - DNA, 120 bp, Artificial Sequence
  ENSG00000182240_52 (sequence is synthesized)
cagcttctttctccagaatgtcttctgtcagagacttccaggaaaggagctccctcctgtctcactgctgtcagcgtgggagccctgctccccaggctccacgtccccggaaggtccatc

SEQ ID NO: 644908 - DNA, 120 bp, Artificial Sequence
  ENSG00000182240_53 (sequence is synthesized)
ttgtcctggagcacacccagccccattcagggtcagtgcaggagggaacagggaatctgcatttcagtaagctccccaggtgaggctgcagagcagaaaccacggctttcagacgtgagc

SEQ ID NO: 644909 - DNA, 120 bp, Artificial Sequence
  ENSG00000182240_54 (sequence is synthesized)
aggctccctgggctcttggtgtcaccctgttagccacatctgcggaatgtggaaggcagaacatagccacgctgcttagtgctgccagcgaacctcaggttgcatcagtggctggaatct

SEQ ID NO: 644910 - DNA, 120 bp, Artificial Sequence
  ENSG00000182240_55 (sequence is synthesized)
atcacagctgttggggatacgtaactcccagcaataaatccagtattttcttccctgccctgagcttcctctgggtttcttatcagcagctattacacacagatgtccagtgcttctaaa

SEQ ID NO: 644911 - DNA, 120 bp, Artificial Sequence
  ENSG00000182240_56 (sequence is synthesized)
ctaaattgtactgtgtaacttttacatcacacttgtgtgcttaaaaagcacaccgtgggtagtgactgggccaagagacatcacaaagcttcctgataaatttgaatccagccacggcaa

SEQ ID NO: 644912 - DNA, 120 bp, Artificial Sequence
  ENSG00000182240_57 (sequence is synthesized)
gagcgacgtgcgggtacctggtccctgatgcttgggtgccccgttgagcctcgggtacttcttggacactattgtgagagcagccatcctggtgtctctgccagcatcttggggaacgct

SEQ ID NO: 644913 - DNA, 120 bp, Artificial Sequence
  ENSG00000182240_58 (sequence is synthesized)
gtgatggtaaaatatctgtctctcctctgggaatcagggcagccctgagaagtgagcagttccctttacagatggataattgtttgtgtaagaccaaccagataaagtccaaactgtgta

SEQ ID NO: 644914 - DNA, 120 bp, Artificial Sequence
  ENSG00000182240_59 (sequence is synthesized)
gaacacacgtgtgcctcacacatagccatctgagtaaaatattttttccaatgtagatttataattagaaatgacagatttataatatagacttcagtaagttgggcacagctgtcactt

SEQ ID NO: 644915 - DNA, 120 bp, Artificial Sequence
  ENSG00000182240_60 (sequence is synthesized)
tcgtggtatcaataaaaggctagaaaccttgggtgtccttggcaacctagcctttgacattgatgtttttccataggattttcttcatttgggttggaataaaaatgcatttttattcac

SEQ ID NO: 644916 - DNA, 120 bp, Artificial Sequence
  ENSG00000182240_61 (sequence is synthesized)
aaggcacagacagataagaatatcataagcagggaagtgtctccaaaggtcaggacatatgtttttctgttgagtgctatatgtggaggtcattgcaagttccctgatatgagtatggtt

SEQ ID NO: 644917 - DNA, 120 bp, Artificial Sequence
  ENSG00000182240_62 (sequence is synthesized)
tcgcttgctacattgtgcctattaaagtaaaattttacacaagcctcgcatttctaagattagtgttcctgaatgaaatgttaagaaaacattaaaagattatctctttttaagatggag

SEQ ID NO: 644918 - DNA, 120 bp, Artificial Sequence
  ENSG00000182240_63 (sequence is synthesized)
gaaaaaaagtgaacaaagctaattaatctatcatgaaaattgcacaaaataacatttcttaacaaatttaatacaattttgtgttctttgttgctagtggtataaaacgagatttttttc

SEQ ID NO: 644919 - DNA, 120 bp, Artificial Sequence
  ENSG00000182240_64 (sequence is synthesized)
cctcatttttctcattgtagatgtcatctctcacatttatatcagtgaggtttgaaattctgtgtagcagttactcagcacatatgagagggcagcgaatgaatgagatttgtcatgtgc

SEQ ID NO: 644920 - DNA, 120 bp, Artificial Sequence
  ENSG00000182240_65 (sequence is synthesized)
taataaaagctgaatttttgtaatctaaaatgatgtattttctactattgctgttaatttgcattgttaaaaattcttaaagtttaatatgttatgttcagtcattgaaagcgaccactc

SEQ ID NO: 644921 - DNA, 120 bp, Artificial Sequence
  ENSG00000182240_66 (sequence is synthesized)
atttttttcttaaagttgatgccttttctgctgtgctagagtcagtattttgcttctggcaggagagctgcaaactgtgtatcctcaaacagatgcaaaaagtagtgctttgcaaaacgt

SEQ ID NO: 644922 - DNA, 120 bp, Artificial Sequence
  ENSG00000182240_67 (sequence is synthesized)
ttgttttctgtttatctcagattaacatcctttaatacaagtttcttaagtgtaacttgtatttctgaaaatgcttaaaattattttatatttccctttgggaatttttctctatttcca

SEQ ID NO: 644923 - DNA, 120 bp, Artificial Sequence
  ENSG00000182240_68 (sequence is synthesized)
gcacgctgatttgatttaaaaatgtaataagaccaagagttggagtaaagggatattcattccatgttaaaagtggcttcatagctactgacaaatgtctgaactattgtcgtgcccttc

SEQ ID NO: 644924 - DNA, 120 bp, Artificial Sequence
  ENSG00000182240_69 (sequence is synthesized)
aaaactggagttttctaaaataatcttatttttatacttgtatgttccagcaatttaagatatataccattgaaagggaaataaaacatttttgtttatttgaataaataatactcccaa

SEQ ID NO: 644925 - DNA, 120 bp, Artificial Sequence
  ENSG00000182240_70 (sequence is synthesized)
cgctggggcgctttccgaggaaattcgggactcgagtttcccggggaagaggcgcggcctgagcccggcgagggtggggagggcaggcgcaggtggaccccggcgccccccgagccccgc

SEQ ID NO: 644926 - DNA, 80 bp, Artificial Sequence
  ENSG00000182240_71 (sequence is synthesized)
tgtgaccttggccgcgggggaggggctgggccgctgcggggcagtcgcggccgccagagggggcagcggagaagaacttg

SEQ ID NO: 644927 - DNA, 120 bp, Artificial Sequence
  ENSG00000182240_72 (sequence is synthesized)
gtctaccctggtaccgcctttcttttcaagagaccattcttcaacagaactgtaaggtttcttcttggctgaatcagatgtgacgcatcccacttctgcgtttgaggtctagcacatacc

SEQ ID NO: 644928 - DNA, 120 bp, Artificial Sequence
  ENSG00000182240_73 (sequence is synthesized)
tgagcatctctgaactattgcgccatgtatttccaattttcatattgtgtatttgtatattttatatgtaatagtataggtgtaatatgtaaatatattttatatgtatttaaaatcttt

SEQ ID NO: 644929 - DNA, 120 bp, Artificial Sequence
  ENSG00000182240_74 (sequence is synthesized)
acaagttgcacttaagaagctatgctaagaaaacaaacacacagaagcctacatcattacatgtatagaatgttcaagaactgatgaaaccagtccgtggtcacaaaagccagaaagtgg

SEQ ID NO: 644930 - DNA, 120 bp, Artificial Sequence
  ENSG00000182240_75 (sequence is synthesized)
ttgcttctggggaccagaagggaaaggggcataaaggaaccttttgaggtgaatagaagtttctgcatcttggtttggcacacatgccaaaactcaccagctacagattctcgttgacac

SEQ ID NO: 644931 - DNA, 120 bp, Artificial Sequence
  ENSG00000182247_0 (sequence is synthesized)
ggctttcggtgactagacggtccgcaggggacatcccgtccctggggcctccccagtctccctccccctcgcgcctgggcagctctctcccagggcttcggctcgagcctgcgacctgca

SEQ ID NO: 644932 - DNA, 120 bp, Artificial Sequence
  ENSG00000182247_1 (sequence is synthesized)
cggacacccccccctcaggatctaaaatgtccactgaggcacaaagagttgatgacagtccaagcactagtggaggaagttccgatggagatcaacgtgaaagtgttcagcaagaaccag

SEQ ID NO: 644933 - DNA, 120 bp, Artificial Sequence
  ENSG00000182247_2 (sequence is synthesized)
aaagagaacaagttcagcccaagaaaaaggagggaaaaatatccagcaaaaccgctgctaaattgtcaactagtgctaaaagaattcagaaggaacttgcagaaatcacattggaccctc

SEQ ID NO: 644934 - DNA, 120 bp, Artificial Sequence
  ENSG00000182247_3 (sequence is synthesized)
ctcccaactgtagtgctggacccaaaggagacaacatttatgaatggaggtcaactatattgggacccccaggatctgtctatgaaggaggggtgttctttcttgacattaccttttcac

SEQ ID NO: 644935 - DNA, 120 bp, Artificial Sequence
  ENSG00000182247_4 (sequence is synthesized)
cagactatccgtttaaaccccctaaggttaccttccgaacaagaatctatcactgtaatattaacagccaaggtgtgatctgtctggacatcttaaaggacaactggagtccggctttaa

SEQ ID NO: 644936 - DNA, 120 bp, Artificial Sequence
  ENSG00000182247_5 (sequence is synthesized)
ctatttctaaagttctcctctccatctgctcacttcttacagattgcaaccctgctgaccctctggtgggcagcatcgccacacagtacatgaccaacagagcagagcatgaccggatgg

SEQ ID NO: 644937 - DNA, 120 bp, Artificial Sequence
  ENSG00000182247_6 (sequence is synthesized)
ccagacagtggaccaagcggtacgccacataggggcctgctgcctgccgccccgcgggacctgtgcaagcacattcaccaagtgcatcggtagccctgcccacccctccagacctcggtt

SEQ ID NO: 644938 - DNA, 120 bp, Artificial Sequence
  ENSG00000182247_7 (sequence is synthesized)
cttattttcctatttttattaaatttggaaccattttgtgatggtatgttgtccatcttcccatcccagttcttcctgccccccttcctctctcccacgctctcttttatctctcatttt

SEQ ID NO: 644939 - DNA, 120 bp, Artificial Sequence
  ENSG00000182247_8 (sequence is synthesized)
attcccttgttgatttctgttaacttgaaagatttgggattttttcccacctcatcatagatgggaacttttgttttcagtgcaaacaatgttggagctgtaatagtaagagctttctta

SEQ ID NO: 644940 - DNA, 120 bp, Artificial Sequence
  ENSG00000182247_9 (sequence is synthesized)
caaagctttgtattactgtgtggttttgttttttttgttgttgtttatttgattttgatttttttttcttttatgtgatctttgggaaaacacattcagaattatatctcgtttctactt

SEQ ID NO: 644941 - DNA, 120 bp, Artificial Sequence
  ENSG00000182247_10 (sequence is synthesized)
aaatgtagtgcttagggttaattttttgtactgaagtctttattggtgggtgcatgctactgggaacaagtttttgtacaaaagcttcaatcagaatcactgtgcattactgagactctg

SEQ ID NO: 644942 - DNA, 120 bp, Artificial Sequence
  ENSG00000182247_11 (sequence is synthesized)
aagtgcttgtaaatttcttagggacctgccacttttgactgtggatcagttgatgtacacttgtattattaaagcactcaataaatcactgtggctgataactgcacttctggtaacccg

SEQ ID NO: 644943 - DNA, 120 bp, Artificial Sequence
  ENSG00000182247_12 (sequence is synthesized)
acatttgctttgtgtcctggtgaccgctgtagccctacgtgcagtgaggcttgtctaattcaattacaggttcaagtgtatttttcatctcaaacctctaatatttctttggagttgagt

SEQ ID NO: 644944 - DNA, 120 bp, Artificial Sequence
  ENSG00000182247_13 (sequence is synthesized)
tgcttagcatgtggaatttctccagctgtcagtagcctgatgattttatggttgttatagtaaattgctatcattttacatattgactgggcattctttctgttacagccttctttatca

SEQ ID NO: 644945 - DNA, 120 bp, Artificial Sequence
  ENSG00000182247_14 (sequence is synthesized)
acaattaaaatatgtaactccaaaaatagccttcttgtgaaagtgaagtctgagctaatcattgtgttcagccactttcaactttatttctctcaaaattgttacagtgattgccctcaa

SEQ ID NO: 644946 - DNA, 120 bp, Artificial Sequence
  ENSG00000182247_15 (sequence is synthesized)
gctttgtattgttcatttttgttgttgttgttgttgttgttgctgctcttttttctccatgattttagcaaaagaagtaaactcaactgtattggtcacggtcagcccattcaatgacaa

SEQ ID NO: 644947 - DNA, 120 bp, Artificial Sequence
  ENSG00000182247_16 (sequence is synthesized)
gggtgtctgtctggcttcaccttcaggctattttagtgtgcagctataggaggcagaggaaacgtgggtggtgtagtttctaaaacacgctgacttgctgattgataattcagggttatt

SEQ ID NO: 644948 - DNA, 120 bp, Artificial Sequence
  ENSG00000182247_17 (sequence is synthesized)
agtgtaacaaagcgtagtggaaactcctactcctgctgcaccatacagttacagaccctaccatactcttggtctcatttaaggaaccattaacaccttcactgctgaaaagcaggattt

SEQ ID NO: 644949 - DNA, 120 bp, Artificial Sequence
  ENSG00000182247_18 (sequence is synthesized)
ataagcataagtcatccacctctaaatattttaacatttaaaatgcctgattcaaaagatacagtttttgttgtttttaactagttaaaaataaatcctaagaaaatatatttaaatatt

SEQ ID NO: 644950 - DNA, 120 bp, Artificial Sequence
  ENSG00000182247_19 (sequence is synthesized)
gcaaatgccacttctaaaccaaaatacctgagaatattttttgtctttttaataacgattttaccattcattttatttaaaaacatttctcagcatagcagggcactgtatggtctctga

SEQ ID NO: 644951 - DNA, 120 bp, Artificial Sequence
  ENSG00000182247_20 (sequence is synthesized)
tgcactactcaaccctctagttgtagtagagggagccacagacagtacataaatgcattgggcagagctatattccagtgaaactttatttaccaccataggcatgggatttggcccatg

SEQ ID NO: 644952 - DNA, 120 bp, Artificial Sequence
  ENSG00000182247_21 (sequence is synthesized)
ggttgtagtttgccaatccctgacacagaccaacatagactgggggctggatgaaaaacaaataacgatgtgtcatttctttctttaacataaaataaattcaatatggtacaacactga

SEQ ID NO: 644953 - DNA, 80 bp, Artificial Sequence
  ENSG00000182247_22 (sequence is synthesized)
gaggagggaggcgcgcggcgccgcatggccgacgtggggctcgcgctctcgcggtctctcccgggcgggcgcgcaggcac

SEQ ID NO: 644954 - DNA, 120 bp, Artificial Sequence
  ENSG00000182247_23 (sequence is synthesized)
ggctcccggaggtggtggcttcactttccaggactcaggggcagccacagcgacagccgcgggcagcagcctcaggagccggagctggaacggccgggggcggcggcagcggcggcgctg

SEQ ID NO: 644955 - DNA, 120 bp, Artificial Sequence
  ENSG00000182247_24 (sequence is synthesized)
attaactatgactaacatacactaggcacccaaaaagttaagatgatagcagtaatgaagagaaatggaccttgagtttcagaaacttgtattctaatggaccttcaaaagatggcaagt

SEQ ID NO: 644956 - DNA, 120 bp, Artificial Sequence
  ENSG00000182253_0 (sequence is synthesized)
agtctgcgggcctccggggcagcggcgaggccggagcgtcgcggcggagaggacgagaccgggacaagaccagggcaggagggagccggccagccgcgagaaccccgcacgcccggcaag

SEQ ID NO: 644957 - DNA, 120 bp, Artificial Sequence
  ENSG00000182253_1 (sequence is synthesized)
atgctgtcctggcggctgcagacgggccccgagaaggccgagctccaggagctcaacgcccggctctatgactacgtgtgtcgggtgcgggagctggagcgcgaaaacctactcctggag

SEQ ID NO: 644958 - DNA, 120 bp, Artificial Sequence
  ENSG00000182253_2 (sequence is synthesized)
ctactcctggaggaggagctgcgcggccggcgcgggcgagagggcctgtgggccgaggggcaggcccgctgcgccgaggaggcgcgcagcttgcggcagcagctggacgagctgagctgg

SEQ ID NO: 644959 - DNA, 120 bp, Artificial Sequence
  ENSG00000182253_3 (sequence is synthesized)
cagcagctggacgagctgagctgggccactgcgctggcggagggcgagcgggacgctctgcggcgcgagctgcgggagctgcagcgcctggatgcggaggagcgcgccgcccgcggccgc

SEQ ID NO: 644960 - DNA, 120 bp, Artificial Sequence
  ENSG00000182253_4 (sequence is synthesized)
cgcgcgccgccctcgaggcgctgctgggccggctgcaggccgagcgccgaggcctcgacgcggcccacgaacgcgacgtgagggagctgcgcgcgcgcgccgccagccttaccatgcatt

SEQ ID NO: 644961 - DNA, 120 bp, Artificial Sequence
  ENSG00000182253_5 (sequence is synthesized)
agccttaccatgcatttccgcgcccgcgccaccggccccgccgcgccgccgccacgcctgcgggaggtgcacgacagctacgcactgctggtggccgagtcgtggcgggagacggtgcag

SEQ ID NO: 644962 - DNA, 120 bp, Artificial Sequence
  ENSG00000182253_6 (sequence is synthesized)
ctgtacgaggacgaggtgcgcgagctggaggaggcgctgcggcgcggccaggagagcagactccaggcggaggaagagacgcggctgtgcgcgcaggaggcagaggcgctgcggcgcgag

SEQ ID NO: 644963 - DNA, 120 bp, Artificial Sequence
  ENSG00000182253_7 (sequence is synthesized)
gcgctcgggttggagcagctgcgcgcgcggctggaggacgcgctgctgcggatgcgcgaggagtacgggatacaggccgaggagcggcagagagtgattgactgcctggaggatgagaag

SEQ ID NO: 644964 - DNA, 120 bp, Artificial Sequence
  ENSG00000182253_8 (sequence is synthesized)
gcaaccctcaccttggccatggctgactggctgcgggactatcaggacctcctgcaggtgaagaccggcctcagtctggaggtggcgacctaccgggccttattggaaggagaaagtaat

SEQ ID NO: 644965 - DNA, 120 bp, Artificial Sequence
  ENSG00000182253_9 (sequence is synthesized)
ccagagatagtgatctgggctgagcacgttgaaaacatgccgtcagaattcagaaacaaatcctatcactataccgactcactactacagagggaaaatgaaaggaatctattttcaagg

SEQ ID NO: 644966 - DNA, 120 bp, Artificial Sequence
  ENSG00000182253_10 (sequence is synthesized)
cagaaagcacctttggcaagtttcaatcacagctcggcactgtattctaacctgtcagggcaccgtggatctcagacgggcacatctattggaggtgatgccagaagaggcttcttgggc

SEQ ID NO: 644967 - DNA, 120 bp, Artificial Sequence
  ENSG00000182253_11 (sequence is synthesized)
tcgggatattcttcctcggccactacccagcaggaaaactcatacggaaaagccgtcagcagtcaaaccaacgtcagaactttctctccaacctatggccttttaagaaatactgaggct

SEQ ID NO: 644968 - DNA, 120 bp, Artificial Sequence
  ENSG00000182253_12 (sequence is synthesized)
caagtgaaaacattccctgacagaccaaaagccggagatacaagggaggtccccgtttacataggtgaagattccacaattgcccgcgagtcgtaccgggatcgccgagacaaggtggca

SEQ ID NO: 644969 - DNA, 120 bp, Artificial Sequence
  ENSG00000182253_13 (sequence is synthesized)
gcaggtgcttcggaaagcacacggtcaaatgagaggaccgtcattctgggaaagaaaacagaagtgaaagccacgagggagcaagaaagaaacagaccagaaaccatccgaacaaagcca

SEQ ID NO: 644970 - DNA, 120 bp, Artificial Sequence
  ENSG00000182253_14 (sequence is synthesized)
gaagagaaaatgttcgattctaaagagaaggcttccgaggagagaaacctaagatgggaagaattgacaaagttagataaggaagcgagacagagagaaagccagcagatgaaggagaag

SEQ ID NO: 644971 - DNA, 120 bp, Artificial Sequence
  ENSG00000182253_15 (sequence is synthesized)
gctaaggagaaggactcaccgaaggagaagagcgtgcgagagagagaggtgccgattagtctagaagtatcccaggacagaagagcagaggtgtccccgaaaggtttgcagacgcctgtg

SEQ ID NO: 644972 - DNA, 120 bp, Artificial Sequence
  ENSG00000182253_16 (sequence is synthesized)
aaggatgctggtggtgggaccggtagagaggcagaagcaagagagctacggttcaggttgggcaccagtgatgccactggttctctgcaaggcgattccatgacagaaaccgtagcagaa

SEQ ID NO: 644973 - DNA, 120 bp, Artificial Sequence
  ENSG00000182253_17 (sequence is synthesized)
aacatcgttaccagtatcctgaagcagttcactcagtctccagagacagaagcatctgctgattcttttccagacacaaaagtcacttacgtggacaggaaagagcttcctggggaaagg

SEQ ID NO: 644974 - DNA, 120 bp, Artificial Sequence
  ENSG00000182253_18 (sequence is synthesized)
aaaacaaagactgaaatagttgtggagtctaaactgactgaggatgttgatgtttccgatgaagctggcctggactaccttttaagcaaggatattaaggaagtggggctgaaaggcaag

SEQ ID NO: 644975 - DNA, 120 bp, Artificial Sequence
  ENSG00000182253_19 (sequence is synthesized)
tcagccgagcagatgataggagacatcatcaacctcggcctgaaagggagggaggggagagcaaaggtcgtcaacgtggagatcgtggaggagcccgtgagttatgtcagcggggagaag

SEQ ID NO: 644976 - DNA, 120 bp, Artificial Sequence
  ENSG00000182253_20 (sequence is synthesized)
ccggaggagttttccgtcccattcaaagtggaggaggtcgaagatgtgtcgccaggcccctgggggttggttaaggaggaggaaggttatggagaaagcgatgtcacattctcagttaat

SEQ ID NO: 644977 - DNA, 120 bp, Artificial Sequence
  ENSG00000182253_21 (sequence is synthesized)
cagcatcgaaggaccaagcagcctcaggagaacacgactcacgtggaagaagtgacagaggcaggtgattcagagggcgagcagagttattttgtgtccactccagatgaacaccccggg

SEQ ID NO: 644978 - DNA, 120 bp, Artificial Sequence
  ENSG00000182253_22 (sequence is synthesized)
gggcacgacagagatgacggctcggtgtacgggcagatccacatcgaggaggaatccaccatcaggtactcttggcaggatgaaatcgtgcaggggactcgaaggaggacacagaaggac

SEQ ID NO: 644979 - DNA, 120 bp, Artificial Sequence
  ENSG00000182253_23 (sequence is synthesized)
ggtgcagtgggcgagaaggttgtgaagcccttggatgtcccagcgccctctctggagggggacctgggttccactcactggaaagaacaagctagaagcggtgaatttcatgccgaaccc

SEQ ID NO: 644980 - DNA, 120 bp, Artificial Sequence
  ENSG00000182253_24 (sequence is synthesized)
acagtcattgaaaaagaaattaaaataccccacgaattccacacctccatgaagggcatctcctccaaggagccccggcagcagctggtggaggtcatcgggcagctggaggaaaccctt

SEQ ID NO: 644981 - DNA, 120 bp, Artificial Sequence
  ENSG00000182253_25 (sequence is synthesized)
cccgagcgcatgagggaggagctgtccgccctcaccagagaggggcagggtgggccggggagcgtttccgtggatgtcaagaaggtccagggtgctggtggcagttccgtgaccctggtt

SEQ ID NO: 644982 - DNA, 120 bp, Artificial Sequence
  ENSG00000182253_26 (sequence is synthesized)
gctgaagtcaacgtctcacaaactgtggatgccgatcggttagacctggaggagctgagcaaagatgaggccagtgagatggagaaggctgtggagtcggtggttcgggagagcctgagc

SEQ ID NO: 644983 - DNA, 120 bp, Artificial Sequence
  ENSG00000182253_27 (sequence is synthesized)
aggcaacgcagcccagcgcctggcagcccagatgaggaaggtggagcggaggccccggctgctggcattcgctttaggcgttgggccacccgggagctgtacatcccttcaggcgagagc

SEQ ID NO: 644984 - DNA, 120 bp, Artificial Sequence
  ENSG00000182253_28 (sequence is synthesized)
gaggttgctggtggggcctctcacagctcgggacagcgcactccccagggcccagtgtcggccactgtggaggtcagcagccccacaggctttgcccagtcacaggtgctggaggatgtg

SEQ ID NO: 644985 - DNA, 120 bp, Artificial Sequence
  ENSG00000182253_29 (sequence is synthesized)
agccaggctgcaaggcacataaaactcggcccctctgaagtctggaggactgagcgaatgtcatatgaaggacccactgcagaagtggtggaggtaagtgcgggaggtgacctaagtcag

SEQ ID NO: 644986 - DNA, 120 bp, Artificial Sequence
  ENSG00000182253_30 (sequence is synthesized)
aggcatgtcacgctgggtcccggtcaaagtccactgtccagagaagtcatcttcctaggccctgcccctgcctgtccagaggcatggggctcgccagaacctggcccagcagagtcttct

SEQ ID NO: 644987 - DNA, 120 bp, Artificial Sequence
  ENSG00000182253_31 (sequence is synthesized)
gcagatatggacggatcagggaggcacagcacatttggctgcagacaatttcatgctgaaaaggagattatttttcagggccccatttctgctgcagggaaggttggtgattattttgca

SEQ ID NO: 644988 - DNA, 120 bp, Artificial Sequence
  ENSG00000182253_32 (sequence is synthesized)
acagaagagtcagtgggtacccagacttctgtcaggcaactccagttaggccctaaagaagggttcagtgggcaaatccagttcacagctccactttcagacaaggtggagttgggtgtc

SEQ ID NO: 644989 - DNA, 120 bp, Artificial Sequence
  ENSG00000182253_33 (sequence is synthesized)
ataggagattctgtacacatggaagggttgccagggagcagcacatccatcaggcacatcagcattgggcctcagaggcatcagaccacccagcagatagtttaccatgggctggttccc

SEQ ID NO: 644990 - DNA, 120 bp, Artificial Sequence
  ENSG00000182253_34 (sequence is synthesized)
caactgggggaatctggtgactcagagagcactgtgcacggagagggctcagcagatgtgcaccaggccactcacagtcatacctcgggtagacaaaccgttatgactgaaaagagcacc

SEQ ID NO: 644991 - DNA, 120 bp, Artificial Sequence
  ENSG00000182253_35 (sequence is synthesized)
ttccaaagtgtcgtttctgaatctccccaggaggatagtgcagaggacacatcaggggcagaaatgacatcgggtgttagcagatcctttaggcacattcgactaggtcctacagaaacg

SEQ ID NO: 644992 - DNA, 120 bp, Artificial Sequence
  ENSG00000182253_36 (sequence is synthesized)
gaaacctctgaacacattgccatccgtggacccgtgtccagaacatttgtgcttgctggttcagcggactcccctgagctaggcaagttagcagacagcagcagaacgctaaggcacatt

SEQ ID NO: 644993 - DNA, 120 bp, Artificial Sequence
  ENSG00000182253_37 (sequence is synthesized)
gcaccagggcccaaagaaacttcgtttacctttcagatggatgtgagtaacgtagaggcgatccgcagccggacacaggaagcgggagctctcggtgtgtctgaccgtggttcctggaga

SEQ ID NO: 644994 - DNA, 120 bp, Artificial Sequence
  ENSG00000182253_38 (sequence is synthesized)
gacgcggacagtaggaatgaccaggcagttggtgtgagctttaaggcctctgctggggaaggagaccaggcccacagagaacagggcaaggagcaggccatgtttgataagaaggtgcag

SEQ ID NO: 644995 - DNA, 120 bp, Artificial Sequence
  ENSG00000182253_39 (sequence is synthesized)
ctccagagaatggtagaccaaaggtcggtgatttcagatgaaaagaaagttgccctcctctatctagacaatgaggaggaggagaatgatgggcattggttttaataagcagaaacattt

SEQ ID NO: 644996 - DNA, 120 bp, Artificial Sequence
  ENSG00000182253_40 (sequence is synthesized)
tgttttaatggcagcctgttggcgacgtgccaacatccaaaggccttaacttattttaagaggccgagggagtctatgaaaatctccccttttttacttttttaaagagtactcccggca

SEQ ID NO: 644997 - DNA, 120 bp, Artificial Sequence
  ENSG00000182253_41 (sequence is synthesized)
tggtcaatttcctttatagttaatccgtaaaggtttccagttaattcatgccttaaaaggcactgcaattttatttttgagttgggacttttacaaaacacttttttccctggagtcttc

SEQ ID NO: 644998 - DNA, 120 bp, Artificial Sequence
  ENSG00000182253_42 (sequence is synthesized)
tctccacttctggagatgaatttctatgttttgcacctggtcacagacatggcttgcatctgtttgaaactacaattaattatagatgtcaaaacattaaccagattaaagtaatatatt

SEQ ID NO: 644999 - DNA, 120 bp, Artificial Sequence
  ENSG00000182253_43 (sequence is synthesized)
taagagtaaattttgcttgcatgtgctaatatgaaataacagactaacattttaggggaaaaataaatacaatttagactctaaaaagtcttttcaaaaagaaatgggaaataggcagac

SEQ ID NO: 645000 - DNA, 120 bp, Artificial Sequence
  ENSG00000182253_44 (sequence is synthesized)
tgtttatgttaaaaaaattcttgctaaatgatttcatctttaggaaaaaattacttgccatatagagctaaattcatcttaagacttgaatgaattgctttctatgtacagaactttaaa

SEQ ID NO: 645001 - DNA, 120 bp, Artificial Sequence
  ENSG00000182253_45 (sequence is synthesized)
caatatagtatttatggcgaggacagctgtagtctgttgtgatatttcacattctatttgcacaggttccctggcactggtagggtagatgattattgggaatcgcttacagtaccattt

SEQ ID NO: 645002 - DNA, 120 bp, Artificial Sequence
  ENSG00000182253_46 (sequence is synthesized)
cattttttggcactaggtcattaagtagcacacagtctgaatgcccttttctggagtggccagttcctatcagactgtgcagacttgcgcttctctgcaccttatcccttagcacccaaa

SEQ ID NO: 645003 - DNA, 120 bp, Artificial Sequence
  ENSG00000182253_47 (sequence is synthesized)
catttaatttcactggtgggaggtagaccttgaagacaatgaagagaatgccgatactcagactgcagctggaccggcaagctggctgtgtacaggaaaattggaagcacacagtggact

SEQ ID NO: 645004 - DNA, 120 bp, Artificial Sequence
  ENSG00000182253_48 (sequence is synthesized)
gtgcctcttaaagatgcctttcccaaccctccattcatgggatgcaggtctttctgagctcaagggtgaaagatgaatacaataacaaccatgaacccacctcacggaagctttttttgc

SEQ ID NO: 645005 - DNA, 120 bp, Artificial Sequence
  ENSG00000182253_49 (sequence is synthesized)
actttgaacagaagtcattgcagttggggtgttttgtccagggaaacagtttattaaatagaaggatgttttggggaaggaactggatatctctcctgcagcccagcaccgagataccca

SEQ ID NO: 645006 - DNA, 120 bp, Artificial Sequence
  ENSG00000182253_50 (sequence is synthesized)
ggacgggcctggggggcgagaaaggcccccatgctcatgggccgcggagtgtggacctgtagataggcaccaccgagtttaagatactgggatgagcatgcttcattggattcattttat

SEQ ID NO: 645007 - DNA, 120 bp, Artificial Sequence
  ENSG00000182253_51 (sequence is synthesized)
tttacacgtcagtattgttttaaagtttctgtctgtaaagtgtagcatcatatataaaaagagtttcgctagcagcgcattttttttagttcaggctagcttctttcacataatgctgtc

SEQ ID NO: 645008 - DNA, 120 bp, Artificial Sequence
  ENSG00000182253_52 (sequence is synthesized)
tcagctgtatttccagtaacacagcatcatcgcactgactgtggcgcactggggaataacagtctgagctagcaccaccctcagccaggctacaacgacagcactggagggtcttccctc

SEQ ID NO: 645009 - DNA, 120 bp, Artificial Sequence
  ENSG00000182253_53 (sequence is synthesized)
tcagattcacctggaggccctcagacccccagggtgcacgtctccccaggtcctgggagtggctaccgcaggtagtttctggagagcacgttttcttcattgataagtggaggagaaatg

SEQ ID NO: 645010 - DNA, 120 bp, Artificial Sequence
  ENSG00000182253_54 (sequence is synthesized)
cagcacagctttcaagatactattttaaaaacaccatgaatcagatagggaaagaaagttgattggaatagcaagtttaaacctttgttgtccatctgccaaatgaactagtgattgtca

SEQ ID NO: 645011 - DNA, 120 bp, Artificial Sequence
  ENSG00000182253_55 (sequence is synthesized)
gactggtatggaggtgactgctttgtaaggttttgtcgtttctaatacagacagagatgtgctgattttgttttagctgtaacaggtaatggtttttggatagatgattgactggtgaga

SEQ ID NO: 645012 - DNA, 120 bp, Artificial Sequence
  ENSG00000182253_56 (sequence is synthesized)
atttggtcaaggtgacagcctcctgtctgatgacaggacagactggtggtgaggagtctaagtgggctcagtttgatgtcagtgtctgggctcatgacttgtaaatggaagctgatgtga

SEQ ID NO: 645013 - DNA, 120 bp, Artificial Sequence
  ENSG00000182253_57 (sequence is synthesized)
acaggtaattaatattatgacccacttctatttactttgggaaatatcttggatcttaattatcatctgcaagtttcaagaagtattctgccaaaagtatttacaagtatggactcatga

SEQ ID NO: 645014 - DNA, 120 bp, Artificial Sequence
  ENSG00000182253_58 (sequence is synthesized)
gctattgttggttgctaaatgtgaatcacgcgggagtgagtgtgcccttcacactgtgacattgtgacattgtgacaagctccatgtcctttaaaatcagtcactctgcacacaagagaa

SEQ ID NO: 645015 - DNA, 120 bp, Artificial Sequence
  ENSG00000182253_59 (sequence is synthesized)
atcaacttcgtggttggatggggccggaacacaaccagtctttttgtatttattgttactgagacaaaacagtactcactgagtgtttttcagtttcctactggtggttttgatattgtt

SEQ ID NO: 645016 - DNA, 120 bp, Artificial Sequence
  ENSG00000182253_60 (sequence is synthesized)
tgtttaagatgtatatttagaatgacatcatctaagaagctgattttgctaaactcctgttccctacaatgggaaatgtcacaagaatgtgcaaaaataaaaatctgaggaaaaaaccca

SEQ ID NO: 645017 - DNA, 120 bp, Artificial Sequence
  ENSG00000182253_61 (sequence is synthesized)
aagagtggctggattcggattttggagtgagacggagcatgaagacgctgtgtcctgaggcctttacattctcatcttacttatcccttgtagcgatcctatgagggaggggttatcctt

SEQ ID NO: 645018 - DNA, 120 bp, Artificial Sequence
  ENSG00000182253_62 (sequence is synthesized)
actttacagatgaggaaactgagtctgggaggctcaaggaccagctcgtccctgtcctcctgctccctagacccagctggtctcagaccctgcggagctgccatcatctgcatctgtgcc

SEQ ID NO: 645019 - DNA, 120 bp, Artificial Sequence
  ENSG00000182253_63 (sequence is synthesized)
ctgactcttcagcctctctccctggccttctggagacagacctctgaccggtgggctccatgtgattctgggctccaggacctctcccatgaagatgaccagcacttgctgagtgcggtg

SEQ ID NO: 645020 - DNA, 120 bp, Artificial Sequence
  ENSG00000182255_0 (sequence is synthesized)
agagcgcgttcgcggccaggggaggcgtgtgctgctcccgcagccagcgagagcgagagagggatggatgttggaggaggaattcgggcttaacaagtgatcgctgctgtctaggatttt

SEQ ID NO: 645021 - DNA, 120 bp, Artificial Sequence
  ENSG00000182255_1 (sequence is synthesized)
gtttcttttcgggggaaccttgacttcctttcccaggcaatccctcctgtgctgaactccagaggaaccaggagtcttggggtcttctctggggcagccccaacccccacccccaggctc

SEQ ID NO: 645022 - DNA, 120 bp, Artificial Sequence
  ENSG00000182255_2 (sequence is synthesized)
cagccgcgaggactctgtgcacccctcgggccaggcaacagaacttgttccgtggatatttggagcctccacctgccaaacccgagtgattccttttaccaccccccgccccccacccag

SEQ ID NO: 645023 - DNA, 120 bp, Artificial Sequence
  ENSG00000182255_3 (sequence is synthesized)
gatcattcttcccctcctccagctgttgcagcttgagggggaaaaacaagccagccggtggattttctttatttttatttttcgccccgccggggaacggtgaagtgcttcttctgcatg

SEQ ID NO: 645024 - DNA, 120 bp, Artificial Sequence
  ENSG00000182255_4 (sequence is synthesized)
attttggctgaagaatgctctgcatttccttgatttctatggagacctcagagctggttttgcttctgctgacacctcatctagcaccttctctacctcccagggtctttgcctctatct

SEQ ID NO: 645025 - DNA, 120 bp, Artificial Sequence
  ENSG00000182255_5 (sequence is synthesized)
gtggtttggcattgtacctgggtacaggaagcctttgatgaacttaaaaggagagcctggagaatcatcctgatagactttgagtagaaatggctggacatacttcaaaccacatcttaa

SEQ ID NO: 645026 - DNA, 120 bp, Artificial Sequence
  ENSG00000182255_6 (sequence is synthesized)
catggttcgagccatcactagaaggcaagtgctaacagtaaaggcttatttgcattttatttacatttaatggactgagcattggccaatttccatggcagaaaaatatatttcattttc

SEQ ID NO: 645027 - DNA, 120 bp, Artificial Sequence
  ENSG00000182255_7 (sequence is synthesized)
taggcacaacttctggctgtcagacacttgctgcctttgaatcttgcagcaacatcactaaccacatcccagacatatttccaaatttcaacatctacccccaaaacataggtgtctgag

SEQ ID NO: 645028 - DNA, 120 bp, Artificial Sequence
  ENSG00000182255_8 (sequence is synthesized)
agactccagcattttcggacttcttagtcttgagagtgccaggctatttatctcgaccagccaagctctggagagcaatgttgaatccctgagaagagagagcatggggcgtgctgattt

SEQ ID NO: 645029 - DNA, 120 bp, Artificial Sequence
  ENSG00000182255_9 (sequence is synthesized)
aaaaacagaaaatgcaaagttggactgaaaatatccttagtcttccaagcaatctgcttaagggttccaaacttaccttaatttggtgagaaaagaagctgccctatttttctttcttct

SEQ ID NO: 645030 - DNA, 120 bp, Artificial Sequence
  ENSG00000182255_10 (sequence is synthesized)
tcttctacaactggaaccagccatttccgaaaaccaccaccatggaggttgcaatggtgagtgcggagagctcagggtgcaacagtcacatgccttatggttatgctgcccaggcccggg

SEQ ID NO: 645031 - DNA, 120 bp, Artificial Sequence
  ENSG00000182255_11 (sequence is synthesized)
cccgggagcgggagaggcttgctcactccagggcagctgcagcagctgctgttgcagcggccacagctgctgtcgaaggtagcgggggttctggtgggggctcccaccaccaccaccagt

SEQ ID NO: 645032 - DNA, 120 bp, Artificial Sequence
  ENSG00000182255_12 (sequence is synthesized)
cacgcggggcctgtacctcccatgaccctcagagcagccggggtagtcggaggaggaggcgacagcggtctgagaagaagaaagcccactaccggcagagcagcttccctcattgctctg

SEQ ID NO: 645033 - DNA, 120 bp, Artificial Sequence
  ENSG00000182255_13 (sequence is synthesized)
acctgatgcccagtggctctgaggagaagatcctgagggagctgagtgaggaggaggaagatgaggaggaggaggaagaggaggaagaggagggaaggttttactatagtgaagatgacc

SEQ ID NO: 645034 - DNA, 120 bp, Artificial Sequence
  ENSG00000182255_14 (sequence is synthesized)
atggtgatgagtgttcctacacggatctgctgcctcaggatgagggcggtggcggctacagttcagtccgctacagtgactgttgtgaacgtgtggtgataaatgtgtcaggcctacgct

SEQ ID NO: 645035 - DNA, 120 bp, Artificial Sequence
  ENSG00000182255_15 (sequence is synthesized)
ttgagacccaaatgaaaactctggcccagtttccagagactttgttgggagaccctgaaaagaggactcagtactttgaccctttgcgcaatgagtatttttttgacaggaaccgcccca

SEQ ID NO: 645036 - DNA, 120 bp, Artificial Sequence
  ENSG00000182255_16 (sequence is synthesized)
gctttgatgccatcttgtattattatcaatcaggaggccgcctgaagaggccagtcaatgtcccctttgatatcttcactgaggaggtgaagttctatcagttgggggaggaggccctgt

SEQ ID NO: 645037 - DNA, 120 bp, Artificial Sequence
  ENSG00000182255_17 (sequence is synthesized)
agtcctgcaaggggcatagccattgtgtccgtcctggtcatcttaatctccattgtcatcttttgcctggaaaccttgcctgagtttagggacgacagggatctcgtcatggcactgagt

SEQ ID NO: 645038 - DNA, 120 bp, Artificial Sequence
  ENSG00000182255_18 (sequence is synthesized)
gctggcgggcatggtgggttgttgaatgatacttcagcaccccatctggagaactcagggcacacaatattcaatgaccccttcttcatcgtggaaacagtctgtattgtatggttttcc

SEQ ID NO: 645039 - DNA, 120 bp, Artificial Sequence
  ENSG00000182255_19 (sequence is synthesized)
tttgagtttgtggttcgctgctttgcttgtcccagccaagcactcttcttcaaaaacatcatgaacatcattgacattgtctccattttgccttacttcatcacactgggcactgacctg

SEQ ID NO: 645040 - DNA, 120 bp, Artificial Sequence
  ENSG00000182255_20 (sequence is synthesized)
gcccagcaacaggggggtggcaatggtcagcagcagcaggccatgtcctttgccatcctcagaatcattcgtctggtccgagtattccggatcttcaaactctccaggcactccaaaggc

SEQ ID NO: 645041 - DNA, 120 bp, Artificial Sequence
  ENSG00000182255_21 (sequence is synthesized)
ctgcagatcctgggccacaccctcagagccagcatgcgggaactgggccttctgatcttcttcctcttcattggggtcatcctcttttctagtgctgtgtattttgcagaggcggatgaa

SEQ ID NO: 645042 - DNA, 120 bp, Artificial Sequence
  ENSG00000182255_22 (sequence is synthesized)
cctactacccatttccaaagcatcccagatgcattttggtgggctgtggtgaccatgacaactgtgggctatggggacatgaagcccatcactgtagggggcaagattgtcgggtccctg

SEQ ID NO: 645043 - DNA, 120 bp, Artificial Sequence
  ENSG00000182255_23 (sequence is synthesized)
tgtgccattgcgggtgtcttaaccattgctttgccagtgccagtgattgtctctaactttaactatttctaccacagagagactgaaaatgaggaacagacacagctaacgcagaatgca

SEQ ID NO: 645044 - DNA, 120 bp, Artificial Sequence
  ENSG00000182255_24 (sequence is synthesized)
gtcagttgtccatacctcccctctaatttgctcaagaaatttcggagctctacttcttcttccctgggggacaagtcagagtatctagagatggaagaaggagttaaggaatctctgtgt

SEQ ID NO: 645045 - DNA, 120 bp, Artificial Sequence
  ENSG00000182255_25 (sequence is synthesized)
gcaaaggaggagaagtgtcagggaaagggggatgacagtgagacagataaaaacaactgttctaatgcaaaggctgtggagactgatgtgtgaatctttttccacctgccactgctcccc

SEQ ID NO: 645046 - DNA, 120 bp, Artificial Sequence
  ENSG00000182255_26 (sequence is synthesized)
cctcagcatctccaaatatatttatgcatagagagtgcagttatgaaaatgaaatatgcaaatgatccaatgcatacagtagtacactatttaatggttatacatggcataattgttact

SEQ ID NO: 645047 - DNA, 120 bp, Artificial Sequence
  ENSG00000182255_27 (sequence is synthesized)
aaacttgtattacatatcaaataaatgatacatcttggagaagagggaggaataggagcaaatctatctttatatttttattagaatgcaagaattttgcacattaactggaaaagatgt

SEQ ID NO: 645048 - DNA, 120 bp, Artificial Sequence
  ENSG00000182255_28 (sequence is synthesized)
taacagtaaagatggagagagagagtgtgtgcgtgtgtgtgtatatgtgtgtgtgtgtgaagtaaattgtcaatgttagtaattgtgcagtgaagggaaaagttggcattttgaagtatt

SEQ ID NO: 645049 - DNA, 120 bp, Artificial Sequence
  ENSG00000182255_29 (sequence is synthesized)
tactatgtaagaactaatgaatctgagcagtcatttatcagtgctttaacagcatatcgtatgtctttggattctgtagttgttttttaaaaattgtaagaaatactgtgtagagaaaaa

SEQ ID NO: 645050 - DNA, 120 bp, Artificial Sequence
  ENSG00000182255_30 (sequence is synthesized)
agaaagtaaattatttaatagactataggtcacaattttatcttggatttaattaaaatttatttttaactggaaattaacttttaaaaaggctgcaagggcctttagaaattgattata

SEQ ID NO: 645051 - DNA, 120 bp, Artificial Sequence
  ENSG00000182255_31 (sequence is synthesized)
ttttgttattaattttgggaagacttaacagcaaatgtctaacattatagaataagtgaaattggagaatatgtaataagttttgtttgcaggtaacaggactggatttttttttctttg

SEQ ID NO: 645052 - DNA, 120 bp, Artificial Sequence
  ENSG00000182255_32 (sequence is synthesized)
cactactttatatgctggagattgagagagacttcaaactgtgaatgtttactaatgtaacagttcaatgacaatcattggaagaatgatttctttagtcttattttattgttttctttt

SEQ ID NO: 645053 - DNA, 120 bp, Artificial Sequence
  ENSG00000182255_33 (sequence is synthesized)
cattgtgtgagactaatgatcatgcagataacatcacaggattctctcctcttttaaaatctaaataactgattgacaaaggaattatgaagtaaaatttagcaactgaatcttttgaaa

SEQ ID NO: 645054 - DNA, 120 bp, Artificial Sequence
  ENSG00000182256_0 (sequence is synthesized)
gcggtggcccggcgtcccgtgtgcgtccagtgtgcgccccgcgggggcgcggccagcgccagagtagatacctgtcccgcccgccgcggccagcagcctcggaggaagccagggcaaaga

SEQ ID NO: 645055 - DNA, 120 bp, Artificial Sequence
  ENSG00000182256_1 (sequence is synthesized)
gccagcagcctcggaggaagccagggcaaagagggccggcggagaccaggtccgcgccggaggaagccgcgcccggccgaggccccggaccctgcgccccgagctccacggcaccatggc

SEQ ID NO: 645056 - DNA, 120 bp, Artificial Sequence
  ENSG00000182256_2 (sequence is synthesized)
cccgaagctgctgctcctcctctgcctgttctcgggcttgcacgcgcggtccagaaaggtggaagaggatgaatatgaagattcatcatcaaaccaaaagtgggtcttggctccaaaatc

SEQ ID NO: 645057 - DNA, 120 bp, Artificial Sequence
  ENSG00000182256_3 (sequence is synthesized)
ccaagacaccgacgtgactcttattctcaacaagttgctaagagaatatgataaaaagctgaggccagatattggaataaaaccgaccgtaattgacgttgacatttatgttaacagcat

SEQ ID NO: 645058 - DNA, 120 bp, Artificial Sequence
  ENSG00000182256_4 (sequence is synthesized)
tggtcctgtgtcatcaataaacatggaataccaaattgacatattttttgctcagacctggacagatagtcgccttcgattcaacagcacaatgaaaattcttactctgaacagcaacat

SEQ ID NO: 645059 - DNA, 120 bp, Artificial Sequence
  ENSG00000182256_5 (sequence is synthesized)
ggtggggttaatctggatcccagacaccatcttccgcaattctaaaaccgcagaggctcactggatcaccacacccaatcagctcctccggatttggaatgacgggaaaatcctttacac

SEQ ID NO: 645060 - DNA, 120 bp, Artificial Sequence
  ENSG00000182256_6 (sequence is synthesized)
tttgaggctcaccatcaatgctgagtgccagctgcagctgcacaacttccccatggacgaacactcctgcccgctgattttctccagctatggctatcccaaagaagaaatgatttatag

SEQ ID NO: 645061 - DNA, 120 bp, Artificial Sequence
  ENSG00000182256_7 (sequence is synthesized)
atggagaaaaaattcagtggaggcagctgaccagaaatcatggcggctttatcagtttgacttcatgggcctcagaaacaccacagaaatcgtgacaacgtctgcaggtgattatgttgt

SEQ ID NO: 645062 - DNA, 120 bp, Artificial Sequence
  ENSG00000182256_8 (sequence is synthesized)
catgactatatattttgaattgagtagaagaatgggatacttcaccattcagacatacattccctgtatactgactgtggttttatcctgggtgtcattttggatcaaaaaagatgctac

SEQ ID NO: 645063 - DNA, 120 bp, Artificial Sequence
  ENSG00000182256_9 (sequence is synthesized)
gccagcaagaacagcattaggcatcaccacggtgctgaccatgaccaccctgagcaccatcgccaggaagtccttgccacgcgtgtcctacgtgaccgccatggacctttttgtgaccgt

SEQ ID NO: 645064 - DNA, 120 bp, Artificial Sequence
  ENSG00000182256_10 (sequence is synthesized)
gtgcttcctgtttgtcttcgccgcgctgatggagtatgccaccctcaactactattccagctgtagaaaaccaaccaccacgaagaagacaacatcgttactacatccagattcctcaag

SEQ ID NO: 645065 - DNA, 120 bp, Artificial Sequence
  ENSG00000182256_11 (sequence is synthesized)
atggattcctgagcgaataagcctacaagccccttccaactattccctcctggacatgaggccaccaccaactgcgatgatcactttaaacaattccgtttactggcaggaatttgaaga

SEQ ID NO: 645066 - DNA, 120 bp, Artificial Sequence
  ENSG00000182256_12 (sequence is synthesized)
tacctgtgtctatgagtgtctggatggcaaagactgtcagagcttcttctgctgctatgaagaatgtaaatcaggatcctggaggaaagggcgtattcacatagacatcttggagctgga

SEQ ID NO: 645067 - DNA, 120 bp, Artificial Sequence
  ENSG00000182256_13 (sequence is synthesized)
ctcgtactcccgggtctttttccccacgtccttcctgctctttaacctggtctactgggttggatacctgtatctctaagtgttgctcagagtgaagagtgaagagcatttggtacacac

SEQ ID NO: 645068 - DNA, 120 bp, Artificial Sequence
  ENSG00000182256_14 (sequence is synthesized)
ttgaccttctgtcgtccccagaccagtagtgaccaatcgggagtagcaaggaaggacactgcccagtgtatcttgttataaatgacctttcagcaacacaggaagtacccagcaaaggtt

SEQ ID NO: 645069 - DNA, 120 bp, Artificial Sequence
  ENSG00000182256_15 (sequence is synthesized)
tctattatgtattttacacacacacatacatacacacacacagctaattgagttttaaagtaatattcttgctaatccctactgaattgtagcttggtgttgtttctgaatggtttttgg

SEQ ID NO: 645070 - DNA, 120 bp, Artificial Sequence
  ENSG00000182256_16 (sequence is synthesized)
atattggaagcagccgctgattacccttgcaaagaaatctgtaaaatgtgcacgtgaatgtctgagatgctctctcaggcctctagtccttctgtatctttcctttgcagccctgggtgt

SEQ ID NO: 645071 - DNA, 120 bp, Artificial Sequence
  ENSG00000182256_17 (sequence is synthesized)
agtagcactcaggagtgttgaatcacccctggccgagacccactcctgctggctcagcctgggcatgtgtgtgctccagtgtgaacagcagtgggttccaaccccagtctcctttctctg

SEQ ID NO: 645072 - DNA, 120 bp, Artificial Sequence
  ENSG00000182256_18 (sequence is synthesized)
tggcctctctggctccagcaccatcatcgttagctggcactcctttacctaataacctcgttctaggcctggggagagtacactcgcattgtctacggtttccattggaggagaaaataa

SEQ ID NO: 645073 - DNA, 120 bp, Artificial Sequence
  ENSG00000182256_19 (sequence is synthesized)
gattttcaaaatgctcatgttgttggggtcaaagatgattatctctgaacatcagaaggttattactttattccaacttactgagagtcaacaatatttgaactttgggttcttggacta

SEQ ID NO: 645074 - DNA, 120 bp, Artificial Sequence
  ENSG00000182256_20 (sequence is synthesized)
gttcaacagcatttcaccttaagagctgtttttcactagaccaacgctcaaccctcgagtatgtgtccagcttatgttatattattatgggttcggtaattgtcattttgcaaagaaagg

SEQ ID NO: 645075 - DNA, 120 bp, Artificial Sequence
  ENSG00000182256_21 (sequence is synthesized)
tatacagtgaacacaacctgttatcttgaagacatacaccggaatgtgaaagacatgtagataaaattttatttttattttatttttttgagacagagtcatgctctgtcacctggccag

SEQ ID NO: 645076 - DNA, 86 bp, Artificial Sequence
  ENSG00000182256_22 (sequence is synthesized)
cctctgcctcccatgttcaagcgattttcctgcctcagtttcccaagtggctgggactacaggtggttttttgttttttgggtttt

SEQ ID NO: 645077 - DNA, 120 bp, Artificial Sequence
  ENSG00000182256_23 (sequence is synthesized)
ggcatgagccaccatgcccggccaaaattaaaaaaaaaaaattagtgaatattaattttcaactcaaaccaactttagatgcaaaaaaatgggcaatggtgatcatcaagtacatatttt

SEQ ID NO: 645078 - DNA, 120 bp, Artificial Sequence
  ENSG00000182256_24 (sequence is synthesized)
atcaagtacatattttgatgaacaagattattttatactttgaaatatggatacatagcaaaatcccaaagaaaaaatatccccccaaatcaatactcttttgatatttttataatacaa

SEQ ID NO: 645079 - DNA, 120 bp, Artificial Sequence
  ENSG00000182256_25 (sequence is synthesized)
aaccaacttgctgcttgctgttagttctttgttataactggatgccaatgtgaactgcagaagactgttttgaaacttctcctcaccaataggcaaaacacaagtcctaccagttagtta

SEQ ID NO: 645080 - DNA, 120 bp, Artificial Sequence
  ENSG00000182256_26 (sequence is synthesized)
ataatgctttggcattgttaaaatttgaaaccagaatctctgtgcttctcatctttctcacatagaaaactgaattaatttgacctagaaaccgtaatttttaaaattatctattgtgca

SEQ ID NO: 645081 - DNA, 120 bp, Artificial Sequence
  ENSG00000182256_27 (sequence is synthesized)
taccataattacccagaaacgtaaaatattttgcagagaaagtatagaaaagtatcaatttcacacaatgtcctggatgtataccagacacagaagaggatgggagcagaagaggccaga

SEQ ID NO: 645082 - DNA, 120 bp, Artificial Sequence
  ENSG00000182256_28 (sequence is synthesized)
aaaagtgaaattagattcatctgcttattcctattaagattgttgcatattaaacggatgcaaagatatagatatgtctgaatttccaaagatggagtctatacagcgtgagacattcaa

SEQ ID NO: 645083 - DNA, 120 bp, Artificial Sequence
  ENSG00000182256_29 (sequence is synthesized)
acccattgtttctctccctgtcaactctctgtcttttggtttggtagttgctacataatccacaagccaattggcttcagtttagcaaattcagttttaaaaataaaagagtatttgtgg

SEQ ID NO: 645084 - DNA, 120 bp, Artificial Sequence
  ENSG00000182256_30 (sequence is synthesized)
agaaacaggttgaaaatattgtcttagatgcaatgtctcctctattggagaatttcacactctggtactctagttctgtctctcatgcataagcaacccccgccttggcagaagtattct

SEQ ID NO: 645085 - DNA, 120 bp, Artificial Sequence
  ENSG00000182256_31 (sequence is synthesized)
gcaaggaccctgaccaaaggaatccaagtcacaccacagcactgagcgccaagggaaggtggcccaagggcagtcttaagacacaatgtcaaacgttatgaatgggtaatttctaacaag

SEQ ID NO: 645086 - DNA, 120 bp, Artificial Sequence
  ENSG00000182256_32 (sequence is synthesized)
ctgaagaactgcaacctgctacattgtaaacgaagttctggagagaactgaattttctagaaaaattcttattgggaggaaaataacctaaaacaactttttataacatggatttgtttg

SEQ ID NO: 645087 - DNA, 120 bp, Artificial Sequence
  ENSG00000182256_33 (sequence is synthesized)
attttaccttaaaagaattttactgatgccttgtgtttcaaaaccactcaacatttggatattgttagcaaccctcctgaaattttacatgtaggataaatacaccaataacctcagttt

SEQ ID NO: 645088 - DNA, 120 bp, Artificial Sequence
  ENSG00000182256_34 (sequence is synthesized)
tctgaatccagccattctcttcttcccaacctcagcagccctcctgatcaaaacagatgagttcagcgctccttttctaggaaggagaaccttcatctcaagaaagtccaatggatttca

SEQ ID NO: 645089 - DNA, 120 bp, Artificial Sequence
  ENSG00000182256_35 (sequence is synthesized)
ctaactgagcatcatagtgtggattcctgcatatacagcaggctccccactagggggtctcaataaaaagagctaaagcaccccctaagagcatgtccatgccgggttctccgcaggctt

SEQ ID NO: 645090 - DNA, 120 bp, Artificial Sequence
  ENSG00000182256_36 (sequence is synthesized)
gcataattcaagttctccatatcagtctcaactcctgagatgagccttttcagtccacaatgaggaagagatgggtgtgccttggtgaggtgcagagctcaggggatttttaatcatgta

SEQ ID NO: 645091 - DNA, 120 bp, Artificial Sequence
  ENSG00000182256_37 (sequence is synthesized)
catgtttactttctagaggaaggagaggagcagtgtggggagagtgggaaggaagtacgctttctttcactaaagactctctttgccaggatgcctgatcaggagggacgtgtgtgggca

SEQ ID NO: 645092 - DNA, 120 bp, Artificial Sequence
  ENSG00000182256_38 (sequence is synthesized)
cgaggtgcaaggctgttccacacagctaagccccagcttgctttgcatgcagaattgggaaatatttggggtggaagttgtctgagtgatctgcattccaaaggtgctactgtgttcctc

SEQ ID NO: 645093 - DNA, 120 bp, Artificial Sequence
  ENSG00000182256_39 (sequence is synthesized)
actttcagaaatactctaagttgaggagatgacagttctgtattttgacatggaatccaaatttctgaccactgtggatcacacttaaaactgtgactgtctgtcttttaagctgcatac

SEQ ID NO: 645094 - DNA, 120 bp, Artificial Sequence
  ENSG00000182256_40 (sequence is synthesized)
tgggtggggggaaagcaaagaaaaggcatttcacattaatggaattggagaaaaatgtctcttcagagcctagaaagcttcagcttctgcaaagtcccaacaccacctaccagaacagag

SEQ ID NO: 645095 - DNA, 120 bp, Artificial Sequence
  ENSG00000182256_41 (sequence is synthesized)
actccctacataccagacagagaaggacaaagttagtataatttactctggacccagccaatactgcccccaatttacccaaaacatgccttaaaatgaaacagaaagctcaaataatac

SEQ ID NO: 645096 - DNA, 120 bp, Artificial Sequence
  ENSG00000182256_42 (sequence is synthesized)
acatcttttaagattttccatttcctgcagttagctatatttcatgccaagttttatttatcttttatgaatggatggaaataggatttcatttctttatatgccaaacagtcttaccct

SEQ ID NO: 645097 - DNA, 120 bp, Artificial Sequence
  ENSG00000182256_43 (sequence is synthesized)
tgttctcaagagcaaagcattttcactctacataagggaaattggggccaatctaaaatgtcagcaacacagtcctgatggggatgagtgtctctaatagaaactccgcaccaaatcatt

SEQ ID NO: 645098 - DNA, 120 bp, Artificial Sequence
  ENSG00000182256_44 (sequence is synthesized)
ttacctggtgatagcttgctgcagtaagtttgcaggcatgttgcttcgttgttctgcaatataaccacactcgaagcaacaggagaggggccggtaacccattctgcattgactccagct

SEQ ID NO: 645099 - DNA, 120 bp, Artificial Sequence
  ENSG00000182256_45 (sequence is synthesized)
ccctatgactaggaagcaatgagccactctatctaaagggctagaacacaaaacagacaaaacctcttcttccttgatcatttttatctcagctgccaaaatggaaattttctgtgattt

SEQ ID NO: 645100 - DNA, 120 bp, Artificial Sequence
  ENSG00000182256_46 (sequence is synthesized)
cctttgagacttgaagaattacacctggtctccaaccattattcttatcaccgtatcggttcagtgctctcaaggcacaaagcacttggaattcactccatgatcttgcaactctttttg

SEQ ID NO: 645101 - DNA, 120 bp, Artificial Sequence
  ENSG00000182256_47 (sequence is synthesized)
agtgcttttcctgagcgattttaaactctacccgtaagaaatttcatctgcaatttctgtaaaaaaaaaaaaaaaaaaaaagaatggcttaagctccacataatctgatgtaaatataca

SEQ ID NO: 645102 - DNA, 120 bp, Artificial Sequence
  ENSG00000182256_48 (sequence is synthesized)
ttgaaacgttaagttctatttgtactgaaacactgtccaccttagactttagaacactatcatttaacagatattcagaaaggttccggaaatacgggggaaagaaccagactacgaata

SEQ ID NO: 645103 - DNA, 120 bp, Artificial Sequence
  ENSG00000182256_49 (sequence is synthesized)
cattggaaatgttaaatttacaatattctcctgagcccccttccaatttcccaaaattgagaaagtgtgtaatctgtacctattttttttctcaaattggcctggaggaaacattcaggt

SEQ ID NO: 645104 - DNA, 120 bp, Artificial Sequence
  ENSG00000182256_50 (sequence is synthesized)
tcagagagtttagcagtgcctctatgtttgtgttctctgtgtaatcacatgaaagaaccaacaaataactcttcaggataaatgacacctgcatcgctgatcccttgttgacttatgttt

SEQ ID NO: 645105 - DNA, 120 bp, Artificial Sequence
  ENSG00000182256_51 (sequence is synthesized)
tattataaaaatagatctctatcattatagggataaaacgtgtatgttttgagatgatttggtaagaactcagccattcagtatttctggaagaattaaaaacttggctttctttttctt

SEQ ID NO: 645106 - DNA, 120 bp, Artificial Sequence
  ENSG00000182256_52 (sequence is synthesized)
aatgtctaatagttttgaagactagatattagggcattttctttcctccttttaaaatttctactgattacaagctagcaatttcaggatatcagcttgatctagttgtattaaggccaa

SEQ ID NO: 645107 - DNA, 80 bp, Artificial Sequence
  ENSG00000182256_53 (sequence is synthesized)
atttcaggatatcagcttgatctagttgtattaaggccaaaaggcagactttctttatatttatttttattatttattta

SEQ ID NO: 645108 - DNA, 120 bp, Artificial Sequence
  ENSG00000182256_54 (sequence is synthesized)
atttacttttttaatgccacctagctgaataatgctttgggttttactgttgtcaataaaaccccttataccttttattgtcctgcttacttataaaagccaaattttaggcgaacttaa

SEQ ID NO: 645109 - DNA, 120 bp, Artificial Sequence
  ENSG00000182256_55 (sequence is synthesized)
ataaatcagtgctgaaaaactagttgaacaatcagtcactgacaagttttcaatgttttgagttaaccaagtgggcttttcagattaggttattcaagagcatgagctagaaaataatta

SEQ ID NO: 645110 - DNA, 120 bp, Artificial Sequence
  ENSG00000182256_56 (sequence is synthesized)
ggcagacaaaacatatgttctcacacacacaccacttccaaaacagacatgatttgaatgtagcattcaggttattgaggtgaacgtaaattgctttgcttgaacaattgagataatcac

SEQ ID NO: 645111 - DNA, 120 bp, Artificial Sequence
  ENSG00000182256_57 (sequence is synthesized)
ctactttcgccacttcacttttcacatttgtaaacacacacagggtttttccagcccagtgagcaggctacacaatgtgaggatgataatggttcctgcagggaagccagagcctctatg

SEQ ID NO: 645112 - DNA, 120 bp, Artificial Sequence
  ENSG00000182256_58 (sequence is synthesized)
tctgccgaacagtttaaattgaacaggttggaaagaacattgattgccaataattaaatgccccagactgagcaggtagctgctacattttctcttctcttttctagttattcagggttc

SEQ ID NO: 645113 - DNA, 120 bp, Artificial Sequence
  ENSG00000182256_59 (sequence is synthesized)
cttctttgattttcatgagaaaggaacatttacacttcctgtgaggggcttagactccgatttctcccagttgcctcacttactgaagttcgatcccagtgaatgatgtgtatgtaccca

SEQ ID NO: 645114 - DNA, 120 bp, Artificial Sequence
  ENSG00000182256_60 (sequence is synthesized)
acacatccaatttgtattttcttaaatatgtgtttcttaggtatctaaggatacatgagcgagcccacagcacaattattgcagtccccaagatgtcagtcttctcaaaatgacaacatt

SEQ ID NO: 645115 - DNA, 120 bp, Artificial Sequence
  ENSG00000182256_61 (sequence is synthesized)
gtcactaaccactttttaaaaaagaactgaaattcccattttttgttaaacgtttttccaatacatagcaatgtgtaaaatagactcccaaatctcctttgggaaaggaacctgtggacc

SEQ ID NO: 645116 - DNA, 120 bp, Artificial Sequence
  ENSG00000182256_62 (sequence is synthesized)
ctggagctaagttgtcattttagggacatggtgataatcaggactgatgccagtaagtgggaagttcattacggcaaggcagtgggaaggtgccagcatcccctttccacctgagatggg

SEQ ID NO: 645117 - DNA, 120 bp, Artificial Sequence
  ENSG00000182256_63 (sequence is synthesized)
ctgaattttcacccggaagtctgaagcctctggaagggcaggtggaatcgctcctggcaagggcatgaccgtgcacaggctgacatgattttccttttgggtggattggagttttacaac

SEQ ID NO: 645118 - DNA, 120 bp, Artificial Sequence
  ENSG00000182256_64 (sequence is synthesized)
tggattcattagcacacgtgtgggaacatgtgcctgtgcccacccacagcacttccttggaactctaagctgcttctctaatctaaggaggtctattcgaaaggatagtgcttgactttc

SEQ ID NO: 645119 - DNA, 120 bp, Artificial Sequence
  ENSG00000182256_65 (sequence is synthesized)
aatttataaaagattattggaaacaccttaagtagtcctaacccactgtcagcttccaattttcaggagcaaatgatgactgctttgatttggttaggctttcttacaacaggtttttat

SEQ ID NO: 645120 - DNA, 120 bp, Artificial Sequence
  ENSG00000182256_66 (sequence is synthesized)
aaaatattgtttatatttgtaacaggaaggattttcaatgtcaatttcatccatgagtgaagaccccccactgcacagagcagcacttctgtcactctcatggggagatcagggtaccca

SEQ ID NO: 645121 - DNA, 120 bp, Artificial Sequence
  ENSG00000182256_67 (sequence is synthesized)
ctcctctacgtagcttggcagacccagaccaccctgagccagcctgccacatccgctagtccatgcacctccagggtggccttgggagctacagagaggaaaaaaagaaaaaatgttgca

SEQ ID NO: 645122 - DNA, 120 bp, Artificial Sequence
  ENSG00000182256_68 (sequence is synthesized)
ttcttaagcaattaaagactccttccaatgtaattaaaaaataagtaatgtggcaaaagatgcacataacttgctccctcaagttctaaattgtcaccaaatatgaaaggtttttagatg

SEQ ID NO: 645123 - DNA, 120 bp, Artificial Sequence
  ENSG00000182256_69 (sequence is synthesized)
aagtacatctacatcataaccatcatcaccctcattgtcctcttccatgtttctactagtactcagctattgattcaacacaaaggcttagagccttttctgaactataacgaaatcaga

SEQ ID NO: 645124 - DNA, 120 bp, Artificial Sequence
  ENSG00000182256_70 (sequence is synthesized)
acttacatcgtggaaaaagcgaaaaagtttcattagagtttaaacattaagtatacagatcctactccaaaattttgctcgcctaaaacatttccagaactgctgtgttccccagcagtc

SEQ ID NO: 645125 - DNA, 120 bp, Artificial Sequence
  ENSG00000182256_71 (sequence is synthesized)
ctgcctgccctgcctcaatcagaatttcaaattactatttagaagaacattccattcaattgttgtttgttgattgctttctctctttttttttccgtttttaccttagttggctatttt

SEQ ID NO: 645126 - DNA, 120 bp, Artificial Sequence
  ENSG00000182256_72 (sequence is synthesized)
attccttttcgtaaagataacgtttgaattgtctaacaactatcttttttcactaaaatacatgcatctttggaaactgcaaattttgtgagctcaaaaagacaatcactgtgcttctta

SEQ ID NO: 645127 - DNA, 120 bp, Artificial Sequence
  ENSG00000182256_73 (sequence is synthesized)
tcatctaatttgagtctaggctttgtttccccctaacttatcctggcatttttactttgaatagaaatagtcacaggcaaaatatattcatgaaatgtacagtgcttactattatatgat

SEQ ID NO: 645128 - DNA, 120 bp, Artificial Sequence
  ENSG00000182256_74 (sequence is synthesized)
ctctgtttagaataactattttattaaaacagtctaaaagacactgtccatcattcttgacatttgatatgtctaattttgtgctagtgaaccaagtttacctgctcacacgtttgtaca

SEQ ID NO: 645129 - DNA, 120 bp, Artificial Sequence
  ENSG00000182256_75 (sequence is synthesized)
actacacaatgtgttttcctttacgtgcagctccggtactgagcaaaaggttcgttgtttaggagtgaaattttctgtgaaagttttgggagagtaattattttcagggatcagacctat

SEQ ID NO: 645130 - DNA, 120 bp, Artificial Sequence
  ENSG00000182256_76 (sequence is synthesized)
gtgttgttaggagcaagaggccatcttgtgtttacatgcagtggtctgtgtatttgtgtctgtacgtacagtggtaaaactgaaacaacttattaataatgtgtgtcactctacccatca

SEQ ID NO: 645131 - DNA, 120 bp, Artificial Sequence
  ENSG00000182256_77 (sequence is synthesized)
ccccaaatttagctgaaacaagtagaaaggagcgcagttttctagcgatagcgtattagcactaagcctctggttaggataaaaaggagcaagggagagggagaaagagaggacagaggg

SEQ ID NO: 645132 - DNA, 120 bp, Artificial Sequence
  ENSG00000182256_78 (sequence is synthesized)
agagagagaaagtggcaatctgtacatttcctgacaaagtgggatcatgttctttccaagaaaaggaaaagaaatccagcttcactacctgatcaggagtccctctggggtccacacaag

SEQ ID NO: 645133 - DNA, 120 bp, Artificial Sequence
  ENSG00000182256_79 (sequence is synthesized)
cctgcctcctttggagagcccttgagcatcactgttgtgaccggggtgcacacctgggcgactccttgatcattcgtgcattctggtcaagttgacccgataagccaaaagtacttttca

SEQ ID NO: 645134 - DNA, 120 bp, Artificial Sequence
  ENSG00000182256_80 (sequence is synthesized)
agatttagatggcaaacagccatccccacccttgtctaggaagtcgtattcgcaggtcacaggaaggcgtcaggtcaggcttgaagcagccggggtgtgggcagggtcctctctctgtga

SEQ ID NO: 645135 - DNA, 120 bp, Artificial Sequence
  ENSG00000182256_81 (sequence is synthesized)
agcctgtgtgggaggtgaaactgtcaggggtcctgggagatggcccaggcaggaagggaaggagagaggcgcggactgctctctgttcccatggaatccttcctgcctgtgaagccattg

SEQ ID NO: 645136 - DNA, 120 bp, Artificial Sequence
  ENSG00000182256_82 (sequence is synthesized)
tcctccagatgggaggtaggccgggagattccagaatccgaaaacattttggaatcatcttagagcaccggtgtggatgcgcttggccccgagggggccgcgccctgccccagtgcgtgc

SEQ ID NO: 645137 - DNA, 120 bp, Artificial Sequence
  ENSG00000182256_83 (sequence is synthesized)
gcctcctgccccagcagggacccgccctcaccaagtggcctccagtagcccctgtgtccctgtcgtcccgcgagggattggaggccctggctccgggcggtcccgaggtcccgccgccct

SEQ ID NO: 645138 - DNA, 120 bp, Artificial Sequence
  ENSG00000182256_84 (sequence is synthesized)
cctcccctgcgcagaggacgtggctccccgctatccgtgcggctcgtggtgtcctagtgaaatgagggcgcactggcgcccgacgtgccttggcgacacgggcggcgccgcgccccgctt

SEQ ID NO: 645139 - DNA, 120 bp, Artificial Sequence
  ENSG00000182256_85 (sequence is synthesized)
cgtgcgtcccgtccccgccgtgccctcagctgggcctcgtggctgggccgccctctgtatttgtatttggattcctacgtttgtacttctaatacaaataaatgcacatgttgtcagaaa

SEQ ID NO: 645140 - DNA, 120 bp, Artificial Sequence
  ENSG00000182256_86 (sequence is synthesized)
ttaatgtacaagccttttgggcaaccatgatacataagtgatatttgagacaaaacaagtgattcaaagtgaaactatgttttcatgttttaattggtatgggagagggatgttagaaat

SEQ ID NO: 645141 - DNA, 120 bp, Artificial Sequence
  ENSG00000182256_87 (sequence is synthesized)
aattcatatttttgaatccaggctgtgtttgcataatgtctataaacctagctataaacttaacctaactcattactgaccatatttacataaaccaattttgctgatggggagagttct

SEQ ID NO: 645142 - DNA, 120 bp, Artificial Sequence
  ENSG00000182256_88 (sequence is synthesized)
gcaaatttccacgtacataagaagaatcaaatattattgagaatccacacataaaagaagctggtgtgatatgtcctttgagtttcaattgcttttatttactctaagttttatctttaa

SEQ ID NO: 645143 - DNA, 120 bp, Artificial Sequence
  ENSG00000182256_89 (sequence is synthesized)
ctttgagtttctttttcaatgattgaaagtaattacctaccaatttgattttatgaagtgatcattatatgcatattcaaaatcctgtaattaaataaaaagagttgttctgcctatgaa

SEQ ID NO: 645144 - DNA, 120 bp, Artificial Sequence
  ENSG00000182256_90 (sequence is synthesized)
atgctgagtgccagctgcagctgcacaacttccccatggacgaacactcctgcccgctgattttctccagctccaccatcttggccttcagattgtctcttcatgcatatcgctgacgtt

SEQ ID NO: 645145 - DNA, 120 bp, Artificial Sequence
  ENSG00000182256_91 (sequence is synthesized)
gggcccacagagctggctggtggttgctgtgaattgggaaatcacattttctgacttctcatcgcgtgttctcactactcaacactgggaggaaccattgaattaaaagttcaaaatcaa

SEQ ID NO: 645146 - DNA, 120 bp, Artificial Sequence
  ENSG00000182256_92 (sequence is synthesized)
agaagctggggtgaggggtacagaagaggatggctgctgggtatgcaacctagagtcagtcagtcagtcacaaacatggcaggaaaataagctgtctgcctcctacaccctgatctggat

SEQ ID NO: 645147 - DNA, 120 bp, Artificial Sequence
  ENSG00000182256_93 (sequence is synthesized)
tcagaatagctggccaaagaggaaggagacctggccaggtgcaattctcgaaggacaaatgaagcactggtcagattccggggcatcagttcacccaatcttgagaaaattctgggggaa

SEQ ID NO: 645148 - DNA, 120 bp, Artificial Sequence
  ENSG00000182256_94 (sequence is synthesized)
aagagttccattcatggtgaatgaaagaagaagctttctagaactaatctgaaagcaaagtgtccctaaagagaaacccatcaaaagtcactgctggattttcacccaaagtgaggcaga

SEQ ID NO: 645149 - DNA, 120 bp, Artificial Sequence
  ENSG00000182256_95 (sequence is synthesized)
gaagctggggtgaggggtacagaagaggatggctgctgggtatgcaacctagagtcagtcagtcagtcacaaacatggcaggaaaataagctgtctgaataccaaattgacatatttttt

SEQ ID NO: 645150 - DNA, 120 bp, Artificial Sequence
  ENSG00000182256_96 (sequence is synthesized)
gcatcagcagagccttctgcctccccgtctaagtcagaatcttcctgtgtggctgccttaccttgcaaatggccagacttctcctctgtgtctccggtagctcccagttccatccacata

SEQ ID NO: 645151 - DNA, 120 bp, Artificial Sequence
  ENSG00000182256_97 (sequence is synthesized)
gcaagggactacacagaggcatgaagcaacgagtggatgaatgtctggctgatcactgtcaaagcacacgtgtaggaaacctttattgcaattgtttgttaataaaggcagatctttcaa

SEQ ID NO: 645152 - DNA, 120 bp, Artificial Sequence
  ENSG00000182256_98 (sequence is synthesized)
ttattttctgatctaacggctgttgcacctcttcttgttacattctcattgtggatttctgtttgagatttatcatgccggtttaaaactcacactgacttcttaaatctgtaacactta

SEQ ID NO: 645153 - DNA, 120 bp, Artificial Sequence
  ENSG00000182256_99 (sequence is synthesized)
ttggaatattgaaaatggtaaaaaaaaaaatgaagaaagatagcttgtgatggtagtagcatttccacttttagtttcttctttcaacatccaagagacctgtcttttatagtgtttctt

SEQ ID NO: 645154 - DNA, 120 bp, Artificial Sequence
  ENSG00000182261_0 (sequence is synthesized)
ggagctttgcacatgtatctcgtctctccctggcctccgctctataacttggccaagcccccagaaagcagggtgggcctctcagcagtggacctctccttttgcctctttctccaggtc

SEQ ID NO: 645155 - DNA, 120 bp, Artificial Sequence
  ENSG00000182261_1 (sequence is synthesized)
actggtcttctggtctggacttgatccttcccccagatcaccatggccatggccaaggccagaaagccccgggaggcattgctctgggccttgagtgaccttgaggagaacgatttcaag

SEQ ID NO: 645156 - DNA, 120 bp, Artificial Sequence
  ENSG00000182261_2 (sequence is synthesized)
aagttaaagttctacttacgggatatgaccctgtctgagggccagcccccactggccagaggggagttggagggcctgattccggtggacctggcagaattactgatttcaaagtatgga

SEQ ID NO: 645157 - DNA, 120 bp, Artificial Sequence
  ENSG00000182261_3 (sequence is synthesized)
gaaaaggaggctgtgaaagttgtcctcaagggcttgaaggtcatgaacctgttggaacttgtggaccagctcagccatatttgtctgcatgattacagagaagtataccgagagcatgtg

SEQ ID NO: 645158 - DNA, 120 bp, Artificial Sequence
  ENSG00000182261_4 (sequence is synthesized)
cgctgcctagaggaatggcaggaagcaggagtcaatggcagatacaaccaggtgctcctggtggccaagcccagctcagagagcccagaatcacttgcctgccccttcccggagcaggag

SEQ ID NO: 645159 - DNA, 120 bp, Artificial Sequence
  ENSG00000182261_5 (sequence is synthesized)
ctggagtctgtcacggtggaggctctatttgattcaggggaaaagccctcactggccccatccttagttgtgctacaggggtcggctggcactggaaagacaactctcgccagaaaaatg

SEQ ID NO: 645160 - DNA, 120 bp, Artificial Sequence
  ENSG00000182261_6 (sequence is synthesized)
gtgttggactgggccaccggtactctgtacccaggccggtttgattatgtcttttatgtaagctgcaaagaagtggtcctgctgctggagagcaaactggagcagctccttttctggtgc

SEQ ID NO: 645161 - DNA, 120 bp, Artificial Sequence
  ENSG00000182261_7 (sequence is synthesized)
tgcggggacaatcaagcccctgtcacagagattctgaggcagccagagcggctcctgttcatcctggatggctttgatgagctgcagaggccctttgaagaaaagttgaagaagaggggt

SEQ ID NO: 645162 - DNA, 120 bp, Artificial Sequence
  ENSG00000182261_8 (sequence is synthesized)
ttgagtcccaaggagagcctgctgcaccttctaattaggagacatacactccccacgtgctcccttctcatcaccacccggcccctggctttgaggaatctggagcccttgctgaaacaa

SEQ ID NO: 645163 - DNA, 120 bp, Artificial Sequence
  ENSG00000182261_9 (sequence is synthesized)
gcacgtcatgtccatatcctaggcttctctgaggaggagagggcgaggtacttcagctcctatttcacggatgagaagcaagctgaccgtgccttcgacattgtacagaaaaatgacatt

SEQ ID NO: 645164 - DNA, 120 bp, Artificial Sequence
  ENSG00000182261_10 (sequence is synthesized)
ctctacaaagcgtgtcaggttccaggcatttgctgggtggtctgctcctggctgcaggggcagatggagagaggcaaagttgtcttagagacacctagaaacagcactgacatcttcatg

SEQ ID NO: 645165 - DNA, 120 bp, Artificial Sequence
  ENSG00000182261_11 (sequence is synthesized)
gcttacgtctccacctttctgccgcccgatgatgatgggggctgctccgagctttcccggcacagggtcctgaggagtctgtgctccctagcagctgaagggattcagcaccagaggttc

SEQ ID NO: 645166 - DNA, 120 bp, Artificial Sequence
  ENSG00000182261_12 (sequence is synthesized)
ctatttgaagaagctgagctcaggaaacataatttagatggccccaggcttgccgctttcctgagtagtaacgactaccaattgggacttgccatcaagaagttctacagcttccgccac

SEQ ID NO: 645167 - DNA, 120 bp, Artificial Sequence
  ENSG00000182261_13 (sequence is synthesized)
atcagcttccaggacttttttcatgccatgtcttacctggtgaaagaggaccaaagccggctggggaaggagtcccgcagagaagtgcaaaggctgctggaggtaaaggagcaggaaggg

SEQ ID NO: 645168 - DNA, 120 bp, Artificial Sequence
  ENSG00000182261_14 (sequence is synthesized)
aatgatgagatgaccctcactatgcagtttttactggacatctcgaaaaaagacagcttctcgaacttggagctcaagttctgcttcagaatttctccctgtttagcgcaggatctgaag

SEQ ID NO: 645169 - DNA, 120 bp, Artificial Sequence
  ENSG00000182261_15 (sequence is synthesized)
cattttaaagaacagatggaatctatgaagcacaacaggacctgggatttggaattctccctgtatgaagctaaaataaagaatctggtaaaaggtattcagatgaacaatgtatcattc

SEQ ID NO: 645170 - DNA, 120 bp, Artificial Sequence
  ENSG00000182261_16 (sequence is synthesized)
aagataaaacattcaaatgaaaagaaatcacagagccagaatttattttctgtcaaaagcagcttgagtcatggacctaaggaggagcaaaaatgtccttctgtccatggacagaaggag

SEQ ID NO: 645171 - DNA, 120 bp, Artificial Sequence
  ENSG00000182261_17 (sequence is synthesized)
ctactggaaaaggcagagggacagaggaaacaccaaaaaatacttacatataaacctaattaaatatgtacaagatctctatgaggaaaatgacaacactctgaggaaagaaatcaaaga

SEQ ID NO: 645172 - DNA, 120 bp, Artificial Sequence
  ENSG00000182261_18 (sequence is synthesized)
agctgtaaatgaatgggaagattttccatgttcatgaatagaaagactcaatattgttaagatgttagttttccccagtttgatctgtagattcaatgcaatcccaatcaagatcccagc

SEQ ID NO: 645173 - DNA, 120 bp, Artificial Sequence
  ENSG00000182261_19 (sequence is synthesized)
aaataactttgtggacattgataagatgattctaatgtttatgtgcaaaggcaaaagactcagaatagccaataaaatattgaagaagaacaaagttggaggagtgctgctatccaactt

SEQ ID NO: 645174 - DNA, 120 bp, Artificial Sequence
  ENSG00000182261_20 (sequence is synthesized)
cttcctactataaagctacagtaatcaagacagtatggtattgttaaaataatagagaaatcagtggagtagaatagagaaccagaaacaaacctacacaaaaatggtcaattgatctta

SEQ ID NO: 645175 - DNA, 120 bp, Artificial Sequence
  ENSG00000182261_21 (sequence is synthesized)
gacaaaggagcaaaagcaatttaatggagaaagtttactcttttcaacaaatggtgctgaaataactggacatccacatgtaaaaaaatgaatctagatgtaaaatacaaaagtactaat

SEQ ID NO: 645176 - DNA, 120 bp, Artificial Sequence
  ENSG00000182261_22 (sequence is synthesized)
ataaactgctagaagataatataggagaaaatctaggtgaccttgggtttggcgatgactttttagatataacagcaaaagcatgaatcattaaaaaaagaattagttggcttcatgaaa

SEQ ID NO: 645177 - DNA, 120 bp, Artificial Sequence
  ENSG00000182261_23 (sequence is synthesized)
attaaaaacttatgctctgtgaaagacactgttaagagaatgaaaagataagccaaagactgggagaaaatatttgcaaacacatatctgataaaagacttgggtaaaaaaaaatacaaa

SEQ ID NO: 645178 - DNA, 120 bp, Artificial Sequence
  ENSG00000182261_24 (sequence is synthesized)
aatacaaatagctcttaaaactcaataataagtaaagagtctacttaaaaagtgagtaggaggcccaggctggtggatcacgaggtcaagagaccgagaccatcctggccaatgtggtga

SEQ ID NO: 645179 - DNA, 120 bp, Artificial Sequence
  ENSG00000182261_25 (sequence is synthesized)
agtgagactctgcctcaaaaaaaaaaaggtgagtaaaaagattggaacagacagcttattaaagaagatacacagatggcaaataaatatttgaaaagacgctcaacttcatatgtcatt

SEQ ID NO: 645180 - DNA, 120 bp, Artificial Sequence
  ENSG00000182261_26 (sequence is synthesized)
atttgaaaagacgctcaacttcatatgtcattagggaattgcaaactaaaaccacaataagataccatgacacccctgttagaatggctaacatcccaaatcctggcaacactaaatgct

SEQ ID NO: 645181 - DNA, 120 bp, Artificial Sequence
  ENSG00000182261_27 (sequence is synthesized)
tgttaggatgtggagtagtgggagccttattcattgctggtcagaatgcaaaatggtacagccactttgaaagacagtttggcagtttcttacaaagctaaacatagttttactatatgt

SEQ ID NO: 645182 - DNA, 120 bp, Artificial Sequence
  ENSG00000182261_28 (sequence is synthesized)
aagatctagcaattatgctcctagatattaacccaagtgagttggaaacttatgtccacataaaaacctgcacatgaatatttatagcagctttattcgtaattgcccaaatttggaagc

SEQ ID NO: 645183 - DNA, 120 bp, Artificial Sequence
  ENSG00000182261_29 (sequence is synthesized)
aaccaagatgtccttcaataggtgatggataagcaaactgtgatacatccacataatgtaatagtattcagtgataaaaataaatgagcaattaagacatgaaaagatatggagaagcct

SEQ ID NO: 645184 - DNA, 120 bp, Artificial Sequence
  ENSG00000182261_30 (sequence is synthesized)
taaatgcaactactaagtgaaagaagtcagtctgaaaaggctacatactgtgtaattccaaatatatgctcttatgaaaaatgaaaaactatggagacaattaaaaatcagtggttgtca

SEQ ID NO: 645185 - DNA, 120 bp, Artificial Sequence
  ENSG00000182261_31 (sequence is synthesized)
ggggttcaaggagagtcagggagagataaccaggtggaggcacaggcactttaggatagtaaaactattctgtgtgatattataatgatggagtcatgacataaatttttcaaaacgcat

SEQ ID NO: 645186 - DNA, 120 bp, Artificial Sequence
  ENSG00000182261_32 (sequence is synthesized)
agagctgtacaatacaaagagtgaatcctaatgtaaactgtgccttgtagttaataatagtgtatcaaaattggttcatcaatgatcacaaatgtgtcacactaatgcaagatgttaata

SEQ ID NO: 645187 - DNA, 120 bp, Artificial Sequence
  ENSG00000182261_33 (sequence is synthesized)
agagaaactttgtgagggggtggtggtggtggagagggtatataggaactttctgtatttaaaaaaagttttattgaagtataattagtttaatacaataaactgtgcatatttaatata

SEQ ID NO: 645188 - DNA, 120 bp, Artificial Sequence
  ENSG00000182261_34 (sequence is synthesized)
caccaaacagaagtgaactagtgagtatgggctaagagagcccaaacttggacctgtagagctgtcggaccaggaaaggggatctgtttcgtctcagtccccaggctttgcttactgggc

SEQ ID NO: 645189 - DNA, 120 bp, Artificial Sequence
  ENSG00000182263_0 (sequence is synthesized)
gttttgggtttgaaattccaacatggcagaggctgcagtccgtcttcccttcaaaaacttggaatgatttcaaatcataggcaccttcacttaaccctagcttccattcatcagcaaaca

SEQ ID NO: 645190 - DNA, 120 bp, Artificial Sequence
  ENSG00000182263_1 (sequence is synthesized)
catcggatcgatgctacgctaacctatcgggttctctctccgcgcgttcaggttaaatgaatacctgacgaaagggcccacgtttcaaggcagtgacatttgatagctgagaggaaaagt

SEQ ID NO: 645191 - DNA, 120 bp, Artificial Sequence
  ENSG00000182263_2 (sequence is synthesized)
ggctttaatgaaaagcaacctttggaattcctgcttgtgagaaatccaattcagctttttgtgctgccagcaagaaatgatcagtagcaccagtgtttatggcttgaagatgcagtggac

SEQ ID NO: 645192 - DNA, 120 bp, Artificial Sequence
  ENSG00000182263_3 (sequence is synthesized)
gccagagcatgcccagtggccagaacagcactttgacatcacctcaaccactcggtctcctgcccacaaagttgaagcctacagaggtcatctgcagcgcacctatcagtacgcctgggc

SEQ ID NO: 645193 - DNA, 120 bp, Artificial Sequence
  ENSG00000182263_4 (sequence is synthesized)
gaatgatgacatatctgctctgactgcatccaacctactaaaaaaatatgcagagaagtattccggcattttggaaggtcctgtggaccgacccgtactcagcaactattcggacacacc

SEQ ID NO: 645194 - DNA, 120 bp, Artificial Sequence
  ENSG00000182263_5 (sequence is synthesized)
atcaggactagtgaacggtcggaaaaatgaaagtgaaccctggcagccttccttgaattcagaagctgtttatcccatgaactgtgttccggatgttatcactgccagcaaagctggagt

SEQ ID NO: 645195 - DNA, 120 bp, Artificial Sequence
  ENSG00000182263_6 (sequence is synthesized)
cagttcagccctccctccagcagatgtctctgcgagtataggaagctctcctggggtagccagcaacctgacagaacctagttattcaagtagtacctgtggaagccacactgtacccag

SEQ ID NO: 645196 - DNA, 120 bp, Artificial Sequence
  ENSG00000182263_7 (sequence is synthesized)
tcttcatgcagggctcccatctcaggaatatgccccaggatacaacggatcatatttgcattctacttatagtagccagccagcacctgcacttccttcacctcatccgtctcctttgca

SEQ ID NO: 645197 - DNA, 120 bp, Artificial Sequence
  ENSG00000182263_8 (sequence is synthesized)
tagctctgggctactacagcccccaccaccacctcctccgccaccagccttggtcccaggctacaatgggacttctaacctctccagttacagctatccgtctgctagctatcctcctca

SEQ ID NO: 645198 - DNA, 120 bp, Artificial Sequence
  ENSG00000182263_9 (sequence is synthesized)
gactgctgtggggtctgggtacagccctgggggggcaccgcctccgccttcagcgtacctgccttcaggaattcctgctcccacccccctaccccccaccactgttcctggctacaccta

SEQ ID NO: 645199 - DNA, 120 bp, Artificial Sequence
  ENSG00000182263_10 (sequence is synthesized)
ccagggccatggtttgacacctattgcaccgtcggctctgacaaacagttcagcaagttctctcaaaaggaaagctttctacatggcagggcaaggagatatggactccagttatggaaa

SEQ ID NO: 645200 - DNA, 120 bp, Artificial Sequence
  ENSG00000182263_11 (sequence is synthesized)
ttacagctatggccaacagagatctacacagagtcctatgtacagaatgcccgacaacagcatttcaaacacaaatcgggggaatggctttgacagaagtgctgaaacatcatccttagc

SEQ ID NO: 645201 - DNA, 120 bp, Artificial Sequence
  ENSG00000182263_12 (sequence is synthesized)
atttaagccaacgaagcagctaatgtcctctgaacagcaaaggaaattcagcagccagtccagtagggctctgacccctccttcctacagtactgctaaaaattcattgggatcaagatc

SEQ ID NO: 645202 - DNA, 120 bp, Artificial Sequence
  ENSG00000182263_13 (sequence is synthesized)
cagtgaatcctttgggaagtacacatcgccagtaatgagtgagcatggggacgagcacaggcagctcctctctcacccaatgcaaggccctggactccgtgcagctacctcatccaacca

SEQ ID NO: 645203 - DNA, 120 bp, Artificial Sequence
  ENSG00000182263_14 (sequence is synthesized)
ctctgtggacgagcaactgaagaatactgacacgcacctcatcgacctggtaaccaatgagattatcacccaaggacctccagtggactggaatgacattgctggtctcgacctggtgaa

SEQ ID NO: 645204 - DNA, 120 bp, Artificial Sequence
  ENSG00000182263_15 (sequence is synthesized)
ggctgtcattaaagaggaggttttatggccagtgttgaggtcagacgcgttcagtggactgacggccttacctcggagcatccttttatttggacctcgggggacaggcaaaacattatt

SEQ ID NO: 645205 - DNA, 120 bp, Artificial Sequence
  ENSG00000182263_16 (sequence is synthesized)
gggcagatgcatcgctagtcagctgggggccacatttttcaaaattgccggttctggactagtcgccaagtggttaggagaagcagagaaaattatccatgcctcttttcttgtggccag

SEQ ID NO: 645206 - DNA, 120 bp, Artificial Sequence
  ENSG00000182263_17 (sequence is synthesized)
gtgtcgccagccctcggtgatttttgttagtgacattgacatgcttctctcctctcaagtgaatgaggaacatagtccagtcagtcggatgagaaccgaatttctgatgcaactggacac

SEQ ID NO: 645207 - DNA, 120 bp, Artificial Sequence
  ENSG00000182263_18 (sequence is synthesized)
tgtactaacttcggctgaggaccaaatcgtagtaatttgtgccaccagtaaaccagaagaaatagatgaatcccttcggaggtacttcatgaaacgacttttaatcccacttcctgacag

SEQ ID NO: 645208 - DNA, 120 bp, Artificial Sequence
  ENSG00000182263_19 (sequence is synthesized)
cacagcgaggcaccagataatagtacaactgctctcacagcacaattactgtctcaatgacaaggagtttgcactgctcgtccagcgcacagaaggcttttctggactagatgtggctca

SEQ ID NO: 645209 - DNA, 120 bp, Artificial Sequence
  ENSG00000182263_20 (sequence is synthesized)
tttgtgtcaggaagcagtggtgggccccctccatgccatgccagccacagacctttcagccattatgcccagccagttgaggcccgttacatatcaagactttgaaaatgctttctgcaa

SEQ ID NO: 645210 - DNA, 120 bp, Artificial Sequence
  ENSG00000182263_21 (sequence is synthesized)
gattcagcctagcatatctcaaaaggagcttgatatgtatgttgaatggaacaaaatgtttggttgcagtcagtgataacttctttagaaaaaaaaaatgtaatgaatgttggcacacac

SEQ ID NO: 645211 - DNA, 120 bp, Artificial Sequence
  ENSG00000182263_22 (sequence is synthesized)
acataaaacctgctacatagggaatagagcccctttccagtagagtttaaattgcaaagggtactggggaagatgacgattaagttgcatctttagagtcagggtagatttggaggaaaa

SEQ ID NO: 645212 - DNA, 120 bp, Artificial Sequence
  ENSG00000182263_23 (sequence is synthesized)
gtgcatcaaatgagagcttctgatttgaaagccccagatgacagaaagcatatgtggatgctcagttctgttcaagctagacaacactcaccaaggagcaaggtgcaagtgtgttgattt

SEQ ID NO: 645213 - DNA, 120 bp, Artificial Sequence
  ENSG00000182263_24 (sequence is synthesized)
cagaaggacatgaacctcgtgtgttgattccattctgctgttctcgagatttagttgctgtcaagtgcctggagtggtgctttattttttgtttgcctcacaattacattggtggcatgt

SEQ ID NO: 645214 - DNA, 120 bp, Artificial Sequence
  ENSG00000182263_25 (sequence is synthesized)
gctaatataaagagctttaacttcaaacattattggactaaagagatgaacagttgtgttatgacagaaaaccagatttttgccattttaagagcaacagtattcctcaatcctgtctgt

SEQ ID NO: 645215 - DNA, 120 bp, Artificial Sequence
  ENSG00000182263_26 (sequence is synthesized)
tctgcagtattaagctaagaacaggtaaaacagggtaacggtaatctggaccttaatttctgcagttcatttcttttaatgttcttgtctgcaaaaactcaggaaagtgattgtgatttg

SEQ ID NO: 645216 - DNA, 120 bp, Artificial Sequence
  ENSG00000182263_27 (sequence is synthesized)
tacagtacctcaaaggaatgtgttgaaagcactatgtactgctgagagtaataggataggcttcaatgttactttatattaaaatgtatgtttacctcaacaattggaaaatagcaagga

SEQ ID NO: 645217 - DNA, 120 bp, Artificial Sequence
  ENSG00000182263_28 (sequence is synthesized)
aaattactttgaatgtatccagaaaaatactgaagtgtgatacaactgaatatttacagtttaaagtagaaatggaaggatttttttaagttcttttactaattatggggaattaaccag

SEQ ID NO: 645218 - DNA, 120 bp, Artificial Sequence
  ENSG00000182263_29 (sequence is synthesized)
agcagaataattctttatgtcaataactgcaagagttcttagtacattgctccttgataattaagtgaaaatgttcttaaaaggtacactggttaattgaaagctacttattcagtttgt

SEQ ID NO: 645219 - DNA, 120 bp, Artificial Sequence
  ENSG00000182263_30 (sequence is synthesized)
gttagtgtctagacctgtcagccacaagacctgtttaggaccctgaaagtcacagtacctaaaaactatgactgcctttttattgcataggtggtagtggtggtgatggtggtggtagtt

SEQ ID NO: 645220 - DNA, 120 bp, Artificial Sequence
  ENSG00000182263_31 (sequence is synthesized)
tgcaagttatctcttaaaactgctgggaatggtgtcattctattcactaatctagcttatagacttgccgtgctgtttgatagaatgcagaggatagcaaccaaaacaaatacacaaata

SEQ ID NO: 645221 - DNA, 120 bp, Artificial Sequence
  ENSG00000182263_32 (sequence is synthesized)
aataaaaacaaaaaccaaccaacaaaccaacttacatacacatatatatatccacaaagaacctctccatctcctccccttctttttgactccactcttgtcagtgcaattttgcttctc

SEQ ID NO: 645222 - DNA, 120 bp, Artificial Sequence
  ENSG00000182263_33 (sequence is synthesized)
attttgaaatctgggctgtagtgctcctgctttatttctacctcagttttgttacatttctcttggaaagtaaagtagaaaattggaagtggacacacacactgcaatgtagcttgccaa

SEQ ID NO: 645223 - DNA, 120 bp, Artificial Sequence
  ENSG00000182263_34 (sequence is synthesized)
acatgttactttgttttcttccatctttcaccgtaaatctagtttccaaagacatcagcatttgtgcttacttccacctcagtctaccagccccacccctacccatggcataagtggcat

SEQ ID NO: 645224 - DNA, 120 bp, Artificial Sequence
  ENSG00000182263_35 (sequence is synthesized)
ttttcttaatttcctatttttctcctgctctctgtcaagttgttctttgtatcctttaatgctttatgtgcaacctttcattgatagtgggctgatgtttggcaatgcttctgaactgtc

SEQ ID NO: 645225 - DNA, 120 bp, Artificial Sequence
  ENSG00000182263_36 (sequence is synthesized)
acagagcaggctgtagctttccacagccactgcccatgcataagcagaacagcctggccttttgaatgtattttcctgggttttttccccttttctttttttagtttagagatgcagtaa

SEQ ID NO: 645226 - DNA, 120 bp, Artificial Sequence
  ENSG00000182263_37 (sequence is synthesized)
caaaactgttgcaaagcactggcattttatgtattcaataaataagtgatgtacatttttaaaaaaatttaaataaatgcaatgagaagccccaagaaaggcctttctgttttttttttc

SEQ ID NO: 645227 - DNA, 120 bp, Artificial Sequence
  ENSG00000182263_38 (sequence is synthesized)
ttacaaaaatttttaccgatcttatccacaatatccaattctctgaaacacttaacatagagaaagctcatgagggatttcttatctctgaaattttatgatgcttgatctttactcccc

SEQ ID NO: 645228 - DNA, 120 bp, Artificial Sequence
  ENSG00000182263_39 (sequence is synthesized)
gtgacattctgtcaattaaagctgtgcttaaatataaatattccatattaaaaagcagtgcctttcattaaggatacaaaaaataatacttaaatacgccctctgcttttcgcaagtgaa

SEQ ID NO: 645229 - DNA, 120 bp, Artificial Sequence
  ENSG00000182263_40 (sequence is synthesized)
taaatgctacaatcgtgttctgggtctaccctgtgcatcccttgtaaggaaattctaatatccacattaacttgtaggttcatattgatctcactgacaagtttacttttgcacagtgct

SEQ ID NO: 645230 - DNA, 120 bp, Artificial Sequence
  ENSG00000182263_41 (sequence is synthesized)
gacctattttctgacttttagacattatatttcatttccgccaacatgctgtgttcacttgaaagcgtctggcaagttttgacaaacccagtcttatttagacaactttggaaaatccaa

SEQ ID NO: 645231 - DNA, 120 bp, Artificial Sequence
  ENSG00000182263_42 (sequence is synthesized)
tattgacccacatttttttgtggctagtaagatttaatgccaaatatatgactgcactattgtgttttacactcatttataaaactgaaaataaattgaagtcatacatcttggctttta

SEQ ID NO: 645232 - DNA, 120 bp, Artificial Sequence
  ENSG00000182263_43 (sequence is synthesized)
gctttaagtgacttaaaaattagaactctgagtgacttaaaaattaatttgagatgcaagtggtcaaaaatccatgtatttagacagaagctgaagtcgtatgtgattttcatttagcct

SEQ ID NO: 645233 - DNA, 120 bp, Artificial Sequence
  ENSG00000182263_44 (sequence is synthesized)
cacaaaatccaagatttgatctcttaggaaattgggcatgttgaagaaatgaagatctgttggaggagatatggctgacctttgagtagatagtgctctcctgtgattctttgattctgc

SEQ ID NO: 645234 - DNA, 120 bp, Artificial Sequence
  ENSG00000182263_45 (sequence is synthesized)
atggcagcattatgagctcttctataaactagcttaataatgagctctattctgaccatctattctggaacttggagtgggggtggggtaccacatcctcagaagtgaatgtgtacagtc

SEQ ID NO: 645235 - DNA, 120 bp, Artificial Sequence
  ENSG00000182263_46 (sequence is synthesized)
ggtgatagtacaactgagtaatggggcttcatacccttggcctctttttgactgctaagaatttggagaaggctattaatgaaggtaaggtaatgagccagtccaaatccctcactgtct

SEQ ID NO: 645236 - DNA, 120 bp, Artificial Sequence
  ENSG00000182263_47 (sequence is synthesized)
ggctaagagattgagccattccactttacagcccctaattcccttcttcccaactgcagcaacatttccaacagggacaaaaaggaagtgaaggaaaccacttcagtattgggatcaata

SEQ ID NO: 645237 - DNA, 120 bp, Artificial Sequence
  ENSG00000182263_48 (sequence is synthesized)
gaaattcaagaggtagttcataatgaccttatatgtgacacaaatggaaatactctacacttctggcatgcttctctcccaaatatttagaacattagtgacaatatgaaaaactttgct

SEQ ID NO: 645238 - DNA, 120 bp, Artificial Sequence
  ENSG00000182263_49 (sequence is synthesized)
gactgagctgatcaatggaatgtgaaggcagtatactttaaggctatttactttcacacagaatgtttatctattagtcagtttgtattctactcaaatgcagatagacgggtataatgt

SEQ ID NO: 645239 - DNA, 120 bp, Artificial Sequence
  ENSG00000182263_50 (sequence is synthesized)
tttcttgtgcatttgaaacctatcaaggagaaaataaaccattccactaaaatacataggccaaacaccatctgggaaagtgataaaagctatccagaggctatgctatgtaaaatagca

SEQ ID NO: 645240 - DNA, 120 bp, Artificial Sequence
  ENSG00000182263_51 (sequence is synthesized)
aggtcaatttacatgggttgcatagtacttggctatgcagttttcaaaagaacacatccaaaaaaaaaaaaaatccaaattagttcctataataggtctttgtaaatttaaatatatttg

SEQ ID NO: 645241 - DNA, 120 bp, Artificial Sequence
  ENSG00000182263_52 (sequence is synthesized)
tgggttggaaaatacgtttttagagacatttagaatttctttctctaaaaatgtatccaactccaagcagaaagagacttctgtactcacattctcatgtttcttagaattgggtagcat

SEQ ID NO: 645242 - DNA, 120 bp, Artificial Sequence
  ENSG00000182263_53 (sequence is synthesized)
gatcattgaatctgtattttgcaaagtgaaagggacgcagcttgttgaactattgaggccactaaagtaaagttctaatatatatatataaatataaaattagtgtgtgtgtttgtatgt

SEQ ID NO: 645243 - DNA, 120 bp, Artificial Sequence
  ENSG00000182263_54 (sequence is synthesized)
gtgtatgtgtgtgtgttctttcatcaccacctagttgaactttaaaacagacgtctacttttcattattcagaagcaacttgttacttcctttcttcatatgtgcagagatacacatgat

SEQ ID NO: 645244 - DNA, 120 bp, Artificial Sequence
  ENSG00000182263_55 (sequence is synthesized)
catgttacaatttgaagtgttttaatgtgtttttttttcttttgaaacgtaaagccttcagttgttgaatcatctgccgatttttatatgaagcacattagcaaacctggagctattagt

SEQ ID NO: 645245 - DNA, 120 bp, Artificial Sequence
  ENSG00000182263_56 (sequence is synthesized)
atttcagaattcacaaccagctgtacttgtgactaaccaacacatgaactgaagctcacactttgctaagacctttggttgacattcgattttgaacctgccagatgcatttgtgtgaac

SEQ ID NO: 645246 - DNA, 120 bp, Artificial Sequence
  ENSG00000182263_57 (sequence is synthesized)
cagggatactgcatctttaatgaacaagtctctcctctttcccctgtttttaaatacaacacaagcagtgtagcactaggcactgcaattgtcaaagacaattagactggaagcaggaaa

SEQ ID NO: 645247 - DNA, 120 bp, Artificial Sequence
  ENSG00000182263_58 (sequence is synthesized)
atttcacctccctgtctcagtgatatgtagaatgtcggcagcatgggtcagccttgccacagagttgtgtgagaatatatgaatcagtcctatagaatgttaaatatttataaaatggtt

SEQ ID NO: 645248 - DNA, 90 bp, Artificial Sequence
  ENSG00000182263_59 (sequence is synthesized)
gaatcagtcctatagaatgttaaatatttataaaatggttctgtagtacaccaaggttgggagcacattcattccttcttgttgtcttat

SEQ ID NO: 645249 - DNA, 120 bp, Artificial Sequence
  ENSG00000182263_60 (sequence is synthesized)
gcttaaaactctccctctaatatctctctctcttttacccccattccccaaccattcttctctccatccctctcctctcctcttcctctctcttctctctctctctctctctctctgtct

SEQ ID NO: 645250 - DNA, 120 bp, Artificial Sequence
  ENSG00000182263_61 (sequence is synthesized)
tgtgtgtgtgtatgagtttccactgtggattatatacacttgctagagaatattcatttcttttttttcttttttcatctgatgtatattcaaacattgttctttataaccatttctacc

SEQ ID NO: 645251 - DNA, 120 bp, Artificial Sequence
  ENSG00000182263_62 (sequence is synthesized)
tcattgctacatattgtacatgtagtatttatttgttgtctttttttgaatgtcatgcatttcgtaagaaaaagacttgtccttgaacttgaacagtctacctcagaaagactgtcttta

SEQ ID NO: 645252 - DNA, 120 bp, Artificial Sequence
  ENSG00000182263_63 (sequence is synthesized)
cactgaacagtattagcaacctaaatgataagacgcattagtgaagtgtggcagggtagataatgcacgagtacttgggatactgatggacttttaattgtattcataacacaagactgc

SEQ ID NO: 645253 - DNA, 120 bp, Artificial Sequence
  ENSG00000182263_64 (sequence is synthesized)
ttaaaagaacttaaaagaaattatgcactgtgtaggtcttcatcgaggtcccatttgggacattatatacagaatagagctttattcctatgtgcccatctctgagaaatgtgttagcat

SEQ ID NO: 645254 - DNA, 120 bp, Artificial Sequence
  ENSG00000182263_65 (sequence is synthesized)
tcccaagtattttacactggcaatctggctacttaagacaaacaaattcaaacaacatttttatattttgactgacaccctcagctcctaaatttaagagaaataatggtacttaactat

SEQ ID NO: 645255 - DNA, 120 bp, Artificial Sequence
  ENSG00000182263_66 (sequence is synthesized)
tttcaactatagtcttcagtgattgaaaatgccttcattttaattctgtgactcctgatataaattaagaaaaacaatgcagttgcaagggcctgcacaacactgaaaataaaccaaaaa

SEQ ID NO: 645256 - DNA, 120 bp, Artificial Sequence
  ENSG00000182263_67 (sequence is synthesized)
ttaaaaatggcacttcccaaaggaattaacaaacgtggagtcatggtgcttgcaagttccataactgaaagcattttgtttctgatttccctttataacatgtatttgtttattgaagca

SEQ ID NO: 645257 - DNA, 120 bp, Artificial Sequence
  ENSG00000182263_68 (sequence is synthesized)
attgtacaactaatggcacattgaattactttgtatgaagtgttttatattatactatttattttagcattcgttctttttcttcaccagctctatattacagtagcaaaagaacactta

SEQ ID NO: 645258 - DNA, 120 bp, Artificial Sequence
  ENSG00000182263_69 (sequence is synthesized)
gttttaaaaaatgctgaaaggggttcaccacccacccaatcgatgaatggacttttgaagttgcttgtcagcaaattgtggatattttacaaaagcaaatgaactgtgacaatccacaac

SEQ ID NO: 645259 - DNA, 120 bp, Artificial Sequence
  ENSG00000182263_70 (sequence is synthesized)
tcccacagatgtgaattcagaaatgcatctgaaactccggtatgcctgacaatctattctttaagtttcattaacaaagtggcatccaatcctttcacttacaattccttgcaggaatgt

SEQ ID NO: 645260 - DNA, 120 bp, Artificial Sequence
  ENSG00000182263_71 (sequence is synthesized)
attgtctagaggctgtctagtagtgattaagagagggtttttgttttgttttatttgtttactgtattaggtgaggaatgccatatttcttgtcagccaacagtacttgtctgagacaga

SEQ ID NO: 645261 - DNA, 120 bp, Artificial Sequence
  ENSG00000182263_72 (sequence is synthesized)
aatttaaaaaaagaaaaagaaacctaactaattaaaatttctgtgcactttgcttccctgaccatattgattttatttgcttaaattgaaacaatacgctggatttgaccagattttgac

SEQ ID NO: 645262 - DNA, 120 bp, Artificial Sequence
  ENSG00000182263_73 (sequence is synthesized)
cccttgaaagaagaaaagccctatatagtacatgtttctttgggttattctagtactgtttccttatttgttctgcaaatttcaaatcatttttttgtgtgcattattttacatctgctg

SEQ ID NO: 645263 - DNA, 120 bp, Artificial Sequence
  ENSG00000182263_74 (sequence is synthesized)
aaactaaatgtgttattattgcactcattaaaaatgaaacaatccatttctcttggaaaaaaatgacaagctttagatgatgaaagcttaaattatccatcacttgcaaaatgaattcat

SEQ ID NO: 645264 - DNA, 120 bp, Artificial Sequence
  ENSG00000182263_75 (sequence is synthesized)
ataatttgtgaacattattaatgtaaatgagacatttctgcttagattttttttattttgatgggatcattatatggttgatcatatgtgtgtaggaagctgctgtacaattaacttgga

SEQ ID NO: 645265 - DNA, 120 bp, Artificial Sequence
  ENSG00000182263_76 (sequence is synthesized)
gatctgaaaatgctttttgtcctcattgttgcagtttcaattgtaatccattgcatctcattttcttgggtgttggcactgtaatatattaaaaaaaaattcagtgctcagtattgtaac

SEQ ID NO: 645266 - DNA, 120 bp, Artificial Sequence
  ENSG00000182263_77 (sequence is synthesized)
aactgtccctactgaatattccttttcataaatacttgctaccacagggaaattaagttttcatatagaataactagtttcagtagtaaccattgaagaattaaaaatgtggttcaaggc

SEQ ID NO: 645267 - DNA, 120 bp, Artificial Sequence
  ENSG00000182263_78 (sequence is synthesized)
agatatttttatgaaaagttttctctattgtaaaatttgttgtatatggctatgctactatcatggaataagaaaagaacaagcatacctcaaataaaaaaaaattctgagttaaaaaaa

SEQ ID NO: 645268 - DNA, 120 bp, Artificial Sequence
  ENSG00000182263_79 (sequence is synthesized)
gctgatggaggaaaggccctatgagctgtgggctggctctataggccccactgtactttagggaattccagtagcaaaggaataaaatcattttagtcactatgcactaatgtttccgtt

SEQ ID NO: 645269 - DNA, 120 bp, Artificial Sequence
  ENSG00000182263_80 (sequence is synthesized)
ggtaaaacctctagccttcagttctatttgtacagtctttaatagtcaacctcatttttcttattttgaaaaaaatgttcttccctctaccttgtctttaaacccagtctatttcctggg

SEQ ID NO: 645270 - DNA, 120 bp, Artificial Sequence
  ENSG00000182263_81 (sequence is synthesized)
acaggtctacatcattaaactgcagatggttctttttctattaagcagcaggtatcattcttgtcctgacaggaggaggctccacctgctgccggcccaccaatacttccagctgactgc

SEQ ID NO: 645271 - DNA, 120 bp, Artificial Sequence
  ENSG00000182264_0 (sequence is synthesized)
ggaatatctataaaggaattcgggcccctacgtgagaagctcggagggggtggtttcaggagttccttgtggagaggggatcgtccgtgactcagaccccgtcgaaaagctctcgatttc

SEQ ID NO: 645272 - DNA, 120 bp, Artificial Sequence
  ENSG00000182264_1 (sequence is synthesized)
acgcaaccaaccttaccctcgtccccaacacaatccttgattttacccctgggaaaattagcgtaggtggtcatgaccccggcttcctctttaaaagccctcagaacctggaccgggctc

SEQ ID NO: 645273 - DNA, 120 bp, Artificial Sequence
  ENSG00000182264_2 (sequence is synthesized)
ctcaatgaaccctagtgttagaggccacaaatcgggaaccaaggtcggggagcggctgtttagggtgcatcactgttcaggatgcatcggggctcctttttctaagcggaagggtgcgcc

SEQ ID NO: 645274 - DNA, 120 bp, Artificial Sequence
  ENSG00000182264_3 (sequence is synthesized)
ctgcaaattgggagcccgttagttttggggaagggtgaacaagggccccctaggtctagaggaccgcatggagtctcgcttaagtgttagtggggtcctcagttctaggaatctgcgttc

SEQ ID NO: 645275 - DNA, 120 bp, Artificial Sequence
  ENSG00000182264_4 (sequence is synthesized)
tcctgctctcggtttggggtgagagcacccttcctaacggtcttcgggaactgtgcgcgccggctgcaatggggccgcattttaccctcctgtgtgcggcgctggccggttgcttgcttc

SEQ ID NO: 645276 - DNA, 120 bp, Artificial Sequence
  ENSG00000182264_5 (sequence is synthesized)
ctgccgaggggtgtgttatatgtgacccgtctgtcgtgctggcgctaaagtccctggagaaagattacctgcctggccacctggatgcgaagcatcacaaagccatgatggaaagggtag

SEQ ID NO: 645277 - DNA, 120 bp, Artificial Sequence
  ENSG00000182264_6 (sequence is synthesized)
gctgaaggatctgaaacgcatcacagacagtgatgtaaaaggcgatctcttcgtgaaggagctattttggatgttgcacttgcaaaaggaaacctttgccacctatgttgctcgattcca

SEQ ID NO: 645278 - DNA, 120 bp, Artificial Sequence
  ENSG00000182264_7 (sequence is synthesized)
aaaagaggcttattgtcccaacaaatgtggtgtgatgttgcaaactctgatctggtgcaagaactgcaaaaaggaggttcacgcttgtcgaaagtcctacgattgcggggagcggaatgt

SEQ ID NO: 645279 - DNA, 120 bp, Artificial Sequence
  ENSG00000182264_8 (sequence is synthesized)
ggaagttcctcaaatggaagacatgatcctggactgtgagttaaactggcatcaggcttcggaaggcctcactgattacagcttttacagggtttgggggaacaatacggagaccttggt

SEQ ID NO: 645280 - DNA, 120 bp, Artificial Sequence
  ENSG00000182264_9 (sequence is synthesized)
gtccaaggggaaagaggccaccctgaccaagcccatggtgggtccagaggatgcaggcagctaccgctgcgagctgggctctgtgaattccagcccagccacgatcatcaattttcacgt

SEQ ID NO: 645281 - DNA, 120 bp, Artificial Sequence
  ENSG00000182264_10 (sequence is synthesized)
cacagtgttgcccaaaatgatcaaggaggaaaaaccttctccaaatatcgtaaccccgggggaggcgaccacggagtcgtccataagcctccagcctctgcagcccgagaaaatgctggc

SEQ ID NO: 645282 - DNA, 120 bp, Artificial Sequence
  ENSG00000182264_11 (sequence is synthesized)
aagccgccttctggggctgctgatctgcggctccctagcactgataaccggccttacctttgcgatatttcgtcgaaggaaggtgatcgatttcatcaaatcctcactgtttggccttgg

SEQ ID NO: 645283 - DNA, 120 bp, Artificial Sequence
  ENSG00000182264_12 (sequence is synthesized)
cagtggagcggccgagcaaacccaggtcccaaaagaaaaggccacagattcgaggcaacaataaagatttatcttgttgtctaagcatctgactcactccccgggacgggactgattcta

SEQ ID NO: 645284 - DNA, 120 bp, Artificial Sequence
  ENSG00000182264_13 (sequence is synthesized)
tggggacttatgagtgattcctgtttaatagtttttctgatctctcagttgggggattcagtgagaaccctaaattttgggtcccctggattggggctcagtttcacacttcggaggcat

SEQ ID NO: 645285 - DNA, 120 bp, Artificial Sequence
  ENSG00000182264_14 (sequence is synthesized)
ttgatgaaggacataggtcctctttatttggagatttcctgaagatcctcttttcgaggtttgcggaccccatggataggcggcccagtgggatttcttaagatggattttggcttttct

SEQ ID NO: 645286 - DNA, 120 bp, Artificial Sequence
  ENSG00000182264_15 (sequence is synthesized)
gggagataagaccaggggaaggaagaggctgacagcagggtctccgggattcgggaatggagaaggctgagatgcagattccgaggttccccgaggctagtaaataccgttttccctatc

SEQ ID NO: 645287 - DNA, 120 bp, Artificial Sequence
  ENSG00000182264_16 (sequence is synthesized)
ctcggctggcaattttatgtaataaaactacaactcccagaaggcaacgggcggctgagtccttaaccaggcctatctttgcccagtggcctcatgggtattgtagtttctaagattagg

SEQ ID NO: 645288 - DNA, 120 bp, Artificial Sequence
  ENSG00000182264_17 (sequence is synthesized)
cctttttggatcctggtggttttgtcattctctgccttggagaggttcctgggtctccagtattctttctgcaccatggatttcttggggagcaggtcatattctacttacactcttttt

SEQ ID NO: 645289 - DNA, 120 bp, Artificial Sequence
  ENSG00000182264_18 (sequence is synthesized)
gtgctgggattacaggagtaagccaccgcatccggcctctacttacaatctttactgagccttgttggagcccacttactacttacctgcgtcctggtcctgtgccttcgtctgaccatc

SEQ ID NO: 645290 - DNA, 120 bp, Artificial Sequence
  ENSG00000182264_19 (sequence is synthesized)
catctaggaatgtcatagatgatctggccccagcccttagccctgacctctccttttagccatgccccttagtgggcaaatacaagccttgaccctgcccctccaggtgtgatgttgcaa

SEQ ID NO: 645291 - DNA, 120 bp, Artificial Sequence
  ENSG00000182264_20 (sequence is synthesized)
actctgatctggtgcaagaactgcaaaaaggaggttcacgcttgtcgaaagtcctacgattgcgggggtgagagaactggacccagcaggaggaattggtgcaggtggggtggggcgaga

SEQ ID NO: 645292 - DNA, 120 bp, Artificial Sequence
  ENSG00000182264_21 (sequence is synthesized)
ggagaggcagtctagagagagcctagatgggggtgtgggggcagtagacaagaaaaggtagggtttaggccaggtgcagtggttcacacctatagtctcgcacttcgagaggctgagacg

SEQ ID NO: 645293 - DNA, 75 bp, Artificial Sequence
  ENSG00000182264_22 (sequence is synthesized)
ggatctctacaaaaaaatttaaaaattagtcaggtgtggtgttgcgttcctgtagtcccagctacttggaaggct

SEQ ID NO: 645294 - DNA, 120 bp, Artificial Sequence
  ENSG00000182264_23 (sequence is synthesized)
ggaaggctgaggcaggaggattgcttggacccaggagttggagactgcagtaagctatgatcataccactgcactccagcccaggcaaaagagtgagaccttgtctaaaaagaaaaaaaa

SEQ ID NO: 645295 - DNA, 120 bp, Artificial Sequence
  ENSG00000182264_24 (sequence is synthesized)
gcactgataaccggccttacctttgcgtaagcaacccattgaagaagacaggcttggcttggagatatttcgtcgaaggaaggtgatcgatttcatcaaatcctcactgtttggccttgg

SEQ ID NO: 645296 - DNA, 120 bp, Artificial Sequence
  ENSG00000182271_0 (sequence is synthesized)
agggttttcaggcagaggaacagttggccaaggaagtcagcttctcagagctcaagagtagatctgagtttaactcattaaagatggcatggaagagcagtgtcataatgcaaatgggaa

SEQ ID NO: 645297 - DNA, 120 bp, Artificial Sequence
  ENSG00000182271_1 (sequence is synthesized)
gatttcttctcttagtaattttatttctgccacgtgagatgacaagttctgttttaactgtgaatggtaaaactgagaactatatcctggatactacacctggctcccaagcatctctga

SEQ ID NO: 645298 - DNA, 120 bp, Artificial Sequence
  ENSG00000182271_2 (sequence is synthesized)
tatgtgctgttcaaaaccacaccagagaggaagaactgctctggtaccgagaggaggggagagtggatttgaaatctggaaacaaaatcaattccagctctgtctgtgtctcttccatca

SEQ ID NO: 645299 - DNA, 120 bp, Artificial Sequence
  ENSG00000182271_3 (sequence is synthesized)
gtgaaaatgacaacggaatcagctttacctgcaggctggggagggatcagtccgtgtccgtttcggtggtgctgaatgttacttttcctcctctcctaagtggaaacgacttccaaacag

SEQ ID NO: 645300 - DNA, 120 bp, Artificial Sequence
  ENSG00000182271_4 (sequence is synthesized)
ttgaggaaggcagtaatgtgaagttggtttgcaatgtgaaagccaacccccaggctcaaatgatgtggtacaaaaacagtagtctcctcgatttagagaaaagccgtcaccaaatccaac

SEQ ID NO: 645301 - DNA, 120 bp, Artificial Sequence
  ENSG00000182271_5 (sequence is synthesized)
atcaccaaagtcgagaagcctgacaacggaacctacagttgtattgcaaagtcatctctgaaaacggagagcttggactttcacctgattgttaaagataaaactgtgggtgtaccaata

SEQ ID NO: 645302 - DNA, 120 bp, Artificial Sequence
  ENSG00000182271_6 (sequence is synthesized)
gagcccattattgctgcatgtgttgtgatctttctgacattgtgctttggactgattgctagaagaaagaaaataatgaagctctgcatgaaggataaagaccctcacagtgaaacagct

SEQ ID NO: 645303 - DNA, 120 bp, Artificial Sequence
  ENSG00000182271_7 (sequence is synthesized)
ctatgagaaagctgagatgccatcgaatacagagagagttttgcatcaggacctccacaatttatgtagtcccatctgtatttattgctattattaaattcactcctgtcactcctgttt

SEQ ID NO: 645304 - DNA, 120 bp, Artificial Sequence
  ENSG00000182271_8 (sequence is synthesized)
cattaatcacttaacagtagttgttaggactaatttgatacacttgtggaacatttttatggaaagagctattaagaatgaaaagtaagattttgttaagtcttctccttgaagtatatg

SEQ ID NO: 645305 - DNA, 120 bp, Artificial Sequence
  ENSG00000182271_9 (sequence is synthesized)
ttaattaattgagatttgttccaaataggttggtaatcatttactgtttagtgtgttttttttctaggtaggagatacttgggtctcacaaattggtgcaaagccaaaaaaaaaaaaaaa

SEQ ID NO: 645306 - DNA, 80 bp, Artificial Sequence
  ENSG00000182272_0 (sequence is synthesized)
gatccgcggtggcagccgtggatgctgttcggtcccgccgccgccccaggagcgcggagccgggagcggccgggcggggg

SEQ ID NO: 645307 - DNA, 120 bp, Artificial Sequence
  ENSG00000182272_1 (sequence is synthesized)
cgggcgggggccgggggctgcagcggcgccgctgagcgcggcctggggcgggcgcggcggccgcgatgccgcggctcccggtgaagaagatccgtaagcagatgaagctgctgctgctgc

SEQ ID NO: 645308 - DNA, 120 bp, Artificial Sequence
  ENSG00000182272_2 (sequence is synthesized)
tgctgctgctgagctgcgccgcgtggctcacctacgtgcacctgggcctggtgcgccagggacgcgcgctgcgccagcgcctgggctacgggcgagatggtgagaagctgaccagtgaga

SEQ ID NO: 645309 - DNA, 120 bp, Artificial Sequence
  ENSG00000182272_3 (sequence is synthesized)
ccgacggccggggggtccacgctgcgccatccacacagagggctgaggactccagtgagagccgtgaagaggagcaagcgcccgaaggtcgggacctagacatgctgtttcctggggggg

SEQ ID NO: 645310 - DNA, 120 bp, Artificial Sequence
  ENSG00000182272_4 (sequence is synthesized)
ctgggaggctgccactgaacttcacccatcagacacccccatggcgggaggagtacaaggggcaggtgaacctgcacgtgtttgaggactggtgtgggggcgccgtgggccacctgagga

SEQ ID NO: 645311 - DNA, 120 bp, Artificial Sequence
  ENSG00000182272_5 (sequence is synthesized)
ggaacctgcacttcccgctgttccctcatacgcgcaccaccgtgaagaagttggccgtgtcccccaagtggaagaactatggactccgtatttttggtttcatccacccggcgagggacg

SEQ ID NO: 645312 - DNA, 120 bp, Artificial Sequence
  ENSG00000182272_6 (sequence is synthesized)
gagacgtccagttttctgtggcctcagacgacaactcggagttctggctgagtctggacgagagccctgctgctgcccagcttgtggcctttgtgggcaagactggctccgagtggacag

SEQ ID NO: 645313 - DNA, 120 bp, Artificial Sequence
  ENSG00000182272_7 (sequence is synthesized)
cgcctggagaattcaccaagttcagctcccaggtgtccaagcccaggcggctcatggcctcccggaggtactactttgagttgctgcacaagcaggacgaccgcggctcggaccacgtgg

SEQ ID NO: 645314 - DNA, 120 bp, Artificial Sequence
  ENSG00000182272_8 (sequence is synthesized)
aagtgggctggcgagctttcctgcccggcctgaagttcgaggtcatcagctctgctcacatctccctgtacacagatgagtcagccttgaagatggaccacgtggcgcacgtcccccagt

SEQ ID NO: 645315 - DNA, 120 bp, Artificial Sequence
  ENSG00000182272_9 (sequence is synthesized)
ctccagccagccacgtgggggggcgtccgccgcaggaggagaccagcgcagacatgctgcggccagatcccagggatacctttttcctcactccacgcatggaatcttcgagcctggaga

SEQ ID NO: 645316 - DNA, 120 bp, Artificial Sequence
  ENSG00000182272_10 (sequence is synthesized)
acgtgctggagccctgcgcctacgcccccacctacgtggtcaaggacttcccgatcgccagataccagggcctgcaatttgtgtacctgtccttcgtttatcccaacgactacactcgcc

SEQ ID NO: 645317 - DNA, 120 bp, Artificial Sequence
  ENSG00000182272_11 (sequence is synthesized)
tcacccacatggagacggacaacaagtgcttctaccgcgagtctccgctgtatctggagaggtttgggttctataaatacatgaagatggacaaggaggagggggatgaggatgaagaag

SEQ ID NO: 645318 - DNA, 120 bp, Artificial Sequence
  ENSG00000182272_12 (sequence is synthesized)
acgaggtgcagcgccgagccttcctcttcctcaacccggacgacttcctggacgacgaggacgagggggagctgctcgacagcctggagcccaccgaggcggccccgcccaggagcggcc

SEQ ID NO: 645319 - DNA, 80 bp, Artificial Sequence
  ENSG00000182272_13 (sequence is synthesized)
ccccgggacggggggacccccaggcactcccgggccctgagctgggccgccagggccgcccgccctttgccgctcttctt

SEQ ID NO: 645320 - DNA, 120 bp, Artificial Sequence
  ENSG00000182272_14 (sequence is synthesized)
cgctcttcttgggccgagctccgcccccgcgccctgcagtggagcagccgcccccaaaggtgtacgtgaccagggtgcggccgggacagcgggcatccccccgggccccagcgccgcgtg

SEQ ID NO: 645321 - DNA, 80 bp, Artificial Sequence
  ENSG00000182272_15 (sequence is synthesized)
ccttccctggcgtcttcctgcaccccaggcctctgcccagagtgcagctgcgggcgcccccacgcccaccccggccccac

SEQ ID NO: 645322 - DNA, 120 bp, Artificial Sequence
  ENSG00000182272_16 (sequence is synthesized)
ccccagcccgggcgcaggccacccaagggggccgggagggccaggcgcgcacgctgggacctgcggcgcccacagtggactcaaacttgtcctccgaagcgcggcccgtgacctccttcc

SEQ ID NO: 645323 - DNA, 120 bp, Artificial Sequence
  ENSG00000182272_17 (sequence is synthesized)
tgagcttgtcccaggtgtccgggccgcagctgcccggggagggcgaagaggaggaggaaggggaggacgatggggccccgggcgacgaggccgcgtcggaggacagcgaggaggccgcgg

SEQ ID NO: 645324 - DNA, 120 bp, Artificial Sequence
  ENSG00000182272_18 (sequence is synthesized)
gcccggcgctcggacgctggcgtgaggacgccatcgactggcagcgcacgttcagcgtgggcgccgtggacttcgagctgctgcgctcggactggaacgacctgcgatgcaacgtttcgg

SEQ ID NO: 645325 - DNA, 120 bp, Artificial Sequence
  ENSG00000182272_19 (sequence is synthesized)
ggaacctgcagctgccggaggcggaggccgtggacgtgaccgctcagtacatggagcggctgaacgcgcgccacggcgggcgcttcgcgcttctgcgcatcgtgaacgtggagaagcgcc

SEQ ID NO: 645326 - DNA, 120 bp, Artificial Sequence
  ENSG00000182272_20 (sequence is synthesized)
gggactcggcgcgagggagtcgcttcctgctggagctggagctgcaggagcgcgggggcggccgcctgcgactgtccgagtacgtcttcctgcggctgccgggagcccgcgtaggggatg

SEQ ID NO: 645327 - DNA, 120 bp, Artificial Sequence
  ENSG00000182272_21 (sequence is synthesized)
cagacggagaaagtcccgaacccgctcccgccgcctccgtgcgccccgacggccgccccgagctctgccggccactgcgcctggcctggcgccaggacgtgatggttcacttcatcgtgc

SEQ ID NO: 645328 - DNA, 120 bp, Artificial Sequence
  ENSG00000182272_22 (sequence is synthesized)
cagtgaaaaaccaggcacggtgggtggcacagttcctggcggacatggctgcgctgcacgcgcgcaccggggactcgcgtttcagcgtcgtcctggtggatttcgagagcgaggatatgg

SEQ ID NO: 645329 - DNA, 120 bp, Artificial Sequence
  ENSG00000182272_23 (sequence is synthesized)
acgtggagcgggccctgcgcgccgcgcgcctgccccggtaccagtacctgagacgaaccgggaacttcgagcgctccgccgggctgcaggcgggagtggacgcggtagaggacgccagca

SEQ ID NO: 645330 - DNA, 120 bp, Artificial Sequence
  ENSG00000182272_24 (sequence is synthesized)
gcatcgtgttcctctgcgacctgcacatccacttcccacccaacatcctggacggcatccgcaagcactgcgtggagggcaggctggccttcgcgcccgtggtcatgcgcctgagctgcg

SEQ ID NO: 645331 - DNA, 120 bp, Artificial Sequence
  ENSG00000182272_25 (sequence is synthesized)
ggagctcgccccgggacccccacggttactgggaggtgaacggctttggcctttttgggatctacaagtcggactttgaccgggttggaggaatgaacacggaggagttccgagaccagt

SEQ ID NO: 645332 - DNA, 120 bp, Artificial Sequence
  ENSG00000182272_26 (sequence is synthesized)
gggggggtgaagactgggagctcctggacagggtcctgcaggcagggctggaggtggagcggctccgactgcggaatttctatcaccactaccactccaagaggggcatgtggagcgtcc

SEQ ID NO: 645333 - DNA, 120 bp, Artificial Sequence
  ENSG00000182272_27 (sequence is synthesized)
gcagcaggaagggctctcgcacgggggcgtcttgaggacgggcagcccctcccagccccggtgggagtcccgaggcagctgctgggggctgggctttgagctcggtcccgagagacccgg

SEQ ID NO: 645334 - DNA, 120 bp, Artificial Sequence
  ENSG00000182272_28 (sequence is synthesized)
cagggctggtcagaggggcacagccaccgcctgtgcctgcccctctctggcccactgggcgtcgtgcccctccccggagaggcagccttcacggcgggtcagggcctggccttggtcccc

SEQ ID NO: 645335 - DNA, 120 bp, Artificial Sequence
  ENSG00000182272_29 (sequence is synthesized)
actctgcgatgatttctgtgaaattttgctgtagcgatgacattgttttcagaatttccaagagttctgtctgttctgttttttattcagaatgaaatgaaatattttttttagttctga

SEQ ID NO: 645336 - DNA, 120 bp, Artificial Sequence
  ENSG00000182272_30 (sequence is synthesized)
cccagggatacctttttcctcagtgagagggggcccgcgcgggggcgagggcgggggtgcctgccccagccaccctgtgaccgcacctcctgcagctccacgcatggaatcttcgagcct

SEQ ID NO: 645337 - DNA, 120 bp, Artificial Sequence
  ENSG00000182287_0 (sequence is synthesized)
gcttcccgcgcgtcgcctagcccgcccctcagctcgccgcagccccggctcctccctcgtccggcccccggggcggggtctgtcagcttgccctcccctctccgcctaagcctgccctat

SEQ ID NO: 645338 - DNA, 120 bp, Artificial Sequence
  ENSG00000182287_1 (sequence is synthesized)
ctatgccagccgggtgtcctccccacagcaccacggcttctcttcctcagcacggcgacaggggcttccccttcgccgccgccgccgccgccggccaagctccgccgcgcccgcggcccg

SEQ ID NO: 645339 - DNA, 120 bp, Artificial Sequence
  ENSG00000182287_2 (sequence is synthesized)
cgccatgcagtttatgttgctttttagtcgtcagggaaagcttcgactgcaaaaatggtatgtcccactatcagacaaagagaagaaaaagatcacaagagaacttgttcagaccgtttt

SEQ ID NO: 645340 - DNA, 120 bp, Artificial Sequence
  ENSG00000182287_3 (sequence is synthesized)
agcacggaaacctaaaatgtgcagcttccttgagtggcgagatctgaagattgtttacaaaagatatgctagtctgtatttttgctgtgctattgaggatcaggacaatgaactaattac

SEQ ID NO: 645341 - DNA, 120 bp, Artificial Sequence
  ENSG00000182287_4 (sequence is synthesized)
cctggaaataattcatcgttatgtggaattacttgacaagtatttcggcagtgtctgtgaactagatatcatctttaattttgagaaggcttattttattttggatgagtttcttttggg

SEQ ID NO: 645342 - DNA, 120 bp, Artificial Sequence
  ENSG00000182287_5 (sequence is synthesized)
aggggaagttcaggaaacatccaagaaaaatgtccttaaagcaattgagcaggctgatctactgcaggaggaagctgaaaccccacgtagtgttcttgaagaaattggactgacataact

SEQ ID NO: 645343 - DNA, 120 bp, Artificial Sequence
  ENSG00000182287_6 (sequence is synthesized)
ctcctcccttgttgatgacttcttgtggcatttcacacactgtagatggtcactcccttcatgtccatgttagctcatggtgtaagatgatgtcttgtcagtattactgttttgctaagc

SEQ ID NO: 645344 - DNA, 120 bp, Artificial Sequence
  ENSG00000182287_7 (sequence is synthesized)
cgcttcattcatgcctacacaatttttttttaaaagggaactttagttaattaagtgataagggacttaaatatgaattagaatggtgcagaaagagataccttttctggatattttaaa

SEQ ID NO: 645345 - DNA, 120 bp, Artificial Sequence
  ENSG00000182287_8 (sequence is synthesized)
gtttaaaggtcagtttctcttaatctgattatgtgcacatatgaaaatggcacatcatatacatgtaaaatcaggcagtatacatttattaattactgtatttgacaaaggaaactctta

SEQ ID NO: 645346 - DNA, 120 bp, Artificial Sequence
  ENSG00000182287_9 (sequence is synthesized)
ggaattgacatgtcacatatcaaatgaatggaaactttgttgaaactttaaaaagcaaatttactccaaagacttgtattggaaattacataccttttttttttttttttaaaggactac

SEQ ID NO: 645347 - DNA, 120 bp, Artificial Sequence
  ENSG00000182287_10 (sequence is synthesized)
agattatttttaatgactaaattggagtgatacttcttacactaaaaattatttcttaggcattctgaatctgggatgagaaacaggattgtttcacaatagtaagcacataatttttaa

SEQ ID NO: 645348 - DNA, 120 bp, Artificial Sequence
  ENSG00000182287_11 (sequence is synthesized)
ggccaaggcacatttgactcctgagatgaattttttgtggtcataatcaaatacttagttgtttttgatgccccaaaataaagtgagaatggtaatttgccaggaattcttcataacagt

SEQ ID NO: 645349 - DNA, 120 bp, Artificial Sequence
  ENSG00000182287_12 (sequence is synthesized)
atcttacaaaaaacgtgttgctctcttcacagtattatgtgtaaagtcattgtttaaagcacgaatgttccctctggggtacttgttaaagctaaatttattttgcttccctccacttag

SEQ ID NO: 645350 - DNA, 120 bp, Artificial Sequence
  ENSG00000182287_13 (sequence is synthesized)
aagtgctgcacactttacagcagcttcctttctttccatggcactgcctagttaacagaagtcttataaaaatttaaaaagacacatttcttacaaaaaagagttgaatgaggtaaaatg

SEQ ID NO: 645351 - DNA, 120 bp, Artificial Sequence
  ENSG00000182287_14 (sequence is synthesized)
gcattagatggctctatattttttaaagctatgtaattgttcagcgtcacttttctaagtacttatacatatctaaacatgtcttcatggtttatattttcacttatatatgctgggctg

SEQ ID NO: 645352 - DNA, 120 bp, Artificial Sequence
  ENSG00000182287_15 (sequence is synthesized)
gattaagctttgttgtgattgtgaccaacattcaggccacgtgagcactgtcttatcacatcgccaattagttgtaataaacgttcaacgtacaaacactggagtgtgtttttatctctt

SEQ ID NO: 645353 - DNA, 120 bp, Artificial Sequence
  ENSG00000182287_16 (sequence is synthesized)
tccaaaagtttgtcaaactatgcagagctgctgaaggaagaatttctcatttttttttcagtaaaatgttgaaaattcccctccatttgaatatggtggttgttataagcacacacaaga

SEQ ID NO: 645354 - DNA, 120 bp, Artificial Sequence
  ENSG00000182287_17 (sequence is synthesized)
tacatggtggaagatctaaggagtcttcatgtacttcattaaaaaataacatggattccatactgagagcctatctacacatttattttcaatcaataaatgctgcttttaaaaccttga

SEQ ID NO: 645355 - DNA, 120 bp, Artificial Sequence
  ENSG00000182287_18 (sequence is synthesized)
acagcaccacggcttctcttcctcagcacggcgacaggggcttccccttcgccgccgccgccgccgccggccaagctccgccgcgcccgcggcccgcggccgcctcgtcagggaaagctt

SEQ ID NO: 645356 - DNA, 120 bp, Artificial Sequence
  ENSG00000182287_19 (sequence is synthesized)
taaagcaattgagcaggctgatctactgcaggagccacgtcatgaatattttaatgtccctgtgtactaaatgactactcatcgagtatgcagaatttcacagaggaaatagaatgctga

SEQ ID NO: 645357 - DNA, 120 bp, Artificial Sequence
  ENSG00000182287_20 (sequence is synthesized)
aatacgtgctggagtactgacatgcatcaaaatgtagtaggatatataaattcagtttgtaatgacaattttgtcaagtttgttatttatattttagcattacctgaaaagtctaattac

SEQ ID NO: 645358 - DNA, 120 bp, Artificial Sequence
  ENSG00000182287_21 (sequence is synthesized)
attaaatcccaagggatagtcccaattacttcattaaactggtattttcatagggaattttgcttggataatgatccattattggggcttataatttattttttacacagaatatggaaa

SEQ ID NO: 645359 - DNA, 120 bp, Artificial Sequence
  ENSG00000182287_22 (sequence is synthesized)
tagcttcagaggttcattgacaataaagcattcattaaatactgtgaatcactaatgccattgatacagaagaatttccctatgaaaatgagagcttctgtgagaaaatgaagtagttgg

SEQ ID NO: 645360 - DNA, 120 bp, Artificial Sequence
  ENSG00000182287_23 (sequence is synthesized)
gagtttaatttcttattaatatgattttaacttgctgcttcattccactatattctgagttgggggaaaagggcagctatctctttaaaatatttaggaattctttgaggattaaaatgt

SEQ ID NO: 645361 - DNA, 120 bp, Artificial Sequence
  ENSG00000182287_24 (sequence is synthesized)
aactggcttttgtcctcagatacgtttgtaattaatggttgtgtaagtttagggatttgttagatatttttcttggaacagtttacatgattttgtagttcaacatttcaaagtttcaac

SEQ ID NO: 645362 - DNA, 120 bp, Artificial Sequence
  ENSG00000182287_25 (sequence is synthesized)
ttgaataaatattaaaatgaggatactttaaagacactcaaataagcaattttaaacttgctttctggtggggatataatccctttgagagtctgaaggatgatgggctgtcaccccagg

SEQ ID NO: 645363 - DNA, 120 bp, Artificial Sequence
  ENSG00000182287_26 (sequence is synthesized)
aaaatttgcacatcattttgtttctaatttcagggaactctcagagcccctagaagtccttctgtagacactcaaatctggagagttcgttaaaatctgtcttgaggatttttaaaaaag

SEQ ID NO: 645364 - DNA, 120 bp, Artificial Sequence
  ENSG00000182287_27 (sequence is synthesized)
taatatcctcagtctcagtcaaattctttggattttttgcttttgtaggtataagtaaacggttaaaaaccttcattgctacttaaaataccagatgagtgactacttttccagttttta

SEQ ID NO: 645365 - DNA, 120 bp, Artificial Sequence
  ENSG00000182287_28 (sequence is synthesized)
ttgggaaagatttttctctaggttctttagtttatgtaatacaaatgaactaatgaatttaaatactggtggaaggggaatattctaattgaatttttggtcaactcagtattgaccaga

SEQ ID NO: 645366 - DNA, 120 bp, Artificial Sequence
  ENSG00000182287_29 (sequence is synthesized)
aaaatcttttcataatattagtagtaaatatagtgttttaggattttgtaaaatttctggaggatgtctgtcatcattttgaacactgtatgtagtaaagttagaaaaaaatgaatctaa

SEQ ID NO: 645367 - DNA, 120 bp, Artificial Sequence
  ENSG00000182287_30 (sequence is synthesized)
agtcttgggcattgtttagaagttaaatattcagccttaaaccaaagaatgaaagcaaacagaaacttaagttttagttatctttactgtgagctaaatgttctagaaatctgattgtgt

SEQ ID NO: 645368 - DNA, 120 bp, Artificial Sequence
  ENSG00000182287_31 (sequence is synthesized)
ttcacattccaaacttttctgttttattttcattctatatgtgatcttgatacagctcattcctttctgcaactgatttaatctcatcttgacaaaatatgacctagaagtgttttgagt

SEQ ID NO: 645369 - DNA, 120 bp, Artificial Sequence
  ENSG00000182287_32 (sequence is synthesized)
aatattaaatcttaaacacatacatattattaatgaaccatctgtgatttatcttataagaggaaaacatgacaatcattaaaatgtttaccaaagaaaatatagctgaagtgctaggtc

SEQ ID NO: 645370 - DNA, 120 bp, Artificial Sequence
  ENSG00000182287_33 (sequence is synthesized)
aaaataagcagtgccataatatatagtgtagtttggtcttcaaatatggaggttaaaaaaagaaactattttgtgtgattatcttacaatctgtatgagctaatgtgttctaatgtatca

SEQ ID NO: 645371 - DNA, 120 bp, Artificial Sequence
  ENSG00000182287_34 (sequence is synthesized)
tatatgtgaaaatattacaagaaactaaaattaatttgtaccattatataatatttaaggttaaaacattcagtattaagaaattttgtagtgccacatttattgaatcacatttgtgct

SEQ ID NO: 645372 - DNA, 120 bp, Artificial Sequence
  ENSG00000182287_35 (sequence is synthesized)
tttgtgctatataataatatcaaacaatccctttaagaacttattagagagctatgtctgaagtctgttctgcaatatctgttgctgaataataactctttcaaagcattaatgctgagt

SEQ ID NO: 645373 - DNA, 120 bp, Artificial Sequence
  ENSG00000182287_36 (sequence is synthesized)
atagttcaaaaattctaatattcattcagttttaatacctaaatacttatattttactagtgatggcattctaatatattaagtcctcatttaaatacttgatactttgttaactgtggc

SEQ ID NO: 645374 - DNA, 120 bp, Artificial Sequence
  ENSG00000182287_37 (sequence is synthesized)
tggcattatatttctgaattttaaaacctttaatattggtaactattgcatattcttttaataaaacatgcagcatatttttttataaaaggaaaagaattcattgtttatatctagaga

SEQ ID NO: 645375 - DNA, 120 bp, Artificial Sequence
  ENSG00000182287_38 (sequence is synthesized)
gcataaagcctaagttaagtaagttattaaacaataacttcacaagatgttcaaatcgatttatcactgaaagaagatctatgaaaatgtgttttgaccaaacttagtattaggcaggta

SEQ ID NO: 645376 - DNA, 120 bp, Artificial Sequence
  ENSG00000182287_39 (sequence is synthesized)
cacagataagattttccattcttaacattctcactgtaatgcacgacatttgaagcacctggatgtgctatcaatcaggtgggaaatttagcattatatattggaagcattgagaaacat

SEQ ID NO: 645377 - DNA, 120 bp, Artificial Sequence
  ENSG00000182287_40 (sequence is synthesized)
tggtctttcatttctatttttttttcccctcctttcctcctcctgccccacaatatattattcatctggttttaatgctacataaatatgcattgtctcatgcctgtttgtgttggatgc

SEQ ID NO: 645378 - DNA, 120 bp, Artificial Sequence
  ENSG00000182287_41 (sequence is synthesized)
cttgtgctaagctgtaacaaaatgttgcttcttttgctgtctgtatacagctgcttgctttaaattagtagattctgaaatagctttccttgcatgtctaaaataaaagtattgcatgta

SEQ ID NO: 645379 - DNA, 120 bp, Artificial Sequence
  ENSG00000182287_42 (sequence is synthesized)
aagaatggggaggtttgtctgaggatatcttatgataaagagcagtctaaggctttagtccctttgatccccaacttatttattggatgcgaaagaagctgaaaccccacgtagtgttct

SEQ ID NO: 645380 - DNA, 120 bp, Artificial Sequence
  ENSG00000182287_43 (sequence is synthesized)
aagaaaaatgtccttaaagcaattgagcaggctgatctactgcaggagagtttcttttcttcttgaaggatgtttttccagtgaagaggggtttctccctatgaagagtattctcacatt

SEQ ID NO: 645381 - DNA, 120 bp, Artificial Sequence
  ENSG00000182307_0 (sequence is synthesized)
gtagttccggtggcgactgcggcgcatggcggccctgggacatcttgctggggaggcagcggcggccccaggcccgggtactccctgcgcgtcccgcggagcccggcttcccggcccagt

SEQ ID NO: 645382 - DNA, 120 bp, Artificial Sequence
  ENSG00000182307_1 (sequence is synthesized)
ttccagcgcccggaatccttccactgtctgtctctgcccagagcaacctacgtgcagtaacgctgactccagagcgcacccgttgggcgatgaaggcggcacagcgtcgaaaaaacaaaa

SEQ ID NO: 645383 - DNA, 120 bp, Artificial Sequence
  ENSG00000182307_2 (sequence is synthesized)
gaataagaagaaaacgcggaacagggcctctgtggcaaatggaggcgagaaggcctcagagaaactcgccccagaagaagttcccctaagcgctgaggcccaggcacaacagttggccca

SEQ ID NO: 645384 - DNA, 120 bp, Artificial Sequence
  ENSG00000182307_3 (sequence is synthesized)
ggaattggcttggtgtgtggagcaactggagctgggcctcaagaggcagaaacccaccccgaaacagaaagagcaggctattggagcaatccgaaccctgcgcagcaaaagaacgccctt

SEQ ID NO: 645385 - DNA, 120 bp, Artificial Sequence
  ENSG00000182307_4 (sequence is synthesized)
gccccggaagaggcagctgatgcactccttgtttggagactatagggctcagatggaagccgaatggcgtgaggccctgcgggctctcagagctgctgcttattcagcccaggtgcaacc

SEQ ID NO: 645386 - DNA, 120 bp, Artificial Sequence
  ENSG00000182307_5 (sequence is synthesized)
tgtagatggagccaccagaaagaagagccaaagggtctgcaggcctcgctctatatggagagccaaagccactctggacatgcctgatgaagagtttaggttcaatttcttttagcgtct

SEQ ID NO: 645387 - DNA, 120 bp, Artificial Sequence
  ENSG00000182307_6 (sequence is synthesized)
ccccgaacctgaaacaatccccctcccttggggtggtgtaggggtttgttttgagtgcagagcctttccaggacttctgttgtcagagaaccctggagttggtctgtccctggctggtcc

SEQ ID NO: 645388 - DNA, 120 bp, Artificial Sequence
  ENSG00000182307_7 (sequence is synthesized)
aaggatttgtagctgttgtgaaggtgtgagaccatcagataggcaaaagaccccgttcgttttctgatgaaatgttctctctttcagaagagagagagaggtgcatttagaaaatatgca

SEQ ID NO: 645389 - DNA, 120 bp, Artificial Sequence
  ENSG00000182307_8 (sequence is synthesized)
ataaattgaagtgagtgttcaaagtattgtagaaggaatattgtactcagtctttaggattagattaagtggctgttggtaacaaagattagtggagaagctgtataatcgtacactggt

SEQ ID NO: 645390 - DNA, 120 bp, Artificial Sequence
  ENSG00000182307_9 (sequence is synthesized)
tttcacttttgaaaggaatccctgtcaaatggtttagtgcttaatgctgttatgtcatattgccctaatctctatttttgataaaattggataaggagtgaaagagtatgctgaccacct

SEQ ID NO: 645391 - DNA, 120 bp, Artificial Sequence
  ENSG00000182307_10 (sequence is synthesized)
tgtgcatgttgccttcattcctgagcaggtatcatcctcagggaaccagcatggcacctaccaggccaggctctgttcttaggagcaaggagcttcttgcgctaacagttctggcctgag

SEQ ID NO: 645392 - DNA, 120 bp, Artificial Sequence
  ENSG00000182307_11 (sequence is synthesized)
acctggattgagccttggcagacttcttgtctaaatgttggccattcagtctcaggccctctgttccatggaattgggaatctccaggtgacctaatcctcattggtggcttgatgtttg

SEQ ID NO: 645393 - DNA, 120 bp, Artificial Sequence
  ENSG00000182307_12 (sequence is synthesized)
ctggtatcttccaaactcagttcccagactagattgatacctggagcccagctgcctactcagcatttccacttgggtgcttcataggcatttcaaacctgatgtgtttaaaacacttga

SEQ ID NO: 645394 - DNA, 120 bp, Artificial Sequence
  ENSG00000182307_13 (sequence is synthesized)
ttaggctccggttttcctttggcttctgcttttcagtgaatggcatgactgcctatgtgggtggcaagccacccaggtgccgaggaaagagactgagggcacgagctgttccagtataat

SEQ ID NO: 645395 - DNA, 120 bp, Artificial Sequence
  ENSG00000182307_14 (sequence is synthesized)
aaaaaccaggccatacagagataggagccgaggggacatagtgcgaagtggccagaagacaagagtgtgagccttctcttatgcccggacagggccaccagagggcttggtctagcagta

SEQ ID NO: 645396 - DNA, 120 bp, Artificial Sequence
  ENSG00000182307_15 (sequence is synthesized)
gagggcttggtctagcagtaacaccagtgtctgggaagatgcctgttgcaaagtggaccatggtctagcagtagcatcagtgtcaaggaaaaacacccactacttagcagactgggaaaa

SEQ ID NO: 645397 - DNA, 120 bp, Artificial Sequence
  ENSG00000182307_16 (sequence is synthesized)
cttcagtggtcacgctcctagtccgctttcatgttccatcctgtatacctggctctgccttttagatagcaggagcaaattagtgaaagtactaaatgtctgatatgcagaaataatggc

SEQ ID NO: 645398 - DNA, 76 bp, Artificial Sequence
  ENSG00000182307_17 (sequence is synthesized)
tgtgaccttacctattattggagatggttcacattccttaccctgcccctttgtcttatatccaataaatatcagt

SEQ ID NO: 645399 - DNA, 75 bp, Artificial Sequence
  ENSG00000182307_18 (sequence is synthesized)
cccatgtgaccttacctattattggagatggttcacattccttaccctgcccctttgtcttggtctccgcgtctt

SEQ ID NO: 645400 - DNA, 120 bp, Artificial Sequence
  ENSG00000182307_19 (sequence is synthesized)
ttgttccagcccttaacaacatcactcctgcagcacgttaccattggaaagtcctacctcaagatgcctccaagaagtccaaaaacaagtccgaagtccgacgagcaatggtggcgatgg

SEQ ID NO: 645401 - DNA, 81 bp, Artificial Sequence
  ENSG00000182307_20 (sequence is synthesized)
aagtccgacgagcaatggtggcgatggcgattctagttaataaaaaggggggagatgtgggcggcaagccacccaggtgct

SEQ ID NO: 645402 - DNA, 71 bp, Artificial Sequence
  ENSG00000182307_21 (sequence is synthesized)
gtagcaattactaaaaccaggccatacagagataagagctgaggggacatagtgaaaagtgaccaaaagac

SEQ ID NO: 645403 - DNA, 120 bp, Artificial Sequence
  ENSG00000182307_22 (sequence is synthesized)
acaatcataacctagggaaaaccaggccatacagagataagagctgaggggacatagtgaaaagtgaccaaaagacaagagtgtgagccttctcttatgcccagacagggccaccagagg

SEQ ID NO: 645404 - DNA, 120 bp, Artificial Sequence
  ENSG00000182307_23 (sequence is synthesized)
cgccagcatctgggaagatgcccgttgccaagcggaccatggtctagtggtagtatcagtgtcaaggaaaaacacccactacttagccgaccaggaaagggagtctccctttccctgggg

SEQ ID NO: 645405 - DNA, 72 bp, Artificial Sequence
  ENSG00000182307_24 (sequence is synthesized)
tgtggagggcctgacatcagtcaggcccacccgcagttatccggaggcctacgtcatgttccatcctgtaca

SEQ ID NO: 645406 - DNA, 120 bp, Artificial Sequence
  ENSG00000182307_25 (sequence is synthesized)
gcctcggctgccaggcaaggaagggccccctgtccagtggacacataagccacatgaccttacttatgactggagatggctcacactccttactctgcccctttgtcttgtatccaataa

SEQ ID NO: 645407 - DNA, 120 bp, Artificial Sequence
  ENSG00000182307_26 (sequence is synthesized)
gtagttccggtggcgactgcggcgcatggcggtgagcggtgtggagaagacgcgcgggtggctgggccttgcattgttggcggctctcggtgaccctcgtgctacccccctttctccagg

SEQ ID NO: 645408 - DNA, 120 bp, Artificial Sequence
  ENSG00000182307_27 (sequence is synthesized)
ggcctaacttaaggaggaagtgtctagggggtgaaaggaagaaggcccagagcaacaagcctggtgggggaaggagatgggctcagggaagcctgagggagcagggaaacagaaagcgtg

SEQ ID NO: 645409 - DNA, 120 bp, Artificial Sequence
  ENSG00000182307_28 (sequence is synthesized)
gacctctctttcctcttcctaggactgaacctgggaagcagcggggaggccctgggaggagtgggaaagagcatggtcctatgttggtcctgctcctgggttggggaaagctgcctcatg

SEQ ID NO: 645410 - DNA, 120 bp, Artificial Sequence
  ENSG00000182307_29 (sequence is synthesized)
tctttgtgtcttggctttctctactagcaatgaagccatatcccataacagtttgagtgcaattcctggggccagatcagctaggttcaaatcctggatctaccacatagtagtactaac

SEQ ID NO: 645411 - DNA, 120 bp, Artificial Sequence
  ENSG00000182307_30 (sequence is synthesized)
accttttgcaaactactgaacctctctaagtgggggatgatagtaatatcaaccttacaaatttgaggaattaatcagttaatttatgcaaggtggttagaattgtatgggcaaacataa

SEQ ID NO: 645412 - DNA, 120 bp, Artificial Sequence
  ENSG00000182307_31 (sequence is synthesized)
tagttccggtggcgactgcggcgcatggcggtgagcggtgtggagaagacgcgcgggtggctgggccttgcattgttggcggctctcggtgaccctcgtgctacccccctttctccagag

SEQ ID NO: 645413 - DNA, 120 bp, Artificial Sequence
  ENSG00000182308_0 (sequence is synthesized)
agaatttcctgtcacgaggaacattccgcaggaggaaatggaggctgaaaggctgcgactcctcgaggaagaggccaagctgaaaaaggtagccagaatgggatttaatgcatcttccat

SEQ ID NO: 645414 - DNA, 120 bp, Artificial Sequence
  ENSG00000182308_1 (sequence is synthesized)
gctccgaaaaagccagctaggtttcctcaacgtcaccagttactcccgtttagccaacgagctgcgtgtgagctgcatggagcggaaaaaggtccaaattcggagcttggatccctcctc

SEQ ID NO: 645415 - DNA, 120 bp, Artificial Sequence
  ENSG00000182308_2 (sequence is synthesized)
tttggcgagcgaccgatttaacttcattctggcgagtaccaacagcgaccagctcttcgtagtgaaccaggtcgaagtcgaaggctccaagtacggcatcatcagcctgcgaactctgaa

SEQ ID NO: 645416 - DNA, 120 bp, Artificial Sequence
  ENSG00000182308_3 (sequence is synthesized)
gatcccttcgttccacgtgtacgtgctcagaaacctctacgtccccaaccggaaggtgaagtccctgtgctgggcctcgctgaaccagttggactctcacgttctgctgtgcttcgaggg

SEQ ID NO: 645417 - DNA, 120 bp, Artificial Sequence
  ENSG00000182308_4 (sequence is synthesized)
aatcacagatgctccaagctgtgcagtgctgctcccagcgtcgcggttcttaagtgttcacacaagagttaaccagcctggcatgctctgcagtttccagatcccagaggcctggtcctg

SEQ ID NO: 645418 - DNA, 120 bp, Artificial Sequence
  ENSG00000182308_5 (sequence is synthesized)
tgcgtggtccctcaacacccgggcatatcactgctttagtgcaggcttgtctcagcaggtcctgttgaccagcgtggcgacgggacaccagcagtcatttgataccagcagtgatgtctt

SEQ ID NO: 645419 - DNA, 120 bp, Artificial Sequence
  ENSG00000182308_6 (sequence is synthesized)
ggcccagcagtttgctagtacggctcctttgctgtttaatggctgtcgctccggggagatctttgccattgatctgcgttgtagaaatcgaggcaaggggtggagggccactcgcctgtt

SEQ ID NO: 645420 - DNA, 120 bp, Artificial Sequence
  ENSG00000182308_7 (sequence is synthesized)
ccatgactcagcagtgacctctgtgcaaatcctccaagaagagcaatgcctgatggcatcagacatgactggaaagatcaagctgtgggatctgagggccactaaatgtgtaaggcagta

SEQ ID NO: 645421 - DNA, 120 bp, Artificial Sequence
  ENSG00000182308_8 (sequence is synthesized)
cgaaggtcacgtgaatgagtccgcctatctgcccctgcatgtgcacgaggaagagggaatcgtggtggcagtgggccaggactgctacacgagaatctggagcctccatgatgcccacct

SEQ ID NO: 645422 - DNA, 120 bp, Artificial Sequence
  ENSG00000182308_9 (sequence is synthesized)
gctcagaaccatcccttccccgtactctgcctccgaggacgacattcccagcgtggccttcgcttctcggctcgggggcatccggggagcagcaccagggctgctcatggctgtccggca

SEQ ID NO: 645423 - DNA, 120 bp, Artificial Sequence
  ENSG00000182308_10 (sequence is synthesized)
ggacctttattgtttccccttcagctaattctgcaggtggcagcgcggccgaatgtggatttgacttaaggaagttaagagtatcttattaccgtttctgtgagagcattttaagagacg

SEQ ID NO: 645424 - DNA, 120 bp, Artificial Sequence
  ENSG00000182308_11 (sequence is synthesized)
tgttgtatatagatcgcatccatccggctgccaggggtaaggtgttaagagttttatgtggagacgttcttgtaaagttatttcagttaaactgtggacttaacttgaaagtccttttca

SEQ ID NO: 645425 - DNA, 120 bp, Artificial Sequence
  ENSG00000182308_12 (sequence is synthesized)
taaaaggtacctgtttcctcttgttgaatgccttagaacagttaaccacctccccaaccctttttttttttaaataattaagacttttctaaggactgaagattggcaaaaactaaaata

SEQ ID NO: 645426 - DNA, 120 bp, Artificial Sequence
  ENSG00000182308_13 (sequence is synthesized)
aattaaagcagcttctttcactagtagccctttagagaagcataatgatggtactggtaagactgtttgactaatcatacagggtcccaggcatctgcgcttgaggaagccagtgggagt

SEQ ID NO: 645427 - DNA, 120 bp, Artificial Sequence
  ENSG00000182308_14 (sequence is synthesized)
ggagacaagggagaggtaatttctcagagtctctacagaaatatttaaggctggagtttggaatcattaaatttggccttctcaaactcaatagcagatctcttaaggttctccttttat

SEQ ID NO: 645428 - DNA, 120 bp, Artificial Sequence
  ENSG00000182308_15 (sequence is synthesized)
tgttatcatccataggcattggaaggaaagatggatctttttaaatactagaagttttaaacagtccttgatgtgcttttgttgaggtacctttcagaatgtaaggtacagcagctccgg

SEQ ID NO: 645429 - DNA, 120 bp, Artificial Sequence
  ENSG00000182308_16 (sequence is synthesized)
tttctattatggtgacttgaagttcagattcaaggaattggctttgactttttgtaatctaggagcagcagtttgtgagagatttattaaaaatgttaaagagcctgtttttctactaag

SEQ ID NO: 645430 - DNA, 120 bp, Artificial Sequence
  ENSG00000182308_17 (sequence is synthesized)
caaggaagaaaaaaaacgtgtaataaggttagttgctacttcttaatagccaaagcctggaaatgatctgaatttcgaaaatgctaaaattcgtgatataatcatacaatcggatactgc

SEQ ID NO: 645431 - DNA, 120 bp, Artificial Sequence
  ENSG00000182308_18 (sequence is synthesized)
ataataatagaaaataaggcacacttgctatgtgaaacagtatggaccaatctcaacatgttgactgaaattaggtagaaatgagtacaaactgtatgattcaattctaaagttcaaaag

SEQ ID NO: 645432 - DNA, 120 bp, Artificial Sequence
  ENSG00000182308_19 (sequence is synthesized)
tagagtagtacgtacctctgtagaaagaaaggatttttttttctttttctttttaggatgtttgagaagtgacatggggaagctttaggaatgctgagttttctttatcttgacacttga

SEQ ID NO: 645433 - DNA, 120 bp, Artificial Sequence
  ENSG00000182308_20 (sequence is synthesized)
tacatacgtaattcatatatctatatgcttcacgtttttatagtttactgtatatatgttattcctcaaaaaataaaaataagcaattaggacactattgtagttaggcaagggacaatg

SEQ ID NO: 645434 - DNA, 120 bp, Artificial Sequence
  ENSG00000182308_21 (sequence is synthesized)
atgccttggacctgcatgtgtgagaagtagaaatgatcagaaatgattgcattggaagatcattcgaaggtagtattattgataaggcttgctgatgagagtaaactagaaagtgaaaga

SEQ ID NO: 645435 - DNA, 120 bp, Artificial Sequence
  ENSG00000182308_22 (sequence is synthesized)
ttaactttagaactggtagatgatggtgtcgtttactaacctggggaggatgaggagaaaaaactttaggtgaagggaatgatgctgagttttagacatctactaaacctccaattggag

SEQ ID NO: 645436 - DNA, 120 bp, Artificial Sequence
  ENSG00000182308_23 (sequence is synthesized)
atacaaagtattctgcagatcaggggtcatgtcatggctggtaatacaaatttggtgacttcaatacatagaattaaaatagatgggatagatgtgctttatatgacatagatgaggtta

SEQ ID NO: 645437 - DNA, 120 bp, Artificial Sequence
  ENSG00000182308_24 (sequence is synthesized)
atgtaattacatattgatagaagatgagtagatcaatagagaagatatgggagtatggttaggcacagatttttggaatcctttcagtcagttttttatactaacttgatatgtgacatg

SEQ ID NO: 645438 - DNA, 120 bp, Artificial Sequence
  ENSG00000182308_25 (sequence is synthesized)
agaaattgtgtaagctttacttgctgttgtttcttcagtgtaaaatgtcttagataataaaactaaatgataaagtagatacagggttaaaggatatgtatcttgtcccttttacattgt

SEQ ID NO: 645439 - DNA, 120 bp, Artificial Sequence
  ENSG00000182308_26 (sequence is synthesized)
aagcattcaaaataaaacaaaacaattaatgaagaaaagacattgcaatcattcagtaagaactagctgcagacatatatatgtatatatatatatgtctgatactgatatgtcatttat

SEQ ID NO: 645440 - DNA, 120 bp, Artificial Sequence
  ENSG00000182308_27 (sequence is synthesized)
ttggcaattgacaaaaaatgactacataacttgataaactgtttatcctcatttgcaaagaaaacaaatgcaaaaaaaaaatcagtaagaaaaacacacctaaaagaaagggaggcaata

SEQ ID NO: 645441 - DNA, 120 bp, Artificial Sequence
  ENSG00000182308_28 (sequence is synthesized)
gtcttgaataggagaaaaagaggagatccaaatggctaatatacatttgaaaaggcatccaacttcttttattgtcaaggaaatgcaaattaaaaccacaatgccacaccactttcacta

SEQ ID NO: 645442 - DNA, 120 bp, Artificial Sequence
  ENSG00000182308_29 (sequence is synthesized)
taatggttaaaataaaatagatcaggtggagtgacgttgggaattaaaagagaagcaaatgttggtgcagttgtgagcaaatagaactttcatatactgttgagtgtatactggtacaag

SEQ ID NO: 645443 - DNA, 120 bp, Artificial Sequence
  ENSG00000182308_30 (sequence is synthesized)
cacttggaaaagttagtaattgctaaagctagaagtttgcatactctatgacccagtcatttcagtcctaggaatatattaatcagaaatgcatacctgtgtccaccataatttgttaat

SEQ ID NO: 645444 - DNA, 120 bp, Artificial Sequence
  ENSG00000182308_31 (sequence is synthesized)
agctccaactggaaactacccaaatgttcattaatagtagagtggataaattgtgggatattaacacaatggaatcctttttgcagtgagaatgagcatagcactatggacaaatcctgc

SEQ ID NO: 645445 - DNA, 120 bp, Artificial Sequence
  ENSG00000182308_32 (sequence is synthesized)
aaacataatgttgaaataaagatgccaaacacaaaagagcacatattgtacaactaatgcacataaagtccctaaacaggcaaaatgaatctatgttcttagaagcaggattaatggtat

SEQ ID NO: 645446 - DNA, 120 bp, Artificial Sequence
  ENSG00000182308_33 (sequence is synthesized)
acttgtagggcagaagagtagtgaccagaagaagattctaggaagctagcaatgctggtgtcatgccagacccctagtgactccaatagtaatggcactgtgtccgagagtccaaagaag

SEQ ID NO: 645447 - DNA, 120 bp, Artificial Sequence
  ENSG00000182308_34 (sequence is synthesized)
atgcgtagacagcgaacaagacttgggtttattgggggaacttatatatagggatggtccagtggtagtaggctggacagaagaaccactactgtttgtaaaaagcatgcagtttatata

SEQ ID NO: 645448 - DNA, 120 bp, Artificial Sequence
  ENSG00000182308_35 (sequence is synthesized)
gcattttcatttagcacactccacctagcaacctccatttaacccaaagcaaaggaccttgatcccctatattgcctgtgttgtaagggatgggctgggggttcagacgtccttcataga

SEQ ID NO: 645449 - DNA, 120 bp, Artificial Sequence
  ENSG00000182308_36 (sequence is synthesized)
taaggagtgaaactcagggttagtcgctcctgtttccttagtttgggattctgagcacacattcgttttagatcacagggtcgttctcaggatatggttgttactgctgtcaggtgcatc

SEQ ID NO: 645450 - DNA, 120 bp, Artificial Sequence
  ENSG00000182308_37 (sequence is synthesized)
ctctctatagcggggtactggctacacagtttttgttcactagtgataattgttagagctatgcccttaatatatgtcttgtgtgtattatacttcaataaaaagttaaattttaaaaaa

SEQ ID NO: 645451 - DNA, 120 bp, Artificial Sequence
  ENSG00000182310_0 (sequence is synthesized)
tagcttctcccctggccttgagacccacacgatggccctgctggctctggccagtgccgtcccgtctgccctgctggccctggctgtcttcagggtgcccgcctgggcctgtctcctctg

SEQ ID NO: 645452 - DNA, 120 bp, Artificial Sequence
  ENSG00000182310_1 (sequence is synthesized)
cttcacaacctactctgagcgcctccgcatctgccagatgtttgttgggatgcggagccccaagcttgaagagtgtgaggaggccttcacggccgccttccagggcctctctgacaccga

SEQ ID NO: 645453 - DNA, 120 bp, Artificial Sequence
  ENSG00000182310_2 (sequence is synthesized)
aatcaactatgatgagagaagccacctgcatgacaccttcacccagatgacccatgccctgcaggagctggctgctgcccagggatcctttgaggttgccttccctgatgctgcggagaa

SEQ ID NO: 645454 - DNA, 120 bp, Artificial Sequence
  ENSG00000182310_3 (sequence is synthesized)
aatgaagaaggtcattacacagcttaaagaagcccaggcttgcatccctccctgcggtctccaggagttcgcccggcgtttcctctgcagcgggtgctactctagggtctgcgacctccc

SEQ ID NO: 645455 - DNA, 120 bp, Artificial Sequence
  ENSG00000182310_4 (sequence is synthesized)
caggaggaggtctccggactcaggacttgtcctatttccgagatatgccgcgggccgaaggatacctggcgcggatccggccggctcagctcacgcaccgcgggacgttctcctgcgtga

SEQ ID NO: 645456 - DNA, 120 bp, Artificial Sequence
  ENSG00000182310_5 (sequence is synthesized)
tcaagcaagaccagcgccccctggcccggctctacttctttcttaacgtgacgggcccgcccccgcgggcggagacagagttgcaggcctcgttccgggaagtgctgcgctgggcgccgc

SEQ ID NO: 645457 - DNA, 120 bp, Artificial Sequence
  ENSG00000182310_6 (sequence is synthesized)
gggatgccgagctgatcgagccctggaggcccagcctgggcgagctgctggccaggcccgaggctctgacgcccagcaatctgttcctgcttgcagtcctcggggccctcgcatcagcga

SEQ ID NO: 645458 - DNA, 120 bp, Artificial Sequence
  ENSG00000182310_7 (sequence is synthesized)
gtgcgacagtgttggcgtggatgttctttcgatggtactgcagtggcaactaacaaaggtatctttcctccttccctatcctatttccatcctgaaaataaagaatatatttcaactcta

SEQ ID NO: 645459 - DNA, 120 bp, Artificial Sequence
  ENSG00000182310_8 (sequence is synthesized)
caaccacacacctggggaattgctggcctgacttctgacccctgactcctcatacccttcctccagagcatgacatttgaccaccaactgaaacctgacctctgaccccagaccactggc

SEQ ID NO: 645460 - DNA, 120 bp, Artificial Sequence
  ENSG00000182310_9 (sequence is synthesized)
gagggacagacagagagaaacagtcagaggagaaaggctcaaagaccatgagaacaacagagacttagggacagagagacacagacaggggaagacagcagggcaaagactcagagaggg

SEQ ID NO: 645461 - DNA, 120 bp, Artificial Sequence
  ENSG00000182310_10 (sequence is synthesized)
gaggatggagagtcagagaggggaagatggagactcagagagggggaggatggagactcagagagagaggaagatggagactcggaaagatggagactcaggagtatggagagtcagaga

SEQ ID NO: 645462 - DNA, 120 bp, Artificial Sequence
  ENSG00000182310_11 (sequence is synthesized)
ggggaggatggacactcgggaggatggagagtcaggaggatggagactcatagaaaggggaggatggagagtcaggagaggttggagactggagagggaatagagacccagagaggggag

SEQ ID NO: 645463 - DNA, 120 bp, Artificial Sequence
  ENSG00000182310_12 (sequence is synthesized)
atagcgactggtcgggggcagagactcagggaggatagagacttgggagggactcaggaagcatagcgactgtggggcaaagagtcagagaggggaggatacagacttgggagggcagag

SEQ ID NO: 645464 - DNA, 120 bp, Artificial Sequence
  ENSG00000182310_13 (sequence is synthesized)
gcaacctccaacccaggaggatgttctttcgatggtactgcagtggcaactaacaaaggtatctttcctccttccctatcctatttccatcctgaaaataaagaatatatttcaactcta

SEQ ID NO: 645465 - DNA, 120 bp, Artificial Sequence
  ENSG00000182310_14 (sequence is synthesized)
aaatgggccaagggccccgggcttggaagggcaggtggcgcctagacccagcgttcccgctccacaggtctccaggagttcgcccggcgtttcctctgcagcgggtgctactctagggtc

SEQ ID NO: 645466 - DNA, 120 bp, Artificial Sequence
  ENSG00000182310_15 (sequence is synthesized)
taggaggaggtgcagcaagcccacacatgcccagatgaatatggcccgcataatgacagtgataggcatagctatcccagtgcaagttaggtgggaacccagataccccctcaggttact

SEQ ID NO: 645467 - DNA, 120 bp, Artificial Sequence
  ENSG00000182310_16 (sequence is synthesized)
aatgcttcgggccttgtaacattagctaggggagcatcgggcaagggttcttcccatgactgtaaggtagtgatgtttcctcttcctccacagcccaggcttgcatccctccctgcggtc

SEQ ID NO: 645468 - DNA, 72 bp, Artificial Sequence
  ENSG00000182310_17 (sequence is synthesized)
aattgtacactttgagtgagtgaactctgtgcgagataaattggagacaaatatggacaactctcccaagga

SEQ ID NO: 645469 - DNA, 120 bp, Artificial Sequence
  ENSG00000182310_18 (sequence is synthesized)
cccggcctcttttgtcccttccctcctctgcgtcaggcttctctggcccggcctccccctcccgctccctcctcctccccggggctggatggaattttttcccctggacctgggccagct

SEQ ID NO: 645470 - DNA, 80 bp, Artificial Sequence
  ENSG00000182310_19 (sequence is synthesized)
ttttcccctggacctgggccagctccggggcaggggggaagccaggccggactgggctgggcggtggggaggggccgggg

SEQ ID NO: 645471 - DNA, 120 bp, Artificial Sequence
  ENSG00000182310_20 (sequence is synthesized)
gggagaagggaaggaggatggcggggacggcgggaggaaggggagaggccgccgtgcggcgaaggcggggagaggatggagagcgctcggcggcggtggggcccggcctgcgggcccggg

SEQ ID NO: 645472 - DNA, 120 bp, Artificial Sequence
  ENSG00000182310_21 (sequence is synthesized)
cggagaagaccccttccctgcgacgcgggagccgcgggagccactatgatgagagaagccacctgcatgacaccttcacccagatgacccatgccctgcaggagctggctgctgcccagg

SEQ ID NO: 645473 - DNA, 120 bp, Artificial Sequence
  ENSG00000182310_22 (sequence is synthesized)
ggaccagagcaccgaggggcataagctggtggcgaggccagacgtggtcggggcccagcgagtgaaccctgctccgtcttcagttcaggatgtgacagtgactcggggcgaccaggctat

SEQ ID NO: 645474 - DNA, 120 bp, Artificial Sequence
  ENSG00000182310_23 (sequence is synthesized)
gcggtcggggacgaaacgtacgacatcaagtgtgggaaagcgggtgggcttcacatccttaggaagccaataagatccctggagaaaaggaagaaaaccaagtattgctctaaatcctca

SEQ ID NO: 645475 - DNA, 120 bp, Artificial Sequence
  ENSG00000182310_24 (sequence is synthesized)
ctctacttctttcttaacggtggggcggggcgcggccgcgtgagtgagcggggtcgggagaggggtggggctcgtgcctggctgacgtgcgcgcccccgcagtgacgggcccgcccccgc

SEQ ID NO: 645476 - DNA, 120 bp, Artificial Sequence
  ENSG00000182310_25 (sequence is synthesized)
ctccccgctgtctcagatcccaccgagaagtctgggttcccagcaacctccaacccaggaggtcaggctttcagttcctcctctctcagacccacgagtccaggtcccagcccctcttta

SEQ ID NO: 645477 - DNA, 86 bp, Artificial Sequence
  ENSG00000182310_26 (sequence is synthesized)
ctctctcagacccacgagtccaggtcccagcccctctttactagcccaggaatccaagtccccagccccctcctcccttagatcta

SEQ ID NO: 645478 - DNA, 120 bp, Artificial Sequence
  ENSG00000182310_27 (sequence is synthesized)
ggattccaggccccaaacccctactccttcagacccaggagtccaagtccccagtcccctcctcccgcagatccaagagtccaagcccccggaccccctcctccctcagacccaggagtc

SEQ ID NO: 645479 - DNA, 120 bp, Artificial Sequence
  ENSG00000182310_28 (sequence is synthesized)
caggcccccagcccctcctccctcagatccaagagtccagacccccaagtttctcttccttcagacccaaaagcccaggccccctgccccctcctccctcagaaccaggagtccgggccc

SEQ ID NO: 645480 - DNA, 120 bp, Artificial Sequence
  ENSG00000182315_0 (sequence is synthesized)
tcaagagtggggtcagcaagagaaactctacggctatgggagagcctgcgttcacctcttttccgagcccacctgttctggggaagctcaaaagaaacatgatgccctgggctttacaga

SEQ ID NO: 645481 - DNA, 120 bp, Artificial Sequence
  ENSG00000182315_1 (sequence is synthesized)
agaaacgagaaatccacatggccaaggcccatcggagacgagctgcgaggtctgctctccccatgagactcaccagctgcatcttccggaggccggtgacaaggatcaggtctcatcctg

SEQ ID NO: 645482 - DNA, 120 bp, Artificial Sequence
  ENSG00000182315_2 (sequence is synthesized)
acaaccaggtcagacgcagaaaaggggacgagcacctggagaagccgcagcaactctgcgcctaccggagactgcaggccctgcagccctgcagcagccaaggagaaggttcaagtccac

SEQ ID NO: 645483 - DNA, 120 bp, Artificial Sequence
  ENSG00000182315_3 (sequence is synthesized)
ggacagggctggtgctgagcgtgtgcgcagcccgcttgagcccacccctgggcggtttccagctgtggcaggggggccaaccccaggaatgggttgtcagctcccaccgcccctctctgg

SEQ ID NO: 645484 - DNA, 120 bp, Artificial Sequence
  ENSG00000182315_4 (sequence is synthesized)
ccaattggtgactcctgcagatatccggagacaggccaggagggtgaagaaagccagggagagactggccaaggccttgcaggcagacaggctggccaggcaggcagaaatgctgacatg

SEQ ID NO: 645485 - DNA, 120 bp, Artificial Sequence
  ENSG00000182315_5 (sequence is synthesized)
tagatgaagcgcagtcctgggctttcggtccctttcttttaatgcccatcctcattcctactctgaattgtcacacttttcccttccccaccagttctttaataaaagtatttgaaaggc

SEQ ID NO: 645486 - DNA, 120 bp, Artificial Sequence
  ENSG00000182318_0 (sequence is synthesized)
gtagtcctggcgggcgtgggcccttgaggtgtgctgggagctgtggtccgggtcggcgggcgcgcaagttggctagtctctgcggccacctccggaagggtccgccggctgtgctggtga

SEQ ID NO: 645487 - DNA, 120 bp, Artificial Sequence
  ENSG00000182318_1 (sequence is synthesized)
ggcccagttccaaggctccggcatcctgtgtctcactgagcactgctgcccgatggccatccccaagcactccctgagcccagtgccgtgggaagaggacagcttccttcaagtgaaggt

SEQ ID NO: 645488 - DNA, 120 bp, Artificial Sequence
  ENSG00000182318_2 (sequence is synthesized)
ggaggaggaagaggaagccagcctctcccagggcggagaatccagccatgaccacattgctcactctgaggctgcacgcctgcgcttccggcacttccgctatgaggaggcatctggtcc

SEQ ID NO: 645489 - DNA, 120 bp, Artificial Sequence
  ENSG00000182318_3 (sequence is synthesized)
acacgaggccctggcccacctccgagcgctgtgctgtcagtggctgcagcccgaggcgcactccaaggagcagatactggagctgctggtgctggagcagttcctgggtgcgctgccccc

SEQ ID NO: 645490 - DNA, 120 bp, Artificial Sequence
  ENSG00000182318_4 (sequence is synthesized)
agagatccaagcctgggtgggagcccagagtcccaagagcggagaggaagccgctgtgctggtggaggatctgactcaggtgctggacaagagaggatgggatccaggagccgagcccac

SEQ ID NO: 645491 - DNA, 120 bp, Artificial Sequence
  ENSG00000182318_5 (sequence is synthesized)
agaggcaagctgcaagcagagtgacctgggagagtcagagccatcaaatgtcactgagaccctcatgggaggtgtttcccttggacccgcctttgtcaaggcatgtgaacctgagggcag

SEQ ID NO: 645492 - DNA, 120 bp, Artificial Sequence
  ENSG00000182318_6 (sequence is synthesized)
ctcagagaggtctggactatcaggggagatctggacaaagtctgtcacccaacagatccacttcaagaaaacttcagggccttacaaggatgtccccacagaccagcgtggccgtgaatc

SEQ ID NO: 645493 - DNA, 120 bp, Artificial Sequence
  ENSG00000182318_7 (sequence is synthesized)
tggtgcctcgaggaacagttctagtgcgtggccaaacctcacctcccaagagaagcctccttcagaagacaaatttgatctggtggatgcttatgggacagagcctccatacacctactc

SEQ ID NO: 645494 - DNA, 120 bp, Artificial Sequence
  ENSG00000182318_8 (sequence is synthesized)
agggaagaggtcctccaagtgtcgcgagtgtaggaagatgttccagagtgcttcggcgctcgaggcacaccagaagacccattctcggaagaccccatatgcctgcagcgagtgtgggaa

SEQ ID NO: 645495 - DNA, 120 bp, Artificial Sequence
  ENSG00000182318_9 (sequence is synthesized)
agccttcagccggagcactcacctcgcccagcaccaggttgtccacacaggggcgaagccccatgagtgtaaggaatgtgggaaggccttcagccgagtcacccacctgactcagcacca

SEQ ID NO: 645496 - DNA, 120 bp, Artificial Sequence
  ENSG00000182318_10 (sequence is synthesized)
atactggagagaaaccctacaaatgtggggaatgtggtaaaaccttcagccgcagcactcacctcacccagcaccagcgggtgcacacgggggagcggccctacgagtgtgacgcgtgtg

SEQ ID NO: 645497 - DNA, 120 bp, Artificial Sequence
  ENSG00000182318_11 (sequence is synthesized)
cgcgtgtgggaaagccttcagccagagcacgcacctgactcaacaccagcgcatccacaccggggagaagccctacaagtgtgacgcgtgtggccgagccttcagcgactgctcagccct

SEQ ID NO: 645498 - DNA, 120 bp, Artificial Sequence
  ENSG00000182318_12 (sequence is synthesized)
gatccgacatctgagaatccactctggagagaagccatatcagtgtaaggtttgtccgaaggcctttgcacagagctcctccctcattgagcaccagaggatccacacgggagagaagcc

SEQ ID NO: 645499 - DNA, 120 bp, Artificial Sequence
  ENSG00000182318_13 (sequence is synthesized)
ttataagtgcagcgactgtgggaaggccttcagtcgtagctcagccctgatggttcacttgcggatccacatcacggtgctgcaatgaccggaagtcgcccctgggggcgtagcacagcg

SEQ ID NO: 645500 - DNA, 120 bp, Artificial Sequence
  ENSG00000182318_14 (sequence is synthesized)
tcttctcggaggctcgaggtctaagagaaacgctgagttcctgaagagccacagacagggtgggtgattgatgagttgtcaaaatgataggtgcctgagggcagactcgggctgtctagg

SEQ ID NO: 645501 - DNA, 120 bp, Artificial Sequence
  ENSG00000182318_15 (sequence is synthesized)
aaccactctgcatttgaggaaccctgatgagcacaaggtgattcaggccagctggagaagcttccagaagggccctgcactgctaccctctatttcccactcagggctgtcccagagaga

SEQ ID NO: 645502 - DNA, 120 bp, Artificial Sequence
  ENSG00000182318_16 (sequence is synthesized)
aggcagccgaactgaggatttagactggttctgagggccagggcaaatgaaggcgcatgtctctcagaactcagcgtcccaagacgctctgggcgggccaactgtagcttgttctcatgt

SEQ ID NO: 645503 - DNA, 120 bp, Artificial Sequence
  ENSG00000182318_17 (sequence is synthesized)
ggttcttcttgcctgcttttctgctgcttagcccagaacggacacctgccatgcccacctctgtgccttggcacctactatttccactccagactattttgtgcctaactgcaaggctga

SEQ ID NO: 645504 - DNA, 120 bp, Artificial Sequence
  ENSG00000182318_18 (sequence is synthesized)
cttttgagactgcctcttccacgatgccttttctacactctgcctctctcatggtttcctgtcgtaatcagtggtgctgcttgacacctgcccagcatgttcctgtctctccttttcctt

SEQ ID NO: 645505 - DNA, 120 bp, Artificial Sequence
  ENSG00000182318_19 (sequence is synthesized)
attgcctcttgcctggattatagccggggtctccttcctgaccacttcctgcctttattctctgcccctgtatcactctccaggggactcttgatattacttagatctgactgtgtcact

SEQ ID NO: 645506 - DNA, 120 bp, Artificial Sequence
  ENSG00000182318_20 (sequence is synthesized)
ccaaggtggaaagctctccaacccatcttctacagcacagcttcctgaacagggtataagtatgctgagatgcaggctgctctgggccccgagcaacctctccagttatcctcatatgca

SEQ ID NO: 645507 - DNA, 120 bp, Artificial Sequence
  ENSG00000182318_21 (sequence is synthesized)
tgtatgaatactgtcatttttctgtgcgtgcagtgaaaatggcctcatctcataccatggctccaccttccatacaccagccacacggaactactgtggtccctgaaggagccatacatt

SEQ ID NO: 645508 - DNA, 83 bp, Artificial Sequence
  ENSG00000182318_22 (sequence is synthesized)
ccacacggaactactgtggtccctgaaggagccatacattttcccacttatgtgcctttgtacctgtgcctggaaccctcctc

SEQ ID NO: 645509 - DNA, 120 bp, Artificial Sequence
  ENSG00000182318_23 (sequence is synthesized)
cgcacctggccctcctttttcatctaaggtgtttcaaatgttgcccaaagaaacctccctgctctccgggagcagacttcagcttgccctctctgcttccagagcacctcctagatacct

SEQ ID NO: 645510 - DNA, 120 bp, Artificial Sequence
  ENSG00000182318_24 (sequence is synthesized)
ctcttacaactcctgccaccttgttttacttatttgctccttgtagagctgccttttccaaggataccataaactcctgagagcaggggccatgtcttactctcagtatctacaacacac

SEQ ID NO: 645511 - DNA, 120 bp, Artificial Sequence
  ENSG00000182318_25 (sequence is synthesized)
aagactcagtaggccctgactgatgtctcttacatgaatgtgactggtgcccccaggaggcagtcaccgtgctgtctctgccccacattgtccttatgtatgtttacatggatgtctccc

SEQ ID NO: 645512 - DNA, 120 bp, Artificial Sequence
  ENSG00000182318_26 (sequence is synthesized)
cagcagcttgaaccctggagagcaagaataatctgattttcctgggggccagcacccaaataagcctggcatgcagtggcctcaataaaatgtgactgtattgagtcattttctagggcc

SEQ ID NO: 645513 - DNA, 120 bp, Artificial Sequence
  ENSG00000182318_27 (sequence is synthesized)
ccagatcccctggtgtcatggacttagtctttgccagcattctgtccatgtgttctctggtcttctctcacaatgctgcatccctgtcccatttttagggtccctgtctatcactggatg

SEQ ID NO: 645514 - DNA, 120 bp, Artificial Sequence
  ENSG00000182318_28 (sequence is synthesized)
ctgcagcttctgttcattactgttagtgtatcattcttcatgcctctgtttctgtgatggtctcatcatatgtgaaccatttgacctggcgtattgtgtactagtcaccgtcaccatctc

SEQ ID NO: 645515 - DNA, 120 bp, Artificial Sequence
  ENSG00000182318_29 (sequence is synthesized)
tccatatgtatctccctgtatttcgggcccattccctctatgtcaagagtaaatagaggcacagagactgatgagaaacgttcataacatgaaggtaagactcagggagacagagacttt

SEQ ID NO: 645516 - DNA, 120 bp, Artificial Sequence
  ENSG00000182318_30 (sequence is synthesized)
gtggaagtatctctgagggagtcccagacacaggcagagagggccacatatcgtgtgccagaggctgagagactgagagggatgacaggcttaggggaaaactcagagaggagagatgca

SEQ ID NO: 645517 - DNA, 120 bp, Artificial Sequence
  ENSG00000182318_31 (sequence is synthesized)
cattcctagtgaaattgcacaggcttccagcatgctggagggaacagaaaaggcatgggcctgaattcaggctgcagagcctgactcctccctgtggctacttttgggacctaagataag

SEQ ID NO: 645518 - DNA, 120 bp, Artificial Sequence
  ENSG00000182318_32 (sequence is synthesized)
tgactttcctgaacctccatgacctcctcatatgtaaaccagggacaggacccaccttgtgtagtgcctgacccaaagcctggccctgcacactgtctctgactcacagcaatcatcagc

SEQ ID NO: 645519 - DNA, 120 bp, Artificial Sequence
  ENSG00000182318_33 (sequence is synthesized)
acctctctttgcctcctacttgctcagtctctgtcacaagaactggatctccatccccttgatgctctgagcatcttcacccatttggtcgttgagacatatctgtccatgtctgtctaa

SEQ ID NO: 645520 - DNA, 120 bp, Artificial Sequence
  ENSG00000182318_34 (sequence is synthesized)
aaggggaggagatgagggagaaaaaagggaatctactcagagcctgtgtgtgctgcccagtctaccaaataatttatatacatctcagtcctcacacaaccatccctgttttatagagga

SEQ ID NO: 645521 - DNA, 120 bp, Artificial Sequence
  ENSG00000182318_35 (sequence is synthesized)
ggaagtggcttagagaatgtaactgaccaaagtcacactgccaggaactggaagcactaggatttgacagcatatccaaatatgtcagcaatttcaataaacatgactgtactcaacaaa

SEQ ID NO: 645522 - DNA, 120 bp, Artificial Sequence
  ENSG00000182324_0 (sequence is synthesized)
gtcaggtggaggatccctttccctcccgccctgcttttgctaggggaggggggtgccctgagcctgagtcgcagccagcctgggagctgggccatgttggccgcagatggccccctggtg

SEQ ID NO: 645523 - DNA, 120 bp, Artificial Sequence
  ENSG00000182324_1 (sequence is synthesized)
aaggttcccgttggctttgggaagtagacaacgggtctgcctcacggggctgaggtgggactggaggatttcgagggcagaactctgggaaggaaagaaaggcttaggacccaaccagca

SEQ ID NO: 645524 - DNA, 120 bp, Artificial Sequence
  ENSG00000182324_2 (sequence is synthesized)
ttccccctggcactgcgggggcctggccagctcatggcgttccctgagcctgttccccaactgtgaaagggggtgatgatcttcacctcccggcatcctgagcggccaagcaggttgggg

SEQ ID NO: 645525 - DNA, 120 bp, Artificial Sequence
  ENSG00000182324_3 (sequence is synthesized)
gcgcctgccccccactaggccaagtggagggggtccctccgtccaatgggcctggccagggccctacgccgcctcagcggcgccctggattcgggagacagccgggcgggcgatgaagag

SEQ ID NO: 645526 - DNA, 120 bp, Artificial Sequence
  ENSG00000182324_4 (sequence is synthesized)
gaggccgggcccgggttgtgccgcaacgggtgggcgccggcaccggtgcagtcacccgtgggccggcgccgcggtcgcttcgtcaagaaagacgggcactgcaacgtgcgtttcgtaaac

SEQ ID NO: 645527 - DNA, 120 bp, Artificial Sequence
  ENSG00000182324_5 (sequence is synthesized)
ctgggtggccagggcgcgcgctacctgagcgacctgttcaccacatgcgtggacgtgcgctggcgctggatgtgcctgctcttctcctgctccttcctcgcctcctggctgctcttcggc

SEQ ID NO: 645528 - DNA, 120 bp, Artificial Sequence
  ENSG00000182324_6 (sequence is synthesized)
ctggccttctggctcattgcctcgctgcacggcgacctggccgccccgccaccgcccgcgccctgcttctcacacgtggccagcttcctggccgccttcctcttcgcgctggagacgcag

SEQ ID NO: 645529 - DNA, 120 bp, Artificial Sequence
  ENSG00000182324_7 (sequence is synthesized)
acgtccatcggctacggcgtgcgcagcgtcaccgaggagtgcccggccgctgtggccgccgtggtgctgcagtgcattgccggctgcgtgctcgacgccttcgtcgtgggtgctgtcatg

SEQ ID NO: 645530 - DNA, 120 bp, Artificial Sequence
  ENSG00000182324_8 (sequence is synthesized)
gccaagatggccaaacccaagaagcgcaacgagacgctggtcttcagcgagaacgccgtcgtggcgctgcgcgaccaccgcctctgcctcatgtggcgcgtcggcaacctgcgccgcagc

SEQ ID NO: 645531 - DNA, 120 bp, Artificial Sequence
  ENSG00000182324_9 (sequence is synthesized)
cacctggtcgaggcccacgtgcgtgcccagctgctgcagccccgtgtgaccccagagggtgagtacatcccgctggaccaccaggatgtggatgtgggctttgatggaggcaccgatcgt

SEQ ID NO: 645532 - DNA, 120 bp, Artificial Sequence
  ENSG00000182324_10 (sequence is synthesized)
atcttcctcgtgtcccccatcaccatcgtccatgagatcgactctgccagtcctctgtatgagctaggacgtgccgagctggccagggctgactttgagctggtggtcattctcgagggg

SEQ ID NO: 645533 - DNA, 120 bp, Artificial Sequence
  ENSG00000182324_11 (sequence is synthesized)
atggttgaggccacagccatgaccacacagtgtcgctcgtcctacctccctggtgaactgctctggggccatcgttttgagccagttctcttccagcgtggctcccagtatgaggtcgac

SEQ ID NO: 645534 - DNA, 120 bp, Artificial Sequence
  ENSG00000182324_12 (sequence is synthesized)
ggcttcccacagcctcaagtctagtttccccggctctctgactgcattttgttatgagaatgaacttgctctgagctgctgccaggaggaagatgaggacgatgagactgaggaagggaa

SEQ ID NO: 645535 - DNA, 120 bp, Artificial Sequence
  ENSG00000182324_13 (sequence is synthesized)
tggggtggaaacagaagatggggctgctagcccccgagttctcacaccaaccctggcgctgaccctgcctccatgatgcaaactgatgtccccttccccgtgtatgcccccttccccaag

SEQ ID NO: 645536 - DNA, 120 bp, Artificial Sequence
  ENSG00000182324_14 (sequence is synthesized)
gtagcaagatggagggatggggctctctcctgggatgggggcaggtgttcctgaataccgacaggcctgctgggtaaatgactaggtggtaaggttctgccatgcctggtgacccaccat

SEQ ID NO: 645537 - DNA, 120 bp, Artificial Sequence
  ENSG00000182324_15 (sequence is synthesized)
ggacatactggaccttaattcctctgcttctgtgctccctcctgagaaccctttatgagcctgattcctcagtctcaccagaattctggatcacccaagaggaaaagactggcagttcta

SEQ ID NO: 645538 - DNA, 120 bp, Artificial Sequence
  ENSG00000182324_16 (sequence is synthesized)
gattcctctatatggggagacctggattgttgaccagggtgagaagccaatggtatagactgcctctggggaagcaagttggcagttcttgaacagcatcagatatcaagagtttgtagg

SEQ ID NO: 645539 - DNA, 120 bp, Artificial Sequence
  ENSG00000182324_17 (sequence is synthesized)
tctggattcacctaagattcaagggagtgttgcttctcaactcagccaactgagtagcaaatcatttgttctagaccacctaaggagggaaggttatggaatgccccaagtattcaagat

SEQ ID NO: 645540 - DNA, 120 bp, Artificial Sequence
  ENSG00000182324_18 (sequence is synthesized)
catcttgattgaccaaagaccaaaaaaaaaaaaaagacctgtggttccagaaagctcattagttgagattctgtgagtctaggttgaccacagaggcaagcactggtgagtctaggacag

SEQ ID NO: 645541 - DNA, 120 bp, Artificial Sequence
  ENSG00000182324_19 (sequence is synthesized)
attttacgtggagagttgaactactccagaaactaaagagtaatgtttctagaatgcacaaaacattgttagtctgtgggtttagaaagactgaagtgacagattaagagttcttgatat

SEQ ID NO: 645542 - DNA, 120 bp, Artificial Sequence
  ENSG00000182324_20 (sequence is synthesized)
tagataactccaacttctggctgtagagcacccagccaagagaataagcagtgctttgaaaggatccactgggtgggttgtttttttttaaagtgccattctagaatgtccaaagggaat

SEQ ID NO: 645543 - DNA, 120 bp, Artificial Sequence
  ENSG00000182324_21 (sequence is synthesized)
caggattctgtggctgtagactgatcacagagtcaaggaagcagtggcaattctagatatctgagattttgctggttccagtttgcccaatggagttgagaatctcaatgattctagatg

SEQ ID NO: 645544 - DNA, 120 bp, Artificial Sequence
  ENSG00000182324_22 (sequence is synthesized)
acttcttgtggttctgtaatgccaaaaggaatgaaggctccagggatacagagttgtccattaccaaagcctggaagttctcatcacctccaggtggactgcttggcagtgctaggaggt

SEQ ID NO: 645545 - DNA, 120 bp, Artificial Sequence
  ENSG00000182324_23 (sequence is synthesized)
ggactcaggacttcagaagcaacatttctggcctgacctggaaggtgaaggtgaaggtgagaccctgtagggcacagggctaattagtggacaagggaagggggaggcccagggctggtg

SEQ ID NO: 645546 - DNA, 79 bp, Artificial Sequence
  ENSG00000182324_24 (sequence is synthesized)
ggcagaggttgcagtgagctgaggttgcggtgagctgagattgtgccgctgcactccagcctggcgacaaagcactaaa

SEQ ID NO: 645547 - DNA, 85 bp, Artificial Sequence
  ENSG00000182324_25 (sequence is synthesized)
aaaaaaaaagaaaagaaaagaaaaaagttaaaaaaaaaattacccaggagtggtggtgtgcacctgtagtagcttaaacttggga

SEQ ID NO: 645548 - DNA, 120 bp, Artificial Sequence
  ENSG00000182324_26 (sequence is synthesized)
ctccaaaaaaaaaaaaaaaaaaaaaatgcgtatcgttccacctatttgacagatgaggccactaagccccaccagaaagcatgcttggccgatgagctcatccattcctgttgcccctga

SEQ ID NO: 645549 - DNA, 120 bp, Artificial Sequence
  ENSG00000182324_27 (sequence is synthesized)
tgtgtctgtttcttaaagatattatacatatgtatattatatatatgtaatataaatacagatatctatctattttttcccttggtccctacaacaggcttagagatggagtgctagcta

SEQ ID NO: 645550 - DNA, 120 bp, Artificial Sequence
  ENSG00000182324_28 (sequence is synthesized)
attggaatgaggtccttttcaaggaccccagaagctttgctctaaatcccaatgctgccccaacttactgtgtcactttggactcctcttcatgtcagtttccccatctgtaaaaacggg

SEQ ID NO: 645551 - DNA, 120 bp, Artificial Sequence
  ENSG00000182324_29 (sequence is synthesized)
atattggaacttgaagttcttcaggggcctttccagcaggatgagtcctcactacaccaagggtgggatgggcattcgagtcctggggatttccctcctctccccagtgctggatcatac

SEQ ID NO: 645552 - DNA, 120 bp, Artificial Sequence
  ENSG00000182324_30 (sequence is synthesized)
ggccttccaggagacgctgggatgtaagatactcttggaggctggctctgaactcgggtgtctgaatcacagggcaagggtaggcgtgggctgtggctaacagccagagtcacttccctg

SEQ ID NO: 645553 - DNA, 120 bp, Artificial Sequence
  ENSG00000182324_31 (sequence is synthesized)
gcctagcttggggacctggggaggaggaggtagctctggacaccagggttcttcccattgtgggagagtgagtgttttagggggagacctgtcccccagattaaagaactgggagcccta

SEQ ID NO: 645554 - DNA, 120 bp, Artificial Sequence
  ENSG00000182325_0 (sequence is synthesized)
agcctcccggcaggtccgacgcagagcccgggcagcgccgcggccccgctcggccgaggactggtggtgggaccggctggcgccgaggggctcggggtaccacctgctgcagtccgacag

SEQ ID NO: 645555 - DNA, 120 bp, Artificial Sequence
  ENSG00000182325_1 (sequence is synthesized)
gaggggctcggggtaccacctgctgcagtccgacagcatgctgctggtgctgtccgaacccggccccgcccggccccgcgcacagcggcgcgcttcccgccgcactccccggcagccgcc

SEQ ID NO: 645556 - DNA, 120 bp, Artificial Sequence
  ENSG00000182325_2 (sequence is synthesized)
gcccaaggccgggctcaggtccgaggcggcggccgcgcccgcacccgcaccggcacccacgcccacgcccgaggaagggcccgacgcgggctggggagaccgcattcccttggaaatcct

SEQ ID NO: 645557 - DNA, 120 bp, Artificial Sequence
  ENSG00000182325_3 (sequence is synthesized)
agaccgcattcccttggaaatcctggtgcagattttcgggttgttggtggcggcggacggccccatgcccttcctgggcagggctgcgcgcgtgtgccgccgctggcaggaggccgcttc

SEQ ID NO: 645558 - DNA, 120 bp, Artificial Sequence
  ENSG00000182325_4 (sequence is synthesized)
ccaacccgcgctctggcacaccgtgaccctgtcgtccccgctggtcggccggcctgccaagggcggggtcaaggcggagaagaagctccttgcttccctggagtggcttatgcccaatcg

SEQ ID NO: 645559 - DNA, 120 bp, Artificial Sequence
  ENSG00000182325_5 (sequence is synthesized)
gttttcacagctccagaggctgaccctcatccactggaagtctcaggtacaccccgtgttgaagctggtaggtgagtgctgtcctcggctcactttcctcaagctctccggctgccacgg

SEQ ID NO: 645560 - DNA, 120 bp, Artificial Sequence
  ENSG00000182325_6 (sequence is synthesized)
tgtgactgctgacgctctggtcatgctagccaaagcctgctgccagctccatagcctggacctacagcactccatggtggagtccacagctgtggtgagcttcttggaggaggcagggtc

SEQ ID NO: 645561 - DNA, 120 bp, Artificial Sequence
  ENSG00000182325_7 (sequence is synthesized)
gcagctgctgcccccagctccaggtcctggaggtgagcaccggcatcaaccgtaatagcattccccttcagctgcctgtcgaggctctgcagaaaggctgccctcagctccaggtgctgc

SEQ ID NO: 645562 - DNA, 120 bp, Artificial Sequence
  ENSG00000182325_8 (sequence is synthesized)
ggctgttgaacctgatgtggctgcccaagcctccgggacgaggggtggctcccggaccaggcttccctagcctagaggagctctgcctggcgagctcaacctgcaactttgtgagcaacg

SEQ ID NO: 645563 - DNA, 120 bp, Artificial Sequence
  ENSG00000182325_9 (sequence is synthesized)
aggtcctgggccgcctactccacggctctcccaacctgcgcttactggatcttcgtggctgtgcgcgcatcacgccggctggccttcaggatctgccatgtcgggagctggagcagcttc

SEQ ID NO: 645564 - DNA, 120 bp, Artificial Sequence
  ENSG00000182325_10 (sequence is synthesized)
atctgggcctgtatggcacgtcagaccggctgactctagccaaggagggcagcccctttttgacccagaagtggtgccatacactgcgagaactggacttgagtggccaggggttcagtg

SEQ ID NO: 645565 - DNA, 120 bp, Artificial Sequence
  ENSG00000182325_11 (sequence is synthesized)
agaaggacctggagcaggccctggctgccttcttaagcacccctgggggctcacacccagccctgtgctctcttaacctcaggggcacccgggtcacaccaagcactgtcagctctgtga

SEQ ID NO: 645566 - DNA, 120 bp, Artificial Sequence
  ENSG00000182325_12 (sequence is synthesized)
tcagcggctgcccgggcctgctctacctcaacctggagtcctgccgctgccttccccggggtctgaagcgggcctaccggggcctggaggaagtccagtggtgtctggagcagctgctca

SEQ ID NO: 645567 - DNA, 120 bp, Artificial Sequence
  ENSG00000182325_13 (sequence is synthesized)
ccagcccctcacccagctaggcagccacagacctgggacacctcagccagcttgcccaccctccacctttgcccaatttcagatatttgagcattttgttaaaataaaacatttttagga

SEQ ID NO: 645568 - DNA, 120 bp, Artificial Sequence
  ENSG00000182325_14 (sequence is synthesized)
ttgaccgcagcccaggagcccatgccgaagagagccaccagcagggccagacacgctttggctctcctgggaagtgaagacttcttctagcttgaaagaaacagagaaacagataggatg

SEQ ID NO: 645569 - DNA, 120 bp, Artificial Sequence
  ENSG00000182325_15 (sequence is synthesized)
cagagccggagtcagaacagggtgagaccaggggaactgggggagccccgggcaggagcgcagatggggaggattggctaaaacgtacccagcgggaccgccggcaggcagggaagcagg

SEQ ID NO: 645570 - DNA, 120 bp, Artificial Sequence
  ENSG00000182325_16 (sequence is synthesized)
aagccggcccgagtcgctgcggccccaggggaggaggccgaaggagcgagtggagccctcctctccagggagaggcggggctggagtcaacgccaccaccaccccaagccggacgccggg

SEQ ID NO: 645571 - DNA, 120 bp, Artificial Sequence
  ENSG00000182325_17 (sequence is synthesized)
aaagggcgcctaccaggaggagccacgcacaccccagggcttcacggtgcccgcgaccgcaagagccaagtcagatcccaggggagtggccgggacggctctgctcggaggggcgccgcc

SEQ ID NO: 645572 - DNA, 120 bp, Artificial Sequence
  ENSG00000182325_18 (sequence is synthesized)
ctctcggtaccgtcaggtgggcgactcgggagccgtccggtccctgcgcctcccggtcccgcgcccagtgcgctcccgctccagtgccggcttcccgccacgccgggacaccgccgtccg

SEQ ID NO: 645573 - DNA, 120 bp, Artificial Sequence
  ENSG00000182325_19 (sequence is synthesized)
tccggcccagggacgccacctcagtccggagcgcgcaggacccggcagcagccacgacccgactcacccgtggcggttccgggcccgcccccggcatggcccacgaccggaagtcccgcc

SEQ ID NO: 645574 - DNA, 120 bp, Artificial Sequence
  ENSG00000182325_20 (sequence is synthesized)
ggagggcgaaagcatcggagcgcgcaccgctcagtccgagagcgcagccccttaggcgcccagttggagtcccaggagcccggctttgagccggggtgtctactgcgctgcgagaggggg

SEQ ID NO: 645575 - DNA, 120 bp, Artificial Sequence
  ENSG00000182325_21 (sequence is synthesized)
accctcatccactggaagtctcaggtacaccccgtgttgaaggtgagagctccaggctgtcctgcacatcagctgtgacactctgggactgttcagtactctaggaagtgggtcaggcac

SEQ ID NO: 645576 - DNA, 120 bp, Artificial Sequence
  ENSG00000182325_22 (sequence is synthesized)
cttgggggcccaacgctgctccgtggggatgtctgcctgcctgcctggttctcttttcctgctgtttcctccagcagggaggtatcagaggcggggacacccaagtaggcctggcatggg

SEQ ID NO: 645577 - DNA, 120 bp, Artificial Sequence
  ENSG00000182325_23 (sequence is synthesized)
cagaaaggaggtcacagctaaggcggtagagtggggttggcaccagccacttgtctgtttcccttgtggatcttagcctgtcgtctcccaaccccagctgcccctctgtctccccgcagc

SEQ ID NO: 645578 - DNA, 120 bp, Artificial Sequence
  ENSG00000182325_24 (sequence is synthesized)
ctcttccttacccctggctccaggctccttccgtctccctgcaccaaggtgttgggtgggaaggactcgtgtgggaacattagtgcagctctgcctccgctgtcggcccaggttttcaca

SEQ ID NO: 645579 - DNA, 120 bp, Artificial Sequence
  ENSG00000182326_0 (sequence is synthesized)
attaagcaatcggtgaaattccccattcctcctttccccgctggagccctggatagagggctctctggcctgggaggaggacgctgtccttgtttcaaaagcagagggagctccaagatc

SEQ ID NO: 645580 - DNA, 120 bp, Artificial Sequence
  ENSG00000182326_1 (sequence is synthesized)
aaggctgagtttccctaagtcatggtctcccagccccctctgtttagatcagggaatttcagacatgcacactcgggtagggaatcttatgaacagaaccaggacagggaggctggccgg

SEQ ID NO: 645581 - DNA, 120 bp, Artificial Sequence
  ENSG00000182326_2 (sequence is synthesized)
aggttcctgcagagggagcgtcaaggccctgtgctgctgtccctgggggccagaggggttgcccagcatgcccactggcaggagagagggaactgacccacttgctcctaccagcttctg

SEQ ID NO: 645582 - DNA, 120 bp, Artificial Sequence
  ENSG00000182326_3 (sequence is synthesized)
aaggtgacactgagccccaggtgacgccgcaccaccaaagaaggtgcttgtgtttgtcagacaaatacagccaggcctgccaccccttaggctccaaagtccggaggtgcagaaagccag

SEQ ID NO: 645583 - DNA, 120 bp, Artificial Sequence
  ENSG00000182326_4 (sequence is synthesized)
gaccaagagacaggcagctcaccagggtggacaaatcgccagagatgtggtgcattgtcctgttttcacttttggcatgggtttatgctgagcctaccatgtatggggagatcctgtccc

SEQ ID NO: 645584 - DNA, 120 bp, Artificial Sequence
  ENSG00000182326_5 (sequence is synthesized)
ctaactatcctcaggcatatcccagtgaggtagagaaatcttgggacatagaagttcctgaagggtatgggattcacctctacttcacccatctggacattgagctgtcagagaactgtg

SEQ ID NO: 645585 - DNA, 120 bp, Artificial Sequence
  ENSG00000182326_6 (sequence is synthesized)
cgtatgactcagtgcagataatctcaggagacactgaagaagggaggctctgtggacagaggagcagtaacaatccccactctccaattgtggaagagttccaagtcccatacaacaaac

SEQ ID NO: 645586 - DNA, 120 bp, Artificial Sequence
  ENSG00000182326_7 (sequence is synthesized)
tccaggtgatctttaagtcagacttttccaatgaagagcgttttacggggtttgctgcatactatgttgccacagacataaatgaatgcacagattttgtagatgtcccttgtagccact

SEQ ID NO: 645587 - DNA, 120 bp, Artificial Sequence
  ENSG00000182326_8 (sequence is synthesized)
tctgcaacaatttcattggtggttacttctgctcctgccccccggaatatttcctccatgatgacatgaagaattgcggagttaattgcagtggggatgtattcactgcactgattgggg

SEQ ID NO: 645588 - DNA, 120 bp, Artificial Sequence
  ENSG00000182326_9 (sequence is synthesized)
agattgcaagtcccaattatcccaaaccatatccagagaactcaaggtgtgaataccagatccggttggagaaagggttccaagtggtggtgaccttgcggagagaagattttgatgtgg

SEQ ID NO: 645589 - DNA, 120 bp, Artificial Sequence
  ENSG00000182326_10 (sequence is synthesized)
aagcagctgactcagcgggaaactgccttgacagtttagtttttgttgcaggagatcggcaatttggtccttactgtggtcatggattccctgggcctctaaatattgaaaccaagagta

SEQ ID NO: 645590 - DNA, 120 bp, Artificial Sequence
  ENSG00000182326_11 (sequence is synthesized)
atgctcttgatatcatcttccaaactgatctaacagggcaaaaaaagggctggaaacttcgctatcatggagatccaatgccctgccctaaggaagacactcccaattctgtttgggagc

SEQ ID NO: 645591 - DNA, 120 bp, Artificial Sequence
  ENSG00000182326_12 (sequence is synthesized)
ttctattcgacttgtcaaagcaatggaaagtggagtaattccaaactgaaatgtcaacctgtggactgtggcattcctgaatccattgagaatggtaaagttgaagacccagagagcact

SEQ ID NO: 645592 - DNA, 120 bp, Artificial Sequence
  ENSG00000182326_13 (sequence is synthesized)
ttgtttggttctgtcatccgctacacttgtgaggagccatattactacatggaaaatggaggaggtggggagtatcactgtgctggtaacgggagctgggtgaatgaggtgctgggcccg

SEQ ID NO: 645593 - DNA, 120 bp, Artificial Sequence
  ENSG00000182326_14 (sequence is synthesized)
gagctgccgaaatgtgttccagtctgtggagtccccagagaaccctttgaagaaaaacagaggataattggaggatccgatgcagatattaaaaacttcccctggcaagtcttctttgac

SEQ ID NO: 645594 - DNA, 120 bp, Artificial Sequence
  ENSG00000182326_15 (sequence is synthesized)
aacccatgggctggtggagcgctcattaatgagtactgggtgctgacggctgctcatgttgtggagggaaacagggagccaacaatgtatgttgggtccacctcagtgcagacctcacgg

SEQ ID NO: 645595 - DNA, 120 bp, Artificial Sequence
  ENSG00000182326_16 (sequence is synthesized)
ctggcaaaatccaagatgctcactcctgagcatgtgtttattcatccgggatggaagctgctggaagtcccagaaggacgaaccaattttgataatgacattgcactggtgcggctgaaa

SEQ ID NO: 645596 - DNA, 120 bp, Artificial Sequence
  ENSG00000182326_17 (sequence is synthesized)
gacccagtgaaaatgggacccaccgtctctcccatctgcctaccaggcacctcttccgactacaacctcatggatggggacctgggactgatctcaggctggggccgaacagagaagaga

SEQ ID NO: 645597 - DNA, 120 bp, Artificial Sequence
  ENSG00000182326_18 (sequence is synthesized)
gatcgtgctgttcgcctcaaggcggcaaggttacctgtagctcctttaagaaaatgcaaagaagtgaaagtggagaaacccacagcagatgcagaggcctatgttttcactcctaacatg

SEQ ID NO: 645598 - DNA, 120 bp, Artificial Sequence
  ENSG00000182326_19 (sequence is synthesized)
atctgtgctggaggagagaagggcatggatagctgtaaaggggacagtggtggggcctttgctgtacaggatcccaatgacaagaccaaattctacgcagctggcctggtgtcctggggg

SEQ ID NO: 645599 - DNA, 120 bp, Artificial Sequence
  ENSG00000182326_20 (sequence is synthesized)
ccccagtgtgggacctatgggctctacacacgggtaaagaactatgttgactggataatgaagactatgcaggaaaatagcaccccccgtgaggactaatccagatacatcccaccagcc

SEQ ID NO: 645600 - DNA, 120 bp, Artificial Sequence
  ENSG00000182326_21 (sequence is synthesized)
tctccaagggtggtgaccaatgcattaccttctgttccttatgatattctcattatttcatcatgactgaaagaagacacgagcgaatgatttaaatagaacttgattgttgagacgcct

SEQ ID NO: 645601 - DNA, 120 bp, Artificial Sequence
  ENSG00000182326_22 (sequence is synthesized)
tgctagaggtagagtttgatcatagaattgtgctggtcatacatttgtggtctgactccttggggtcctttccccggagtacctattgtagataacactatgggtggggcactcctttct

SEQ ID NO: 645602 - DNA, 120 bp, Artificial Sequence
  ENSG00000182326_23 (sequence is synthesized)
tgcactattccacagggataccttaattctttgtttcctctttacctgttcaaaattccatttacttgatcattctcagtatccactgtctatgtacaataaaggatgtttataagcaaa

SEQ ID NO: 645603 - DNA, 120 bp, Artificial Sequence
  ENSG00000182326_24 (sequence is synthesized)
agaaaaataaaaagaatgcagcaggccaggttagcaggaacgttaagacggtgacggagaacagcaaagcctggaagcaagccgccgtggagaaggaagaactgtgctgagtacttcact

SEQ ID NO: 645604 - DNA, 120 bp, Artificial Sequence
  ENSG00000182326_25 (sequence is synthesized)
tgcccaggctggagtgcagcggcacaatcacagctcactgcagtttcaacttcctgggttcaagtgatcctcctgcctgagcctcccaagtagctaggactataggctcctcctggctgt

SEQ ID NO: 645605 - DNA, 120 bp, Artificial Sequence
  ENSG00000182326_26 (sequence is synthesized)
ctgttacactttctcagaccttccttgattatgatgacctcgaagttttgaggagtactgggaaagagtattataggatgccccctactggaatttgtcagatgtttttctcatgattat

SEQ ID NO: 645606 - DNA, 81 bp, Artificial Sequence
  ENSG00000182326_27 (sequence is synthesized)
ccccctactggaatttgtcagatgtttttctcatgattatacagggattatggcttttggggaggaagatctcagaaactc

SEQ ID NO: 645607 - DNA, 120 bp, Artificial Sequence
  ENSG00000182326_28 (sequence is synthesized)
aacaataatttaaaaaacagatagattgttgttctgatagaatcctgagatacttcacttcttcaggaaaatctaaaccagtcaacggttgctagaaatgcctcaacctctagtaatcct

SEQ ID NO: 645608 - DNA, 120 bp, Artificial Sequence
  ENSG00000182326_29 (sequence is synthesized)
ttaactagacctgagactgcagacagcttgcgggtggttagttggtaatgccatatgattttagacatctgctgtattggaatgttaagcatcaggattgaggacaactggacgatttta

SEQ ID NO: 645609 - DNA, 120 bp, Artificial Sequence
  ENSG00000182326_30 (sequence is synthesized)
gtgacctgccagagtccagctcagtgaggtggcagtatcactgtgccgtgggctgccagggccgtggggaacctcctcagccgcactgaagccaggccaactggaaggaaatagaaacgt

SEQ ID NO: 645610 - DNA, 120 bp, Artificial Sequence
  ENSG00000182326_31 (sequence is synthesized)
ctttttcttacccttatggttttggatttaacctcattctcccttcttggtgtttgttcttgacctcagcctctttctactctttgtagacataaatgaatgcacagattttgtagatgt

SEQ ID NO: 645611 - DNA, 120 bp, Artificial Sequence
  ENSG00000182326_32 (sequence is synthesized)
tttagttgtgcgtgatggttgattaataccccacccttaacttacacagagagatctctccctgaagacaaatttttttttcatacagcatctttctctgttgctcaagctggagtgcag

SEQ ID NO: 645612 - DNA, 120 bp, Artificial Sequence
  ENSG00000182326_33 (sequence is synthesized)
gtcatttggctgtcccttttctccttcctcgcacaaccctgtatcagtggggcagcacttccttctcagaccgcttgtcccagggtccctgccttcccctagtgaaagaagctcctgcct

SEQ ID NO: 645613 - DNA, 120 bp, Artificial Sequence
  ENSG00000182326_34 (sequence is synthesized)
aaaaaaaaaaaaattagcccagcgtcatgcgtgtcacctgtggtccctgctactcaaaaggctgaggtggtagaatcacttgagcgcgggaggtcaaggctgcagtgacctgagatcgca

SEQ ID NO: 645614 - DNA, 120 bp, Artificial Sequence
  ENSG00000182326_35 (sequence is synthesized)
caaccactgagaaccaggctcttcactacggctttcatggggccatctgaattggcatctcagcgggtgagagagctgagagatgccagttggggaggatggccacagagaggctggtgt

SEQ ID NO: 645615 - DNA, 120 bp, Artificial Sequence
  ENSG00000182326_36 (sequence is synthesized)
tataagcacaaaaagaatagagatggaagactagggctaaggtagcggaataaggatgtgggagggagtgccacctgtactcacagtgaactggagtcaagtcctagtggcataaatgtt

SEQ ID NO: 645616 - DNA, 120 bp, Artificial Sequence
  ENSG00000182326_37 (sequence is synthesized)
gaggtaaagtaccaccttggcttctccccagtccctggccccagatcaggatgagcggactgaaattgtccagttgtttacccaatgtatgtgtgtgatcaaggtataacacctttccca

SEQ ID NO: 645617 - DNA, 120 bp, Artificial Sequence
  ENSG00000182326_38 (sequence is synthesized)
taaacacaacagcttaagatctgtagttctcccttgtgagtcatggagctgcctggccagcttggcattctctctgccttcagtcttcttgaggaaggggagttgacacgttggggcaaa

SEQ ID NO: 645618 - DNA, 120 bp, Artificial Sequence
  ENSG00000182326_39 (sequence is synthesized)
gctttctgtcagcctcatctcctgggtgctttaggtctgctaagatgttcccaagcttcttgtggtgaggactcctcattgatccaaggccagagatcaattccagttttgattttggtt

SEQ ID NO: 645619 - DNA, 120 bp, Artificial Sequence
  ENSG00000182326_40 (sequence is synthesized)
agacagggctgcttgaggagatgaggtgatcacggttaaagaagaggggctgtcctacatggatgatcatgatgcgccaagactgttgaaaacctgagtggaaatgggagcatcgttctt

SEQ ID NO: 645620 - DNA, 120 bp, Artificial Sequence
  ENSG00000182326_41 (sequence is synthesized)
gagggcaggagagagactgataccgcgggggtggggctggtggaggacaatagaggaagaagaaaactgggagaaagtactcgattcctttggagaaaaattaggagaaagtctagagaa

SEQ ID NO: 645621 - DNA, 120 bp, Artificial Sequence
  ENSG00000182326_42 (sequence is synthesized)
gcaatgagggaaggatacaatttagctatagtctagaaagttagtcgaagttaactagggagggtgtgaggggcacggtgccatgtggggatgttggtgatatggccctgtgtgttatac

SEQ ID NO: 645622 - DNA, 74 bp, Artificial Sequence
  ENSG00000182326_43 (sequence is synthesized)
aacttgcttgaaaacggtgacagagtgaggctatgtcacttacacacacacacccccgagcttccttatagctg

SEQ ID NO: 645623 - DNA, 120 bp, Artificial Sequence
  ENSG00000182326_44 (sequence is synthesized)
gtcacttacacacacacacccccgagcttccttatagctgtgtagtggtagggctcaactctggaatcatatgtcaggagagtaatatggaataatagtagcctgaaatgtgatcccttg

SEQ ID NO: 645624 - DNA, 120 bp, Artificial Sequence
  ENSG00000182326_45 (sequence is synthesized)
atcttgggacatagaagttcctgaagggtatgggattcacctctacttcacccatctggacattgagctgtcagagaactacataaatgaatgcacagattttgtagatgtcccttgtag

SEQ ID NO: 645625 - DNA, 120 bp, Artificial Sequence
  ENSG00000182327_0 (sequence is synthesized)
acggactggctaggcgctggtgagggggcggcggtcccagcagcaggcatgggagtggcggcgcggcccccagccctgcggcactggttcagccactcaattcctctcgctatcttcgcg

SEQ ID NO: 645626 - DNA, 120 bp, Artificial Sequence
  ENSG00000182327_1 (sequence is synthesized)
ctgctgctgctttatctcagtgttcggagcctaggcgcccgctcgggctgcggacccagggcgcagccctgcgttccaggggaaacggcgcccttccaggtccggcaggagtcgggaacc

SEQ ID NO: 645627 - DNA, 120 bp, Artificial Sequence
  ENSG00000182327_2 (sequence is synthesized)
ctggaggccccggagaggaaacagcctccgtgtctgggccctcgggggatgctgggccgcatgatgaggcggttccacgccagtctgaaacccgaaggggatgtggggctgtcgccgtac

SEQ ID NO: 645628 - DNA, 120 bp, Artificial Sequence
  ENSG00000182327_3 (sequence is synthesized)
ctggcgggatggagggcactcgtcgagttcctgactcccctcggctccgtcttcgccttcgccactagggaggccttcaccaaggtgacagacctggaggctcgggtgcacggcccggac

SEQ ID NO: 645629 - DNA, 120 bp, Artificial Sequence
  ENSG00000182327_4 (sequence is synthesized)
gcggagcactactggtcgctggtggccatggcggcgtgggagcggagggcgggactgctggagcagccgggggcggccccccgggacccgacccggagctcgggctctcgcacgctgctc

SEQ ID NO: 645630 - DNA, 120 bp, Artificial Sequence
  ENSG00000182327_5 (sequence is synthesized)
gcgctggtcccagctctgcctccaccgggtggcgaccggcgcgctgggaggcccggacgcgggcgtgcagtgcagcgacgcctaccgtgcggccctgggtccgcatcacccctggctggt

SEQ ID NO: 645631 - DNA, 120 bp, Artificial Sequence
  ENSG00000182327_6 (sequence is synthesized)
atcacccctggctggtccgacagaccgcccgcctcgccttcctcgccttcccgggtcgccgccgcctgctggagctggcgtgtcccggagccaccgaggcggaggcgcgggccgcgctgg

SEQ ID NO: 645632 - DNA, 120 bp, Artificial Sequence
  ENSG00000182327_7 (sequence is synthesized)
cttggaggatgtctacaaccgcacccagagcctgctggccgagcgcggcctgctccagctggcctaagacggcggctgcggggaccggcgggaacggagcggaccgcccggggtggggcc

SEQ ID NO: 645633 - DNA, 120 bp, Artificial Sequence
  ENSG00000182327_8 (sequence is synthesized)
gcgcagcccggggtcagtcctgcagcccgcgccgcggccgcctccgtatcccgcctcttccgtgacgtcgccgcggcgagggccgcccccggcagggaatggcgttgagctccctctgtc

SEQ ID NO: 645634 - DNA, 120 bp, Artificial Sequence
  ENSG00000182327_9 (sequence is synthesized)
cgcagtctcggaaagacgggaggagctgtgaggaataaaaaagcaatatttggcagcgtcgacgtagggcgttttgtgtgatgacgacaggcgcttaagggaaataaaaaacgaaggtga

SEQ ID NO: 645635 - DNA, 120 bp, Artificial Sequence
  ENSG00000182329_0 (sequence is synthesized)
agacaagaaggatggtgctgtggccgagatctgtagatgcacacggctggtaacagagcaaccgggaccaagggacaacaagagctcaggagaaggggagagacaggtcgcccagagagt

SEQ ID NO: 645636 - DNA, 120 bp, Artificial Sequence
  ENSG00000182329_1 (sequence is synthesized)
agacaatccagggcttgaggaggctggctgtgcggtttattttttctctccacaaagacacacactgtctaaactgtgtggctggttgttactaagaagctgctgcgagagggaaaaatg

SEQ ID NO: 645637 - DNA, 120 bp, Artificial Sequence
  ENSG00000182329_2 (sequence is synthesized)
tatttaataaaaggccctgtgtttgtggtcttcttgggcttgctgtgagctctggaaatcttgaggtgtgaccagatttcagccttcaaaaccaagatggactgcccttgagaaggggtg

SEQ ID NO: 645638 - DNA, 120 bp, Artificial Sequence
  ENSG00000182329_3 (sequence is synthesized)
gtcagagggaaacatgttcacgctctccctcctgagccggggccacgggaagctgggccaggacaaacagaagttagaagtctactttgaaccagaggattacttgaactggaggtcccc

SEQ ID NO: 645639 - DNA, 120 bp, Artificial Sequence
  ENSG00000182329_4 (sequence is synthesized)
agaagactatgttcctgtcagcaaacctcaagataagaacaatgccagtcagcactcctggagcctctttctccctaaaactttcagtactagaaagggtgccctgatcctgtactcaga

SEQ ID NO: 645640 - DNA, 120 bp, Artificial Sequence
  ENSG00000182329_5 (sequence is synthesized)
aggttttgccatttcggcatggacacccaaagagaggagaaaaggcccctactgccccagaggtccctggaggaagctggatcttgaactgcacacacttcaagacctcaaagaagccat

SEQ ID NO: 645641 - DNA, 120 bp, Artificial Sequence
  ENSG00000182329_6 (sequence is synthesized)
cctggcatatggaaggcagcagggagagcaggacagagcctggcaaccatacctccacttccgaagccagctggagagccaggcccaacggcagatccagccagggcattcagccaagag

SEQ ID NO: 645642 - DNA, 120 bp, Artificial Sequence
  ENSG00000182329_7 (sequence is synthesized)
atacctccgaggcctcctgcggacttggcccccagacgccatgtataggctctggtgcgcaggatacatcaaggattctgtgctactccaggacagtcaacttaatgtaccaaagaagct

SEQ ID NO: 645643 - DNA, 120 bp, Artificial Sequence
  ENSG00000182329_8 (sequence is synthesized)
caggccacaacaagatctttcaggtgtacccccaaaataccatctcctgcctgtcttcccttcattttggattcaacaaggaaaatcttttgaacaacgtcaacagggcctggatgaagg

SEQ ID NO: 645644 - DNA, 120 bp, Artificial Sequence
  ENSG00000182329_9 (sequence is synthesized)
ggaagctggagctgctggacacgtggaccagggccctctagccaagaaccatggcagtcaggggactcgcttgccaccacgcaggaagcagccctggcaggaagatgaaacgcaggcaga

SEQ ID NO: 645645 - DNA, 120 bp, Artificial Sequence
  ENSG00000182329_10 (sequence is synthesized)
ggacacgtcaatagagaatcacctttgtttatatgcttcaaaggagagctacaatgaaaagacacagcaaacctccaggaaggcctttgggcatggccgcatcgatcactcttggctccc

SEQ ID NO: 645646 - DNA, 120 bp, Artificial Sequence
  ENSG00000182329_11 (sequence is synthesized)
aagtgacaaatcccacattacattctgtggaggcgccttccctaataggaaggcagatctcagcgataaacaaaggaacgtgaaactccacaaggccagaagcagccacttgttacaggt

SEQ ID NO: 645647 - DNA, 120 bp, Artificial Sequence
  ENSG00000182329_12 (sequence is synthesized)
gcttcctgctgaaagaagcctcttccctcctgtagcatctgccactggctccagaataatcacccctggggaagtgaagaagaaaaaggcaccaaaggctttgaaattacctcctatctc

SEQ ID NO: 645648 - DNA, 120 bp, Artificial Sequence
  ENSG00000182329_13 (sequence is synthesized)
agaagaaccacccagagtcttggagcccctgaagagccaatttaaagccaatgagcccccaacagagctcttcatcttaccggtggagattcattaccacaccaaacaacccccaaaaga

SEQ ID NO: 645649 - DNA, 120 bp, Artificial Sequence
  ENSG00000182329_14 (sequence is synthesized)
gaaagcccacagaagaggtgctccacaccctgagtcagaaccagaaagcagcgaagaatccacacctgtgtggagacctcccctgaagcatgcgtccttagaaacaccatgggagttaac

SEQ ID NO: 645650 - DNA, 120 bp, Artificial Sequence
  ENSG00000182329_15 (sequence is synthesized)
agtgcatctcccagtggacgcgagcagggacacactctcacctcaagatgatgatgccccacctcacgatgtggccccaccattggatcttctacccccgattaaaggaaaaaaaagtcc

SEQ ID NO: 645651 - DNA, 120 bp, Artificial Sequence
  ENSG00000182329_16 (sequence is synthesized)
tgagagccagaagggcgtggacagccctaggacatcagaccacaacagccccccaagtctcccgaacatgagagtgcccaggagggcactgccagcagctcaagaagattccagcgaccc

SEQ ID NO: 645652 - DNA, 120 bp, Artificial Sequence
  ENSG00000182329_17 (sequence is synthesized)
ccctcccagggcatacccaaaccgaggcgcttccatcgggtaaagcctatgaatctgtcaattcaaatatcagccatgaagaggaagggcctagtagtcagcatttcctaaaagcaaaca

SEQ ID NO: 645653 - DNA, 120 bp, Artificial Sequence
  ENSG00000182329_18 (sequence is synthesized)
ctgaacctagagccaatcttcacatgaacctttatgaaacctcaccgttgacccaaacaacagagaagcagggagcccagcagtccttggaggcagcagctcagaagacaggagagcctc

SEQ ID NO: 645654 - DNA, 120 bp, Artificial Sequence
  ENSG00000182329_19 (sequence is synthesized)
aaagttgtataaataaagcgctgatatgttcaaacagaaaagaattttacacgcgcaagctgcacatcgacatgacgccgttcctgaaggaaagtggaaatgcactggactatcaggaag

SEQ ID NO: 645655 - DNA, 120 bp, Artificial Sequence
  ENSG00000182329_20 (sequence is synthesized)
aagcagggagacccctcagagaaactcaccacaacgaccaagacccagagccaaggagtatgacccttgactctcccagggcttcccggactgagcacatccagaccccagaagcagata

SEQ ID NO: 645656 - DNA, 120 bp, Artificial Sequence
  ENSG00000182329_21 (sequence is synthesized)
ttgtgcaaaaagtgggcagagattatgatgtacaccacctacacagaggacttctgggatacgggcctgagtcacccgagaggttgagtgctgtgtatacatctcttcttccaagagaaa

SEQ ID NO: 645657 - DNA, 120 bp, Artificial Sequence
  ENSG00000182329_22 (sequence is synthesized)
gagaagggaaggctgaaccaagactgtttagccaggagacatcagccaacatcagtcatgagagggatttgattaacgaggccaagagaaaggaaaaacccaagaaagacaaaaccaaag

SEQ ID NO: 645658 - DNA, 120 bp, Artificial Sequence
  ENSG00000182329_23 (sequence is synthesized)
gacccaaaagcgagagagaaggaaaggtctacgggcaagcagaggctgccattggaaagtcaaaggactcaaaggctaaaaaaaaattagaaaaaaaaacaagaccccaaaggaaaagga

SEQ ID NO: 645659 - DNA, 120 bp, Artificial Sequence
  ENSG00000182329_24 (sequence is synthesized)
cacagaaggaaagaaatctggagatagcggcagagctgagcgggcctgatgtcagctatgaggaaacagaagacacctcaaatagaggttcctttgcctcagactcctttgtagaggacc

SEQ ID NO: 645660 - DNA, 120 bp, Artificial Sequence
  ENSG00000182329_25 (sequence is synthesized)
cttggctttctcccaaatatgatgcccaggaaagccaagtttctctagatggaagatcatcaccctctcagattgcaactgtcactggcaacatggaatctaaagaagagagaagatgtg

SEQ ID NO: 645661 - DNA, 120 bp, Artificial Sequence
  ENSG00000182329_26 (sequence is synthesized)
aggacccttccaaggccctcctcactaagagggagcaggagaaggcttcctgggacaggcttcgagcagaaagagccgagatgaggtggctggaggtggagaagaagagaagggagcagg

SEQ ID NO: 645662 - DNA, 120 bp, Artificial Sequence
  ENSG00000182329_27 (sequence is synthesized)
aagagcaaaggcagctccagcaggagcagctggagagagcaaaaaagatggaggaggagctggagctggagcagcagagacgtacagaagagatccgcttgaggaaacagagactccaag

SEQ ID NO: 645663 - DNA, 120 bp, Artificial Sequence
  ENSG00000182329_28 (sequence is synthesized)
aagaacagcagcggcaggaggaggaggagagaaagcagcagctccggttgaaagcagcccaggagagagcccggcaacagcaagaggagtttcggaggaaactgcgagaactacagagaa

SEQ ID NO: 645664 - DNA, 120 bp, Artificial Sequence
  ENSG00000182329_29 (sequence is synthesized)
aaaagcagcaggaggaagccgagagggccgaggcagagaagcaaaggcaagaggaattggaaatgcagttagaagaagaacaaaaacacctgatggaaatggctgaagaggaacgactgg

SEQ ID NO: 645665 - DNA, 120 bp, Artificial Sequence
  ENSG00000182329_30 (sequence is synthesized)
agtaccagcggcggaaacaggaagcagaagagaaggctcggctggaggcagaggagaggaggcaaaaagaagaggaagcagcaagactggctctggaagaagccacgaaacaagcccagg

SEQ ID NO: 645666 - DNA, 120 bp, Artificial Sequence
  ENSG00000182329_31 (sequence is synthesized)
aacaagccaggcaaaaagctgctttggagaaacattttcatttctatcaagaactccataaggaagccagtggcctgcagtggacacagaacatttccagaccatgggtttactcttatt

SEQ ID NO: 645667 - DNA, 120 bp, Artificial Sequence
  ENSG00000182329_32 (sequence is synthesized)
tccagttcctacaaatacccaggccttaaggctagaagaaaactaaaaaatttaggatgttgcagtcaagcaccagataagagtgacttccctaaatgttattcaaggtcccttcagaaa

SEQ ID NO: 645668 - DNA, 120 bp, Artificial Sequence
  ENSG00000182329_33 (sequence is synthesized)
tctgataatctgttaaaatttttgttgtgaaatgcctattttatcagcactgctaaccagataagcacacatttaagttaaccatatcagagtgcaatgcatttcgaaaaatccaaaaaa

SEQ ID NO: 645669 - DNA, 120 bp, Artificial Sequence
  ENSG00000182329_34 (sequence is synthesized)
atgggagacgctggaaagagattggagagggagaagaagaggaagaccacagtatttctcccttcccactctgcctcaagtgaaaagaagcatctgcattacctctgtgatacagctctc

SEQ ID NO: 645670 - DNA, 120 bp, Artificial Sequence
  ENSG00000182329_35 (sequence is synthesized)
cactctgaagggaagcaaggcaagacacacaagggtccacagccaaggaaaaggagtctggaagggagatgatgatgccccacctcacgatgtggccccaccattggatcttctaccccc

SEQ ID NO: 645671 - DNA, 120 bp, Artificial Sequence
  ENSG00000182329_36 (sequence is synthesized)
atggttccttccaagccacagtgtagtgaacctcatcacaacacaattctgctgggctggatttgtcccaagtgtggatcatggccaaagcagctgtgatgtggcaagctcattgaagct

SEQ ID NO: 645672 - DNA, 120 bp, Artificial Sequence
  ENSG00000182329_37 (sequence is synthesized)
aacgggaggcagtgtgatgtggaggggaaagtgcaagacactaagtcaggacatctgggttctgggtcctggtcttgtgttatttcaaggtgtgcccttgagccaattgaatgaaaatgc

SEQ ID NO: 645673 - DNA, 120 bp, Artificial Sequence
  ENSG00000182329_38 (sequence is synthesized)
tatttcaaggtgtgcccttgagccaattgaatgaaaatgctttcagggcctcagtttcccccaagctgattcaaatttaaaaaaaaaaaaaattttttttgaaacagagtctcactctgt

SEQ ID NO: 645674 - DNA, 120 bp, Artificial Sequence
  ENSG00000182329_39 (sequence is synthesized)
cagaccttcatggtgagtgttacaggtcttaaaggcagcacgtctggagttgttcgttctttccggtgggttcgtggtcttactggcctcaagagtgaagctgcagaccttcgcggtgag

SEQ ID NO: 645675 - DNA, 88 bp, Artificial Sequence
  ENSG00000182329_40 (sequence is synthesized)
agaccttcgcggtgagtgttacagtttgtaaaggtggcgcatccggagttgttcattcctcctgtctggcgttgttcgtccctgctga

SEQ ID NO: 645676 - DNA, 120 bp, Artificial Sequence
  ENSG00000182329_41 (sequence is synthesized)
ttagctagacagaaaagttctccaaggccccaccccacccagaagcccagtaggcttcacctctcaatagcactcgctgcgggactttgcggcacctagcccaggcactccggcagccca

SEQ ID NO: 645677 - DNA, 120 bp, Artificial Sequence
  ENSG00000182329_42 (sequence is synthesized)
ctttgcggcacctagcccaggcactccggcagcccagagggagctcatcccccgatcaagcccagcaggcgtcggccgcgacaggcccagtccgcgcccacccggaacccgcgccggccg

SEQ ID NO: 645678 - DNA, 120 bp, Artificial Sequence
  ENSG00000182329_43 (sequence is synthesized)
acgagcgagctgctgcacgcagccccggctcctgcctgcgcctctccctccacacctcccggcgagcagaggctcaggcctcgaccagccccagagaagggccccacagcgcagcggcgg

SEQ ID NO: 645679 - DNA, 120 bp, Artificial Sequence
  ENSG00000182329_44 (sequence is synthesized)
gctgaagggctcctccagcacgccagagcggacgcggaggccaacgaggcgccgagagtaagcaagggctgctagcacgttgtcacctctcactgtcacctaggctggagtgcagtggta

SEQ ID NO: 645680 - DNA, 66 bp, Artificial Sequence
  ENSG00000182329_45 (sequence is synthesized)
tctgctaagaaatgttttaaatctgtgcaaaagccattttcaaagagaagaagatagctgagaaac

SEQ ID NO: 645681 - DNA, 120 bp, Artificial Sequence
  ENSG00000182329_46 (sequence is synthesized)
gcaaaagccattttcaaagagaagaagatagctgagaaacaacagaaaagggaaggtcagcccacaaagaatgagtagaggcttaagttcaaaaagacaaagatacagagtcatatatgg

SEQ ID NO: 645682 - DNA, 120 bp, Artificial Sequence
  ENSG00000182329_47 (sequence is synthesized)
ccattggctcctaaaagagctacttatgagtatcaagtatggaaagaactttttgttggacattcgtcccacagaagaaactaaacccttcgtcagtagagccatgtgcttagctaaatc

SEQ ID NO: 645683 - DNA, 76 bp, Artificial Sequence
  ENSG00000182329_48 (sequence is synthesized)
ctaaacccttcgtcagtagagccatgtgcttagctaaatctattcctcaaataaacattcctttagaacattaaag

SEQ ID NO: 645684 - DNA, 62 bp, Artificial Sequence
  ENSG00000182329_49 (sequence is synthesized)
cccaaatttactttcttaagggaaaaaaaagaaaagcaaaataaaacctatccttttgcgcc

SEQ ID NO: 645685 - DNA, 120 bp, Artificial Sequence
  ENSG00000182329_50 (sequence is synthesized)
aaaaaaaagaaaagcaaaataaaacctatccttttgcgccatggagttttagggtcgggcagtcttggagggaaatccttactcaaaacctcactagtggtacaactttgagtgggttac

SEQ ID NO: 645686 - DNA, 120 bp, Artificial Sequence
  ENSG00000182329_51 (sequence is synthesized)
tataccttttgcacctcagctgccacacctatagagaacattgacaatgacaacatggaggggagtcatggccatcacacgacagccccatgctggtgtccgggtggtgccttcttcccg

SEQ ID NO: 645687 - DNA, 120 bp, Artificial Sequence
  ENSG00000182329_52 (sequence is synthesized)
gctggctccgcggtttccatggtttctgttagtcccctccctccatccccactttggcgtttgcctttgtttgattcatgtttccacccttcctcttgcccctccacattatgaggaaaa

SEQ ID NO: 645688 - DNA, 120 bp, Artificial Sequence
  ENSG00000182329_53 (sequence is synthesized)
agggaagcctctgatctctctatttggaagtttgcagaagccttttcctacttcagtgaagtgcagtcatacaaaatttatactcaacagcatcagcagatttttttccatcaatatttc

SEQ ID NO: 645689 - DNA, 120 bp, Artificial Sequence
  ENSG00000182329_54 (sequence is synthesized)
ctttttaatttcagctttatctgaattttaatagcataaagaatttacttttgttcttttaaagagcaaccaaaacaagaataatatatgtttgaatataaggtcttaacactatgttta

SEQ ID NO: 645690 - DNA, 120 bp, Artificial Sequence
  ENSG00000182329_55 (sequence is synthesized)
ctggatatttgggcaacagttgccatagggggatggttcaagggcttcactgtccagtgctagtgctagctttgcactgcctttagacaagaaaagtccccccacccccagcatggcttg

SEQ ID NO: 645691 - DNA, 120 bp, Artificial Sequence
  ENSG00000182329_56 (sequence is synthesized)
gaagactgaaaggcatagagggattcttttgctgcaaatgtcaaggattcctttgtagcttaatgaagttgtaatgaatctacaagggagtttggagatatctacgtcaaccccctagtt

SEQ ID NO: 645692 - DNA, 120 bp, Artificial Sequence
  ENSG00000182329_57 (sequence is synthesized)
tatagatgaaaaaagcaagtcccaaagagggaaaggatcttgatcacagacaaacagtgacttagggacaatgccaagaccagatctaagaccccctgatttcgaacccactgcctgtct

SEQ ID NO: 645693 - DNA, 120 bp, Artificial Sequence
  ENSG00000182329_58 (sequence is synthesized)
tgatatctactgagtgcctgttatgtgccaaacactgttctagacactaggaattcaggagtaagcaagacagagaaggtctctcttcccatcatatttacattctaggggtgggaatgg

SEQ ID NO: 645694 - DNA, 120 bp, Artificial Sequence
  ENSG00000182329_59 (sequence is synthesized)
agacagactctaaacaaatattttttaaagctagcaataaatgctatgcagaaaaaatttaacgatgtgataggacaccgggcacagtggctcacacatgttaattccagcactttggga

SEQ ID NO: 645695 - DNA, 86 bp, Artificial Sequence
  ENSG00000182329_60 (sequence is synthesized)
taagtgaaacccctatccctacaaaaaaaatcaaaaaattagccaggtgtggtggtgaatgcctgtggtcccagctacatgggagg

SEQ ID NO: 645696 - DNA, 61 bp, Artificial Sequence
  ENSG00000182329_61 (sequence is synthesized)
gtgaatcaaagcggcagtgagctaaaatcaagtcaccacactccagcctgggtgacagagc

SEQ ID NO: 645697 - DNA, 120 bp, Artificial Sequence
  ENSG00000182330_0 (sequence is synthesized)
gaactactgcttgattctctgagagatcccagcaccctacaaactgagtccagatctgagttttcccttgcagattcatcaagatgagcatcagggccccacccagactcctggagctgg

SEQ ID NO: 645698 - DNA, 120 bp, Artificial Sequence
  ENSG00000182330_1 (sequence is synthesized)
caaggcagaggctgctgagggaccaggccttggccatctccaccatggaggagctgcccagggagctcttccccacactgttcatggaggccttcagcaggagacgctgtgaaaccctga

SEQ ID NO: 645699 - DNA, 120 bp, Artificial Sequence
  ENSG00000182330_2 (sequence is synthesized)
aaacaatggtgcaggcctggcctttcacccgcctccctctagggtccctgatgaagtcgcctcatctggagtcattaaaatctgtgctggaaggggttgatgtgctgttgacccaagagg

SEQ ID NO: 645700 - DNA, 120 bp, Artificial Sequence
  ENSG00000182330_3 (sequence is synthesized)
ttcgccccaggcagtcaaaacttcaagtgctggacttgaggaatgtggatgagaacttctgcgacatattttctggagctactgcatccttcccggaggctctgagtcagaagcaaacag

SEQ ID NO: 645701 - DNA, 120 bp, Artificial Sequence
  ENSG00000182330_4 (sequence is synthesized)
cagataactgtccagggacaggcaggcagcagccattcatggtgttcatagacctttgtctcaagaacaggacactagatgaatgcctcacccacctcttagagtggggcaagcagagaa

SEQ ID NO: 645702 - DNA, 120 bp, Artificial Sequence
  ENSG00000182330_5 (sequence is synthesized)
aaggcttactgcatgtgtgttgcaaggagctgcaggtttttggaatgcccatccacagtatcatagaggtcctgaacatggtggagcttgactgtatccaggaggtggaagtgtgctgcc

SEQ ID NO: 645703 - DNA, 120 bp, Artificial Sequence
  ENSG00000182330_6 (sequence is synthesized)
cctgggagctgtccactcttgtgaagtttgccccttacctgggccagatgaggaatctccgcaaacttgttctcttcaacatccgtgcatctgcctgcattcccccagacaacaaggggc

SEQ ID NO: 645704 - DNA, 120 bp, Artificial Sequence
  ENSG00000182330_7 (sequence is synthesized)
ttccagaatctgtctatgcactccgtctctttcctcgaaggccacctggaccagctgctcaggtgtctccaggcctccttggagatggtcgttatgaccgactgcctgctgtcagagtcg

SEQ ID NO: 645705 - DNA, 120 bp, Artificial Sequence
  ENSG00000182330_8 (sequence is synthesized)
gacttgaagcatctctcttggtgcccgagcatccgtcaattaaaggagctggacctgaggggtgtcacgctgacccatttcagccctgagcccctcacaggtctgctggagcaagttgtg

SEQ ID NO: 645706 - DNA, 120 bp, Artificial Sequence
  ENSG00000182330_9 (sequence is synthesized)
gccaccctgcagaccctggacttagaggactgtgggatcatggattcccaactcagcgccatcctgcctgtcctgagccgctgctcccagctcagcaccttcagcttctgtgggaacctc

SEQ ID NO: 645707 - DNA, 120 bp, Artificial Sequence
  ENSG00000182330_10 (sequence is synthesized)
atctccatggctgcccttgagaacctgctgcgccacaccgtcgggctgagcaagctaagcctggagctgtatcctgcccctctggagagttatgacacccagggagctctctgctggggg

SEQ ID NO: 645708 - DNA, 120 bp, Artificial Sequence
  ENSG00000182330_11 (sequence is synthesized)
agatttgctgaacttggggctgagctgatgaacacactgagggacttaaggcagcccaagatcattgtgttctgcaccgtcccctgccctcgctgtggcatcagggcctcctatgacctg

SEQ ID NO: 645709 - DNA, 120 bp, Artificial Sequence
  ENSG00000182330_12 (sequence is synthesized)
gagcccagtcactgcctctgttgaatgcctgccatcagggtggatatatttcaagctttcttctggtcatttcggagctgaaacctaggccatgagtgcatgttaaagggagcacagacc

SEQ ID NO: 645710 - DNA, 120 bp, Artificial Sequence
  ENSG00000182330_13 (sequence is synthesized)
catcgtttcaaatgcctcctcagtgtgaatgggaaaggaatgaggatgcaggaggggcaggactgggggaaaagttgacttggagtggatgggctctttagagacctgtgtcccagagaa

SEQ ID NO: 645711 - DNA, 120 bp, Artificial Sequence
  ENSG00000182330_14 (sequence is synthesized)
tcagaaatgggaatctgaattgctagagtgagaatcagggaggagagacacatgagagggttacccctgcacagatggttgtaaagtaacagtcagaaataaagggaaactgagtggaaa

SEQ ID NO: 645712 - DNA, 120 bp, Artificial Sequence
  ENSG00000182330_15 (sequence is synthesized)
acccaaagccctggtgcctggaactactgcttgattctctgagagatcccagcaccctacaaactgagtccagatctggtaagtcaccacctccttagatgagcatcagggccccaccca

SEQ ID NO: 645713 - DNA, 120 bp, Artificial Sequence
  ENSG00000182333_0 (sequence is synthesized)
agagaaacagaatcctaactatttctgaggaaactgcaggtccaaaatgtggctgcttttaacaatggcaagtttgatatctgtactggggactacacatggtttgtttggaaaattaca

SEQ ID NO: 645714 - DNA, 120 bp, Artificial Sequence
  ENSG00000182333_1 (sequence is synthesized)
tcctggaagccctgaagtgactatgaacattagtcagatgattacttattggggatacccaaatgaagaatatgaagttgtgactgaagatggttatattcttgaagtcaatagaattcc

SEQ ID NO: 645715 - DNA, 120 bp, Artificial Sequence
  ENSG00000182333_2 (sequence is synthesized)
ttatgggaagaaaaattcagggaatacaggccagagacctgttgtgtttttgcagcatggtttgcttgcatcagccacaaactggatttccaacctgccgaacaacagccttgccttcat

SEQ ID NO: 645716 - DNA, 120 bp, Artificial Sequence
  ENSG00000182333_3 (sequence is synthesized)
tctggcagatgctggttatgatgtgtggctgggcaacagcagaggaaacacctgggccagaagaaacttgtactattcaccagattcagttgaattctgggctttcagctttgatgaaat

SEQ ID NO: 645717 - DNA, 120 bp, Artificial Sequence
  ENSG00000182333_4 (sequence is synthesized)
ggctaaatatgaccttccagccacaatcgacttcattgtaaagaaaactggacagaagcagctacactatgttggccattcccagggcaccaccattggttttattgccttttccaccaa

SEQ ID NO: 645718 - DNA, 120 bp, Artificial Sequence
  ENSG00000182333_5 (sequence is synthesized)
tgaagtatacaaaaagccttataaacaaacttagatttgttcctcaatccctcttcaagtttatatttggtgacaaaatattctacccacacaacttctttgatcaatttcttgctactg

SEQ ID NO: 645719 - DNA, 120 bp, Artificial Sequence
  ENSG00000182333_6 (sequence is synthesized)
aagtgtgctcccgtgagatgctgaatctcctttgcagcaatgccttatttataatttgtggatttgacagtaagaactttaacacgagtcgcttggatgtgtatctatcacataatccag

SEQ ID NO: 645720 - DNA, 120 bp, Artificial Sequence
  ENSG00000182333_7 (sequence is synthesized)
caggaacttctgttcaaaacatgttccattggacccaggctgttaagtctgggaaattccaagcttatgactggggaagcccagttcagaataggatgcactatgatcagtcccaacctc

SEQ ID NO: 645721 - DNA, 120 bp, Artificial Sequence
  ENSG00000182333_8 (sequence is synthesized)
cctactacaatgtgacagccatgaatgtaccaattgcagtgtggaacggtggcaaggacctgttggctgacccccaagatgttggccttttgcttccaaaactccccaatcttatttacc

SEQ ID NO: 645722 - DNA, 120 bp, Artificial Sequence
  ENSG00000182333_9 (sequence is synthesized)
acaaggagattcctttttacaatcacttggactttatctgggcaatggatgcccctcaagaagtttacaatgacattgtttctatgatatcagaagataaaaagtagttctggatttaaa

SEQ ID NO: 645723 - DNA, 120 bp, Artificial Sequence
  ENSG00000182333_10 (sequence is synthesized)
gaattatccgtttgtttttccaaaatactttattctctcatacatagtattttcataatgtttgacatgcagtgcttctttctgtaattttgactttagaaatatattggcatcaacaaa

SEQ ID NO: 645724 - DNA, 120 bp, Artificial Sequence
  ENSG00000182333_11 (sequence is synthesized)
aaaatactaaccagccagagaaacagaatcctaactatttctgaggaaactgacttggcaacaagcattttgagaaatttattctgcccttgaacatctttgagcccattgagatgttct

SEQ ID NO: 645725 - DNA, 120 bp, Artificial Sequence
  ENSG00000182333_12 (sequence is synthesized)
caggtaaacaaaagggacaattaaaaataaacactgggctttaaaagcataggcatttgccccttctaatccagtcccattttaacaaattacactccaagtaggaggataaacaagtca

SEQ ID NO: 645726 - DNA, 120 bp, Artificial Sequence
  ENSG00000182333_13 (sequence is synthesized)
acttttgtgatctcaggagtctccattagggatttccagaaagtgattttccaaatggaatgaacaatatggctgaagcaaggaaactcacagcccctggaaaattccaaaggaatgtcc

SEQ ID NO: 645727 - DNA, 120 bp, Artificial Sequence
  ENSG00000182333_14 (sequence is synthesized)
atatggattcaagagagaagtaaaaacccatttaggggtaggagaacagcaatctgaatcatcatcaataggaggggtggggagagtgaaattcagatatcatggagagattatcatggg

SEQ ID NO: 645728 - DNA, 120 bp, Artificial Sequence
  ENSG00000182333_15 (sequence is synthesized)
cttctctcactggtcttcttgtgccttattcctggaaattactgatggaggtagagaacagaacaaaacctggctgctgatgctaaggcatgaaagtgtttcaagagttctaggagctga

SEQ ID NO: 645729 - DNA, 120 bp, Artificial Sequence
  ENSG00000182333_16 (sequence is synthesized)
aaggaaacctgtgtgtcccaggtgtagcgggaaaagggaaaatgacatgagtgaagactgaggtgcagatggggcagtagtggtgatagtgagagccttgggcctcattctgagtgcact

SEQ ID NO: 645730 - DNA, 120 bp, Artificial Sequence
  ENSG00000182333_17 (sequence is synthesized)
gagaagttttaaaaagaggagtggcataatacagttttcattttcaaaatatcatgttggctgatttgtgaaaaataaaatagagaaagacaggatttatattaaatgacatggaacaca

SEQ ID NO: 645731 - DNA, 120 bp, Artificial Sequence
  ENSG00000182333_18 (sequence is synthesized)
gacctgaatcagaaaacataaatctttactgtttttaagaaactgagtatgtgtcttagtatgtatataatatgtgtgtctgttgatttctagagtcgcttggatgtgtatctatcacat

SEQ ID NO: 645732 - DNA, 120 bp, Artificial Sequence
  ENSG00000182334_0 (sequence is synthesized)
atggggactggaaatgacaccactgtggtagagtttactcttttggggttatctgaggatactacagtttgtgctattttatttcttgtgtttctaggaatttatgttgtcaccttaatg

SEQ ID NO: 645733 - DNA, 120 bp, Artificial Sequence
  ENSG00000182334_1 (sequence is synthesized)
ggtaatatcagcataattgtattgatcagaagaagtcatcatcttcatacacccatgtacattttcctctgccatttggcctttgtagacattgggtactcctcatcagtcacacctgtc

SEQ ID NO: 645734 - DNA, 120 bp, Artificial Sequence
  ENSG00000182334_2 (sequence is synthesized)
atgctcatgagcttcctaaggaaagaaacctctctccctgttgctggttgtgtggcccagctctgttctgtagtgacgtttggtacggccgagtgcttcctgctggctgccatggcctat

SEQ ID NO: 645735 - DNA, 120 bp, Artificial Sequence
  ENSG00000182334_3 (sequence is synthesized)
tgtgtgaatgcttggacattcattggctgcttattaagactgtccttctgtgggccaaataaagtcaatcactttttctgtgactattcaccacttttgaagcttgcttgttcccatgat

SEQ ID NO: 645736 - DNA, 120 bp, Artificial Sequence
  ENSG00000182334_4 (sequence is synthesized)
tttacttttgaaataattccagctatctcttctggatctatcattgtggccactgtgtgtgtcatagccatatcctacatctatatcctcatcaccatcctgaagatgcactccaccaag

SEQ ID NO: 645737 - DNA, 120 bp, Artificial Sequence
  ENSG00000182334_5 (sequence is synthesized)
ggccgccacaaggccttctccacctgcacctcccacctcactgcagtcactctgttctatgggaccattaccttcatttatgtgatgcccaagtccagctactcaactgaccagaacaag

SEQ ID NO: 645738 - DNA, 120 bp, Artificial Sequence
  ENSG00000182334_6 (sequence is synthesized)
gtggtgtctgtgttctacaccgtggtgattcccatgttgaaccccctgatctacagcctcaggaacaaggagattaagggggctctgaagagagagcttagaataaaaatattttcttga

SEQ ID NO: 645739 - DNA, 120 bp, Artificial Sequence
  ENSG00000182334_7 (sequence is synthesized)
cattacccagtgtggagctttttagtcaatcaggagggaagattttcagatagaataggaaattagaagtccatcttgctttacctttaataaaatttaattaaatttataattgagaat

SEQ ID NO: 645740 - DNA, 120 bp, Artificial Sequence
  ENSG00000182346_0 (sequence is synthesized)
tcatctctgcttcacaatgccgatgatttagctgggaggacccaaaatgctggaaaagctgatgggtgctgattctctccagcttttcagatccagatatacattgggtaaaatctactt

SEQ ID NO: 645741 - DNA, 120 bp, Artificial Sequence
  ENSG00000182346_1 (sequence is synthesized)
cataggttttcaaaggagcattcttctgagcaaatctgaaaactctctaaactctattgcaaaggagacagaagaaggaagagagacggtaacaaggaaagaaggatggaagagaaggca

SEQ ID NO: 645742 - DNA, 120 bp, Artificial Sequence
  ENSG00000182346_2 (sequence is synthesized)
tgaggacggctatttggaaatggcacagaggcatttacagagatcattatgtccttgggtctcttaccttcctcagccctatgcagagcttgaagaagtaagcagccatgttggaaaagt

SEQ ID NO: 645743 - DNA, 120 bp, Artificial Sequence
  ENSG00000182346_3 (sequence is synthesized)
ttccttgcctatgaggcctctaaggaccgcaggcagcctctagaacgaatgtggacctgcaactacaaccagcaaaaagaccagtcatgcaaccacaaggaaataacttctaccaaagct

SEQ ID NO: 645744 - DNA, 120 bp, Artificial Sequence
  ENSG00000182346_4 (sequence is synthesized)
gaatgagtttggaagcagattcttcccagccaatccttctgatgacaatgtagtctggccaacatcttcactggactctgacggactctgtgtctgggacccagctgataacacgtggtg

SEQ ID NO: 645745 - DNA, 120 bp, Artificial Sequence
  ENSG00000182346_5 (sequence is synthesized)
atgggattgtatttgcaactctctggtcagtaagtgataaaatgccatttctatgcacccacctggcctgtgtgactgggagaatctctctttttattaaatgtgcttcaagttttaaca

SEQ ID NO: 645746 - DNA, 120 bp, Artificial Sequence
  ENSG00000182346_6 (sequence is synthesized)
agatttgttacacaatgatataaactaataccataggtaatcaaaatcctctcctcttgtttggtaatatttcatcactaaattattattgaaagttacacatactgctttgtgagctgt

SEQ ID NO: 645747 - DNA, 120 bp, Artificial Sequence
  ENSG00000182346_7 (sequence is synthesized)
cataatcagtaaaacaaacaacggaaattcaaaagtcctgtgaagttttttgaatagttagtgaatttatgtgggaaaatattcaagtatattaatttatccaaatagtaatgatgtctc

SEQ ID NO: 645748 - DNA, 120 bp, Artificial Sequence
  ENSG00000182346_8 (sequence is synthesized)
cctttgccattgttatggatttatggatttatgtatctgatacatgtaacattacattttcaatcaatactattgatggacccttccctacttttataatttctaactatagttttaggg

SEQ ID NO: 645749 - DNA, 120 bp, Artificial Sequence
  ENSG00000182346_9 (sequence is synthesized)
agaatactaataatggaagcattacttttattttttctataaattcctctggaaatatgtatttcttatgtcctaaggttattaacaaaaagagaaaataatttctgatttataattcac

SEQ ID NO: 645750 - DNA, 120 bp, Artificial Sequence
  ENSG00000182346_10 (sequence is synthesized)
tttccttcaaaaaataataactcagtgtctagtaaggtaaagcaaaaaaagttaaaagaacccataagtttattttaaaatacctactcagaagcaaaactgactttctattaaaaatta

SEQ ID NO: 645751 - DNA, 120 bp, Artificial Sequence
  ENSG00000182346_11 (sequence is synthesized)
aaaaaaaaagttttcttattattgttttgtttccttgtttttaggtgatgggattgtatttgcaactctctggtcagtaagtgataaaatgccatttctatgcacccacctggcctgtgt

SEQ ID NO: 645752 - DNA, 120 bp, Artificial Sequence
  ENSG00000182346_12 (sequence is synthesized)
tgaatggaaagccagaaagtagagtgaagcaagtaatgtgtgtgtgagtagtcattggatacatacataacagtgagcaagtttatcagctcctgcatggcagtgttctgatgatctttt

SEQ ID NO: 645753 - DNA, 120 bp, Artificial Sequence
  ENSG00000182346_13 (sequence is synthesized)
gcagaacattccaaggtgattctaaatggcaatttgcactgtcattttaaaagaatttctcagatatttgctgggcactttatggaaggagacactgaggcttgaagaagtaagcagcca

SEQ ID NO: 645754 - DNA, 120 bp, Artificial Sequence
  ENSG00000182346_14 (sequence is synthesized)
ccaaacttctttcatttaaagaaccaaacttctttaaataaaaatgactcacaataatttaatattttaccatttacaaagagattaactacaacaatattgatcttgagttaatttccc

SEQ ID NO: 645755 - DNA, 90 bp, Artificial Sequence
  ENSG00000182346_15 (sequence is synthesized)
ctatgttgcccaggctggagtgcagcagcgcctccagccacaacacccagcccattaatgtttaatcccctagaagcaaaggagacagaa

SEQ ID NO: 645756 - DNA, 120 bp, Artificial Sequence
  ENSG00000182346_16 (sequence is synthesized)
ttctaaccaatggaacatgggaaaggtgatgacacttgactccggtgatgaggttacctttcacaagacctggccaactgagaccggatctccttacaggcttgaagaagtaagcagcca

SEQ ID NO: 645757 - DNA, 120 bp, Artificial Sequence
  ENSG00000182348_0 (sequence is synthesized)
agccacctcgtcagagcagcatgtggactggctcgccgggtcccctccgtgctctgtgctgtcgccgccgccgcctctgtcagagcagcagctgtcggcagcaggagccccgcacggggc

SEQ ID NO: 645758 - DNA, 120 bp, Artificial Sequence
  ENSG00000182348_1 (sequence is synthesized)
gcggagcagggacgcgctgccaccgcctccccctgcgtcctgctggccgcgtcttctcgggaggtggtagtcgctgttgccgctgagaaacccgcccgctttccacggctggtcgcctgg

SEQ ID NO: 645759 - DNA, 120 bp, Artificial Sequence
  ENSG00000182348_2 (sequence is synthesized)
tgaggagttgagactctgcgcctccgcccggacccacatggcttgttacctggtcatcagttcgagacatctcagcaatgggcactaccggggcattaaaggagtcttcaggggacccct

SEQ ID NO: 645760 - DNA, 120 bp, Artificial Sequence
  ENSG00000182348_3 (sequence is synthesized)
gtgcaagaacggatctccctctccggattttgcagaaaagaagtccacagcaaaggccctggaagatgtaaaggcaaacttttactgtgaattatgtgacaagcagtatcacaaacacca

SEQ ID NO: 645761 - DNA, 120 bp, Artificial Sequence
  ENSG00000182348_4 (sequence is synthesized)
ggagtttgacaatcatattaattcttatgaccatgctcataagcagagactgaaagaattaaagcaacgggaatttgctcgaaatgtagcttctaagtcatggaaagatgagaaaaaaca

SEQ ID NO: 645762 - DNA, 120 bp, Artificial Sequence
  ENSG00000182348_5 (sequence is synthesized)
agaaaaagcacttaaacgacttcatcagctggctgagttaaggcagcaatctgaatgtgtttctggaaatggaccagcatacaaagcccccagggtagccatagaaaagcaactccagca

SEQ ID NO: 645763 - DNA, 120 bp, Artificial Sequence
  ENSG00000182348_6 (sequence is synthesized)
aggaattttccccattaagaatggcagaaaggtatcatgcatgaagagtgctcttctccttaaaggaaaaaatctccccagaatcatatccgataaacagcggtccaccatgccaaatcg

SEQ ID NO: 645764 - DNA, 120 bp, Artificial Sequence
  ENSG00000182348_7 (sequence is synthesized)
acaccaattacaatcagacaggcgttgtttgtttggaaatcaggtactgcaaacatcttcagatctcagcaatgcaaatcacagaacaggagtatcatttactttttccaaaaaagtgca

SEQ ID NO: 645765 - DNA, 120 bp, Artificial Sequence
  ENSG00000182348_8 (sequence is synthesized)
cctaaaattagaatcttcagcatcagttttcagtgagaacacagaagaaacccatgattgtaacaagtcacccatttataaaacaaaacaaactgcagataagtgcaagtgctgcaggtt

SEQ ID NO: 645766 - DNA, 120 bp, Artificial Sequence
  ENSG00000182348_9 (sequence is synthesized)
tgcaaataaagatacacaccttaccaaggaaaaagaggtaaatatctcaccaagccatctggaaagtgttttacacaataccatctccataaactctaaaattttgcaagacaaacacga

SEQ ID NO: 645767 - DNA, 120 bp, Artificial Sequence
  ENSG00000182348_10 (sequence is synthesized)
ctctattgatgagacactagaagattcaattggcattcatgcttcattctctaaatctaacattcatctttcagatgtagattttactcctaccagcagagaaaaagaaactagaaatac

SEQ ID NO: 645768 - DNA, 120 bp, Artificial Sequence
  ENSG00000182348_11 (sequence is synthesized)
attgaagaacactttagaaaattgtgttaatcacccatgccaagcaaatgcttccttcagcccaccaaacatttacaaccatagtgatgccaggatatctgaatgcctggatgagttttc

SEQ ID NO: 645769 - DNA, 120 bp, Artificial Sequence
  ENSG00000182348_12 (sequence is synthesized)
atcactggagccaagtgaacaaaagagtacagtgcatctgaatccaaattccagaatagagaacagagaaaaatctttagataaaacagaaagagttagcaaaaatgttcaaagacttgt

SEQ ID NO: 645770 - DNA, 120 bp, Artificial Sequence
  ENSG00000182348_13 (sequence is synthesized)
aaaagaagcatgtacccataatgtggcatctaaaccactaccttttctccacgttcaaagcaaggatggccacaccactcttcaatggcctacggaacttctgctctttacaaaaacaga

SEQ ID NO: 645771 - DNA, 120 bp, Artificial Sequence
  ENSG00000182348_14 (sequence is synthesized)
accctgtatctcttatggctgcaacccactgtattttgattttaagctttctcggaacacaaaggaagaccacaatctagaggacttaaaaacagaattgggtaagaagcccttggaatt

SEQ ID NO: 645772 - DNA, 120 bp, Artificial Sequence
  ENSG00000182348_15 (sequence is synthesized)
gaagactaaaagagagagccaagtctcaggtttaactgaagaccaacaaaaattgatccaagaagattatcaatatccgaaaccaaagacgatgatagctaatccggattgggaaaaatt

SEQ ID NO: 645773 - DNA, 120 bp, Artificial Sequence
  ENSG00000182348_16 (sequence is synthesized)
ccagaggaaatataatttggactacagtgattctgagccaaataagagtgaatatactttcagtgcaaatgatttggaaatgaaaaatcctaaagtgcctctttacctcaacacatctct

SEQ ID NO: 645774 - DNA, 120 bp, Artificial Sequence
  ENSG00000182348_17 (sequence is synthesized)
aaaggattgtgctggaaagaataatagtagtgagaacaaacttaaggaagcttcaagggcccattggcaaggctgcagaaaggcagttctaaatgatatagatgaggacctatcttttcc

SEQ ID NO: 645775 - DNA, 120 bp, Artificial Sequence
  ENSG00000182348_18 (sequence is synthesized)
ttcctacatctctaggtttaaaaagcataaattgattccctgcagtcctcatttggaatttgaagatgaaagacaattcaactgcaagtccagtccttgtacagtagggggtcacagtga

SEQ ID NO: 645776 - DNA, 120 bp, Artificial Sequence
  ENSG00000182348_19 (sequence is synthesized)
ccatgggaaagacttcagtgtaattttgaagagtaaccacatcagcatgaccagcaaggtttccggatgtggaaaccaaagatacaagagatactctccacagtcatgtttgagtagata

SEQ ID NO: 645777 - DNA, 120 bp, Artificial Sequence
  ENSG00000182348_20 (sequence is synthesized)
ttcttcctctttggacacatcccctagcagcatgtctagcttgagaagtacttgttcaagtcatagattcaatggtaatagcagaggtaatttgctctgcttccataaaagagaacacca

SEQ ID NO: 645778 - DNA, 120 bp, Artificial Sequence
  ENSG00000182348_21 (sequence is synthesized)
ctcagttgaaaggcacaaacggaaatgtctaaagcacaactgcttctacttgtctgatgatataacaaagagcagccaaatgcagtctgaaccacagaaagagaggaactgcaaattgtg

SEQ ID NO: 645779 - DNA, 120 bp, Artificial Sequence
  ENSG00000182348_22 (sequence is synthesized)
ggaatcatttaaaaatgaaaaatactcaaaacgtagatattgtcactgcagagaaagacaaaaactgggcaaaaatcaacaacaattttcagggctaaaatctacgagaatcatctattg

SEQ ID NO: 645780 - DNA, 120 bp, Artificial Sequence
  ENSG00000182348_23 (sequence is synthesized)
tgattctaactcacagatttcctgtactggaagcagtaaaaaaccacctaattgccagggaactcagcacgacagattggactcttactcaatagagaaaatgtattacttgaataaaag

SEQ ID NO: 645781 - DNA, 120 bp, Artificial Sequence
  ENSG00000182348_24 (sequence is synthesized)
gaagtgtaactccgggaatatcagctgccttctaaagaactgttccagtggcccttcagaaaccacagaatcaaacactgcagaaggagagaggacccctctaacagcaaaaatcctttt

SEQ ID NO: 645782 - DNA, 120 bp, Artificial Sequence
  ENSG00000182348_25 (sequence is synthesized)
agaaagagtacaagccaagaaatgtcaagaacaatcaagtaatgttgagatctcttcaaacagttgtaaaagtgaattagaggctccttcgcaagtcccatgcacaattcaacttgcacc

SEQ ID NO: 645783 - DNA, 120 bp, Artificial Sequence
  ENSG00000182348_26 (sequence is synthesized)
atcaggctgtaacagacaagcattgcctttgtctgaaaaaatacagtatgcaagtgagagcagaaatgatcaagacagtgcaattccaaggactacggagaaagacaaaagcaaaagttc

SEQ ID NO: 645784 - DNA, 120 bp, Artificial Sequence
  ENSG00000182348_27 (sequence is synthesized)
acacacaaataattttacaattttagcagacactgattgtgataaccatctttctaaaggtataattcacctagtaacagagtctcagtcactaaacataaaaagggatgcaacaacaaa

SEQ ID NO: 645785 - DNA, 120 bp, Artificial Sequence
  ENSG00000182348_28 (sequence is synthesized)
agaacaatcaaaacctttaattagtgaaatccaaccttttattcaaagctgtgacccagtaccaaatgaattccctggtgcttttccgtctaataaatatactggtgtgactgattcaac

SEQ ID NO: 645786 - DNA, 120 bp, Artificial Sequence
  ENSG00000182348_29 (sequence is synthesized)
agagacccaagaagaccaaataaatctagacttacaggatgtaagcatgcatataaatcatgtagagggaaatataaactcttactatgacagaactatgcagaaacctgacaaagtcga

SEQ ID NO: 645787 - DNA, 120 bp, Artificial Sequence
  ENSG00000182348_30 (sequence is synthesized)
agacggattagaaatgtgtcataaatctatctctccccctttaattcaacagcccataacattttctcctgacgaaatagataaatataagatcctacagctacaagcccagcagcatat

SEQ ID NO: 645788 - DNA, 120 bp, Artificial Sequence
  ENSG00000182348_31 (sequence is synthesized)
gcagaagcaactcctatcaaagcatcttcgagttttgcctgctgcagggcctactgccttctctccggcctcaaccgtacagacagttccagttcaccagcacacttctatcaccaccat

SEQ ID NO: 645789 - DNA, 120 bp, Artificial Sequence
  ENSG00000182348_32 (sequence is synthesized)
ccaccacacgttcctgcagcattttgctgtttctgcttccttaagttctcatagcagtcacctccctattgctcatctacatcctctttcacaggcacatttcagtcctatttcattttc

SEQ ID NO: 645790 - DNA, 120 bp, Artificial Sequence
  ENSG00000182348_33 (sequence is synthesized)
gactctgactccaaccattatccctgcacaccccactttcttagcaggtcatcccctgcatttagtagctgctacccccttccacccatctcacataacacttcagcctctgccccctac

SEQ ID NO: 645791 - DNA, 120 bp, Artificial Sequence
  ENSG00000182348_34 (sequence is synthesized)
agcatttattcctacattgtttggtcctcacttaaatccagccacaacttctatcatccacttgaatcctttaatccaaccagtattccaaggtcaagatttttgccatcattcttgctc

SEQ ID NO: 645792 - DNA, 120 bp, Artificial Sequence
  ENSG00000182348_35 (sequence is synthesized)
tagccagatgcaacagctaaatgaagtgaaagaggccttaaatgtgtccacacacttgaactaataagtgttaaagcccctcctgtggataatttttttaattgtcactacctataaaat

SEQ ID NO: 645793 - DNA, 120 bp, Artificial Sequence
  ENSG00000182348_36 (sequence is synthesized)
catacatttaaagaagtctgtcaattataagatttaaaatattgctgccaattcaaaatgtgacaaatatataaatatgatctgaattgctaatactaaaacaagagcattttaataatt

SEQ ID NO: 645794 - DNA, 120 bp, Artificial Sequence
  ENSG00000182348_37 (sequence is synthesized)
ttttagcttgccaaaataataggcaaatttgaataattttatgaaagcgtagagggaagagggaaagagttaaagatttgttttggatgggttctcgcataatgttataaaatagcaaca

SEQ ID NO: 645795 - DNA, 120 bp, Artificial Sequence
  ENSG00000182348_38 (sequence is synthesized)
gaaaacattcaagcagagcattaaaattaaaaagaaaaatcaaatgaaatatggcaccctgcgttctaagtatttgttgtgtgaatgaatgagtgttgatttggcttatttgttagataa

SEQ ID NO: 645796 - DNA, 120 bp, Artificial Sequence
  ENSG00000182348_39 (sequence is synthesized)
taaaaggtcagtgaaatgaagcaattatttaaagtaatttatgtcgttaactattgactaagttttcaattaatgtagtctgttactgtattttcataggaaataagaacaagacatttt

SEQ ID NO: 645797 - DNA, 120 bp, Artificial Sequence
  ENSG00000182348_40 (sequence is synthesized)
ttttctgattaatttaggttgaaaattacattttaatgaaaaacaatctttatagattatacttttgagtttctgtgaaaaataaattatcttcatttcacacaaatctatgtcaagata

SEQ ID NO: 645798 - DNA, 120 bp, Artificial Sequence
  ENSG00000182348_41 (sequence is synthesized)
tgtaattgtaagaatcagcaaaatctaaaactaagaatgtttaacttttgtataaaaacatatacaaactatcattagtatttgataatgcaaactcaaaaataaaacgtgctcagaata

SEQ ID NO: 645799 - DNA, 120 bp, Artificial Sequence
  ENSG00000182348_42 (sequence is synthesized)
accttttaaatatattggtcaatctgtcaaatataacaggaactaaaatattgtttattattcttctactcaaaaattttactacgttcagccaatacatgtataaggatagaggtaaag

SEQ ID NO: 645800 - DNA, 120 bp, Artificial Sequence
  ENSG00000182348_43 (sequence is synthesized)
gtttgaaaatgtcagtgtttttacatgtttattgaggatatcttattaaatatctggtgtgttttattcaattgtactagatatttatgaaacaatgaataatgatgaataaattcacca

SEQ ID NO: 645801 - DNA, 120 bp, Artificial Sequence
  ENSG00000182348_44 (sequence is synthesized)
tccatgtaatgttgcaaataatttcaaacattcattcaaaatggtttttggccgccaaaatttgcatttcatacatctatattggtgcataatcctacagttaggtttattattttatgt

SEQ ID NO: 645802 - DNA, 120 bp, Artificial Sequence
  ENSG00000182348_45 (sequence is synthesized)
tcttaagcatgagtttcagagaaaatcaaacttaacagaaatggaggtaatcatttatctaatgctgtctatacgaagatgcaaactcctctaccactagaagattagaggatgtcttct

SEQ ID NO: 645803 - DNA, 120 bp, Artificial Sequence
  ENSG00000182348_46 (sequence is synthesized)
tcagccttggctgcaaaaggaagatagctatatttaaggcttgttgtgattcaggtacagttaccctatccacttgtttgcattatcttctttaattttcacaactgtattttgaaatca

SEQ ID NO: 645804 - DNA, 120 bp, Artificial Sequence
  ENSG00000182348_47 (sequence is synthesized)
gtattatcattcctcattacagataaggaaaatgaaatagaaaggttaaatactaaatacttggtaaacagtaggaaaggacatcgttgattcaggagagactggtgagagagaaagaga

SEQ ID NO: 645805 - DNA, 120 bp, Artificial Sequence
  ENSG00000182359_0 (sequence is synthesized)
agcgaagggcgggaccaaggccaagagcccgacagttacgccactcacacttgcggaagagttaacgggacagcggtgcaggccaatcgcaaccagtcctctggaggcagggagactggg

SEQ ID NO: 645806 - DNA, 120 bp, Artificial Sequence
  ENSG00000182359_1 (sequence is synthesized)
gtggagacttcggagactgcagttgcagttctaaggacatatggaattggctatggataattcatatgctttcaatcaacgaagcacatgtaatggaattccatctgagaagaaaaacaa

SEQ ID NO: 645807 - DNA, 120 bp, Artificial Sequence
  ENSG00000182359_2 (sequence is synthesized)
cttccttgtatcagaagatcatggacaaaaaatcttaagtgtactacagaattttagagaacaaaatgtcttttatgatttcaaaataattatgaaagatgaaataatcccgtgtcatcg

SEQ ID NO: 645808 - DNA, 120 bp, Artificial Sequence
  ENSG00000182359_3 (sequence is synthesized)
ttgtgtgttagcagcatgcagtgactttttcagggctatgtttgaagtaaacatgaaagaaagagatgatggaagtgttaccattactaatttgtcctccaaggcagtaaaagcatttct

SEQ ID NO: 645809 - DNA, 120 bp, Artificial Sequence
  ENSG00000182359_4 (sequence is synthesized)
cgattatgcctatactggaaaaacaaaaataacagatgataatgtggaaatgttcttccagttgtcatcatttcttcaagtttccttcctatccaaagcttgcagtgactttttaataaa

SEQ ID NO: 645810 - DNA, 120 bp, Artificial Sequence
  ENSG00000182359_5 (sequence is synthesized)
aagtattaatcttgtcaattgtttacagttattatctatatcagatagctatggctccaccagtttgtttgatcatgcattacactttgtacaacatcacttttctttattatttaaatc

SEQ ID NO: 645811 - DNA, 120 bp, Artificial Sequence
  ENSG00000182359_6 (sequence is synthesized)
cagtgatttcttagagatgaattttggagtactacagaaatgtctggaatcagatgaattaaatgttcctgaagaagaaatggtactgaaagttgtccttagttggactaaacataactt

SEQ ID NO: 645812 - DNA, 120 bp, Artificial Sequence
  ENSG00000182359_7 (sequence is synthesized)
agaatcaaggcaaaagtatctgcctcatttgattgaaaaagtgagattacatcagttatctgaggagacacttcaggactgtctgttcaatgaagagagtttactcaaaagcacaaactg

SEQ ID NO: 645813 - DNA, 120 bp, Artificial Sequence
  ENSG00000182359_8 (sequence is synthesized)
ttttgacataatcatggatgcaattaagtgtgtgcaaggttctggtggactcttccctgatgctcgaccatccacaactgagaaatacatattcattcacaaaactgaggaaaatggaga

SEQ ID NO: 645814 - DNA, 120 bp, Artificial Sequence
  ENSG00000182359_9 (sequence is synthesized)
aaatcaatatacattttgctataacattaaatctgattcatggaaaatactgccgcaatcacacctgattgatttgccaggatctagtctttcgagttacggagagaaaatattcttgac

SEQ ID NO: 645815 - DNA, 120 bp, Artificial Sequence
  ENSG00000182359_10 (sequence is synthesized)
aggtggttgcaaagggaaatgttgtcgaacggttcgactgcatattgccgagtcatatcatgatgccactgatcaaacctggtgctactgtccagtgaaaaatgatttcttcttggtatc

SEQ ID NO: 645816 - DNA, 120 bp, Artificial Sequence
  ENSG00000182359_11 (sequence is synthesized)
aactatgaaaacaccaagaaccatgcatacatcagttatggctctcgatagattatttgtcataggtggaaaaactagaggatcccgggacattaaaagtctcttagatgttgaatctta

SEQ ID NO: 645817 - DNA, 120 bp, Artificial Sequence
  ENSG00000182359_12 (sequence is synthesized)
caatcctctttccaaagaatggatatctgttagcccattacccagaggcatatactatccagaagcaagcacatgccaaaatgtaatttatgttcttggatcagaggtagagattacaga

SEQ ID NO: 645818 - DNA, 120 bp, Artificial Sequence
  ENSG00000182359_13 (sequence is synthesized)
tgcttttaacccatcacttgattgcttttttaaatacaatgctacaactgatcagtggtctgaactagtagcagagtttgggcaattttttcatgcaacattaattaaagctgtaccagt

SEQ ID NO: 645819 - DNA, 120 bp, Artificial Sequence
  ENSG00000182359_14 (sequence is synthesized)
aaactgtacactgtatatatgtgacctttccacctataaggtttatagtttttgtccagacacttgtgtttggaaaggcgaaggatcttttgagtgtgcaggctttaatgcaggtgcaat

SEQ ID NO: 645820 - DNA, 120 bp, Artificial Sequence
  ENSG00000182359_15 (sequence is synthesized)
ggtgattatgcaccagatgaaatcacagatgaagtgcaggtctaccacagcaacaggtctgaatgggaagaagtttcaccaatgcctagagccttaacagaattttactgccaggtgatt

SEQ ID NO: 645821 - DNA, 120 bp, Artificial Sequence
  ENSG00000182359_16 (sequence is synthesized)
cagtttaataaatacagagacccatggttttctaatctatgtgcttgaacattctaaaacgagtccagttctagtaacctaaagtaaatttgttaaccaaaatgataggtaaaaagatct

SEQ ID NO: 645822 - DNA, 120 bp, Artificial Sequence
  ENSG00000182359_17 (sequence is synthesized)
aatgataggtaaaaagatctatacatcttaatgaaataaaacattcctgcttttagttattatgtatgtacaccatatatgaataaacagtttccaaaaacttaaaatacaaaatatatt

SEQ ID NO: 645823 - DNA, 120 bp, Artificial Sequence
  ENSG00000182359_18 (sequence is synthesized)
tataatttaaccttggggaatccagaatacttagtattttcacatgaaactacaaatcatagactctgacactttgatttttaaagtactctgtccataaaagatttgtactgtttagat

SEQ ID NO: 645824 - DNA, 120 bp, Artificial Sequence
  ENSG00000182359_19 (sequence is synthesized)
gggagaaacctctagagagagtaaaaatgaattacactgtatcttatatgaagtaaaaaataaatcagaggtgagaatattgttactgcgggtatgagttgttgaattcctatcatttgt

SEQ ID NO: 645825 - DNA, 120 bp, Artificial Sequence
  ENSG00000182359_20 (sequence is synthesized)
gatgattggttaacttcttttaggtaccctttttacccttttttagttcagaaataattctcccagctttataaatagtacactaaacatagtttaactttttttaatgactcatttttt

SEQ ID NO: 645826 - DNA, 120 bp, Artificial Sequence
  ENSG00000182359_21 (sequence is synthesized)
cattaaaagcataatgtaccatgttataatgccattagcagttacttaaatgctttaaaaattgctgattagttttcaatgtcagttggtttcaatttctagctctctctctctctctcc

SEQ ID NO: 645827 - DNA, 120 bp, Artificial Sequence
  ENSG00000182359_22 (sequence is synthesized)
tccccccctctcattttctggttcaatcttagtaaattaacattctggatttaattagtagttctaagttacacctggcctgagtttatgttaacatgtaaccctcaattggaaattttt

SEQ ID NO: 645828 - DNA, 120 bp, Artificial Sequence
  ENSG00000182359_23 (sequence is synthesized)
ggattctgggatggcagtactaaaatactttttatgtatcattgctaggttccagcctaattaaggacatagaaaattgacctctaattaagtggatcattattatggcatttcttaagc

SEQ ID NO: 645829 - DNA, 120 bp, Artificial Sequence
  ENSG00000182359_24 (sequence is synthesized)
tttatccaaatttcagctacataaaacatttcaggatttaaattagtaccatatcaattttctgtgatgatgtataccaactataaagcactatgttggtttactacttcagtaaattat

SEQ ID NO: 645830 - DNA, 120 bp, Artificial Sequence
  ENSG00000182359_25 (sequence is synthesized)
tcttagtgaattattttctaaattaaaaaaaatgacttggcttttggtattgataatagtattcacaacctgcatctgttaagatgtttgatctttaacccacacaatgtaagggtactg

SEQ ID NO: 645831 - DNA, 120 bp, Artificial Sequence
  ENSG00000182359_26 (sequence is synthesized)
ttgtcattgttctcaggtaggtgattctgccttccaagagtatatgtttctttaatcagtttaaaagataaaggcattttgggttttaagacccctgctttacatctcaggtaatgtgta

SEQ ID NO: 645832 - DNA, 120 bp, Artificial Sequence
  ENSG00000182359_27 (sequence is synthesized)
gattgtacttctctggaaccaaatgtagttttctacactcagttgtaaatgttaatctttctcaaatgtgcacattctttaaaagtgtgttcctaagtagaaatacacctaaatgaagat

SEQ ID NO: 645833 - DNA, 120 bp, Artificial Sequence
  ENSG00000182359_28 (sequence is synthesized)
tctcttattttatcatataaatttatgcaacgataagttccaaatgtatttttcaaaacagaatggaatatcagagtacattttcatgaagtttaaaaatcaaggactgttcctgattag

SEQ ID NO: 645834 - DNA, 120 bp, Artificial Sequence
  ENSG00000182359_29 (sequence is synthesized)
atgacgtatttattggtggccttcttatctaagcacatgagtagttggctctgaactttgtgtatttgaaaaaggaaaattcagtggaggcttttgtttgtgtgtgtgtggctttgaaaa

SEQ ID NO: 645835 - DNA, 120 bp, Artificial Sequence
  ENSG00000182359_30 (sequence is synthesized)
caaattatttgagaaagaccataacacagtgagtagcctatatgtgcatttactgaattgttaatttaaggatatatattaatagagtatgtttaaaataaatattgttttcatcactga

SEQ ID NO: 645836 - DNA, 120 bp, Artificial Sequence
  ENSG00000182359_31 (sequence is synthesized)
agactggggtggagacttcggagactgcagttgcagttgttccgtgtaggctgttgttgactctcgtatgaaagcccacgcgatccaagtgccctgcaggttttggtccagggaaaagtt

SEQ ID NO: 645837 - DNA, 120 bp, Artificial Sequence
  ENSG00000182359_32 (sequence is synthesized)
ggtctctgcagatgactgtaaatgactacctggaggtcgattaaagtgcggtactgcgggattcagccgatttccttcttcctctgactgcccggaaatatcagccaaaggccagcgttc

SEQ ID NO: 645838 - DNA, 120 bp, Artificial Sequence
  ENSG00000182359_33 (sequence is synthesized)
agtaattaacacaattacctgcctatgatttctgtcctatttaagatgggttctattatgtttttatctatacttgtcttcattaacttttcgtgatatcataagccccccgaatccctc

SEQ ID NO: 645839 - DNA, 120 bp, Artificial Sequence
  ENSG00000182359_34 (sequence is synthesized)
cacacacacacacaaattcagatccccaaaggacagtaaaacgaattattggcttaatatatcatcttagctaaccaaaagcctgtgtcagctgccatgttgaaaatctgcttaccagct

SEQ ID NO: 645840 - DNA, 120 bp, Artificial Sequence
  ENSG00000182359_35 (sequence is synthesized)
gcagggagcttacaatctggtaaggcaaataaatcatacgcataaaaagtacaataagagacagtgtaaagatacgtaagtgatactaatacccatatcagcaatgatcataactcactt

SEQ ID NO: 645841 - DNA, 120 bp, Artificial Sequence
  ENSG00000182359_36 (sequence is synthesized)
ctccatttttaactaagaatcatataacctttccttcttgtcgttttaaactgatttttataactttgatacattacgtttctgtttccaaaacacttctgtgtacgttattgcacatgt

SEQ ID NO: 645842 - DNA, 120 bp, Artificial Sequence
  ENSG00000182359_37 (sequence is synthesized)
taccttgtctatgcctcagattttatgatttggataattaagttctattttatactgcactcaagtttttccccacaagaacatgcaacagtaatttttaattctaaaaaaaaaaacaaa

SEQ ID NO: 645843 - DNA, 120 bp, Artificial Sequence
  ENSG00000182359_38 (sequence is synthesized)
ttttcaggtcttcccaggtcagcatttcccaaagttctctggaacattaatcccttgaactacgctgggacagaagaaatttttttgatggtgtcagctttgtttgggggatccctgtgt

SEQ ID NO: 645844 - DNA, 120 bp, Artificial Sequence
  ENSG00000182359_39 (sequence is synthesized)
acaaaaatggaagcaaaatttgaagaaaataactctgcgagaaaagaaaatttccgtcctgtgttgtattcatgtattacggggagaggagggtctaaccgatttaaaaatttatcctct

SEQ ID NO: 645845 - DNA, 120 bp, Artificial Sequence
  ENSG00000182359_40 (sequence is synthesized)
ccttagcaaattcatcctctccttatattagggaaaagtacttcttagctataaggcatttcttgaaagctctcagcttgttctaattctaagcaaccttctgaatataatttggtttcc

SEQ ID NO: 645846 - DNA, 120 bp, Artificial Sequence
  ENSG00000182359_41 (sequence is synthesized)
catgtagatcaccctaaagagaatgtcctattcataacactgcagtaatcactatgatgacagcagatttccatttctgcgaagttaagggtcagacacatgaccttgcaattactgtgt

SEQ ID NO: 645847 - DNA, 120 bp, Artificial Sequence
  ENSG00000182359_42 (sequence is synthesized)
taattgtatcaaggtagtactatcctgtgaggcttcttggtcaatagacaagccccttttggtgaaaccctgatcttcagccttcctagttatactacaataaacttaaatcctaattgc

SEQ ID NO: 645848 - DNA, 120 bp, Artificial Sequence
  ENSG00000182362_0 (sequence is synthesized)
gctctcgcgtcctttgctgggtccagacaccggtacgtccgggcgggtttttagtctcccaagcgagagcgtcgcattcacccgcgtgggtctgcgggcgccccagaccccagaggaccc

SEQ ID NO: 645849 - DNA, 120 bp, Artificial Sequence
  ENSG00000182362_1 (sequence is synthesized)
ggcccccaacgcttacctgtcccctctcctgtccctcccccattccagccccttctctccccagccgttgcccctccccgcaccccgccgcgtccgcgcgcctctctccgcgcgcacccc

SEQ ID NO: 645850 - DNA, 120 bp, Artificial Sequence
  ENSG00000182362_2 (sequence is synthesized)
caacccgcccccttttctctgggaaccgctccttccgctccgcccgcctggagtccttctggccggattccgcggcatccttccatagaccctcgttgttgcttcctccttgtggttccg

SEQ ID NO: 645851 - DNA, 120 bp, Artificial Sequence
  ENSG00000182362_3 (sequence is synthesized)
ttgcaaacatttttaaagggctggttattcttcctgaaatgagtttggtgattagaaatctgcagcgagtcatccccatcaggagagcgccacttcgcagtaagatcgagattgtaagga

SEQ ID NO: 645852 - DNA, 120 bp, Artificial Sequence
  ENSG00000182362_4 (sequence is synthesized)
cagcacattaatagaatctacagagatagaaatgtcccaaccgatgtgctttcttttccatttcatgagcatctgaaagcaggtgaatttccccagcctgattttccagatgactacaat

SEQ ID NO: 645853 - DNA, 120 bp, Artificial Sequence
  ENSG00000182362_5 (sequence is synthesized)
ttgggagacattttcctaggagtggagtatatcttccatcagtgtaaagaaaatgaagattacaatgacgtcctgactgtgacggccacccacggactctgtcacttgctgggattcaca

SEQ ID NO: 645854 - DNA, 120 bp, Artificial Sequence
  ENSG00000182362_6 (sequence is synthesized)
cacggcacggaggcagagtggcagcagatgttccagaaggagaaggcggtgctggacgagctgggccgacgcacggggacccggctgcagcccctgacccggggcctcttcggagggagc

SEQ ID NO: 645855 - DNA, 120 bp, Artificial Sequence
  ENSG00000182362_7 (sequence is synthesized)
tgagggccgcgttccttctgaaagcgggacgcgggaggggtggaggctgcggggagccggggtcgcacacgaataaataacgaatgaacgtacgaggggaacctcctcttatttccttca

SEQ ID NO: 645856 - DNA, 120 bp, Artificial Sequence
  ENSG00000182362_8 (sequence is synthesized)
gaaatcatataacctggctcatggaacatgggccttgcaaaggggtcaagatcacaaccctgcatccatgtgtgtccgtgggtaccgtaagggctactgggggaagaacctgtaagcagg

SEQ ID NO: 645857 - DNA, 120 bp, Artificial Sequence
  ENSG00000182362_9 (sequence is synthesized)
gtgtgaggagcacccaggctgggtagggactgcatgccccatgccacagttgaaggagggagagaacacgctgtgaaaacacagaagctcccagagaagccttctcagcttttatctctg

SEQ ID NO: 645858 - DNA, 120 bp, Artificial Sequence
  ENSG00000182362_10 (sequence is synthesized)
gagtagagcagactatgttgagctaacacagacctgctgaatcagcttctttctgagctgccagaagtacagaagttggagcctccaccaccttccagatctgtttctcctcagtgtaat

SEQ ID NO: 645859 - DNA, 120 bp, Artificial Sequence
  ENSG00000182362_11 (sequence is synthesized)
ccacctatgggttcttcctgcccactgcacagacaaaaccaattcactgcaattgtggtattgcagtagagaaagagtttaacacagagctagccaagcagaaaggctggagttattatt

SEQ ID NO: 645860 - DNA, 120 bp, Artificial Sequence
  ENSG00000182362_12 (sequence is synthesized)
caactcaatctcccagagaactcagaggctacagtttctacaggcaatttggcaggcaggggctagggaatgcctgctgctgatcggctgcagacggaccatggggtgtcaacgattttt

SEQ ID NO: 645861 - DNA, 120 bp, Artificial Sequence
  ENSG00000182362_13 (sequence is synthesized)
gtcccctgagtccgcctctgcgtggagccacgggatcagctgagtcatgagtctcaggtccaggtggagtctgtaggttgccagaactcaaaagtctgaaaaacatcccaaaagaccatt

SEQ ID NO: 645862 - DNA, 120 bp, Artificial Sequence
  ENSG00000182372_0 (sequence is synthesized)
ctctcgtagcgacgcccccaggggggcagaacgcgtgcgcacgcgcgtgcgaacgcgcgtgcgcgggcggtgtttgaggccggccagtcgtgactgggcggcaatgaggtcagtgactgc

SEQ ID NO: 645863 - DNA, 120 bp, Artificial Sequence
  ENSG00000182372_1 (sequence is synthesized)
cgggagtcctgcaggggcggggcggcgccaagcgcagggagcccggctgagtggcagcccagattgaagatggatacgtgacaatcccagggaccgctgcactgacttcatttccttaga

SEQ ID NO: 645864 - DNA, 120 bp, Artificial Sequence
  ENSG00000182372_2 (sequence is synthesized)
caagacacagtgtagggcccggcccgtgttggccccaggactcctttggaatatagctgtggacaatgaatcctgcgagcgatgggggcacatcagagagcatttttgacctggactatg

SEQ ID NO: 645865 - DNA, 120 bp, Artificial Sequence
  ENSG00000182372_3 (sequence is synthesized)
catcctgggggatccgctccacgctgatggtcgctggctttgtcttctacttgggcgtctttgtggtctgccaccagctgtcctcttccctgaatgccacttaccgttctttggtggcca

SEQ ID NO: 645866 - DNA, 120 bp, Artificial Sequence
  ENSG00000182372_4 (sequence is synthesized)
gagagaaggtcttctgggacctggcggccacgcgtgcagtctttggtgttcagagcacagccgcaggcctgtgggctctgctgggggaccctgtgctgcatgccgacaaggcgcgtggcc

SEQ ID NO: 645867 - DNA, 120 bp, Artificial Sequence
  ENSG00000182372_5 (sequence is synthesized)
agcagaactggtgctggtttcacatcacgacagcaacgggattcttttgctttgaaaatgttgcagtccacctgtccaacttgatcttccggacatttgacttgtttctggttatccacc

SEQ ID NO: 645868 - DNA, 120 bp, Artificial Sequence
  ENSG00000182372_6 (sequence is synthesized)
atctctttgcctttcttgggtttcttggctgcttggtcaatctccaagctggccactatctagctatgaccacgttgctcctggagatgagcacgccctttacctgcgtttcctggatgc

SEQ ID NO: 645869 - DNA, 120 bp, Artificial Sequence
  ENSG00000182372_7 (sequence is synthesized)
tcttaaaggcgggctggtccgagtctctgttttggaagctcaaccagtggctgatgattcacatgtttcactgccgcatggttctaacctaccacatgtggtgggtgtgtttctggcact

SEQ ID NO: 645870 - DNA, 120 bp, Artificial Sequence
  ENSG00000182372_8 (sequence is synthesized)
gggacggcctggtcagcagcctgtatctgcctcatttgacactgttccttgtcggactggctctgcttacgctaatcattaatccatattggacccataagaagactcagcagcttctca

SEQ ID NO: 645871 - DNA, 120 bp, Artificial Sequence
  ENSG00000182372_9 (sequence is synthesized)
atccggtggactggaacttcgcacagccagaagccaagagcaggccagaaggcaacgggcagctgctgcggaagaagaggccatagctgctccagccggggctccggggcggcagcagag

SEQ ID NO: 645872 - DNA, 120 bp, Artificial Sequence
  ENSG00000182372_10 (sequence is synthesized)
ctggcacaccgattctgggaagccccgcgaatgatggcttttgaattaatgaggcagtgaatgttttgtgtttacttctaagggaaatactaactttctttcgcattagtattaattttg

SEQ ID NO: 645873 - DNA, 120 bp, Artificial Sequence
  ENSG00000182372_11 (sequence is synthesized)
aagtagctacaaagtatttttaagaaattataattttatgactgtctggcaggctctgtcagtttagccgcgccggaccgtgtcaagcatctaggagaggagtccatggtgtccaggcat

SEQ ID NO: 645874 - DNA, 120 bp, Artificial Sequence
  ENSG00000182372_12 (sequence is synthesized)
cggggcgtcacacctgttgaggagtggggtggctttgaatgctggaaatggcttcatagtgaagtgcctcccacagggcgggtgggtcagcgttgactctttccagctgcacactcatat

SEQ ID NO: 645875 - DNA, 120 bp, Artificial Sequence
  ENSG00000182372_13 (sequence is synthesized)
gccgtgtgtcttattcagaagtcacattcttttcagttggagagaattgggctaagatagaaaataacatgatttgttccttattaaagcttcccagcgtatgaaattctaagctgggtg

SEQ ID NO: 645876 - DNA, 120 bp, Artificial Sequence
  ENSG00000182372_14 (sequence is synthesized)
tctctctcaaaaaaaaaaaaaaaaaaaaattctagaccgaagtgtacggcagtgccatctggtggcaagtggtacaaagacaacgctgaggggtagtgactcctgtagcagcagagacgc

SEQ ID NO: 645877 - DNA, 120 bp, Artificial Sequence
  ENSG00000182372_15 (sequence is synthesized)
gctgaggggtagtgactcctgtagcagcagagacgccttggagtttaacccccaccaaccagagcgtgggctggtaaagatgaaatcttgcaagttttttttttttttaaatcatggtac

SEQ ID NO: 645878 - DNA, 120 bp, Artificial Sequence
  ENSG00000182372_16 (sequence is synthesized)
ctgttttaaaatgagaagttattattcatactgtgttgctcatttgacaaaataaggtaaggatttcataatcaggttgtctgggtttcagagctgtttttaattgactgagttacctac

SEQ ID NO: 645879 - DNA, 120 bp, Artificial Sequence
  ENSG00000182372_17 (sequence is synthesized)
aggcacccaatctagaccctaattctgtggttggtgttcctctgtagatttcaagacaagtagtgatgtcattttctccctgagctgtagggtggacctggacccctcagagatgctcga

SEQ ID NO: 645880 - DNA, 120 bp, Artificial Sequence
  ENSG00000182372_18 (sequence is synthesized)
ctgcagggtcctggggtccctagagtggtcctgcagcagcccctggcaatgagctgcctgatgatgagtcccaaggtacattgttctactgttttatacccaggtagaagttacacagca

SEQ ID NO: 645881 - DNA, 120 bp, Artificial Sequence
  ENSG00000182372_19 (sequence is synthesized)
tgtgtgtgtgtgtgtgtgtgtgtgagtgttttgatataaacgtgcaattaaaattcaaagtttattttttatcacaagcacctttgaaatgtacgtggaaaacgtcggctgctcgtgaga

SEQ ID NO: 645882 - DNA, 120 bp, Artificial Sequence
  ENSG00000182372_20 (sequence is synthesized)
tgaaatgtacgtggaaaacgtcggctgctcgtgagaatcatgtgtgacttacgttccttatgttttatggaactctcggaacagtgttttgtttttgtttagtttttgttttcgtttttt

SEQ ID NO: 645883 - DNA, 75 bp, Artificial Sequence
  ENSG00000182372_21 (sequence is synthesized)
ggattctcctgcctcaccctttcaagtagctgggattacaggtacctctaccatgcctggctgattttttgtatt

SEQ ID NO: 645884 - DNA, 120 bp, Artificial Sequence
  ENSG00000182372_22 (sequence is synthesized)
cccaaagttctgggattacgggcgtgagccacttcacccggcccggagcggtgtattttgattgctggtgctttaactatattgaccaaggtgtatagtaacctatttatcacattttac

SEQ ID NO: 645885 - DNA, 120 bp, Artificial Sequence
  ENSG00000182372_23 (sequence is synthesized)
gaagcaattttaatcttaaacacatccagcaaatggtgtccctgctgaaacttttaactggaaacctcacacctggcaggcagcactctctgcagccgtgcccttgtggagtcagcagga

SEQ ID NO: 645886 - DNA, 120 bp, Artificial Sequence
  ENSG00000182372_24 (sequence is synthesized)
gctggtgtttttcagccagacagaggcataataaagtgactgatgtttacagaacccaaatgatgtcttcctctctctcaaaataaactaacctattcatattgctgtgaatgctttatc

SEQ ID NO: 645887 - DNA, 120 bp, Artificial Sequence
  ENSG00000182372_25 (sequence is synthesized)
ttggagatagaaaatataatgataaattcatcatgtgttcagaattcgatttggagttggaagtggacagcctaatttttatctcacctccactaggactttgaccttcccaggggtcca

SEQ ID NO: 645888 - DNA, 120 bp, Artificial Sequence
  ENSG00000182372_26 (sequence is synthesized)
tgtcacccacacattggtccggggacccctcagtgcagagcctgaagttgggggtttaggggtggaaaaggcttcgtgaaatgttaatgatgcgtacaccttccagatggcacagcactt

SEQ ID NO: 645889 - DNA, 120 bp, Artificial Sequence
  ENSG00000182372_27 (sequence is synthesized)
tcccatggtcctcactggcctcagtctccctgaccggcagtgtgaggggatgtagctatagtggagcatggtacaagcgacattcatgagctctgacttcttggtgccaggttggtgtga

SEQ ID NO: 645890 - DNA, 120 bp, Artificial Sequence
  ENSG00000182372_28 (sequence is synthesized)
gcctgggcccggcccactcagcggcccacattggccagcattcagctgcacgtgtgtgctgcgtgcttcacatcctctattgagagttacagcaagtgttaaacgaggtgagttcacata

SEQ ID NO: 645891 - DNA, 120 bp, Artificial Sequence
  ENSG00000182372_29 (sequence is synthesized)
acaggaattctggaactgcttgaaaactaggacgattgggcaatatcggccttaactccacctgatggcaggtgacccggatagaaaatggccctgcgtttagccaggatgtggctctcc

SEQ ID NO: 645892 - DNA, 120 bp, Artificial Sequence
  ENSG00000182372_30 (sequence is synthesized)
agcttggcttcagtgtgatcacttgtcagtgcgctttctctttcgatagtgaaatccttctctatacctatgttttgttttgtttcttaagttgggaaacagaatgggccagggaggttg

SEQ ID NO: 645893 - DNA, 120 bp, Artificial Sequence
  ENSG00000182372_31 (sequence is synthesized)
agtgactgaagaccaagggttggtgcagcctcctcgccgcgctgcgggggctgggccgcacaggcttctgcccttctcggtgtccaggctccttgggtgatgctggagttgtcatggccg

SEQ ID NO: 645894 - DNA, 120 bp, Artificial Sequence
  ENSG00000182372_32 (sequence is synthesized)
cagttcagtgtgagattttttaccaggtattgcgcttaagggacatgattttccattttcttcgcccggacaacttgaatgaaatgggcactgttgattccacttctgtcgaggagcttc

SEQ ID NO: 645895 - DNA, 120 bp, Artificial Sequence
  ENSG00000182372_33 (sequence is synthesized)
ggggctcagagaggtgatgacgtgcccaaggtgacgcaactcgtgaacagccgtgcctgccttgggcgcagcctccggcgccagagctgggctcttcaacacggcatttagcgcagaaag

SEQ ID NO: 645896 - DNA, 120 bp, Artificial Sequence
  ENSG00000182372_34 (sequence is synthesized)
acggcatttagcgcagaaagtcgtggttcaggcagtatgggccgctgtgacaaaacacctaagactgggtagtttataaagaacagacattcaggccaggcacggtgactcacgcctgta

SEQ ID NO: 645897 - DNA, 120 bp, Artificial Sequence
  ENSG00000182372_35 (sequence is synthesized)
cacagttctggaggctggaagtccaagataaaggtgtgggctgattagtttctgctgggaacactgcatcctcacgtggtggaggggatggaaggtcaacaggcctcagctagttctccg

SEQ ID NO: 645898 - DNA, 120 bp, Artificial Sequence
  ENSG00000182372_36 (sequence is synthesized)
caacaggcctcagctagttctccgctgcctttttatgaggcattaagccatttgcaagagtagggggccccacctcttaataccaccgcaatgacaattacaatgtcatgtgaattctgg

SEQ ID NO: 645899 - DNA, 120 bp, Artificial Sequence
  ENSG00000182372_37 (sequence is synthesized)
aggggacacggtcacactgcagcatcagcacccggtgaatgtggttctcttcccatgtccgaattttgtgagctccacacgggcagggttgcatctgttttattctctgattgattctaa

SEQ ID NO: 645900 - DNA, 120 bp, Artificial Sequence
  ENSG00000182372_38 (sequence is synthesized)
gccccatgtccctggcacaggatggctgcttggcagtagggagtggatgaaccagtagtacccagggctgccaggcagggccctgcaggggacagacccaagggctgatatggggacacc

SEQ ID NO: 645901 - DNA, 120 bp, Artificial Sequence
  ENSG00000182372_39 (sequence is synthesized)
tgctgaggggggaatttaccacggtaagggcagggctgggaggctgggcagccagtttcaccctcgcacaggctgcctggcaagaccagcggctggaggtgatgtcctcagtagagaacg

SEQ ID NO: 645902 - DNA, 120 bp, Artificial Sequence
  ENSG00000182372_40 (sequence is synthesized)
gtggccactggaaacgtgtggccagaaggggaaacgctcgggcctctggtgggggccagcctggggtggggtcggccagggtcagctgcctttccttcatgctggggaggagatgttgtg

SEQ ID NO: 645903 - DNA, 120 bp, Artificial Sequence
  ENSG00000182372_41 (sequence is synthesized)
tgcatgtgagaaagcatttgatagcatgccaaaagtttcctccattatgtgcgtgtcaagtgtttgaccaggtcagaactcttgttctatgcgaatgtgctcacgcagacagaagcggag

SEQ ID NO: 645904 - DNA, 120 bp, Artificial Sequence
  ENSG00000182372_42 (sequence is synthesized)
gggctccgtcgctctgccctcacgccgctgaaccgcgagggtctcccgctcctcaggcttgcggctcggccgcgaagtgtgtcaggtgtgcatcctgggtgctcctttgtgctctgtcct

SEQ ID NO: 645905 - DNA, 120 bp, Artificial Sequence
  ENSG00000182372_43 (sequence is synthesized)
acggtgacacaggcggcgtggggttagacaggtaccggtcagactacggtgacacaggcggcgtgcggttagacaggtaccggtcagattacggtggcacaggcggcgtggggttagaca

SEQ ID NO: 645906 - DNA, 120 bp, Artificial Sequence
  ENSG00000182372_44 (sequence is synthesized)
ggtaccggtcagattacggtggcacaggcggcgtggggttagacaggtaccggtcagattacggtggcacaggcggcgtggggttagacaggtaccggtcagattacggtggcacaggcg

SEQ ID NO: 645907 - DNA, 120 bp, Artificial Sequence
  ENSG00000182372_45 (sequence is synthesized)
gcgtggggttagacaggtaccggtcagattacggtggcacaggcagcgtggggttagacaggtaccggtcagattacggtggcacaggcggcgtggggttagacaggtaccggtcagatt

SEQ ID NO: 645908 - DNA, 120 bp, Artificial Sequence
  ENSG00000182372_46 (sequence is synthesized)
acggtggcacaggcggcgtggggttagacaggtaccggtcagattacggtgacacaggcggcgtggggttagacaggtaccggtcagattacggtggcacaggctgcgtggggttagaca

SEQ ID NO: 645909 - DNA, 120 bp, Artificial Sequence
  ENSG00000182372_47 (sequence is synthesized)
ggtaccggtcagattacggtggcacaggcggcgtggggttagacaggtactggtcagatgcacgggctccctaaacccctgctgtggcttcggcagtaaagacaggacgcacccatgtca

SEQ ID NO: 645910 - DNA, 120 bp, Artificial Sequence
  ENSG00000182372_48 (sequence is synthesized)
caagaggagcacaggcaggggtgttggtgttggggcagccctcagggtctccagaccccagccccactcacacagcagcctaggaaggaagggcagagtcccaggtgtcagctggtgggt

SEQ ID NO: 645911 - DNA, 120 bp, Artificial Sequence
  ENSG00000182372_49 (sequence is synthesized)
ctcccaggagctgcccctccctggaagtcacaggacaggaatgacagatcagggaactgcaggaagctgccacctctggggtcagaatatgcccagcctgcgggggctctctatcggggt

SEQ ID NO: 645912 - DNA, 120 bp, Artificial Sequence
  ENSG00000182372_50 (sequence is synthesized)
cttcgagagccagacagcctgccttgtgctgcatacctggctttgctctgtgcagaacccagcacacgtgattttgtgtgacatgccagcagcctggctcccaggacaggaggcctgccc

SEQ ID NO: 645913 - DNA, 120 bp, Artificial Sequence
  ENSG00000182372_51 (sequence is synthesized)
tgggggaggggctgcaggaggagggggggcaggcacccatgagtctgtccagccttgtcacagatgcatcgcccaccctgcggtcctgatttcagctcacctcagagtaaatcagaataa

SEQ ID NO: 645914 - DNA, 120 bp, Artificial Sequence
  ENSG00000182372_52 (sequence is synthesized)
actgcacccagactttcacgaatgcatgttgacgctttcagttcacccctttctttgctaactttcttcctattttcttctaatgcgagagcttattaattccatatttatcattttgaa

SEQ ID NO: 645915 - DNA, 120 bp, Artificial Sequence
  ENSG00000182372_53 (sequence is synthesized)
taacttttctcctttttagtaacaaaatgtacttcactcttagtaaaatgtatttactattttagtaacaaaaatatacttgcctaatcatgtttaaaatatagtgatgtgaaaaattca

SEQ ID NO: 645916 - DNA, 120 bp, Artificial Sequence
  ENSG00000182372_54 (sequence is synthesized)
ttgaggccggccagtcgtgactgggcggcaatgaggtcagtgactgccgggagtcctgcaggggcggggcggcgccaagcgcagggagcccggctgagtggcagcccaggtgagcgctca

SEQ ID NO: 645917 - DNA, 120 bp, Artificial Sequence
  ENSG00000182372_55 (sequence is synthesized)
agtgactgccgggagtcctgcaggggcggggcggcgccaagcgcagggagcccggctgagtggcagcccagattggccgtcatggaggctgtggttgttaaggaagttcttcctgagcat

SEQ ID NO: 645918 - DNA, 120 bp, Artificial Sequence
  ENSG00000182372_56 (sequence is synthesized)
ccagtttccatacaaagagcacaggttctctaggtggcctcagagatgttcaatacacaatgtcttctgataacgaggaactgggcaaaagcctggtaggacaccggattgaagatggat

SEQ ID NO: 645919 - DNA, 120 bp, Artificial Sequence
  ENSG00000182372_57 (sequence is synthesized)
atgcttgcagagtcatcttcagaatgagtcagctccgcttgtcccaggcaggagactcacgagttgatgtgaaatgcggattccctatgagacggaggacattgcatgtctcatcccatc

SEQ ID NO: 645920 - DNA, 120 bp, Artificial Sequence
  ENSG00000182372_58 (sequence is synthesized)
acgaccgtgtgggtctcgttatttcataagagagggggaaaatgtgaattggaattttatttcctaagtactgttcttggtttctgaccagctgatcccaagtttcacatccttgtctgt

SEQ ID NO: 645921 - DNA, 120 bp, Artificial Sequence
  ENSG00000182372_59 (sequence is synthesized)
tatacacggcccttattaaagaacgtctcaaaggaatcgcgataggtgcaggggccactgcagtgggactaggctcaactctgagtgtaagaagaaaaacgggaatgtacagccacggag

SEQ ID NO: 645922 - DNA, 120 bp, Artificial Sequence
  ENSG00000182372_60 (sequence is synthesized)
agggtgagaacggacggaaaactatgaagaggctacatcaggccaggggggttcttgctagaaccacttggtaggattcgtgccacaggcaggccaggtgataagataccgagggtgagg

SEQ ID NO: 645923 - DNA, 120 bp, Artificial Sequence
  ENSG00000182372_61 (sequence is synthesized)
aaccaacccccatcctgcctttgacctccaaactgtctttcatcactcctaggcctgggccaaactaattttggaagatatttatagtttaaacgataatagcccttctcccgaactgaa

SEQ ID NO: 645924 - DNA, 120 bp, Artificial Sequence
  ENSG00000182372_62 (sequence is synthesized)
ctgcctgtgtaaagctaatgaaaggccagtaggttaggaggatgagaggagcctggattctgctaaaatatagatgtaaacgacgaccagccattactctggaggtcacaagatttgcag

SEQ ID NO: 645925 - DNA, 120 bp, Artificial Sequence
  ENSG00000182372_63 (sequence is synthesized)
cttctgcagataaacatcactattgtagaacctaagattggccgtttgagatgtcctttcaagtttttgcatttctgatgtccgactgatcctgtggccccactcagaagcggactccct

SEQ ID NO: 645926 - DNA, 120 bp, Artificial Sequence
  ENSG00000182372_64 (sequence is synthesized)
tgtggccccactcagaagcggactccctggcctgctaaactacccttgaaatacagtagcctccaaattttcagggaaattgatttaagtaatggtcaggcctctgagcccaagccaagc

SEQ ID NO: 645927 - DNA, 62 bp, Artificial Sequence
  ENSG00000182372_65 (sequence is synthesized)
ggctcaaaaagcttctgtaattttcctttacctacgcaaatcctataaaacggtcccaccct

SEQ ID NO: 645928 - DNA, 67 bp, Artificial Sequence
  ENSG00000182372_66 (sequence is synthesized)
tgcccgccagagaacaaaccccctttgtctgtaattttcctttacctacgcaaatcctataaaacgg

SEQ ID NO: 645929 - DNA, 120 bp, Artificial Sequence
  ENSG00000182372_67 (sequence is synthesized)
gcatcctgtacgcagcttgcagttttccagttttctctttgtgggcgttatttccataagagtgcagacttctgggatgcaggtcagggctgtgacttccctgggtttctctggagtgag

SEQ ID NO: 645930 - DNA, 120 bp, Artificial Sequence
  ENSG00000182372_68 (sequence is synthesized)
atcagtgtggagtggagaggtgtgtgctggaggaagaggccttggcctgtgctccgcattgcctactcctctcacctggaaacaccggacttcaggagtcactcggctgtggcagaaaat

SEQ ID NO: 645931 - DNA, 120 bp, Artificial Sequence
  ENSG00000182372_69 (sequence is synthesized)
atatcactgtgggactttcttggaacatgaggagagttgggtgataggaacacaaggagcagagaacgcactggcctctgacagccgctctgtgcagattcagtccttcagccacccgca

SEQ ID NO: 645932 - DNA, 120 bp, Artificial Sequence
  ENSG00000182378_0 (sequence is synthesized)
cttccgggcagcagggaagatctgagttcatgtagctggtgttggcttagggtctgggaggaaggcttttgggaagatgtaaataagaacaaaatctgcagccacctgggaagcctggcc

SEQ ID NO: 645933 - DNA, 120 bp, Artificial Sequence
  ENSG00000182378_1 (sequence is synthesized)
tcagtgtggaagagaaggcagcaggattattacagaaccttgtgaagccaacgcgggcagccgccaggagctgcagaccgagaggatctcgtcctttcttgcggcccagggagaccaggc

SEQ ID NO: 645934 - DNA, 120 bp, Artificial Sequence
  ENSG00000182378_2 (sequence is synthesized)
ctttcattctgggctcgagaccaacaattcgaattccgaactccccctgcgtgtgggactcaaggttgcccagggctcacctctgatgggtgggcaggtgagcgcttccaacagcttctc

SEQ ID NO: 645935 - DNA, 120 bp, Artificial Sequence
  ENSG00000182378_3 (sequence is synthesized)
gaggctgcactgcagaaatgccaacgaggactggatgtcggcactgtgtccccggctctgggatgtgcccctccaccacctctccatcccagggagccacgacacgatgacgtactgcct

SEQ ID NO: 645936 - DNA, 120 bp, Artificial Sequence
  ENSG00000182378_4 (sequence is synthesized)
gaacaagaagtcccccatttcgcacgaggagtcccggctgctgcagctgctgaacaaggccttgccctgcatcacgcgccctgtcgtgctgaaatggtccgtcacccaggcactggacgt

SEQ ID NO: 645937 - DNA, 120 bp, Artificial Sequence
  ENSG00000182378_5 (sequence is synthesized)
cacagagcagctggatgccggggtgcggtacctggacctgcggatagcccacatgctggagggctcggagaagaacctgcactttgtccatatggtgtacacaacggcgctggtggagga

SEQ ID NO: 645938 - DNA, 120 bp, Artificial Sequence
  ENSG00000182378_6 (sequence is synthesized)
cacactcacggaaatctcggagtggctggagcggcatccacgcgaggtggtcatcctggcctgcagaaacttcgaggggctgagcgaggacctgcacgagtacctggtcgcctgtatcaa

SEQ ID NO: 645939 - DNA, 120 bp, Artificial Sequence
  ENSG00000182378_7 (sequence is synthesized)
gaacatcttcggggacatgctgtgtcctcgtggggaggtgccgacactgcggcagctgtggtcccggggccaacaggtcatcgtctcctatgaagacgagagctccttgcgccggcacca

SEQ ID NO: 645940 - DNA, 120 bp, Artificial Sequence
  ENSG00000182378_8 (sequence is synthesized)
cgagctgtggccaggagtcccctactggtggggaaacagggtgaagaccgaggccctcatccgatacctggagaccatgaagagctgcggccgcccaggagggttgttcgtggccggcat

SEQ ID NO: 645941 - DNA, 120 bp, Artificial Sequence
  ENSG00000182378_9 (sequence is synthesized)
caacctcacggagaacctgcagtacgttctggcgcacccgtccgagtccctggagaagatgacgctgcccaaccttccgcggctgagcgcgtgggtccgagagcagtgcccggggccggg

SEQ ID NO: 645942 - DNA, 120 bp, Artificial Sequence
  ENSG00000182378_10 (sequence is synthesized)
ttcacggtgcaccaacatcatcgcgggggacttcatcggcgcagacggcttcgtcagtgacgtcatcgcgctcaatcagaagctgctgtggtgctgacgggacccttctgaagttcggga

SEQ ID NO: 645943 - DNA, 120 bp, Artificial Sequence
  ENSG00000182378_11 (sequence is synthesized)
cgcggcggctgcagtttcacccccgaatttccaagtattgtgactttgtttgggccaaatgttggtgatcataggaccgatgataatacgttttcattttctttaaaatagagatggggt

SEQ ID NO: 645944 - DNA, 72 bp, Artificial Sequence
  ENSG00000182378_12 (sequence is synthesized)
tgataatacgttttcattttctttaaaatagagatggggtggctgggcgtggtgacttcgcctgtccttgag

SEQ ID NO: 645945 - DNA, 120 bp, Artificial Sequence
  ENSG00000182378_13 (sequence is synthesized)
cctgtagtcccagttactcgggaggctcaggcaggagaactgcttgaagccgggagatggaggttgcattgagctgacatcgtgccactgcactccagtctgaatgatagaccgagactc

SEQ ID NO: 645946 - DNA, 120 bp, Artificial Sequence
  ENSG00000182378_14 (sequence is synthesized)
tgcattgagctgacatcgtgccactgcactccagtctgaatgatagaccgagactccatctcaaaagaaaaaaaaacagccgagtgtgcagtgactcacgcctgtcatcccagcactttg

SEQ ID NO: 645947 - DNA, 78 bp, Artificial Sequence
  ENSG00000182378_15 (sequence is synthesized)
gacagtcaagaaccaccatggcagcccataatatgttttcttatttctgtattctccttgctgtggcgtctggagccc

SEQ ID NO: 645948 - DNA, 120 bp, Artificial Sequence
  ENSG00000182378_16 (sequence is synthesized)
tcttatttctgtattctccttgctgtggcgtctggagcccttacagacccagggagacactatcctcccacagctcactaattactaaacacagtgacagcccacttaggagccggcctc

SEQ ID NO: 645949 - DNA, 120 bp, Artificial Sequence
  ENSG00000182378_17 (sequence is synthesized)
ccctgtcagccaacccctcagctagttctcacaccaagcctatagatatatatgtgtgtgtatatatgtgtgtttatgtgtctgtgtgtatatatgtgtatatatcggtgtgtatatatg

SEQ ID NO: 645950 - DNA, 120 bp, Artificial Sequence
  ENSG00000182378_18 (sequence is synthesized)
tatgtatgtttatacatgtgtatatgtgtgtgtgtgtgtgtatatgtgtgtatgtgtgtatatatgtatatgtgtgcatatgtgtatacgtgtatgcatacatgtatatgtgtatgcatg

SEQ ID NO: 645951 - DNA, 120 bp, Artificial Sequence
  ENSG00000182378_19 (sequence is synthesized)
tatatgtgtatgtgtacatgtatatgtgtttatacatgtatatgtgtgtatgcgtgtatacgtgtatgtatacatgtatatgtgtgtatgcgtgtatatacacacgtatacatatatacg

SEQ ID NO: 645952 - DNA, 86 bp, Artificial Sequence
  ENSG00000182378_20 (sequence is synthesized)
tcccccgactaatttcatatatttagtagagacggggtttctccgcgttggtcaggccgttctcaaacttctgacctcaggtgatc

SEQ ID NO: 645953 - DNA, 120 bp, Artificial Sequence
  ENSG00000182378_21 (sequence is synthesized)
acaggcatgagccactgtgcccagccgccgatatttctttaaattatgtttagggacagggtctttttctgtcacccaggctggagggcagtggtacagtcatagctcactgcagcctca

SEQ ID NO: 645954 - DNA, 120 bp, Artificial Sequence
  ENSG00000182378_22 (sequence is synthesized)
ctcaacctcctgggctcaagcgatcctctcagctcagcctcccgtgtagctggggctccagggacacacccccactgctggctaatttttgtatttttggtagagtcagggtttcaccac

SEQ ID NO: 645955 - DNA, 120 bp, Artificial Sequence
  ENSG00000182378_23 (sequence is synthesized)
gtcagggtttcaccacatggcacagtctggtctcaaattcctgggctccagtgatcctcccaccttagcttccagagtggccaggatcacaggcaggcaccaccatgcccaggtaatttt

SEQ ID NO: 645956 - DNA, 120 bp, Artificial Sequence
  ENSG00000182378_24 (sequence is synthesized)
atttttttgtagagacgtggtctggctatgttgtccagggtggtctcaaactcctgggctcaactgatcctcccacctcaacctctgccatagccaggacctcaggtgtcagccaccaca

SEQ ID NO: 645957 - DNA, 120 bp, Artificial Sequence
  ENSG00000182378_25 (sequence is synthesized)
cccacagctaattttttttgtagagatggggtctggctctgttgctcaggctggtgtgtagtaggggcacagtcatagctcactgtaaccttcaacgcctgggctgaagcaattctcccg

SEQ ID NO: 645958 - DNA, 120 bp, Artificial Sequence
  ENSG00000182378_26 (sequence is synthesized)
gcaattctcccgcctcagcttcccaagtaactgggagtataggtgtacaccaccatgcccagctaattatttagtagtagtaggaggagtattatgtttgagatggagtctcgctctgtc

SEQ ID NO: 645959 - DNA, 120 bp, Artificial Sequence
  ENSG00000182378_27 (sequence is synthesized)
cacctggcctcaagccagtatttccctggccctaaatcattcctggctgggtcccagcccagtagagccagccccccagcccggagtgctactgaagtgttcaaaagttgtcaatcctca

SEQ ID NO: 645960 - DNA, 120 bp, Artificial Sequence
  ENSG00000182378_28 (sequence is synthesized)
gccgttccctagtcctgttgcccggttctgccgaagccccttgaaggctgtggcctgggctgttccctcattcattcctgcctcccgagccaaacccaggtatccgcttgtgccctgcgt

SEQ ID NO: 645961 - DNA, 120 bp, Artificial Sequence
  ENSG00000182378_29 (sequence is synthesized)
ggtgtggcagcgtcttctctcgggaagggtcaggagtaatttcttctttcagtggcctctctgtgctagtcccggtcacctccgtgaattaaagtcctacaggtacaagggagacccccc

SEQ ID NO: 645962 - DNA, 120 bp, Artificial Sequence
  ENSG00000182378_30 (sequence is synthesized)
ccccacggaaggcgcccccagtccgtgtgggagactcgcacaccggttttctgcacaggtttctttctgcctctgaagcgtgaacggtcctagtttcagacgcagatcctgcaaatactt

SEQ ID NO: 645963 - DNA, 77 bp, Artificial Sequence
  ENSG00000182378_31 (sequence is synthesized)
tgaacggtcctagtttcagacgcagatcctgcaaatacttttttttgtttttttgagatggattttccctcttgttg

SEQ ID NO: 645964 - DNA, 120 bp, Artificial Sequence
  ENSG00000182378_32 (sequence is synthesized)
ccgaggagctgagattacaggcgcgtgccaccgtgcctggttaattttgtatttgtatttttatttatgttttgagacggagtttcgctctcgttgccgaggctggagtgtagtagtgtg

SEQ ID NO: 645965 - DNA, 120 bp, Artificial Sequence
  ENSG00000182378_33 (sequence is synthesized)
acctcattttctacatgtcgcttgttggagctgctggttcaagttcccagccagccaatggatgccagcaccatttttactcccctttcccaagcaaatcgtgcatttttgtctaacgag

SEQ ID NO: 645966 - DNA, 120 bp, Artificial Sequence
  ENSG00000182378_34 (sequence is synthesized)
agacatcagtttctcaggatgatcctcaagaacgttatggagtccatgttgcaataggttctctttgggacctaatgactcattttccaaaaatccgcttctacttttggtacccggttg

SEQ ID NO: 645967 - DNA, 120 bp, Artificial Sequence
  ENSG00000182378_35 (sequence is synthesized)
ctacggtgaaatgaaggtgccccgcatccagaaagacgcactcctggaccacaaccggcggctacctcagccccacggctctgcaggatcagggctcgggcaggccccgcggagatgaag

SEQ ID NO: 645968 - DNA, 120 bp, Artificial Sequence
  ENSG00000182378_36 (sequence is synthesized)
aatttgcagggagcctccctgacttccgtcggctgtgaatccttgtctgtcaggggcgtatccacaaaatcaccgaattcatacagatcgtttaaataaatgaacatcattaaagtcaaa

SEQ ID NO: 645969 - DNA, 120 bp, Artificial Sequence
  ENSG00000182378_37 (sequence is synthesized)
gggctggaccagctaaaggctcgcatttgcatattaaaggttgccaagccgggtctaagagccagggctttcacgctagacaagaaacattttttggagctgcaaaaaatgcttccaagg

SEQ ID NO: 645970 - DNA, 90 bp, Artificial Sequence
  ENSG00000182378_38 (sequence is synthesized)
caagaaacattttttggagctgcaaaaaatgcttccaaggaccccttttcctctctctctctctcttttttttttttcttttttggatat

SEQ ID NO: 645971 - DNA, 120 bp, Artificial Sequence
  ENSG00000182378_39 (sequence is synthesized)
gttttaggaagagtgtcccgcagagacccggcgggagctgccaggagctctgggattccagcggctggaaggttgcccagggctcacctctgatgggtgggcaggtgagcgcttccaaca

SEQ ID NO: 645972 - DNA, 120 bp, Artificial Sequence
  ENSG00000182379_0 (sequence is synthesized)
ctggctcccgcctgcccgagacccgcccagcctgccccgctcagccgccagagaagatgcggctgctcccggaatggttcctcttgctctttggcccgtggctccttaggaaggccgtca

SEQ ID NO: 645973 - DNA, 120 bp, Artificial Sequence
  ENSG00000182379_1 (sequence is synthesized)
gtgcccagataccagagtccggaaggccgcagtacctggggctgcgccccgccgcggccggagcgggtgcccccggccagcagctcccagagccaaggtcttcggacggcctaggcgtgg

SEQ ID NO: 645974 - DNA, 120 bp, Artificial Sequence
  ENSG00000182379_2 (sequence is synthesized)
tggagctgggcctggccgaccaaccacacgggggcgctggcccgggcaggggcagccggggcgttgcccgcgcagcgcaccaagaggaagccgtccatcaaggcggcgcgcgccaaaaag

SEQ ID NO: 645975 - DNA, 120 bp, Artificial Sequence
  ENSG00000182379_3 (sequence is synthesized)
ccaaaaagatcttcggctggggggacttctactttcgggtgcataccctcaagttttcgctgctggtgaccggcaagatcgtggaccatgtgaacggtaccttcagtgtgtatttccgcc

SEQ ID NO: 645976 - DNA, 120 bp, Artificial Sequence
  ENSG00000182379_4 (sequence is synthesized)
acaactcgtccagcctgggcaacctcagtgtcagcatcgtgccgccctccaagcgtgtcgagttcggaggagtctggctgcccgggcctgtcccccaccctctgcagtctacgctcgccc

SEQ ID NO: 645977 - DNA, 120 bp, Artificial Sequence
  ENSG00000182379_5 (sequence is synthesized)
ctggggatggcagcagcagcggcggggcccgggcttgggggctccctcgggggcgcactggcggggccgcttgggggcgcgttgggagtgcctggggccaaagagtcacgcgctttcaat

SEQ ID NO: 645978 - DNA, 120 bp, Artificial Sequence
  ENSG00000182379_6 (sequence is synthesized)
ggggccaaagagtcacgcgctttcaattgccacgtggagtatgagaagacaaaccgcgcgcgcaagcaccgaccgtgcctgtacgacccgtcgcaggtgtgcttcaccgagcacacgcag

SEQ ID NO: 645979 - DNA, 120 bp, Artificial Sequence
  ENSG00000182379_7 (sequence is synthesized)
agccaggccgcctggctctgtgccaagcccttcaaagtcatctgtatcttcgtctctttcctcagctttgactacaaactggtgcagaaggtgtgcccagactataacttccagagtgag

SEQ ID NO: 645980 - DNA, 120 bp, Artificial Sequence
  ENSG00000182379_8 (sequence is synthesized)
cacccctacttcggatagcgcccctccccagccagtcctgagcctcccgccaaatcccagcctcactaggtgggacccccttcccagtgttctgccgctcctgtggccatgtcgcccact

SEQ ID NO: 645981 - DNA, 120 bp, Artificial Sequence
  ENSG00000182379_9 (sequence is synthesized)
ccttccactctgggggcggaggggaatggcttctcgggaccctcagctagcgtgggtgcccttttccttatgcggagtgcccgcaaggctggggtagccccctccagtacaccccaaagt

SEQ ID NO: 645982 - DNA, 120 bp, Artificial Sequence
  ENSG00000182379_10 (sequence is synthesized)
gaaagggataagagtgcagccccagaataggcggggcttggaggcggtcccaatgtcccctgggtccacagtgggtccccttttcacccttggcgctaggctgcgcactccctttccccg

SEQ ID NO: 645983 - DNA, 120 bp, Artificial Sequence
  ENSG00000182379_11 (sequence is synthesized)
cagctttaataactcctggcctggcaccctcaccccaccctgactttcccatcccccagcgcttgtcctgcttcaccctaccccgcctaagactgtaaaggcctaaaaacctcggcctgt

SEQ ID NO: 645984 - DNA, 120 bp, Artificial Sequence
  ENSG00000182379_12 (sequence is synthesized)
cctcccaccattctgcctgccatatgcctgtccccttttcctccaaaccctattagggtaccggaagcagaacccctgggctgaggccctggccctgcccccggcccctgcccctgcccg

SEQ ID NO: 645985 - DNA, 120 bp, Artificial Sequence
  ENSG00000182379_13 (sequence is synthesized)
cccccctccagtccaggcagtcgagctccacctgccctctcctgctgcttcctctcggtgatattttttctacgccaaaacagacgggaaagggaacaaaataaagtgaaatccaataca

SEQ ID NO: 645986 - DNA, 120 bp, Artificial Sequence
  ENSG00000182379_14 (sequence is synthesized)
caccctgcctgacccaggtggtaggggaaaagcaacgggccagcctggaggcccaggggaggtgcaccctgcaatgcggctggggggctgacagcctgatcctcccccaatcccagcagt

SEQ ID NO: 645987 - DNA, 120 bp, Artificial Sequence
  ENSG00000182389_0 (sequence is synthesized)
gtcccgggagtcggcggccccgctccccccacccctcctccacgtccctttctcctcccgctcctcctctttctcctccttctcttcctcctcctcctcaccctccttcgggtctctgcg

SEQ ID NO: 645988 - DNA, 120 bp, Artificial Sequence
  ENSG00000182389_1 (sequence is synthesized)
ctcccgctccggagcccgcagcctcccccagcggatgccggggactcggaccccgcaccctgagagtctttgttaatggatgtggtggcccgaggcaccacaacccggaggagcaggttg

SEQ ID NO: 645989 - DNA, 120 bp, Artificial Sequence
  ENSG00000182389_2 (sequence is synthesized)
aaaagatccgatggcagcaccacttcgaccagcttcatcctcagacagggttcagcggattcctacacaagcaggccgtctgactccgatgtctctttggaagaggaccgggaagcaatt

SEQ ID NO: 645990 - DNA, 120 bp, Artificial Sequence
  ENSG00000182389_3 (sequence is synthesized)
cgacaggagagagaacagcaagcagctatccagcttgagagagcaaagtccaaacctgtagcatttgccgtgaagacaaatgtgagctactgcggcgccctggacgaggatgtgcctgtt

SEQ ID NO: 645991 - DNA, 120 bp, Artificial Sequence
  ENSG00000182389_4 (sequence is synthesized)
ccaagcacagctatctcctttgatgctaaagactttctacatattaaagagaaatataacaatgattggtggataggaaggctggtgaaagagggctgtgaaattggcttcattccaagt

SEQ ID NO: 645992 - DNA, 120 bp, Artificial Sequence
  ENSG00000182389_5 (sequence is synthesized)
ccactcagattggagaacatacggatccagcaagaacaaaaaagaggacgttttcacggagggaaatcaagtggaaattcttcttcaagtcttggagaaatggtatctgggacattccga

SEQ ID NO: 645993 - DNA, 120 bp, Artificial Sequence
  ENSG00000182389_6 (sequence is synthesized)
gcaactcccacatcaacagcaaaacagaagcaaaaagtgacggagcacattcctccttacgatgttgtaccgtcaatgcgtccggtggtgttagtggggccgtcactgaaaggttacgag

SEQ ID NO: 645994 - DNA, 120 bp, Artificial Sequence
  ENSG00000182389_7 (sequence is synthesized)
gtaacagacatgatgcagaaagccctctttgatttcctgaagcacaggtttgatgggaggatttcaataacgagagtgacagctgacatttctcttgctaagaggtctgtcctaaataat

SEQ ID NO: 645995 - DNA, 120 bp, Artificial Sequence
  ENSG00000182389_8 (sequence is synthesized)
cccagcaagagagcaataattgaacgttcgaacacccggtccagcttagcggaagtacaaagtgaaattgaaagaatctttgagttggcaagatctttgcaactggttgttcttgatgca

SEQ ID NO: 645996 - DNA, 120 bp, Artificial Sequence
  ENSG00000182389_9 (sequence is synthesized)
gacaccatcaatcacccagcacaacttataaagacttccttagcaccaattattgttcatgtaaaagtctcatctccaaaggttttacagcggttgattaaatctagaggaaagtcacaa

SEQ ID NO: 645997 - DNA, 120 bp, Artificial Sequence
  ENSG00000182389_10 (sequence is synthesized)
agtaaacacttgaatgttcaactggtggcagctgataaacttgcacaatgccccccagaaatgtttgatgttatattggatgaaaatcagcttgaggatgcatgtgaacatctaggggag

SEQ ID NO: 645998 - DNA, 120 bp, Artificial Sequence
  ENSG00000182389_11 (sequence is synthesized)
tacctggaggcgtactggcgtgccacccacacaaccagtagcacacccatgaccccgctgctgggaaggaatttgggctccacggcactctcaccatatcccacagcaatttctgggtta

SEQ ID NO: 645999 - DNA, 120 bp, Artificial Sequence
  ENSG00000182389_12 (sequence is synthesized)
cagagtcagcgaatgaggcacagcaaccactccacagagaactctccaattgaaagacgaagtctaatgacctctgatgaaaattatcacaatgaaagggctcggaagagtaggaaccgc

SEQ ID NO: 646000 - DNA, 120 bp, Artificial Sequence
  ENSG00000182389_13 (sequence is synthesized)
ttgtcttccagttctcagcatagccgagatcattaccctcttgtggaagaagattaccctgactcataccaggacacttacaaaccccataggaaccgaggatcacctgggggatatagc

SEQ ID NO: 646001 - DNA, 120 bp, Artificial Sequence
  ENSG00000182389_14 (sequence is synthesized)
catgactcccgacataggctttgagtctaatgaaacaaaaaatattcatctgttgacaatttgccatagcagtgctaggataaaccaatcatcttaacttggctaacatagcacagtatt

SEQ ID NO: 646002 - DNA, 120 bp, Artificial Sequence
  ENSG00000182389_15 (sequence is synthesized)
tactgtgctaatgggctgctgtcattttatgctaagtaaggggcaaaaaaaaaaattacattatgcccttgagtctagatggatattagatgcccgatcatatagatatttttaagtgca

SEQ ID NO: 646003 - DNA, 120 bp, Artificial Sequence
  ENSG00000182389_16 (sequence is synthesized)
acatttacatgataacagtacattttgttttcttcatagatttagacacatcaatttgtaatttagggtacttacaaggcacatataaaataatttcccatgctggaaattccaaatgac

SEQ ID NO: 646004 - DNA, 120 bp, Artificial Sequence
  ENSG00000182389_17 (sequence is synthesized)
cagttccagttggaaccaatttataaaccaattcctgttggaatttgggtgaattgactagaaagtctacttgagcatgttgtaatcaactgaaaaatctggggggaaaaaaaaaaaact

SEQ ID NO: 646005 - DNA, 120 bp, Artificial Sequence
  ENSG00000182389_18 (sequence is synthesized)
aataagaaaatcgaaataccaatagaagccaaatccagctttggtatttatttgctggaagctaaatttacacttaaagttggagtgtataaacattttaatatatgttaatgttgccag

SEQ ID NO: 646006 - DNA, 120 bp, Artificial Sequence
  ENSG00000182389_19 (sequence is synthesized)
aatcttaatgcagaaattatatagtctcctcagattttaatatttttatttctttcctggcacagctgttgtattcaaagtgttttgctttttgtttggtcagtactgttagctcatttg

SEQ ID NO: 646007 - DNA, 120 bp, Artificial Sequence
  ENSG00000182389_20 (sequence is synthesized)
aagttggcaaaaacaaatacaaacaagcaaaaaacctcaaatttttttcagcagtgagagagaatagtaaagagaggcccaagcatagctggttatgtgaaatataaaatggggtgttgt

SEQ ID NO: 646008 - DNA, 120 bp, Artificial Sequence
  ENSG00000182389_21 (sequence is synthesized)
tctccctttaatcaatctgagcacaactacatacatccaggaatctgaagtcagatagtaaggatgtggtaccaatcctcccgagtgcaatgctaaacacttccaggtgggaattcatct

SEQ ID NO: 646009 - DNA, 120 bp, Artificial Sequence
  ENSG00000182389_22 (sequence is synthesized)
atttcacttaacacaaacgcagggtctgtatttcctgccaacaagattgagtatctttccattgcttctctcagtctctgtctttgaatatctgaatgttctggcccttcaacaaattct

SEQ ID NO: 646010 - DNA, 120 bp, Artificial Sequence
  ENSG00000182389_23 (sequence is synthesized)
ttaaatcatgctaaggaatttcgttttatgtggacacactcaactttgatattcaggagatgtttttacaaaatgactaattgaaaaaagttgaaacaaatgattttaaaagcttgcagt

SEQ ID NO: 646011 - DNA, 120 bp, Artificial Sequence
  ENSG00000182389_24 (sequence is synthesized)
aaaaaataaactcatagattcagcaaatatttgttgactaaaattatagcatttttaatgcagaaaattataaagaatttggagattgagctgccttatttctaatgaacactcctcttc

SEQ ID NO: 646012 - DNA, 120 bp, Artificial Sequence
  ENSG00000182389_25 (sequence is synthesized)
atcttattaagtcttcacagtttttccagtggctataattatggaattggtgacctatgttttatattatcaaggaagccttagattcactctgatctaagaaattattgaaattgaccc

SEQ ID NO: 646013 - DNA, 120 bp, Artificial Sequence
  ENSG00000182389_26 (sequence is synthesized)
tttttacacaaatgtctttaaaaaaaaaaacttatttctaaatgtccatagtgcatgcattttctaaaaccccaataagtccagccataaaagttcttttctgctagtacatgtcatgaa

SEQ ID NO: 646014 - DNA, 120 bp, Artificial Sequence
  ENSG00000182389_27 (sequence is synthesized)
gcctatttttgaaaataatgataattaattttatagtatcttcttttctccccaagcctttcagtattcaggcactcaaagcatgcaccagttcagtaatcttcttgaccatggaaataa

SEQ ID NO: 646015 - DNA, 120 bp, Artificial Sequence
  ENSG00000182389_28 (sequence is synthesized)
gttccacattactgatgagttatatatatatcttgaaccccattacaacctcaccacatccccctgcatttatgttcagtgtttgtaccccattatgaacctgtttagctgataatgagg

SEQ ID NO: 646016 - DNA, 120 bp, Artificial Sequence
  ENSG00000182389_29 (sequence is synthesized)
atacctataattctgtaagtcatttcaaatatttgatacaattaaaaaatatgggcttagtaaattttaaaagttaacatgtgatactggcttgtgagattcttctgtcatctagtgaag

SEQ ID NO: 646017 - DNA, 120 bp, Artificial Sequence
  ENSG00000182389_30 (sequence is synthesized)
cttataaaactttcagttaagacattttaaaagagttatatccattaggcactttaataaacatataacctgccattactgaatactttgttagaacacagaagagcatcttccagcaaa

SEQ ID NO: 646018 - DNA, 120 bp, Artificial Sequence
  ENSG00000182389_31 (sequence is synthesized)
caaaaatatatttattacatgtacagcacatacttgcatgagaaagaaaacattagccaaaacatttttctatatgctttactggtttcttgtttatgcgcattaaagtatttaattgca

SEQ ID NO: 646019 - DNA, 120 bp, Artificial Sequence
  ENSG00000182389_32 (sequence is synthesized)
aagagtgcaccaaggtgtacaaatttagactagacagctgttcagctttttctgtagtagcattagcagtttggtcatttaactactttaagatacttacattttatggcaggtagctgt

SEQ ID NO: 646020 - DNA, 120 bp, Artificial Sequence
  ENSG00000182389_33 (sequence is synthesized)
aacagcatttaaatatatttcctagtcatcaagattaccatcttctttcaactttttaaaagtcacttgtttttaaaggtttttcaaagccttgtttttagtcttccatgtcatgccgat

SEQ ID NO: 646021 - DNA, 120 bp, Artificial Sequence
  ENSG00000182389_34 (sequence is synthesized)
aaagagagtctcattcaatatctgtgcacaaaaccaatctatcaattaccatcagatgtccatacctgttttgctttgcattcttattcaaaagctgacaatcttggaaagggtataatg

SEQ ID NO: 646022 - DNA, 120 bp, Artificial Sequence
  ENSG00000182389_35 (sequence is synthesized)
tatattttattgatggatatatttaaatgtttactttaatttggaatattctttccccttctttctgtaataagtttatcttcctcaaataaggggatatacatcttattttttttaaag

SEQ ID NO: 646023 - DNA, 120 bp, Artificial Sequence
  ENSG00000182389_36 (sequence is synthesized)
acttaagagtttattgtgtaaatgatacttaaaatctagatatatactaaatgaaaagttttatttttgccaagcacaccaagcacctttgaaaaatacatactccatactttgttttta

SEQ ID NO: 646024 - DNA, 120 bp, Artificial Sequence
  ENSG00000182389_37 (sequence is synthesized)
attaatttcatttaaagatagcaaatgattataagcaagagaaacaagtcttttactgttttgaggctgttttaacttacagtataagccacatactagaattctgtaatttcagtcaca

SEQ ID NO: 646025 - DNA, 120 bp, Artificial Sequence
  ENSG00000182389_38 (sequence is synthesized)
gaggccgctttcctagctcagtcaccagtctgtggttgaggaagggttttgctttttgtgctctgtattgggaaggcagataaaatgccaggtctggactgcctctggggataacctcac

SEQ ID NO: 646026 - DNA, 120 bp, Artificial Sequence
  ENSG00000182389_39 (sequence is synthesized)
cctgtgggatgtgaatgaatagcatcttgcctggtaaatccacaggaattgataaggcaggcgcagttctcccaaacaggccttttctctttaagctgtagctgtggtttctgcagcaat

SEQ ID NO: 646027 - DNA, 120 bp, Artificial Sequence
  ENSG00000182389_40 (sequence is synthesized)
tttgtttttgccttgaaagaggtgctctggattatcacacctccatgtatgacaatttgtacctgcatggaattgaagactcggaggctggttcagcggattcctacacaagcaggccgt

SEQ ID NO: 646028 - DNA, 120 bp, Artificial Sequence
  ENSG00000182389_41 (sequence is synthesized)
gggtcctggagccgggtggggaagtcctgcgccctccccctccgtccgcagcccagcctcgggggccagccccctccgcccaccgcacacgggctggccatgcggcggctctgaacgatg

SEQ ID NO: 646029 - DNA, 120 bp, Artificial Sequence
  ENSG00000182389_42 (sequence is synthesized)
atgcagaaagccctctttgatttcctgaagcacaggtttgatgggaggtgagaaatatagatgtttttgtatttttattttcctttaaccaaacttgtgtgataaattgaattgtagatc

SEQ ID NO: 646030 - DNA, 120 bp, Artificial Sequence
  ENSG00000182389_43 (sequence is synthesized)
tatgtttccagagatttcagaagttctctagttaaaagttaactcagtattcttgggaagaatataataaaagaactctgaaaatatgaagtataacattgagtccccagtgaagaaagg

SEQ ID NO: 646031 - DNA, 120 bp, Artificial Sequence
  ENSG00000182389_44 (sequence is synthesized)
ccccagtgaagaaaggaccatgagaagaaaaataagccatttgttttatttaaatgtatatatctttattttctcagttattaataatttcataccaaaatgttttttatgaaaaaatat

SEQ ID NO: 646032 - DNA, 120 bp, Artificial Sequence
  ENSG00000182389_45 (sequence is synthesized)
aaaatgttttttatgaaaaaatattaattaaaatatataatatttctcatgagtatagtggcttgctggtcaaactaggcagtatttgggaattgtgtatgtgtgtgtgtgtgtgtgtgt

SEQ ID NO: 646033 - DNA, 120 bp, Artificial Sequence
  ENSG00000182389_46 (sequence is synthesized)
aatttcctcaaaagaagagagtgagaattattttaatcataagcctcccaaagtgatcattttgtagggaatagtacttatttggatatttattatagttgtgggttgtttttattagaa

SEQ ID NO: 646034 - DNA, 120 bp, Artificial Sequence
  ENSG00000182389_47 (sequence is synthesized)
atgtccttgttattttattgatctttttttaatgtattttactatgatccatcaacaatatggctcaggcattagccattaaataattttatcatttaagttttgtgaaaaattctaaag

SEQ ID NO: 646035 - DNA, 120 bp, Artificial Sequence
  ENSG00000182389_48 (sequence is synthesized)
aaagtttctctgttttgcagagaaatggtaaaaagcctgtattgactcaattctaaatattaagctctttcacagtgctgaatgcagtccatgtaaaaataaccacatgaaaaaacctga

SEQ ID NO: 646036 - DNA, 120 bp, Artificial Sequence
  ENSG00000182389_49 (sequence is synthesized)
gatttatcagaaatgtaggaaatttaaatggggtgcatcaaaaagtatgggcaaatgcatccagtttattactgtaggattgaagaaaaacatcacattctttatttttgaaggcagtaa

SEQ ID NO: 646037 - DNA, 120 bp, Artificial Sequence
  ENSG00000182389_50 (sequence is synthesized)
ttaagccattcactttctctttgctaaattatgagaatccactaaatgcacaaaataattttaaaatgtaaaaaaacttcagatagattttaataaattggtatattaagaataaaaaca

SEQ ID NO: 646038 - DNA, 120 bp, Artificial Sequence
  ENSG00000182389_51 (sequence is synthesized)
cattagtttctggaacaatatagaaagttagtaaacagattttagtttaagaaataagaatgcttctaggtacattagtatataggtcaggctgccttaataaatagaccccaaaatgtg

SEQ ID NO: 646039 - DNA, 120 bp, Artificial Sequence
  ENSG00000182389_52 (sequence is synthesized)
tagtgattcaaacacaatggaagcttattattgctcacttaacagtctgaagcaggtgttccttggctgggagggaggatagagttgggggaggggagaattgggcagaaagtttgttcc

SEQ ID NO: 646040 - DNA, 120 bp, Artificial Sequence
  ENSG00000182389_53 (sequence is synthesized)
ctctgtcatttggggcccttagcccaggtacgatgtctctagtcagcttgcccggcctggaggtagcgcaactgacatttcactggttagaacttggttatgtggtcatacttaattgca

SEQ ID NO: 646041 - DNA, 120 bp, Artificial Sequence
  ENSG00000182389_54 (sequence is synthesized)
gcggaggcactcttgcagtccaggaggaagaggagatagaatttgttgaatcaataatagccttcgtcacattcatctactggacaaaggcttaataagaaagatgtatttgttccattt

SEQ ID NO: 646042 - DNA, 120 bp, Artificial Sequence
  ENSG00000182389_55 (sequence is synthesized)
cactctctttaaaaaagaaataggcagataatgaagtagcttcaaagaaaataagttaaaagccctgaatcctagagcattggagttggaaggatacataaaatgtcttttagactcatc

SEQ ID NO: 646043 - DNA, 120 bp, Artificial Sequence
  ENSG00000182389_56 (sequence is synthesized)
atttctccaataaccacaatcagatagacaacctgcttctgtttgaaacttttggttattgggattacactttctaaaaaagcattgcaaaaaaatagctgaactctgactttgtaactt

SEQ ID NO: 646044 - DNA, 120 bp, Artificial Sequence
  ENSG00000182389_57 (sequence is synthesized)
aatagggctggtcttggtcttgctgtctgatgctctggccttaaccctaaccctcatgcaggtccctgtggattgaaggcagccagcatgccttggtcgcacgtgcatagttccttcaga

SEQ ID NO: 646045 - DNA, 120 bp, Artificial Sequence
  ENSG00000182389_58 (sequence is synthesized)
tatgtatggagtcacatggtttcaacctgtggagctgttacctaaggcagttctgagcagtgccgaatccactggccccataacagccctatctgaacaaatcccatcccataagacagt

SEQ ID NO: 646046 - DNA, 120 bp, Artificial Sequence
  ENSG00000182389_59 (sequence is synthesized)
gttagattattttggtctataacatacttatacgcaacagtgctgttaaaggtttgccctcaagaatgaagaatctgatgttcttcctcaatcctgaggcccagaaaaagggaatttatt

SEQ ID NO: 646047 - DNA, 120 bp, Artificial Sequence
  ENSG00000182389_60 (sequence is synthesized)
taattgtaacagcagagatttgtctcgaatcaagtagaattgtcgcatccattactgtacacatactactgaagttggttttaatagaaattgaatgcaaatttcaatctcaagtattca

SEQ ID NO: 646048 - DNA, 120 bp, Artificial Sequence
  ENSG00000182389_61 (sequence is synthesized)
tggggtctgatgacatggcagagggtctggaggaagagcccagcagtagcaaaagtaatagctgaagagagagacttagccctggagaaatctgatatatttctccagcaggagaaagat

SEQ ID NO: 646049 - DNA, 120 bp, Artificial Sequence
  ENSG00000182389_62 (sequence is synthesized)
aggtagatattaaaggggtgaggggtgagagaatggacttgatttcaaatattaagaggccaggcagcagaatgaacaataaggagttccttggttgagtgtatgtggagactttgataa

SEQ ID NO: 646050 - DNA, 120 bp, Artificial Sequence
  ENSG00000182389_63 (sequence is synthesized)
gaaagaaattcgctggtagcgtcacactgactctgacatgtcttcttcgtggggaatatcgttaggttttgagctataacatcatgctgcattatgttttaccaattgatacaaggagag

SEQ ID NO: 646051 - DNA, 120 bp, Artificial Sequence
  ENSG00000182389_64 (sequence is synthesized)
aaaaaaacaaatagtctttaattgaaaccagccaagagaacaatgacaaggaaggctttagcacagtgacacggcataaacaatatgttctaatggaaacctactctgtgtttcatgggc

SEQ ID NO: 646052 - DNA, 120 bp, Artificial Sequence
  ENSG00000182389_65 (sequence is synthesized)
tatgaatgcagtacgttagacaaaataggagaaagtcctattatttttcagaaagtacaaagaagggatctgttggctacgaggctttcttctttaatctgcttttcagatcttagtaga

SEQ ID NO: 646053 - DNA, 120 bp, Artificial Sequence
  ENSG00000182389_66 (sequence is synthesized)
aaataattcaacaaattggatgaaagtccaacagtttgactattgcagaatcataaacttgggatttttttgataccttagaaattatttgagtcagtttagagctacttattatacaat

SEQ ID NO: 646054 - DNA, 120 bp, Artificial Sequence
  ENSG00000182389_67 (sequence is synthesized)
ttgagtcagtttagagctacttattatacaattttattgctgtagctgctattgtggggcctaactgtaatacatgtaagaaaaacagaatactaggctgggcgcagtggctcatgccta

SEQ ID NO: 646055 - DNA, 120 bp, Artificial Sequence
  ENSG00000182389_68 (sequence is synthesized)
tcagttcttgatcgagcacccaggagacagtcatgttgacgcttgctcctcaagggtctgtttccacgtgggtcctgatggaagccagtgctcagcatgggaaggcagggggtaccgtgt

SEQ ID NO: 646056 - DNA, 120 bp, Artificial Sequence
  ENSG00000182389_69 (sequence is synthesized)
ggggctcatgaggccctctgccctttctttcctctcttgcacacttctcatcttttatgtattacattgtttagaaatacctccctcaaaatattcacaatgggaagatctggtcaaaga

SEQ ID NO: 646057 - DNA, 120 bp, Artificial Sequence
  ENSG00000182389_70 (sequence is synthesized)
tttgctgtacattaaatgcaaagaaaaggactttatctgtcttgaccattctcattattattagaagtaatagagaatgaacagcacaagaggacaaacaatcaatcttccagcaaaccc

SEQ ID NO: 646058 - DNA, 120 bp, Artificial Sequence
  ENSG00000182389_71 (sequence is synthesized)
aaacctttaaagcccaaacagagttcaccctgctgggtttttaagatgatggcatatgccaccaaatccttctctgcttatttattttaaagggcacatgttttaaaagaccactaaaaa

SEQ ID NO: 646059 - DNA, 120 bp, Artificial Sequence
  ENSG00000182389_72 (sequence is synthesized)
cattagtgaactttggagattaaacaaaaccatgtgacaaggaaaagagtagagacttcgtttcagatgtttgttttgactttgtgctagcttggattaaaaaataggtagaacgtgaca

SEQ ID NO: 646060 - DNA, 120 bp, Artificial Sequence
  ENSG00000182389_73 (sequence is synthesized)
ctcagtacacatttgctgaatgaattaatgaatcgctttcaggcagatctaagaatcctggctctatccccctctctttctctcttgtctttctcagagttggaaatgtcagagggatga

SEQ ID NO: 646061 - DNA, 120 bp, Artificial Sequence
  ENSG00000182389_74 (sequence is synthesized)
gcaggagagtggtctacaaaaatccagccatgggcatggagaatttccgccaacatacacaaactagcaggaaggctgagtccagtgctggcctcagttctctagctgctcctcactgga

SEQ ID NO: 646062 - DNA, 120 bp, Artificial Sequence
  ENSG00000182389_75 (sequence is synthesized)
ggcaggcacaactcaggcgtgccaaggatacccggcacctgtgtacaaagccagcctgttgtctcctggcagcagttctatcccctaacgagggaagagggaagagggaagagggtctgg

SEQ ID NO: 646063 - DNA, 120 bp, Artificial Sequence
  ENSG00000182389_76 (sequence is synthesized)
tgaacactgctggtttattcctcaacaccctggaggagaaccaaggggggtggaaattagcaattgcacatggttaagcatgaaaaacaccttccatggtaacctccccctaggagacga

SEQ ID NO: 646064 - DNA, 120 bp, Artificial Sequence
  ENSG00000182389_77 (sequence is synthesized)
gaattgaagactcggaggctgaagaataatgtgatgtgttacccaagatggtgtgaacagagcttcaagccaatggagaagactaggcctaaatagctgacctggtgaagtgacacataa

SEQ ID NO: 646065 - DNA, 120 bp, Artificial Sequence
  ENSG00000182389_78 (sequence is synthesized)
ggcgtgagccaccgtgcccagccttcagtgctgtttaaatagctcttctagtgtgggcttcaactgagaacatccctgttttcatcctcaaggttgtttttctgctcagtgttcttgttg

SEQ ID NO: 646066 - DNA, 120 bp, Artificial Sequence
  ENSG00000182389_79 (sequence is synthesized)
gttgaccacgtctgggctgctgcaggacaatgattgaagttttagtagtgaaagagttcaatagtgttgacattgaaactggaaaatcattttactaatgtaagatgatgctttactata

SEQ ID NO: 646067 - DNA, 120 bp, Artificial Sequence
  ENSG00000182389_80 (sequence is synthesized)
ttgaaatcttagacaaatagatgacccatagcccaaatacaggtaggatttatcttttgtaataagctgagtctctttttcctttagatgtatatgcaaaagagaagatggatgaaaact

SEQ ID NO: 646068 - DNA, 120 bp, Artificial Sequence
  ENSG00000182389_81 (sequence is synthesized)
acttaatctagtcaaaatatttttcttcacaacattgctactttccgaataactcagatgcttaactatattctgccatctaaatttatatctgcaataaggcatggagtgtgtgcatca

SEQ ID NO: 646069 - DNA, 120 bp, Artificial Sequence
  ENSG00000182389_82 (sequence is synthesized)
aattttaggcaaatgaaaaagaactcgccccaggatactgttatggatgtgacaatttaagaagctacacatcatctgaaactattctattttctttgccagggttcagcggattcctac

SEQ ID NO: 646070 - DNA, 120 bp, Artificial Sequence
  ENSG00000182389_83 (sequence is synthesized)
ctttggctcaaaagtgggtcgttgctcagtggctaccagctgctcttcccttacctcacatttctggaataatcattttgtgattattctaacaaggctccagattgggaagctctctga

SEQ ID NO: 646071 - DNA, 120 bp, Artificial Sequence
  ENSG00000182389_84 (sequence is synthesized)
tcctttcacctctaagtgaggttagtaacatctccaaagaggcatttcctcagaaccttcacctttttgtatttggtttggtggtgaattattggtcgtcttccaacttagcaatatcaa

SEQ ID NO: 646072 - DNA, 120 bp, Artificial Sequence
  ENSG00000182389_85 (sequence is synthesized)
tcactctaatattataaccaacaacattatcttgtttaatatttaaagcaacacttagaaatgtttataaatgatgattctctcttatctttatacagttctattggagagaaggttgaa

SEQ ID NO: 646073 - DNA, 120 bp, Artificial Sequence
  ENSG00000182389_86 (sequence is synthesized)
attgttcacaatttagatgatggtctttcctaataagagtcttaattttgtgactatataagtcattgcagttagtctttaatgaaatgaattttattaatgtaaaacaaattctgagac

SEQ ID NO: 646074 - DNA, 120 bp, Artificial Sequence
  ENSG00000182389_87 (sequence is synthesized)
aattatttgtttcctttaaataatctgctatttaattattattgtcgttgtttgcaaaatgtatttttggaatgttaacctcttttcatacctgcatacttgaacttgtcttttgtgtgg

SEQ ID NO: 646075 - DNA, 120 bp, Artificial Sequence
  ENSG00000182389_88 (sequence is synthesized)
gggccttaaaattcataataggaagtggaggcagtgaaaggaagtaagaaaaggaaattatgctaaaagatggtttgcaaatttaaattctttaaatgaacatatcacaaaatgttgtta

SEQ ID NO: 646076 - DNA, 120 bp, Artificial Sequence
  ENSG00000182389_89 (sequence is synthesized)
agacccaggatgtccgttaagaatgtgtcttggcaaccttaatttgcatgttagtatatattttcttagttacacagttttattttggtatttgcttaaaaaatgtaataccattgtaga

SEQ ID NO: 646077 - DNA, 120 bp, Artificial Sequence
  ENSG00000182389_90 (sequence is synthesized)
aattaccctatgtactgatatatttactacctcttctctagagaagacaatctgtctttaaagggaaaaacactggtcaataagtagtgatcaaaattatcactattctggctaaccttg

SEQ ID NO: 646078 - DNA, 120 bp, Artificial Sequence
  ENSG00000182389_91 (sequence is synthesized)
ctgcaaagctaaatacatagattattaaaatatgccttccctttagattttaaactgtttccaaaatgctgtttggcaccctttcatttcttccacgttagtgaagttttctttgaattg

SEQ ID NO: 646079 - DNA, 120 bp, Artificial Sequence
  ENSG00000182389_92 (sequence is synthesized)
gttcacagtttatcatgaggcaaggttaatttaacaaataagtcatcatagggaacaaaacaaactgcaagggaattgcctttgtgtgcaacttgttataatatctagttctaagtctaa

SEQ ID NO: 646080 - DNA, 120 bp, Artificial Sequence
  ENSG00000182389_93 (sequence is synthesized)
aggagtaaaagtccaaagactttatgtttaagagcagctggtttgcaaattcacattttgttggtccttgacttccacagagcatgacttagccatttactgggtaaggatatgcataat

SEQ ID NO: 646081 - DNA, 120 bp, Artificial Sequence
  ENSG00000182389_94 (sequence is synthesized)
cttggactcccatgtaattggaataaacttcatatcaatgtttcaaataaatgctatgtaccccttattccttttacatttctgcctttgtcttttatgacaatgttgcatgttgtgttt

SEQ ID NO: 646082 - DNA, 120 bp, Artificial Sequence
  ENSG00000182389_95 (sequence is synthesized)
catgttgtgtttttttaaattatataaaactcatccttgaatgactgtatgaatgaaaaatttataggaaattatgtaataaaatctgttttattagtttctcatacctttaaatactgt

SEQ ID NO: 646083 - DNA, 120 bp, Artificial Sequence
  ENSG00000182389_96 (sequence is synthesized)
tgttagtaagttacttactcaagctgtgtctatggggcagagaacagtcctcttctttaaaataatcatgatcaaaccagtcaagtcaatccaattagctgttagacagacaataaggat

SEQ ID NO: 646084 - DNA, 120 bp, Artificial Sequence
  ENSG00000182389_97 (sequence is synthesized)
aaccttctttttgacttaagcagtcaagttagtcaaaatagaaaaattggcttatatgggcacccagaactacagcattcaaaaattacttttaaaagtttcttcttttattaaaatgga

SEQ ID NO: 646085 - DNA, 120 bp, Artificial Sequence
  ENSG00000182389_98 (sequence is synthesized)
ctttcttaaataaaatacatcctctgatagcagctatctctttttacttgtaatgattaattctaaatgcttcatgtaattgagggacattatgagaagactagaaagtatctcatcaga

SEQ ID NO: 646086 - DNA, 120 bp, Artificial Sequence
  ENSG00000182389_99 (sequence is synthesized)
taatcctaagggctgtaacttctacttgccataaacaaagtataattaagagtgagtagcaattggtttggggagtcgtagttatatatgaaactttcttttgtttctcatgatgtatgt

SEQ ID NO: 646087 - DNA, 120 bp, Artificial Sequence
  ENSG00000182389_100 (sequence is synthesized)
aaaatgtttgcagaaggatggtagaaaatgttactaatgaatttagagtggtttgggagaatacactgatacttcctcatttgaaaattataaggagttacaaggggaactaagaaccag

SEQ ID NO: 646088 - DNA, 120 bp, Artificial Sequence
  ENSG00000182389_101 (sequence is synthesized)
aagtggctggcctctagcttttcaatacctgataagtgttcttggttatgttttgaacacttaaatttctcaacaaatggctatgtctatatttatgtaggggccacccttgccctactt

SEQ ID NO: 646089 - DNA, 120 bp, Artificial Sequence
  ENSG00000182389_102 (sequence is synthesized)
gcatgccactttgacttttaactgaaatcagtgtgaattctgtatgcataagggatgtaataaagaggcgggatcattaacgctatatcgttgcatactatttttcatatgccttacaat

SEQ ID NO: 646090 - DNA, 120 bp, Artificial Sequence
  ENSG00000182389_103 (sequence is synthesized)
attttctgggatgttattaaaatgaaagcattttattgccaaaataaatctatgttgttacttataatctgcattagcagtagaaaaataatgtagcaaaaacatattgtacagtacaaa

SEQ ID NO: 646091 - DNA, 120 bp, Artificial Sequence
  ENSG00000182389_104 (sequence is synthesized)
attataaaatatatattttgccaataatataaaaatagattgaggagaaagaagcacatttgttatagcacaaacttataacaaaatccaccgttaaatttggcagtcatattttttaaa

SEQ ID NO: 646092 - DNA, 120 bp, Artificial Sequence
  ENSG00000182389_105 (sequence is synthesized)
agtatgtcgatttagttctaagttttgtcagatttacttcatctaccatctttttaacttgctgcttgatacttttccagcaatttatttcatagccttgcaatctgtggatgtaatttc

SEQ ID NO: 646093 - DNA, 120 bp, Artificial Sequence
  ENSG00000182389_106 (sequence is synthesized)
ttttgttttattcccttccataaaatttattaaattttattttgtgataacactcataccatattttctcctcttatttcttctctttcaataacaacagcagaaagtcacagcaagtga

SEQ ID NO: 646094 - DNA, 120 bp, Artificial Sequence
  ENSG00000182389_107 (sequence is synthesized)
gctcatagggctcctctgaattttggacatgtgtgagatttttgtatttttcacagcctcgagtcagaatgatcaataaagatgtcccaaccacaaaaaattatattagttagggattct

SEQ ID NO: 646095 - DNA, 120 bp, Artificial Sequence
  ENSG00000182389_108 (sequence is synthesized)
ttaatttgttttgtactgaatactactttgaaacataagttaaagccattagctgtgtttttgtagggatggtgggaaggaataaaaaataaatgtattaacataaaacatactaaaaca

SEQ ID NO: 646096 - DNA, 120 bp, Artificial Sequence
  ENSG00000182389_109 (sequence is synthesized)
gaaatatggcaaaatgatgtaaaaagatttttcctactattctgagggctgttgaaatcccaggctattgctatatctccattgacaaagtgggataaaaaatgcctttgtcaaataatt

SEQ ID NO: 646097 - DNA, 120 bp, Artificial Sequence
  ENSG00000182389_110 (sequence is synthesized)
ttttttctttctttaaattttagttatttattttaataatttgtccccttttatttttcttatctaggtatgtgtagcattctacaaggcatgctgggtaaaatatactatgcaaatgtg

SEQ ID NO: 646098 - DNA, 120 bp, Artificial Sequence
  ENSG00000182389_111 (sequence is synthesized)
tacagtgctgcatgttttgttctccctctgctttagtggctttaaagaaaaaaacgtggtgttatttttgtgaataaaaacattaacaaagaaaatgcagagtgcatgcatagagtatcc

SEQ ID NO: 646099 - DNA, 120 bp, Artificial Sequence
  ENSG00000182389_112 (sequence is synthesized)
aactgccaaccagcatggcagtcttctctcatgggtggagaatgtctaaagaagctgtactctcctccagatgttctgagatcctagccttccatctatctctgcagacactgctttggt

SEQ ID NO: 646100 - DNA, 120 bp, Artificial Sequence
  ENSG00000182389_113 (sequence is synthesized)
gcagtggacttgggaatcctgaacaaactagggccttttgagaatcagtagaatggattgaaagagctgctgggggttcaagcacttcactgcagtgcaggagagttcagcccttcccac

SEQ ID NO: 646101 - DNA, 120 bp, Artificial Sequence
  ENSG00000182389_114 (sequence is synthesized)
tgcccatgacactgtggtgtccttaagtgcaagaacaggagttcccagacacctatgtcctggggtattatagagctcatagattagcattgtttgcaggggaagggccacgggacatgg

SEQ ID NO: 646102 - DNA, 120 bp, Artificial Sequence
  ENSG00000182389_115 (sequence is synthesized)
cagtatatgaccaaatgcagttacagcagtggccaaaagacatagatatatcactggtttacatgtagcaatatactaatacaaatgttttgcctgggtctccaatcacagaatagtctg

SEQ ID NO: 646103 - DNA, 120 bp, Artificial Sequence
  ENSG00000182389_116 (sequence is synthesized)
attaatttaaaattaaactgaaatgtcccattaataatcggtgacaaaaataaccagaaaatgactctgacatttatctgacatggagatagtgagctaaaacattattcaggtgaataa

SEQ ID NO: 646104 - DNA, 120 bp, Artificial Sequence
  ENSG00000182389_117 (sequence is synthesized)
tattaaagtattacttaacataaatgacctggtacagtccactccctccatttttacaggtctctctttgaaatctctgggaaaaatctaggatgggaactcaggctcctcctgagactt

SEQ ID NO: 646105 - DNA, 120 bp, Artificial Sequence
  ENSG00000182389_118 (sequence is synthesized)
cacacagagttagaataggatgaacatatcaaatccatggaactgagagccaatgtaagcagatgacatcattacaggtttaaatatatgatttctcacactgcatttcctctctgataa

SEQ ID NO: 646106 - DNA, 120 bp, Artificial Sequence
  ENSG00000182389_119 (sequence is synthesized)
tactcagggccaagcagaccattaaaaagatcctggcttatttgattttctttcaactcatctacaatacctcaggttcatgtcttcttctatcaggttttacagcggttgattaaatct

SEQ ID NO: 646107 - DNA, 120 bp, Artificial Sequence
  ENSG00000182389_120 (sequence is synthesized)
gggtgggtttttttttcttcatattgttgttttcattctaaaatgatggtgatgatggtatgttgtcatctaaaagatttcttggaacaaactgctgctgttatgttgcttgtattcagg

SEQ ID NO: 646108 - DNA, 120 bp, Artificial Sequence
  ENSG00000182389_121 (sequence is synthesized)
catccagatgtggatggtgtttgccttgtaataagaaatgaacttagtgtccggggtctgttcttctcactgctaccttgtttgctttgcaaacatgcagcaaaccacttagcattcagc

SEQ ID NO: 646109 - DNA, 120 bp, Artificial Sequence
  ENSG00000182389_122 (sequence is synthesized)
ctccagtcacatggatacgcttaagaaaagaacaaaagaaaacataccaatttgatcttcctttaactcttctgcaagaaaattccagcaggcataaaagattatgacactgaaggtcaa

SEQ ID NO: 646110 - DNA, 120 bp, Artificial Sequence
  ENSG00000182389_123 (sequence is synthesized)
gaattgattggaactagagaggccctgtggttatagtagatgaaagagtcagggctgagtcagatgaaaaacgaaattatagcaactcttcttctagtgccattgccagaaaacagctgc

SEQ ID NO: 646111 - DNA, 120 bp, Artificial Sequence
  ENSG00000182389_124 (sequence is synthesized)
tgggttagaaggtgagcaatggtgggatggggtgggagatggaactgctatcacatggcactgggtccccagtggccagtctctccacttttcccactgacttactatttctgtgcctat

SEQ ID NO: 646112 - DNA, 120 bp, Artificial Sequence
  ENSG00000182389_125 (sequence is synthesized)
gtttctgtaaaggaaataactgtccttcttactcaatggattcactagattgttttatacacttgtgtaggattgtttaagctctatggaagcatgaaatctgattcaaatgtttagaga

SEQ ID NO: 646113 - DNA, 120 bp, Artificial Sequence
  ENSG00000182389_126 (sequence is synthesized)
gggcaacacagcataacctgtaaaagcacagactctggagccagatatttgggttttgaatccacactgactagttatgtaatcttgggcaagtacctatctcatgggattggtgtaagg

SEQ ID NO: 646114 - DNA, 120 bp, Artificial Sequence
  ENSG00000182389_127 (sequence is synthesized)
attgagtgagtgaatatgtggtaaagctgttagaacagcgccaggaacataagaagcaccgtctaagttttcttattataattactggatacactttgtgtgacgtcatgtctggtccag

SEQ ID NO: 646115 - DNA, 120 bp, Artificial Sequence
  ENSG00000182389_128 (sequence is synthesized)
tgaaaggatgttcagacgataagagtaataatgcatcctttcattagatgcttacagttggccacacagtgtgctagatgctttacatagattatctctaatcttcacagttacctggtg

SEQ ID NO: 646116 - DNA, 120 bp, Artificial Sequence
  ENSG00000182389_129 (sequence is synthesized)
agataggccatattatctccattttatagtttaggcaactgaaaacagagacattaaacgatttccctaaggtgacatagcaaattaggattcaatctattctagatctatctggctcca

SEQ ID NO: 646117 - DNA, 120 bp, Artificial Sequence
  ENSG00000182389_130 (sequence is synthesized)
aagacaatttcctaccccctaacccatccacccatacacacatgtacctggttacctaccctgaagataatttgatagcttggagcatggcgtgctctgttaagtttcacttcacgctgc

SEQ ID NO: 646118 - DNA, 120 bp, Artificial Sequence
  ENSG00000182389_131 (sequence is synthesized)
ctgttagtgaagcccaattacacagtggaatgtatgattaaggcactgaacagacagaggaatgtattgcccagccctgaccttctaatgtttcacagttgaaggaagataatctttgtt

SEQ ID NO: 646119 - DNA, 120 bp, Artificial Sequence
  ENSG00000182389_132 (sequence is synthesized)
gtctagctatcaaaagccgggaactatgttattatttccaatttttggaacaatcttataaggatagttatatcagtttggtcttctgggaagcagacacctaaatggaattacaaatgc

SEQ ID NO: 646120 - DNA, 120 bp, Artificial Sequence
  ENSG00000182389_133 (sequence is synthesized)
aagagatttattggagaaattttatctttatgaaaataagtttattaacatttattctaataattactagagaaaattcttgtgtcctattaaatttgagggattttagctgctgagagg

SEQ ID NO: 646121 - DNA, 120 bp, Artificial Sequence
  ENSG00000182389_134 (sequence is synthesized)
gttgatcattgagtagttgtacatataatatggtttgttacatctgaaatagctggaatcaagaaaagatatttgcatctgtaaaagcaactaatatactgagctaccttaggacttgta

SEQ ID NO: 646122 - DNA, 120 bp, Artificial Sequence
  ENSG00000182389_135 (sequence is synthesized)
cccaggtcagagatttcaaacagctccatgactggaaagacagccttgccttaccattatctcagtaggataaacactttatctttttatataattggtaagataacctggaattttaaa

SEQ ID NO: 646123 - DNA, 120 bp, Artificial Sequence
  ENSG00000182389_136 (sequence is synthesized)
caggcagtctggatggataaggttaccttgtacttagcattttctaaacactgtttactttattaaacatgttcaattgatactgcacagatgtagtaatgctgaggaggaatagtatcc

SEQ ID NO: 646124 - DNA, 120 bp, Artificial Sequence
  ENSG00000182389_137 (sequence is synthesized)
tctattttggcatgtgtgaagaaatctttggattataaaaaccagtagtaaccttaaaatgtgtctgcatttgcccctgctttacttcaagaccataattataattgtcatccaaagatt

SEQ ID NO: 646125 - DNA, 120 bp, Artificial Sequence
  ENSG00000182389_138 (sequence is synthesized)
ggtgatcactgtgtcattttaattcctttaggagaatttgcgacttacttaattggccaccatatctccagtatgaaaagtcagcaaattacattggcagagtatcacattgctaagaaa

SEQ ID NO: 646126 - DNA, 120 bp, Artificial Sequence
  ENSG00000182389_139 (sequence is synthesized)
tgaaaggcaacagtttttggaaagggaagcctataggagctctgaaaaaagttaacgctgtagccagaattaatcctagatccagggactgttgaagcaaaaggggaccttaaagagcac

SEQ ID NO: 646127 - DNA, 120 bp, Artificial Sequence
  ENSG00000182389_140 (sequence is synthesized)
ccaatatagtatttcctagactatattatttataatatgggtcctatgtgatatcagtaagtgttatgggaaaataatcctgataccaaaaatgtttgagaaaacacttaggtgaacaaa

SEQ ID NO: 646128 - DNA, 120 bp, Artificial Sequence
  ENSG00000182389_141 (sequence is synthesized)
ggtagtctggtttctttactacagaaccctgaatatgccaatgtgtattttatatctccaataggacaaatagtgtgcacagcttcccctaaaattgtgactgcagatctgcttttccat

SEQ ID NO: 646129 - DNA, 120 bp, Artificial Sequence
  ENSG00000182389_142 (sequence is synthesized)
tgagcatcctatgggtccagtggaacatgtctagggaaagacttagtccaatctcctcattttacaaatgatggaactgagaccaagagaactggcttttcaaaggttgtatgcctgggc

SEQ ID NO: 646130 - DNA, 120 bp, Artificial Sequence
  ENSG00000182389_143 (sequence is synthesized)
caaagtcagcttaagatctctttctcctagtctagcaagactagatgatgaatggcaacaggtcagttatatattctcctggaaagaaaagtatgggttttggccaggtgcagtagctca

SEQ ID NO: 646131 - DNA, 120 bp, Artificial Sequence
  ENSG00000182389_144 (sequence is synthesized)
tcagtgccaatgcatttatggctgtttattacacaaaccgagggatgttcttatggggatccatggacgcagcagagaaagttaccaaaaacctaccacccagaaatagtcattgttaat

SEQ ID NO: 646132 - DNA, 120 bp, Artificial Sequence
  ENSG00000182389_145 (sequence is synthesized)
gttgtagttaaactctttttcatacactgtattccttttaaaaatatttgaacacacatgcaagtagttttgctaatttggaaacaatttgaaggcttaatttaaagattctctaattaa

SEQ ID NO: 646133 - DNA, 120 bp, Artificial Sequence
  ENSG00000182389_146 (sequence is synthesized)
tatttcatttctcatttgttttctatggtaatttgatttcatttaaaatggtattaaaaattcatgtcattagaatataattttgaaaaatcttatttacccctcagtgttaataactgt

SEQ ID NO: 646134 - DNA, 120 bp, Artificial Sequence
  ENSG00000182389_147 (sequence is synthesized)
ccattgtgtaaattgatattcaaaaaattcattattttacctaaggaacggacagagtttaagatggtgaaggccaataaaaaaaggaaaaaaatgatgcagactctcaagaaaatgctg

SEQ ID NO: 646135 - DNA, 120 bp, Artificial Sequence
  ENSG00000182389_148 (sequence is synthesized)
ttttcagtctccatgtggaatttcaggatgtattagtacagcccgagctggaagggttgaagcagagagtaaggcagggcccaaaggagggagggcctcgtttacatttggacagcagac

SEQ ID NO: 646136 - DNA, 120 bp, Artificial Sequence
  ENSG00000182389_149 (sequence is synthesized)
agccaagccctggaattaatggtaatgaagagatattggtggcctaatagggaattgtggtacatttggaaacgatggagttattcatgtaggaatttttcttctaccacattccctgat

SEQ ID NO: 646137 - DNA, 120 bp, Artificial Sequence
  ENSG00000182389_150 (sequence is synthesized)
tcctatcggctaatttcattctggcctagaactgctgttgcattagggcatccagtgtcctagttaccaattccaattgtattaccaatttggaatggcaagtccaaggccctattctgg

SEQ ID NO: 646138 - DNA, 120 bp, Artificial Sequence
  ENSG00000182389_151 (sequence is synthesized)
cctaccaaaactggaggcaactggattggttctggagtggttctaagtgtctgggtccttgttcatgtgaagccctcttatctacaggacactgaaccaaaccaggtttctgagttgtac

SEQ ID NO: 646139 - DNA, 120 bp, Artificial Sequence
  ENSG00000182389_152 (sequence is synthesized)
ccaactagactggagctgcttggatgtccacagaatcgctttaaatcagttattgagtatattttgcttcgttcccatttgttggacattcaggacattgaacactttagctattacaaa

SEQ ID NO: 646140 - DNA, 120 bp, Artificial Sequence
  ENSG00000182389_153 (sequence is synthesized)
caggaaagaacaggaataactcattataaatttatctgaggaataactggttataaatgtatttgaaatttagaagcaagatagtaggaaaaatgtgccaatattctagaaaatgggcaa

SEQ ID NO: 646141 - DNA, 120 bp, Artificial Sequence
  ENSG00000182389_154 (sequence is synthesized)
aaatgcccaagggactgcagaattatgagttaacaaatataaaaataactattgattgaggtgatagtcatttttgcccaagtggttattctgtttccttttatgaaattgcatttgtct

SEQ ID NO: 646142 - DNA, 120 bp, Artificial Sequence
  ENSG00000182389_155 (sequence is synthesized)
accttgttcccagcaacactgtgctgtgtccagcacgggaacaacccatggtgattggctggcccggaacttccagtgttgctctcaactcctgtacccaattcccacccagtgagaaat

SEQ ID NO: 646143 - DNA, 120 bp, Artificial Sequence
  ENSG00000182389_156 (sequence is synthesized)
caggatataaggtcatttgtaccagggaggaagctgtctgtttttcatacatcttcaaaattgacgtgtccagaatgaaatcataaggcaggttctccaaagtgggcgataggaaggtgg

SEQ ID NO: 646144 - DNA, 120 bp, Artificial Sequence
  ENSG00000182389_157 (sequence is synthesized)
tgaagataattacagggacaaatgggtacattcttccatcttttaaactcatgtactgtcatttgcagagtttacatattttgatatggctctcgttattgtcttttagcaaaacagaag

SEQ ID NO: 646145 - DNA, 120 bp, Artificial Sequence
  ENSG00000182389_158 (sequence is synthesized)
caaaaagtggtaagttgtgtttcctttttaaatctactgttaaggttcctatatatacatgcctgcaatgctccatttcagtgacccaagtggctataaaataagggaagagcctcctcg

SEQ ID NO: 646146 - DNA, 120 bp, Artificial Sequence
  ENSG00000182389_159 (sequence is synthesized)
gtggggactttgataatcatttgtcgttcaacctgagaattatgaaattatgaatgttgtggctgtggagaggcatgctcaacctcaccttgtcacgcgtgtcgaatcatctttttcaga

SEQ ID NO: 646147 - DNA, 120 bp, Artificial Sequence
  ENSG00000182389_160 (sequence is synthesized)
tgtcatggttctgtagactgtaaaggaagcatggcagcatctgcttctggggaggtctcagggagattttactggtagcagaaggccaagcgggagcaggtgtcttacatgcctggagca

SEQ ID NO: 646148 - DNA, 120 bp, Artificial Sequence
  ENSG00000182389_161 (sequence is synthesized)
ggaggaagagacggggaggtgccacacacttttaaacaatcagatctcactataactcactcattgtcacaggaacagcacaaggagatggtgccaaaccattcatgagggactgccccc

SEQ ID NO: 646149 - DNA, 120 bp, Artificial Sequence
  ENSG00000182389_162 (sequence is synthesized)
gtggtccagtcacctctcaccagtccccacctccatcactggggattacatctcaacatgagatttgcgggggacacagatccaaaccatattatccctttttttctaaaattttgtctt

SEQ ID NO: 646150 - DNA, 120 bp, Artificial Sequence
  ENSG00000182389_163 (sequence is synthesized)
ccatgcccctttttagacacatggggagcatgtgttcctgtcttggggtctttgcatttgctgttttttcttactggaacctttttcttcacacttacacccggccactccatctgcttt

SEQ ID NO: 646151 - DNA, 120 bp, Artificial Sequence
  ENSG00000182389_164 (sequence is synthesized)
atatctttgttaggtatcaccctttcagtgacccctttcctgccaattgtatttaaaattgtacccactccccttccctgtacttcccatcccttccctgacttagttttctctgttgca

SEQ ID NO: 646152 - DNA, 120 bp, Artificial Sequence
  ENSG00000182389_165 (sequence is synthesized)
cttattactctcagaaatattatatatttacctatctatcttgtttggtataagctgagcatccataatctgaaaagctgaaatccagaatgttccaaaatttgaaactttttgaggact

SEQ ID NO: 646153 - DNA, 120 bp, Artificial Sequence
  ENSG00000182389_166 (sequence is synthesized)
gacatgatgctcaaaggagatgctcattagagcattttcgatttcagacatttggattagggatgttcaactaagtatatagtgcaaatttccgaaatctgaaaacagtggaaatccaaa

SEQ ID NO: 646154 - DNA, 120 bp, Artificial Sequence
  ENSG00000182389_167 (sequence is synthesized)
acatttctgctcccaggcattttggataagggatattcaacctgtactgatatgtcctactagtatatgactcaataagggaaaggattttgtctccccaatgccgctgtcttatttcta

SEQ ID NO: 646155 - DNA, 120 bp, Artificial Sequence
  ENSG00000182389_168 (sequence is synthesized)
ctttccaaaacagggatgtacaatccatatttgttgaataaaataactgaattattatcattttcaaagttttattgttattattatttcttaattgttacagtcatgggccatataact

SEQ ID NO: 646156 - DNA, 120 bp, Artificial Sequence
  ENSG00000182389_169 (sequence is synthesized)
tttttgtcaaagacaaaaagtaggaaggtggcagctcccgacggcatttgtgggcttcagggaagcttccagagcacacctgaggagaccagagttgaggatcttctatttaaataaata

SEQ ID NO: 646157 - DNA, 120 bp, Artificial Sequence
  ENSG00000182389_170 (sequence is synthesized)
atatttttcgtgaccaattccctacgatcagttcttaattctgatgcccacataatcatcttgtaagaagaaatggtttctccaggtctaactgcttgttttgagctgtgtttgacatct

SEQ ID NO: 646158 - DNA, 120 bp, Artificial Sequence
  ENSG00000182389_171 (sequence is synthesized)
gactggcacattggtgcctggtgttaggttaacaagcagttcataagaccattcccgtcagtgatggttttgtctgatttccgcactgagtaactagaagagatgcttttgcagagtatt

SEQ ID NO: 646159 - DNA, 120 bp, Artificial Sequence
  ENSG00000182389_172 (sequence is synthesized)
ccaggtctcggctagttctccacattctcttagaaatgaggtcaaagaaaacatttggatagattcttgaaattctttatagcagaatttggtgtgttttgaattatttaataggatgag

SEQ ID NO: 646160 - DNA, 120 bp, Artificial Sequence
  ENSG00000182389_173 (sequence is synthesized)
ggccaaagaaagctttgtactctcaagttctattttcaaagaatctggggagtgagtctttagttccttttctatatcctaggaaatcaagtggaaattcttcttcaagtcttggagaaa

SEQ ID NO: 646161 - DNA, 120 bp, Artificial Sequence
  ENSG00000182389_174 (sequence is synthesized)
tttctgccttaaggtttagaagtgcatcttttaaaaatgtgttttgctctgtggttttttgttagtggacaaaggagaacgtcttgctgattattaataagcacatttaaaatctttcca

SEQ ID NO: 646162 - DNA, 120 bp, Artificial Sequence
  ENSG00000182389_175 (sequence is synthesized)
cagtgtacagattctatgaattttcagatagtgaagaatataatagttcatttcttctaaaagctactattgtagatcccaaacaagacagttatgcaagtgtataatagaaacaaaaca

SEQ ID NO: 646163 - DNA, 120 bp, Artificial Sequence
  ENSG00000182389_176 (sequence is synthesized)
ttaagacagatgtggaaaagtagactctggcttatcatagactatgaattctatattggtaaatttcttggatcctgttgattcctgtgtcatccatactctgtacctagttgagagagt

SEQ ID NO: 646164 - DNA, 64 bp, Artificial Sequence
  ENSG00000182389_177 (sequence is synthesized)
gctggaactacaggcatgtgccactgtgcctggctagtttttgtattttagtagagacggaggt

SEQ ID NO: 646165 - DNA, 120 bp, Artificial Sequence
  ENSG00000182389_178 (sequence is synthesized)
caggcatgagccaccatgccaggccctgctttattcttctcttgcatgaccgaaggatactttctaacgtagaaaatcctggcacaatactcacattactttcaactagagtgccttatg

SEQ ID NO: 646166 - DNA, 120 bp, Artificial Sequence
  ENSG00000182389_179 (sequence is synthesized)
tactttcaactagagtgccttatgactgcccaccgtatgcattcaaagtcttatgcaaatatgctgaagaatcttatgcatgcagaaaaaataaaaccattttttcacattcttataaat

SEQ ID NO: 646167 - DNA, 120 bp, Artificial Sequence
  ENSG00000182389_180 (sequence is synthesized)
gaagtatccctttgggcctgtggagaatcacgtgtgtatcacaaaagaatgcagcttagccacagactggtagattgtctttgataatcaaaatgaagagggtttcccagctttgactgg

SEQ ID NO: 646168 - DNA, 120 bp, Artificial Sequence
  ENSG00000182389_181 (sequence is synthesized)
catcattaaatgccagagcaaagcatttgtagttcctgaaggtcttgttcaagagcaaatcaactatgaattgtggcaaattgtattgctacttcctagaaagagcatggtttatttata

SEQ ID NO: 646169 - DNA, 120 bp, Artificial Sequence
  ENSG00000182389_182 (sequence is synthesized)
tgtcttgattccttcctggtgtggtgtatattataaagggaattcagcaaggcaggccataatggaggaagaacatttttactggagtaggtttttttgtgtgtgaaacagtttaaacct

SEQ ID NO: 646170 - DNA, 120 bp, Artificial Sequence
  ENSG00000182389_183 (sequence is synthesized)
tcctccattctgctctgcttgcattctgatactagccagagcctgtttaaaatacttgtggccaatgtttgttatactgtggttcccctgtagcatgtaaattggttattaagtactgtg

SEQ ID NO: 646171 - DNA, 120 bp, Artificial Sequence
  ENSG00000182389_184 (sequence is synthesized)
gttataaatcacttggagagccccataacatttttactggcttgttctgttctgtgttcctattcataggatttcaataacgagagtgacagctgacatttctcttgctaagaggtctgt

SEQ ID NO: 646172 - DNA, 120 bp, Artificial Sequence
  ENSG00000182389_185 (sequence is synthesized)
gctatctcctttgatgctaaagactttctacatattaaagaggtaaatgtagaacatactgcatcccttcacctgccaaaaagctgaagccaggaatcagctctgagccaaactagccag

SEQ ID NO: 646173 - DNA, 120 bp, Artificial Sequence
  ENSG00000182389_186 (sequence is synthesized)
agaggagacccaaggagctgccagtgcagtacatgatttaatttgctgagcctcccaaatctagtcattctcattaagattgagaagtctgagatcattgcttgcattatcacacactga

SEQ ID NO: 646174 - DNA, 120 bp, Artificial Sequence
  ENSG00000182389_187 (sequence is synthesized)
caacattaaatcacagtcaaccttaaaattatagcatagatttctgacagacctctatggtcctctgggcacctttaaatccccttctgtgactgcagagccataaatatatggatccaa

SEQ ID NO: 646175 - DNA, 120 bp, Artificial Sequence
  ENSG00000182389_188 (sequence is synthesized)
aaatgtaagtttggtgtcatggcacctacccagaagggactgtttacaggggatgttgtaattatagacatgtagactatagtgctgtgcaccttgactatggaaccaacactagagtgt

SEQ ID NO: 646176 - DNA, 120 bp, Artificial Sequence
  ENSG00000182389_189 (sequence is synthesized)
ataatcattcaaagaaagatttacagctaagaaaagggcagagggctctgggaaacagaaaggcaaaagggtaaagtgtttgagtagccaagaagggtgggatccaagacccctagtgga

SEQ ID NO: 646177 - DNA, 120 bp, Artificial Sequence
  ENSG00000182389_190 (sequence is synthesized)
gggacagacctttgatagaaagaagaatgctaattcattgtgacatgcagggaaaagatgagtgcaggcacagacacttcagggccttgggaataggaaactgaggacccatcaacttca

SEQ ID NO: 646178 - DNA, 120 bp, Artificial Sequence
  ENSG00000182389_191 (sequence is synthesized)
accatggcctctactttcttgatggtatatgaggtgaggatgtctacatttgtctagaagacaagaactcttgacctgaaacatgtgccctggcatctgaatggttaagttgattatgtc

SEQ ID NO: 646179 - DNA, 120 bp, Artificial Sequence
  ENSG00000182389_192 (sequence is synthesized)
tcaccatttccatcaaaaatgcccaagccatattcattagttgctaatacccactgtgtccaaggagaagcaccacttgaaaaggtaagagatgttcttacatgtgacatgcacactcac

SEQ ID NO: 646180 - DNA, 120 bp, Artificial Sequence
  ENSG00000182389_193 (sequence is synthesized)
tcacaccaacattccaaccttgtatttgattgctttcctgcattgtatcaaggtctcaatttgtcctggctgctgtttgagctatgtgcttgttgatcagtgattttctcttcagtctgg

SEQ ID NO: 646181 - DNA, 120 bp, Artificial Sequence
  ENSG00000182389_194 (sequence is synthesized)
cagtttgatgtgacattgagctggtaatcttatgtggaccagagcctcttgttttcatgtcttgaaattatcagataagaaaacatctttgatatagaaagtgctaatcattttagggaa

SEQ ID NO: 646182 - DNA, 120 bp, Artificial Sequence
  ENSG00000182389_195 (sequence is synthesized)
atccaaatagagaagggttggaacaacaccgaggtgacctctgtagagagctggcacaagttcccagaacatcaacacaaatgaatacatttctataatcaagttatagccttccctctc

SEQ ID NO: 646183 - DNA, 120 bp, Artificial Sequence
  ENSG00000182389_196 (sequence is synthesized)
agtagttgatggcgggtagtgctaggtactgcagtgctgtactcctggtgactcagtggtggccagcaggctgagatcctccgggctgtgcacatctgtggaggaagaataatgtgatgt

SEQ ID NO: 646184 - DNA, 120 bp, Artificial Sequence
  ENSG00000182389_197 (sequence is synthesized)
acacacacacacacacccgctcggttcttcccattcccgccacactgcaccagcttccgtccccaagtcctgattcatgaaccgtgccacctttgtctcattttaaactgtgcagactat

SEQ ID NO: 646185 - DNA, 120 bp, Artificial Sequence
  ENSG00000182389_198 (sequence is synthesized)
tttaatcttgccacccccatcccagatttccccctcccttcatcctctggaagctctgatgtaaagcgcttgctaggtgggagagcgcttctcccaatccgctcgggtaggcgagtttcc

SEQ ID NO: 646186 - DNA, 120 bp, Artificial Sequence
  ENSG00000182389_199 (sequence is synthesized)
actttacagctgaagaaaaagaaatccagcaaaattaaatgatttgcccaaggtcctataaccagtggactgcaaggctggactagagggcagagtttccatcccatgggtgcaggccag

SEQ ID NO: 646187 - DNA, 120 bp, Artificial Sequence
  ENSG00000182389_200 (sequence is synthesized)
gtcctgagggacacgcttctctctgtagagagctgtctctcctgctcacatcctgggtaaatccttattggcaaagaataaggtgggagagaaggtggccaacaaagtgctagctctgcc

SEQ ID NO: 646188 - DNA, 120 bp, Artificial Sequence
  ENSG00000182389_201 (sequence is synthesized)
cagtctttctcagtgccaatgcatttatggctcctgagcatcatataggaaaaagattctgaccttctacgttattactctattggcagctttgttgaaaagtttgggttcagcggattc

SEQ ID NO: 646189 - DNA, 120 bp, Artificial Sequence
  ENSG00000182389_202 (sequence is synthesized)
aacaggtctggtggataggcgtggaaaggcttttctcagatggctagctgcagtccgagaatatataggcactaaaagctgagtacggcacttcggttgggggtgggggttggggaacca

SEQ ID NO: 646190 - DNA, 120 bp, Artificial Sequence
  ENSG00000182389_203 (sequence is synthesized)
tccgcatatgtcctaccgttctgtgctgttgaaaatgtctttgtggggtgtgtgggggttaacttgtgataagtgattattttcaatgttttcacacagtaagcttgtaataagatcatc

SEQ ID NO: 646191 - DNA, 120 bp, Artificial Sequence
  ENSG00000182389_204 (sequence is synthesized)
ttgcctagggacaattttattccgaataagagtaaaccattattatacactgttagcacctcacatccccacagtaggagagagatgttggtactgtgatgcaaggctttcttaagagtt

SEQ ID NO: 646192 - DNA, 120 bp, Artificial Sequence
  ENSG00000182389_205 (sequence is synthesized)
tggtccaaaagtagatgttatgctcccagtgccctagattttagtttgtaacctccgtgtttcacatactctatatgtgaagagagaggaaaaagaaacatgccgaaacacacttgagtc

SEQ ID NO: 646193 - DNA, 120 bp, Artificial Sequence
  ENSG00000182389_206 (sequence is synthesized)
gtctcgctctgtcgcccaggctggacattttagattcttgagtcctgtggagcctttttgggcaagtccattaacttctgctttggtgtccaggagggtagttaagaatctggattacaa

SEQ ID NO: 646194 - DNA, 120 bp, Artificial Sequence
  ENSG00000182389_207 (sequence is synthesized)
ctttggtgtccaggagggtagttaagaatctggattacaaggaagtgcaaaagatcattcagtgccccacagcagggccccacttccgaataggagatttcacacagaacgtcaccttac

SEQ ID NO: 646195 - DNA, 120 bp, Artificial Sequence
  ENSG00000182389_208 (sequence is synthesized)
ttcttgtattaccttgacatagatgatggagtgtgtgcttccagatgaacccatacctagcccaggctggttccagtggatcatgcacatcgactcttcctacattagctgctatataag

SEQ ID NO: 646196 - DNA, 120 bp, Artificial Sequence
  ENSG00000182389_209 (sequence is synthesized)
agctgcctattctaccttcactgtccccactgtgtgttaatacaagttctagtggccaagatttttttcatggactgagccccccatgtacactatactatgtgttttcatctgatttgc

SEQ ID NO: 646197 - DNA, 120 bp, Artificial Sequence
  ENSG00000182389_210 (sequence is synthesized)
agtagatttcattagacctgctctttagtgtgtacgtgtatttcataaatggattcattgtgtattttgatgtttgtggaattattctggaaatagatttattttttcattcatcaggtt

SEQ ID NO: 646198 - DNA, 120 bp, Artificial Sequence
  ENSG00000182389_211 (sequence is synthesized)
tcaatccacatatatgtaaataggtcagtctcaacctgctactgtgtgttgcaccctattctgtcaaatgctgttcttacttgagaaaatgttgagcatactaggactagaactggcctg

SEQ ID NO: 646199 - DNA, 120 bp, Artificial Sequence
  ENSG00000182389_212 (sequence is synthesized)
cacaggagacactttgcaaaatttaaagctcctacatggaccttctggaattgtgagtagcttgaaatacggattcttagggtatattgtacggtgatgccggggttagttgcacatagg

SEQ ID NO: 646200 - DNA, 120 bp, Artificial Sequence
  ENSG00000182389_213 (sequence is synthesized)
agtaatagttcatttctctgacacaattgcttccatttccaaatgcttaaattctaaagcatttagaaagagggacctgatcttttcctgtgaaaaagatgatcagatcatcattcaggg

SEQ ID NO: 646201 - DNA, 120 bp, Artificial Sequence
  ENSG00000182389_214 (sequence is synthesized)
caatttccagagaggaaaatatagtctttaagtgttttcaatcatagaaaggaatcataatatattgattaatactgttagaaattttatgtatgtaaaagttacagcaaagtaaatttt

SEQ ID NO: 646202 - DNA, 120 bp, Artificial Sequence
  ENSG00000182389_215 (sequence is synthesized)
tgtatgtataacaatatctgagtgtatatataaaagcacatacttaaatttacatgtacgtacacattattataagaatagctttgtgttaaactatttattttctataagctgtggaac

SEQ ID NO: 646203 - DNA, 120 bp, Artificial Sequence
  ENSG00000182389_216 (sequence is synthesized)
aagctgtggaactatgtatgtttgtctcaatgtctgtgcacctctgcatgcatgcgtactgttcaccctggtaccttcacctacattcatatacagatatgttccatgcatcgctaattg

SEQ ID NO: 646204 - DNA, 120 bp, Artificial Sequence
  ENSG00000182389_217 (sequence is synthesized)
tgcttttgatgtgaacaaagatacccaagagagttgaaaggcaaagcagcctcaagagaataaaggattgctcctttcaaagatatagtaaagttattttaaatatgaagatatatcctt

SEQ ID NO: 646205 - DNA, 120 bp, Artificial Sequence
  ENSG00000182389_218 (sequence is synthesized)
gtgcttgctagggaggcggataaacttcagacagaaggatttatatgtttaggggccttcagaagacactttagggatttaaggattagatttcttttggaaacaagaaggccagaggtc

SEQ ID NO: 646206 - DNA, 120 bp, Artificial Sequence
  ENSG00000182389_219 (sequence is synthesized)
tctatggtttggtggatcagagcatctcttctggagtcaaaaagtctttctggcctatttatagagaatgaggactgatctgtaagagaatccaaggactggatgttggcatctctgacc

SEQ ID NO: 646207 - DNA, 120 bp, Artificial Sequence
  ENSG00000182389_220 (sequence is synthesized)
acagaagaaaaccaaatgttgctcctggtttgtgtagggaatttgactgagaaaaatcaagttgttttactcagctgagctgtgttggtgtttggctaggggtgtgttaagtaaatgaca

SEQ ID NO: 646208 - DNA, 120 bp, Artificial Sequence
  ENSG00000182389_221 (sequence is synthesized)
aacagggctttctcttcaatcagcaatgatggttttctaaaatatatattgaaattatttctagatataattggcatggagccaaagagagaaattccttgaatcgatcagatcccatga

SEQ ID NO: 646209 - DNA, 120 bp, Artificial Sequence
  ENSG00000182389_222 (sequence is synthesized)
atttgctgttccagcttgtcaatcttgctgctttcttgttaattttctatttttgagtcacagaggcaagaattcggatcaatcctcgccaggtacttccatgtctccttttctgctgct

SEQ ID NO: 646210 - DNA, 120 bp, Artificial Sequence
  ENSG00000182389_223 (sequence is synthesized)
gttattattattattagattatgatgagtcaatccaggattttagaatatggccctgtgactccctttgtatgtactcaatggacattccattattctgtggtgcaagacattctgtaaa

SEQ ID NO: 646211 - DNA, 120 bp, Artificial Sequence
  ENSG00000182389_224 (sequence is synthesized)
agggtcagcaataaccgtgaaaaatcattattttagggtgaaggtggggaggcttcccattaccttagctcttctctttctgtggggttcagcttggaccttatttctatgtcaacagtt

SEQ ID NO: 646212 - DNA, 120 bp, Artificial Sequence
  ENSG00000182389_225 (sequence is synthesized)
ctcccattctggtcactgtctcccctttaccgtctcttacccaggtgaacaaggccacttaaggaggacaagaggatataactggactggttatcatcgttcattctcttctcttccctc

SEQ ID NO: 646213 - DNA, 120 bp, Artificial Sequence
  ENSG00000182389_226 (sequence is synthesized)
tcccacttgtcctttaaaataatcatgaagccatgaactcagatatccataacattaagttaaaaattgtaccaaggaagcgctacagatataggctctgtgttctcatctacatcggct

SEQ ID NO: 646214 - DNA, 120 bp, Artificial Sequence
  ENSG00000182389_227 (sequence is synthesized)
gatttaggggcctttcatgtgtttgcatcaggctctggcggctgtgaaaacagcaacagctgtaacctgccacactagaaaaaatacattcattgggtggatccccgagttctcacagga

SEQ ID NO: 646215 - DNA, 120 bp, Artificial Sequence
  ENSG00000182389_228 (sequence is synthesized)
ggctggggcactgccgtgtaaagctagcgccctgccctcagaacaacttagtgtgtaaaacctaaaggagcttacagttcatataaaataatgacaactttgagctttttaagactttga

SEQ ID NO: 646216 - DNA, 120 bp, Artificial Sequence
  ENSG00000182389_229 (sequence is synthesized)
agggcgtgagtctaagataaaactgtgtggctatttttacagcatgtattggtatgccaaaagaaggtagcccagatagctcacgtgacaatttttgacatctaaatagaccaatacttg

SEQ ID NO: 646217 - DNA, 120 bp, Artificial Sequence
  ENSG00000182389_230 (sequence is synthesized)
ctcttgctctacattttatattcttttataacataactatatagttttagttataaatattttcctctctttttaaatggtgccacattatcagtacttcctgtgtccttttttttcttt

SEQ ID NO: 646218 - DNA, 120 bp, Artificial Sequence
  ENSG00000182389_231 (sequence is synthesized)
tgtgtctgtcatgagaaatattgaaaagtcttatatttaaaacaggatgttttgaatttgcttttagccttttcattcagaggagttgatccaaggtatccactcagacatggagattgg

SEQ ID NO: 646219 - DNA, 120 bp, Artificial Sequence
  ENSG00000182389_232 (sequence is synthesized)
caactgtcaattactcaggagcttgtctgtgtagtttgtggaaaaaaaaaaacaacagttctcttattttgcctttcttatgcctgttattccttaatctcccttttctttttagcctga

SEQ ID NO: 646220 - DNA, 120 bp, Artificial Sequence
  ENSG00000182389_233 (sequence is synthesized)
gcatcatataggaaaaagattctgaccttctacgttattactctattggcagctttgttgaaaagtttggtgagtgataaggttgtagttgaaattgtttctagatctttttaaatctcc

SEQ ID NO: 646221 - DNA, 120 bp, Artificial Sequence
  ENSG00000182389_234 (sequence is synthesized)
ataagacttaaaaaattttgccttctattgggcatatctatcagccaggaaaatttctattttactttttgtactttgtattatgaaaaaatgttgtagtataatagtgtcatgattgaa

SEQ ID NO: 646222 - DNA, 75 bp, Artificial Sequence
  ENSG00000182389_235 (sequence is synthesized)
ttatgaaaaaatgttgtagtataatagtgtcatgattgaaagtggagacagaacagatgggcagattgcttgagc

SEQ ID NO: 646223 - DNA, 86 bp, Artificial Sequence
  ENSG00000182389_236 (sequence is synthesized)
agtctgggcaacatggcaaaaccccatctttgcaaaaaaataaaaataaaaaaaattagtggggcatggtggcatgtacctgtagg

SEQ ID NO: 646224 - DNA, 120 bp, Artificial Sequence
  ENSG00000182389_237 (sequence is synthesized)
atggaattgaagactcggaggctgtaagtattttcatagatagctaattccctctcccctcctcttcctcctcccactatcccctccacccccccgcttcttatttcttaggcaacgcag

SEQ ID NO: 646225 - DNA, 120 bp, Artificial Sequence
  ENSG00000182389_238 (sequence is synthesized)
ggaacatggagcagaaagctaacatcattctggggcttgctggctgctgtgtaaatgttctctgtgtagtttataggtaactaaaattatttattgtcaagcaaaaaagaaattagggtg

SEQ ID NO: 646226 - DNA, 120 bp, Artificial Sequence
  ENSG00000182389_239 (sequence is synthesized)
atggcaaagcattcaagagtgtaggctgtttgaatttatacattaccgggtccacgtttgatctcaccaggggtaactgctccttgcagactggtttaaactatgcagaaagtgcctatg

SEQ ID NO: 646227 - DNA, 120 bp, Artificial Sequence
  ENSG00000182389_240 (sequence is synthesized)
ttttccaatagcagggttcatagaaaagcctcattcattatataatacacattgtttgttgagctagcatgaatggaagttcctaagctgtggctgtattattatgtgctttctggccaa

SEQ ID NO: 646228 - DNA, 120 bp, Artificial Sequence
  ENSG00000182389_241 (sequence is synthesized)
acaagcagtgcagatatactgcttctttgttaaggaaatcagatgctaggcttgtggccatacagcaatccagtgcagaggcagtgggcagtgttcctatactctaccttggaagagcga

SEQ ID NO: 646229 - DNA, 120 bp, Artificial Sequence
  ENSG00000182389_242 (sequence is synthesized)
agcagactcacgtgtgttttgggttagagaactggactccttctcccccctaggtcaggctcatgcaatctgttaaaatcagggtgaaataatttcctgaaatccctgaaatcataccat

SEQ ID NO: 646230 - DNA, 120 bp, Artificial Sequence
  ENSG00000182389_243 (sequence is synthesized)
agagtgctagcttttaaatataaggtaaagctgataattgaatctttcttttgactcttgctggtggtagttcctatttttttcatcaatacacagaaacctcgcaaggtagaatggctg

SEQ ID NO: 646231 - DNA, 120 bp, Artificial Sequence
  ENSG00000182389_244 (sequence is synthesized)
ggggtggttaatgggaagtgctgtggggagtctgaattttatgtgagtgcagtgccaatacatgttgctacatttgaaacaggagtgtgttatataagattctctggctaaaccaccaaa

SEQ ID NO: 646232 - DNA, 120 bp, Artificial Sequence
  ENSG00000182389_245 (sequence is synthesized)
aaaaaaaaacaaaaaacaaaaaaaaaccctgtggtatacgtcaatgcagacgtatatgtctaatgatgtgctatccatgaaagatagaaatcctcagttctgttaaggcattccattttt

SEQ ID NO: 646233 - DNA, 120 bp, Artificial Sequence
  ENSG00000182389_246 (sequence is synthesized)
aaggcattccatttttccttcctgtctgtgtgttttctctaactctaactctgtttccgcaaagtctctctgcgtgttgcccaacgtgctcataaatgatcagactgtcagtgtattgta

SEQ ID NO: 646234 - DNA, 120 bp, Artificial Sequence
  ENSG00000182389_247 (sequence is synthesized)
agggactgtagtctgaaacattggtggctgaaatcaagaaggtccacacttgcaggtggggtgggggaatggcaaaggcaattacaggagttcagtaagccagcttcctgggctggtttc

SEQ ID NO: 646235 - DNA, 120 bp, Artificial Sequence
  ENSG00000182389_248 (sequence is synthesized)
ttcagaaggcctgatcacttcttctaccccttctctgctcactcagttatgaaacctatgatgccttgtgaattgtaagttttattttcggccattgattttaaacttgggcaggcagtg

SEQ ID NO: 646236 - DNA, 120 bp, Artificial Sequence
  ENSG00000182389_249 (sequence is synthesized)
aattgcaccgaagtggactggagtcattttagaaatgcctgtagaaactggctgctgtgaagagttggctaggaactaataaatccagctccttgttctccagaactgtatacatttcag

SEQ ID NO: 646237 - DNA, 120 bp, Artificial Sequence
  ENSG00000182389_250 (sequence is synthesized)
atgcactggttcagaggggagccattataagtatgaaaacatttttttttttttttttttttgcctttgggtccagtgtcacaggacagctgagtttttctgtaagatgggaagtgaaga

SEQ ID NO: 646238 - DNA, 120 bp, Artificial Sequence
  ENSG00000182389_251 (sequence is synthesized)
gtggaggtgaggaaggtgggaaacatgaggagtggagttgggcatctggccaatcctcagttgagagtatgggaggctttcaggtgggcgggattgaaaccgtgtcacataaatcagggg

SEQ ID NO: 646239 - DNA, 120 bp, Artificial Sequence
  ENSG00000182389_252 (sequence is synthesized)
tgaatgttcctgggagactaaacatgatctttccttgcaagaaagtcacagttctctgtgtaataaacagagttggctgctccccagaattctccagtcaaggattactatctgcgagct

SEQ ID NO: 646240 - DNA, 120 bp, Artificial Sequence
  ENSG00000182389_253 (sequence is synthesized)
acatggtgcatttgtgaatgtctttttcaatttgttccccattctgaacgggggagcactgagtacctaaaaagaatgctagctatggacaagaaggcagcagagtcttgcagtagcgag

SEQ ID NO: 646241 - DNA, 120 bp, Artificial Sequence
  ENSG00000182389_254 (sequence is synthesized)
agcttgctgtctctcagctttagtcaattagctaattagtagtctggtggaaagaatcctcaatgggctctcctagtcttttcctgcctaactacatgaaaccagtcatctccactttgc

SEQ ID NO: 646242 - DNA, 120 bp, Artificial Sequence
  ENSG00000182389_255 (sequence is synthesized)
tcagcttctcaacaaggctaatgatatctgtcatacctgagtcacagctgacataaaaggaaacgaggtgttcagccttctgagatctttagaagaaaagctagataacggtgttcttgg

SEQ ID NO: 646243 - DNA, 120 bp, Artificial Sequence
  ENSG00000182389_256 (sequence is synthesized)
tgttgtgaatggcaatgaccattagtaacatgcagggactttaaacatgtctttcctggggtaccagttggaaagcatcctaaaattccccatgatggagaagaataaaggctgtaagtg

SEQ ID NO: 646244 - DNA, 120 bp, Artificial Sequence
  ENSG00000182389_257 (sequence is synthesized)
agtagctccgtcaagccataggtgagcagggctgtggaggatggatcataacccacagaagcgagtccatagtgctggtgaattacatcgttcatctggaaagcctgttcatggtctcca

SEQ ID NO: 646245 - DNA, 120 bp, Artificial Sequence
  ENSG00000182389_258 (sequence is synthesized)
cgattgccaagggtggtgtagtccactcatgacttcctaggattctctttacattcatattctgagggcaacttgttttaactaggaaggataaatagggctcttccatgccttacattt

SEQ ID NO: 646246 - DNA, 120 bp, Artificial Sequence
  ENSG00000182389_259 (sequence is synthesized)
tttaaactgttgaaattagctctatagataatagaaaaataaaattaagatttccaagacagagtgcatgccctaacatcacattaagaacccactgaccttgagccaaagatcgtgcaa

SEQ ID NO: 646247 - DNA, 120 bp, Artificial Sequence
  ENSG00000182389_260 (sequence is synthesized)
tttgtaaagaaggtacaaaatattatctgtgtgttcctgacatgggattggcatgtgataattgctaataaatgtgggatggttgctttgtgaaggattactaaacataccaaatagagt

SEQ ID NO: 646248 - DNA, 120 bp, Artificial Sequence
  ENSG00000182389_261 (sequence is synthesized)
agtggtcagtgcttgtgaggggaagatcccagcgattagtggtcccttcttttgtcttgtatttagagccttccacatgcagagggaaacatgctcaaaggcacagtattttgaccttga

SEQ ID NO: 646249 - DNA, 120 bp, Artificial Sequence
  ENSG00000182389_262 (sequence is synthesized)
agaggtacaatggcagtgttgatggtgaatcctattaggtaatgactaaagttaaatatcatgggtgacagggacattaagttaggttgaagtttctcaaacaaacatcaattctctgct

SEQ ID NO: 646250 - DNA, 120 bp, Artificial Sequence
  ENSG00000182389_263 (sequence is synthesized)
ctcctgttttctacccattttgtaactccttatagtgtctttggcttttaagtactccttctaatgtatggtgagaggctaaaagataattaaaagcttaagccaggttgtctgactcct

SEQ ID NO: 646251 - DNA, 120 bp, Artificial Sequence
  ENSG00000182389_264 (sequence is synthesized)
tccttacaatccattcacctgctgtcagagtcagtggggtggatggggggcatgttagtgtaaacaagaagaaacaaagtatatctcacctcatggtttttacctttactctgtaaagtc

SEQ ID NO: 646252 - DNA, 120 bp, Artificial Sequence
  ENSG00000182389_265 (sequence is synthesized)
ataaacccacaaccattggaattaatttcatggcaatctattaattttataataaccacaatgtgatccatttgtgtgcttgttaatgcacatttgtagattccttcatcaaatgtttat

SEQ ID NO: 646253 - DNA, 120 bp, Artificial Sequence
  ENSG00000182389_266 (sequence is synthesized)
tgaacacttgttatgtgccatgcattgtgctagacttaggaaataaagacataacccacacacagtatcttacccatgggcaaagagacagaagagacagatggttagaatacctgtgac

SEQ ID NO: 646254 - DNA, 120 bp, Artificial Sequence
  ENSG00000182389_267 (sequence is synthesized)
agtggaattatgaacaaggaactaggggtataaagaagagtaggggttaagagatgtgtgagaagacttctcagaagttatatttgagctggttcttcaaggcaggcaggaatgtacaaa

SEQ ID NO: 646255 - DNA, 120 bp, Artificial Sequence
  ENSG00000182389_268 (sequence is synthesized)
gacattgacatgtaaacaaaaatatgttgttgagaaacaagtagatttgtgtatagcatgcttagaacagggaagttggtggtgtgatttgagaggaacagaagagattgaaaaagattg

SEQ ID NO: 646256 - DNA, 120 bp, Artificial Sequence
  ENSG00000182389_269 (sequence is synthesized)
aggccaatgtgttggggttctaatgcaccttgctaaagagaactccaaaatagatcccatgcaatgttaattttacaacatagtaacagttgttacattcagaatgttttccattgtcaa

SEQ ID NO: 646257 - DNA, 120 bp, Artificial Sequence
  ENSG00000182389_270 (sequence is synthesized)
ataaatttggaaatgatgaattaaactgacaggtttcttctctgcaagacttagagccttgaagatatgaaggataatgcatgtttgaaattctaaagagaagctattatagtattcaat

SEQ ID NO: 646258 - DNA, 120 bp, Artificial Sequence
  ENSG00000182389_271 (sequence is synthesized)
ataacccttacacaaaacccccttcttcccataggatatcttatgagattattgttccagagtactcactttgggaaatgttgctttggaccctggggagccattgaagtgttttaagca

SEQ ID NO: 646259 - DNA, 120 bp, Artificial Sequence
  ENSG00000182389_272 (sequence is synthesized)
tgggagaaatatgaacaggtttgagtataagggatataatttgtgacagggatcctggagagaggtgggcccaaatcatcatggtcagtttatagaagtgttcatcgaggtcctccagca

SEQ ID NO: 646260 - DNA, 120 bp, Artificial Sequence
  ENSG00000182389_273 (sequence is synthesized)
tcatagtccatgactccccagggctccatttgactggaataggattatgaggaaaacttatttggaacccctctgagaatcagtccaggtagccaagattttttgatttggttgagatct

SEQ ID NO: 646261 - DNA, 120 bp, Artificial Sequence
  ENSG00000182389_274 (sequence is synthesized)
ttttctttaaaaaacaaaaaaagagctatatagataaatatgcctcacagataaaatatatttattacattctgtatacatattatccaaacattgggctcaccccagtatttaatgtgg

SEQ ID NO: 646262 - DNA, 120 bp, Artificial Sequence
  ENSG00000182389_275 (sequence is synthesized)
ccttctccagcatccctgctggcttgttctgcccaagcacctctcttcctctgcccaagtgcctgttgcctaagagttttgtgttggttaagcagtaggtatggctgcccttgctcctgg

SEQ ID NO: 646263 - DNA, 120 bp, Artificial Sequence
  ENSG00000182389_276 (sequence is synthesized)
cagaaaccacacttaacctcattgctggtgcagagtaaataaggcccaggtatttctgagtcatttacacagaaactcagagtgccttgagggttatttgtaccagggcagtccagttca

SEQ ID NO: 646264 - DNA, 120 bp, Artificial Sequence
  ENSG00000182389_277 (sequence is synthesized)
catcaatgtctttctgctgcttctgaaaatattgtattcatatttgaagcttaagaaaacataggcttgctcacatgtagtcctggccaggagctcccataagccagtgacagtttaatg

SEQ ID NO: 646265 - DNA, 120 bp, Artificial Sequence
  ENSG00000182389_278 (sequence is synthesized)
aaaacagcaaatgggaaacataccctgacatcctgaggctgaaatttactacagtaaaaattgactttattttccaaacttccttctgaagaaaatttattttaaaactgtttctgccat

SEQ ID NO: 646266 - DNA, 120 bp, Artificial Sequence
  ENSG00000182389_279 (sequence is synthesized)
gtgagagaaaaggggacaaatatgctacattactaacaaatgtagaatatgatttcagaagaatttgacaaataagcccacttgttttcattaatattctgaaagctagtcacctttcca

SEQ ID NO: 646267 - DNA, 120 bp, Artificial Sequence
  ENSG00000182389_280 (sequence is synthesized)
agcaatgtgaagtctttcaggccattggtattggataacatgaaaagtgatatgttgactcttcaaattaatcctttttaatacagatcatgccttaaacttcagtgattctatgggaaa

SEQ ID NO: 646268 - DNA, 120 bp, Artificial Sequence
  ENSG00000182389_281 (sequence is synthesized)
taagaattttatgcaatcatgcaaaacataagaaaatagattttcatgatagtcttgagtattcatgaccctgcacaccttgtcaatccttttggttaaggaagggagaattttttggtg

SEQ ID NO: 646269 - DNA, 120 bp, Artificial Sequence
  ENSG00000182389_282 (sequence is synthesized)
ggctatgtgaacttgaatttatactaaataagcaaagcaaatcacaaacacttttcaatgaggatatttagagcaacattacctttttccctaggccatctttagggtcgtttaaggccg

SEQ ID NO: 646270 - DNA, 120 bp, Artificial Sequence
  ENSG00000182389_283 (sequence is synthesized)
ggtacaatggctcacacctgtgatgccaacacttcaggaggccaaggcaggaggattgcttggactttggagttcaagaccaacctgggaaacttagtgagacccagtctctacaaaaaa

SEQ ID NO: 646271 - DNA, 89 bp, Artificial Sequence
  ENSG00000182389_284 (sequence is synthesized)
caacctgggaaacttagtgagacccagtctctacaaaaaataaaaaatttagccaggcacacaagctgaggtgggaggatcacttgagc

SEQ ID NO: 646272 - DNA, 120 bp, Artificial Sequence
  ENSG00000182389_285 (sequence is synthesized)
gcactccagcatgggacacagagtgagaccctgtctctaaaaattaataataataatttaagttagatagttttgtgtactgtatgtactttggaccagattacagcattgtttggtcac

SEQ ID NO: 646273 - DNA, 120 bp, Artificial Sequence
  ENSG00000182393_0 (sequence is synthesized)
agttgcgatttagccatggctgcagcttggaccgtggtgctggtgactttggtgctaggcttggccgtggcaggccctgtccccacttccaagcccaccacaactgggaagggctgccac

SEQ ID NO: 646274 - DNA, 120 bp, Artificial Sequence
  ENSG00000182393_1 (sequence is synthesized)
attggcaggttcaaatctctgtcaccacaggagctagcgagcttcaagaaggccagggacgccttggaagagtcactcaagctgaaaaactggagttgcagctctcctgtcttccccggg

SEQ ID NO: 646275 - DNA, 120 bp, Artificial Sequence
  ENSG00000182393_2 (sequence is synthesized)
aattgggacctgaggcttctccaggtgagggagcgccctgtggccttggaggctgagctggccctgacgctgaaggtcctggaggccgctgctggcccagccctggaggacgtcctagac

SEQ ID NO: 646276 - DNA, 120 bp, Artificial Sequence
  ENSG00000182393_3 (sequence is synthesized)
ctcagcccacagcagggcccaggccccggggccgcctccaccactggctgcaccggctccaggaggcccccaaaaaggagtccgctggctgcctggaggcatctgtcaccttcaacctct

SEQ ID NO: 646277 - DNA, 120 bp, Artificial Sequence
  ENSG00000182393_4 (sequence is synthesized)
tccgcctcctcacgcgagacctcaaatatgtggccgatgggaacctgtgtctgagaacgtcaacccaccctgagtccacctgacaccccacaccttatttatgcgctgagccctactcct

SEQ ID NO: 646278 - DNA, 120 bp, Artificial Sequence
  ENSG00000182393_5 (sequence is synthesized)
tccttaatttatttcctctcaccctttatttatgaagctgcagccctgactgagacatagggctgagtttattgttttacttttatacattatgcacaaataaacaacaaggaattggaa

SEQ ID NO: 646279 - DNA, 120 bp, Artificial Sequence
  ENSG00000182400_0 (sequence is synthesized)
agactttagttcggccctaggatttggtagccccgaagtgtgggctctctccagtaccagactcatttcagtaccagcctttgggaagtcgtgtgaatacctcggtctcttagccacagg

SEQ ID NO: 646280 - DNA, 120 bp, Artificial Sequence
  ENSG00000182400_1 (sequence is synthesized)
gatagaatggcggcctgacggagccgcggcgccggcgaagtcgctgaggcgcgagctggaacccccagaccagctcaaacgggagccaaaactcgaagcttggaagaattagcaggaaat

SEQ ID NO: 646281 - DNA, 120 bp, Artificial Sequence
  ENSG00000182400_2 (sequence is synthesized)
ggcggatgaggcgttgtttttgcttctccataacgagatggtgtctggagtgtacaagtccgcggagcagggggaggtggaaaacggacgatgtattactaagctggaaaacatggggtt

SEQ ID NO: 646282 - DNA, 120 bp, Artificial Sequence
  ENSG00000182400_3 (sequence is synthesized)
tcgagtgggacaaggattgatagaaaggtttacaaaagatactgcaaggttcaaggatgagttagatatcatgaagttcatttgtaaagatttttggactacggtattcaagaaacaaat

SEQ ID NO: 646283 - DNA, 120 bp, Artificial Sequence
  ENSG00000182400_4 (sequence is synthesized)
cgacaatctaaggacaaatcatcagggcatctatgtacttcaggacaacaaatttcgcctgcttactcagatgtctgcaggaaaacagtatttagaacatgcatctaagtatttagcatt

SEQ ID NO: 646284 - DNA, 120 bp, Artificial Sequence
  ENSG00000182400_5 (sequence is synthesized)
tacgtgtggcttaatcagaggtggcttatcaaacttgggaataaaaagtattgtaacagctgaagtgtcttcaatgcctgcttgcaaatttcaggtgatgatacagaagctgtagaacat

SEQ ID NO: 646285 - DNA, 120 bp, Artificial Sequence
  ENSG00000182400_6 (sequence is synthesized)
actgaaatgcaaggcttcaacagtgtaaagagataaattattcatgtaaaagtatttcaagtagtgatgatttaattacattgttcgatgtttgtacaggagtaagcatgtatttttatc

SEQ ID NO: 646286 - DNA, 120 bp, Artificial Sequence
  ENSG00000182400_7 (sequence is synthesized)
aatttaacacagatcaaaggagatgaagggacattctgccatgacatacacttaaccaaaactattcaaaatgaaaaccggatttcaaataaccagacaccaagatgcagggcccttatt

SEQ ID NO: 646287 - DNA, 120 bp, Artificial Sequence
  ENSG00000182400_8 (sequence is synthesized)
ttaaacctttttatttggttagagtgatatgtatttagccatagatggagaaacaaagctcagggtttgttgaattagcatgagagaaaattatgtaccaacagaattatttgtgagaag

SEQ ID NO: 646288 - DNA, 120 bp, Artificial Sequence
  ENSG00000182400_9 (sequence is synthesized)
tgagagaaaattatgtaccaacagaattatttgtgagaagaatgaacaaattttgataaagtatgaatttgttttattttaaaaagcaaacatactaaattttttttattttattgctta

SEQ ID NO: 646289 - DNA, 120 bp, Artificial Sequence
  ENSG00000182400_10 (sequence is synthesized)
atatacattgtatgtgtgtatatataaatacatatatgactgcctaaattgtttataaatttaatttttctttaataggtttcattccttcagagctccattaatgtaatcaaaatgaaa

SEQ ID NO: 646290 - DNA, 120 bp, Artificial Sequence
  ENSG00000182400_11 (sequence is synthesized)
tatagattagtttaaatgtgaattcagtgactctagggccaaagaatattaggtatgtttggaaagaatttttgtatttattcctgttacagttttgactttcaacttctctccccgtgc

SEQ ID NO: 646291 - DNA, 120 bp, Artificial Sequence
  ENSG00000182400_12 (sequence is synthesized)
atggaagtcctggtaaaggatctaacatctttattcccttctttcctcttccagctgagcagagttggataattgaattagtcattctgacattctttggaccatatcatcttagtggtt

SEQ ID NO: 646292 - DNA, 120 bp, Artificial Sequence
  ENSG00000182400_13 (sequence is synthesized)
ctcatctgatatatctttcttaccacctcttctacttactttctcttacttaaattatctggcataagcagttatctccagcttttgttagaatcttgcatgttgattactaaaactata

SEQ ID NO: 646293 - DNA, 120 bp, Artificial Sequence
  ENSG00000182400_14 (sequence is synthesized)
ctttgtttcccatttatttattacccttttgcatgtatttgtgtgacagggaactctgcagcagggggtgactgacacaccaaacaagatgtttcactgggtactctgccatagaaatgg

SEQ ID NO: 646294 - DNA, 120 bp, Artificial Sequence
  ENSG00000182400_15 (sequence is synthesized)
cagattaagaagattgactataccaaacattatattaaaaacacaaaataaaaactataaaaatgtactttaggacattaaagaaaactcaagttagaagcataccattttcctttcatg

SEQ ID NO: 646295 - DNA, 120 bp, Artificial Sequence
  ENSG00000182400_16 (sequence is synthesized)
gaagggtacagtattacaaagataatttgtttaacttgatttattaaattctagttatgtgccctataatgatgtttcagtcagtgacagacctcatatatggcagtggttccataagat

SEQ ID NO: 646296 - DNA, 120 bp, Artificial Sequence
  ENSG00000182400_17 (sequence is synthesized)
tacaatactgtatttttactgtaccttctttatgtttagatatgcaagtacttaccattgtgttacagtgtcctacagtattcactacaataatatgctgtacaggtttgtagcctagga

SEQ ID NO: 646297 - DNA, 120 bp, Artificial Sequence
  ENSG00000182400_18 (sequence is synthesized)
ccatctaggtttgtgtaagtacactctgtgattgtacaattttaaaatctcctaatgatgatgcatttctcagaatgtatcccctttgctaagcaatgcatgactgcaatcctaattctc

SEQ ID NO: 646298 - DNA, 120 bp, Artificial Sequence
  ENSG00000182400_19 (sequence is synthesized)
tttgctaagcaatgcatgactgcaatcctaattctcacatgttttggggaaaaaattttaattttgaaaaaatttaggaaagttcctaccaaatatacatgtataaagtttattaaaagt

SEQ ID NO: 646299 - DNA, 120 bp, Artificial Sequence
  ENSG00000182400_20 (sequence is synthesized)
cataatgacccaggaatagctaatgacacagaagtagatcaaaatagaacacaatagagaacttcaaaataaaacaggtgtgagaattgtgtgtgtgaaaaagctgggttcaaataagtt

SEQ ID NO: 646300 - DNA, 120 bp, Artificial Sequence
  ENSG00000182400_21 (sequence is synthesized)
ggtttgttagacattcatatgcctacccatcagccatttcgttctcccttccttgctgacaaagccccattttttttttctttttttttggcctaaaactctgtatggctgccttgtgct

SEQ ID NO: 646301 - DNA, 120 bp, Artificial Sequence
  ENSG00000182400_22 (sequence is synthesized)
atagaatagggtgcttccctagcctagagagggtgagtgttgattagattctgtgccaatcatggtaattggcttacttgatcatttgatggaatctaggctaacgagacaaaggaagtc

SEQ ID NO: 646302 - DNA, 120 bp, Artificial Sequence
  ENSG00000182400_23 (sequence is synthesized)
tgaaggctttgaataagaaattttctgttgctcttaacaattgatacaagttagggatttgccagcatccctcttctgcttctcagtgaagatatgtgatatggatgtttgaagctaatc

SEQ ID NO: 646303 - DNA, 120 bp, Artificial Sequence
  ENSG00000182400_24 (sequence is synthesized)
tgcaacagccttctgatggccatgaaaggacaagtatggagatgaaagctatcacactgagaatagtgggatgtagatagaaagcacctgaattgtgcttctgaattaaccaatccagga

SEQ ID NO: 646304 - DNA, 120 bp, Artificial Sequence
  ENSG00000182400_25 (sequence is synthesized)
actgctttacctttggactttttgttatgtgagatattctttatattgttccatttgctttgggtatatgtatattgttacttgtagccaaaaagaaacctctcttagtagaaacaaagg

SEQ ID NO: 646305 - DNA, 120 bp, Artificial Sequence
  ENSG00000182400_26 (sequence is synthesized)
gagagttaggttattcaaaaattagtatgggacaattgaatatgcctttttctgcgggagtaggtggggagaaacttaaaggttcacttgtaaaacaataaagtactaaagaaaatgtga

SEQ ID NO: 646306 - DNA, 120 bp, Artificial Sequence
  ENSG00000182400_27 (sequence is synthesized)
gctctgcccccgacatcgtggtgagaggggaaccttcctcatatctgggcgctggcctctccgggcttgggagagaggaactcagtgatcatagagctggccgaatgccggggtagaggg

SEQ ID NO: 646307 - DNA, 120 bp, Artificial Sequence
  ENSG00000182400_28 (sequence is synthesized)
tttgaaaattttcttgcaggtaggttataaacaaaggtgatctatttcaaaagattgcataaaacttgggatattttaattttaattcctgaatgttattctctttacttcaaaaattaa

SEQ ID NO: 646308 - DNA, 120 bp, Artificial Sequence
  ENSG00000182400_29 (sequence is synthesized)
gccatttaactcatttattcaaattttattttaatgtttaaagaaaatatatattttatatattttagactttcttcctgaagctattttagactttattcctgaagctattgaagcaac

SEQ ID NO: 646309 - DNA, 120 bp, Artificial Sequence
  ENSG00000182400_30 (sequence is synthesized)
cctgaagctattgaagcaactatctaaaatcttactgcattttcaacttaagatctgctaggttctttaacctgcatagaatttttaagtacataggtttgaaataactatagtctatgt

SEQ ID NO: 646310 - DNA, 120 bp, Artificial Sequence
  ENSG00000182400_31 (sequence is synthesized)
ttatgcgtgtaattatctttgaacttataaatcagttctttttagtatttctttctcactacctgaatagttaaactcggagtatattttatataacaatgtcatgataatgctcagctc

SEQ ID NO: 646311 - DNA, 120 bp, Artificial Sequence
  ENSG00000182400_32 (sequence is synthesized)
tttgttcttttgtggttttttgatgtgctagaatgcattgcacctgaaattttggctataatgttagactaatttgaggcctcataatttatataacataatgtgaatccattgagatag

SEQ ID NO: 646312 - DNA, 84 bp, Artificial Sequence
  ENSG00000182400_33 (sequence is synthesized)
ctcataatttatataacataatgtgaatccattgagataggatcatgttacctggtgcttatgactttattagtgttaataaat

SEQ ID NO: 646313 - DNA, 120 bp, Artificial Sequence
  ENSG00000182400_34 (sequence is synthesized)
aggagtttgagaccagccagggtaacaaagtggaaccctgtctctacaaagatatacagattagctgagcatggtgacatgtgcctgtggtctcagctgctagggaggctgaggtgggag

SEQ ID NO: 646314 - DNA, 120 bp, Artificial Sequence
  ENSG00000182400_35 (sequence is synthesized)
gatagcttgagcctgggagggaggtagacgttgcaatgagccgagattatgctattgcactctaacctgggcgacagagccagaatctgtctcaaaaaaaaaattaaaattaaaaaaccc

SEQ ID NO: 646315 - DNA, 120 bp, Artificial Sequence
  ENSG00000182400_36 (sequence is synthesized)
aataaatgttcagtgctgttctggcatttggaaattagttaataattagtccctcttgctttttttggaggagaaatactgtattacttctagttgatctttttaggtttacaaaagata

SEQ ID NO: 646316 - DNA, 120 bp, Artificial Sequence
  ENSG00000182405_0 (sequence is synthesized)
gcctatgaaggggactgcccatgaagtgaaagtcaagtgtgtgttgctgcggcagccacggaggccaaggacctcacgggagtaaaagatgacgagactggcttcgggagaaacaccatc

SEQ ID NO: 646317 - DNA, 120 bp, Artificial Sequence
  ENSG00000182405_1 (sequence is synthesized)
cagaagagacctttcaaaaaacttctagagactccccaagacgtatgagatgaaaggcttcttctgtctgtgtgcgtttaactcatttctccttagccccgagattacgcgctgctgtgc

SEQ ID NO: 646318 - DNA, 120 bp, Artificial Sequence
  ENSG00000182405_2 (sequence is synthesized)
ctgcgactgcagcgtttacgccgagataactcgtggattacagtgccaaccttactcccaaagtttgccacgaaatatctcgcttctgttattttcgcatggttctggtatattgacttt

SEQ ID NO: 646319 - DNA, 120 bp, Artificial Sequence
  ENSG00000182405_3 (sequence is synthesized)
tgaaacaaaagacatcattctgtttatagcattctgtttttagtagtgggatttccatctacaaaatatagtaattctcgatcgctgaaatgtcaaatcctagaaaacgtagcattccta

SEQ ID NO: 646320 - DNA, 120 bp, Artificial Sequence
  ENSG00000182405_4 (sequence is synthesized)
tgcgtgatagtaataccggtctcgaacagttgttggctgaagattcatttgatgaatctgatttttcggaaatagatgattctgataatttttcggatagtgctttagaagccgataaga

SEQ ID NO: 646321 - DNA, 120 bp, Artificial Sequence
  ENSG00000182405_5 (sequence is synthesized)
tcaggcctctgtcccatttagaatctgatggaaagagctctacatcaagtgactcagggcgctccatgaaatggtcagctcgtgctatgattccacgtcaaaggtatgactttaccggca

SEQ ID NO: 646322 - DNA, 120 bp, Artificial Sequence
  ENSG00000182405_6 (sequence is synthesized)
cacctggcagaaaagtcgatgtcagtgatatcactgacccattgcagtattttgaactgttctttactgaggaattagtttcaaaaattactagagaaacaaatgcccaagctgccttgt

SEQ ID NO: 646323 - DNA, 120 bp, Artificial Sequence
  ENSG00000182405_7 (sequence is synthesized)
tggcttcaaagccaccgggtccgaaaggattttcgcgaatggataaatggaaagacactgacaatgacgagctcaaagtcttttttgcagtaatgttactgcaaggtattgtgcagaaac

SEQ ID NO: 646324 - DNA, 120 bp, Artificial Sequence
  ENSG00000182405_8 (sequence is synthesized)
ctgagctggagatgttttggtcaacaaggcctcttttggatacaccttatctcaggcaaattatgactggtgaaagatttttacttttgtttcggtgcctgcattttgtcaacaattctt

SEQ ID NO: 646325 - DNA, 120 bp, Artificial Sequence
  ENSG00000182405_9 (sequence is synthesized)
ctatatctgctggtcaatcaaaggcccagatttcattgcagaagatcaaacctgtgttcgactttcttgtaaataaattttccactgtatatactccaaacagaaacattgcagttgatg

SEQ ID NO: 646326 - DNA, 120 bp, Artificial Sequence
  ENSG00000182405_10 (sequence is synthesized)
aatcactgatgctgttcaaggggccattagctatgaagcagtacctcccgacaaaacgagtacgatttggtctgaagctatatgtactttgtgaaagtcagtctggttatgtgtggaatg

SEQ ID NO: 646327 - DNA, 120 bp, Artificial Sequence
  ENSG00000182405_11 (sequence is synthesized)
cgcttgttcacacagggcctggcatgaatttgaaagattcagcggatggcctgaaatcatcacgcattgttcttaccttggtcaatgaccttcttggccaagggtattgtgtcttcctcg

SEQ ID NO: 646328 - DNA, 120 bp, Artificial Sequence
  ENSG00000182405_12 (sequence is synthesized)
ataactttaatatatctcccatgcttttcagagaattacatcaaaataggactgatgcagttgggacagctcgtttgaacagaaaacagattccaaatgatctgaaaaaaaggattgcaa

SEQ ID NO: 646329 - DNA, 120 bp, Artificial Sequence
  ENSG00000182405_13 (sequence is synthesized)
aggggacgactgtagccagattctgtggtgaacttatggcactgaaatggtgtgacggcaaggaggtgacaatgttgtcaacattccacaatgatactgtgattgaagtaaacaatagaa

SEQ ID NO: 646330 - DNA, 120 bp, Artificial Sequence
  ENSG00000182405_14 (sequence is synthesized)
atggaaagaaaactaaaaggccacgtgtcattgtggattataacgagaatatgggagcagtggactcggctgatcaaatgcttacttcttatccatctgagcgcaaaagacacaaggttt

SEQ ID NO: 646331 - DNA, 120 bp, Artificial Sequence
  ENSG00000182405_15 (sequence is synthesized)
ggtataagaaattctttcaccatcttctacacattacagtgctgaactcctacatcctgttcaagaaggataatcctgagcacacgatgagccatataaacttcagactggcattgattg

SEQ ID NO: 646332 - DNA, 120 bp, Artificial Sequence
  ENSG00000182405_16 (sequence is synthesized)
aaagaatgctggaaaagcatcacaagccagggcagcaacatcttcgaggtcgtccttgctccgatgatgtcacacctcttcgtctgtctggaagacatttccccaagagcataccagcaa

SEQ ID NO: 646333 - DNA, 120 bp, Artificial Sequence
  ENSG00000182405_17 (sequence is synthesized)
cgtccgggaaacagaatccaactggtcgctgcaaaatttgctgctcccaatacgacaaggatggcaagaagatccggaaagaaacgcgctatttttgtgccgaatgtgatgttccgcttt

SEQ ID NO: 646334 - DNA, 120 bp, Artificial Sequence
  ENSG00000182405_18 (sequence is synthesized)
cgaatgtgatgttccgctttgtgttgttccgtgctttgaaatttaccacacgaaaaaaaattattaaataccgatcatcatacacatctgttccattaggattagagacaagttctgttt

SEQ ID NO: 646335 - DNA, 75 bp, Artificial Sequence
  ENSG00000182405_19 (sequence is synthesized)
cctaattttgcatttttagtagagactgggtttatccatgttggtcaggctagtcttgacctcccgacctcaggt

SEQ ID NO: 646336 - DNA, 120 bp, Artificial Sequence
  ENSG00000182405_20 (sequence is synthesized)
atttttagtagagactgggtttatccatgttggtcaggctagtcttgacctcccgacctcaggtgatccgcctatctgggcctcacaaagtcctgggattataggcatgagccactgcgc

SEQ ID NO: 646337 - DNA, 120 bp, Artificial Sequence
  ENSG00000182405_21 (sequence is synthesized)
tcagatttgcttcagcctcaaagagggtgtttatgtaaaactaaatgagtgcaggcagcgagctacacttttttttttcctaaatggaaaatgggaaggagatactgtctctgaacaaaa

SEQ ID NO: 646338 - DNA, 120 bp, Artificial Sequence
  ENSG00000182405_22 (sequence is synthesized)
aggagatactgtctctgaacaaaaatagctggaaaaacacataactgttaactaagggttgcctctagtgaaaaggattggaagacaatttatctgatgctacactattcttcctgttgt

SEQ ID NO: 646339 - DNA, 120 bp, Artificial Sequence
  ENSG00000182405_23 (sequence is synthesized)
gattgttttactgtgaacataacaaggttgtattggggaggagggcaggggttgattgctgccaatgttgattgctgaggccttagccaagatttcaggcatcatttgctccagtccttt

SEQ ID NO: 646340 - DNA, 120 bp, Artificial Sequence
  ENSG00000182405_24 (sequence is synthesized)
ttctttatggtggaaagtgaagtgacttgcccaagatctttgttggccctaaacatcgctgtctctgctacagattcctattgagagcaatgcatgttttagccttgtgcactcttagag

SEQ ID NO: 646341 - DNA, 120 bp, Artificial Sequence
  ENSG00000182405_25 (sequence is synthesized)
tcagcatcatgggaaagagtaacagcaattgaaaaaagagattcaagagccaagtactcagccctggcaggggatggggacatgatgcccagagccacccctatactccagtctccctgg

SEQ ID NO: 646342 - DNA, 120 bp, Artificial Sequence
  ENSG00000182405_26 (sequence is synthesized)
catcagctactgcagtactggggtacttgccttcatcttttttctgaagatagttacttcttcatatttgatcatcggaaggagcagcattgctcagaaacacacacacacacacacaca

SEQ ID NO: 646343 - DNA, 120 bp, Artificial Sequence
  ENSG00000182405_27 (sequence is synthesized)
cttgactttcttgtctgccaaataaatttcttatttgctagggaactggtaatctaggctcaagaagtgtgtggagaaggtttattttcattctttttactttaaaatatgccttagttt

SEQ ID NO: 646344 - DNA, 120 bp, Artificial Sequence
  ENSG00000182405_28 (sequence is synthesized)
ttgaatagataagacattcaagtgtcagaaagtaaaagtcagttcaggactgagaaaggaaagatcagtgctgattttaatcagactgtaatgtaccaactagatacagacagggccagt

SEQ ID NO: 646345 - DNA, 120 bp, Artificial Sequence
  ENSG00000182405_29 (sequence is synthesized)
ggcaaggccatcagaaaacttcttcccaaggccacaccacacctgcaaaatgcctaacaaccttcttcttttcagtgattaccactttcttaccaatgacttcgctttgttcctcgtgcc

SEQ ID NO: 646346 - DNA, 120 bp, Artificial Sequence
  ENSG00000182405_30 (sequence is synthesized)
tctgaacagactgctgagatacccaatcaagagccaatccttgcttccctagactctcctcaatcattcaacagaagcccaaatcttgtaaaagttcctttctgggccgggcacagtggc

SEQ ID NO: 646347 - DNA, 120 bp, Artificial Sequence
  ENSG00000182405_31 (sequence is synthesized)
agtgagactccatctcaaaaaataaaaaagtttccttctgttccctcttactgttatatccttggtttctctggtgtggggtcttccttacagcagcaagctcataaacttaacttgacc

SEQ ID NO: 646348 - DNA, 120 bp, Artificial Sequence
  ENSG00000182405_32 (sequence is synthesized)
cttaacttgaccgcaggtgtgttccttggtggtctttatctgatagactttgtcacatggtacaatattcaaaaggcacatggtacaatattcaaaaggcacatggtacaatattcaaaa

SEQ ID NO: 646349 - DNA, 120 bp, Artificial Sequence
  ENSG00000182405_33 (sequence is synthesized)
ggtatgagtatacaaaaaaaatctcccacctacttctctccctagtcacccaattctcaagaggcaatcactgttgccattttcctgagtattcttccacagatagtcaactatctacag

SEQ ID NO: 646350 - DNA, 90 bp, Artificial Sequence
  ENSG00000182405_34 (sequence is synthesized)
tttcctgagtattcttccacagatagtcaactatctacagaaaaatatatacattaaaaataaggccaggcacagtgttgaagcaggagg

SEQ ID NO: 646351 - DNA, 120 bp, Artificial Sequence
  ENSG00000182405_35 (sequence is synthesized)
agggccaggaatttgaagctgtagtgtgctatgatagcaggcctgtgaatagccattgcactccatcctgggcaacatagccagaccctgtctctaaaaaaaaaaaaaaaaaaaaaaaag

SEQ ID NO: 646352 - DNA, 80 bp, Artificial Sequence
  ENSG00000182405_36 (sequence is synthesized)
aaagacaaaaaaacaaatccatatatacatatatatgtatatatatagtatgctaccagttgtgtgaaaaaaggggcaaa

SEQ ID NO: 646353 - DNA, 120 bp, Artificial Sequence
  ENSG00000182405_37 (sequence is synthesized)
atatataataatgtattacctaacatatgattatatataactataatgtgtactgttttacatacatatttccaaagtatactataaatgcacttccgcactttgctctttttactaaat

SEQ ID NO: 646354 - DNA, 120 bp, Artificial Sequence
  ENSG00000182405_38 (sequence is synthesized)
atatcttggaaatcatcctttattcgtacataaaaagcttcatagttcctttttatggctgcaaaatgttccagcttatggatggactgattctctatcgagcaacattaagattgtgtc

SEQ ID NO: 646355 - DNA, 120 bp, Artificial Sequence
  ENSG00000182405_39 (sequence is synthesized)
ctattttactattcctaattttgctgaagtgaatttcttttgccatgtgatttccacaggtgtatatatgtagcgtaattagtactagtagaaagtagaattgctagatcaaagagtatg

SEQ ID NO: 646356 - DNA, 120 bp, Artificial Sequence
  ENSG00000182405_40 (sequence is synthesized)
tgcctttgtaattttgatgatattgtgaaatcttcttccacagaagttgttgcaactttcactctcaccagcaatgtgtaagataacttgcttcttcataccctcaccaacaatgagcta

SEQ ID NO: 646357 - DNA, 86 bp, Artificial Sequence
  ENSG00000182405_41 (sequence is synthesized)
agataacttgcttcttcataccctcaccaacaatgagctatcaaatgttatttttgccaagcaaataaattaaaagtgatatctca

SEQ ID NO: 646358 - DNA, 120 bp, Artificial Sequence
  ENSG00000182405_42 (sequence is synthesized)
gggatgacaggcgtgagccaccacgctgggcctcttcttggttttttaatccatcttctgccatatggtgaattaaatctaagttgtattgtaggattaatggagagcagctaaagagga

SEQ ID NO: 646359 - DNA, 120 bp, Artificial Sequence
  ENSG00000182405_43 (sequence is synthesized)
ttaatggagagcagctaaagaggaataaagccatgtgttcagccaaggatagttatcatgaaggataaaagcctcaaaatcctgattttgaaatacaaagtgctgattttaaaatcagta

SEQ ID NO: 646360 - DNA, 120 bp, Artificial Sequence
  ENSG00000182405_44 (sequence is synthesized)
catgttgagctgagccctgaggcctttgtttcagtcccaaccagagcagaagtaagcattgttgaaaccgtagtaaaaagattatttgagaaataatggaatgggacaaaggattataat

SEQ ID NO: 646361 - DNA, 120 bp, Artificial Sequence
  ENSG00000182405_45 (sequence is synthesized)
gtgctacagccctctgaccattacactttctaaactattaataaaattttacttttcaaaaatgatttcaaaaattgcaaaatttagaaatatgctgaaataaaaacagcttcatcccaa

SEQ ID NO: 646362 - DNA, 120 bp, Artificial Sequence
  ENSG00000182415_0 (sequence is synthesized)
aacaggcaggaagaaagctttctgtactacaccagagggttggggctgtggatttagctactctcacctgaggctactgagcaagctgtcatgcaccatgagacaaagcccaagctgtcc

SEQ ID NO: 646363 - DNA, 120 bp, Artificial Sequence; identical to SEQ ID NO: 282195
  ENSG00000182415_1 (sequence is synthesized)

SEQ ID NO: 646364 - DNA, 120 bp, Artificial Sequence; identical to SEQ ID NO: 282196
  ENSG00000182415_2 (sequence is synthesized)

SEQ ID NO: 646365 - DNA, 120 bp, Artificial Sequence; identical to SEQ ID NO: 282197
  ENSG00000182415_3 (sequence is synthesized)

SEQ ID NO: 646366 - DNA, 120 bp, Artificial Sequence; identical to SEQ ID NO: 282198
  ENSG00000182415_4 (sequence is synthesized)

SEQ ID NO: 646367 - DNA, 120 bp, Artificial Sequence; identical to SEQ ID NO: 282199
  ENSG00000182415_5 (sequence is synthesized)

SEQ ID NO: 646368 - DNA, 120 bp, Artificial Sequence; identical to SEQ ID NO: 282200
  ENSG00000182415_6 (sequence is synthesized)

SEQ ID NO: 646369 - DNA, 120 bp, Artificial Sequence; identical to SEQ ID NO: 282201
  ENSG00000182415_7 (sequence is synthesized)

SEQ ID NO: 646370 - DNA, 120 bp, Artificial Sequence; identical to SEQ ID NO: 282202
  ENSG00000182415_8 (sequence is synthesized)

SEQ ID NO: 646371 - DNA, 120 bp, Artificial Sequence; identical to SEQ ID NO: 282203
  ENSG00000182415_9 (sequence is synthesized)

SEQ ID NO: 646372 - DNA, 120 bp, Artificial Sequence; identical to SEQ ID NO: 282204
  ENSG00000182415_10 (sequence is synthesized)

SEQ ID NO: 646373 - DNA, 120 bp, Artificial Sequence; identical to SEQ ID NO: 282205
  ENSG00000182415_11 (sequence is synthesized)

SEQ ID NO: 646374 - DNA, 120 bp, Artificial Sequence; identical to SEQ ID NO: 282206
  ENSG00000182415_12 (sequence is synthesized)

SEQ ID NO: 646375 - DNA, 120 bp, Artificial Sequence; identical to SEQ ID NO: 282207
  ENSG00000182415_13 (sequence is synthesized)

SEQ ID NO: 646376 - DNA, 120 bp, Artificial Sequence; identical to SEQ ID NO: 282208
  ENSG00000182415_14 (sequence is synthesized)

SEQ ID NO: 646377 - DNA, 120 bp, Artificial Sequence; identical to SEQ ID NO: 282209
  ENSG00000182415_15 (sequence is synthesized)

SEQ ID NO: 646378 - DNA, 120 bp, Artificial Sequence; identical to SEQ ID NO: 282210
  ENSG00000182415_16 (sequence is synthesized)

SEQ ID NO: 646379 - DNA, 120 bp, Artificial Sequence; identical to SEQ ID NO: 282211
  ENSG00000182415_17 (sequence is synthesized)

SEQ ID NO: 646380 - DNA, 120 bp, Artificial Sequence; identical to SEQ ID NO: 282212
  ENSG00000182415_18 (sequence is synthesized)

SEQ ID NO: 646381 - DNA, 80 bp, Artificial Sequence
  ENSG00000182446_0 (sequence is synthesized)
gtattgagcgaggcaccgggacgtcggcggctggcggagccgggcgggcgaagctggagcggcggtggcggcggcgtagg

SEQ ID NO: 646382 - DNA, 120 bp, Artificial Sequence
  ENSG00000182446_1 (sequence is synthesized)
ggcccttggggcggcaggcggcggcggcccggggctcgagcccggaggcaggagcagccgccatggccgagagcatcataattcgtgtccagtccccggatggagtgaagcggatcacag

SEQ ID NO: 646383 - DNA, 120 bp, Artificial Sequence
  ENSG00000182446_2 (sequence is synthesized)
caacaaagagagaaacagcagcaacatttttgaaaaaggttgcaaaggagtttggcttccaaaataatggcttctcggtttacatcaatagaaacaagaccggagagataacagcctcct

SEQ ID NO: 646384 - DNA, 120 bp, Artificial Sequence
  ENSG00000182446_3 (sequence is synthesized)
ccaacaaatccctcaacttgctaaaaatcaagcatggcgatttgttgttcctgtttccctcgagccttgctgggccctcatctgaaatggagacgtcagttccaccgggcttcaaagtct

SEQ ID NO: 646385 - DNA, 120 bp, Artificial Sequence
  ENSG00000182446_4 (sequence is synthesized)
ttggcgctcccaacgtggtggaggatgagattgatcagtacctcagcaaacaggacgggaagatttacagaagccgagacccacagctatgccgccacggccctttggggaaatgcgtgc

SEQ ID NO: 646386 - DNA, 120 bp, Artificial Sequence
  ENSG00000182446_5 (sequence is synthesized)
actgcgtccctctagagccattcgatgaggactatctaaaccatctcgagcctcccgtgaagcacatgtccttccacgcctacatccggaagctgactggaggggctgacaaggggaagt

SEQ ID NO: 646387 - DNA, 120 bp, Artificial Sequence
  ENSG00000182446_6 (sequence is synthesized)
ttgttgccctggagaacatcagctgcaagattaagtcagggtgcgaggggcacctcccgtggccgaatggcatctgtactaagtgccagccgagcgccatcacgctgaacagacagaagt

SEQ ID NO: 646388 - DNA, 120 bp, Artificial Sequence
  ENSG00000182446_7 (sequence is synthesized)
acaggcatgtggacaatatcatgtttgagaatcacaccgtcgctgaccgctttcttgacttctggagaaagacagggaaccagcattttgggtacttatacggacggtacacggagcaca

SEQ ID NO: 646389 - DNA, 120 bp, Artificial Sequence
  ENSG00000182446_8 (sequence is synthesized)
aagacattccccttggcatcagggctgaagtggctgcgatttatgagccacctcagattggtacacagaacagcttggagcttcttgaggatccaaaagctgaagtggtcgatgaaattg

SEQ ID NO: 646390 - DNA, 120 bp, Artificial Sequence
  ENSG00000182446_9 (sequence is synthesized)
ctgccaaacttggcctgcggaaggttggctggatatttacagacctcgtctcagaagatacccgaaagggtaccgtccgctacagtcgaaataaggacacctatttcctaagttcagaag

SEQ ID NO: 646391 - DNA, 120 bp, Artificial Sequence
  ENSG00000182446_10 (sequence is synthesized)
agtgcatcactgcaggagacttccagaacaagcatcccaacatgtgccggctctctccagacggacattttggatccaagtttgttactgcagtggctacaggtggtcctgacaaccaag

SEQ ID NO: 646392 - DNA, 120 bp, Artificial Sequence
  ENSG00000182446_11 (sequence is synthesized)
tccactttgaagggtaccaggtgtccaatcagtgtatggcactggtccgtgatgagtgtttgctgccatgcaaggacgccccggagcttggctacgccaaggagtctagcagtgagcagt

SEQ ID NO: 646393 - DNA, 120 bp, Artificial Sequence
  ENSG00000182446_12 (sequence is synthesized)
acgtgcctgatgtgttttataaggacgtagacaagtttggcaacgagatcacccagctggcccggcccctgcctgtggagtatctcatcatagacatcacaacaactttccccaaggatc

SEQ ID NO: 646394 - DNA, 120 bp, Artificial Sequence
  ENSG00000182446_13 (sequence is synthesized)
cagtttacactttttctatttcgcaaaatccatttcctattgaaaaccgggatgtattgggtgagacacaggacttccatagcttggccacctatttgtctcagaatacctcatctgtgt

SEQ ID NO: 646395 - DNA, 120 bp, Artificial Sequence
  ENSG00000182446_14 (sequence is synthesized)
tcttggataccatctcagatttccacctcttgctgttcctggtcaccaatgaagttatgcctctgcaggacagcatcagcttgctgctggaggccgtgcggaccagaaatgaggagctcg

SEQ ID NO: 646396 - DNA, 120 bp, Artificial Sequence
  ENSG00000182446_15 (sequence is synthesized)
cccagacatggaagaggtctgagcagtgggccaccatcgagcagctgtgcagcacagttggcgggcagctcccaggtctccatgagtacggcgccgtcgggggctccacacacacggcca

SEQ ID NO: 646397 - DNA, 120 bp, Artificial Sequence
  ENSG00000182446_16 (sequence is synthesized)
ctgcagccatgtgggcctgtcagcactgcacgttcatgaaccagccaggcacaggccactgcgagatgtgcagcctccccaggacctagggcgcctgccctctgctggctaggaccgggc

SEQ ID NO: 646398 - DNA, 120 bp, Artificial Sequence
  ENSG00000182446_17 (sequence is synthesized)
ccagcccagcccttcctgaagccagaagcgttgctgagtgtgttccctgtaactgccccatagtgggcagccctggaggaacaaggggctggctgtcctgggctccctgacccactgaag

SEQ ID NO: 646399 - DNA, 120 bp, Artificial Sequence
  ENSG00000182446_18 (sequence is synthesized)
cagtctccagactggaaacgcagagcggctcctcacgcctaatcctgttgacaagtcccccgccgtgttggaaagacctctcgcctctacgtggcacctggaattggggcgcacagggag

SEQ ID NO: 646400 - DNA, 120 bp, Artificial Sequence
  ENSG00000182446_19 (sequence is synthesized)
gggccgatgctgccaccacccagccttctctttattttcagtgctttttgtttggcctccctgcccccatgtttttctggctgggagctcttggttacccccttgtctgactgcttggtg

SEQ ID NO: 646401 - DNA, 120 bp, Artificial Sequence
  ENSG00000182446_20 (sequence is synthesized)
gcaggcaccctgcctgtgagggccactttcctcttctagtagctgttgtctggtggggacgcagtggccctggacacggctcccctctgcaggtctgcaggtcggtttgctgcctgccct

SEQ ID NO: 646402 - DNA, 120 bp, Artificial Sequence
  ENSG00000182446_21 (sequence is synthesized)
cctcctctcacccgatgtccaggtgggattttaaagtctgcattggttataataacagttatcagtaattcctgcccagaagacttttatttatttttttttaagataaaaactgcacaa

SEQ ID NO: 646403 - DNA, 120 bp, Artificial Sequence
  ENSG00000182446_22 (sequence is synthesized)
aaggggagtgagagagactagtttccacatccttccctcctttagtgaagcccccgaggttgtgtccagggtgatgagtgtggacgggggcaccagtcagttctcccttgaagtaaacct

SEQ ID NO: 646404 - DNA, 120 bp, Artificial Sequence
  ENSG00000182446_23 (sequence is synthesized)
cagtgcctgagacttttctaccaagccacacagctgcagcaactgcagatactgcgggctgagcaggagcagtggtggcgcctgccctgaggctgccctgcgatggcctgggtgggagag

SEQ ID NO: 646405 - DNA, 120 bp, Artificial Sequence
  ENSG00000182446_24 (sequence is synthesized)
ctgggtcaccggtgccgatgctctggccctccccaatacgctgcttcgtcccactgcaccgcctggctgagggcgttaggggctgtgcctcttgtgagggccatttgggacctccctggg

SEQ ID NO: 646406 - DNA, 120 bp, Artificial Sequence
  ENSG00000182446_25 (sequence is synthesized)
gcactgcacaattgatagtgtaccaatagagggagactgggcgatctggaacagcacgtggtggggtcctgcttgtgtgctctgcgttcctctgtggcgtggccaggccggggcatggct

SEQ ID NO: 646407 - DNA, 120 bp, Artificial Sequence
  ENSG00000182446_26 (sequence is synthesized)
cttacccggggagtggtgggcatctcgatgcttctttgccttaatgatggccacatctgggctgctctgcacccacgggagaggctggcccagctgcagactgcttagggacttctgtgt

SEQ ID NO: 646408 - DNA, 120 bp, Artificial Sequence
  ENSG00000182446_27 (sequence is synthesized)
ccatcctggggggtaagcccacgtgacccacattcttggcactatgaacagagaacatttgcctgttggcttctgaagtggtcagggccatggctgacacctccaggtccgcctggcatg

SEQ ID NO: 646409 - DNA, 120 bp, Artificial Sequence
  ENSG00000182446_28 (sequence is synthesized)
ggacaccaagtggaaggcccaagcagctcatctgctcttgggaccaggggccagttgggttgggtctggtcacggcagagctattgtggagggtcaggaagggtggagaggagctgggtt

SEQ ID NO: 646410 - DNA, 120 bp, Artificial Sequence
  ENSG00000182446_29 (sequence is synthesized)
gaagcggactgctgcggatgcaactcccagcttgcccaccgcgggctgtctgctctccctcctagcagctgtcacactgaagttttgtcctctgctgtctcctctggtcctgagatgagc

SEQ ID NO: 646411 - DNA, 120 bp, Artificial Sequence
  ENSG00000182446_30 (sequence is synthesized)
tgtgagcctaggtggccaaggcttcctgcattgcttccctgtgagtccaaggccttcccccaccactgggcagaggctggacagcacggacttctagagagagccgcgttgccagttcct

SEQ ID NO: 646412 - DNA, 120 bp, Artificial Sequence
  ENSG00000182446_31 (sequence is synthesized)
ctcccactcgctcgtccttatccaccacgctattatagtttccgttgtcctccaccagcatttcccttactctgaagttccggcattcacatcattcatgttttcttttgtcttttagct

SEQ ID NO: 646413 - DNA, 120 bp, Artificial Sequence
  ENSG00000182446_32 (sequence is synthesized)
aaaggaaaagcattggcgatttgtctgattctggttttgagttactctttgttcagtaatgcactttattttattgtccaaagagagtcagagctaagcatacaggcttgggggtgagcc

SEQ ID NO: 646414 - DNA, 120 bp, Artificial Sequence
  ENSG00000182446_33 (sequence is synthesized)
ctgctgtgagagttcaggccctgggaggctcagccacctcctcttgtgggaaggaggtctcagccccacctcgcatcttcacctgcccttggtgtggacacaccctctcatgctaccagc

SEQ ID NO: 646415 - DNA, 120 bp, Artificial Sequence
  ENSG00000182446_34 (sequence is synthesized)
accataatccagtgggggtgactgggtgcacacctgcccaggtgaacacagcggctgccagtctcctggtcccgagaggaggtggggcctggccctggctccctccaaccagctgctcct

SEQ ID NO: 646416 - DNA, 120 bp, Artificial Sequence
  ENSG00000182446_35 (sequence is synthesized)
gggacacaggtgctcctgcttcggctctgtttcggctcacaggtgtgcatcactgggcttggatttgcattacattgaccccagccctgcagtggaacctaataaaagcgcctgaagcaa

SEQ ID NO: 646417 - DNA, 120 bp, Artificial Sequence
  ENSG00000182446_36 (sequence is synthesized)
tccctctagaggccatgctgctggcctccccctgtgcgtagcagaggctcagcgcctggagtgaccggcacgtgtgagactgcactcgcttactctgtgtcttggcagccattcgatgag

SEQ ID NO: 646418 - DNA, 120 bp, Artificial Sequence
  ENSG00000182446_37 (sequence is synthesized)
gtttattttgtgtctgtattttgtctcaaaaccactcactcgggtatttgacatcaggcaccctgtgcctcttccctgcctgtgccttccctagtcagcccagggaactgcacctcctgc

SEQ ID NO: 646419 - DNA, 120 bp, Artificial Sequence
  ENSG00000182446_38 (sequence is synthesized)
acgtgcctgatgtgttttataagtcttcttcagtgtttcattttggataatttcttttagtcttcacattcgttgatctggacttctacagtgtctcatctgcagttaatctcatccagc

SEQ ID NO: 646420 - DNA, 120 bp, Artificial Sequence
  ENSG00000182446_39 (sequence is synthesized)
gttgcctaggctggagtgcagtggagtgatcatagctcactacagccttcaattcctgagctcaagcgatcctcctgcatcagctttcggagtacctaggagtataaacatgagccacta

SEQ ID NO: 646421 - DNA, 120 bp, Artificial Sequence
  ENSG00000182446_40 (sequence is synthesized)
cacccaactaatgtttttggcacagttggcgggcagctcccaggtctccatgagtacggcgccgtcgggggctccacacacacggccactgcagccatgtgggcctgtcagcactgcacg

SEQ ID NO: 646422 - DNA, 120 bp, Artificial Sequence
  ENSG00000182446_41 (sequence is synthesized)
aggtggtgaaaggtgaggctccctctacaccagagccaccttgctagtatactgcactatttttgcagtcatctgttggaagacattctctggaggacagcatcagcttgctgctggagg

SEQ ID NO: 646423 - DNA, 120 bp, Artificial Sequence
  ENSG00000182446_42 (sequence is synthesized)
gaaggcttggccagcttccagaccccaagctcacagctgcacagttggcatttttaagagacaccgttgggggagaagagggcgagtgctttgcagaagtggctgctctgggacagcatc

SEQ ID NO: 646424 - DNA, 120 bp, Artificial Sequence
  ENSG00000182446_43 (sequence is synthesized)
gcccggaggcaggagcagccgccatggccgagagcatccaagtgccttgtcatgagtcactaaggagagcagctctgcagacggggacgttacagagctccctccccaccagaagacctg

SEQ ID NO: 646425 - DNA, 120 bp, Artificial Sequence
  ENSG00000182446_44 (sequence is synthesized)
tgcagtgagtacccccaccccctgccccggcaccccgtggctggggccggagagcagcccactctgcacagctccccactgccggtggtgccctggattccgcacccagctgcatcctgg

SEQ ID NO: 646426 - DNA, 120 bp, Artificial Sequence
  ENSG00000182446_45 (sequence is synthesized)
caggtgccatcggcaatgcaacgagtagagactcggcctccctgccaggcacgtggcaggctccggtgatggagcagacatgttgtccaggccgtacgtcttaggtacacagccctgtaa

SEQ ID NO: 646427 - DNA, 120 bp, Artificial Sequence
  ENSG00000182446_46 (sequence is synthesized)
attttataaacctgtacatcagagatactaatctccaggcatcctaggagcactttgaacatcattgtcttaagagaatcagaaactttatggaagcgccggaagcgtgggaccttttgg

SEQ ID NO: 646428 - DNA, 120 bp, Artificial Sequence
  ENSG00000182446_47 (sequence is synthesized)
tctccttgagaatttccctttagtgcttaaagctgtaaggaggagaagcctgcagcatccatgttgttgctggtggacactacggaacggaccgcaggcattgcgtgtcttccggaccct

SEQ ID NO: 646429 - DNA, 120 bp, Artificial Sequence
  ENSG00000182446_48 (sequence is synthesized)
cagtcaccaggtcctgaacgattccccactcgtgagaaccttctgtcagcattgctgcagggactcctcacgcaccgtggtgcctcgtgcagcccgagtgccctgagtccctgcagctga

SEQ ID NO: 646430 - DNA, 120 bp, Artificial Sequence
  ENSG00000182446_49 (sequence is synthesized)
gaagatttacagaagccgagacccacagctctttttatcagtttccacctcaaaatatgttcccataaaaaattttgaagcatttgggtacaaagagactggaaagcggttggatgattt

SEQ ID NO: 646431 - DNA, 120 bp, Artificial Sequence
  ENSG00000182446_50 (sequence is synthesized)
gctgtgccttggaatattccctcctcacctggggctatatgaagtgcttatgcatatgtacattgtttattttagattttttgcaattccttttaaataaaccagtgagaaggatctgag

SEQ ID NO: 646432 - DNA, 120 bp, Artificial Sequence
  ENSG00000182446_51 (sequence is synthesized)
aaaaaaacgcgacaatgtcaagtgtgagtgaagatgtgaagcagctgggactctcgtaccttgcgagtgggaggcaaaaccgtgccaccctcgcgagaactgtgtctcagggtcttagaa

SEQ ID NO: 646433 - DNA, 120 bp, Artificial Sequence
  ENSG00000182446_52 (sequence is synthesized)
ccagagtgcccgggagctacggccctggacaaatgctagaatccttctgttaacacagccttcaaaagacacatcaaacacctttataccatttcctgtttttttttttttttttgagac

SEQ ID NO: 646434 - DNA, 87 bp, Artificial Sequence
  ENSG00000182446_53 (sequence is synthesized)
cctttataccatttcctgtttttttttttttttttgagacggagtttggctcttgtcacccaggctggagtgtggtggcgtgatctt

SEQ ID NO: 646435 - DNA, 64 bp, Artificial Sequence
  ENSG00000182446_54 (sequence is synthesized)
ccaccatgcctggataatttttgtattcttagtagagctgcctctgcctcccagagtgttggga

SEQ ID NO: 646436 - DNA, 90 bp, Artificial Sequence
  ENSG00000182446_55 (sequence is synthesized)
ctttgtttattactattgccgaggctggagtgcagttgcacaatcgtaactcactgcagcctcaaactccaggctcaagtgatctttctg

SEQ ID NO: 646437 - DNA, 120 bp, Artificial Sequence
  ENSG00000182446_56 (sequence is synthesized)
tcactgcagcctcaaactccaggctcaagtgatctttctgcttcagcctgctgagtaactgggaccacaggcttgcaacaccacacccagctaattcttggggctttgttgttgcttttt

SEQ ID NO: 646438 - DNA, 120 bp, Artificial Sequence
  ENSG00000182446_57 (sequence is synthesized)
atttgtttgttttttaaaaataattttaacttattttagattcacagggtacatgtgcaggtttgtcacctgggtatattgcctgatgctgaggttggggtatgattgatcacatcaccc

SEQ ID NO: 646439 - DNA, 81 bp, Artificial Sequence
  ENSG00000182446_58 (sequence is synthesized)
gcctgatgctgaggttggggtatgattgatcacatcacccaggtactacacatagtacctaatagtttttcagcccgccct

SEQ ID NO: 646440 - DNA, 73 bp, Artificial Sequence
  ENSG00000182446_59 (sequence is synthesized)
tgagctggagcctcaccactctgcctcctgggttgaagcaattcccctccctcagcctcccgagtagctggga

SEQ ID NO: 646441 - DNA, 120 bp, Artificial Sequence
  ENSG00000182446_60 (sequence is synthesized)
tttatgtacgtgagtacccatgtttagctcccacttataaatgaaaacatgtagtatttggtttgctgttcctgcattagtttgcttagaataatggccttcaactgcatccatgttgct

SEQ ID NO: 646442 - DNA, 120 bp, Artificial Sequence
  ENSG00000182446_61 (sequence is synthesized)
aggacatgatttcattcctttttatggctgcaaaattttttaatatttttgtatcaatgaggtctcactgtgttgcccagactggtctcaaactttggcctcaagcattccttgcacctc

SEQ ID NO: 646443 - DNA, 120 bp, Artificial Sequence
  ENSG00000182446_62 (sequence is synthesized)
tccttgcacctcagcctcacaaagtcctgagattatacctgggagccactgcacccagccctttgatgcagttctaacaatgacaccagtcttttttttttttttcttttttgtttccct

SEQ ID NO: 646444 - DNA, 120 bp, Artificial Sequence
  ENSG00000182446_63 (sequence is synthesized)
tctcaaactcctaggctcaagtgatcttcctgccttggttcccaaagtgctgagattacagctgtgagccactgcacctgaccttttttttttcccccctccttttttttttgagacagg

SEQ ID NO: 646445 - DNA, 75 bp, Artificial Sequence
  ENSG00000182446_64 (sequence is synthesized)
ttgaggtcagtctcaccttgacctccccaggctcaaacaatcctcccgcctcagcctcctgagcagctgggacta

SEQ ID NO: 646446 - DNA, 90 bp, Artificial Sequence
  ENSG00000182446_65 (sequence is synthesized)
tccccaggctcaaacaatcctcccagcatgtgccaccatccctggctgattttttaaatttgttgtagagatgaggtctcactatgttgc

SEQ ID NO: 646447 - DNA, 120 bp, Artificial Sequence
  ENSG00000182446_66 (sequence is synthesized)
cccaagcgatcctcccgcctcagtgctgagattgcagtggtaagccaccatgtccagccaactctttaataataggcagttctgactggtgtaagttctgactggtatctcactgtggtt

SEQ ID NO: 646448 - DNA, 120 bp, Artificial Sequence
  ENSG00000182446_67 (sequence is synthesized)
actggtatctcactgtggttttaatttgcatctctgatgattagtgatgttgggcattttttcatgggttttttgtttgtttgttttgagacaaagtcttgttctgttgcccaggctgga

SEQ ID NO: 646449 - DNA, 120 bp, Artificial Sequence
  ENSG00000182446_68 (sequence is synthesized)
ctgcagcctccacctcccgggttcaagccattgtccagcctctgcctcctaagtagctggaattacaggtggctgccaccacacccagctaatttttttagttttagtagagacagggtt

SEQ ID NO: 646450 - DNA, 120 bp, Artificial Sequence
  ENSG00000182446_69 (sequence is synthesized)
atgggttgttttgttttgttttgagacggaatctcaccctgtcacccaggctgcagtgcaatctcatgatctccacttactgcaacctccacgtcctgggttcaagtgatactcctgcct

SEQ ID NO: 646451 - DNA, 120 bp, Artificial Sequence
  ENSG00000182446_70 (sequence is synthesized)
tctcccaaagtgctgggattacagacgtgtatacacaagacacaaagatcagctcaggatgggtcataggcctaatggtaaaaggtaaaactatgaagcaggctgggcatgatgtctcat

SEQ ID NO: 646452 - DNA, 120 bp, Artificial Sequence
  ENSG00000182446_71 (sequence is synthesized)
tgtctcatagctataatcctaacactctaggaggccaaagctggaggacactgtagcccagaagtgtgagaccagcccacacagcatagtgaagccccgtctgtacaaaaaaacaatatt

SEQ ID NO: 646453 - DNA, 120 bp, Artificial Sequence
  ENSG00000182447_0 (sequence is synthesized)
atgtggatgttttcttggctttgtgctattttaattattttggctattgctggtatgaacacaatagcaaagaccacaccacataccaaatttacgaagaaatctgaggaaagagagatg

SEQ ID NO: 646454 - DNA, 120 bp, Artificial Sequence
  ENSG00000182447_1 (sequence is synthesized)
ccaaagggtctaaagccatccagtggcccacctccagaagaagaagaaaccctcttcacagaaatggctgaaatggcagaaccaattaccaaaccctcggccttggattctgtctttggc

SEQ ID NO: 646455 - DNA, 120 bp, Artificial Sequence
  ENSG00000182447_2 (sequence is synthesized)
actgccactctctctccctttgaaaacttcactcttgacccagctgatttctttttgaattgttgtgattgttgttcacctgtacccgggcagaaaggagaacctggagagactggacag

SEQ ID NO: 646456 - DNA, 120 bp, Artificial Sequence
  ENSG00000182447_3 (sequence is synthesized)
ccaggtcctaaaggagaggctggaaatttggggatcccagggccaccaggagttgttgggccccaaggccctagaggctacaaaggagagaaaggactcaaaggagaacgtggggaccaa

SEQ ID NO: 646457 - DNA, 120 bp, Artificial Sequence
  ENSG00000182447_4 (sequence is synthesized)
ggagttccaggatacccaggaaaaccgggagcacaaggtgaacctggccctaagggagataaaggaaacattggtttgggaggagtgaaaggacaaaaaggctccaagggagacacatgt

SEQ ID NO: 646458 - DNA, 120 bp, Artificial Sequence
  ENSG00000182447_5 (sequence is synthesized)
ggggataagggctgctgtggagattctggggagaggggaggaaaaggacagaaaggtgaggggggtatgaaaggggaaaaaggtagcaaaggagacagtggaatggaaggcaaaagcggc

SEQ ID NO: 646459 - DNA, 120 bp, Artificial Sequence
  ENSG00000182447_6 (sequence is synthesized)
cgtaatggtctgcctggggccaaaggtgatccagggattaaaggagaaaaaggagagttaggtcctcctggtctcctgggacctactgggccgaagggtgacattggcaacaaaggggtc

SEQ ID NO: 646460 - DNA, 120 bp, Artificial Sequence
  ENSG00000182447_7 (sequence is synthesized)
cgaggccccactgggaagaagggctctcggggctttaaaggctccaagggtgagttggctagagtgccccggtcggctttcagcgctggtttgtcaaagccatttcctcctcctaacatc

SEQ ID NO: 646461 - DNA, 120 bp, Artificial Sequence
  ENSG00000182447_8 (sequence is synthesized)
cccatcaaatttgaaaagattctctataatgaccaagggaattacagtcctgtcactgggaagtttaactgctctattcctgggacatatgttttttcctaccatattacggtgaggggg

SEQ ID NO: 646462 - DNA, 120 bp, Artificial Sequence
  ENSG00000182447_9 (sequence is synthesized)
cgacctgctcgaatcagtctggtggcccagaataagaagcagttcaagtccagagaaactctctatggtcaggaaatagaccaggcctctctcctcgtcatcttgaaattaagtgcagga

SEQ ID NO: 646463 - DNA, 120 bp, Artificial Sequence
  ENSG00000182447_10 (sequence is synthesized)
gaccaagtctggcttgaggtgtcaaaagattggaatggggtgtatgtcagtgctgaggatgacagcatttttactgggttccttttgtacccagaggaaacttctggaatttcaccataa

SEQ ID NO: 646464 - DNA, 120 bp, Artificial Sequence
  ENSG00000182450_0 (sequence is synthesized)
gtgcacgctagtgtccacacacgtgtgcgtgggctctgggtgccctggcgcggccggcacgcccatgggggccggggatgccggggcgtctgcggagagtgcaggtgggtgacgacagct

SEQ ID NO: 646465 - DNA, 120 bp, Artificial Sequence
  ENSG00000182450_1 (sequence is synthesized)
ccccaggagccccccgcccggcccctccaggcgggcagtggagctggcccggcgcctgggcgcgccatgcgcagcaccacgctcctggccctgctggcgctggtcttgctttacttggtg

SEQ ID NO: 646466 - DNA, 120 bp, Artificial Sequence
  ENSG00000182450_2 (sequence is synthesized)
tctggtgccctggtgttccgggccctggagcagccccacgagcagcaggcccagagggagctgggggaggtccgagagaagttcctgagggcccatccgtgtgtgagcgaccaggagctg

SEQ ID NO: 646467 - DNA, 120 bp, Artificial Sequence
  ENSG00000182450_3 (sequence is synthesized)
ggcctcctcatcaaggaggtggctgatgccctgggagggggtgcggacccagaaaccaactcgaccagcaacagcagccactcagcctgggacctgggcagcgccttctttttctcaggg

SEQ ID NO: 646468 - DNA, 120 bp, Artificial Sequence
  ENSG00000182450_4 (sequence is synthesized)
accatcatcaccaccatcggctatggcaatgtggccctgcgcacagatgccgggcgcctcttctgcatcttttatgcgctggtggggattccgctgtttgggatcctactggcaggggtc

SEQ ID NO: 646469 - DNA, 120 bp, Artificial Sequence
  ENSG00000182450_5 (sequence is synthesized)
ggggaccggctgggctcctccctgcgccatggcatcggtcacattgaagccatcttcttgaagtggcacgtgccaccggagctagtaagagtgctgtcggcgatgcttttcctgctgatc

SEQ ID NO: 646470 - DNA, 120 bp, Artificial Sequence
  ENSG00000182450_6 (sequence is synthesized)
cgactatgtggccggcgcggaccccaggcaggactccccggcctatcagccgctggtgtggttctggatcctgctcggcctggcttacttcgcctcagtgctcaccaccatcgggaactg

SEQ ID NO: 646471 - DNA, 120 bp, Artificial Sequence
  ENSG00000182450_7 (sequence is synthesized)
gctgcgagtagtgtcccgccgcactcgggcagagatgggcggcctcacggctcaggctgccagctggactggcacggtgacagcgcgcgtgacccagcgagccgggcccgccgccccgcc

SEQ ID NO: 646472 - DNA, 120 bp, Artificial Sequence
  ENSG00000182450_8 (sequence is synthesized)
gccggagaaggagcagccactgctgcctccaccgccctgtccagcgcagccgctgggcaggccccgatccccttcgccccccgagaaggctcagccgccttccccgcccacggcctcggc

SEQ ID NO: 646473 - DNA, 120 bp, Artificial Sequence
  ENSG00000182450_9 (sequence is synthesized)
cctggattatcccagcgagaacctggccttcatcgacgagtcctcggatacgcagagcgagcgcggctgcccgctgccccgcgcgccgagaggtcgccgccgcccaaatccccccaggaa

SEQ ID NO: 646474 - DNA, 120 bp, Artificial Sequence
  ENSG00000182450_10 (sequence is synthesized)
gcccgtgcggccccgcggccccgggcgtccccgagacaaaggcgtgccggtgtaggggcaggatccctggccgggcctctcaagggcttcgtttctgctctccccggcatgcctggcttg

SEQ ID NO: 646475 - DNA, 120 bp, Artificial Sequence
  ENSG00000182450_11 (sequence is synthesized)
tttgaccaaagagccctctttccacgagactgaagtctggggaggaggctacagttgcctctccgcctcctccctggccccggcccttccctcacttccatccatctctagaccccccca

SEQ ID NO: 646476 - DNA, 120 bp, Artificial Sequence
  ENSG00000182450_12 (sequence is synthesized)
aggctttctgtgtcgctgccccgggcgggtgtatccctcacagcacctcacgactgtgcctcaaagcctgcatcaataaatgaaaacggtctgcaccgctgcgggcgtgacgctcccgga

SEQ ID NO: 646477 - DNA, 120 bp, Artificial Sequence
  ENSG00000182450_13 (sequence is synthesized)
agtgctgagcccaagggccaggctgtccccaggggcggagagttgcggacccttcccgatccggtaatgggcctgggagatgccagattagcgtggtgcctgtccggagagacgggccag

SEQ ID NO: 646478 - DNA, 120 bp, Artificial Sequence
  ENSG00000182450_14 (sequence is synthesized)
ctgatgcccaggtcggggccctgccgctggccacactgggctccggtccaaggctagaaggctggcccctgctgcaacccctctccggctcctctgccacccacctcccggggctggccg

SEQ ID NO: 646479 - DNA, 120 bp, Artificial Sequence
  ENSG00000182450_15 (sequence is synthesized)
caggcttaggctctctttcggcctcccactcgccttcctttcccttctcggtgccctcctctctttcctcacccggtagtcccagacaggggctgagggccgggcagcggaggtaagggg

SEQ ID NO: 646480 - DNA, 120 bp, Artificial Sequence
  ENSG00000182450_16 (sequence is synthesized)
aaggctggagataggagggggactgggtgtgtccagccagagggatgtctgtggacagtgcagctgggggctttatggatctttgggtgtgtaggggatagaggaggagggtgtgggtgt

SEQ ID NO: 646481 - DNA, 120 bp, Artificial Sequence
  ENSG00000182450_17 (sequence is synthesized)
ggaccggctgggctcctccctgcgccatggcatcggtcacattgaagccatcttcttggtgagctgctccatgccctgcctgcccttgtgctgggctccggctacccttccccatgtccc

SEQ ID NO: 646482 - DNA, 120 bp, Artificial Sequence
  ENSG00000182450_18 (sequence is synthesized)
tggcacatgagcgcgcccccaaagaccataagcctctcccacaggctcctgggggcgggagtggggagtatgggagtggggattgttggtgtctcctgggtcctgcctactgccccatcc

SEQ ID NO: 646483 - DNA, 120 bp, Artificial Sequence
  ENSG00000182459_0 (sequence is synthesized)
ctttccctgggtgcccacatgaacagagacaccaggatgctctcctgagaccacagcaactgcagaagctgaagacatttccagaagttcaagcttccaccctctgcaggtccccactga

SEQ ID NO: 646484 - DNA, 120 bp, Artificial Sequence
  ENSG00000182459_1 (sequence is synthesized)
gctgggacccaggtcatccaccccaccccaaatccctggataggaaacccctttctcctcctgctccttgtccccttcatccctgccgcccagcatcctactggcctcagcacctgtggc

SEQ ID NO: 646485 - DNA, 120 bp, Artificial Sequence
  ENSG00000182459_2 (sequence is synthesized)
cagaccgtccaagatcctctgaaggcccagctcttgctgtccaccccggcagtaggcaggcagcctggccatgtgccctccggtcagcatgcggtatgaggaagagggcatgtcctacct

SEQ ID NO: 646486 - DNA, 120 bp, Artificial Sequence
  ENSG00000182459_3 (sequence is synthesized)
ctacgcctcctggatgtatcagcttcaacatggagatcagctaagcatttgcttcacctgcttcaaggctgcctttctagactttaaagacttgctggagtcagaggactgggaagaaga

SEQ ID NO: 646487 - DNA, 120 bp, Artificial Sequence
  ENSG00000182459_4 (sequence is synthesized)
caactgggaccctgagctgatggagcacactgaggcagagtcagagcaggaggggtcctcagggatggagctgagctgggggcagagcccaggacagcctgtgcaggggggctctgaggc

SEQ ID NO: 646488 - DNA, 120 bp, Artificial Sequence
  ENSG00000182459_5 (sequence is synthesized)
atgggggccagggaccctggcagcagccccagaagggttggaagatgcaggtctggacccccactttgtccccactgaactatggcctcaggaggctgtgcccctgggcctgggccttga

SEQ ID NO: 646489 - DNA, 120 bp, Artificial Sequence
  ENSG00000182459_6 (sequence is synthesized)
ggatgctgactggacccagggtcttccctggagatttgaggagcttcttacctgctcacactggccaagcttctttccttcatagcaggggtttctcaaagtggacctgcccccagggga

SEQ ID NO: 646490 - DNA, 120 bp, Artificial Sequence
  ENSG00000182459_7 (sequence is synthesized)
gcccgtggtgttgaagctgggcattacctgggcagtggaccctgccgaggctgaggcctagttactggccctgcagcttgtctccatggtgggctgctatgataccatctacctacagaa

SEQ ID NO: 646491 - DNA, 120 bp, Artificial Sequence
  ENSG00000182459_8 (sequence is synthesized)
ggccctgaggaccccagggcagcactggaaattgctgctggagcctggtgaagtgtgggtggtgagactccaagatgcaccccaagagcaggacctgcactggtggatgctgagcattct

SEQ ID NO: 646492 - DNA, 120 bp, Artificial Sequence
  ENSG00000182459_9 (sequence is synthesized)
agaaacatcgttaacaggacacagggcagagctggtccctgcagcctcagccctgcagaagaggattcaccatagtctcttattcaccctggaccaacagggagagcaagaagggagact

SEQ ID NO: 646493 - DNA, 120 bp, Artificial Sequence
  ENSG00000182459_10 (sequence is synthesized)
cagcctgtaagccacagtcctccagccaagaacaggatctcagcacccctgagacacagagcaggggtcctgaggaaagcctggctgttgcaggagcctcggccatgggggagctgccct

SEQ ID NO: 646494 - DNA, 120 bp, Artificial Sequence
  ENSG00000182459_11 (sequence is synthesized)
gtttccagcctcagtccagggccccagaactgagagactaaggctcatgtagctgccattgtcctgggcacaccaggacatcagagactgggaagggccagcaattgctgttccacaaca

SEQ ID NO: 646495 - DNA, 120 bp, Artificial Sequence
  ENSG00000182459_12 (sequence is synthesized)
gccaggggagcagttggcaaaggaaacatggggagcaactttaggggctgggagatagggcctgttgtggcctcagagggaagcattacaaatattcataacctggaaacaagttcttac

SEQ ID NO: 646496 - DNA, 120 bp, Artificial Sequence
  ENSG00000182459_13 (sequence is synthesized)
cagttgattgtcacatagttctggatgtgttggcctgaatggctgttgtgctgcttgtgacatggggggcagggcacagaacttgtgcctatttcaccttggccatggggagggacattg

SEQ ID NO: 646497 - DNA, 120 bp, Artificial Sequence
  ENSG00000182459_14 (sequence is synthesized)
cttgtaaaacacatgctctgcagaacacaccagaatctgtggtgacctggatgtgttctcgactttgccaggacaatctcaggggtgccacaagaccctgtcagcagcactaggatctct

SEQ ID NO: 646498 - DNA, 120 bp, Artificial Sequence
  ENSG00000182459_15 (sequence is synthesized)
ggtctacagtggagggagagctggttttaaatgttggccgttgatgcaatttaaccatttaattcctgttgctctatatgttgtttttaattttaaaaagtcataaaagctttcaaacaa

SEQ ID NO: 646499 - DNA, 120 bp, Artificial Sequence
  ENSG00000182463_0 (sequence is synthesized)
agtttgttcagcgggatcgatgtttgctggcatcgcctcgccctgtcttgtgtgtgtgtgcgagggtgtgtgtgtgtgtttgtgtgtgtgtgcatatgtggggggtgtgagtgtgtgtgt

SEQ ID NO: 646500 - DNA, 120 bp, Artificial Sequence
  ENSG00000182463_1 (sequence is synthesized)
gcgaggaagcgggggtgcgtgcgcgtgtgagtgcgtgtgtgagtgtctgtgtgtgtgtctgtgtgtgtgtgtgagtgagtgaattccagattttctgtctttccaaaacccgctcctgtc

SEQ ID NO: 646501 - DNA, 120 bp, Artificial Sequence
  ENSG00000182463_2 (sequence is synthesized)
ctctcgcatatcactcacagacggggatctgacagcagccacaaacctacagtgagtgatcgctctccccccggcacgaatccgccatagagatcggcgaggaggaggaggaggaggagg

SEQ ID NO: 646502 - DNA, 120 bp, Artificial Sequence
  ENSG00000182463_3 (sequence is synthesized)
aagaaaagaaggaggaggtggaggaggaggtggaggaggaggaggaggagggaaagaggagaaggaagaagaagaaaaagaagaaacccactaccttcccaggattgccttttttttttc

SEQ ID NO: 646503 - DNA, 120 bp, Artificial Sequence
  ENSG00000182463_4 (sequence is synthesized)
cttatctttacgcgcgagtgtgcctgtggcgcgtgtgcgcccctcgtcccttccatccgaacccgggcttggatgtttaataaagaaatcaagtgtctcaacagtcaccaaaaaaaaaaa

SEQ ID NO: 646504 - DNA, 120 bp, Artificial Sequence
  ENSG00000182463_5 (sequence is synthesized)
aaaccgcaaaaacaaaaccaaaaaaattccaaaagcaaaaacaaaaaagagagaggaaaaaaaattcaaaataaacaaacaaacaaacaaggcagaaccaacctctacttcaaagcagcc

SEQ ID NO: 646505 - DNA, 120 bp, Artificial Sequence
  ENSG00000182463_6 (sequence is synthesized)
ggcacaagccacccgtgtctgccacccagagaggggggtctctggcccgtggtggaggagttgcaggggggatcgtcagggggacagaggccgagtgacgtcctaggagccaccgggcaa

SEQ ID NO: 646506 - DNA, 120 bp, Artificial Sequence
  ENSG00000182463_7 (sequence is synthesized)
gaggcggaggagacccagagaggccagagagacagcgggccccagcgcgcggctcggggctggggcgccagaagtgggactggagcgaagtagaggatgccgaggagaaaacagcaggca

SEQ ID NO: 646507 - DNA, 120 bp, Artificial Sequence
  ENSG00000182463_8 (sequence is synthesized)
cccaagcgggcggcaggctacgcccaggaggaacagctgaaagaagaggaggaaataaaagaagaggaggaggaggaggacagcggttcagtagctcaactgcagggtggcaatgacaca

SEQ ID NO: 646508 - DNA, 120 bp, Artificial Sequence
  ENSG00000182463_9 (sequence is synthesized)
gggacggacgaggagctagaaacgggcccagagcaaaaaggctgcttcagctaccagaactctccaggaagtcatttgtccaatcaggatgccgagaacgagtctctgctgagtgacgcc

SEQ ID NO: 646509 - DNA, 120 bp, Artificial Sequence
  ENSG00000182463_10 (sequence is synthesized)
agtgatcaggtgtcggacatcaagagtgtctgcggcagagatgcctcagacaagaaagcacacactcacgtcaggcttccaaacgaagcacacaattgcatggataaaatgaccgctgtc

SEQ ID NO: 646510 - DNA, 120 bp, Artificial Sequence
  ENSG00000182463_11 (sequence is synthesized)
tacgccaacatcctgtcggattcctactggtcaggcctgggccttggcttcaagctgtccaatagtgagaggaggaactgtgacacccgaaacggcagcaacaagagtgattttgattgg

SEQ ID NO: 646511 - DNA, 120 bp, Artificial Sequence
  ENSG00000182463_12 (sequence is synthesized)
caccaagacgctctgtccaaaagcctgcagcagaacttgccttctcggtccgtctcgaaacccagcctgttcagctcggtgcagttgtaccgacagagcagcaagatgtgcgggactgtg

SEQ ID NO: 646512 - DNA, 120 bp, Artificial Sequence
  ENSG00000182463_13 (sequence is synthesized)
ttcacaggggccagcagattccgatgccgacagtgcagcgcggcctatgacaccctagtcgagctgactgtgcacatgaatgaaacgggccactatcaagatgacaaccgcaaaaaggac

SEQ ID NO: 646513 - DNA, 120 bp, Artificial Sequence
  ENSG00000182463_14 (sequence is synthesized)
aagctcagacccacgagctattcaaagcccaggaaaagggctttccaggatatggacaaagaggatgctcaaaaggttctgaaatgtatgttttgtggcgactcctttgattccctccaa

SEQ ID NO: 646514 - DNA, 120 bp, Artificial Sequence
  ENSG00000182463_15 (sequence is synthesized)
gatttgagcgtccacatgattaaaacaaaacattaccaaaaagtgcctttgaaggagccagtcccaaccatttcctcgaaaatggtcaccccggctaagaaacgcgtttttgatgtcaat

SEQ ID NO: 646515 - DNA, 120 bp, Artificial Sequence
  ENSG00000182463_16 (sequence is synthesized)
cggccgtgttcccccgattcaaccacaggatcttttgcagattctttttcttctcagaagaacgccaacttgcagttgtcctccaacaaccgctatggctaccaaaatggagccagctac

SEQ ID NO: 646516 - DNA, 120 bp, Artificial Sequence
  ENSG00000182463_17 (sequence is synthesized)
acctggcagtttgaggcctgcaagtcccagatcttaaagtgcatggagtgtgggagctcccatgacaccttgcagcagctcaccacccacatgatggtcacaggtcactttctcaaggtc

SEQ ID NO: 646517 - DNA, 120 bp, Artificial Sequence
  ENSG00000182463_18 (sequence is synthesized)
accagctctgcctccaagaaagggaagcagctggtattagacccgttagcagtggagaaaatgcagtcgttgtctgaggccccaaacagtgattctctggctcccaagccatccagtaac

SEQ ID NO: 646518 - DNA, 120 bp, Artificial Sequence
  ENSG00000182463_19 (sequence is synthesized)
tcagcatcagattgtacagcctctacaactgagttaaagaaagagagtaaaaaagaaaggccagaggaaaccagcaaggatgagaaagtcgtgaaaagcgaggactatgaagatcctcta

SEQ ID NO: 646519 - DNA, 120 bp, Artificial Sequence
  ENSG00000182463_20 (sequence is synthesized)
caaaaacctttagaccctacaatcaaatatcaatacctaagggaggaagacttggaagatggctcaaagggtggaggggacattttgaaatctttggaaaatactgtcaccacagccatc

SEQ ID NO: 646520 - DNA, 120 bp, Artificial Sequence
  ENSG00000182463_21 (sequence is synthesized)
aacaaagcccaaaacggggcccccagctggagtgcctaccccagcatccacgcagcctaccagctgtctgagggcaccaagccgcctttgcctatgggatcccaggtactgcagatccgg

SEQ ID NO: 646521 - DNA, 120 bp, Artificial Sequence
  ENSG00000182463_22 (sequence is synthesized)
cctaatctcaccaacaagctgaggcccattgcaccaaagtggaaagtgatgccactggtttctatgcccacacacctggccccttacactcaagtcaagaaagagtcagaagacaaagat

SEQ ID NO: 646522 - DNA, 120 bp, Artificial Sequence
  ENSG00000182463_23 (sequence is synthesized)
gaagcggtgaaggagtgtgggaaagaaagtccccacgaagaggcctcatctttcagccacagtgagggcgattctttccgcaaaagtgaaacacctccagaagccaaaaagaccgagctg

SEQ ID NO: 646523 - DNA, 120 bp, Artificial Sequence
  ENSG00000182463_24 (sequence is synthesized)
ggtcccctgaaggaggaggagaagctgatgaaagagggcagcgagaaggagaaaccccagcccctggagcccacatctgctctgagcaatgggtgcgccctcgccaaccacgccccggcc

SEQ ID NO: 646524 - DNA, 120 bp, Artificial Sequence
  ENSG00000182463_25 (sequence is synthesized)
ctgccatgcatcaacccactcagcgccctgcagtccgtcctgaacaatcacttgggcaaagccacggagcccttgcgctcaccttcctgctccagcccaagttcaagcacaatttccatg

SEQ ID NO: 646525 - DNA, 120 bp, Artificial Sequence
  ENSG00000182463_26 (sequence is synthesized)
ttccacaagtcgaatctcaatgtcatggacaagccggtcttgagtcctgcctccacaaggtcagccagcgtgtccaggcgctacctgtttgagaacagcgatcagcccattgacctgacc

SEQ ID NO: 646526 - DNA, 120 bp, Artificial Sequence
  ENSG00000182463_27 (sequence is synthesized)
aagtccaaaagcaagaaagccgagtcctcgcaagcacaatcttgtatgtccccacctcagaagcacgctctgtctgacatcgccgacatggtcaaagtcctccccaaagccaccacccca

SEQ ID NO: 646527 - DNA, 120 bp, Artificial Sequence
  ENSG00000182463_28 (sequence is synthesized)
aagccagcctcctcctccagggtcccccccatgaagctggaaatggatgtcaggcgctttgaggatgtctccagtgaagtctcaactttgcataaaagaaaaggccggcagtccaactgg

SEQ ID NO: 646528 - DNA, 120 bp, Artificial Sequence
  ENSG00000182463_29 (sequence is synthesized)
aatcctcagcatcttctgattctacaagcccagtttgcctcgagcctcttccagacatcagagggcaaatacctgctgtctgatctgggcccacaagagcgtatgcaaatctctaagttt

SEQ ID NO: 646529 - DNA, 120 bp, Artificial Sequence
  ENSG00000182463_30 (sequence is synthesized)
acgggactctcaatgaccactatcagtcactggctggccaacgtcaagtaccagcttaggaaaacgggcgggacaaaatttctgaaaaacatggacaaaggccaccccatcttttattgc

SEQ ID NO: 646530 - DNA, 120 bp, Artificial Sequence
  ENSG00000182463_31 (sequence is synthesized)
agtgactgtgcctcccagttcagaaccccttctacctacatcagtcacttagaatctcacctgggtttccaaatgaaggacatgacccgcttgtcagtggaccagcaaagcaaggtggag

SEQ ID NO: 646531 - DNA, 120 bp, Artificial Sequence
  ENSG00000182463_32 (sequence is synthesized)
caagagatctcccgggtatcgtcggctcagaggtctccagaaacaatagctgccgaagaggacacagactctaaattcaagtgtaagttgtgctgtcggacatttgtgagcaaacatgcg

SEQ ID NO: 646532 - DNA, 120 bp, Artificial Sequence
  ENSG00000182463_33 (sequence is synthesized)
gtaaaactccacctaagcaaaacgcacagcaagtcacccgaacaccattcacagtttgtaacagacgtggatgaagaatagctctgcaggacgaatgccttagtttccactttccagcct

SEQ ID NO: 646533 - DNA, 120 bp, Artificial Sequence
  ENSG00000182463_34 (sequence is synthesized)
ggatcccctcacactgaacccttcttcgttgcaccatcctgcttctgacattgaactcattgaactcctcctgacaccctggctctgagaagactgccaaaaaaaaaaaaaaaaaaaaat

SEQ ID NO: 646534 - DNA, 120 bp, Artificial Sequence
  ENSG00000182463_35 (sequence is synthesized)
caccccagccatttctcttcatcctcactaacaatttggtaatgaagtattgatttccacttctctgcttatgggcggtattagattttcattgataaattgcaatggggctgtctcgtc

SEQ ID NO: 646535 - DNA, 120 bp, Artificial Sequence
  ENSG00000182463_36 (sequence is synthesized)
tccacagtacccttttcactgtcacaagaaaacaaagtgccaccgaagaaaagtaatgactgagagcattgatgtacttattttgtcagtttgtaacaggaaagtgggggggagtctaag

SEQ ID NO: 646536 - DNA, 120 bp, Artificial Sequence
  ENSG00000182463_37 (sequence is synthesized)
tcttcatagtctaatgtccaagtgggttgcactagatgtagacacttggaggcttacttttcatggtaatgtccatttcctatttataacccctctgggaacgtttgtctaaaggaaatg

SEQ ID NO: 646537 - DNA, 120 bp, Artificial Sequence
  ENSG00000182463_38 (sequence is synthesized)
tttctgttcagtgtaacaattacagttgcacctggattgcccagtcctgcccctgcactaggggaccattaatcactgcaaagtagaagaattattaagttaaaccagagtttgagccaa

SEQ ID NO: 646538 - DNA, 120 bp, Artificial Sequence
  ENSG00000182463_39 (sequence is synthesized)
gaaaacccctgaacaatgttcatcttctgtgaaacttgctcaaatagttaagcttaaccatgttgctgccaaagacttttcctatgcagtggtggggcaccttgatcatcatcattatct

SEQ ID NO: 646539 - DNA, 120 bp, Artificial Sequence
  ENSG00000182463_40 (sequence is synthesized)
tgattggctgaaaaaaaaatagttttaagcacacaccactgtctatgagaactgcaaattgggagaataggtgaaatgcagaatctgagagaacgcgagaagatgagatcattacagggt

SEQ ID NO: 646540 - DNA, 120 bp, Artificial Sequence
  ENSG00000182463_41 (sequence is synthesized)
ggaaagttctgcagcagccttttctggtaatccctttctgcagaacctgatgtttatgggctctaaaacgcagcttagctttagaagcaacagaaagcatgaaatagggtgtccatttta

SEQ ID NO: 646541 - DNA, 120 bp, Artificial Sequence
  ENSG00000182463_42 (sequence is synthesized)
aatgtgttcctgcaacttttttcattaaaactttgagggcccaattttaatttgtggaatattcccgttaataatgagatctaattaagacatccattaaaagcccgttaaagttaattt

SEQ ID NO: 646542 - DNA, 120 bp, Artificial Sequence
  ENSG00000182463_43 (sequence is synthesized)
aacgtaaaaattccaatagaactgtattagattttctccattaaattaacgttatggatttttaacggatgtcttaattatacgttattattaacgggaatactgtattacacagattaa

SEQ ID NO: 646543 - DNA, 120 bp, Artificial Sequence
  ENSG00000182463_44 (sequence is synthesized)
aatcaggtcctaagtcaacttggaagagctaagagcatgttttaatattaaaagtcttgcatacctagtgcacagtttggagacgcaaggatagatctgtttactctagttgaacatttt

SEQ ID NO: 646544 - DNA, 120 bp, Artificial Sequence
  ENSG00000182463_45 (sequence is synthesized)
ctatacaattgaaagcaacctataatagataaatccatcattgcatttaaacaatgaatttccttattctcaaaggacaaatacgtctggattatgtggtaaattgctactcagctatgg

SEQ ID NO: 646545 - DNA, 120 bp, Artificial Sequence
  ENSG00000182463_46 (sequence is synthesized)
tgaaatatttatactattctaggcacaacactaggaactaggtgattctgaaacaaaaggaatattttctgttgttgctttaattaccaaggttatttttttttaatctcaacactgaca

SEQ ID NO: 646546 - DNA, 120 bp, Artificial Sequence
  ENSG00000182463_47 (sequence is synthesized)
aaatgaaaccaaatatctcttcctcaccatttctcaaggaggctgcctgttggaattgttttggaaattttgacatgatccctaaattcaacattgggattaaaaaaaaaaaaaaacttc

SEQ ID NO: 646547 - DNA, 120 bp, Artificial Sequence
  ENSG00000182463_48 (sequence is synthesized)
ttatttacctcctagggaaagtgttgcccttatgccacatataatagcaaattgctttttttatggcatgcataacctagatgggaaaaaatatggcgcttcggggaaggagggaaaaag

SEQ ID NO: 646548 - DNA, 120 bp, Artificial Sequence
  ENSG00000182463_49 (sequence is synthesized)
taaatgaagttccaggaatgtcattctgaagtaatgaggcatggacagaaaatatacccctcacatcatcggattgagatggcagtcgaaatagcttcattgaagtgtcagcactcatcc

SEQ ID NO: 646549 - DNA, 120 bp, Artificial Sequence
  ENSG00000182463_50 (sequence is synthesized)
gtgctgatattattttttatgatgggaggatcataaagtgaattgagaacagtgaggtctgtctttgcttaacctattcaaccagaaatgaatggagctcgactggaaaggaacagtctt

SEQ ID NO: 646550 - DNA, 120 bp, Artificial Sequence
  ENSG00000182463_51 (sequence is synthesized)
cagatgggttaagattgaagggtggactggactctactgagcaccgtccttcaacaaggaaattctattaaaggaaaatcaatgcattagtattggggttctcgtagctgttaaaaattg

SEQ ID NO: 646551 - DNA, 120 bp, Artificial Sequence
  ENSG00000182463_52 (sequence is synthesized)
tctgctccaatccagggttattaggccaaagttacataattcagatctcactgcaaccatccaaaagtggattctcgagcccttgctccaatggggggaggagatcaatacaattcccaa

SEQ ID NO: 646552 - DNA, 120 bp, Artificial Sequence
  ENSG00000182463_53 (sequence is synthesized)
ttccatggaaattgtttcccttctaaggaagaaaaaataaatcatctgcttcaacatataatcgatatggttttgttagcgtaatttctatggtgggtggggtgggaggtgagagaaaaa

SEQ ID NO: 646553 - DNA, 120 bp, Artificial Sequence
  ENSG00000182463_54 (sequence is synthesized)
aatattgataaatttggtaagacaggtgaattgccgcctggcaaccgtgcatgtcactgccgagggatggctgctaaggttcaccttagaaaacaagatctgggctggcactggggcata

SEQ ID NO: 646554 - DNA, 120 bp, Artificial Sequence
  ENSG00000182463_55 (sequence is synthesized)
catcaccactcagcatattcctagaggccaggcctgtcttcactcagccagccctctgaggcttctagaaacttctttctggaggaaaaaaactaaataacataaactcaggagaatgtc

SEQ ID NO: 646555 - DNA, 120 bp, Artificial Sequence
  ENSG00000182463_56 (sequence is synthesized)
tttacccaccttcataccactgctttctttttgctgaataaaacacagttctgataagtaagaactttagaattggaaaggaggctgacatgcaaatataatgcaaattaccctcaagta

SEQ ID NO: 646556 - DNA, 120 bp, Artificial Sequence
  ENSG00000182463_57 (sequence is synthesized)
tcgccattcttccaccacctcttggtaccagtgagagcgagagattgccttttcttccccatccctccttccagctaagaccaccaaccagctgcaaattgagatgtccatttaaaaatt

SEQ ID NO: 646557 - DNA, 120 bp, Artificial Sequence
  ENSG00000182463_58 (sequence is synthesized)
tatatgtcaatatttaaatgttacatatttggccctattttgtagttcagcaaatcctccaaatacacagcatgttacaaggcactggtggcacagggcacaacaggaaatgatatttat

SEQ ID NO: 646558 - DNA, 120 bp, Artificial Sequence
  ENSG00000182463_59 (sequence is synthesized)
ttagcaaattcatttaacaaatattattgggcacctgttatgtgagacactgtcctaggcactgtgggataacaacagcaaacacttcacacaacagcctggccttcctgtgttttacaa

SEQ ID NO: 646559 - DNA, 120 bp, Artificial Sequence
  ENSG00000182463_60 (sequence is synthesized)
cagctcctaaagatagctgatatcaagacatttgagggacacagttcatgtagaatcaaaatattagtatttcagaataaggattttttttctgaaaagcatacagagaggaaacagctt

SEQ ID NO: 646560 - DNA, 120 bp, Artificial Sequence
  ENSG00000182463_61 (sequence is synthesized)
aaaaataggtcaagacctaaaaacagaatataatcacggaataaactggataacccagacagtccccacagaatttctttcaggtcacagatttcttaaaactcacccccaaaatgtgcc

SEQ ID NO: 646561 - DNA, 120 bp, Artificial Sequence
  ENSG00000182463_62 (sequence is synthesized)
tgcttggttgtttgaatcttgcataattaatgtcacaggcgcaagccgctgaacttagttgagatgcagaaaacaaacaaatgcaatgacatatctgagaagcatttatgtaactccggt

SEQ ID NO: 646562 - DNA, 120 bp, Artificial Sequence
  ENSG00000182463_63 (sequence is synthesized)
taagtggtgaggaggggtgtgtgaagacagtgtgcatgcatgagtgtgtattcatatatatgtgtatacatatgaatttcactgttattttccagggtctatggacaatgtggcagtaag

SEQ ID NO: 646563 - DNA, 120 bp, Artificial Sequence
  ENSG00000182463_64 (sequence is synthesized)
agtctatgatgttctgaaacttttcacagtaaatccaaagattacagaccttacaaggtgcttgcattctgttgcttttccatctgtcacttctcaggttatttgactgtgttcaaacct

SEQ ID NO: 646564 - DNA, 120 bp, Artificial Sequence
  ENSG00000182463_65 (sequence is synthesized)
tcttttctttttcattgagtttcattttttaagcttgttaaatgcttttgtttaaaaaaaaaaaaaaaaccccaaatgtcatttttcacattatcctctcttctctgcaacaaggatagt

SEQ ID NO: 646565 - DNA, 120 bp, Artificial Sequence
  ENSG00000182463_66 (sequence is synthesized)
aagatgtagatgaatgcaaaaataataacaacaataaggaaatatattaaagctttaaaatatgcacatatgtagttctaaagagcaataacggtagtatctatttcgaacatgcattag

SEQ ID NO: 646566 - DNA, 120 bp, Artificial Sequence
  ENSG00000182463_67 (sequence is synthesized)
gcaaaaaagaaatcaaaactgaaattttcgtgtatttttccccttgtaagatgttcaaatgctaacttcattttctcctttcctctatgtggcactttctcaaaatatctatgaaatact

SEQ ID NO: 646567 - DNA, 120 bp, Artificial Sequence
  ENSG00000182463_68 (sequence is synthesized)
tttagacaaagattgagctggagaaagagatacaaatttccatccccccagacagagagacatatttccattgtaggaaggcattaaacattttgaaacttgtgaatcatctttagaatt

SEQ ID NO: 646568 - DNA, 120 bp, Artificial Sequence
  ENSG00000182463_69 (sequence is synthesized)
tctactggggaattttacttcttcatccaaagtaaaagccacttatctcctttggttcccagtgacagattcagaggcatacgcagatatacaattttcaggctctagttaatcttcttc

SEQ ID NO: 646569 - DNA, 120 bp, Artificial Sequence
  ENSG00000182463_70 (sequence is synthesized)
caatagttacgaacaatgggctaacaggcgtgggtgtttctccaaaaattattcatgcacaaggcagcccaaagcttcagggaaaactagaaatgtgttatggattagaataggactgtt

SEQ ID NO: 646570 - DNA, 120 bp, Artificial Sequence
  ENSG00000182463_71 (sequence is synthesized)
ttaaaatgctagtaccaggtggaacgctatttctgcaacaggactctgtccatttcctttggaacaatatattccaagtaaaatggctcttccaaggaatgacacctttacttgacaccc

SEQ ID NO: 646571 - DNA, 120 bp, Artificial Sequence
  ENSG00000182463_72 (sequence is synthesized)
ttcggcatacaaatgattttaccaatagccatgattattattaaggccttttaaaatacaggctgtttgaaaaaagacagattaaatattcacagcctttgtatcatggttatttgctta

SEQ ID NO: 646572 - DNA, 120 bp, Artificial Sequence
  ENSG00000182463_73 (sequence is synthesized)
aaacagcttttagaagtacaagtaataactttttgataagaaaccccaggagaaactttttggtaagaaacctcaaaaaatttgaacaaaggcattacaaaaaaaaaaaaaaaactaacc

SEQ ID NO: 646573 - DNA, 120 bp, Artificial Sequence
  ENSG00000182463_74 (sequence is synthesized)
actccattcaactctctcagaaaataaatttcaatgtgttcaatgaattgtcttgaacctgaaacctgcatttagatatcagtcccctgccaatagctaatattaacagaatttgaacaa

SEQ ID NO: 646574 - DNA, 120 bp, Artificial Sequence
  ENSG00000182463_75 (sequence is synthesized)
tcatacaattatgtctcaaatgtgaagactttgtacagtaatattttcactttctaaatgacccatataacattcaggaattatagatgtgtatgtatattttttaagtacagaaagttc

SEQ ID NO: 646575 - DNA, 120 bp, Artificial Sequence
  ENSG00000182463_76 (sequence is synthesized)
agccagtcttcagagaagtaaaagtgatgtctattgtgcattgaagtaaatattacaaacattccagtttcgcaatacaatacttgagctttcgaacacctcagacactagaatgtgtaa

SEQ ID NO: 646576 - DNA, 120 bp, Artificial Sequence
  ENSG00000182463_77 (sequence is synthesized)
tgcgagtcaaaaaagctgacatacaaaacaattcccatttggctcagggttcctaaatgtcacaatatcttgggtaaaatatactttttgatttcctgatgatgtccttctaatcccttc

SEQ ID NO: 646577 - DNA, 120 bp, Artificial Sequence
  ENSG00000182463_78 (sequence is synthesized)
tgactttgattcctaacagccaggcactgttgacatgaatcattaacttccaaacccctttaaaatcaagaagctaggtgatcatacagtcatttcaatggccaaccagttcttgctcta

SEQ ID NO: 646578 - DNA, 120 bp, Artificial Sequence
  ENSG00000182463_79 (sequence is synthesized)
cagagcttttacacctttttgggaaacctgatatcaaacacatttatgttatatatttgctcccttgcattaattctagatttttttttaatttcttttagaaagggcaggggggaagtg

SEQ ID NO: 646579 - DNA, 120 bp, Artificial Sequence
  ENSG00000182463_80 (sequence is synthesized)
ggtcagagcaaggttcaagaatcacattcatccttgctctaaagtgtttacttgccagcaaagaaaggcaaacacatttttatattcagaaagcagaccggtcattttcaaagaaaaatg

SEQ ID NO: 646580 - DNA, 120 bp, Artificial Sequence
  ENSG00000182463_81 (sequence is synthesized)
actgcaaccatgcctgtagaatgtttctgtgcaagcgcactaattttctatcacctgcatgctgtatataatacatttgcctgtatactaggaagaaaaaccaggctgttttccctgagt

SEQ ID NO: 646581 - DNA, 120 bp, Artificial Sequence
  ENSG00000182463_82 (sequence is synthesized)
acaatgcagcttggatggctgggagcgtaagccttccgtgcatttttatagtgtacatatttgtatatactaactatatcgccatgtatgaacacagattttgttatatttgcttgtttc

SEQ ID NO: 646582 - DNA, 120 bp, Artificial Sequence
  ENSG00000182463_83 (sequence is synthesized)
tgtttcctaccaaactggcccacaatggggattcttttgtatagaaaaaatatgcttgtaattttttcctggtcattctctttcaatagcttatgaaagaattagatctgagtttacaaa

SEQ ID NO: 646583 - DNA, 120 bp, Artificial Sequence
  ENSG00000182463_84 (sequence is synthesized)
gaaactataagaaccaagtttgtctgtctgcatgagtcccgtccaattgctggatctagggaggaaccaacttcctaattcagagttttccttttaaaggcatgctttacccccatggga

SEQ ID NO: 646584 - DNA, 120 bp, Artificial Sequence
  ENSG00000182463_85 (sequence is synthesized)
aaactgcacactcatccatgtagaattattctctttgtattttatctaatagtgcctgaaaatttttttaatgtcttcttagaagaagaattcataattgtcaaaatttgaaacattagc

SEQ ID NO: 646585 - DNA, 120 bp, Artificial Sequence
  ENSG00000182463_86 (sequence is synthesized)
ttaattttgtttttatgacctcaagattcttctccttatttattcggttgctgttgtaatggggccccaggccattcctgacatcggcgtgttcttcttctgcattaaggatgtttttga

SEQ ID NO: 646586 - DNA, 120 bp, Artificial Sequence
  ENSG00000182463_87 (sequence is synthesized)
aattacagagattattgagccaacaggctgttttaatcaaaaccatgtttcacttctttttgatgattataaattgtccttgcaatgaaaaaaaaaaaagaacttttctgctaggaagat

SEQ ID NO: 646587 - DNA, 120 bp, Artificial Sequence
  ENSG00000182463_88 (sequence is synthesized)
tataccaccctgtggccaaacagattcatcacagataggcatctatgcccatttctctgggatctggaaaattcttcccttggctgaccccaatttcttttactccccattatcctgaat

SEQ ID NO: 646588 - DNA, 120 bp, Artificial Sequence
  ENSG00000182463_89 (sequence is synthesized)
attagctttcaatgcagtcactatttgacatttccaaaggctttgccgcattgtcactgcccaaagacaaacaaccactggaaatgatggctttcctgcttgaaacgaagggggccaggt

SEQ ID NO: 646589 - DNA, 66 bp, Artificial Sequence
  ENSG00000182463_90 (sequence is synthesized)
gaaatgatggctttcctgcttgaaacgaagggggccaggtgcagtggctcaagcctgtaaccccta

SEQ ID NO: 646590 - DNA, 120 bp, Artificial Sequence
  ENSG00000182463_91 (sequence is synthesized)
aagactgtgtctcaaaaaaaaaaaaaagaatggattttcagaaaaagtgctccctttcctgtcctgtggtgccaccatcctgtcctccttcgtaatcatgaacaatctgatcttgaactc

SEQ ID NO: 646591 - DNA, 120 bp, Artificial Sequence
  ENSG00000182463_92 (sequence is synthesized)
catgaacaatctgatcttgaactcccacataacttaaatcaggcaaaaagaaacattcacagcgtccccttgctgaataaaaatgactttgtttggaggcacttaagatgtatgcctgtg

SEQ ID NO: 646592 - DNA, 120 bp, Artificial Sequence
  ENSG00000182463_93 (sequence is synthesized)
tgtggtgccgcagcattgaaattatctgtagaaggggaattttttttaaaaatacaattttatcactagaaataaattccgatggtggaaacgaagaaaacccttaaattatatcacaaa

SEQ ID NO: 646593 - DNA, 120 bp, Artificial Sequence
  ENSG00000182463_94 (sequence is synthesized)
agccattattttttgcatccaaagagtttttttttttaaggaaaatcattctactttgagaactgtaattaaagccctaaataacagacactactttgttgagctattgtgaaaaaaaaa

SEQ ID NO: 646594 - DNA, 120 bp, Artificial Sequence
  ENSG00000182463_95 (sequence is synthesized)
caacacattcgccaaggttatatggagcccctgatttccatcaaaaaggtttctataagtatattatttacatttttatacatgataactcttgcctttgtgttgaaaaaaaaaaagtct

SEQ ID NO: 646595 - DNA, 120 bp, Artificial Sequence
  ENSG00000182463_96 (sequence is synthesized)
cttttttttcccccactcagcagttattggaaatagactgttcccatctgaaaccgtatcgtaatttgcatcaggaaacccaactgctgacattgaggacctgggtgtgttcaattatga

SEQ ID NO: 646596 - DNA, 120 bp, Artificial Sequence
  ENSG00000182463_97 (sequence is synthesized)
ttttgctggaggctgtccctcattttaatgctgcagctattgaaccaccttcctgaaacctagctgatacggaatagcagagacatgcctctcaacaccattagctttgcaaatggcttc

SEQ ID NO: 646597 - DNA, 120 bp, Artificial Sequence
  ENSG00000182463_98 (sequence is synthesized)
atttcagtcaacgtcgacttctgctttggccaattgaaaaatgaaaattaaaggagagaagaaaaaaaacacagatgcacttaaaacatgaaaagaattatttatatgataaaaatatat

SEQ ID NO: 646598 - DNA, 120 bp, Artificial Sequence
  ENSG00000182463_99 (sequence is synthesized)
ttagcttttcaaagcacaagactgaatagaagtgctctttttatgctttctggagatgttactgttaaatgtctttctacatcaggcttaataaatctgtaatgacatttgatggattga

SEQ ID NO: 646599 - DNA, 120 bp, Artificial Sequence
  ENSG00000182463_100 (sequence is synthesized)
atttatttttctagaacacacccgacatgtaggctctattgcaatacatctgaaaacacaaaatctgtttgctccaaaattggtgatagcctctgacttaagatgatggtggccaggcga

SEQ ID NO: 646600 - DNA, 84 bp, Artificial Sequence
  ENSG00000182463_101 (sequence is synthesized)
tggtgatagcctctgacttaagatgatggtggccaggcgaggtggttcaagcctgtggatcatgaggtcaggagttcaagacca

SEQ ID NO: 646601 - DNA, 120 bp, Artificial Sequence
  ENSG00000182472_0 (sequence is synthesized)
actgacctccttcttggtgctctgacagcggcagccggtcctccctcagctctgcccgccttctctcctgctgctggccaagcccattaagctgctaccttggccacaactgaaggcccc

SEQ ID NO: 646602 - DNA, 120 bp, Artificial Sequence
  ENSG00000182472_1 (sequence is synthesized)
acgccctgggaagaaagctactgaagaggcgtccctgctccccagcaccccaaaccatcaattaatattaacgagggaaggctcctcattgcctaaagaccccactggggctccaatgga

SEQ ID NO: 646603 - DNA, 120 bp, Artificial Sequence
  ENSG00000182472_2 (sequence is synthesized)
agagaggccccgcccccgtgactcaggaggttaaagggcctggtgccggcttgtgaggccagtgtccagatggcatccagcagtgggagggtcaccatccagctcgtggatgaggaggct

SEQ ID NO: 646604 - DNA, 120 bp, Artificial Sequence
  ENSG00000182472_3 (sequence is synthesized)
ggggtcggagccgggcgcctgcagctttttcggggccagagctatgaggcaattcgggcagcctgcctggattcggggatcctgttccgcgacccttacttccctgctggccctgatgcc

SEQ ID NO: 646605 - DNA, 120 bp, Artificial Sequence
  ENSG00000182472_4 (sequence is synthesized)
cttggctatgaccagctggggccggactcggagaaggccaaaggcgtgaaatggatgaggccccatgagttctgtgctgagccgaagttcatctgtgaagacatgagccgcacagacgtg

SEQ ID NO: 646606 - DNA, 120 bp, Artificial Sequence
  ENSG00000182472_5 (sequence is synthesized)
tgtcaggggagcctgggtaactgctggttccttgcagctgccgcctcccttactctgtatccccggctcctgcgccgggtggtccctcctggacaggatttccagcatggctacgcaggc

SEQ ID NO: 646607 - DNA, 120 bp, Artificial Sequence
  ENSG00000182472_6 (sequence is synthesized)
gtcttccacttccagctctggcagtttggccgctggatggacgtcgtggtggatgacaggctgcccgtgcgtgaggggaagctgatgttcgtgcgctcggaacagcggaatgagttctgg

SEQ ID NO: 646608 - DNA, 120 bp, Artificial Sequence
  ENSG00000182472_7 (sequence is synthesized)
gccccactcctggagaaggcctacgccaagctccacggctcctatgaggtgatgcggggcggccacatgaatgaggcttttgtggatttcacaggcggcgtgggcgaggtgctctatctg

SEQ ID NO: 646609 - DNA, 120 bp, Artificial Sequence
  ENSG00000182472_8 (sequence is synthesized)
agacaaaacagcatggggctgttctctgccctgcgccatgccctggccaaggagtccctcgtgggcgccactgccctgagtgatcggggtgagtaccgcacagaagagggcctggtaaag

SEQ ID NO: 646610 - DNA, 120 bp, Artificial Sequence
  ENSG00000182472_9 (sequence is synthesized)
ggacacgcgtattccatcacgggcacacacaaggtgttcctgggcttcaccaaggtgcggctgctgcggctgcggaacccatggggctgcgtggagtggacgggggcctggagcgacagc

SEQ ID NO: 646611 - DNA, 120 bp, Artificial Sequence
  ENSG00000182472_10 (sequence is synthesized)
tgcccacgctgggacacactccccaccgagtgccgcgatgccctgctggtgaaaaaggaggatggcgagttctggatggagctgcgggacttcctcctccatttcgacaccgtgcagatc

SEQ ID NO: 646612 - DNA, 120 bp, Artificial Sequence
  ENSG00000182472_11 (sequence is synthesized)
tgctcgctgagcccggaggtgctgggccccagcccggaggggggcggctggcacgtccacaccttccaaggccgctgggtgcgtggcttcaactccggcgggagccagcctaatgctgaa

SEQ ID NO: 646613 - DNA, 120 bp, Artificial Sequence
  ENSG00000182472_12 (sequence is synthesized)
accttctggaccaatcctcagttccgtttaacgctgctggagcctgatgaggaggatgacgaggatgaggaagggccctgggggggctggggggctgcaggggcacggggcccagcgcgg

SEQ ID NO: 646614 - DNA, 120 bp, Artificial Sequence
  ENSG00000182472_13 (sequence is synthesized)
acgcccaagtgcacggtccttctgtccctcatccagcgcaaccggcggcgcctgagagccaagggcctcacttacctcaccgttggcttccacgtgttccagattccagaggagctgctg

SEQ ID NO: 646615 - DNA, 120 bp, Artificial Sequence
  ENSG00000182472_14 (sequence is synthesized)
ggcctctgggattccccgcgcagccatgcgctcctgccccggctgctgcgcgccgaccgctcgcccctcagcgcccgccgcgacgtgacccgccgctgctgcctgcgtccaggccactac

SEQ ID NO: 646616 - DNA, 120 bp, Artificial Sequence
  ENSG00000182472_15 (sequence is synthesized)
ctggtggtgccgagcaccgcccacgccggcgacgaggctgacttcactctgcgtgtcttctccgagcgccgccacacggccgtggagatcgacgacgtgatcagcgcagacctgcagtct

SEQ ID NO: 646617 - DNA, 120 bp, Artificial Sequence
  ENSG00000182472_16 (sequence is synthesized)
ctccagggcccctacctgcccctggagctggggttggagcagctgtttcaggagctggctggagaggaggaagaactcaatgcctctcagctccaggccttactaagcattgccctggag

SEQ ID NO: 646618 - DNA, 120 bp, Artificial Sequence
  ENSG00000182472_17 (sequence is synthesized)
cctgccagggcccatacctccacccccagagagatcgggctcaggacctgtgagcagctgctgcagtgtttcgggcatgggcaaagcctggccttacaccacttccagcagctctggggc

SEQ ID NO: 646619 - DNA, 120 bp, Artificial Sequence
  ENSG00000182472_18 (sequence is synthesized)
tacctcctggagtggcaggccatatttaacaagttcgatgaggacacctctggaaccatgaactcctacgagctgaggctggcactgaatgcagcaggcttccacctgaacaaccagctg

SEQ ID NO: 646620 - DNA, 120 bp, Artificial Sequence
  ENSG00000182472_19 (sequence is synthesized)
acccagaccctcaccagccgctaccgggatagccgtctgcgtgtggacttcgagcggttcgtgtcctgtgtggcccacctcacctgcatcttctgccactgcagccagcacctggatggg

SEQ ID NO: 646621 - DNA, 120 bp, Artificial Sequence
  ENSG00000182472_20 (sequence is synthesized)
ggtgagggggtcatctgcctgacccacagacagtggatggaggtggccaccttctcctaggatctccggatgggcgcacctgctgctcagggcagggttgctgagcaagaccacctccct

SEQ ID NO: 646622 - DNA, 120 bp, Artificial Sequence
  ENSG00000182472_21 (sequence is synthesized)
aggccttgcctggcatgggtgccactctctctggcatccacctgtctggggctagtctctggccctcactgctcacggccgggtgaccactctggcctgcgtactcctcactcagaaaca

SEQ ID NO: 646623 - DNA, 120 bp, Artificial Sequence
  ENSG00000182472_22 (sequence is synthesized)
agaacagcgacagcccttctcgagcagatgacacgagctagtccacgttgacagcttaagacagtgctagctctgccctggctctcctagaaggtggaggacagacacaggagaaataaa

SEQ ID NO: 646624 - DNA, 120 bp, Artificial Sequence
  ENSG00000182472_23 (sequence is synthesized)
aaaagatgatgctgcaggaatccttcttaaaaatattacatgttttattatcctgtccccagagggtggtttatccagaaaccaagaaaaaaaatcaatcagaataaactcaaaaaaaaa

SEQ ID NO: 646625 - DNA, 120 bp, Artificial Sequence
  ENSG00000182472_24 (sequence is synthesized)
aggtagggggagcaaaaccatcaaccaccaggcagccaggccatcagcccacctccacctctggagggtccccagagacccacgcccgacgcagacccggaggagcatcagcaaggggcc

SEQ ID NO: 646626 - DNA, 120 bp, Artificial Sequence
  ENSG00000182472_25 (sequence is synthesized)
cgggcagagaatcggctatgtcttcattatgagagcaggagagacggcagagatatgttgctaggtgaatatatatttatataataaatccgtaagttaataaagtaaatagtaattctc

SEQ ID NO: 646627 - DNA, 120 bp, Artificial Sequence
  ENSG00000182472_26 (sequence is synthesized)
attgctgcctggaccaaggcggatgcaggaagctggggtggttcctggcctggcctgaatctgattctggtgtctggtggggacgccaggttcgccgcggggcccaggtaactgctggtt

SEQ ID NO: 646628 - DNA, 120 bp, Artificial Sequence
  ENSG00000182472_27 (sequence is synthesized)
gcgaggatgagcccagggctccacggtccctacctagaccccacgcgattcctcacctgagaccccgtcccacacagccccagctggggcaaacagccccctccccacttcccatctgta

SEQ ID NO: 646629 - DNA, 120 bp, Artificial Sequence
  ENSG00000182472_28 (sequence is synthesized)
cccttcccccaccccagcatctcaggtgtctcattttgcttgctttttcctccctccgggcttaaatctcctgaccttttcttgaaatgctcacagctcctccctgcctcagggccttgg

SEQ ID NO: 646630 - DNA, 120 bp, Artificial Sequence
  ENSG00000182472_29 (sequence is synthesized)
gctcagtccataccctctcccaggaccaccctctccctcctgacacctccagccaggctcaggtctcatctaaggtgcccagccctggaagctctccctgaccacccccctgccccaggc

SEQ ID NO: 646631 - DNA, 120 bp, Artificial Sequence
  ENSG00000182472_30 (sequence is synthesized)
cggtctgctggccccccaccagcaaccacagcccagtgcttcccccgtcacagccctggccctgtggggacaggtctgtctcccccactcctggagctagggctctgaggctctgtcagc

SEQ ID NO: 646632 - DNA, 120 bp, Artificial Sequence
  ENSG00000182472_31 (sequence is synthesized)
ccctgccgtgtccctagcacagggcttggcccagagcagctggatgagtaaatggcctcacaagccctctttcctggactaggaggaagaactcaatgcctctcagctccaggccttact

SEQ ID NO: 646633 - DNA, 120 bp, Artificial Sequence
  ENSG00000182472_32 (sequence is synthesized)
gagttgggctcaggaagccagggctcagcctggcagcatctccctgcaggggatcttgtgtgggccccgtgacctgggccacggctgctcgcaagctccccttccgctgaaaggcaaggc

SEQ ID NO: 646634 - DNA, 120 bp, Artificial Sequence
  ENSG00000182472_33 (sequence is synthesized)
tgccttgagcacagactgggcaccccctgcctggatttgaatcccagctctgctaggcgcagcagtcactggctccctgtgcctcggcttctataatatgggactgacaacatcacctgc

SEQ ID NO: 646635 - DNA, 120 bp, Artificial Sequence
  ENSG00000182472_34 (sequence is synthesized)
gggtacatggggggcagtgcctgggtgagggagggagtggggaaggggacgttggggtctctcctccccttctggagagattgaccttaaccagatgcccccgacccccaacacagcatg

SEQ ID NO: 646636 - DNA, 120 bp, Artificial Sequence
  ENSG00000182472_35 (sequence is synthesized)
ggcaaagcctggccttacaccacttccagcagctctggggctacctcctggagtggcaggtgaggtgggagactgggcctcttcccagaaagagagaaacctttactaacagagacatag

SEQ ID NO: 646637 - DNA, 120 bp, Artificial Sequence
  ENSG00000182472_36 (sequence is synthesized)
gcaccctgtgggctatcaggtccccagggaacgagggggtactggactaggctgacttggagagatctggctgggatatccctgcccccacccagcctcagcttgtcctctgggtcattg

SEQ ID NO: 646638 - DNA, 120 bp, Artificial Sequence
  ENSG00000182472_37 (sequence is synthesized)
ctcttattcccattttacagattgggaaacagaagtcccaagtggctaggctgcttgctgggggtccacaccagaagaaagggagttgggatgggcaccaggctgtcttgcctgggaggc

SEQ ID NO: 646639 - DNA, 120 bp, Artificial Sequence
  ENSG00000182472_38 (sequence is synthesized)
tggcactgaatgcagcaggtgtggacagggtcctggggtggtcgtggggacaggacctgttctctcccatcccattgtctccaagtccccctgctcagctgtggccgtctgcactgtggc

SEQ ID NO: 646640 - DNA, 120 bp, Artificial Sequence
  ENSG00000182472_39 (sequence is synthesized)
catccacaggcccacaccttagcttgttgccagtccctggcaggggttgggtgaccctgaaagaggccaaataaggaaggagaagggcaaggggcgtgtgtggggtggggaggacatgaa

SEQ ID NO: 646641 - DNA, 120 bp, Artificial Sequence
  ENSG00000182472_40 (sequence is synthesized)
agggggatgtgcctggtaggggttctggggcagggagaggcccctccaggaaggggaagattaggagctggtatctgagagggtctggcccccagggcagcatggtagaatgttctggat

SEQ ID NO: 646642 - DNA, 120 bp, Artificial Sequence
  ENSG00000182472_41 (sequence is synthesized)
tctggtgcaccggggttggaatcctcactctactgactccaggaggggccctgggcacttgacttcatctctttgagcctccattttcctctctaaaatggccagggcctggtgtggtgg

SEQ ID NO: 646643 - DNA, 87 bp, Artificial Sequence
  ENSG00000182472_42 (sequence is synthesized)
ctcacttgaggatggcttgagcccgggaggctgaggctgcagtgagccgtgattgtgcctgggtgacagagcaagagcctgcctctc

SEQ ID NO: 646644 - DNA, 120 bp, Artificial Sequence
  ENSG00000182472_43 (sequence is synthesized)
gaagaggatcggggaggaggggaggagtggaggagcagggccaagagggggcggcgctgggaggggagtagggggctagtagggctggggggccaggtctcagaggggagagggagctaa

SEQ ID NO: 646645 - DNA, 120 bp, Artificial Sequence
  ENSG00000182472_44 (sequence is synthesized)
gggaatgagagggaggggctcagggacagacagagggacgaggttagggacagagagaggctgggggttagaagggccagaggggaccaaggatacagagaaggcgctgggagcgcagat

SEQ ID NO: 646646 - DNA, 120 bp, Artificial Sequence
  ENSG00000182472_45 (sequence is synthesized)
ggggaaggaagagttggggaggggtcggcgagggcctgggtcggggactgcggggcaaaggttcaataagggtctaataggacgaagaaggagggagagagcacagaggtgagaaggggc

SEQ ID NO: 646647 - DNA, 120 bp, Artificial Sequence
  ENSG00000182472_46 (sequence is synthesized)
acctgcccctggagctggggttggagcagctgtttcaggagctggctggagaggaggaagaactcaatgcctctcagctccaggccttactaagcattgccctggagcctggcttccacc

SEQ ID NO: 646648 - DNA, 120 bp, Artificial Sequence
  ENSG00000182473_0 (sequence is synthesized)
gcgatgattcccccacaggaggcatccgctcgacggcgggagattgaggacaagctgaagcaggaggaggagactctgtccttcatccgagacagcctggagaagagcgaccagctcact

SEQ ID NO: 646649 - DNA, 120 bp, Artificial Sequence
  ENSG00000182473_1 (sequence is synthesized)
aagaacatggtgtctatcttatcatcctttgagagccgccttatgaagctggagaactccatcatccctgtgcacaagcagacggagaatctgcagcggctgcaggagaatgttgagaag

SEQ ID NO: 646650 - DNA, 120 bp, Artificial Sequence
  ENSG00000182473_2 (sequence is synthesized)
acgctgtcctgcctggaccatgtcatcagctactaccatgtggccagtgacactgagaagatcatcagagagggccccacaggtaggctggaagagtacctgggaagcatggccaagatt

SEQ ID NO: 646651 - DNA, 120 bp, Artificial Sequence
  ENSG00000182473_3 (sequence is synthesized)
cagaaggcagtggagtatttccaggacaacagcccagacagcccggaactcaacaaagtgaaactgctctttgagcgcgggaaggaggccctggagtccgaatttcgcagcctgatgacg

SEQ ID NO: 646652 - DNA, 120 bp, Artificial Sequence
  ENSG00000182473_4 (sequence is synthesized)
cggcacagtaaggtcgtctcgcccgtgctcatcttggatctgatcagtggtgacgatgatctggaggcccaggaggacgtgaccctggagcacctgcccgagagcgtgctccaggatgtc

SEQ ID NO: 646653 - DNA, 120 bp, Artificial Sequence
  ENSG00000182473_5 (sequence is synthesized)
attcgcatctcccgctggctggtggaatatggccgcaaccaagatttcatgaacgtctactaccagatacgctccagccagctggaccgctccatcaaaggactgaaggagcatttccat

SEQ ID NO: 646654 - DNA, 120 bp, Artificial Sequence
  ENSG00000182473_6 (sequence is synthesized)
aagagcagttcttcctctggggttccctactcccctgctatccccaacaagaggaaagacacacctaccaagaagccagtcaagcggccagggagagatgacatgctggacgtggagacc

SEQ ID NO: 646655 - DNA, 120 bp, Artificial Sequence
  ENSG00000182473_7 (sequence is synthesized)
gatgcctacatccactgcgtcagtgccttcgtcaagctggcgcagagcgagtaccagctgctggccgacatcatccccgagcaccaccagaagaagaccttcgactccctgatacaggat

SEQ ID NO: 646656 - DNA, 120 bp, Artificial Sequence
  ENSG00000182473_8 (sequence is synthesized)
gccctggatgggctgatgcttgaaggggagaacatcgtgtctgctgcccggaaggccattgtgcgacacgacttctccacggtgctcaccgtcttccccatcctgcgacacctcaagcag

SEQ ID NO: 646657 - DNA, 120 bp, Artificial Sequence
  ENSG00000182473_9 (sequence is synthesized)
accaagcctgagtttgaccaggtgctccagggcacggctgccagcacaaagaacaagctgcctggcctcatcacatccatggagaccatcggtgccaaagcgctggaggacttcgcagac

SEQ ID NO: 646658 - DNA, 120 bp, Artificial Sequence
  ENSG00000182473_10 (sequence is synthesized)
aacatcaagaatgacccggacaaggagtacaacatgccgaaggacggcaccgtacacgagctcaccagcaatgccatcctcttcctgcagcagcttttggacttccaggagacggcaggc

SEQ ID NO: 646659 - DNA, 120 bp, Artificial Sequence
  ENSG00000182473_11 (sequence is synthesized)
gccatgctggcctcccaagagaccagctcttcggccaccagctacagctctgagttcagcaagcggctgctaagcacctatatctgtaaagtgctgggcaacctgcagttgaacttgctg

SEQ ID NO: 646660 - DNA, 120 bp, Artificial Sequence
  ENSG00000182473_12 (sequence is synthesized)
agcaagtccaaggtgtacgaggacccagctctgagcgccatcttcctgcacaacaactacaattacatcctcaagtccctggagaagtctgaactgatccagctggtggcagtgacacag

SEQ ID NO: 646661 - DNA, 120 bp, Artificial Sequence
  ENSG00000182473_13 (sequence is synthesized)
aagactgctgagcgctcctaccgggagcacattgagcagcagatccagacctaccagcgcagctggttaaaggtgactgattacatcgcagagaagaatctacctgtgttccagccggga

SEQ ID NO: 646662 - DNA, 120 bp, Artificial Sequence
  ENSG00000182473_14 (sequence is synthesized)
gtcaagctccgggacaaggagcggcagattatcaaggagcgttttaagggcttcaatgatggcctcgaagaactgtgcaaaatccagaaggcctgggctattccagacacagagcagagg

SEQ ID NO: 646663 - DNA, 120 bp, Artificial Sequence
  ENSG00000182473_15 (sequence is synthesized)
gacaggattcgccaggcccagaagaccattgtcaaggagacctacggggcctttctacagaagtttggcagcgtgcccttcaccaagaacccggagaagtacatcaagtacggggtggag

SEQ ID NO: 646664 - DNA, 120 bp, Artificial Sequence
  ENSG00000182473_16 (sequence is synthesized)
caggtgggcgacatgatcgatcgccttttcgacacctctgcctgagcctgctgctagccctgcctggttccaccagactggcgtgtcattggacagataaaccagtgttagcttgcctct

SEQ ID NO: 646665 - DNA, 120 bp, Artificial Sequence
  ENSG00000182473_17 (sequence is synthesized)
gggctgggtgagcttgaagtcctctgggacagagacctgtctccacgcctccgggagctgtgtccctgagccccctagtcctggctcctgctttttccccacagcccgtgttcccagccg

SEQ ID NO: 646666 - DNA, 120 bp, Artificial Sequence
  ENSG00000182473_18 (sequence is synthesized)
aaccagcactctcccggaagcctggggtccctccacaccttggcttttatgaccctgatggcttctgaaacaggaaaagagagaaggaagacagaggcctgtgcccactgctgctccatg

SEQ ID NO: 646667 - DNA, 120 bp, Artificial Sequence
  ENSG00000182473_19 (sequence is synthesized)
cagcctaggtcagaggtggggacagagaactcccctacagcccagagatgtggcagggctcagagaagcagccagagctcctggaggaaaggcagtcgggactgaccccctctcttaaaa

SEQ ID NO: 646668 - DNA, 120 bp, Artificial Sequence
  ENSG00000182473_20 (sequence is synthesized)
cacattcccgcccgcccacaggcctgaggtctgggacctttccctcccaggagtcccctaggtggctgggggaggcaggctcactggccattttccctagagtccagcacactgcaggag

SEQ ID NO: 646669 - DNA, 120 bp, Artificial Sequence
  ENSG00000182473_21 (sequence is synthesized)
gcgttcggaggaggagttccgccccaccctctacagccttcctcaggcccctgtctctggcccccagcctcagtgcctcttggcccagggccaggcagtcgtggttgcagaaggagcaat

SEQ ID NO: 646670 - DNA, 120 bp, Artificial Sequence
  ENSG00000182473_22 (sequence is synthesized)
taggctgcctgcctgtgggctgggagacagggacaatggggaaaagttaaggagcaaaatgggggttggaagcaaaaaatagggccccacctatttaggacgagattgaagactgaccct

SEQ ID NO: 646671 - DNA, 120 bp, Artificial Sequence
  ENSG00000182473_23 (sequence is synthesized)
tgaggcacacttgcactggagatgggtttatttcacgctctgtgcttgtgtgctagcggagggagagctcagggtggcttaatccagaggccctgtcatggcccgcccccagccatggga

SEQ ID NO: 646672 - DNA, 120 bp, Artificial Sequence
  ENSG00000182473_24 (sequence is synthesized)
aagcaaacttcatcctaaggtgtgcagcccaggccctgcccctttacagtctaggccgcctgccatggggtgcagcctctccaggggctgcgtcagacttgcacgctgcccacatccaga

SEQ ID NO: 646673 - DNA, 120 bp, Artificial Sequence
  ENSG00000182473_25 (sequence is synthesized)
ttcctgcaaagacgaattgggtgcacagcaccccaaccacatacacgaggaagaagatgcggtcagcagtctcaggccagcttctctgtgacccctttactcctctggagggctctgtgg

SEQ ID NO: 646674 - DNA, 120 bp, Artificial Sequence
  ENSG00000182473_26 (sequence is synthesized)
ggagagatacagggaaaggagctgttcttcaaggtcccctcaacatgagcggaagagcgaaccccaggggtcatcagcctgtatcgcttcctttcttagattctcagctgatgaaaattt

SEQ ID NO: 646675 - DNA, 120 bp, Artificial Sequence
  ENSG00000182473_27 (sequence is synthesized)
gggtctggcccatttcaggccatcttcagttgaagaaacaccctcttaggctgtgcaaggcatgggttatcaggggattgaggtcacctgggacttcagggaggctcagcttgctccctg

SEQ ID NO: 646676 - DNA, 120 bp, Artificial Sequence
  ENSG00000182473_28 (sequence is synthesized)
ccccagacctgtttcttctaagggaggaggacatggtggagaccagggacaggagagccagcagggtggatgcaaggggcctctacccacacctggacctccgtgccctcaccccagccc

SEQ ID NO: 646677 - DNA, 120 bp, Artificial Sequence
  ENSG00000182473_29 (sequence is synthesized)
taggtgtgcacctaggcctcattccttaccccccagcccctgcccaccttcagcaggatgaggccctgggttgccgtgctctcgctgttcccctctcggggctgggctggggccgctctt

SEQ ID NO: 646678 - DNA, 120 bp, Artificial Sequence
  ENSG00000182473_30 (sequence is synthesized)
ggccccaaggttgccccgggccagcagcccagccagcagcacagtctctatggtgctgaggaagagcagcagcagcaggatggtgaagtagtaaactgggggaggcagggcacagggaga

SEQ ID NO: 646679 - DNA, 120 bp, Artificial Sequence
  ENSG00000182473_31 (sequence is synthesized)
tgctcaggggccagtccctgtgtctctggtgcccagcgagctgagcaccagtgggtgaccggggagaaacagggcagactgggtaagggagcagggcttactgagcagtgggttgcagga

SEQ ID NO: 646680 - DNA, 120 bp, Artificial Sequence
  ENSG00000182473_32 (sequence is synthesized)
ggaggagctgggcagggcctgcaccagggaggagtggaggacgaggtaactcagcagcaatgtcaccttgtagcctatgcgctcaatggcccggaggggcagcaaccccccgcacacgtc

SEQ ID NO: 646681 - DNA, 120 bp, Artificial Sequence
  ENSG00000182473_33 (sequence is synthesized)
agccaacagcagtgcctctgcaggcaccaagagagcgatgatggacttgagcgccgtgttcttcagcctcagctggaaggggaaaagtcagggccttcccggcgggggggaaggaggtgg

SEQ ID NO: 646682 - DNA, 120 bp, Artificial Sequence
  ENSG00000182473_34 (sequence is synthesized)
gcatcgggggcatggggcctggcctctggccgtgcatcctcactcccacccgcctccagcagccctctgtcggcctcctcccgacttgactcaccgtcacctggaagcagggcaccagct

SEQ ID NO: 646683 - DNA, 120 bp, Artificial Sequence
  ENSG00000182473_35 (sequence is synthesized)
gctggggtgggacttgggtcttcagatcataaactacgtattccctcttgacactcacaatctcgttcaccacgtgggcctggaactctaactccatcgctgaggggtgggaatgagaac

SEQ ID NO: 646684 - DNA, 120 bp, Artificial Sequence
  ENSG00000182473_36 (sequence is synthesized)
tatgaaccaggaaggagagatcccagctgccaagtctgggggtagcagactggagcccaggggtgatggagacttttgatggcttttggcagggacagacttggacacaaaaccgatcca

SEQ ID NO: 646685 - DNA, 120 bp, Artificial Sequence
  ENSG00000182473_37 (sequence is synthesized)
tagaagggcttcccaaaccttgttttgcaacatcccaaattgtctccagttgaaggaaggcctttatcagattcatagatgagctttcattgtaaaaataaatgtactttgcaccacttc

SEQ ID NO: 646686 - DNA, 120 bp, Artificial Sequence
  ENSG00000182473_38 (sequence is synthesized)
cagtattcccagcatggtctagatgggaaaaaggggggctctaacctcattcctctggaaggtcacgagcatgatttccgagttaagcacctgtccgaggccttgaacgacaagcacggg

SEQ ID NO: 646687 - DNA, 120 bp, Artificial Sequence
  ENSG00000182473_39 (sequence is synthesized)
cttccctgtaccccaaggggcggcctgcctggcccctggataaacgctgcttgtgtttgtgcggccgacatctcgccaggtcacgagcatgatttccgagttaagcacctgtccgaggcc

SEQ ID NO: 646688 - DNA, 120 bp, Artificial Sequence
  ENSG00000182473_40 (sequence is synthesized)
gcacattgagcagcagatccagacctaccagcgcaggtgagaggctgggcccgccctgctcctgcatgggcccctgtgccaccacgcactcttccttctcagcacctcaggacacagagt

SEQ ID NO: 646689 - DNA, 120 bp, Artificial Sequence
  ENSG00000182473_41 (sequence is synthesized)
cggtcacggggaactcctgtcctctggaccctaatcctccacttggtttctaatcaaactcacggggtggagagagaagccccctcctctaccactacctgctcctaggggcccactatg

SEQ ID NO: 646690 - DNA, 120 bp, Artificial Sequence
  ENSG00000182473_42 (sequence is synthesized)
ttagatgttccagaagccctgactgggctggtcacttccttcacaggccccgcatttgcccacatggatgaccccagtgccagcctccttgaggtggcacagccacctgcccaccctggg

SEQ ID NO: 646691 - DNA, 120 bp, Artificial Sequence
  ENSG00000182473_43 (sequence is synthesized)
ctgccctctttcaggtacaactcagaatgctcagtcctggggtcaaaccaccttatccaggacgctgattcaggaatcttccctccttatctttccatccgtcactctcctgcctctggt

SEQ ID NO: 646692 - DNA, 120 bp, Artificial Sequence
  ENSG00000182473_44 (sequence is synthesized)
gtctgatcccactgtctgcgcagagccgagaatgaagccagaacaaaggctgggctcagctccttttattcccctcgaacctggcggggcctgctggctcccttgcagctttctgccaga

SEQ ID NO: 646693 - DNA, 120 bp, Artificial Sequence
  ENSG00000182473_45 (sequence is synthesized)
acagtcagcctcttccccatcctctgccagtgtggggtacaggccaggagctgggggacccacgccgcccccagccaggagtgtggctggccccagaccagcagctcaagagttgtgcca

SEQ ID NO: 646694 - DNA, 120 bp, Artificial Sequence
  ENSG00000182473_46 (sequence is synthesized)
agcaggcctccaagagggtgcgttgtcccggggcagccagctgcgccactggcctgtcagcacccatgtgccttcctttccttcctggggcctccaagccctctgaagtgggaagggcct

SEQ ID NO: 646695 - DNA, 120 bp, Artificial Sequence
  ENSG00000182473_47 (sequence is synthesized)
ctgcttcagggaaccagaggctgtttttccacagaatgacccggacaaggagtacaacatgccgaaggacggcaccgtacacgagctcaccagcaatgtgggtgctgcctgaggacacca

SEQ ID NO: 646696 - DNA, 120 bp, Artificial Sequence
  ENSG00000182473_48 (sequence is synthesized)
gggagaggggaggaaggagggcccaggcccaggcccagggccaggcagagtactggtggaagggactcagcctggcccagagccgctcgcacctttgtgagcagtcctgggtggcaggat

SEQ ID NO: 646697 - DNA, 120 bp, Artificial Sequence
  ENSG00000182473_49 (sequence is synthesized)
ggacagtgacatgtttagtgtctctagcagacagggcctttcctggcaggctagagtgaaaatgaagtttccagccgcgctcttcactgggcggatcccagccctgggctggccctgggc

SEQ ID NO: 646698 - DNA, 120 bp, Artificial Sequence
  ENSG00000182473_50 (sequence is synthesized)
actcagaggggtcgctgtgggaggccgtcggccgggcctgccacttgcccttctgcaccgttttcttcccacccaggccatcctcttcctgcagcagcttttggacttccaggagacggc

SEQ ID NO: 646699 - DNA, 120 bp, Artificial Sequence
  ENSG00000182473_51 (sequence is synthesized)
gaggagatggggttgggggctaggccgtggggttgggacgcagtggtctcctttagcttctggtttctggtgatgtcctccccttgcctgcccccaggaggaggagactctgtccttcat

SEQ ID NO: 646700 - DNA, 120 bp, Artificial Sequence
  ENSG00000182473_52 (sequence is synthesized)
gcccgggctcgcctcacctccccgcctgcttaagccctcccggagcgctcggggttcgacccccgagcacggcgggaggagggcgcccccctgcggcacagccacgtccacgaagcccct

SEQ ID NO: 646701 - DNA, 120 bp, Artificial Sequence
  ENSG00000182473_53 (sequence is synthesized)
cccggggttctagaaagcggaggcctccgaaggaaagaccaagatgcagagagatgtctaaaaggtgccagaaggtgactatccagccctggtatcactgcctggtgatttcgtttcttt

SEQ ID NO: 646702 - DNA, 120 bp, Artificial Sequence
  ENSG00000182473_54 (sequence is synthesized)
gatcttcacgaatggcctcactggctgtgatttggacagaaatcagctgccacgtgcaacattctcccatgggaacatgtgtccgcagtacctatctcagagcccaaatccttcctgccc

SEQ ID NO: 646703 - DNA, 120 bp, Artificial Sequence
  ENSG00000182473_55 (sequence is synthesized)
agcaacagtttggcatctctcctgcctagccccctccccatgttccgtaccctcactgaggaggctgcacttcccactggcctggacttgctgctttctgtctaagctcgccattcttcc

SEQ ID NO: 646704 - DNA, 120 bp, Artificial Sequence
  ENSG00000182473_56 (sequence is synthesized)
aagccagtcaagcggccaggtgagcccccatcctggcccatctctgcaacagccagaggctgactgggactgtactgctttagtccaatctagcgttcgcagcgtcaggcccctccagag

SEQ ID NO: 646705 - DNA, 120 bp, Artificial Sequence
  ENSG00000182473_57 (sequence is synthesized)
cttgtcgtcgtggtaaccccgactgtaggtacacaggacagaaagcaagtgtctacccacccagtgaagccccccaagagcaagactcttccttccagctagcagagcctggggttacac

SEQ ID NO: 646706 - DNA, 120 bp, Artificial Sequence
  ENSG00000182473_58 (sequence is synthesized)
agcttctttggagtaggggagtaacacaggtgctcagcgaatcccgcctgaggcagagcccctgcctaggcctcctccctcacacacacgtcgccctgtcagaaggccaggcacactact

SEQ ID NO: 646707 - DNA, 120 bp, Artificial Sequence
  ENSG00000182473_59 (sequence is synthesized)
gcagccaggatgctgggatagcaaggggataggtgctccaaccttcaccttccagaaaggcagggtgatctgaagtgacgtgtagctgagagctggatggggagaatttcactttcccag

SEQ ID NO: 646708 - DNA, 120 bp, Artificial Sequence
  ENSG00000182473_60 (sequence is synthesized)
ttgatccagaaaggaaagaaaccccagagcatcctctcggaagaacttaaactggctttgggctccagtgcgagcgagtgacttgtggaaaggggcaccatgatgagaggccggggccgg

SEQ ID NO: 646709 - DNA, 120 bp, Artificial Sequence
  ENSG00000182473_61 (sequence is synthesized)
ctccaggtaaacagtgtctctgccagccacagcttggcaagcccggctatgtctggccactgagagatgctgcccgcagctcgatgatgtgctgggatgttctggggtggggctgctgag

SEQ ID NO: 646710 - DNA, 120 bp, Artificial Sequence
  ENSG00000182473_62 (sequence is synthesized)
attgcactgaaaaagaaagctggagaagccggggctgctcccacccaggctggccccctgtccagctgctgctgtgggcacatgccctagttgtggcctgtggcacctgcttatgacaac

SEQ ID NO: 646711 - DNA, 120 bp, Artificial Sequence
  ENSG00000182473_63 (sequence is synthesized)
aagctttgggtagagcttacttacacccttggtttctccagtccctgcctgctcatgcccctcagagagtgaggtgtctgttccacaagagcacccgctcccctgcaggcctttgtttag

SEQ ID NO: 646712 - DNA, 120 bp, Artificial Sequence
  ENSG00000182473_64 (sequence is synthesized)
ggtttggagaaacaggcagagcaggggctgccctcagggagtagagcattagggagctggtgcctggggccttctccctccagtgtggaaatcctgcccaccagccaaaacctgctgcaa

SEQ ID NO: 646713 - DNA, 120 bp, Artificial Sequence
  ENSG00000182473_65 (sequence is synthesized)
atggggactgccagcccagcctgtgggcgcagctgcctgcacagtggatggagcagctctgtgccttctgtgtggtggggagtggctgtctctatgaggctgctaggatgcttgggcccc

SEQ ID NO: 646714 - DNA, 120 bp, Artificial Sequence
  ENSG00000182473_66 (sequence is synthesized)
agccagtctgtgcttgcttcctcttctgcctggctccctgacaggtcccccagaagccccagagccctatttgcactgccttaagagtgcccgctggccatgcagctacctggcctttca

SEQ ID NO: 646715 - DNA, 120 bp, Artificial Sequence
  ENSG00000182473_67 (sequence is synthesized)
ggcaggagggatctgatctcaggtggctcacagtggaccacatccatccttgggccagagacactagaggaaaactccagctgtggggtttcagagttgtcaggaactggtgggctcagg

SEQ ID NO: 646716 - DNA, 120 bp, Artificial Sequence
  ENSG00000182473_68 (sequence is synthesized)
accgatgtcaggctctagggagtcaggctctggggatgtcggttcccacttctgaggagagggacagggaggcctcccaggtggtgaagcaccgacctcagcatccctggaggcaattgg

SEQ ID NO: 646717 - DNA, 120 bp, Artificial Sequence
  ENSG00000182473_69 (sequence is synthesized)
gagcctgacgggtttggcggctgctagatccacatcggcgacccacatcctgccggcgtgcacctgcgtctgtgtctgctcctggtgggttgtggggcaggaatcagattcactcattag

SEQ ID NO: 646718 - DNA, 120 bp, Artificial Sequence
  ENSG00000182473_70 (sequence is synthesized)
ctcattagtaagccgcactcgctgaaggggagagcatgagcaagggagacgtgagccaggccttggttattaggagctaattatgggccaagtatggtggctcacgcctgtaatcctagc

SEQ ID NO: 646719 - DNA, 120 bp, Artificial Sequence
  ENSG00000182473_71 (sequence is synthesized)
gttgtttgcttagttgtgacccacatcccttcctaccaccacccaccaagtagatccagagatttagcaaacgaaacaagccaggccactgaggcaggccaccctctgccctcatgcttc

SEQ ID NO: 646720 - DNA, 120 bp, Artificial Sequence
  ENSG00000182473_72 (sequence is synthesized)
tctttctgtctggcagctggttaaaggtgactgattacatcgcagagaagaatctacctgtgttccagccgggagtcaaggtgggctcaagacctgggctgggaaggggtgtctggcaga

SEQ ID NO: 646721 - DNA, 120 bp, Artificial Sequence
  ENSG00000182473_73 (sequence is synthesized)
cgggatactttttgtcgtgtctctgggaaaaagtggacaagcatccctctgggatcagagagcaaaggatgcatgtggccatcaggacacaggagacaggcccagaccaagggtgtttgg

SEQ ID NO: 646722 - DNA, 120 bp, Artificial Sequence
  ENSG00000182473_74 (sequence is synthesized)
aaggtactggtacctcccagttgggccccctgccccactcgcctccttgcctggagacatggggttagagggcaggtagcagtgaggaggtatctccagtctgtggaggggttgaggtgt

SEQ ID NO: 646723 - DNA, 120 bp, Artificial Sequence
  ENSG00000182473_75 (sequence is synthesized)
ggctgagcatcaggagagcaaggtttgcctgcacctttcaagaccagacactggacctctggcccctccctcagcccctttgaccgtcctcgccctggaagcagtgtcctcactctggga

SEQ ID NO: 646724 - DNA, 120 bp, Artificial Sequence
  ENSG00000182473_76 (sequence is synthesized)
gcggtgctggttggttggaaggtgtcctttctgcccctgcccccctcccaaatccttctctcgtgtctgcctgctctcctaatcaggctcgctcagctggccttcagagggtagcaagtg

SEQ ID NO: 646725 - DNA, 120 bp, Artificial Sequence
  ENSG00000182473_77 (sequence is synthesized)
acgtgagaagcttggggatatcagtctctgccctggtctcatgagggacatggagccagcttgaggatgtatgcagtagaatacacagaaggatatagcacagtacatcctataggcatt

SEQ ID NO: 646726 - DNA, 120 bp, Artificial Sequence
  ENSG00000182473_78 (sequence is synthesized)
agcacagtacatcctataggcattaggatctctgcttcaagaattgcacattttttattattaaaaattctttattataaaacttgttaatgtattataaaaattaaattataaattaca

SEQ ID NO: 646727 - DNA, 120 bp, Artificial Sequence
  ENSG00000182481_0 (sequence is synthesized)
acacggtctttgagctgagtcgaggtggaccctttgaacgcagtcgccctacagccgctgattccccccgcatcgcctcccgtggaagcccaggcccgcttcgcagctttctccctttgt

SEQ ID NO: 646728 - DNA, 120 bp, Artificial Sequence
  ENSG00000182481_1 (sequence is synthesized)
ctcataaccatgtccaccaacgagaatgctaatacaccagctgcccgtcttcacagattcaagaacaagggaaaagacagtacagaaatgaggcgtcgcagaatagaggtcaatgtggag

SEQ ID NO: 646729 - DNA, 120 bp, Artificial Sequence
  ENSG00000182481_2 (sequence is synthesized)
ctgaggaaagctaagaaggatgaccagatgctgaagaggagaaatgtaagctcatttcctgatgatgctacttctccgctgcaggaaaaccgcaacaaccagggcactgtaaattggtct

SEQ ID NO: 646730 - DNA, 120 bp, Artificial Sequence
  ENSG00000182481_3 (sequence is synthesized)
gttgatgacattgtcaaaggcataaatagcagcaatgtggaaaatcagctccaagctactcaagctgccaggaaactactttccagagaaaaacagccccccatagacaacataatccgg

SEQ ID NO: 646731 - DNA, 120 bp, Artificial Sequence
  ENSG00000182481_4 (sequence is synthesized)
gctggtttgattccgaaatttgtgtccttcttgggcagaactgattgtagtcccattcagtttgaatctgcttgggcactcactaacattgcttctgggacatcagaacaaaccaaggct

SEQ ID NO: 646732 - DNA, 120 bp, Artificial Sequence
  ENSG00000182481_5 (sequence is synthesized)
gtggtagatggaggtgccatcccagcattcatttctctgttggcatctccccatgctcacatcagtgaacaagctgtctgggctctaggaaacattgcaggtgatggctcagtgttccga

SEQ ID NO: 646733 - DNA, 120 bp, Artificial Sequence
  ENSG00000182481_6 (sequence is synthesized)
gacttggttattaagtacggtgcagttgacccactgttggctctccttgcagttcctgatatgtcatctttagcatgtggctacttacgtaatcttacctggacactttctaatctttgc

SEQ ID NO: 646734 - DNA, 120 bp, Artificial Sequence
  ENSG00000182481_7 (sequence is synthesized)
cgcaacaagaatcctgcacccccgatagatgctgttgagcagattcttcctaccttagttcggctcctgcatcatgatgatccagaagtattagcagatacctgctgggctatttcctac

SEQ ID NO: 646735 - DNA, 120 bp, Artificial Sequence
  ENSG00000182481_8 (sequence is synthesized)
caacttgtgaagcttctaggagcttctgaattgccaattgtgactcctgccctaagagccatagggaatattgtcactggtacagatgaacagactcaggttgtgattgatgcaggagca

SEQ ID NO: 646736 - DNA, 120 bp, Artificial Sequence
  ENSG00000182481_9 (sequence is synthesized)
ctcgccgtctttcccagcctgctcaccaaccccaaaactaacattcagaaggaagctacgtggacaatgtcaaacatcacagccggccgccaggaccagatacagcaagttgtgaatcat

SEQ ID NO: 646737 - DNA, 120 bp, Artificial Sequence
  ENSG00000182481_10 (sequence is synthesized)
ggattagtcccattccttgtcagtgttctctctaaggcagattttaagacacaaaaggaagctgtgtgggccgtgaccaactataccagtggtggaacagttgaacagattgtgtacctt

SEQ ID NO: 646738 - DNA, 120 bp, Artificial Sequence
  ENSG00000182481_11 (sequence is synthesized)
gttcactgtggcataatagaaccgttgatgaacctcttaactgcaaaagataccaagattattctggttatcctggatgccatttcaaatatctttcaggctgctgagaaactaggtgaa

SEQ ID NO: 646739 - DNA, 120 bp, Artificial Sequence
  ENSG00000182481_12 (sequence is synthesized)
actgagaaacttagtataatgattgaagaatgtggaggcttagacaaaattgaagctctacaaaaccatgaaaatgagtctgtgtataaggcttcgttaagcttaattgagaagtatttc

SEQ ID NO: 646740 - DNA, 120 bp, Artificial Sequence
  ENSG00000182481_13 (sequence is synthesized)
tctgtagaggaagaggaagatcaaaacgttgtaccagaaactacctctgaaggctacactttccaagttcaggatggggctcctgggacctttaacttttagatcatgtagctgagacat

SEQ ID NO: 646741 - DNA, 120 bp, Artificial Sequence
  ENSG00000182481_14 (sequence is synthesized)
aaatttgttgtgtactacgtttggtattttgtcttattgtttctctactaagaactctttcttaaatgtggtttgttactgtagcactttttacactgaaactatacttgaacagttcca

SEQ ID NO: 646742 - DNA, 120 bp, Artificial Sequence
  ENSG00000182481_15 (sequence is synthesized)
actgtacatacatactgtatgaagcttgtcctctgactaggtttctaatttctatgtggaatttcctatcttgcagcatcctgtaaataaacattcaagtccacccttttcttgacttca

SEQ ID NO: 646743 - DNA, 120 bp, Artificial Sequence
  ENSG00000182481_16 (sequence is synthesized)
gttgactaggcctcgggggcgacgttcattgaccaggcggctgagtttcgcggggtctgcgggtttagggcgccgacgctctgcaaacggcagcggaggccttaacgcgtcgcggccggg

SEQ ID NO: 646744 - DNA, 120 bp, Artificial Sequence
  ENSG00000182481_17 (sequence is synthesized)
agaatcggagcgagccaggcttgagggcgaatgtcccgggaggacttgtggcggccctggtttcgcctcctcctttctcgttgcatcttccccggcgtgggggcaggggctgggggtggc

SEQ ID NO: 646745 - DNA, 120 bp, Artificial Sequence
  ENSG00000182481_18 (sequence is synthesized)
agttgggagcaccgtctctgacacctaggccccgggggtggctctgccaccaagtcgtaggcgagcgtaatgaaagcaaagatagcaaattgtaaggagggctttgacttttgtcatctt

SEQ ID NO: 646746 - DNA, 120 bp, Artificial Sequence
  ENSG00000182481_19 (sequence is synthesized)
ctgaatgacgcacagctgatgtcatcctaattaagcgcattcactcctagtctctggaaatgcaaatcaaatatgcgagatgcggcactgcatttttaatgttgaccataatgtaatgat

SEQ ID NO: 646747 - DNA, 120 bp, Artificial Sequence
  ENSG00000182481_20 (sequence is synthesized)
gaagcaaatttttatttaattttcgagtctgcacctattttggccaagtaaagacagtaaaatagggagagcctcctgaggatctgaatttattgccctggcacataatttttagctctt

SEQ ID NO: 646748 - DNA, 120 bp, Artificial Sequence
  ENSG00000182481_21 (sequence is synthesized)
gaactggaatgtagtgttgttttaaaagttgcccgcatgattttgatacatagaaaaggttgggagctactactgattgtaagatctttggctccagttgaagtagtgctaaaagcaggc

SEQ ID NO: 646749 - DNA, 120 bp, Artificial Sequence
  ENSG00000182481_22 (sequence is synthesized)
cctctagtatacaggtgtggattcagtagatgcttgataattcagttcttatttggtactattattgacaaaggaaaatgataaaggaaatatttttctcttcccccatcttttagcttt

SEQ ID NO: 646750 - DNA, 120 bp, Artificial Sequence
  ENSG00000182481_23 (sequence is synthesized)
ctcagtgttccgagacttggttattaagtacggtgcagttgacccactgttggctctccttgcagttcctgatatgtcatctttagcagtaagttactaacatgagtaaagttactcact

SEQ ID NO: 646751 - DNA, 120 bp, Artificial Sequence
  ENSG00000182481_24 (sequence is synthesized)
acacggtctttgagctgagtcgaggtggaccctttgaacgcagtcgccctacagccgctgattccccccgcatcgcctcccgtggaagcccaggcccgcttcgcaggaaatatttttctc

SEQ ID NO: 646752 - DNA, 120 bp, Artificial Sequence
  ENSG00000182489_0 (sequence is synthesized)
caaaggtcctgagagcgcgcaggtgagcgggccagctgatagctacagcctagcaatagctaggatacctaggcactgaactgaatcccctcttctgccctccttcttctgcgcccgctc

SEQ ID NO: 646753 - DNA, 120 bp, Artificial Sequence
  ENSG00000182489_1 (sequence is synthesized)
ttctgccctggctcagctctccgctgacttgagaggacacactggtcaggactctttgtgaggagctgctgagtgtcggtgcccccgacagatcggctacaccctgcctgaggggctgcg

SEQ ID NO: 646754 - DNA, 120 bp, Artificial Sequence
  ENSG00000182489_2 (sequence is synthesized)
aaaggagccgccacggaagccgctgttctcatgactcttcacgtccctggagttggactctggatggggcgctgggatgcttgcttttgtcttgttcaagtttcacagcaagtatgttga

SEQ ID NO: 646755 - DNA, 120 bp, Artificial Sequence
  ENSG00000182489_3 (sequence is synthesized)
cgattggaatcggggccaatcaagagtcaagttcaaagtggtactcctgggctttccatcccagactccaagtcgaatctgagtctagaagagagcggtttcttgctctaactagtgaat

SEQ ID NO: 646756 - DNA, 120 bp, Artificial Sequence
  ENSG00000182489_4 (sequence is synthesized)
ctctgttcccaaactggacttgacagagctctcctcacctatacttggactgtagcggccatagggttctcttggggatgggtgggagggtgctatgaacacaagaccacaacattcaga

SEQ ID NO: 646757 - DNA, 120 bp, Artificial Sequence
  ENSG00000182489_5 (sequence is synthesized)
aagaacctcgacaatggacagagtttatgaaattcctgaggagccaaatgtggatccggtttcatctctggaggaagatgtcatccgtggagccaacccccgatttacttttccatttag

SEQ ID NO: 646758 - DNA, 120 bp, Artificial Sequence
  ENSG00000182489_6 (sequence is synthesized)
catccttttctccacctttttgtactgtggggaggctgcatctgctttgtacatggttagaatctatcgaaagaatagtgaaacttactggatgacatacaccttttctttctttatgtt

SEQ ID NO: 646759 - DNA, 120 bp, Artificial Sequence
  ENSG00000182489_7 (sequence is synthesized)
ttcatccattatggtccagttgaccctcatttttgtccacagagatctagccaaagataaaccgctatcattatttatgcatctaatcctcttgggacctgttatcagatgtttggaggc

SEQ ID NO: 646760 - DNA, 120 bp, Artificial Sequence
  ENSG00000182489_8 (sequence is synthesized)
catgattaagtacctcacactgtggaagaaagaggagcaggaggagccctatgtcagcctcacccgaaagaagatgctaatagatggcgaggaggtgctgatagaatgggaggtgggcca

SEQ ID NO: 646761 - DNA, 120 bp, Artificial Sequence
  ENSG00000182489_9 (sequence is synthesized)
ctccatccggaccctggctatgcaccgcaatgcctacaaacgtatgtcacagatccaagccttcctgggctcagtgccccagctgacctatcagctctatgtgagcctgatctctgcaga

SEQ ID NO: 646762 - DNA, 120 bp, Artificial Sequence
  ENSG00000182489_10 (sequence is synthesized)
ggttcccctgggtagagttgtgctaatggtattttccctggtatctgtcacctatggggccaccctttgcaatatgttggctatccagatcaagtacgatgactacaagattcgccttgg

SEQ ID NO: 646763 - DNA, 120 bp, Artificial Sequence
  ENSG00000182489_11 (sequence is synthesized)
ggctgtgcccttcctagtgctcaacttcctgatcatcctctttgagccctggattaagttctggagaagtggtgcccagatgcccaataacattgagaaaaacttcagccgggtcggcac

SEQ ID NO: 646764 - DNA, 120 bp, Artificial Sequence
  ENSG00000182489_12 (sequence is synthesized)
tctggtggtcctgatttcagtcaccatcctctatgctggcatcaacttctcttgctggtcagctttgcagttgaggttggcagacagagatctcgtcgacaaagggcagaactggggaca

SEQ ID NO: 646765 - DNA, 120 bp, Artificial Sequence
  ENSG00000182489_13 (sequence is synthesized)
tatgggcctgcactatagtgtgaggttggtagagaatgtgatcatggtcttggtttttaagttctttggagtgaaagtgttactgaattactgtcattccttgattgccttgcagctcat

SEQ ID NO: 646766 - DNA, 120 bp, Artificial Sequence
  ENSG00000182489_14 (sequence is synthesized)
tattgcttatctgatttccattggcttcatgctccttttcttccagtacttgcatccattgcgctcactcttcacccataatgtagtagactacctccattgtgtctgctgtcaccagca

SEQ ID NO: 646767 - DNA, 120 bp, Artificial Sequence
  ENSG00000182489_15 (sequence is synthesized)
ccctcggaccagggttgagaactcagagccaccctttgagactgaagcaaggcaaagtgttgtctgattctattttctgggtattttaggaagagttgggagttgccaagagtaaccatg

SEQ ID NO: 646768 - DNA, 120 bp, Artificial Sequence
  ENSG00000182489_16 (sequence is synthesized)
aaattgaacgaaaggatgaggttcatgggtgagatacccatcagtacattttcttgacttttctgttaagcctatcagaagaaagagcaactcccaaataggttttattttcttaagagt

SEQ ID NO: 646769 - DNA, 120 bp, Artificial Sequence
  ENSG00000182489_17 (sequence is synthesized)
taccactatgtttggaaacagggggtatcgactatatagttgaaagggtcagaaataccattcacacccttcttacccaagtcaattggaataacttgtcttcaaacactttaggctctc

SEQ ID NO: 646770 - DNA, 120 bp, Artificial Sequence
  ENSG00000182489_18 (sequence is synthesized)
taaagtgaccttctagctctgctcatttgcttgatgcatttctgagctttcctgggctgagctgaaggcccagaatcccgctagaatatatcctgactgatcagaggatatgacagctta

SEQ ID NO: 646771 - DNA, 120 bp, Artificial Sequence
  ENSG00000182489_19 (sequence is synthesized)
ccagctaagagtacctcccaggaaacagtctgactaatgtggaacctgcaactgtcagtgtggctggggtctttttaattccagtgagaagctctggctgagaagaaaatcaccactatt

SEQ ID NO: 646772 - DNA, 120 bp, Artificial Sequence
  ENSG00000182489_20 (sequence is synthesized)
aaaaaagctgctccccaagcagattagctctctgttaggattttactagtggccattcagcaaggacctctctttacagtggcacttcataggcacactctaaggagaaagtgcagagta

SEQ ID NO: 646773 - DNA, 120 bp, Artificial Sequence
  ENSG00000182489_21 (sequence is synthesized)
gaattccttcagggcataagccaaaatgactctttttctcagggacctgcatgggcctccagcttgtctattggaattgttaagtgaagcctctcacttagtgcctcattagcagagatt

SEQ ID NO: 646774 - DNA, 120 bp, Artificial Sequence
  ENSG00000182489_22 (sequence is synthesized)
tcctccaacccagcttttctgtgctcttggtattttactacttgatgtggacctcagagaagctgaactgtaattgaaaatgtttccgatgtgtggaagaaatgaagactgctttgtgtc

SEQ ID NO: 646775 - DNA, 120 bp, Artificial Sequence
  ENSG00000182489_23 (sequence is synthesized)
aaagctgtggctcctgcctgggtctggaggtggtggtcagaagtgcttctgaagagcggcccaagcccctttttgtcccgccactccacaacgagcatccctcggctggccgcctgcccg

SEQ ID NO: 646776 - DNA, 120 bp, Artificial Sequence
  ENSG00000182489_24 (sequence is synthesized)
ggaactctccggctggttttgtttggccgcagccgtcccgcccatctcgcccgcccccgccgtcccggtgccttagtttttgaagctgccgacctctcgcagctggaatcgcagaccagg

SEQ ID NO: 646777 - DNA, 120 bp, Artificial Sequence
  ENSG00000182489_25 (sequence is synthesized)
caggaccctggcagcagacggcgtccaagagtttggcgacctccgtccagccaggttggcgccccgcacatcgtgcctctcactagcaaagtttctccgaggagaagcagcccctccagc

SEQ ID NO: 646778 - DNA, 120 bp, Artificial Sequence
  ENSG00000182489_26 (sequence is synthesized)
cttttcttcatcctgtagagcgagcgcgctctgcttctgtccctcaacactgcattcggagacagggtggtgacaatactccactcccgggccaggcggtcttgggggcggggcttgggg

SEQ ID NO: 646779 - DNA, 120 bp, Artificial Sequence
  ENSG00000182492_0 (sequence is synthesized)
ctctctccacaaactgcccaggagtgagtagctgctttcggtccgccggacacaccggacagatagacgtgcggacggcccaccaccccagcccgccaactagtcagcctgcgcctggcg

SEQ ID NO: 646780 - DNA, 120 bp, Artificial Sequence
  ENSG00000182492_1 (sequence is synthesized)
cctcccctctccaggtccatccgccatgtggcccctgtggcgcctcgtgtctctgctggccctgagccaggccctgccctttgagcagagaggcttctgggacttcaccctggacgatgg

SEQ ID NO: 646781 - DNA, 120 bp, Artificial Sequence
  ENSG00000182492_2 (sequence is synthesized)
gccattcatgatgaacgatgaggaagcttcgggcgctgacacctcgggcgtcctggacccggactctgtcacacccacctacagcgccatgtgtcctttcggctgccactgccacctgcg

SEQ ID NO: 646782 - DNA, 120 bp, Artificial Sequence
  ENSG00000182492_3 (sequence is synthesized)
ggtggttcagtgctccgacctgggtctgaagtctgtgcccaaagagatctcccctgacaccacgctgctggacctgcagaacaacgacatctccgagctccgcaaggatgacttcaaggg

SEQ ID NO: 646783 - DNA, 120 bp, Artificial Sequence
  ENSG00000182492_4 (sequence is synthesized)
tctccagcacctctacgccctcgtcctggtgaacaacaagatctccaagatccatgagaaggccttcagcccactgcggaagctgcagaagctctacatctccaagaaccacctggtgga

SEQ ID NO: 646784 - DNA, 120 bp, Artificial Sequence
  ENSG00000182492_5 (sequence is synthesized)
gatcccgcccaacctacccagctccctggtggagctccgcatccacgacaaccgcatccgcaaggtgcccaagggagtgttcagcgggctccggaacatgaactgcatcgagatgggcgg

SEQ ID NO: 646785 - DNA, 120 bp, Artificial Sequence
  ENSG00000182492_6 (sequence is synthesized)
gaacccactggagaacagtggctttgaacctggagccttcgatggcctgaagctcaactacctgcgcatctcagaggccaagctgactggcatccccaaagacctccctgagaccctgaa

SEQ ID NO: 646786 - DNA, 120 bp, Artificial Sequence
  ENSG00000182492_7 (sequence is synthesized)
tgaactccacctagaccacaacaaaatccaggccatcgaactggaggacctgcttcgctactccaagctgtacaggctgggcctaggccacaaccagatcaggatgatcgagaacgggag

SEQ ID NO: 646787 - DNA, 120 bp, Artificial Sequence
  ENSG00000182492_8 (sequence is synthesized)
cctgagcttcctgcccaccctccgggagctccacttggacaacaacaagttggccagggtgccctcagggctcccagacctcaagctcctccaggtggtctatctgcactccaacaacat

SEQ ID NO: 646788 - DNA, 120 bp, Artificial Sequence
  ENSG00000182492_9 (sequence is synthesized)
ctcttcaacaaccccgtgccctactgggaggtgcagccggccactttccgctgcgtcactgaccgcctggccatccagtttggcaactacaaaaagtagaggcagctgcagccaccgcgg

SEQ ID NO: 646789 - DNA, 120 bp, Artificial Sequence
  ENSG00000182492_10 (sequence is synthesized)
ggcctcagtgggggtctctggggaacacagccagacatcctgatggggaggcagagccaggaagctaagccagggcccagctgcgtccaacccagccccccacctcgggtccctgacccc

SEQ ID NO: 646790 - DNA, 120 bp, Artificial Sequence
  ENSG00000182492_11 (sequence is synthesized)
agctcgatgccccatcaccgcctctccctggctcccaagggtgcaggtgggcgcaaggcccggcccccatcacatgttcccttggcctcagagctgcccctgctctcccaccacagccac

SEQ ID NO: 646791 - DNA, 120 bp, Artificial Sequence
  ENSG00000182492_12 (sequence is synthesized)
ccagaggcaccccatgaagcttttttctcgttcactcccaaacccaagtgtccaaggctccagtcctaggagaacagtccctgggtcagcagccaggaggcggtccataagaatggggac

SEQ ID NO: 646792 - DNA, 120 bp, Artificial Sequence
  ENSG00000182492_13 (sequence is synthesized)
agtgggctctgccagggctgccgcacctgtccagacacacatgttctgttcctcctcctcatgcatttccagcctttcaaccctccccgactctgcggctcccctcagcccccttgcaag

SEQ ID NO: 646793 - DNA, 120 bp, Artificial Sequence
  ENSG00000182492_14 (sequence is synthesized)
cccccttgcaagttcatggcctgtccctcccagacccctgctccactggcccttcgaccagtcctcccttctgttctctctttccccgtccttcctctctctctctctctctctctctct

SEQ ID NO: 646794 - DNA, 120 bp, Artificial Sequence
  ENSG00000182492_15 (sequence is synthesized)
gtgtgtgtgtgtgtgtgtgtgtgtcttgtgcttcctcagacctttctcgcttctgagcttggtggcctgttccctccatctctccgaacctggcttcgcctgtccctttcactccacacc

SEQ ID NO: 646795 - DNA, 120 bp, Artificial Sequence
  ENSG00000182492_16 (sequence is synthesized)
cctttcactccacaccctctggccttctgccttgagctgggactgctttctgtctgtccggcctgcacccagcccctgcccacaaaaccccagggacagcagtctccccagcctgccctg

SEQ ID NO: 646796 - DNA, 120 bp, Artificial Sequence
  ENSG00000182492_17 (sequence is synthesized)
ctcaggccttgcccccaaacctgtactgtcccggaggaggttgggaggtggaggcccagcatcccgcgcagatgacaccatcaaccgccagagtcccagacaccggttttcctagaagcc

SEQ ID NO: 646797 - DNA, 120 bp, Artificial Sequence
  ENSG00000182492_18 (sequence is synthesized)
cctcacccccactggcccactggtggctaggtctccccttatccttctggtccagcgcaaggaggggctgcttctgaggtcggtggctgtctttccattaaagaaacaccgtgcaacgtg

SEQ ID NO: 646798 - DNA, 120 bp, Artificial Sequence
  ENSG00000182504_0 (sequence is synthesized)
agattacaagctccacagagccgcgggaggacggttgcctggtattattagcaagcagcaaatatggcggtggcgcgcgtggacgcggctttgcctcccggagaaggatcagtggtcaat

SEQ ID NO: 646799 - DNA, 120 bp, Artificial Sequence
  ENSG00000182504_1 (sequence is synthesized)
tggtcaggacagggactacagaaattaggtccaaatttaccctgtgaagctgatattcacactttgattctggataaaaatcagattattaaattggaaaatctggagaaatgcaaacga

SEQ ID NO: 646800 - DNA, 120 bp, Artificial Sequence
  ENSG00000182504_2 (sequence is synthesized)
ttaatacagttatcagtagctaataatcggctggttcggatgatgggtgtggccaagctgacgttgcttcgtgtattaaatttgcctcataatagcattggctgtgtggaagggctaaag

SEQ ID NO: 646801 - DNA, 120 bp, Artificial Sequence
  ENSG00000182504_3 (sequence is synthesized)
gaactagtacatctggaatggctgaatttggcaggaaataatcttaaggccatggaacagatcaatagctgcacagctctacagcatctcgatttatcagacaataatatatcccagata

SEQ ID NO: 646802 - DNA, 120 bp, Artificial Sequence
  ENSG00000182504_4 (sequence is synthesized)
ggtgatctatctaaattggtatccctgaaaaccctgcttttacatggaaacatcatcacctctcttagaatggcacctgcttacctacccagaagtcttgctatactttctttggcagaa

SEQ ID NO: 646803 - DNA, 120 bp, Artificial Sequence
  ENSG00000182504_5 (sequence is synthesized)
aatgaaatccgagacttaaatgagatctcttttttggcatccttaactgaattggaacagttgtcgattatgaacaatccttgtgtgatggcaacaccatccatcccaggatttgactat

SEQ ID NO: 646804 - DNA, 120 bp, Artificial Sequence
  ENSG00000182504_6 (sequence is synthesized)
cggccgtacatcgtcagctggtgcctaaacctcagagtcctagatggatatgtgatttctcagaaggaaagtttgaaagctgaatggctctatagtcaaggcaaggggagagcatatcgg

SEQ ID NO: 646805 - DNA, 120 bp, Artificial Sequence
  ENSG00000182504_7 (sequence is synthesized)
cctggccagcacatccagcttgtccaatatctggctacagtctgccccctcacttctacactaggtcttcaaactgcagaggatgccaaactagagaagattttgagcaaacagaggttt

SEQ ID NO: 646806 - DNA, 120 bp, Artificial Sequence
  ENSG00000182504_8 (sequence is synthesized)
caccagaggcagttgatgaaccaaagccaaaatgaagagttgtctcctcttgttcctgttgaaacaagggcatcccttattcctgagcattcaagccctgttcaagattgccagatatcc

SEQ ID NO: 646807 - DNA, 120 bp, Artificial Sequence
  ENSG00000182504_9 (sequence is synthesized)
caggaaagtgaacccgtcattcaagtgaattcttgggttgggataaacagtaatgatgatcagttatttgcggttaagaataattttccagcctctgtacacactacgagatattctcga

SEQ ID NO: 646808 - DNA, 120 bp, Artificial Sequence
  ENSG00000182504_10 (sequence is synthesized)
aatgatctgcacctggaagacatacagacggatgaggacaagttaaactgtagtcttctctcttcagagtctacttttatgccagttgcatcaggactgtctccactatcacctacagtt

SEQ ID NO: 646809 - DNA, 120 bp, Artificial Sequence
  ENSG00000182504_11 (sequence is synthesized)
gagctgaggctgcagggcattaacttgggcctagaagatgatggtgttgcagatgaatctgtgaaagggctggaaagccaggtgttggataaggaagaggaacagcctttatgggctgca

SEQ ID NO: 646810 - DNA, 120 bp, Artificial Sequence
  ENSG00000182504_12 (sequence is synthesized)
aatgagaattctgttcaaatgatgagaagtgaaatcaatacagaggtaaatgagaaagctggactattaccttgtcctgagccaacaataatcagtgctatcttgaaggatgataaccac

SEQ ID NO: 646811 - DNA, 120 bp, Artificial Sequence
  ENSG00000182504_13 (sequence is synthesized)
agtcttacattttttcctgagtcaactgagcagaaacaatcagacataaagaaaccagaaaatacacaaccagaaaataaagaaaccatatctcaagcaacttcagagaaacttcccatg

SEQ ID NO: 646812 - DNA, 120 bp, Artificial Sequence
  ENSG00000182504_14 (sequence is synthesized)
attttaacccagagatctgttgctttgggacaagacaaagttgcccttcagaaattaaatgatgcagccaccaagcttcaggcctgttggcggggattttatgccaggaactacaaccct

SEQ ID NO: 646813 - DNA, 120 bp, Artificial Sequence
  ENSG00000182504_15 (sequence is synthesized)
caagccaaagatgtgcgttacgaaatccggctacgcagaatgcaagagcacattgtctgcttaactgatgaaataaggagattacgaaaagaaagagatgaagaacgtattaaaaaattt

SEQ ID NO: 646814 - DNA, 120 bp, Artificial Sequence
  ENSG00000182504_16 (sequence is synthesized)
gtacaagaagaagctttcagattcctttggaaccaggtaaggtctctacaggtttggcaacagacagtggaccagcgtctaagttcctggcatactgatgttcctcctatatcaagtact

SEQ ID NO: 646815 - DNA, 120 bp, Artificial Sequence
  ENSG00000182504_17 (sequence is synthesized)
cttgtgccatcgaaacatccattatttacccaaagccaggagtcctcttgtgatcaaaatgctgattggtttattgcttctgatgtagctcctcaagagaaatcattaccagaatttcca

SEQ ID NO: 646816 - DNA, 120 bp, Artificial Sequence
  ENSG00000182504_18 (sequence is synthesized)
gactctggttttcattcctctctaacagaacaagttcattcattgcagcattctttggattttgagaaaagttccacagaaggcagtgaaagctccataatggggaattccattgacaca

SEQ ID NO: 646817 - DNA, 120 bp, Artificial Sequence
  ENSG00000182504_19 (sequence is synthesized)
gtcagatatggcaaagaatcagatttaggggatgttagtgaagaacatggtgaatggaataaggaaagctcaaataacgagcaggacaatagtctgcttgaacagtatttaacttcagtt

SEQ ID NO: 646818 - DNA, 120 bp, Artificial Sequence
  ENSG00000182504_20 (sequence is synthesized)
caacagctggaagatgctgatgagaggaccaattttgatacagagacaagagatagcaaacttcacattgcttgtttcccagtacagttagatacattgtctgacggtgcttctgtagat

SEQ ID NO: 646819 - DNA, 120 bp, Artificial Sequence
  ENSG00000182504_21 (sequence is synthesized)
gagagtcatggcatatctcctcctttgcaaggtgaaattagccagacacaagagaattctaaattaaatgcagaagttcaggggcagcagccagaatgtgattctacatttcagctattg

SEQ ID NO: 646820 - DNA, 120 bp, Artificial Sequence
  ENSG00000182504_22 (sequence is synthesized)
catgttggtgttactgtgtagcatgtcttttgggaggcagatatccacttaacttttcttaaaaatactttcagttgcctttgcttttttttggagggaaatactccctacccctaattt

SEQ ID NO: 646821 - DNA, 120 bp, Artificial Sequence
  ENSG00000182504_23 (sequence is synthesized)
tgttactacttatatagaatttgtattcatgtcttatatttttcagattctagatattgagctgagttttcattttgattttgttagctttttacttagctgtaaggtaccaaactattt

SEQ ID NO: 646822 - DNA, 120 bp, Artificial Sequence
  ENSG00000182504_24 (sequence is synthesized)
atattgaaagctatatgcactttatttcttaactgaattgcatcaacaatgttcctgtttctttcatgtactcatttactttcaaaaataagctagaatatattaaagaaaatagaaaaa

SEQ ID NO: 646823 - DNA, 120 bp, Artificial Sequence
  ENSG00000182504_25 (sequence is synthesized)
attaccttaaatatataaataagagaattttggcccttctgtgtctgagaaaattaattatatagcaaggaatgaaatttgataaagcaaatataaatgagaaatatgaggattgtgaat

SEQ ID NO: 646824 - DNA, 120 bp, Artificial Sequence
  ENSG00000182504_26 (sequence is synthesized)
tattgaaatttgccagtctccctggtgtaaaatgtttttttaaagccttttttcctcctttcggagtcaaggaaagcctttctataagcaaattaaggaagaaaaggtaggattataaga

SEQ ID NO: 646825 - DNA, 120 bp, Artificial Sequence
  ENSG00000182504_27 (sequence is synthesized)
tttctcaatggggatgattaaattgtctcatggaaaacttcagttaatgtcatgcatcagttttaacatatgaagtaaagtgttctatccaggattaaagtcaagtttacttaggcaaca

SEQ ID NO: 646826 - DNA, 120 bp, Artificial Sequence
  ENSG00000182504_28 (sequence is synthesized)
caagaatatttcacttagatatgaagaaaggaaacactagtctccattcacttgaaatactctcatggcaaatatttatcctctcattaagtgctttttcaccctataggtaagcatttt

SEQ ID NO: 646827 - DNA, 120 bp, Artificial Sequence
  ENSG00000182504_29 (sequence is synthesized)
tgtgccaacatgttgtcagaaattaatgtatgttcatctcctctgttcctgcttatttttacttatatatttcagcagaaggtccgtggccattcacttcaattttgacctctgtcccat

SEQ ID NO: 646828 - DNA, 120 bp, Artificial Sequence
  ENSG00000182504_30 (sequence is synthesized)
agtgaagaacatttaaagtaatactactggtcgaatatgaatgactttttaggaactactttttgtctaacctgaaaaagttccacatttggaagacaatttaatgatggtgaagaaata

SEQ ID NO: 646829 - DNA, 120 bp, Artificial Sequence
  ENSG00000182504_31 (sequence is synthesized)
aggataatatcgtttaacaacatgtatttggtttccctcaacttacagacatacagctatttaaaactatggcaatacttaagcatctctaaatttaggtgctaaatatctattattctg

SEQ ID NO: 646830 - DNA, 120 bp, Artificial Sequence
  ENSG00000182504_32 (sequence is synthesized)
ttgtagtcattaggtgcccttctctgaagttatgtaaaataaaagcatctgatccttcaaggataaagttgaggatcacatggtacgtggcatttgttgttattgttttttaaagagatg

SEQ ID NO: 646831 - DNA, 120 bp, Artificial Sequence
  ENSG00000182504_33 (sequence is synthesized)
gaggctggctctgttggtgcggtgccatgatcatagttcactataacctcgaactcctggctcaagtgatctcccacttcagcctcccgagtatctgggattataagcaagagccactgc

SEQ ID NO: 646832 - DNA, 120 bp, Artificial Sequence
  ENSG00000182504_34 (sequence is synthesized)
tcccagctcatggtatttgttgatagtcataacatttttcctgtatggtaagacgtatttttctcagtttataaatacgtagcactcaggttgagacgacttggattttattcttagaaa

SEQ ID NO: 646833 - DNA, 120 bp, Artificial Sequence
  ENSG00000182504_35 (sequence is synthesized)
tccagaatcccttgaaaaggaaatattttctgtttcttataaataaaagagtaatcttactttcagaaggattttccttagtgaaacatgtgtaacattgaatgcatgttaaataaaaat

SEQ ID NO: 646834 - DNA, 120 bp, Artificial Sequence
  ENSG00000182504_36 (sequence is synthesized)
ggaatttctaactttttttcaatagtgctaattatcttttctgaatgattttgaatgtcttcttaaatataccctatttttctattttaaagttaagtgcctcacttgctgtccatagtt

SEQ ID NO: 646835 - DNA, 120 bp, Artificial Sequence
  ENSG00000182504_37 (sequence is synthesized)
agacaaagaaaaaccaatttccactgcactagtaccaaaatactactttatacattagtttttcataaaagctgctggaatgtcatgattcagtattacctaaatagatttctgctaaaa

SEQ ID NO: 646836 - DNA, 120 bp, Artificial Sequence
  ENSG00000182504_38 (sequence is synthesized)
tcctctccctcctgtcttttttaagttatggaaaaacacaactaaattcatttgatcatcagcacttgttagcaggatttccttttttacctttgccttgtttctttagcccacaaatag

SEQ ID NO: 646837 - DNA, 120 bp, Artificial Sequence
  ENSG00000182504_39 (sequence is synthesized)
tactcagcatactttcattaaaaatttggcacaatatgataattgttaatattctgttcttcgtctgtgttttatttaacttttactagtgtttagaagtgcaagaatattaaatagccc

SEQ ID NO: 646838 - DNA, 120 bp, Artificial Sequence
  ENSG00000182504_40 (sequence is synthesized)
cttccttaactgtacatattatcttgaatgtagataaaatgaaaatactgtaaattagagtgtaggaaaactggcatagagttaatatattttaatgggtttacattatactttaaaagt

SEQ ID NO: 646839 - DNA, 120 bp, Artificial Sequence
  ENSG00000182504_41 (sequence is synthesized)
aatttatataattaaaatatttggttttaactctatgggctattctttggttggctgaagagggaatgggtctagtaaggtttggaaagttaagctttgaacatggtctttgtgtttttt

SEQ ID NO: 646840 - DNA, 120 bp, Artificial Sequence
  ENSG00000182504_42 (sequence is synthesized)
tcctaacaaggaaaggtttagttcagctgtgctattttagtacacatcagttctcttgatttatggaagattcagtttatcaattaagaattcctgcagaagcacagaatcataccatgt

SEQ ID NO: 646841 - DNA, 120 bp, Artificial Sequence
  ENSG00000182504_43 (sequence is synthesized)
aagagttggaaggaagcttaagagatttctgttcgaatctctttgtttcaaagatgaaactaaagcacagcatgttaaatgacttgtctaagttatagctagttagtagtaaataaactg

SEQ ID NO: 646842 - DNA, 120 bp, Artificial Sequence
  ENSG00000182504_44 (sequence is synthesized)
aaaacctatatgctactgtagtccaaaattttattatgtcctcttaatctttacatttagtgagtcagtaaggaaatctctgcatatttctcattctctttgaaagaggaaaaaaacttc

SEQ ID NO: 646843 - DNA, 120 bp, Artificial Sequence
  ENSG00000182504_45 (sequence is synthesized)
taagagagctacaactctatcactcatgacagagttgcttgtagaaaataactaattccttcagaaccctgagtgaattttttctaagaaatgtgacttgattaaaatggtttcaaaaga

SEQ ID NO: 646844 - DNA, 120 bp, Artificial Sequence
  ENSG00000182504_46 (sequence is synthesized)
tttctaagaaatgtgacttgattaaaatggtttcaaaagagcaatagtggaaattaaagttttagaaaagagacctggcgtggtggttgacaactgtaatcccagtgctttgggaggctg

SEQ ID NO: 646845 - DNA, 120 bp, Artificial Sequence
  ENSG00000182504_47 (sequence is synthesized)
ctggacaacatagcaagacccccctctctacaaaaaaaatttttttctgaaaagaataagtacattttagagtccatttatttgacgacaggcagtatgacaggttgctgaggtatataa

SEQ ID NO: 646846 - DNA, 120 bp, Artificial Sequence
  ENSG00000182504_48 (sequence is synthesized)
aattttctagagaaatgctgagtttgatgacattttatcttcagttttgtagaacagatgttaaaatgttaactctcctggtgtgcagaaagctgtaatcatgacagttgataatatgca

SEQ ID NO: 646847 - DNA, 120 bp, Artificial Sequence
  ENSG00000182504_49 (sequence is synthesized)
atttagtttgattttataggtttaattataaaaggcttcacaatatgcatgttttaggaaaatgttcatttatttagtcatataatcgtttgtatatatgtaaataactttattctggaa

SEQ ID NO: 646848 - DNA, 120 bp, Artificial Sequence
  ENSG00000182504_50 (sequence is synthesized)
taatgtgggtgccatcttgagcgtgtgtttttatctgttttggattattttttgtatacaaacaccataatactgtattttcctgttatctacttaagtctagttctactttttcccaat

SEQ ID NO: 646849 - DNA, 120 bp, Artificial Sequence
  ENSG00000182504_51 (sequence is synthesized)
aatttcaggaaaatacaagcttgagatattatactatctcccttggtattttttgtgtgcaaagtcttagaattggatttataacattgataataaaaatataaaacgtttttcctcggg

SEQ ID NO: 646850 - DNA, 120 bp, Artificial Sequence
  ENSG00000182504_52 (sequence is synthesized)
agttaagatggtaaaaagaaaaaaatagaatgaatatgatcatttctccatcataaaggaaagaagagacttcattgtgtgtgtgttttttttttttttttcgagatagagtttcactgt

SEQ ID NO: 646851 - DNA, 66 bp, Artificial Sequence
  ENSG00000182504_53 (sequence is synthesized)
ttcctgtgtagctgggattacaggtgtgcaaccacaaggctcggctaatttttttgtatttttagt

SEQ ID NO: 646852 - DNA, 120 bp, Artificial Sequence
  ENSG00000182504_54 (sequence is synthesized)
actgtgcccagccgagacttcattgtttaatgtatatttttattttttccaaacaccagctcgaatcagagtatatttttattttgccacatacctttaaaaggtatttattgtgtcata

SEQ ID NO: 646853 - DNA, 120 bp, Artificial Sequence
  ENSG00000182504_55 (sequence is synthesized)
atgttttaaatgttaaatatatgataccctcattcatgaagtgaagcagaaagggtctgtaaggaacattctaaacatttttaatgatattgcttttactgatcaagcttgttgtgccat

SEQ ID NO: 646854 - DNA, 120 bp, Artificial Sequence
  ENSG00000182504_56 (sequence is synthesized)
attaaaattaaaagtcaaataaacaaagcagtcctcacagccttggaaagaaatagataattgtcttcttaagatgaggtgctttttatctgtggatgaatggaaatcacactgaatttt

SEQ ID NO: 646855 - DNA, 120 bp, Artificial Sequence
  ENSG00000182504_57 (sequence is synthesized)
gctttttatctgtggatgaatggaaatcacactgaattttaattcttatttattttagtggatagcaggaatcactctgtagtagttgtgttcattttcttttctttttcttttcttttt

SEQ ID NO: 646856 - DNA, 66 bp, Artificial Sequence
  ENSG00000182504_58 (sequence is synthesized)
tcaatctcttgacctcgtgatccacccagttcatcttctaattaaatatctttgaatgttttgtaa

SEQ ID NO: 646857 - DNA, 120 bp, Artificial Sequence
  ENSG00000182504_59 (sequence is synthesized)
ggccttgttcatcttctaattaaatatctttgaatgttttgtaataattttaatgttgacaataagagtttaaaaataatttgattttggactgtatttagatttctctttaattttgct

SEQ ID NO: 646858 - DNA, 120 bp, Artificial Sequence
  ENSG00000182504_60 (sequence is synthesized)
tgctgtagaaatagtaaatgatttaaagtggttatgatgtgttttatgaaggcttactattttatattgtacttatttaatttgtatttgagtctgtctaattttaaataaaaggtttat

SEQ ID NO: 646859 - DNA, 120 bp, Artificial Sequence
  ENSG00000182504_61 (sequence is synthesized)
aagtccttttgatgcactgttttgttggtttgagggtgttagattcttatagttgattcagaacactgtgcttctgtgattataacacttttcacacaatgtagccactgttgctttggt

SEQ ID NO: 646860 - DNA, 120 bp, Artificial Sequence
  ENSG00000182504_62 (sequence is synthesized)
tgtctcctacagtgtaccgaaagcatctggagagcagacactatctgctctatctcctcatctccatccccagcaaagcacttgatacatagatgcagtgtagtaataaatgttcaatga

SEQ ID NO: 646861 - DNA, 120 bp, Artificial Sequence
  ENSG00000182504_63 (sequence is synthesized)
acgtgagctttatagggatctataattctaaacatagaaaggtacagaaaacattgaaaaaccaagtataaaaatgagaagatgatgaagtctacatggaattcagtacatgacataaga

SEQ ID NO: 646862 - DNA, 120 bp, Artificial Sequence
  ENSG00000182504_64 (sequence is synthesized)
aataaagaaaatagcagggattcagaaggggctaaaattctatatgactacaataggaattattccttaatcccatggctcgtatgttttactgactgctagcccaggaaagttaggatt

SEQ ID NO: 646863 - DNA, 120 bp, Artificial Sequence
  ENSG00000182504_65 (sequence is synthesized)
tcattaatattgcaactagtaatatttactggtattatcaggtagaagagaaagaggcagcaaaggatactgagaagggacagccagagtggtaggaaaactaggagagttccaccttca

SEQ ID NO: 646864 - DNA, 120 bp, Artificial Sequence
  ENSG00000182504_66 (sequence is synthesized)
acaggagcaagtgtttcaggagagatgagaggtgccacagagaggacacaggcattaaacttggcagttggaggctattggtgactgtgttggtgattctccagactatcctcaggttgg

SEQ ID NO: 646865 - DNA, 120 bp, Artificial Sequence
  ENSG00000182504_67 (sequence is synthesized)
atgatttgctaaaaggactcacagaacttgggaaaatactattctgttcgtcattatggttcattacagcaaaaggatacagattagaatcagtaaagaaaaaaggtgcctagggcagag

SEQ ID NO: 646866 - DNA, 120 bp, Artificial Sequence
  ENSG00000182504_68 (sequence is synthesized)
tctaggagacatgaggtgcaagcttccagttgttctctttcagtggagttgtacagacagggcttaattttctcagcaatgatgtatgataacacatatgaagtattgccaactgacgaa

SEQ ID NO: 646867 - DNA, 120 bp, Artificial Sequence
  ENSG00000182504_69 (sequence is synthesized)
agttacctcatctttggtgtccagggtttttattgtgggccagtcacataggtattgagtacccatgtaactgatcttaactatttacacctcagaccacatagaggtcacactgatact

SEQ ID NO: 646868 - DNA, 120 bp, Artificial Sequence
  ENSG00000182508_0 (sequence is synthesized)
aaagggcagctagtattcccatccttgtctaacaagctgtaaggagaagttgtttctgagatctgagcctgaagagagggaacaagtcagtcagccttcgtggtcagaagagaaacctgt

SEQ ID NO: 646869 - DNA, 120 bp, Artificial Sequence
  ENSG00000182508_1 (sequence is synthesized)
gaccatgaggagcagcctgaccatggtgggaaccctctgggccttcctgtcccttgttactgctgtgaccagttctaccagttacttcctaccttactggctctttggatcccagatggg

SEQ ID NO: 646870 - DNA, 120 bp, Artificial Sequence
  ENSG00000182508_2 (sequence is synthesized)
gaagccagtgtcattcagcacattccggaggtgcaactaccctgtgcggggagagggacacagtctgatcatggtggaagaatgtgggcgctatgccagcttcaatgccatcccaagcct

SEQ ID NO: 646871 - DNA, 120 bp, Artificial Sequence
  ENSG00000182508_3 (sequence is synthesized)
ggcctggcagatgtgcacagtggtgacaggtgccggctgtgctctgctgctcctggtggcactagctgctgtcctgggttgctgcatggaggagctcatctccagaatgatgggacgttg

SEQ ID NO: 646872 - DNA, 120 bp, Artificial Sequence
  ENSG00000182508_4 (sequence is synthesized)
catgggagcagcgcagtttgttggagggctgctgataagctcaggctgtgccttataccctttaggatggaatagcccggagataatgcaaacatgtgggaatgtctccaatcaatttca

SEQ ID NO: 646873 - DNA, 120 bp, Artificial Sequence
  ENSG00000182508_5 (sequence is synthesized)
gttaggtacctgtcggcttggctgggcctattactgtgctggaggtggagcagctgcagccatgttgatctgcacctggctctcttgctttgctggaagaaaccccaagcctgtcatatt

SEQ ID NO: 646874 - DNA, 120 bp, Artificial Sequence
  ENSG00000182508_6 (sequence is synthesized)
agaggtactaaggattaggccatttgtcatctgactgtcattagcatagcctagtgtttgcatgctttttaaactaattgtcgttcattttcacttatctttaagccagtaggtcactgg

SEQ ID NO: 646875 - DNA, 120 bp, Artificial Sequence
  ENSG00000182508_7 (sequence is synthesized)
ctgtttataaaattcatcagaggaaacattctcagacatttacccaactggcaagtcgtgctaacccgaagacccaaagtacccctttatgcaaaataggatccaaagctaaggctgggt

SEQ ID NO: 646876 - DNA, 120 bp, Artificial Sequence
  ENSG00000182508_8 (sequence is synthesized)
aagaatagttgtgcagggagggagcacgagatgggcagagctggttcctaccactccattcacacagttcatcagttcattcccaagtatttattgtcacccccaaacatctctggagta

SEQ ID NO: 646877 - DNA, 120 bp, Artificial Sequence
  ENSG00000182508_9 (sequence is synthesized)
ctactgctcaatttttgtgtcgttatcaggagtataccttggctcttcctttttttctcctgcttccccccgcaccttgtggggaagcttcaggggagcgggggagggtgattcccagtg

SEQ ID NO: 646878 - DNA, 120 bp, Artificial Sequence
  ENSG00000182508_10 (sequence is synthesized)
gtggggaaaacattaatcaaggatacttgcatttagcctggagccccttcctcattatgctttagaatattcataggagttccatttgtattctggctgggtgatgagcaaaaaaaatat

SEQ ID NO: 646879 - DNA, 120 bp, Artificial Sequence
  ENSG00000182508_11 (sequence is synthesized)
atagtagcaaatattctctcatcctttagagataaagaaatggtgttcatcaaatgtactgagaatagactagcatttgtggggcactcaataaatttaaattcatggtgacagtgacaa

SEQ ID NO: 646880 - DNA, 120 bp, Artificial Sequence
  ENSG00000182508_12 (sequence is synthesized)
tgcctgtatgtctgaggctgggtttgaagcctccagcgtgtttggagttaatccccattaggttggactccgcccctttctcccaaaggtaaagcaaggttttcaggcatcactgcaaag

SEQ ID NO: 646881 - DNA, 120 bp, Artificial Sequence
  ENSG00000182508_13 (sequence is synthesized)
ggcagctagtattcccatccttgtctaacaagctgtaaggagaagttgtttctgagatctgagcctgaagagagggaacaagtcagtcagccttcgtggtcagaagatgaaaaaggtgga

SEQ ID NO: 646882 - DNA, 120 bp, Artificial Sequence
  ENSG00000182511_0 (sequence is synthesized)
gagtcggtccgaggccgtcccaggagcagctgcccgtgcggaacagcactatgggcttctcttccgagctgtgcagcccccagggccacggggtcctgcagcaaatgcaggaggccgagc

SEQ ID NO: 646883 - DNA, 120 bp, Artificial Sequence
  ENSG00000182511_1 (sequence is synthesized)
ttcgtctactggagggcatgagaaagtggatggcccagcgggtcaagagtgacagggagtatgcaggactgcttcaccacatgtccctgcaggacagtgggggccagagccgggccatca

SEQ ID NO: 646884 - DNA, 120 bp, Artificial Sequence
  ENSG00000182511_2 (sequence is synthesized)
gccctgacagccccatcagtcagtcctgggctgagatcaccagccaaactgagggcctgagccgcttgctgcggcagcacgcagaggatctgaactcagggcccctgagcaagctgagcc

SEQ ID NO: 646885 - DNA, 120 bp, Artificial Sequence
  ENSG00000182511_3 (sequence is synthesized)
tgctcatccgggaacggcagcagcttcgcaagacctacagcgagcagtggcagcagctgcagcaggagctcaccaagacccacagccaggacattgagaagctgaagagccagtaccgag

SEQ ID NO: 646886 - DNA, 120 bp, Artificial Sequence
  ENSG00000182511_4 (sequence is synthesized)
ctctggcacgggacagtgcccaagccaagcgcaagtaccaggaggccagcaaagacaaggaccgtgacaaggctaaggacaagtatgtgcgcagcctgtggaagctctttgctcaccaca

SEQ ID NO: 646887 - DNA, 120 bp, Artificial Sequence
  ENSG00000182511_5 (sequence is synthesized)
accgctatgtgctgggcgtgcgggctgcgcagctacaccaccagcaccaccaccagctcctgctgcccggcctgctgcggtcactgcaggacctgcacgaggagatggcttgcatcctga

SEQ ID NO: 646888 - DNA, 120 bp, Artificial Sequence
  ENSG00000182511_6 (sequence is synthesized)
aggagatcctgcaggaatacctggagattagcagcctggtgcaggatgaggtggtggccattcaccgggagatggctgcagctgctgcccgcatccagcctgaggctgagtaccaaggct

SEQ ID NO: 646889 - DNA, 120 bp, Artificial Sequence
  ENSG00000182511_7 (sequence is synthesized)
tcctgcgacagtatgggtccgcacctgacgtcccaccctgtgtcacgttcgatgagtcactgcttgaggagggtgaaccgctggagcctggggagctccagctgaacgagctgactgtgg

SEQ ID NO: 646890 - DNA, 120 bp, Artificial Sequence
  ENSG00000182511_8 (sequence is synthesized)
agagcgtgcagcacacgctgacctcagtgacagatgagctggctgtggccaccgagatggtgttcaggcggcaggagatggttacgcagctgcaacaggagctccggaatgaagaggaga

SEQ ID NO: 646891 - DNA, 120 bp, Artificial Sequence
  ENSG00000182511_9 (sequence is synthesized)
acacccacccccgggagcgggtgcagctgctgggcaagaggcaagtgctgcaagaagcactgcaggggctgcaggtagcgctgtgcagccaggccaagctgcaggcccagcaggagttgc

SEQ ID NO: 646892 - DNA, 120 bp, Artificial Sequence
  ENSG00000182511_10 (sequence is synthesized)
tgcagaccaagctggagcacctgggccccggcgagcccccgcctgtgctgctcctgcaggatgaccgccactccacgtcgtcctcggagcaggagcgagaggggggaaggacacccacgc

SEQ ID NO: 646893 - DNA, 120 bp, Artificial Sequence
  ENSG00000182511_11 (sequence is synthesized)
tgagcagctgtggtaccacggggccatcccgagggcagaggtggctgagctgctggtgcactctggggacttcctggtgcgggagagccagggcaagcaggagtacgtgctgtcggtgct

SEQ ID NO: 646894 - DNA, 120 bp, Artificial Sequence
  ENSG00000182511_12 (sequence is synthesized)
gtgggatggtctgccccggcacttcatcatccagtccttggataacctgtaccgactggaaggggaaggctttcctagcattcctttgctcatcgaccacctactgagcacccagcagcc

SEQ ID NO: 646895 - DNA, 120 bp, Artificial Sequence
  ENSG00000182511_13 (sequence is synthesized)
cctcaccaagaagagtggtgttgtcctgcacagggctgtgcccaaggacaagtgggtgctgaaccatgaggacctggtgttgggtgagcagattggacgggggaactttggcgaagtgtt

SEQ ID NO: 646896 - DNA, 120 bp, Artificial Sequence
  ENSG00000182511_14 (sequence is synthesized)
cagcggacgcctgcgagccgacaacaccctggtggcggtgaagtcttgtcgagagacgctcccacctgacctcaaggccaagtttctacaggaagcgaggatcctgaagcagtacagcca

SEQ ID NO: 646897 - DNA, 120 bp, Artificial Sequence
  ENSG00000182511_15 (sequence is synthesized)
ccccaacatcgtgcgtctcattggtgtctgcacccagaagcagcccatctacatcgtcatggagcttgtgcaggggggcgacttcctgaccttcctccgcacggagggggcccgcctgcg

SEQ ID NO: 646898 - DNA, 120 bp, Artificial Sequence
  ENSG00000182511_16 (sequence is synthesized)
ggtgaagactctgctgcagatggtgggggatgcagctgctggcatggagtacctggagagcaagtgctgcatccaccgggacctggctgctcggaactgcctggtgacagagaagaatgt

SEQ ID NO: 646899 - DNA, 120 bp, Artificial Sequence
  ENSG00000182511_17 (sequence is synthesized)
cctgaagatcagtgactttgggatgtcccgagaggaagccgatggggtctatgcagcctcagggggcctcagacaagtccccgtgaagtggaccgcacctgaggcccttaactacggccg

SEQ ID NO: 646900 - DNA, 120 bp, Artificial Sequence
  ENSG00000182511_18 (sequence is synthesized)
ctactcctccgaaagcgacgtgtggagctttggcatcttgctctgggagaccttcagcctgggggcctccccctatcccaacctcagcaatcagcagacacgggagtttgtggagaaggg

SEQ ID NO: 646901 - DNA, 120 bp, Artificial Sequence
  ENSG00000182511_19 (sequence is synthesized)
gggccgtctgccctgcccagagctgtgtcctgatgccgtgttcaggctcatggagcagtgctgggcctatgagcctgggcagcggcccagcttcagcaccatctaccaggagctgcagag

SEQ ID NO: 646902 - DNA, 120 bp, Artificial Sequence
  ENSG00000182511_20 (sequence is synthesized)
catccgaaagcggcatcggtgaggctgggacccccttctcaagctggtggcctctgcaggcctaggtgcagctcctcagcggctccagctcatatgctgacagctcttcacagtcctgga

SEQ ID NO: 646903 - DNA, 120 bp, Artificial Sequence
  ENSG00000182511_21 (sequence is synthesized)
ctcctgccaccagcatccacactgccggcaggatgcagcgccgtgtcctctctgtgtccctgctgctgccagggcttcctcttccgggcagaaacaataaaaccacttgtgcccactgaa

SEQ ID NO: 646904 - DNA, 120 bp, Artificial Sequence
  ENSG00000182511_22 (sequence is synthesized)
agctggggcaggcttggcctgtcgaggacctgggcaagggtgtccctgtaaggggtggtgggtggaagggcctggggagggaggctccaggttggctcctgttcccgaacgtgcggagga

SEQ ID NO: 646905 - DNA, 120 bp, Artificial Sequence
  ENSG00000182511_23 (sequence is synthesized)
aaaccgcgggaggaggaagcgcggaatcaggaactggccggggtccgcaccgggcctgagtcggtccgaggccgtcccaggagcagctgcccgtgcgggtacctctagccccggggcctg

SEQ ID NO: 646906 - DNA, 120 bp, Artificial Sequence
  ENSG00000182511_24 (sequence is synthesized)
gccccctgccctaccacccagagacctccctgccccatctgattccccacttgtaccccgactccctgcccagcccccaccacacaccatcctccaggaaacgggacagtacctaccctg

SEQ ID NO: 646907 - DNA, 120 bp, Artificial Sequence
  ENSG00000182511_25 (sequence is synthesized)
aaaactcccagcagacagctctgccagcaccctgacctcatcacccccacccaggccgcccccatcgagctcttgtgtgcacgcagggagacaccctgttactgtaagccataagatacc

SEQ ID NO: 646908 - DNA, 120 bp, Artificial Sequence
  ENSG00000182511_26 (sequence is synthesized)
ggagcgagaggggggaaggacacccacgctggagatccttaagagccacatctcaggaatcttccgccccaagttctcggtgagtggcgcccagcctgggcccccctactgttgtgtttc

SEQ ID NO: 646909 - DNA, 120 bp, Artificial Sequence
  ENSG00000182511_27 (sequence is synthesized)
agtgtgaagaactgggcctattgtgtcttcctgggctgaagtgatctggtcgccacaggctatagggctgaggcctaaggtggagggaggcctgactgaatcaagatgacttcttgtggg

SEQ ID NO: 646910 - DNA, 120 bp, Artificial Sequence
  ENSG00000182511_28 (sequence is synthesized)
gagcctgagtcccaaatggaaaactccacgcctgtccgctccccaacccctgccccttgatttccccaggtctcccttgggacaggaagcccctgcctgggggtaggaggatggggacaa

SEQ ID NO: 646911 - DNA, 120 bp, Artificial Sequence
  ENSG00000182511_29 (sequence is synthesized)
ctaggatctgtatccgagaagcagtctctgttcgggatatttacttggaaattttattcaaatggaagctggcgcctgagcctctccttagggaattccgtgagaacagcactatgggct

SEQ ID NO: 646912 - DNA, 120 bp, Artificial Sequence
  ENSG00000182511_30 (sequence is synthesized)
ggaatcaggaactggccggggtccgcaccgggcctgagtcggtccgaggccgtcccaggagcagctgcccgtgcggcactatgggcttctcttccgagctgtgcagcccccagggccacg

SEQ ID NO: 646913 - DNA, 120 bp, Artificial Sequence
  ENSG00000182511_31 (sequence is synthesized)
gctgtatctgccttctccttcctctcctgggggccctctggggcagtggctggagatctggcaggccaatgcttgggagccattgtgcccccctccctgcctcccccatctgtgctgtat

SEQ ID NO: 646914 - DNA, 80 bp, Artificial Sequence
  ENSG00000182512_0 (sequence is synthesized)
gtgggcccgggccgtcgtgggctccggcttgcgtgcggagatgagcgggtccctcggccgagctgcggcggctctgctcc

SEQ ID NO: 646915 - DNA, 120 bp, Artificial Sequence
  ENSG00000182512_1 (sequence is synthesized)
gggcgtgcgggcggcgggctcgggcgcgggcggcggcggctcggcggagcagttggacgcgctggtgaagaaggacaaggtggtggtcttcctcaaggggacgccggagcagccccagtg

SEQ ID NO: 646916 - DNA, 120 bp, Artificial Sequence
  ENSG00000182512_2 (sequence is synthesized)
cggcttcagcaacgccgtggtgcagatcctgcggctgcacggcgtccgcgattacgcggcctacaacgtgctggacgacccggagctccgacaaggcattaaagactattccaactggcc

SEQ ID NO: 646917 - DNA, 120 bp, Artificial Sequence
  ENSG00000182512_3 (sequence is synthesized)
caccatcccgcaagtgtacctcaatggcgagtttgtagggggctgtgacattcttctgcagatgcaccagaatggggacttggtggaagaactgaaaaagctggggatccactccgccct

SEQ ID NO: 646918 - DNA, 120 bp, Artificial Sequence
  ENSG00000182512_4 (sequence is synthesized)
actccaagtgagggcggccaagtcctcgctgagcagagagggagccgttcatgtcagagactcactgccagaaaagccttacccattttggttttcactattgagaccgcaactgcttgc

SEQ ID NO: 646919 - DNA, 120 bp, Artificial Sequence
  ENSG00000182512_5 (sequence is synthesized)
actgatcattttggttcgtgagcagttggtgattttagttggtctggtgttcgggctaagaatattttattgtggacttaattacaaccactgcactgtaatgattcaatgctgtattat

SEQ ID NO: 646920 - DNA, 120 bp, Artificial Sequence
  ENSG00000182512_6 (sequence is synthesized)
gatattgctgtaaacaaaattcattcttatattgtcacttattctttgcctgattcagaagttaaataggagctttggaatcattattcatgacccctctgcaaatgtgtcagtctccaa

SEQ ID NO: 646921 - DNA, 120 bp, Artificial Sequence
  ENSG00000182512_7 (sequence is synthesized)
agagagtatctccccccaaattttgtgtagcttcttttgttatggaaaatggtgaacaaaaaaagaaactgtgataactggggcgttgttttttaaaataaactccagcacagggatgct

SEQ ID NO: 646922 - DNA, 120 bp, Artificial Sequence
  ENSG00000182512_8 (sequence is synthesized)
gtgcatgcctgagttgattccgaagtgcatatgtctgtaaggatttggagtgcctgcagtgttttatgtgtgggaagtaagggtgagtctcatattcttctattaaatttgccacaagaa

SEQ ID NO: 646923 - DNA, 120 bp, Artificial Sequence
  ENSG00000182512_9 (sequence is synthesized)
aaaattgcacatggaacagctggctctcgagcaggcatgcctcagcttcctctggagtatgctttttctgcaagtctggtgtgctcgagggtaccaccaaccctgtgcggctccaagact

SEQ ID NO: 646924 - DNA, 120 bp, Artificial Sequence
  ENSG00000182512_10 (sequence is synthesized)
acagattatgtagcaagtccactggtcctgctcttccggatttattcttcccgccaataggagcacttaccacgttccaagcatcgtcctaggcactgaggatacagcagtgaataaaac

SEQ ID NO: 646925 - DNA, 120 bp, Artificial Sequence
  ENSG00000182512_11 (sequence is synthesized)
cggagcagccccagtgcggcttcagcaacgccgtggtgcagatcctgcggctgcacggcgtccgcgattacgcggcctacaacgtgctggacgacccggagctccgacaagtcatcatcc

SEQ ID NO: 646926 - DNA, 120 bp, Artificial Sequence
  ENSG00000182512_12 (sequence is synthesized)
ttgtggctcagaattgaacagagtagttgcacagctgcgctgtcacagagtgtccctcatctcatgtgtgtcctcagagccatttgcacacaggactgatcacatgcatgctggttggtt

SEQ ID NO: 646927 - DNA, 120 bp, Artificial Sequence
  ENSG00000182512_13 (sequence is synthesized)
tcttggctgctgtgagcgcttaagagcagagcgggtctcactcccccacccctcagccctggacagggaccttgctgagctctgggccttcattagactcaccagtcacttcgggttctg

SEQ ID NO: 646928 - DNA, 120 bp, Artificial Sequence
  ENSG00000182512_14 (sequence is synthesized)
cacagagcctcatcatccactccacagagagcccatcacagtggctggatagatgggaactgacaacccatagctgtgggacagggatttttccctgggtaaaagtaattgttaaaaatt

SEQ ID NO: 646929 - DNA, 120 bp, Artificial Sequence
  ENSG00000182512_15 (sequence is synthesized)
aaaaaaaaaaaaaactcaacaactcatcatctcgaggagaagtgactgacggcctgcaccaacttagacagtcacagtcatgaaaagtgcacaggtgggattgcccgagttggccatgaa

SEQ ID NO: 646930 - DNA, 120 bp, Artificial Sequence
  ENSG00000182512_16 (sequence is synthesized)
ttaccgtgatggatccatttggaaatgaagttggttgtgacatttcttcaagttttgtttcgcttgaagcttgactggtagatggagaattttggccttatgtatcttatgtgacttgca

SEQ ID NO: 646931 - DNA, 120 bp, Artificial Sequence
  ENSG00000182512_17 (sequence is synthesized)
ttacccagtccagtcctctgccattaatctaaggtccgcaatgtatcaggtattttactgagaatcttgcttacctaattctcacaaaaaaaaaaaccttgggagatgagggtggaaaca

SEQ ID NO: 646932 - DNA, 120 bp, Artificial Sequence
  ENSG00000182512_18 (sequence is synthesized)
accactggtctctttgacacaaaaactcatgctcttagtggcaagcacagtgttctcaagattgggggaagccagggagggacagtgggttgtctgctactagtgggtcaaaattacata

SEQ ID NO: 646933 - DNA, 120 bp, Artificial Sequence
  ENSG00000182518_0 (sequence is synthesized)
aacttcctgcgcggttgctatggttccgagggcaggactatgggaggctgccctgtacggaaaagaagaagaaatggcagtaaagagggcaaccatcattccacccagcccaaaaggaat

SEQ ID NO: 646934 - DNA, 120 bp, Artificial Sequence
  ENSG00000182518_1 (sequence is synthesized)
aagagaaaccctatctttcaggattctcaagatacagaggtattttcatggagtgataatgaaaggagcagcagccgcattaatatcccagagagagcaagtggaccagaaggcaactta

SEQ ID NO: 646935 - DNA, 120 bp, Artificial Sequence
  ENSG00000182518_2 (sequence is synthesized)
aaccagattgttactgaacccgatgcaaactttccccagttcttgcatgaggggtatgtaccatgccaaggtctttactcccatatcaaccagaccttgaaggaggctcacttcaacagc

SEQ ID NO: 646936 - DNA, 120 bp, Artificial Sequence
  ENSG00000182518_3 (sequence is synthesized)
ctgcagcagcgagggcaagctccaacatgatgaattaggacttccttattccaacctaaactgtgtttataaaagcaattgcatacacaccaaaaaaagtctattggtttttaagtctac

SEQ ID NO: 646937 - DNA, 120 bp, Artificial Sequence
  ENSG00000182518_4 (sequence is synthesized)
attttaagtaacaagttaatgggcagttgtttaattggggttttacttcactgttgtacttttaaaggggctgtgaataaatgtttatgaaatttttatttttatttttattttactctt

SEQ ID NO: 646938 - DNA, 120 bp, Artificial Sequence
  ENSG00000182518_5 (sequence is synthesized)
atttcatgttaaggtagcaatatgaggaaacttctcctgtgcattgaagccatatgtccaattcagattgatttccagatctgtcagttagaaactctatgttaaacatctttttaaaat

SEQ ID NO: 646939 - DNA, 120 bp, Artificial Sequence
  ENSG00000182518_6 (sequence is synthesized)
acaagtaagtcttcatttttaaaaatacagtagcctagtaaagaggtatgtagctttcatttaaaaaacaaacaaaaaatccacactcaaaaaaccataagttagtattcccaaatatgc

SEQ ID NO: 646940 - DNA, 120 bp, Artificial Sequence
  ENSG00000182518_7 (sequence is synthesized)
aaagccagattcagtcttgcactgaaatgaactgccatactcccctcagaaggtagatgttctgttgaaattgctctctagttgtaatggcaacaatcagacccagtttagactatgaac

SEQ ID NO: 646941 - DNA, 120 bp, Artificial Sequence
  ENSG00000182518_8 (sequence is synthesized)
atgaaaatctctctctaataactgtctctacactttgtatttccagggagaatgtttctaaggctcttgtatacttagataccttctgtatcatttatcctctagagtgtgcacttcaga

SEQ ID NO: 646942 - DNA, 120 bp, Artificial Sequence
  ENSG00000182518_9 (sequence is synthesized)
cttagtaggaaacactgcacaattctgtcagataagaaatatgtaatattttgtcttaaacaaaaatttattacgttagcacattatgtgatctcataattccatctattatgtatagag

SEQ ID NO: 646943 - DNA, 120 bp, Artificial Sequence
  ENSG00000182518_10 (sequence is synthesized)
tttccggccggtaccagtccgagctctggtccccacggtcatcacgctttgctttctcagccaagatctcggggctcagggcggaaacgcagcggatatgtattttcttccggggttggt

SEQ ID NO: 646944 - DNA, 120 bp, Artificial Sequence
  ENSG00000182518_11 (sequence is synthesized)
acctgcaggtgacagtgttggccggtggcgcggccctgcttgcctcgtgccccgcccttcgtgcttgaaaaaaaatcccgcgaagccttctccgaaagaacatgctggttctttggttga

SEQ ID NO: 646945 - DNA, 120 bp, Artificial Sequence
  ENSG00000182518_12 (sequence is synthesized)
gcctcgtgccccgcccttcgtgcttgaaaaaaaatcccgcgaagccttctccgaaagaacatgctggttctttggttgtcagtgccttacaagccctggaggcgggggtgaggtggggat

SEQ ID NO: 646946 - DNA, 120 bp, Artificial Sequence
  ENSG00000182518_13 (sequence is synthesized)
tgttactgaacccgatgcaaactttccccagttcttgcatgagggattgtctaaacctgtttatgtcataaactggtttatgtcctttggtcctgaaataaaactcaatacttcacagca

SEQ ID NO: 646947 - DNA, 120 bp, Artificial Sequence
  ENSG00000182518_14 (sequence is synthesized)
tgtgaaactcactcatttcctgcatgcggacttactttggtcctggatgaataatattgaagatatgtgcttaaaacattcctaacatcagaatttgcgcctgtgttttcttccccaaga

SEQ ID NO: 646948 - DNA, 77 bp, Artificial Sequence
  ENSG00000182518_15 (sequence is synthesized)
ggatgaataatattgaagatatgtgcttaaaacattcctaacatcagaatttgcgccttgtaagcttccctgtgtcc

SEQ ID NO: 646949 - DNA, 120 bp, Artificial Sequence
  ENSG00000182518_16 (sequence is synthesized)
gaatgttaaaagcccacttttctgtgaccagcagaccttatctatggtcccaattccaattccttgtaaacacaatttgtaaaatcccgtgagatcctgtctcctttgccatcccgctgc

SEQ ID NO: 646950 - DNA, 120 bp, Artificial Sequence
  ENSG00000182518_17 (sequence is synthesized)
aaggttataagtagagaaaacttaagttacaattccagttttcctcaagatctgagacatgttaattgtctttgtttctccctctggtaacatcttcccaccacacatatttcctgcctt

SEQ ID NO: 646951 - DNA, 120 bp, Artificial Sequence
  ENSG00000182518_18 (sequence is synthesized)
agagagtttaaaaggtgataaaaaaatctaacactggctaccccgctcgggaccccttccacgctgtgaaagctttgtactgtcactctgcttaataaagcctacagcttttttactctc

SEQ ID NO: 646952 - DNA, 120 bp, Artificial Sequence
  ENSG00000182521_0 (sequence is synthesized)
acgcttctctcgcgccctctgcaggaacctgggccgagggccgccccgcctcgctgcccccaggctcataaatggcctctgcgccctggccggagcgggttccgaggctgctcgctccgc

SEQ ID NO: 646953 - DNA, 120 bp, Artificial Sequence
  ENSG00000182521_1 (sequence is synthesized)
gcttaccctcttacccgcccccacccccaacagtgggattacggtccatggagcaggaggagacctacctggagctctacctggaccagtgcgccgctcaggatggccttgccccaccca

SEQ ID NO: 646954 - DNA, 120 bp, Artificial Sequence
  ENSG00000182521_2 (sequence is synthesized)
ggtctcccctgttcagcccagttgtaccttatgatatgtacatactgaatgcatccaatccggatactgcatttaattcgaaccctgaagtcaaagaaacatctggtgatttctcatctg

SEQ ID NO: 646955 - DNA, 120 bp, Artificial Sequence
  ENSG00000182521_3 (sequence is synthesized)
tggatcttagcttcctaccagatgaagttacccaggaaaataaagaccagcctgtcattagcaaacacgaaactgaagaaaattctgaaagccaaagtccacaaagtaggttgccatcac

SEQ ID NO: 646956 - DNA, 120 bp, Artificial Sequence
  ENSG00000182521_4 (sequence is synthesized)
ccagcgaacaggacgttgggctgggcttaaacagcagcagtttgtcaaattcccattcacagctgcaccctggtgatactgactcagtccagccctctcctgagaaaccaaactccgact

SEQ ID NO: 646957 - DNA, 120 bp, Artificial Sequence
  ENSG00000182521_5 (sequence is synthesized)
ccttgtctctggcatccataactcccatgacaccaatgacccctatttcagaatgttgtggaattgtacctcaactacagaatatagtttccactgtaaacctggcctgtaagttggatc

SEQ ID NO: 646958 - DNA, 120 bp, Artificial Sequence
  ENSG00000182521_6 (sequence is synthesized)
tgaagaaaatagctttgcatgcaaaaaatgcagaatataacccaaagaggtttgctgctgtcataatgaggatccgagagcccaggacaacagcccttatatttagctctgggaagatgg

SEQ ID NO: 646959 - DNA, 120 bp, Artificial Sequence
  ENSG00000182521_7 (sequence is synthesized)
tctgcacgggagccaaaagtgaagagcagtctcgacttgcagcaagaaaatatgctcgtgtggtgcagaagcttgggttccctgccagattcctcgattttaaaattcagaacatggttg

SEQ ID NO: 646960 - DNA, 120 bp, Artificial Sequence
  ENSG00000182521_8 (sequence is synthesized)
gaattgtgttgcttatctttgtatctggaaaagttgtgttgacaggtgccaaagaacgttctgagatctatgaagcatttgaaaacatctatcctattctaaaaggttttaaaaaagcct

SEQ ID NO: 646961 - DNA, 120 bp, Artificial Sequence
  ENSG00000182521_9 (sequence is synthesized)
gagcatatcattcagcatctcacattattctggtttgaatatgtccataagcccagcacagaaacagctggattcttctacgtttaattgtagatgttacaagtacgttacttattaaag

SEQ ID NO: 646962 - DNA, 120 bp, Artificial Sequence
  ENSG00000182521_10 (sequence is synthesized)
ggcgactctgtgtaagtaacctaagaaacgaagaaaaattcttattcaaaatgactccttttgtgttattttaaaaactgaacaagtaaacatttcaaaatttgagagatttagggtctc

SEQ ID NO: 646963 - DNA, 120 bp, Artificial Sequence
  ENSG00000182521_11 (sequence is synthesized)
agagatttagggtctcactagaatgatattgtagcatcatgaagactcaatgcgtttccttttagccggaagggccatcttccagtaatttgccaaaatgacgaacacaaagggaaagag

SEQ ID NO: 646964 - DNA, 120 bp, Artificial Sequence
  ENSG00000182521_12 (sequence is synthesized)
aaagggaaagaggtgaggcacctgatacatgttctctaggccttttagaaaagatggagttgttcctttggccacatacatgcgaatctacgaaaaaggtgatattgtagacatcaaggg

SEQ ID NO: 646965 - DNA, 120 bp, Artificial Sequence
  ENSG00000182521_13 (sequence is synthesized)
cgcaaatgttaccacagcaaagctggaagagtctacagtgttacccagcatgctgttggcattgtaaacaagggcaagatttttgccaagagaatgaatgtgcttactgagccaggctgg

SEQ ID NO: 646966 - DNA, 120 bp, Artificial Sequence
  ENSG00000182521_14 (sequence is synthesized)
tcttgaactcctgacctcagttgatccatctgcctgggccttggcactctaagagccaagtaagtttcctgaaacgcgtgaaggtaaataatcagaaaaagacgtcaaagggagaggtgt

SEQ ID NO: 646967 - DNA, 120 bp, Artificial Sequence
  ENSG00000182521_15 (sequence is synthesized)
ctgagttcaactgaagcgccagcctgctccacccagacaagcacttagaaccaatggagggagcctgggctgctggaacctattccctatgagttcatggcataataggtgtcaaaaaaa

SEQ ID NO: 646968 - DNA, 67 bp, Artificial Sequence
  ENSG00000182521_16 (sequence is synthesized)
gtctgggatgtgaggagcgcctctacgcggccgcgaccccatccaggaggtgaggagcgtctctgcc

SEQ ID NO: 646969 - DNA, 120 bp, Artificial Sequence
  ENSG00000182521_17 (sequence is synthesized)
ccgctcaggtgggagaatttttttataaagacaatgatcagcactgaggtagaaatggtgactttccctagcatttaacacagcaaagaagagcccagacaggaaaggttctgagaaagg

SEQ ID NO: 646970 - DNA, 120 bp, Artificial Sequence
  ENSG00000182533_0 (sequence is synthesized)
ctctctgccccaagtattttcagccccagccggccacacagctcggatctcctcctgtggatccccccagctctgcgatgatggcagaagagcacacagatctcgaggcccagatcgtca

SEQ ID NO: 646971 - DNA, 120 bp, Artificial Sequence
  ENSG00000182533_1 (sequence is synthesized)
aggatatccactgcaaggagattgacctggtgaaccgagaccccaagaacattaacgaggacatagtcaaggtggattttgaagacgtgatcgcagagcctgtgggcacctacagctttg

SEQ ID NO: 646972 - DNA, 120 bp, Artificial Sequence
  ENSG00000182533_2 (sequence is synthesized)
acggcgtgtggaaggtgagctacaccaccttcactgtctccaagtactggtgctaccgtctgttgtccacgctgctgggcgtcccactggccctgctctggggcttcctgttcgcctgca

SEQ ID NO: 646973 - DNA, 120 bp, Artificial Sequence
  ENSG00000182533_3 (sequence is synthesized)
tctccttctgccacatctgggcggtggtgccatgcattaagagctacctgatcgagatccagtgcatcagccacatctactcactctgcatccgcaccttctgcaacccactcttcgcgg

SEQ ID NO: 646974 - DNA, 120 bp, Artificial Sequence
  ENSG00000182533_4 (sequence is synthesized)
ccctgggccaggtctgcagcagcatcaaggtggtgctgcggaaggaggtctaaagccaggtggggcaacagcggtggcagggcagggggtggtgggccagactggtccccgggggacttc

SEQ ID NO: 646975 - DNA, 120 bp, Artificial Sequence
  ENSG00000182533_5 (sequence is synthesized)
caatggcccttcgctctcccccagccccaccatgatgcccccatgcctgggcgtgggggaagatcatttgccaagaggcagctactgcaagtctttgcgttcacttgtactgtaacaaca

SEQ ID NO: 646976 - DNA, 120 bp, Artificial Sequence
  ENSG00000182533_6 (sequence is synthesized)
taaaccagcacgcggttcccacccggggccaacctctccacgcgcactcaggaaagtgaccagtgaccactggcgttaggaaggtggctccagtaaagggttttggctgcatttggggaa

SEQ ID NO: 646977 - DNA, 120 bp, Artificial Sequence
  ENSG00000182533_7 (sequence is synthesized)
tgctgcattttgttcgtgcctgtaagattggtttgtgtcctgaccagctccaaaaatatacttcactgccctgaaaaacagacacagggagagttggttgtctcttcacttggccaaatg

SEQ ID NO: 646978 - DNA, 120 bp, Artificial Sequence
  ENSG00000182533_8 (sequence is synthesized)
taagtgaagaacagagtctttttcttcttcggattctattgtttgctggaaccgtacacgttccttggaagatcatgtttaagtgactcctgttgcctgagcacaaaaatgggcaccaat

SEQ ID NO: 646979 - DNA, 120 bp, Artificial Sequence
  ENSG00000182533_9 (sequence is synthesized)
ggaggaaaatgacccttgggctggcaggggcagtgacccttccagggtaccactgagggaagggcctgggttcaagcctcccggaacctcccctttggctaaccgagcccctgaaatgcc

SEQ ID NO: 646980 - DNA, 120 bp, Artificial Sequence
  ENSG00000182533_10 (sequence is synthesized)
cagtactgccatttgacatgagggtaccttcgccctcaggagatgtgacgaaggaacaaggtctaatttgtgcgtgtgtggactcactatggaaataaaatgcagtagaaagagcatgta

SEQ ID NO: 646981 - DNA, 120 bp, Artificial Sequence
  ENSG00000182533_11 (sequence is synthesized)
gagaccccaagaacattaacgaggacatagtcaagactggagaaaatggaaaaagagaataccccggaggaatctgaagctctcaaacacttctgataacatcctgctggttactgatca

SEQ ID NO: 646982 - DNA, 120 bp, Artificial Sequence
  ENSG00000182533_12 (sequence is synthesized)
gaatgcagaacgagcaccaccagggtcttgaaaccttacaaacaacttcataaatcctgcactgggcttccttattgaccacacaggcttcctatcaaacatgaatgaagaggaggtgga

SEQ ID NO: 646983 - DNA, 120 bp, Artificial Sequence
  ENSG00000182533_13 (sequence is synthesized)
ctgtattacaaaattaataatgtaagatggtggctgccaaagccattcataatcgtaattgcttttgcatgtgttttcttgaaagcaacttcatatttgtcagcaactaggaatgaaggc

SEQ ID NO: 646984 - DNA, 120 bp, Artificial Sequence
  ENSG00000182533_14 (sequence is synthesized)
gcttcctttgatacttatatgtacaggcacaaaatagagttgaactttgctgcacacaataaatgtgttgtgaaaatacgtgtttgaagtctaataaacagacttttattttgcccatgt

SEQ ID NO: 646985 - DNA, 80 bp, Artificial Sequence
  ENSG00000182534_0 (sequence is synthesized)
cgcggcgcgatggaggcgccggccgagctactggccgcgctgcctgcgctggccaccgcgctggcccttctgctcgcctg

SEQ ID NO: 646986 - DNA, 120 bp, Artificial Sequence
  ENSG00000182534_1 (sequence is synthesized)
gggggagctcggggagcctgcgggaccgggggagcccgaagggccaggggatcccgcggcggcgccagcggaggcggaggagcaggcggtggaggcgaggcaggaagaggagcaggactt

SEQ ID NO: 646987 - DNA, 120 bp, Artificial Sequence
  ENSG00000182534_2 (sequence is synthesized)
caggacttggatggtgagaaggggccatcatcggaagggcctgaggaggaggacggagaaggcttctccttcaaatacagccccgggaagctgaggggaaaccagtacaagaagatgatg

SEQ ID NO: 646988 - DNA, 120 bp, Artificial Sequence
  ENSG00000182534_3 (sequence is synthesized)
accaaagaggagctggaggaggagcagagagttcagaaggaacagctggctgccatcttcaagctcatgaaagacaacaaggagacgtttggcgagatgtccgacggcgacgtgcaggag

SEQ ID NO: 646989 - DNA, 120 bp, Artificial Sequence
  ENSG00000182534_4 (sequence is synthesized)
cagctccggctctacgacatgtagactgcgcccacgggatgcacagcggccatgcctgatgctgtccccacccttgccccatgcccttgttctttccagacttctgtaggcctaattttc

SEQ ID NO: 646990 - DNA, 120 bp, Artificial Sequence
  ENSG00000182534_5 (sequence is synthesized)
ccttataaacatagatgcaggcgtacattctataggtacttgccgagttcttgcagtgtgtatattactttgcaggaatcaaaattgttttattcagaagacaaagtccctgacccctct

SEQ ID NO: 646991 - DNA, 120 bp, Artificial Sequence
  ENSG00000182534_6 (sequence is synthesized)
gaagacaaagtccctgacccctctggtttctgcttgctggtgaggttccagctgttattgggctctgaggccctctcctgatccaaatctttttttgtttgtttgagatggagtctcact

SEQ ID NO: 646992 - DNA, 120 bp, Artificial Sequence
  ENSG00000182534_7 (sequence is synthesized)
caatactacactcttattctgccttacgaggatttctggaagcttctgtaactgtagggaagaaagctgtaggggagcatggtttttttgttttgtttttgtttttgagacgaggtctca

SEQ ID NO: 646993 - DNA, 120 bp, Artificial Sequence
  ENSG00000182534_8 (sequence is synthesized)
caggctggagtgcagtggtgccatcatgactcactgcagccttgacctcccaggcgcacaaaatcctcctctcagcctgagtaactgggactacaggtgtgtaccactacatccagctaa

SEQ ID NO: 646994 - DNA, 90 bp, Artificial Sequence
  ENSG00000182534_9 (sequence is synthesized)
cagcctgagtaactgggactacaggtgtgtaccactacatccagctaaaggagagcgtttttttcgcgcctggtcactgtgcccttcacc

SEQ ID NO: 646995 - DNA, 120 bp, Artificial Sequence
  ENSG00000182534_10 (sequence is synthesized)
tacaggcgtgagccaccatgcccagctgggagcgttctttcagcaaaaagtctaattcagagactcaccttccatcctggcactaaacaatagtactagaggtaagatctgccaagaatt

SEQ ID NO: 646996 - DNA, 120 bp, Artificial Sequence
  ENSG00000182534_11 (sequence is synthesized)
tagaggtaagatctgccaagaatttctctcacttaagcaggatacttactttaaatataattaggcaagacttatttgagtacttgcctaattgtatttaattagaactatgctggatgc

SEQ ID NO: 646997 - DNA, 120 bp, Artificial Sequence
  ENSG00000182534_12 (sequence is synthesized)
tgtagacagaagaaataaaatactcaacttggtccctatcttccagcaggttagaggcctttagggaagaaaagcctgtgtgcagggaaagagaacctcaccagaaagtattcaataaaa

SEQ ID NO: 646998 - DNA, 120 bp, Artificial Sequence
  ENSG00000182534_13 (sequence is synthesized)
tgccaaagtgatcttacagaacagtgcctgtgacaccggaggggattgttctgtctttgtgagtgaacatacaatgatggggataactggtcctcataccatgcaggtcccatttctgat

SEQ ID NO: 646999 - DNA, 120 bp, Artificial Sequence
  ENSG00000182534_14 (sequence is synthesized)
caccccactggcaggacaattcacagttcttgagcaaactgagttagggagggtatgctaacgacagaacctatgcaagttcttagaaatattttttgtttgctgaaataaagctcaatc

SEQ ID NO: 647000 - DNA, 120 bp, Artificial Sequence
  ENSG00000182534_15 (sequence is synthesized)
aacacactaccttaaaaaaaaagtggagcagtggcatttccatgcctcatgctcaccatcatgaggttaacttcccgccgtcgcctcttgcctgccaggggtttttcgggagcccctctc

SEQ ID NO: 647001 - DNA, 120 bp, Artificial Sequence
  ENSG00000182534_16 (sequence is synthesized)
tgttccactctgattccttttgtttcttgctgaccattcactctctgtgtctgttgttggatccaaatacgagtgtttttctttctttttgtggtcagtgcttttttccttcttgaaatt

SEQ ID NO: 647002 - DNA, 120 bp, Artificial Sequence
  ENSG00000182534_17 (sequence is synthesized)
ctttctttttgtggtcagtgcttttttccttcttgaaattgttttaatgtgttttgtcaaaagcatttaaccatgttatgatttaagaattctctgttcacttgaggtcaggagttcaag

SEQ ID NO: 647003 - DNA, 120 bp, Artificial Sequence
  ENSG00000182534_18 (sequence is synthesized)
aaaaaaaaaaaaaaaaaaaaaattatttgttctgtctcaggtcttagggaccccttacctcagctaatgtctctgtcccctaaatgcacatcggtgggcagggcaaacccgtaggtgccc

SEQ ID NO: 647004 - DNA, 120 bp, Artificial Sequence
  ENSG00000182534_19 (sequence is synthesized)
gggcaaacccgtaggtgcccttatccctcccaaggctgcactgcaaagctcctgtgtttccattgcccactttcttctccctctcctttcttttctgattataccaaacaggaatgactc

SEQ ID NO: 647005 - DNA, 120 bp, Artificial Sequence
  ENSG00000182534_20 (sequence is synthesized)
gtgtacttgagtcaaaatcctgatggcattgggaaaagtaaactgaaggaatttttgtacacttgtaccagctaagatgttctgactgcaacgacagaaaactccagctcaactggctta

SEQ ID NO: 647006 - DNA, 120 bp, Artificial Sequence
  ENSG00000182534_21 (sequence is synthesized)
aacaagaacagggctctctcacgtgagaagccaagagttagaacaactccaggcccagaatggtcggagctcaagctgcagttctcttagctcagtcttcctcgtactgtgggcttttat

SEQ ID NO: 647007 - DNA, 120 bp, Artificial Sequence
  ENSG00000182534_22 (sequence is synthesized)
tggagactagctctcctcatggtggcaagatggctgcaggagttcaggtatctcatccagaagcaagaaaagggcatgtcttgcttgcgtctctaggcgtaagggaactggtccagatgt

SEQ ID NO: 647008 - DNA, 120 bp, Artificial Sequence
  ENSG00000182534_23 (sequence is synthesized)
ccccgccccacatcccttcagatcccaattggccagaatatggcacgtgcccatgtttcaaccaatcatgggcaaggacatgggaccagcatgattggcctagacccctggagcctgggg

SEQ ID NO: 647009 - DNA, 120 bp, Artificial Sequence
  ENSG00000182534_24 (sequence is synthesized)
ctgggcccagcatcccctgaatacatggccatctggaggagaaggtaactgaatttcactggggatctgtgataaaagggagcatgggtgttggggagacacctgttccagttgggtttc

SEQ ID NO: 647010 - DNA, 120 bp, Artificial Sequence
  ENSG00000182534_25 (sequence is synthesized)
ctatgaggtccaggacagggcttggtgggcactcggaagccagtgtctgaagtgctcagcatcctcctcttcctcggtggtgggtgtccaccgcccaggccccacccctggccttggaca

SEQ ID NO: 647011 - DNA, 120 bp, Artificial Sequence
  ENSG00000182534_26 (sequence is synthesized)
cttcatggaaacactgctgatttgctgtggtgttgggtggctcctatctattccccgtaagtgctggcctctgttgacaccatttctgctacctcatctgagattgttctcatcagctca

SEQ ID NO: 647012 - DNA, 120 bp, Artificial Sequence
  ENSG00000182534_27 (sequence is synthesized)
cagagattcatttcagtgaatgaaccaaatctaagctaaaaagcataaaggagggcagaaagaaacagcagtgtgggagaaagagcgcaaacaccgagagaaagatgtctacctggcagc

SEQ ID NO: 647013 - DNA, 120 bp, Artificial Sequence
  ENSG00000182534_28 (sequence is synthesized)
catgtcagagaatcaccagtatgtatgtcactgccaccaagaacctaagagccacagaggcctacagaagccaatcccaatggaactctctctgggtgtgggggttgagagaacctaaag

SEQ ID NO: 647014 - DNA, 120 bp, Artificial Sequence
  ENSG00000182534_29 (sequence is synthesized)
cattcagctgcacagagcctctttccagcgatgggaaccagtctcaaagcctttacatctctcccctgccctccatcactgctgagaaccctgccccaggctggcctgcctacatgacac

SEQ ID NO: 647015 - DNA, 120 bp, Artificial Sequence
  ENSG00000182534_30 (sequence is synthesized)
aaatagcagtggactgtcactcatcagtatctgcagttctgtttaccaaagcctgcttgctagagacgtttcagggcctccttccctcaaagcgtccactgtacctccatctggatacaa

SEQ ID NO: 647016 - DNA, 120 bp, Artificial Sequence
  ENSG00000182534_31 (sequence is synthesized)
ttagctggctccccacttcctggactgacggtaaccaccttttccaatgaccctgaagaaaacatgcaatctaagctgctttaagagtaacctacaactgaggacaaattttctatcaac

SEQ ID NO: 647017 - DNA, 120 bp, Artificial Sequence
  ENSG00000182534_32 (sequence is synthesized)
tcccagtacccctctctgccgtggctgatttgttactggttttccttttttttttttaatttgaaaatgtaagtaattatactaagaccagatcactctgagattgttttattctaattt

SEQ ID NO: 647018 - DNA, 120 bp, Artificial Sequence
  ENSG00000182534_33 (sequence is synthesized)
gtcctaaggacctgcctgtacttagagcctgatagaaagcccaagttgatctactgggcagctctctgggcctggaaggaagagcacacaacaagacttcaacagtgagcctggctaggt

SEQ ID NO: 647019 - DNA, 120 bp, Artificial Sequence
  ENSG00000182534_34 (sequence is synthesized)
ccaggcagaccatgatttctgaaagcaacagtatagtccacatggaatcaggctgctgatgaacagcagcgagaggctgcctctgaatcatatctgcagggtcacctgcgcctggtggag

SEQ ID NO: 647020 - DNA, 120 bp, Artificial Sequence
  ENSG00000182534_35 (sequence is synthesized)
gcccacagtcatccattaggccccagtatcctatgtgggagtatccacgtctagtctctacttctcactgcaggagaggtggcagatgaggaggtttcctactttaaagaaagtagaagt

SEQ ID NO: 647021 - DNA, 120 bp, Artificial Sequence
  ENSG00000182534_36 (sequence is synthesized)
tgtttcctttcttccctcctcacagccttgagggggaggttgtgcccagcctgacagcagctgccttgcccaagattacatcctgttctgggggcagcccacctccaaaccaagtcacta

SEQ ID NO: 647022 - DNA, 120 bp, Artificial Sequence
  ENSG00000182534_37 (sequence is synthesized)
gtggggtacaaaggcctgccctctctgccaaaaggcaggtgctgatggaccattccagttctagagttcccaaagagacgtctttttggagagcggcagggtaccagaaatccttcactc

SEQ ID NO: 647023 - DNA, 120 bp, Artificial Sequence
  ENSG00000182534_38 (sequence is synthesized)
aggctatagcatggccaccaattataagtaacttgaggcccacccagccaaacatgcctttccgggtctagtgctgggttccagaacaggaagcctggcagattcctactgccacagatt

SEQ ID NO: 647024 - DNA, 120 bp, Artificial Sequence
  ENSG00000182534_39 (sequence is synthesized)
ctttttactattattattgtcaccttatttttcttttggtggaacccctctagggcttccaccggattctccaccatttacgctatcaattttatcagttttggttttatcgtttcagtg

SEQ ID NO: 647025 - DNA, 120 bp, Artificial Sequence
  ENSG00000182534_40 (sequence is synthesized)
cttctttttgctaacggtagcagccaatatacatcatctctggagacaaatcacgccatagaaaatattgtagttttcctcatttttcttaacgccacagagtcagctgggctgtagtac

SEQ ID NO: 647026 - DNA, 120 bp, Artificial Sequence
  ENSG00000182534_41 (sequence is synthesized)
cagcccggatgtaccagtttactcagccactccccctctcatggacatctgcatggtttccagtcttgcaaattcatacagtgccactacaaataaaaccttgcgcgtatgctgttttca

SEQ ID NO: 647027 - DNA, 120 bp, Artificial Sequence
  ENSG00000182534_42 (sequence is synthesized)
ttaggtcctgagccacaaatattcttgcaaatccttttgaactgaagaataacgaagttatccttagcgtcctcctaaaggcttttccttttggcatcttaaaagcttgagagataaaac

SEQ ID NO: 647028 - DNA, 120 bp, Artificial Sequence
  ENSG00000182534_43 (sequence is synthesized)
ggaaaccccagagaggagtctgggcaggctcccagggtgcatgctgcctccataaatctgctgagctctagaccctcaatcaggacttgtcccttggctagcaggatcctgggaacacct

SEQ ID NO: 647029 - DNA, 120 bp, Artificial Sequence
  ENSG00000182534_44 (sequence is synthesized)
ttggccctgccctgtgtagagatgttcatgtctgttcctgtgggtcactttgttaagctgaagagttttaagaggtagagctcagaccctggactgggatttttcttaccactcaaactt

SEQ ID NO: 647030 - DNA, 120 bp, Artificial Sequence
  ENSG00000182534_45 (sequence is synthesized)
aaaagaacattttaaaagcagagttcactttcactccagtctcccctcttttgccctcactgaagccaaaccacagaagactttgaggaatgagagacaaatgaggtagagctcacctgt

SEQ ID NO: 647031 - DNA, 120 bp, Artificial Sequence
  ENSG00000182534_46 (sequence is synthesized)
gctcaccagctccgtcagggtggtcagccgacccctttccctgggaaccccacttctctctgtggctggcttggttgtcgggggtgagatgccatattgattacagggcagcaaagaacc

SEQ ID NO: 647032 - DNA, 120 bp, Artificial Sequence
  ENSG00000182534_47 (sequence is synthesized)
agtaccaggaatttacttgaccattccccttatttttcatctagaggaatctcggattcagccctttcattgctaagacaccttttcactgaggttcttaccagctcagccaaatctcca

SEQ ID NO: 647033 - DNA, 120 bp, Artificial Sequence
  ENSG00000182534_48 (sequence is synthesized)
ctctgctatagcagaagcaataatgtttgctttaaaaagatttcttgacctatgccttttcttagaaagtttgatagattagttagaacttcagatcatcagatcagtctcaaatgggtt

SEQ ID NO: 647034 - DNA, 120 bp, Artificial Sequence
  ENSG00000182534_49 (sequence is synthesized)
tcttggaattttatatttgacaatatttatactataccaaactcatttgcagttcttaggtttgttggttaaaacatttttttaaagcagtaagtttatagaaaatgttttcatttaatg

SEQ ID NO: 647035 - DNA, 120 bp, Artificial Sequence
  ENSG00000182534_50 (sequence is synthesized)
gaaggctggggaatgtccagcatcaacccctatggcatgcattcccaggggccttctcatctgggcctggaacctttggttcagggcttaggggagaacaggccacatggcaacagccac

SEQ ID NO: 647036 - DNA, 120 bp, Artificial Sequence
  ENSG00000182534_51 (sequence is synthesized)
acagtcattgccttcaacacagagccacgtgtccccaaacagcaatagtcatgcccttgtccaggctgggatctaattgacacaataggtcgttgactccctcctagtagagctatctag

SEQ ID NO: 647037 - DNA, 120 bp, Artificial Sequence
  ENSG00000182534_52 (sequence is synthesized)
gtttgtctggaaagtttccgaccctggcttataggcaccacacctcatgtactcctcatggcttggatctctgtattcagcctttgttcagtccaataaactttgagtagatgatctcaa

SEQ ID NO: 647038 - DNA, 120 bp, Artificial Sequence
  ENSG00000182534_53 (sequence is synthesized)
atctacccactgggcttccaagttgaagttcctggggctcccatgtcccctccccatgaccttcaatcccacagagcccatgggcacggcacgtcgctctcatcctctgacattcctgca

SEQ ID NO: 647039 - DNA, 120 bp, Artificial Sequence
  ENSG00000182534_54 (sequence is synthesized)
ctgctgacagtttctcgtgggcccttccaaaaaacaaaccttttctctgcattttcgagcacatgcgtgcatttccactttgccatttacagcaagatgactgcgctgctcacgtggggc

SEQ ID NO: 647040 - DNA, 120 bp, Artificial Sequence
  ENSG00000182534_55 (sequence is synthesized)
tgctgcttgcatttttccctcgatttatcttgatgtacttttcatgtcagcacctatcaacgcctcctttttttttttttttctttttttaagatgcagtcttgctgtgtcactaggctg

SEQ ID NO: 647041 - DNA, 120 bp, Artificial Sequence
  ENSG00000182534_56 (sequence is synthesized)
tgttggccaggctggtctcgaattcccaacctcagctgatccacccacctaggcctcccaaaattctgggattacaggcgtgagcgaccgcacccggtccccagttctgtcttttcaact

SEQ ID NO: 647042 - DNA, 120 bp, Artificial Sequence
  ENSG00000182534_57 (sequence is synthesized)
cgaccgcacccggtccccagttctgtcttttcaactgcacgcggtcagagtcattatataaaaatcctgatggacatttctccagtctggagcagatccctagaagtgggtttgctgtgt

SEQ ID NO: 647043 - DNA, 120 bp, Artificial Sequence
  ENSG00000182534_58 (sequence is synthesized)
caaatggagcggctcctcttcctgcccccggaagaggcctgcccactccgacctcagccatagagatactttgctgtgcaaaatttgggaaacgtcaggacacacaggcaccacttcgcc

SEQ ID NO: 647044 - DNA, 120 bp, Artificial Sequence
  ENSG00000182534_59 (sequence is synthesized)
atagatagcactaagtctgtgtgtacaaagtgcccaacagggaagacgctgtgttgcctgcgcagctccccccaggcagcattttgtgtagtcaaggaagtccctcaggccaggcacagt

SEQ ID NO: 647045 - DNA, 83 bp, Artificial Sequence
  ENSG00000182534_60 (sequence is synthesized)
cggccaacatggtgacatgccatctctactgaaaacacaaaaaaattagctgggcttgggtggcgggcgcccgtaatcccagc

SEQ ID NO: 647046 - DNA, 120 bp, Artificial Sequence
  ENSG00000182534_61 (sequence is synthesized)
ccagcctgggcaacaagagccaaaactctgtctcagaaacacactcagaaaaaaacagaaaccaaacaaacaaaaagtcactcagaggagctcaaggcccctctgggtttgccacttccg

SEQ ID NO: 647047 - DNA, 120 bp, Artificial Sequence
  ENSG00000182534_62 (sequence is synthesized)
acccgctgtggggcttgtaaaaactttgcctcccggcacagctcagtgttttgttagggagcctcccgtgagcggccgacgctggctgggctccatgggatcagctggggctgctcattc

SEQ ID NO: 647048 - DNA, 120 bp, Artificial Sequence
  ENSG00000182534_63 (sequence is synthesized)
agttttgggaacatggacactgagagagttggggatggaaaacaacatagaaggaagcaaagccagaggctgcgatggccatgctgcctggccctggtcccagacagacaccccagccag

SEQ ID NO: 647049 - DNA, 120 bp, Artificial Sequence
  ENSG00000182534_64 (sequence is synthesized)
gcagcgtcgcagtgggagtcctgggcccacttctccaaatggcacacagaagcctcaacaggcacccacctgggaaaggccaaggccgagggcttggggtgcacagtcaagaacacgcct

SEQ ID NO: 647050 - DNA, 120 bp, Artificial Sequence
  ENSG00000182534_65 (sequence is synthesized)
cagctcagcatttgtgagccgagtcactttggcccatcgtttgtacacagcccccacctgctggttgaccatgaccacagggcaggcgctgccacagggcgtgggcaggctggaccttcg

SEQ ID NO: 647051 - DNA, 120 bp, Artificial Sequence
  ENSG00000182541_0 (sequence is synthesized)
gtcttcccgcgcctgaggcggcggcggcaggagctgaggggagttgtagggaactgaggggagctgctgtgtcccccgcctcctcctccccatttccgcgctcccgggaccatgtccgcg

SEQ ID NO: 647052 - DNA, 120 bp, Artificial Sequence
  ENSG00000182541_1 (sequence is synthesized)
ctggcgggtgaagatgtctggaggtgtccaggctgtggggaccacattgctccaagccagatatggtacaggactgtcaacgaaacctggcacggctcttgcttccggtgttcagaatgc

SEQ ID NO: 647053 - DNA, 120 bp, Artificial Sequence
  ENSG00000182541_2 (sequence is synthesized)
caggattccctcaccaactggtactatgagaaggatgggaagctctactgccccaaggactactgggggaagtttggggagttctgtcatgggtgctccctgctgatgacagggcctttt

SEQ ID NO: 647054 - DNA, 120 bp, Artificial Sequence
  ENSG00000182541_3 (sequence is synthesized)
atggtggctggggagttcaagtaccacccagagtgctttgcctgtatgagctgcaaggtgatcattgaggatggggatgcatatgcactggtgcagcatgccaccctctactgtgggaag

SEQ ID NO: 647055 - DNA, 120 bp, Artificial Sequence
  ENSG00000182541_4 (sequence is synthesized)
tgccacaatgaggtggtgctggcacccatgtttgagagactctccacagagtctgttcaggagcagctgccctactctgtcacgctcatctccatgccggccaccactgaaggcaggcgg

SEQ ID NO: 647056 - DNA, 120 bp, Artificial Sequence
  ENSG00000182541_5 (sequence is synthesized)
ggcttctccgtgtccgtggagagtgcctgctccaactacgccaccactgtgcaagtgaaagaggtcaaccggatgcacatcagtcccaacaatcgaaacgccatccaccctggggaccgc

SEQ ID NO: 647057 - DNA, 120 bp, Artificial Sequence
  ENSG00000182541_6 (sequence is synthesized)
atcctggagatcaatgggacccccgtccgcacacttcgagtggaggaggtggaggatgcaattagccagacgagccagacacttcagctgttgattgaacatgaccccgtctcccaacgc

SEQ ID NO: 647058 - DNA, 120 bp, Artificial Sequence
  ENSG00000182541_7 (sequence is synthesized)
ctggaccagctgcggctggaggcccggctcgctcctcacatgcagaatgccggacacccccacgccctcagcaccctggacaccaaggagaatctggaggggacactgaggagacgttcc

SEQ ID NO: 647059 - DNA, 120 bp, Artificial Sequence
  ENSG00000182541_8 (sequence is synthesized)
ctaaggcgcagtaacagtatctccaagtcccctggccccagctccccaaaggagcccctgctgttcagccgtgacatcagccgctcagaatcccttcgttgttccagcagctattcacag

SEQ ID NO: 647060 - DNA, 120 bp, Artificial Sequence
  ENSG00000182541_9 (sequence is synthesized)
cagatcttccggccctgtgacctaatccatggggaggtcctggggaagggcttctttgggcaggctatcaaggtgacacacaaagccacgggcaaagtgatggtcatgaaagagttaatt

SEQ ID NO: 647061 - DNA, 120 bp, Artificial Sequence
  ENSG00000182541_10 (sequence is synthesized)
cgatgtgatgaggagacccagaaaacttttctgactgaggtgaaagtgatgcgcagcctggaccaccccaatgtgctcaagttcattggtgtgctgtacaaggataagaagctgaacctc

SEQ ID NO: 647062 - DNA, 120 bp, Artificial Sequence
  ENSG00000182541_11 (sequence is synthesized)
ctgacagagtacattgaggggggcacactgaaggactttctgcgcagtatggatccgttcccctggcagcagaaggtcaggtttgccaaaggaatcgcctccggaatggcctatttgcac

SEQ ID NO: 647063 - DNA, 120 bp, Artificial Sequence
  ENSG00000182541_12 (sequence is synthesized)
tctatgtgcatcatccaccgggatctgaactcgcacaactgcctcatcaagttggacaagactgtggtggtggcagactttgggctgtcacggctcatagtggaagagaggaaaagggcc

SEQ ID NO: 647064 - DNA, 120 bp, Artificial Sequence
  ENSG00000182541_13 (sequence is synthesized)
cccatggagaaggccaccaccaagaaacgcaccttgcgcaagaacgaccgcaagaagcgctacacggtggtgggaaacccctactggatggcccctgagatgctgaacggaaagagctat

SEQ ID NO: 647065 - DNA, 120 bp, Artificial Sequence
  ENSG00000182541_14 (sequence is synthesized)
gatgagacggtggatatcttctcctttgggatcgttctctgtgagatcattgggcaggtgtatgcagatcctgactgccttccccgaacactggactttggcctcaacgtgaagcttttc

SEQ ID NO: 647066 - DNA, 120 bp, Artificial Sequence
  ENSG00000182541_15 (sequence is synthesized)
tggagcctgagagcagaccagcattctcgaaattggaggactcctttgaggccctctccctgtacctgggggagctgggcatcccgctgcctgcagagctggaggagttggaccacactg

SEQ ID NO: 647067 - DNA, 120 bp, Artificial Sequence
  ENSG00000182541_16 (sequence is synthesized)
tgagcatgcagtacggcctgacccgggactcacctccctagccctggcccagccccctgcaggggggtgttctacagccagcattgcccctctgtgccccattcctgctgtgagcagggc

SEQ ID NO: 647068 - DNA, 120 bp, Artificial Sequence
  ENSG00000182541_17 (sequence is synthesized)
cgtccgggcttcctgtggattggcggaatgtttagaagcagaacaagccattcctattacctccccaggaggcaagtgggcgcagcaccagggaaatgtatctccacaggttctggggcc

SEQ ID NO: 647069 - DNA, 120 bp, Artificial Sequence
  ENSG00000182541_18 (sequence is synthesized)
tagttactgtctgtaaatccaatacttgcctgaaagctgtgaagaagaaaaaaacccctggcctttgggccaggaggaatctgttactcgaatccacccaggaactccctggcagtggat

SEQ ID NO: 647070 - DNA, 120 bp, Artificial Sequence
  ENSG00000182541_19 (sequence is synthesized)
tgtgggaggctcttgcttacactaatcagcgtgacctggacctgctgggcaggatcccagggtgaacctgcctgtgaactctgaagtcactagtccagctgggtgcaggaggacttcaag

SEQ ID NO: 647071 - DNA, 120 bp, Artificial Sequence
  ENSG00000182541_20 (sequence is synthesized)
tgtgtggacgaaagaaagactgatggctcaaagggtgtgaaaaagtcagtgatgctccccctttctactccagatcctgtccttcctggagcaaggttgagggagtaggttttgaagagt

SEQ ID NO: 647072 - DNA, 120 bp, Artificial Sequence
  ENSG00000182541_21 (sequence is synthesized)
cccttaatatgtggtggaacaggccaggagttagagaaagggctggcttctgtttacctgctcactggctctagccagcccagggaccacatcaatgtgagaggaagcctccacctcatg

SEQ ID NO: 647073 - DNA, 120 bp, Artificial Sequence
  ENSG00000182541_22 (sequence is synthesized)
ttttcaaacttaatactggagactggctgagaacttacggacaacatcctttctgtctgaaacaaacagtcacaagcaaaggaagaggctgggggactagaaagaggccctgccctctag

SEQ ID NO: 647074 - DNA, 120 bp, Artificial Sequence
  ENSG00000182541_23 (sequence is synthesized)
aaagctcagatcttggcttctgttactcatactcgggtgggctccttagtcagatgcctaaaacattttgcctaaagctcgatgggttctggaggacagtgtggcttgtcacaggcctag

SEQ ID NO: 647075 - DNA, 120 bp, Artificial Sequence
  ENSG00000182541_24 (sequence is synthesized)
agtctgagggaggggagtgggagtctcagcaatctcttggtcttggcttcatggcaaccactgctcacccttcaacatgcctggtttaggcagcagcttgggctgggaagaggtggtggc

SEQ ID NO: 647076 - DNA, 120 bp, Artificial Sequence
  ENSG00000182541_25 (sequence is synthesized)
agagtctcaaagctgagatgctgagagagatagctccctgagctgggccatctgacttctacctcccatgtttgctctcccaactcattagctcctgggcagcatcctcctgagccacat

SEQ ID NO: 647077 - DNA, 120 bp, Artificial Sequence
  ENSG00000182541_26 (sequence is synthesized)
gtgcaggtactggaaaacctccatcttggctcccagagctctaggaactcttcatcacaactagatttgcctcttctaagtgtctatgagcttgcaccatatttaataaattgggaatgg

SEQ ID NO: 647078 - DNA, 120 bp, Artificial Sequence
  ENSG00000182541_27 (sequence is synthesized)
gtttggggtattaatgcaatgtgtggtggttgtattggagcagggggaattgataaaggagagtggttgctgttaatattatcttatctattgggtggtatgtgaaatattgtacataga

SEQ ID NO: 647079 - DNA, 120 bp, Artificial Sequence
  ENSG00000182541_28 (sequence is synthesized)
cctgatgagttgtgggaccagatgtcatctctggtcagagtttacttgctatatagactgtacttatgtgtgaagtttgcaagcttgctttagggctgagccctggactcccagcagcag

SEQ ID NO: 647080 - DNA, 120 bp, Artificial Sequence
  ENSG00000182541_29 (sequence is synthesized)
cacagttcagcattgtgtggctggttgtttcctggctgtccccagcaagtgtaggagtggtgggcctgaactgggccattgatcagactaaataaattaagcagttaacataactggcaa

SEQ ID NO: 647081 - DNA, 120 bp, Artificial Sequence
  ENSG00000182541_30 (sequence is synthesized)
ctcaagaatgccagtgtgtgtgtagcctccacagagaggtcgttttctcggagtccagaggggccgcctgagcttctgagaactagggaggagccatcccagccatgagcccctgtggga

SEQ ID NO: 647082 - DNA, 120 bp, Artificial Sequence
  ENSG00000182541_31 (sequence is synthesized)
atctgctgggggccaagtggcctggagtcctcaggctcccgcagctgctccggagggagaggtgagctcagggcagcctgcctgcagccagaggtgccgggagccccgggcctgtcatgg

SEQ ID NO: 647083 - DNA, 120 bp, Artificial Sequence
  ENSG00000182541_32 (sequence is synthesized)
tggccatctacagccggcctgaggcagtcacagacggatttgcagctgagcctgtctatctggtgtgggaagaagatggggagttacttgtcagtcccggcttacttcacctccagagac

SEQ ID NO: 647084 - DNA, 120 bp, Artificial Sequence
  ENSG00000182541_33 (sequence is synthesized)
atctgacacttcctttggaagctctagggcagagagtgaaagagtggattttgacgggggccttgcttggaggtcattcacccacccctgtcctcactccagcaacagtgataactcact

SEQ ID NO: 647085 - DNA, 120 bp, Artificial Sequence
  ENSG00000182541_34 (sequence is synthesized)
ggggccgcaggagagggcccgggctgcgcggatgatgagggcccagtgaggcgccaagggaaggtcaccatcaagtatgaccccaaggagctacggaagcacctcaacctagaggagtgg

SEQ ID NO: 647086 - DNA, 120 bp, Artificial Sequence
  ENSG00000182541_35 (sequence is synthesized)
atcctggagcagctcacgcgcctctacgactgccaggaagaggagatctcagaactagagattgacgtggatgagctcctggacatggagagtgacgatgcctgggcttccagggtcaag

SEQ ID NO: 647087 - DNA, 120 bp, Artificial Sequence
  ENSG00000182541_36 (sequence is synthesized)
gagctgctggttgactgttacaaacccacagaggccttcatctctggcctgctggacaagatccgggccatgcagaagctgagcacaccccagaagaagtgagggtccccgacccaggcg

SEQ ID NO: 647088 - DNA, 120 bp, Artificial Sequence
  ENSG00000182541_37 (sequence is synthesized)
aacggtggctcccataggacaatcgctaccccccgacctcgtagcaacagcaataccgggggaccctgcggccaggcctggttccatgagcagggctcctcgtgcccctggcccaggggt

SEQ ID NO: 647089 - DNA, 120 bp, Artificial Sequence
  ENSG00000182541_38 (sequence is synthesized)
ctcttcccctgccccctcagttttccacttttggatttttttattgttattaaactgatgggactttgtgtttttatattgactctgcggcacgggccctttaataaagcgaggtagggt

SEQ ID NO: 647090 - DNA, 120 bp, Artificial Sequence
  ENSG00000182541_39 (sequence is synthesized)
acgcctttggtgcagctcaaaaaaaaaaaaaaaaatgatttccagcggtccacattagagttgaaattttctggtgggagaatctataccttgttcctttataggccaaggaccgcagtc

SEQ ID NO: 647091 - DNA, 120 bp, Artificial Sequence
  ENSG00000182541_40 (sequence is synthesized)
cttcagtaacaccagtgtaaaagcttgaggagaaattgtgaagctacacagtatttgttttctaatacctcttgtcattctaaatatctttaatttattaaaaaatatatatatacagta

SEQ ID NO: 647092 - DNA, 120 bp, Artificial Sequence
  ENSG00000182541_41 (sequence is synthesized)
caggttggtatcctgcctttttctcccagctcacagggtcctgggacgtttgcctctgtctaaggccacccctgagccctctgcaagcacaggggtgagagaagccttgaggtcaagaat

SEQ ID NO: 647093 - DNA, 120 bp, Artificial Sequence
  ENSG00000182541_42 (sequence is synthesized)
gtggctgtcaacccctgagccatctgacaacacatatgtacaggttggagaagagagaggtaaagacatagcagcaagtaatctggataggacacagaaacacagccattaaaagaaagt

SEQ ID NO: 647094 - DNA, 120 bp, Artificial Sequence
  ENSG00000182541_43 (sequence is synthesized)
ttaaaagaaggaaattcacccaaaccatttgaatacagtaagtgtattcatctttcgatattcccctgtccatatctacacatatacttttttttatagtaaatagttctgtattttgcc

SEQ ID NO: 647095 - DNA, 120 bp, Artificial Sequence
  ENSG00000182541_44 (sequence is synthesized)
aggtatcaattgagcacctactaagtgaaaggtaagatccttccctcaaagacttaatagttgaacgttgggagtgggaggagaggcaggcagagaggagacacaatatagttggataag

SEQ ID NO: 647096 - DNA, 120 bp, Artificial Sequence
  ENSG00000182541_45 (sequence is synthesized)
gacctccaaggagagtgttacaggctgagaggaggatatacttaggttgtctttagggaatcagaaaaggagactctggaataggctggcagagagaggggctacctcctatacctgctc

SEQ ID NO: 647097 - DNA, 120 bp, Artificial Sequence
  ENSG00000182541_46 (sequence is synthesized)
tggacaaacgactttaagcatagtgacagacttgccaaccctgtattggaagaactgatcttttttagtggggatgattacttctggggatttcttctcataactgagaccaaaacagtt

SEQ ID NO: 647098 - DNA, 120 bp, Artificial Sequence
  ENSG00000182541_47 (sequence is synthesized)
ttgtgcagtctcagaaatgacaggaggtaccaatctgacacttcctttggaagctctagggcagagagtgaaagagtggattttgacgggggccttgcttggaggtcattcacccacccc

SEQ ID NO: 647099 - DNA, 120 bp, Artificial Sequence
  ENSG00000182544_0 (sequence is synthesized)
cgtgatgaagccatcatggcggcggccagaggcctgcccggctcccggaagcaggctgtgaggggcgggagcgctgctggaacccgagccggagccggagccacagcggggagggtggcc

SEQ ID NO: 647100 - DNA, 120 bp, Artificial Sequence
  ENSG00000182544_1 (sequence is synthesized)
tggcggcctggagccggacgtgtccggggcgtccccgcagaccggggcagcaggtcgtccgggggcccaccatgctggtgactgcctaccttgcttttgtaggcctcctggcctcctgcc

SEQ ID NO: 647101 - DNA, 120 bp, Artificial Sequence
  ENSG00000182544_2 (sequence is synthesized)
tggggctggaactgtcaagatgccgggctaaaccccctggaagggcctgcagcaatccctccttccttcggtttcaactggacttctatcaggtctacttcctggccctggcagctgatt

SEQ ID NO: 647102 - DNA, 120 bp, Artificial Sequence
  ENSG00000182544_3 (sequence is synthesized)
ggcttcaggccccctacctctataaactctaccagcattactacttcctggaaggtcaaattgccatcctctatgtctgtggccttgcctctacagtcctctttggcctagtggcctcct

SEQ ID NO: 647103 - DNA, 120 bp, Artificial Sequence
  ENSG00000182544_4 (sequence is synthesized)
cccttgtggattggctgggtcgcaagaattcttgtgtcctcttctccctgacttactcactatgctgcttaaccaaactctctcaagactactttgtgctgctagtggggcgagcacttg

SEQ ID NO: 647104 - DNA, 120 bp, Artificial Sequence
  ENSG00000182544_5 (sequence is synthesized)
gtgggctgtccacagccctgctcttctcagccttcgaggcctggtatatccatgagcacgtggaacggcatgacttccctgctgagtggatcccagctacctttgctcgagctgccttct

SEQ ID NO: 647105 - DNA, 120 bp, Artificial Sequence
  ENSG00000182544_6 (sequence is synthesized)
ggaaccatgtgctggctgtagtggcaggtgtggcagctgaggctgtagccagctggatagggctggggcctgtagcgccctttgtggctgccatccctctcctggctctggcaggggcct

SEQ ID NO: 647106 - DNA, 120 bp, Artificial Sequence
  ENSG00000182544_7 (sequence is synthesized)
ctgtcggaccgccgcgtgctgctgttgggcaccatacaagctctatttgagagtgtcatcttcatctttgtcttcctctggacacctgtgctggacccacacggggcccctctgggcatt

SEQ ID NO: 647107 - DNA, 120 bp, Artificial Sequence
  ENSG00000182544_8 (sequence is synthesized)
atcttctccagcttcatggcagccagcctgcttggctcttccctgtaccgtatcgccacctccaagaggtaccaccttcagcccatgcacctgctgtcccttgctgtgctcatcgtcgtc

SEQ ID NO: 647108 - DNA, 120 bp, Artificial Sequence
  ENSG00000182544_9 (sequence is synthesized)
ttctctctcttcatgttgactttctctaccagcccaggccaggagagtccggtggagtccttcatagcctttctacttattgagttggcttgtggattatactttcccagcatgagcttc

SEQ ID NO: 647109 - DNA, 120 bp, Artificial Sequence
  ENSG00000182544_10 (sequence is synthesized)
ctacggagaaaggtgatccctgagacagagcaggctggtgtactcaactggttccgggtacctctgcactcactggcttgcctagggctccttgtcctccatgacagtgatcgaaaaaca

SEQ ID NO: 647110 - DNA, 120 bp, Artificial Sequence
  ENSG00000182544_11 (sequence is synthesized)
ggcactcggaatatgttcagcatttgctctgctgtcatggtgatggctctgctggcagtggtgggactcttcaccgtggtaaggcatgatgctgagctgcgggtaccttcacctactgag

SEQ ID NO: 647111 - DNA, 120 bp, Artificial Sequence
  ENSG00000182544_12 (sequence is synthesized)
gagccctatgcccctgagctgtaaccccactccaggacaagatagctgggacagactcttgaattccagctatccgggattgtacagatctctctgtgactgactttgtgactgtcctgt

SEQ ID NO: 647112 - DNA, 120 bp, Artificial Sequence
  ENSG00000182544_13 (sequence is synthesized)
ggtttctcctgccattgctttgtgtttgggaggacatgatgggggtgatggactggaaagaaggtgccaaaagttccctctgtgttactcccatttagaaaataaacacttttaaatgat

SEQ ID NO: 647113 - DNA, 120 bp, Artificial Sequence
  ENSG00000182544_14 (sequence is synthesized)
aaaagccctggtggtagccaacatagatgggagggagaggagcaggggatgaagtcagaggagtggcagagggtcagaggacagagggtcttgtaggccattataaatacttcggctttt

SEQ ID NO: 647114 - DNA, 120 bp, Artificial Sequence
  ENSG00000182544_15 (sequence is synthesized)
acccttagtgagatgggaagtcattggaggctcttgaggagatgatacggaagctgtagagaggttaaatagtttttccaaggtaaaacagcttgtaagtggcagaaggtagggaattaa

SEQ ID NO: 647115 - DNA, 120 bp, Artificial Sequence
  ENSG00000182544_16 (sequence is synthesized)
actgggacactgggaagttatgcggcttgcccaaggccacacagctggtgtctggaccatactggcttctcttgcatggaggtcactgcagtgggagaggaggcaaaccaaggagacctt

SEQ ID NO: 647116 - DNA, 120 bp, Artificial Sequence
  ENSG00000182544_17 (sequence is synthesized)
ctcggcttcgggcagcggtgctgttccttaggaagctccaacccttggctctaccggactgcgggcatctttcccgagcactgcacggaagaaaagaaaattggcacttatttcagggtg

SEQ ID NO: 647117 - DNA, 120 bp, Artificial Sequence
  ENSG00000182544_18 (sequence is synthesized)
actgggaagttatgcggcttgcccaaggccacacagctggtaagtgacaggggcaggactgcgccttagtctgtctgcagcccgactccaagttctttacaccacaccgcctccctcagg

SEQ ID NO: 647118 - DNA, 120 bp, Artificial Sequence
  ENSG00000182544_19 (sequence is synthesized)
gcgagcgaggccaggccaggagaagcaaccgcagcctcctatggtcgccccttcccgacccaccccaggcgtcaggagttccgcgcccgggtcgtccgggggcccaccatgctggtgact

SEQ ID NO: 647119 - DNA, 120 bp, Artificial Sequence
  ENSG00000182545_0 (sequence is synthesized)
cgcttcctctccaggcaaaatgaagctgaatctggtgcagatctttttcatgttgctgatgctgctgctgggcctggggatgggcctggggttgggacttcatatggctacagcagtctt

SEQ ID NO: 647120 - DNA, 120 bp, Artificial Sequence
  ENSG00000182545_1 (sequence is synthesized)
ggaggagagtgatcaaccgctcaatgaattttggtccagtgactcacaggacaaagctgaggccactgaggagggagacggcacccaaaccacagaaacgctggtgcttagcaacaaaga

SEQ ID NO: 647121 - DNA, 120 bp, Artificial Sequence
  ENSG00000182545_2 (sequence is synthesized)
ccagacagatagagaatgcaatgatatgatggcacacaagatgaaggagcccagtcagagttgcatagcccagtatgcattcatccatgaggatctaaacacagtcaaagctgtctgtaa

SEQ ID NO: 647122 - DNA, 120 bp, Artificial Sequence
  ENSG00000182545_3 (sequence is synthesized)
cagtcctgtcattgcctgtgagctcaaggggggaaaatgtcacaaaagctcccgaccttttgatttgacattgtgcgagctgtcccaaccagaccaggtcactcctaactgcaattacct

SEQ ID NO: 647123 - DNA, 120 bp, Artificial Sequence
  ENSG00000182545_4 (sequence is synthesized)
aacttctgttataaaaaagcacattattataacctgtaatgacatgaagcgccagttaccaactggacaatgaagcaactcatcatcttttttctcttcaccttctcctgttcctcttcc

SEQ ID NO: 647124 - DNA, 120 bp, Artificial Sequence
  ENSG00000182551_0 (sequence is synthesized)
gagcgcggcccctgggttcgaacacggcacccgcactgcgcgtcatggtgcaggcctggtatatggacgacgccccgggcgacccgcggcaaccccaccgccccgaccccggccgcccag

SEQ ID NO: 647125 - DNA, 120 bp, Artificial Sequence
  ENSG00000182551_1 (sequence is synthesized)
tgggcctggagcagctgcggcggctcggggtgctctactggaagctggatgctgacaaatatgagaatgatccagaattagaaaagatccgaagagagaggaactactcctggatggaca

SEQ ID NO: 647126 - DNA, 120 bp, Artificial Sequence
  ENSG00000182551_2 (sequence is synthesized)
tcataaccatatgcaaagataaactaccaaattatgaagaaaagattaagatgttctacgaggagcatttgcacttggacgatgagatccgctacatcctggatggcagtgggtacttcg

SEQ ID NO: 647127 - DNA, 120 bp, Artificial Sequence
  ENSG00000182551_3 (sequence is synthesized)
atgtgagggacaaggaggaccagtggatccggatcttcatggagaagggagacatggtgacgctccccgcggggatctatcaccgcttcacggtggacgagaagaactacacgaaggcca

SEQ ID NO: 647128 - DNA, 120 bp, Artificial Sequence
  ENSG00000182551_4 (sequence is synthesized)
tgcggctgtttgtgggagaaccggtgtggacagcgtacaaccggcccgctgaccattttgaagcccgcgggcagtacgtgaaatttctggcacagaccgcctagcagtgctgcctgggaa

SEQ ID NO: 647129 - DNA, 120 bp, Artificial Sequence
  ENSG00000182551_5 (sequence is synthesized)
ctaacacgtgcctcgtaaaggtccccaatgtaatgactgagcagaaaatcaatcactttctctttgcttttagaggatagccttgaggctagattatctttcctttgtaagattatttga

SEQ ID NO: 647130 - DNA, 120 bp, Artificial Sequence
  ENSG00000182551_6 (sequence is synthesized)
tcagaatattttgtaatgaaaggatctagaaagcaacttggaagtgtaaagagtcaccttcattttctgtaactcaatcaagactggtgggtccatggccctgtgttagttcatgcattc

SEQ ID NO: 647131 - DNA, 120 bp, Artificial Sequence
  ENSG00000182551_7 (sequence is synthesized)
agttgagtcccaaatgaaagtttcatctcccgaaatgcagttccttagatgcccatctggacgtgatgccgcgcctgccgtgtaagaaggtgcaatcctagataacacagctagccagat

SEQ ID NO: 647132 - DNA, 120 bp, Artificial Sequence
  ENSG00000182551_8 (sequence is synthesized)
agaagacacttttttctccaaaatgatgccttggggtggggagtggtagggggaagagctcccaccctaaggggcacacactgagttgcttatgccacttccttgttcaaaataaagtaa

SEQ ID NO: 647133 - DNA, 120 bp, Artificial Sequence
  ENSG00000182551_9 (sequence is synthesized)
ggcttggagttaccttatattcaggtatatgtgatattttgcctggtttgttaaaattgccccatttagattccttctataattgttcttatagataagtaatttatatatgagctgtgt

SEQ ID NO: 647134 - DNA, 120 bp, Artificial Sequence
  ENSG00000182551_10 (sequence is synthesized)
tagtattttttcagtgtgagatctctggattctttcacaataaagctgttgaattttaacaggagtattagtacataaattttctactcaacaattccgagataggattatgcctagttt

SEQ ID NO: 647135 - DNA, 120 bp, Artificial Sequence
  ENSG00000182551_11 (sequence is synthesized)
gtcatatcacagaaaaactccaagttaacttcatgttttggaagggcaggtcgtttttaaagtatttctttttttaactggatgaaaaatcttcatgttaggattaattttcttaatcac

SEQ ID NO: 647136 - DNA, 120 bp, Artificial Sequence
  ENSG00000182551_12 (sequence is synthesized)
ctccacactgtacagaggaaactcaagccttaaatgtttaagtaaactctgtctcagttttaggattaaaatacccaccggtggtgtgatgatgccatataccgcagggcttgcttctgt

SEQ ID NO: 647137 - DNA, 120 bp, Artificial Sequence
  ENSG00000182551_13 (sequence is synthesized)
caagtgtgactctatctcagtaattaaaataagtgctgatctactgattttttttaatggattcatttctaaatgggcattataaatagagcttgttcatttttaagaacgaaacattca

SEQ ID NO: 647138 - DNA, 120 bp, Artificial Sequence
  ENSG00000182551_14 (sequence is synthesized)
tatgataaactatcgctttaaattgcctttcttgcttcatataacttttccctgtcaggatccttagtgtttgaaactcctcgtgcggggctggcctcctgcggactctagtttcgcctc

SEQ ID NO: 647139 - DNA, 120 bp, Artificial Sequence
  ENSG00000182551_15 (sequence is synthesized)
ggcctcctgcggactctagtttcgcctccttgatgtggcgcctgggatttcttcacttcagagctgtatttttacaggcaagagtaagttcctgggcacagtggctcatgcctgtaatct

SEQ ID NO: 647140 - DNA, 65 bp, Artificial Sequence
  ENSG00000182551_16 (sequence is synthesized)
attgaaagagtaagagctgaggcatataatagaattctgctaaagcacttaaggtgaaatcacat

SEQ ID NO: 647141 - DNA, 120 bp, Artificial Sequence
  ENSG00000182551_17 (sequence is synthesized)
ataatagaattctgctaaagcacttaaggtgaaatcacattttcttttcccaggatgttgctcacatctttcgtttttattgaggtgtcatttatatacaataaaatgtactcattttca

SEQ ID NO: 647142 - DNA, 86 bp, Artificial Sequence
  ENSG00000182551_18 (sequence is synthesized)
gtggcatgatctcggctcaccgcaacctcatcttcccgagttcaagccattctcatgcacagcaccatgccgggctaattttgtat

SEQ ID NO: 647143 - DNA, 66 bp, Artificial Sequence
  ENSG00000182551_19 (sequence is synthesized)
ctccatgttggtcaggctgacattatagacacgaaccaccgcacccggcctatatgctttcttaat

SEQ ID NO: 647144 - DNA, 120 bp, Artificial Sequence
  ENSG00000182551_20 (sequence is synthesized)
agacacgaaccaccgcacccggcctatatgctttcttaatatccattctggatcagtgctgttggaagacaaaattacaacaaatttagttaaagatctaattagcttttattcttgatt

SEQ ID NO: 647145 - DNA, 120 bp, Artificial Sequence
  ENSG00000182551_21 (sequence is synthesized)
tgtgaatagggcaacctccgttctacaaaatagaataagagctcgatagggtaatagcacaacagtgggttttgtagggcggcaacaaagaaacagaacaataggtagaaaagctgattg

SEQ ID NO: 647146 - DNA, 120 bp, Artificial Sequence
  ENSG00000182551_22 (sequence is synthesized)
gttaacgtcaagttacattaggttacttttttcctaagggttaaagcagaagcgacttccttattattctgactcaggaagactggaatcttctgatcgcaggaaaagctggtctgtttg

SEQ ID NO: 647147 - DNA, 120 bp, Artificial Sequence
  ENSG00000182551_23 (sequence is synthesized)
agatgcacctccttctttaaagttttagtttgatcaagtggcatatggcatgagtggctgcattttggtttggtctcatcctggggcctagtgcaggggctcagtccaaaacagtgacct

SEQ ID NO: 647148 - DNA, 120 bp, Artificial Sequence
  ENSG00000182551_24 (sequence is synthesized)
catcccagcactttgggaggctgaggcggcagattgcctgaagccagaagtttgagacctcatctctaaaaaaacccaaaaaacaaaaaagccacacacacaccccatattaacattata

SEQ ID NO: 647149 - DNA, 120 bp, Artificial Sequence
  ENSG00000182551_25 (sequence is synthesized)
cacacacacaccccatattaacattatatatatgtaacatctcccataatttttaacagaggtaacacatgtggacatgtttgtgtatctgtttaatcaatctgttattagtgacataga

SEQ ID NO: 647150 - DNA, 120 bp, Artificial Sequence
  ENSG00000182551_26 (sequence is synthesized)
gttctaaaaaaccttttgtcatacatacaaacaattggaagattattttagcttggaataaactaaatacctgctgctataacaaaatgacaaaaatagcttaaactgggcaatttataa

SEQ ID NO: 647151 - DNA, 120 bp, Artificial Sequence
  ENSG00000182551_27 (sequence is synthesized)
acaacagcaatttatagaattcttatagttctagaggctaagaagtccaagattaaggtgccagcagatttagtgtctgatgaggatcctgtcctcatagacggccatttccttgctctg

SEQ ID NO: 647152 - DNA, 79 bp, Artificial Sequence
  ENSG00000182551_28 (sequence is synthesized)
tgaggatcctgtcctcatagacggccatttccttgctctgtcctcatgtggtggaaggggcaaactgctctcttacatc

SEQ ID NO: 647153 - DNA, 63 bp, Artificial Sequence
  ENSG00000182551_29 (sequence is synthesized)
agtgcccagctccatctctcttacaaggccactaatcctataaatgagggcttgccctcatga

SEQ ID NO: 647154 - DNA, 120 bp, Artificial Sequence
  ENSG00000182551_30 (sequence is synthesized)
caaggccactaatcctataaatgagggcttgccctcatgacttaatcacatcctaaaggtcccaccccttaatactatcacatttgtgttaagtttcaacattcgtatatttaaacttat

SEQ ID NO: 647155 - DNA, 120 bp, Artificial Sequence
  ENSG00000182551_31 (sequence is synthesized)
gacacgtgtcatataatgtgtcatattacatattatgtgtcataatatggacacattcagaccatagcaaatagtactgtgcatatcatgcagtggataggctaagttttagagtcaact

SEQ ID NO: 647156 - DNA, 120 bp, Artificial Sequence
  ENSG00000182551_32 (sequence is synthesized)
gcatatcatgcagtggataggctaagttttagagtcaactttgtagaaaataacgtattgatgactagtactttaatatgttctggagtatcgggggaacccacccccaatatttcaaca

SEQ ID NO: 647157 - DNA, 63 bp, Artificial Sequence
  ENSG00000182551_33 (sequence is synthesized)
aatttaccagggtggagtttttccccaccttagtaagcctgagggtactgcagcagctgttta

SEQ ID NO: 647158 - DNA, 120 bp, Artificial Sequence
  ENSG00000182551_34 (sequence is synthesized)
ccagagcagctgtttatagacctccccccagaaatgcattccttccccagagtattaatattaatattccttcctaggaaaagaatttagtgataccttctctacttgcacgcccattta

SEQ ID NO: 647159 - DNA, 85 bp, Artificial Sequence
  ENSG00000182551_35 (sequence is synthesized)
atttagtgataccttctctacttgcacgcgtgtttttgcctgaccctgcaggcagtcaaaccttatggttgtcttcccttgttcc

SEQ ID NO: 647160 - DNA, 120 bp, Artificial Sequence
  ENSG00000182551_36 (sequence is synthesized)
taaagacaggcataataaattataaaagtattatttgagaactgatagatgtccgtgaaatcttcaaaacttatgttcctctgccatggctccagccggtccctccattcggggtccctg

SEQ ID NO: 647161 - DNA, 120 bp, Artificial Sequence
  ENSG00000182551_37 (sequence is synthesized)
aaggtgggagtgctgtgctttctccccaggcccggcctgtgtggtggccctggccgtggcatctctgccgctgaactgcgcggcttccgcagactccaagcgcggtcgctgggctcggga

SEQ ID NO: 647162 - DNA, 120 bp, Artificial Sequence
  ENSG00000182551_38 (sequence is synthesized)
ctcctcgacctgtgcttcaaggagagtctgtggagccgcaggcgatgtccgaggtgacagctgtccttccgtggcagcctccgtggcccctgcctgcgatcctggtggacagaactacac

SEQ ID NO: 647163 - DNA, 120 bp, Artificial Sequence
  ENSG00000182552_0 (sequence is synthesized)
acttcccaggccccaccagccgcggctccggctcgtagcccacagcccactgccggcggctgggcgctgccgaggctcggggcgcgcgcagttggcgtctgccagtgccaagactgtgcc

SEQ ID NO: 647164 - DNA, 120 bp, Artificial Sequence
  ENSG00000182552_1 (sequence is synthesized)
gcccccacagccgaggcgcgaaagggggacgcccggcctctgggccgctgccttcgctttctcttcgttgttgcgaacgccgtccgctcaggaggcgccccgcgaccggcgcgatgagtg

SEQ ID NO: 647165 - DNA, 120 bp, Artificial Sequence
  ENSG00000182552_2 (sequence is synthesized)
ccaacgaggaccaggagatggaactagaagcattacgctctatttatgaaggagatgaaagtttccgggaattaagtccagtttcttttcaatataggataggtgaaaatggtgatccca

SEQ ID NO: 647166 - DNA, 120 bp, Artificial Sequence
  ENSG00000182552_3 (sequence is synthesized)
aagccttcttaatagagatttcctggacagaaacatatccccaaacacctccaattctatctatgaacgctttttttaacaacaccatatcatcagctgtaaagcagagtatattagcca

SEQ ID NO: 647167 - DNA, 120 bp, Artificial Sequence
  ENSG00000182552_4 (sequence is synthesized)
agctacaggaagcagtagaagctaatcttggaaccgctatgacctatacattgtttgaatatgccaaagacaataaagagcagttcatggagaatcacaatcccatcaattccgcaacat

SEQ ID NO: 647168 - DNA, 120 bp, Artificial Sequence
  ENSG00000182552_5 (sequence is synthesized)
cgataagcaatatcatctcaattgaaactcctaatacagccccatcaagtaagaaaaaagacaaaaaagaacaactttcaaaagcccagaagcgtaagctggcagacaaaacagatcaca

SEQ ID NO: 647169 - DNA, 120 bp, Artificial Sequence
  ENSG00000182552_6 (sequence is synthesized)
aaggagaacttcctcgaggctggaactgggttgatgttgtgaagcatttaagcaaaactggctctaaggatgatgagtagcacttggaatttgagacaaggaaagagcattctttaaaga

SEQ ID NO: 647170 - DNA, 120 bp, Artificial Sequence
  ENSG00000182552_7 (sequence is synthesized)
gtaaaactgggttcaaaatctttcattactattttctggtattgaggcgactttttataaaacacaattttttgtatgtttcttacattaaaaaggttgtaagttgaaagttcatgaaga

SEQ ID NO: 647171 - DNA, 120 bp, Artificial Sequence
  ENSG00000182552_8 (sequence is synthesized)
gatcttgttgtattaaattattttcacaaacttgccttaataaaaggtgaaaatgttactgtttagtatactttatgaagccccttgagctttataaatggacaggcatggggaataaga

SEQ ID NO: 647172 - DNA, 120 bp, Artificial Sequence
  ENSG00000182552_9 (sequence is synthesized)
atcagtgttaatttaaatgatcttatcctggtggatgtgctattttcttaaaggagtatgaagcccttttcaaactatcatcccagtggagcggagtactcagtgaacagttactccata

SEQ ID NO: 647173 - DNA, 120 bp, Artificial Sequence
  ENSG00000182552_10 (sequence is synthesized)
agaaatttaaatgctggtatttgaactttatacatgatactttttgtagtttcttttaatttttgaaagatgaactgcttccttttaataaattaatatctatttatacttttctcttga

SEQ ID NO: 647174 - DNA, 120 bp, Artificial Sequence
  ENSG00000182552_11 (sequence is synthesized)
tttgggtcaagatgtttgatcatgagtgctttgagtggtatgtggaataggagaatataaaaacaaatctgccaaatacactagaaagcattttagtaagaaatgctggccctttcttaa

SEQ ID NO: 647175 - DNA, 120 bp, Artificial Sequence
  ENSG00000182552_12 (sequence is synthesized)
aacatttctcttgcatataccaggatgggagtaaaagatgccttaatatttagtttttgtattgttggagacattgattttaataaaatcctatttatctgctgttgtgtgcttttagtt

SEQ ID NO: 647176 - DNA, 120 bp, Artificial Sequence
  ENSG00000182552_13 (sequence is synthesized)
gttggataactgaggtctcctaaatggttcaacataaaaccacatttcaagtcttgtttctttttggagtgtcttttcaagtattcaaatgtatttctcaacctgagcatctttttaatc

SEQ ID NO: 647177 - DNA, 120 bp, Artificial Sequence
  ENSG00000182552_14 (sequence is synthesized)
atatacatgggagtcttttaaatgctgaactgttacacatgcttgatttaaaaataataataatagaggaaactattggtctagttgtgccaagaaaagtttctgatgtttatgtgtgat

SEQ ID NO: 647178 - DNA, 120 bp, Artificial Sequence
  ENSG00000182552_15 (sequence is synthesized)
gtacagtgattttgtatatgcgcccagctttaagaacacataaaactattacgtctggtaggaagattgttagtgcctcaagttacacctgtgcagcttgggtctgagttttgatagaac

SEQ ID NO: 647179 - DNA, 120 bp, Artificial Sequence
  ENSG00000182552_16 (sequence is synthesized)
agtaaacatttaaagaagttaagagcagtttgagctgtatccgcggtttttactcgttaactgacttcagctaaatagtttgaattatagagtaagtataattacagcaaaggagttaat

SEQ ID NO: 647180 - DNA, 120 bp, Artificial Sequence
  ENSG00000182552_17 (sequence is synthesized)
ctcattttcaaagctgtttctcattttatttcttgaattaatgtagagcaaaacatgttaaaattcaggaccactggaatatggcaacttatgtttcagggttgtgtgtgggtagtattt

SEQ ID NO: 647181 - DNA, 120 bp, Artificial Sequence
  ENSG00000182552_18 (sequence is synthesized)
gtggttgtattggtttgttttttgtttttggagaaacatctgctagtggaataaaatactttgttttgctctgaagagactgaaattgttcaggcttattatggctcatagattacagag

SEQ ID NO: 647182 - DNA, 120 bp, Artificial Sequence
  ENSG00000182552_19 (sequence is synthesized)
aatgatgctagttacatgccaatgaactatttttactctttttatatgaaatgtaaaaatttgtaggggttctggtgatggtggtacctcttattaccttatgtaaaacacttgaacagc

SEQ ID NO: 647183 - DNA, 120 bp, Artificial Sequence
  ENSG00000182552_20 (sequence is synthesized)
ctcatcaatattgccgtcatctgtttaacactcccagtatattttctcaatgtctgtttacttaaaattttgtggagtgacataattaataagcaataaagtctgaattatacacagcga

SEQ ID NO: 647184 - DNA, 120 bp, Artificial Sequence
  ENSG00000182552_21 (sequence is synthesized)
tgtggtaagtatctaaggttatataagttagtcaagcttttacatagttgagtgggcttgaatgagaaagtaaagaccctctatttctaattcatttataccactaaacaaaactcattc

SEQ ID NO: 647185 - DNA, 120 bp, Artificial Sequence
  ENSG00000182557_0 (sequence is synthesized)
agtctcaggccaagagctgcaggctggcatggctggggggatgtcagcggagtgccctgagcctgggccaggaggtctgcagggccagtccccagggccaggcaggcagtgtccccctcc

SEQ ID NO: 647186 - DNA, 120 bp, Artificial Sequence
  ENSG00000182557_1 (sequence is synthesized)
catcacgcccacctcctggagcctgcccccgtggagggcctacgtggctgccgccgtcctctgctacatcaacctcctgaattacatgaactggttcatcattgcaggagtgctgctgga

SEQ ID NO: 647187 - DNA, 120 bp, Artificial Sequence
  ENSG00000182557_2 (sequence is synthesized)
tatacaggaggttttccagatcagtgacaaccatgctggtttgcttcagactgtcttcgttagctgcctgctgctgtctgcacctgtgtttggctacctgggcgaccgacatagccgcaa

SEQ ID NO: 647188 - DNA, 120 bp, Artificial Sequence
  ENSG00000182557_3 (sequence is synthesized)
ggctaccatgagcttcggtatcttgctgtggtcaggagctggcctctctagctccttcatctccccccggtattcttggctcttcttcctgtcccggggcatcgtgggcactggctcggc

SEQ ID NO: 647189 - DNA, 120 bp, Artificial Sequence
  ENSG00000182557_4 (sequence is synthesized)
cagctactccaccatcgcgcccaccgtcctgggcgacctcttcgtgagggaccagcgcacccgcgtgctggctgtcttctacatctttatccccgttggaagtggtctgggctacgtgct

SEQ ID NO: 647190 - DNA, 120 bp, Artificial Sequence
  ENSG00000182557_5 (sequence is synthesized)
ggggtcggctgtgacgatgctgactgggaactggcgctgggccctccgagtcatgccctgcctggaggccgtggccttgatcctgcttatcctgctggttccagacccaccccggggagc

SEQ ID NO: 647191 - DNA, 120 bp, Artificial Sequence
  ENSG00000182557_6 (sequence is synthesized)
tgccgagacacagggggagggggccgtgggaggcttcaggagcagctggtgtgaggacgtcagatacctggggaaaaactggagtttcgtgtggtcgaccctcggagtgaccgccatggc

SEQ ID NO: 647192 - DNA, 120 bp, Artificial Sequence
  ENSG00000182557_7 (sequence is synthesized)
cctgcttccaggagccgtgcagcaaccccgacagcctgatttttggggcactgaccatcatgaccggcgtcattggggtcatcttgggggcagaagctgcgaggaggtacaagaaagtca

SEQ ID NO: 647193 - DNA, 120 bp, Artificial Sequence
  ENSG00000182557_8 (sequence is synthesized)
ttccaggagctgagcccctcatctgcgcctccagcctgcttgccacagccccctgcctctacctggctctcgtcctggccccgaccaccctgctggcctcctatgtgttcctgggccttg

SEQ ID NO: 647194 - DNA, 120 bp, Artificial Sequence
  ENSG00000182557_9 (sequence is synthesized)
gggagctgcttctgtcctgcaactgggcagtggttgccgacatcctgctgtctgtggtggtgcccagatgccgggggacggcagaggcacttcagatcacggtgggccacatcctgggag

SEQ ID NO: 647195 - DNA, 120 bp, Artificial Sequence
  ENSG00000182557_10 (sequence is synthesized)
acgctggcagcccctatctcacaggacttatctctagtgtcctgcgggccaggcgccctgactcctatctgcagcgcttccgcagcctgcagcagagcttcctgtgctgcgcctttgtca

SEQ ID NO: 647196 - DNA, 120 bp, Artificial Sequence
  ENSG00000182557_11 (sequence is synthesized)
tcgccctggggggcggctgcttcctgctgactgcgctgtacctggagagagacgagacccgggcctggcagcctgtcacagggaccccagacagcaatgatgtggacagcaacgacctgg

SEQ ID NO: 647197 - DNA, 120 bp, Artificial Sequence
  ENSG00000182557_12 (sequence is synthesized)
agagacaaggcctactttcgggcgctggcgcctctacagaggagccctgaggtccctgcctacactcgtcctgcctgcaagcctcccgttggtccccacagcagcagtgcctcggttcct

SEQ ID NO: 647198 - DNA, 120 bp, Artificial Sequence
  ENSG00000182557_13 (sequence is synthesized)
ctttggctgtcctcggggactccggctgaggcacatctgccacttttgaattcccggctggagagctggcaggaccctgtggctgggctgggaatggagctgtcagcactctgcgtggga

SEQ ID NO: 647199 - DNA, 120 bp, Artificial Sequence
  ENSG00000182557_14 (sequence is synthesized)
ggcctgggcctgtgcctgcatcccgctcaaggctgccccagcctggggtctccagcctggctgctgctgggccctgaataaagagaggccagtacaaagcccatggattttgggcctgta

SEQ ID NO: 647200 - DNA, 120 bp, Artificial Sequence
  ENSG00000182557_15 (sequence is synthesized)
gcctgactcaagcagggcccagccttgggcaggagggtgtagggtatgtgtttccataggtggagagagtggcgctgggggtgggccaggagccagaggtcactggtgacctgaccgagg

SEQ ID NO: 647201 - DNA, 120 bp, Artificial Sequence
  ENSG00000182557_16 (sequence is synthesized)
gcagtggacatctgggcctcacgtggcttactttcctcagtgaaacaggtctgagcctgcagagagccagctccctggggcgtggggggggcaccctgggtcaggctggtggtggggtct

SEQ ID NO: 647202 - DNA, 120 bp, Artificial Sequence
  ENSG00000182557_17 (sequence is synthesized)
ggagctcagggcaggtacctgaactctgagagggcttcacagaggagatgaccgaaacgtaagtcctaaatgacaaatatagatgctccagctggaccagagagtggaaggcacgccagg

SEQ ID NO: 647203 - DNA, 120 bp, Artificial Sequence
  ENSG00000182557_18 (sequence is synthesized)
cagaaggcgcagctgagttcaagggcctggagcatcctgtctcagagcgttattttggtctgatgtccacacgaagcctccagtctgtggtggtgcccagatgccgggggacggcagagg

SEQ ID NO: 647204 - DNA, 120 bp, Artificial Sequence
  ENSG00000182566_0 (sequence is synthesized)
agtgcgtaggtccagtgagaacaggcgtgaaatttatatctctgcccaggactgggtgcctgcatcgccatggacaccaccaggtacagcaagtggggcggcagctccgaggaggtcccc

SEQ ID NO: 647205 - DNA, 120 bp, Artificial Sequence
  ENSG00000182566_1 (sequence is synthesized)
ggagggccctggggacgctgggtgcactggagcaggagacccctcttcttggccctggctgtcctggtcaccacagtcctttgggctgtgattctgagtatcctattgtccaaggcctcc

SEQ ID NO: 647206 - DNA, 120 bp, Artificial Sequence
  ENSG00000182566_2 (sequence is synthesized)
acggagcgcgcggcgctgcttgacggccacgacctgctgaggacaaacgcctcgaagcagacggcggcgctgggtgccctgaaggaggaggtcggagactgccacagctgctgctcgggg

SEQ ID NO: 647207 - DNA, 120 bp, Artificial Sequence
  ENSG00000182566_3 (sequence is synthesized)
acgcaggcgcagctgcagaccacgcgcgcggagcttggggaggcgcaggcgaagctgatggagcaggagagcgccctgcgggaactgcgtgagcgcgtgacccagggcttggctgaagcc

SEQ ID NO: 647208 - DNA, 120 bp, Artificial Sequence
  ENSG00000182566_4 (sequence is synthesized)
ggcaggggccgtgaggacgtccgcactgagctgttccgggcgctggaggccgtgaggctccagaacaactcctgcgagccgtgccccacgtcgtggctgtccttcgagggctcctgctac

SEQ ID NO: 647209 - DNA, 120 bp, Artificial Sequence
  ENSG00000182566_5 (sequence is synthesized)
atcactgcgcagatgccagcgcgcacctggtgatcgttgggggcctggatgagcagggcttcctcactcggaacacgcgtggccgtggttactggctgggcctgagggctgtgcgccatc

SEQ ID NO: 647210 - DNA, 120 bp, Artificial Sequence
  ENSG00000182566_6 (sequence is synthesized)
tgggcaaggttcagggctaccagtgggtggacggagtctctctcagcttcagccactggaaccagggagagcccaatgacgcttgggggcgcgagaactgtgtcatgatgctgcacacgg

SEQ ID NO: 647211 - DNA, 120 bp, Artificial Sequence
  ENSG00000182566_7 (sequence is synthesized)
ggctgtggaacgacgcaccgtgtgacagcgagaaggacggctggatctgtgagaaaaggcacaactgctgaccccgcccagtgccctggagccgcgcccattgcagcatgtcgtatcctg

SEQ ID NO: 647212 - DNA, 120 bp, Artificial Sequence
  ENSG00000182566_8 (sequence is synthesized)
ggggctgctcacctccctggctcctggagctgattgccaaagagttttttcttcctcatccaccgctgctgagtctcagaaacacttggcccaacatagccctgtccagcccagtgcctg

SEQ ID NO: 647213 - DNA, 120 bp, Artificial Sequence
  ENSG00000182566_9 (sequence is synthesized)
ggctctgggacctccatgccgacctcatcctaactccactcacgcagacccaacctaacctccactagctccaaaatccctgctcctgcgtccccgtgatatgcctccacttctctccct

SEQ ID NO: 647214 - DNA, 120 bp, Artificial Sequence
  ENSG00000182566_10 (sequence is synthesized)
aaccaaggttaggtgactgaggactggagctgtttggttttctcgcattttccaccaaactggaagctgtttttgcagcctgaggaagcatcaataaatatttgagaaatgaatccagga

SEQ ID NO: 647215 - DNA, 120 bp, Artificial Sequence
  ENSG00000182566_11 (sequence is synthesized)
ctcagcctcctgagtagctgggactaccgatacacatcaccatgcccagaaatgagggtcttgttatattgcccaggctggtctggtctggaactcctgggctcagtgatccttccatgt

SEQ ID NO: 647216 - DNA, 120 bp, Artificial Sequence
  ENSG00000182566_12 (sequence is synthesized)
aattaaggccaagaaaatgggaaggaaggaagggagtgcgtaggtccagtgagaacaggcgtgaaatttatatctctgcccaggactgggtgcctgcatcgccatggacaccaccagggc

SEQ ID NO: 647217 - DNA, 120 bp, Artificial Sequence
  ENSG00000182566_13 (sequence is synthesized)
cctggggacgctgggtgcactggagcaggagacccctcttcttggccctggctgtcctggtcaccacagtcctttgggctgtgattctgagtatcctattgtccaagggagcctctctcc

SEQ ID NO: 647218 - DNA, 120 bp, Artificial Sequence
  ENSG00000182566_14 (sequence is synthesized)
ctgaggacaaacggtgtgtgcagagccgggcgcctgggcccccggggcgtgaggggcgggagtttctgagaccccggagatggagtctcgagtgcgtgggggccctatggtccctgaggc

SEQ ID NO: 647219 - DNA, 120 bp, Artificial Sequence
  ENSG00000182566_15 (sequence is synthesized)
tggaagggggtcccctgagtcctcccaagtgacccgaggggcatgcattttggggcgggggtcgttccagcctcgaagcagacggcggcgctgggtgccctgaaggaggaggtcggagac

SEQ ID NO: 647220 - DNA, 120 bp, Artificial Sequence
  ENSG00000182568_0 (sequence is synthesized)
ccgttccccggacgcggcggatgagccggccccgctggggaaggctccgggcggcggcgggcggccgggaggaggctgcgtgctcggggctggggctgcgagcggggtgattttgtatta

SEQ ID NO: 647221 - DNA, 120 bp, Artificial Sequence
  ENSG00000182568_1 (sequence is synthesized)
gggtgattttgtattaaaatgaggaggaggaagaagaggcacccacagcggcagcggcggcggcggcggcagcagcagcaggagcagcggcggagagggctgcagcccgggcggacgcgc

SEQ ID NO: 647222 - DNA, 120 bp, Artificial Sequence
  ENSG00000182568_2 (sequence is synthesized)
ggagccgagcggggcacggcggcggcagcgacagcggccgggatgagtcaactaataatttaatgggggcagagacggcagcgaggggtagagctagcgagggagagagcgagagaagca

SEQ ID NO: 647223 - DNA, 120 bp, Artificial Sequence
  ENSG00000182568_3 (sequence is synthesized)
gccccgtccggggactcgcgctcacactcacgcacacacacaaacacacacacacctctccctgtgccacccagcaacacccggcctcgtcacaacaacaacagccgcggccgccctcta

SEQ ID NO: 647224 - DNA, 120 bp, Artificial Sequence
  ENSG00000182568_4 (sequence is synthesized)
tcctgcccgggggcccagccgaaagccagggcgactctagaggacgctgcccgcccccctctttcatttcgggaaactcctgatcagttttgtcggggtttctgggtttcttttccccca

SEQ ID NO: 647225 - DNA, 120 bp, Artificial Sequence
  ENSG00000182568_5 (sequence is synthesized)
aagtcctagtgccattgtggtgctcgttgtttacctcggactctggacgagtgagagcttggcgactttttggggggagggggcggggagtttgtcgctgcctaggcggtggaggtggct

SEQ ID NO: 647226 - DNA, 120 bp, Artificial Sequence
  ENSG00000182568_6 (sequence is synthesized)
gggggtgccttctgatcttcctcctcctccccctccccccgaacctcttctctcctcacttgctgggaccccagacgctcacagccccgcgtcaatgggcagggagagggtccttgcggc

SEQ ID NO: 647227 - DNA, 120 bp, Artificial Sequence
  ENSG00000182568_7 (sequence is synthesized)
tgttgtcagcgagggcagaatcaaaagtggcattttagtgcctttccggggcttttctcgcgaccccctgccccccaccctcgctgtcccccgctagatgccctcgttgggggtgcgagg

SEQ ID NO: 647228 - DNA, 120 bp, Artificial Sequence
  ENSG00000182568_8 (sequence is synthesized)
ctgtggggaaaagtttaaggtttgttaatattagtcgcgattgttggcgaggggggtgggggtgattggaagggaggcgaggtggccttcccaatgcgcgttattcggggttattgaaga

SEQ ID NO: 647229 - DNA, 120 bp, Artificial Sequence
  ENSG00000182568_9 (sequence is synthesized)
ataatattgcaagtgacagccagaagtagactttctgtcctcacaccgaagaacccgagtgagcaggagggagggagagacgcgaagagaccttttttcctttttggagaccttgtccgc

SEQ ID NO: 647230 - DNA, 120 bp, Artificial Sequence
  ENSG00000182568_10 (sequence is synthesized)
agtgatttttttttttttaagagaatcctcagtcaccacgtcgtttccccagcaccatcacagtgtacagctcataacgggttttgctttgtttttacgatttccccccaacgaatcact

SEQ ID NO: 647231 - DNA, 120 bp, Artificial Sequence
  ENSG00000182568_11 (sequence is synthesized)
tgtcagatcaattttatcttcttcctcctccctgcttcccactctcccctcctccccatcgcaaaccctgttctctgaggttagacattttacaaacccctatatgttggttttcgaatt

SEQ ID NO: 647232 - DNA, 120 bp, Artificial Sequence
  ENSG00000182568_12 (sequence is synthesized)
gtgattttttttttaaacccctttctcatggctactcttctagacgtttatttctgcccttcccccgcttaggggggcgggggtaggggaaaggaaaataatacaatttcaggggaagtc

SEQ ID NO: 647233 - DNA, 120 bp, Artificial Sequence
  ENSG00000182568_13 (sequence is synthesized)
gccttcaggtctgctgcttttttatttttttttttttaattaaaaaaaaaaaggacatagaaaacatcagtcttgaacttctcttcaagaacccgggctgcaaaggaaatctcctttgtt

SEQ ID NO: 647234 - DNA, 120 bp, Artificial Sequence
  ENSG00000182568_14 (sequence is synthesized)
tttgttatttatgtgctgtcaagttttgaagtggtgatctttagacagtgactgagtatggatcatttgaacgaggcaactcaggggaaagaacattcagaaatgtctaacaatgtgagt

SEQ ID NO: 647235 - DNA, 120 bp, Artificial Sequence
  ENSG00000182568_15 (sequence is synthesized)
gatccgaagggtccaccagccaagattgcccgcctggagcagaacgggagcccgctaggaagaggaaggcttgggagtacaggtgcaaaaatgcagggagtgcctttaaaacactcgggc

SEQ ID NO: 647236 - DNA, 120 bp, Artificial Sequence
  ENSG00000182568_16 (sequence is synthesized)
catctgatgaaaaccaaccttaggaaaggaaccatgctgccagttttctgtgtggtggaacattatgaaaacgccattgaatatgattgcaaggaggagcatgcagaatttgtgctggtg

SEQ ID NO: 647237 - DNA, 120 bp, Artificial Sequence
  ENSG00000182568_17 (sequence is synthesized)
agaaaggatatgcttttcaaccagctgatcgaaatggcattgctgtctctaggttattcacatagctctgctgcccaggccaaagggctaatccaggttggaaagtggaatccagttcca

SEQ ID NO: 647238 - DNA, 120 bp, Artificial Sequence
  ENSG00000182568_18 (sequence is synthesized)
ctgtcttacgtgacagatgcccctgatgctacagtagcagatatgcttcaagatgtgtatcatgtggtcacattgaaaattcagttacacagttgccccaaactagaagacttgcctccc

SEQ ID NO: 647239 - DNA, 120 bp, Artificial Sequence
  ENSG00000182568_19 (sequence is synthesized)
gaacaatggtcgcacaccacagtgaggaatgctctgaaggacttactgaaagatatgaatcagagttcattggccaaggagtgccccctttcacagagtatgatttcttccattgtgaac

SEQ ID NO: 647240 - DNA, 120 bp, Artificial Sequence
  ENSG00000182568_20 (sequence is synthesized)
agtacttactatgcaaatgtctcagcagcaaaatgtcaagaatttggaaggtggtacaaacatttcaagaagacaaaagatatgatggttgaaatggatagtctttctgagctatcccag

SEQ ID NO: 647241 - DNA, 120 bp, Artificial Sequence
  ENSG00000182568_21 (sequence is synthesized)
caaggcgccaatcatgtcaattttggccagcaaccagttccagggaacacagccgagcagcctccatcccctgcgcagctctcccatggcagccagccctctgtccggacacctcttcca

SEQ ID NO: 647242 - DNA, 120 bp, Artificial Sequence
  ENSG00000182568_22 (sequence is synthesized)
aacctgcaccctgggctcgtatcaacacctatcagtcctcaattggtcaaccagcagctggtgatggctcagctgctgaaccagcagtatgcagtgaatagacttttagcccagcagtcc

SEQ ID NO: 647243 - DNA, 120 bp, Artificial Sequence
  ENSG00000182568_23 (sequence is synthesized)
ttaaaccaacaatacttgaaccaccctccccctgtcagtagatctatgaataagcctttggagcaacaggtttcgaccaacacagaggtgtcttccgaaatctaccagtgggtacgcgat

SEQ ID NO: 647244 - DNA, 120 bp, Artificial Sequence
  ENSG00000182568_24 (sequence is synthesized)
gaactgaaacgagcaggaatctcccaggcggtatttgcacgtgtggcttttaacagaactcagggcttgctttcagaaatcctccgaaaggaagaggaccccaagactgcatcccagtct

SEQ ID NO: 647245 - DNA, 120 bp, Artificial Sequence
  ENSG00000182568_25 (sequence is synthesized)
ttgctggtaaaccttcgggctatgcagaatttcttgcagttaccggaagctgaaagagaccgaatataccaggacgaaagggaaaggagcttgaatgctgcctcggccatgggtcctgcc

SEQ ID NO: 647246 - DNA, 120 bp, Artificial Sequence
  ENSG00000182568_26 (sequence is synthesized)
cccctcatcagcacaccacccagccgtcctccccaggtgaaaacagctactattgccactgaaaggaatgggaaaccagagaacaataccatgaacattaatgcttccatttatgatgag

SEQ ID NO: 647247 - DNA, 120 bp, Artificial Sequence
  ENSG00000182568_27 (sequence is synthesized)
attcagcaggaaatgaagcgtgctaaagtgtctcaagcactgtttgcaaaggttgcagcaaccaaaagccagggatggttgtgcgagctgttacgctggaaagaagatccttctccagaa

SEQ ID NO: 647248 - DNA, 120 bp, Artificial Sequence
  ENSG00000182568_28 (sequence is synthesized)
aacagaaccctgtgggagaacctctccatgatccgaaggttcctcagtcttcctcagccagaacgtgatgccatttatgaacaggagagcaacgcggtgcatcaccatggcgacaggccg

SEQ ID NO: 647249 - DNA, 120 bp, Artificial Sequence
  ENSG00000182568_29 (sequence is synthesized)
ccccacattatccatgttccagcagagcagattcagcaacagcagcagcaacagcaacagcagcagcagcagcagcaggcaccgccgcctccacagccacagcagcagccacagacaggc

SEQ ID NO: 647250 - DNA, 120 bp, Artificial Sequence
  ENSG00000182568_30 (sequence is synthesized)
cctcggctccccccacggcaacccacggtggcctctccagcagagtcagatgaggaaaaccgacagaagacccggccacgaacaaaaatttcagtggaagccttgggaatcctccagagt

SEQ ID NO: 647251 - DNA, 120 bp, Artificial Sequence
  ENSG00000182568_31 (sequence is synthesized)
ttcatacaagacgtgggcctgtaccctgacgaagaggccatccagactctgtctgcccagctcgaccttcccaagtacaccatcatcaagttctttcagaaccagcggtactatctcaag

SEQ ID NO: 647252 - DNA, 120 bp, Artificial Sequence
  ENSG00000182568_32 (sequence is synthesized)
attccggtttagaggtcgatgtggcagaatataaagaagaggagctgctgaaggatttggaagagagtgtccaagataaaaatactaacacccttttttcagtgaaactagaagaagagc

SEQ ID NO: 647253 - DNA, 120 bp, Artificial Sequence
  ENSG00000182568_33 (sequence is synthesized)
tgtcagtggaaggaaacacagacattaatactgatttgaaagactgagataaaagtatttgtttcgttcaacagtgccactggtatttactaacaaaatgaaaagtccaccttgtcttct

SEQ ID NO: 647254 - DNA, 120 bp, Artificial Sequence
  ENSG00000182568_34 (sequence is synthesized)
ctcagaaaacctttgttgttcattgtttggccaatgaatcttcaaaaacttgcacaaacagaaaagttggaaaaggataatacagactgcactaaatgttttcctctgttttacaaactg

SEQ ID NO: 647255 - DNA, 120 bp, Artificial Sequence
  ENSG00000182568_35 (sequence is synthesized)
cttggcagccccaggtgaagcatcaaggattgtttggtattaaaatttgtgttcacgggatgcaccaaagtgtgtaccccgtaagcatgaaaccagtgttttttgttttttttttagttc

SEQ ID NO: 647256 - DNA, 120 bp, Artificial Sequence
  ENSG00000182568_36 (sequence is synthesized)
ttattccggagcctcaaacaagcattataccttctgtgattatgatttcctctcctataattatttctgtagcactccacactgatctttggaaacttgccccttatttaaaaaaaaaaa

SEQ ID NO: 647257 - DNA, 120 bp, Artificial Sequence
  ENSG00000182568_37 (sequence is synthesized)
agaaaaaaaagagtttgttactctattgtatgttacaaaagaactatagactgtggaatgcagtttaaagatgacatatgccaacaaatgccttgtattatatggcactgccgtaattca

SEQ ID NO: 647258 - DNA, 120 bp, Artificial Sequence
  ENSG00000182568_38 (sequence is synthesized)
aatttgtttttattttggaaataaaagttcactgtacttttttttcattctcattgttacatgattttttaaaaaaaggaaaagaaaatgtgaaacacaatttagtcctcattatttatt

SEQ ID NO: 647259 - DNA, 120 bp, Artificial Sequence
  ENSG00000182568_39 (sequence is synthesized)
tgtagatcctgcagcatcatgttgtaattaattttttggaagtttccgttaaatgtaatattgcttctcttgttaccatactgattcttttctatttataaatgtattttgatgggcagt

SEQ ID NO: 647260 - DNA, 120 bp, Artificial Sequence
  ENSG00000182568_40 (sequence is synthesized)
aaaacaaagtgtcttaaaagttttaaatagagaaaatgtgctttacacagttgcctataaaaagtgctctatgttatccaagcaattcatactataagcttcactcttattgttgtatgc

SEQ ID NO: 647261 - DNA, 120 bp, Artificial Sequence
  ENSG00000182568_41 (sequence is synthesized)
aatttttactatcatgcaaataagcttaggtaaataaaactaatagatcaccttagaaaattatgcaattaatgtgaaaataattgatgtttgcaatgtgtcttcctttggtttacaatc

SEQ ID NO: 647262 - DNA, 120 bp, Artificial Sequence
  ENSG00000182568_42 (sequence is synthesized)
aattttaaagctacatctgtataaaatttctgtataaaggtgtatttcttttttatgagtttatggctatgaaaacagctattttgttacagctggctgtttttataagtgtatcacaat

SEQ ID NO: 647263 - DNA, 120 bp, Artificial Sequence
  ENSG00000182568_43 (sequence is synthesized)
tttctttatgcagaaatgttctgactaggagtggttattgactgtaactacacaattaaaattgtttgtatcgtatgacatggtagggtttgtctgcttatgtgaagtaactaaaggagt

SEQ ID NO: 647264 - DNA, 120 bp, Artificial Sequence
  ENSG00000182568_44 (sequence is synthesized)
caaaggatggccctctcatttaggtgcatgttaataacttgttatttcactgattttaaaaagagcaattgacaagttacttgaaacactgtaaatttaaatcacaaacacatgctcatt

SEQ ID NO: 647265 - DNA, 120 bp, Artificial Sequence
  ENSG00000182568_45 (sequence is synthesized)
tttaaataggtatgaaatttcacaatgaaaataacctgtttggttaacattttgcttaataagtagagataggatggtcaaaagactctccgacaaaaacaaatccagtctctagcagtt

SEQ ID NO: 647266 - DNA, 120 bp, Artificial Sequence
  ENSG00000182568_46 (sequence is synthesized)
atgttgttagaatggattcatctgtgcttatttcacaatacttcatttatagcaatgcttttccttaagctaatgtataaatatttctaaaggccattaatagtaacaaaataagtaggg

SEQ ID NO: 647267 - DNA, 120 bp, Artificial Sequence
  ENSG00000182568_47 (sequence is synthesized)
gaaaaaatggaccttctgtataaaaaccccttagcttttttttttcacaagttataagtggaataagttaataactgagctcgtaagtgtatctcataactataagagctacatgaagaa

SEQ ID NO: 647268 - DNA, 120 bp, Artificial Sequence
  ENSG00000182568_48 (sequence is synthesized)
aataggaataacacacctggtatttaaacacaatcttcaaaattcttgcaacattaaacatagtaaaatgccagaatataaaatgaggtgtgctaatggtcacaggattgaggccagcat

SEQ ID NO: 647269 - DNA, 120 bp, Artificial Sequence
  ENSG00000182568_49 (sequence is synthesized)
tacagtttggggtgatttttcttttatttgctccctcactttgtttcctagatgctagtaggggtatctgggttgcttgagataccattttgcaattgccccttctctttctgcctacca

SEQ ID NO: 647270 - DNA, 120 bp, Artificial Sequence
  ENSG00000182568_50 (sequence is synthesized)
tcttctcaggccctgatgagcttattggtaggcaactgggctgctttagtgttgaacttgtactttagaaactgaagtggaatcattgaaaactttcaataaagctttaaagttccattt

SEQ ID NO: 647271 - DNA, 120 bp, Artificial Sequence
  ENSG00000182568_51 (sequence is synthesized)
acttttgaagcacagctaagctcctctgaaggcagctggtttgttgcaaacttaaaattgtactgaaaagttgccactttttatttagtaagaaaacaaacattctggctcactagagtt

SEQ ID NO: 647272 - DNA, 120 bp, Artificial Sequence
  ENSG00000182568_52 (sequence is synthesized)
cagaaaagtaataatttgagccaaaggaatttgaattaagaaaatagaaactaggtttcatgtatttaaaaaataggaaataaaatagaaactcaaatgccatgaagttatcttcctctt

SEQ ID NO: 647273 - DNA, 120 bp, Artificial Sequence
  ENSG00000182568_53 (sequence is synthesized)
ccttatatcccctaagtttgggttgcaaataactttccaattcctaataacctaaattattttgaaatagtgttttcagtgaaatgatgaatgtttgaatgtttgtttggtaatcaacat

SEQ ID NO: 647274 - DNA, 120 bp, Artificial Sequence
  ENSG00000182568_54 (sequence is synthesized)
ggtaatcaacataacaatgctaacaaaattcccacttagattttttaacttttaaaagtcagcgtggttttgataatttgatattttaaatgcccacacatacacacacacacacacaca

SEQ ID NO: 647275 - DNA, 120 bp, Artificial Sequence
  ENSG00000182568_55 (sequence is synthesized)
cacatgttaataaactgataggatggagtgagcaaaattgttttcagggaagatggcacattttagaaaagacttgcccagatgatcttccatattgctcccccaatgtcatttatcgct

SEQ ID NO: 647276 - DNA, 120 bp, Artificial Sequence
  ENSG00000182568_56 (sequence is synthesized)
catgccaatcctcctcttgttacctgtggctatggtaaaattcctttaacaagcttcattgtgtccaagtatttcagagacttttaaaagctgggcatgacatagcgttttgtgctgtta

SEQ ID NO: 647277 - DNA, 120 bp, Artificial Sequence
  ENSG00000182568_57 (sequence is synthesized)
agaccttagcagagtcaggtagtttacgggtaatattcaaccttgtgcatctgaatctgtcatggattcccttcactcagcactttgccactaatttgtattacactctgtggccatata

SEQ ID NO: 647278 - DNA, 120 bp, Artificial Sequence
  ENSG00000182568_58 (sequence is synthesized)
atacttgcacattatgcaaaaaaaaatgttgatagtatctccttgccacacaatatgcagagttgacaacctttgaaaaccaaggtaactaatatgtatgtcctagttgtgtggcgcttg

SEQ ID NO: 647279 - DNA, 120 bp, Artificial Sequence
  ENSG00000182568_59 (sequence is synthesized)
gtaacaaagtctgtacatattatgtataaaatgtgtattggttagcatttagtactaagaaattctgagtttaaaataagtgatttttttcaaagtagcgatatctatatctgtgtttat

SEQ ID NO: 647280 - DNA, 120 bp, Artificial Sequence
  ENSG00000182568_60 (sequence is synthesized)
ctaaaaatactggcttgaatagaaaacattctcagatgattcaagattgagtaaaaatgagaatcccatacattccattattaaattctgccctattcccaattgttagcatctggctga

SEQ ID NO: 647281 - DNA, 120 bp, Artificial Sequence
  ENSG00000182568_61 (sequence is synthesized)
tattaaggtctttgattgtcacaatattctcaataaatgagacattctgaactgcctggtgatattttcaaaaagagcaattaaaatgtgtattccctctaatacagctgatagaactgt

SEQ ID NO: 647282 - DNA, 120 bp, Artificial Sequence
  ENSG00000182568_62 (sequence is synthesized)
tgtgttaaagcaagttggaaatttgcatgatagtgtggaaaccaatggaggtccaaaatattaatcatatctaaaatatcagaaaatatcaatactagtcttctttatgcatatttttga

SEQ ID NO: 647283 - DNA, 120 bp, Artificial Sequence
  ENSG00000182568_63 (sequence is synthesized)
ctttttaagagggcttatgaattcaatgtttcttctgaggcaatccttttaatgtaaatactaaatacttgcatgtcttttgacaaaggctaaactacaatctattaatatgcacatttt

SEQ ID NO: 647284 - DNA, 120 bp, Artificial Sequence
  ENSG00000182568_64 (sequence is synthesized)
tgataaaatataaagtaccctaattaaagaaattgtggtagaaggtgtatgtcctgaatactatacctgtttaacaataccaaatgttaaataaaaatagtttgaaattaatgtttaaaa

SEQ ID NO: 647285 - DNA, 120 bp, Artificial Sequence
  ENSG00000182568_65 (sequence is synthesized)
agagctatgacctgatttgtgacgcaccctcagaactgcagtaatggtccagctgcttcacaggcaactggtaaccacctcatttggggatgtttctgccttgctagcagtgccagagag

SEQ ID NO: 647286 - DNA, 120 bp, Artificial Sequence
  ENSG00000182568_66 (sequence is synthesized)
aacttcatcattgtcacctcatcaaagactactttttcagacatctcctgtagggctagattcagagagcagcttctgatatttggagggtgatctttagacagtgactgagtatggatc

SEQ ID NO: 647287 - DNA, 120 bp, Artificial Sequence
  ENSG00000182568_67 (sequence is synthesized)
ggggtctggatcagacacccttactcttccccttcactccattgtttagtgtccatcatggcagccaaggtgaagactcgagatgactggaaaatatattcttcatgatcattcagttct

SEQ ID NO: 647288 - DNA, 120 bp, Artificial Sequence
  ENSG00000182568_68 (sequence is synthesized)
tgatagataacctcagggtaaaaaaactgggccttggaaacatcagagaggtgcagattttggcagtcattggacatttccttctctcttagcccaagaaacctattaaattcttgcctg

SEQ ID NO: 647289 - DNA, 120 bp, Artificial Sequence
  ENSG00000182568_69 (sequence is synthesized)
acaaatcatatgctcccactgcagcaggcggaaaaataggactccagtgtctctctttggagagttctttcatagcaaattcctgtaatgcccattctaatcattatgccttatactgga

SEQ ID NO: 647290 - DNA, 120 bp, Artificial Sequence
  ENSG00000182568_70 (sequence is synthesized)
aaacattcttgctggtgtaattgcacctgtcctttctgtttcatacatgtacacacataaatattcacacacagttttctttcaaatccaaaaagtacaagcttaggaaatccttttaga

SEQ ID NO: 647291 - DNA, 120 bp, Artificial Sequence
  ENSG00000182568_71 (sequence is synthesized)
aaaaaattatttctaaaatctgtcctgcctcttaggcacttccgtatcctcagatggccagccactcgtcagatagcaaagttgtgcaagactgaagcacatcaactttgtttttctcct

SEQ ID NO: 647292 - DNA, 120 bp, Artificial Sequence
  ENSG00000182568_72 (sequence is synthesized)
atttcatatattaaaaaatctgtgataaatgctctgttaccctcagagtctgaaaaaatatgtccctcctttgagatgcaaatctgaactttgattagaaacagagtctgcctccttgac

SEQ ID NO: 647293 - DNA, 120 bp, Artificial Sequence
  ENSG00000182568_73 (sequence is synthesized)
agccacagataacctctcttaacaagttaaaaacaatttttaaagcagaatggtgtgttctgagcttatgaaaaagttaattcatagggtttttcctttttagctcctaatggaaaatgc

SEQ ID NO: 647294 - DNA, 120 bp, Artificial Sequence
  ENSG00000182568_74 (sequence is synthesized)
agagcagattcaggttcgtttactttggccaattcagtatagcaataagtaaataaagctttaaacttagcagggaaattagcgtttctcttcctcctgccagtctaaccataggctttt

SEQ ID NO: 647295 - DNA, 120 bp, Artificial Sequence
  ENSG00000182568_75 (sequence is synthesized)
tagcaagagataacaatacactgccatcttgctcagggggataaaatgaatattaacatactttttccagcgtatgtatcgtgttcctctttcctcatctcccagccaccaaagcaacag

SEQ ID NO: 647296 - DNA, 120 bp, Artificial Sequence
  ENSG00000182568_76 (sequence is synthesized)
gaaccccttttttacactcgtttggcaaatgtgtctttgttggtattgggttttgtgttaagagcttaaaatttttgtgtgttttttaaaaatcacaatttaaaacaccacctatttttt

SEQ ID NO: 647297 - DNA, 120 bp, Artificial Sequence
  ENSG00000182568_77 (sequence is synthesized)
aattaataccacagtgcccctgaggaaaagagcaaccgctgttgctgtaaaggaagtttgtagaatcacaattttatacattggattctgtccagaaagaggaggggagggaagcttaat

SEQ ID NO: 647298 - DNA, 120 bp, Artificial Sequence
  ENSG00000182568_78 (sequence is synthesized)
tggaatcttgccttacagtccttggcccttccttcaccttgtatgtaatagctgtctccccacactttacagaatgtaggttaggggtgagtcatctctgtttgtctttcctttagagcc

SEQ ID NO: 647299 - DNA, 120 bp, Artificial Sequence
  ENSG00000182568_79 (sequence is synthesized)
cctctcccaccacccttgggaaaggagagtctagaggcgttttcttaccaggcctgccgacccctgcaccatggctcggtgctgctcctcaggtgagcgggcacagttacctatgccacc

SEQ ID NO: 647300 - DNA, 120 bp, Artificial Sequence
  ENSG00000182568_80 (sequence is synthesized)
aagggacacagagagggggtgacctaaagacctgctccccaggtcaggattttcaaacctgtaaaggccctactaaccatggtcttgggcagagctcactgtgccagcagatgcagcctt

SEQ ID NO: 647301 - DNA, 120 bp, Artificial Sequence
  ENSG00000182568_81 (sequence is synthesized)
atgctttgtttgtcatgtcatgggacttgtcaccattcatctcctgaagacactcttctgtgaatttagatggaaaagttctgggatcaggtagtcattagcgctcttagggccccagtt

SEQ ID NO: 647302 - DNA, 120 bp, Artificial Sequence
  ENSG00000182568_82 (sequence is synthesized)
gcttagaaagcgtgttgtcattgaacttgagttgtatagcttatttttgttaaaggggatgattttagctctcttttaaagtaaaatgccactgccttccagagtcctaaaattctacct

SEQ ID NO: 647303 - DNA, 120 bp, Artificial Sequence
  ENSG00000182568_83 (sequence is synthesized)
ctgttgagtcacctacattctgcaatttttttgtatttctgtgaaaaattatatatatgtgtgtgcgtgtgtgtatagatagatacgtataactaaaaacagtaataaagttatttatct

SEQ ID NO: 647304 - DNA, 120 bp, Artificial Sequence
  ENSG00000182568_84 (sequence is synthesized)
accaggataaaaaaattctcaagtgtgtattaaagataaaacaagttgacaaagagcttccctttaggatatcaagcactaaaataatcgtgaaagcctgaaaaacttactgtttagcaa

SEQ ID NO: 647305 - DNA, 120 bp, Artificial Sequence
  ENSG00000182568_85 (sequence is synthesized)
aaacaaaaaagagaacgatatatgttaattaatttaaaaagtacttattcgaaaatataaattgtttttaataaaattgcttcttaggggtataaaaggaaatgcatagacacggtatca

SEQ ID NO: 647306 - DNA, 120 bp, Artificial Sequence
  ENSG00000182568_86 (sequence is synthesized)
gcattctaatattttgccacttaggttgatttactttgctgataagaattatggatatcgagtgtacagtatgtgcatgtgtcacatatttatgtataattgtgtatggaaattgtagca

SEQ ID NO: 647307 - DNA, 120 bp, Artificial Sequence
  ENSG00000182568_87 (sequence is synthesized)
catatacatatactaattatgaaaaagtgtctgtatacactaaatttaaatcctaaccacatctgagtttgctatagacaaaacaattcgctagctgtcgtatggtggattgaacctttt

SEQ ID NO: 647308 - DNA, 120 bp, Artificial Sequence
  ENSG00000182568_88 (sequence is synthesized)
gaggtaagaaaaaaacttgcagtgtcagcctagtgcaattcggtaagaaattgtgtgtgtattaaattggaactgtctgatagaaaattcacaagtgtgagaatatcagaaatcctttag

SEQ ID NO: 647309 - DNA, 120 bp, Artificial Sequence
  ENSG00000182568_89 (sequence is synthesized)
tctcatgacagataacactgaataagagcataagctcatcttctgttcttcctggccatccaatgaaacggagcagaacacaaatttctttccccgctgctctgtagctcacctttctga

SEQ ID NO: 647310 - DNA, 120 bp, Artificial Sequence
  ENSG00000182568_90 (sequence is synthesized)
aatgtctttgaaatcctttcctctccatcttcattttaaatctttgttaattatttacatcataatttgatgtgctgtcttcgcctttgatgcgtatcattctagtgaattttatggctc

SEQ ID NO: 647311 - DNA, 120 bp, Artificial Sequence
  ENSG00000182568_91 (sequence is synthesized)
acattttcagagcactgagttttcacttcctctgctgatctctgataagtaagtgcagtagccccccaaagctgtcttaattcatcccttcctagtcatatcattttgatttttttgtaa

SEQ ID NO: 647312 - DNA, 120 bp, Artificial Sequence
  ENSG00000182568_92 (sequence is synthesized)
atgctgtcggccatttcgccggcctaccttttctttctaaatcttcatccctatcaaagaagctatatgtaggatccgggaccacatttttcctgattggagacggctttgtgtggaact

SEQ ID NO: 647313 - DNA, 120 bp, Artificial Sequence
  ENSG00000182568_93 (sequence is synthesized)
tttttgcaccattatgcattcctacttctccctctttctttaagcatggagaagcctacttaaccttattataacaataacagaataggttattaatatttaatatgcacatgattaaaa

SEQ ID NO: 647314 - DNA, 120 bp, Artificial Sequence
  ENSG00000182568_94 (sequence is synthesized)
tttctctcccttaaacataggtcagctgtattattactaaccggcatgtaatttttcatttaaaatattggtattctgccccatgccgtttctgaaatgcagtctactttagtagtgatt

SEQ ID NO: 647315 - DNA, 120 bp, Artificial Sequence
  ENSG00000182568_95 (sequence is synthesized)
ttattaaagtgtttctgctgtattttgtaatgtgtttctaattgttaaaaattgggactacgtaaatgcaatttgctgttttctttttagctatacttgtaataattcttgttctaaaag

SEQ ID NO: 647316 - DNA, 120 bp, Artificial Sequence
  ENSG00000182568_96 (sequence is synthesized)
taagcccatttttccccacttagtttttttataggccagttatctttttattcatgtgtattggtacagtttccacagatcattttgttaatttgaataagaatgtaatgctatcatcta

SEQ ID NO: 647317 - DNA, 120 bp, Artificial Sequence
  ENSG00000182568_97 (sequence is synthesized)
gaaatatagtaacatctgtatcatatctagataggccattttacaaatacattatatttgtggagagatatctagagctaaaacatttacataggacacatatatacacgtaggtccccg

SEQ ID NO: 647318 - DNA, 120 bp, Artificial Sequence
  ENSG00000182568_98 (sequence is synthesized)
tttggaggatcttgtaacctcgtaatatggctcttaaaaacgcactagtattcccactttctgaagtttgtagaagctgctatatatttctgtgatctttagacagtgactgagtatgga

SEQ ID NO: 647319 - DNA, 120 bp, Artificial Sequence
  ENSG00000182568_99 (sequence is synthesized)
aaccctgatttgaggtttgatggagctccctggtttaaagcaactggtatctgaagcaagaatctgccaaaaatgcaaagtgacttgaccactggtgaccttttaaaatatgcctgattc

SEQ ID NO: 647320 - DNA, 120 bp, Artificial Sequence
  ENSG00000182568_100 (sequence is synthesized)
tccttcccttggccccgcgcgctcgctcgctcgctcctcgcctcgctctcccctttaaacgcccacttcgtatggggaaagaggacaacttgaagtcaagttgcaattaacttccgcggc

SEQ ID NO: 647321 - DNA, 120 bp, Artificial Sequence
  ENSG00000182568_101 (sequence is synthesized)
agccgcagctccggcggcggcggcggcggcaggagaggcagaagccgccgcctcggaagtccgacgccggcgcgcccgcccggggagccgttcttggtttcaggcccgcactcgacagcc

SEQ ID NO: 647322 - DNA, 120 bp, Artificial Sequence
  ENSG00000182568_102 (sequence is synthesized)
tgaaattgtgtattatgagcaccagtttggttaagtactttttgtggaaccagttagagctaatatctaaaaaaggaagaaaatgatttgtggaaccagttagagttaatatctaaaaaa

SEQ ID NO: 647323 - DNA, 120 bp, Artificial Sequence
  ENSG00000182568_103 (sequence is synthesized)
ttcgtcaccattattatttgatcagaaaggtaattctgcattcattgcttttggaaaatgcactgttaatttagagcacagcttaccttaggaccaagttcatattctacttaaatattt

SEQ ID NO: 647324 - DNA, 120 bp, Artificial Sequence
  ENSG00000182568_104 (sequence is synthesized)
ctgttacgactttaaataatatgagaatgtatatatttgtgtgcatttgcctgtactgtacccagtctgccttggaagcacagtgaatctcttgtgattatttattttcatggctaatat

SEQ ID NO: 647325 - DNA, 120 bp, Artificial Sequence
  ENSG00000182568_105 (sequence is synthesized)
tatgttggacaatttatttattaatggaaaaataaattttaaaaagaaactacctcgtgctcctgaagcttagcttcagtactgctctcctgaaacatgacagtcatttccgtaggaatt

SEQ ID NO: 647326 - DNA, 120 bp, Artificial Sequence
  ENSG00000182568_106 (sequence is synthesized)
aaatacacttaggtgtttagttgatgttcagtctgtattataaatgatattggagcaacaattacaaatctatcatgttatacaaatgtgtttttaataaactgtactttatttcacagt

SEQ ID NO: 647327 - DNA, 120 bp, Artificial Sequence
  ENSG00000182575_0 (sequence is synthesized)
cgcgcaggtccccagcacatctgggcgagagcggcgccgctggagccgaggggggcgccgagcgcagatctggagcagcagagccacggcgcagctggggcccttcgaggcgctcggggc

SEQ ID NO: 647328 - DNA, 120 bp, Artificial Sequence
  ENSG00000182575_1 (sequence is synthesized)
cacggcgcagctggggcccttcgaggcgctcggggcgcacatctgggacctcgagcgggggccgtgccgcgcgcagctggaccaggggaggggggcggcggctgcacagctggaccgaag

SEQ ID NO: 647329 - DNA, 120 bp, Artificial Sequence
  ENSG00000182575_2 (sequence is synthesized)
gggccgcgggccgccggggactggagcatgggacggcgcgcctgaaggagcaggaaggggaaggaggcctgggaccccgaaaagagaaggggagagcgaggggacgagagcggaggagga

SEQ ID NO: 647330 - DNA, 120 bp, Artificial Sequence
  ENSG00000182575_3 (sequence is synthesized)
agatgcaactgactcgctgctgcttcgtgttcctggtgcagggtagcctctatctggtcatctgtggccaggatgatggtcctcccggctcagaggaccctgagcgtgatgaccacgagg

SEQ ID NO: 647331 - DNA, 120 bp, Artificial Sequence
  ENSG00000182575_4 (sequence is synthesized)
gccagccccggccccgggtgcctcggaagcggggccacatctcacctaagtcccgccccatggccaattccactctcctagggctgctggccccgcctggggaggcttggggcattcttg

SEQ ID NO: 647332 - DNA, 120 bp, Artificial Sequence
  ENSG00000182575_5 (sequence is synthesized)
ggcagccccccaaccgcccgaaccacagccccccaccctcagccaaggtgaagaaaatctttggctggggcgacttctactccaacatcaagacggtggccctgaacctgctcgtcacag

SEQ ID NO: 647333 - DNA, 120 bp, Artificial Sequence
  ENSG00000182575_6 (sequence is synthesized)
ggaagattgtggaccatggcaatgggaccttcagcgtccacttccaacacaatgccacaggccagggaaacatctccatcagcctcgtgccccccagtaaagctgtagagttccaccagg

SEQ ID NO: 647334 - DNA, 120 bp, Artificial Sequence
  ENSG00000182575_7 (sequence is synthesized)
aacagcagatcttcatcgaagccaaggcctccaaaatcttcaactgccggatggagtgggagaaggtagaacggggccgccggacctcgctttgcacccacgacccagccaagatctgct

SEQ ID NO: 647335 - DNA, 120 bp, Artificial Sequence
  ENSG00000182575_8 (sequence is synthesized)
cccgagaccacgctcagagctcagccacctggagctgctcccagcccttcaaagtcgtctgtgtctacatcgccttctacagcacggactatcggctggtccagaaggtgtgcccagatt

SEQ ID NO: 647336 - DNA, 120 bp, Artificial Sequence
  ENSG00000182575_9 (sequence is synthesized)
cccctactacccatctgggtgacccggggcaggccacagaggccaggccagggctggaaggacaggcctgcccatgcaggagaccatctggacaccgggcagggaaggggttgggcctca

SEQ ID NO: 647337 - DNA, 120 bp, Artificial Sequence
  ENSG00000182575_10 (sequence is synthesized)
ggcagggaggggggtggagacgaggagatgccaagtggggccagggccaagtctcaagtggcagagaaagggtcccaagtgctggtcccaacctgaagctgtggagtgactagatcacag

SEQ ID NO: 647338 - DNA, 120 bp, Artificial Sequence
  ENSG00000182575_11 (sequence is synthesized)
gagcactggaggaggagtgggctctctgtgcagcctcacagggctttgccacggagccacagagagatgctgggtccccgaggcctgtgggcaggccgatcagtgtggccccagatcaag

SEQ ID NO: 647339 - DNA, 120 bp, Artificial Sequence
  ENSG00000182575_12 (sequence is synthesized)
tcatgggaggaagctaagcccttggttcttgccatcctgaggaaagatagcaacagggagggggagatttcatcagtgtggacagcctgtcaacttaggatggatggctgagagggcttc

SEQ ID NO: 647340 - DNA, 120 bp, Artificial Sequence
  ENSG00000182575_13 (sequence is synthesized)
ctaggagccagtcagcagggtggggtggggccagaggagctctccagccctgcctagtgggcgccctcagccccttgtcgtgtgctgagcatggcatgaggctgaagtggcaaccctggg

SEQ ID NO: 647341 - DNA, 120 bp, Artificial Sequence
  ENSG00000182575_14 (sequence is synthesized)
gtctttgatgtcttgacagattgaccatctgtctccagccaggccacccctttccaaaattccctcttctgccagtactccccctgtaccacccattgctgatggcacacccatccttaa

SEQ ID NO: 647342 - DNA, 120 bp, Artificial Sequence
  ENSG00000182575_15 (sequence is synthesized)
gctaagacaggacgattgtggtcctcccacactaaggccacagcccatccgcgtgctgtgtgtccctcttccaccccaacccctgctggctcctctgggagcatccatgtcccggagagg

SEQ ID NO: 647343 - DNA, 120 bp, Artificial Sequence
  ENSG00000182575_16 (sequence is synthesized)
ggtccctcaacagtcagcctcacctgtcagaccggggttctcccggatctggatggcgccgccctctcagcagcgggcacgggtggggcggggccgggccgcagagcatgtgctggatct

SEQ ID NO: 647344 - DNA, 120 bp, Artificial Sequence
  ENSG00000182575_17 (sequence is synthesized)
gttctgtgtgtctgtctgtgggtggggggaggggagggaagtcttgtgaaaccgctgattgctgacttttgtgtgaagaatcgtgttcttggagcaggaaataaagcttgccccggggca

SEQ ID NO: 647345 - DNA, 120 bp, Artificial Sequence
  ENSG00000182575_18 (sequence is synthesized)
ctctcctgagtggagatgtgagacacacacccctcctccagaccaccctccgctccccaccctggaggcttgagactgctggcactggagcagcccaccaatggacacccaccgtgtgcc

SEQ ID NO: 647346 - DNA, 120 bp, Artificial Sequence
  ENSG00000182575_19 (sequence is synthesized)
gttcagcctcccacagtgctgtggagactgcaggaaggaggaggaagcaatggggccagaggccctgggcgccctccccacctcccctggctgaactctcagcaggcactgggggcactt

SEQ ID NO: 647347 - DNA, 120 bp, Artificial Sequence
  ENSG00000182575_20 (sequence is synthesized)
tgacccccctcctgctcctctcctcctgtggagagccagatgctggcgacagctggagggcccggccttcctggcacacagttctgcctgcaccagggatggattcattttaataacttc

SEQ ID NO: 647348 - DNA, 120 bp, Artificial Sequence
  ENSG00000182575_21 (sequence is synthesized)
atttcaccctcatgcacactgccgcctcatccctcctttccaccttccccagtagcctggctgctctcctcagctaggacttcgctaacagatttcctcccaaaccttaattctttggaa

SEQ ID NO: 647349 - DNA, 120 bp, Artificial Sequence
  ENSG00000182575_22 (sequence is synthesized)
tagccctctggtccctactgttcttgccagatacttctgtgcccgcttggtcctcacaagggcaaggggtccatccaacttcctctggctaagaagacgtcacctctgccccattggcga

SEQ ID NO: 647350 - DNA, 120 bp, Artificial Sequence
  ENSG00000182575_23 (sequence is synthesized)
gcagtgtccccatggtgatgcccccccaccatcacgacgaagtgcgctggcctcccactcttgccatgcacacactcacaggagattcctctgaagaaacctgtccccactctgcccaga

SEQ ID NO: 647351 - DNA, 120 bp, Artificial Sequence
  ENSG00000182575_24 (sequence is synthesized)
acatttgcttgagacccaagtggcagggatccaaccgcccttggcgctgatgtttgctgagggctcagggcttccctctccagccccggttccaagctgtctgatcccccacgaggaaac

SEQ ID NO: 647352 - DNA, 120 bp, Artificial Sequence
  ENSG00000182575_25 (sequence is synthesized)
ttgagcaaacaccctgggctcggtgctggaggagggcgtagcatcttcaagaacagctcagggagggagagctagcaggtagaatgggccaatgagggtgttccttggtgtcctccctga

SEQ ID NO: 647353 - DNA, 120 bp, Artificial Sequence
  ENSG00000182575_26 (sequence is synthesized)
actgccatctgcagacccagcagggtcctagccccgtcattttgctgcgtggccttggccatgtccattctcctctctggctttctttctttgtttcttcctctatgacatgaagggctt

SEQ ID NO: 647354 - DNA, 120 bp, Artificial Sequence
  ENSG00000182575_27 (sequence is synthesized)
gcccagaccaggggttctcaaacgcggatcacccagagggtttgttaacacacagatttctgggtcctacccacatttctaattcagcaggcctgggtggggcctaagaattagaatttc

SEQ ID NO: 647355 - DNA, 120 bp, Artificial Sequence
  ENSG00000182575_28 (sequence is synthesized)
taacgagtgcccaggtctatgctgatgctgctgctccagggcccatgctgggagacccactcaaaggaccttgaagttcatctctggctatggctccgcaggagggggagacacctcgga

SEQ ID NO: 647356 - DNA, 120 bp, Artificial Sequence
  ENSG00000182575_29 (sequence is synthesized)
tgtgatttcccagctgtaatttccatctgcttctcctggggaaggggcctttcagagaatcggggctattgtattggattttcaatctgaccacatgccagtgaaggaacaggctggagt

SEQ ID NO: 647357 - DNA, 120 bp, Artificial Sequence
  ENSG00000182575_30 (sequence is synthesized)
cctcctgcagctagtaagaggcctcagaatggccagctgccagtggcaccttgtctgggagttagttgggccctttgggactctgtgaagggaagacactaccaaggtcacagtgccttc

SEQ ID NO: 647358 - DNA, 120 bp, Artificial Sequence
  ENSG00000182575_31 (sequence is synthesized)
tggaggtcattctaagtcggctctcttgggagggcagcactcagggccctttgggccctcttgaggagaggagagtcctggcagtaaggtaagatgggcttgccaccccccacctttcgc

SEQ ID NO: 647359 - DNA, 120 bp, Artificial Sequence
  ENSG00000182575_32 (sequence is synthesized)
ccctgcccaccagcgctccgcgcaaactggtcccctcatactgcagcgcagagttgggtggggctgagaagccatctggttacagcccaccttgtaggaaatgacccagcttgtttcccc

SEQ ID NO: 647360 - DNA, 120 bp, Artificial Sequence
  ENSG00000182575_33 (sequence is synthesized)
tcccgtggtcctccaccctaacccctcagcccagctgggggctgccgggggccttgtctcctccatcagtggagcctctgggacaagtttaccaggctgggggttctttaaggacacagc

SEQ ID NO: 647361 - DNA, 120 bp, Artificial Sequence
  ENSG00000182575_34 (sequence is synthesized)
ttggatctccccatcaggctggggaacacctagggccgggggccatgcctccctcatcagactgaggacaccctgatgtcaggggctggatggccccttagactgggggtccctgagggc

SEQ ID NO: 647362 - DNA, 120 bp, Artificial Sequence
  ENSG00000182575_35 (sequence is synthesized)
agaagctatgcctcccctcatcagactggagtctccctgagggcaagaactgtgctatggatgggagggggacagcttgccttttcctaggcatcagagcacctggaggctgcctctgcc

SEQ ID NO: 647363 - DNA, 120 bp, Artificial Sequence
  ENSG00000182575_36 (sequence is synthesized)
cttcagctttgctcaaaggcgctgtctgggtctcagcattcctttctcaagtagggtgaatctcctagcactctgtgaagctaataagggggattacccgttaggtcaactggtagcaat

SEQ ID NO: 647364 - DNA, 120 bp, Artificial Sequence
  ENSG00000182575_37 (sequence is synthesized)
gcccgagtctccttctcgatgaagcttaaggcaaaagcaaatgaatatctaggtcccttcccccccttccccccttccctttcctgggatgagcaagcgggaactgagtcaccctgttcc

SEQ ID NO: 647365 - DNA, 120 bp, Artificial Sequence
  ENSG00000182575_38 (sequence is synthesized)
ccatccttggcaggaatgctggtgaccttgcattgtggcagattcaggtggcgaggcccattgctcgagatgcacctggtgggtgggtggcagggatcctgggggagtgtttatggggac

SEQ ID NO: 647366 - DNA, 120 bp, Artificial Sequence
  ENSG00000182575_39 (sequence is synthesized)
ggaggcagctgaagggcagggaggggtgaccaggtgctgggatcatcgagtgagtatgtgcaggagggattgtagagacacaatgaaacagttgctctgtgttgggaagtgatccagtgt

SEQ ID NO: 647367 - DNA, 120 bp, Artificial Sequence
  ENSG00000182575_40 (sequence is synthesized)
catcgctgggagtgggagacagaaatgttacttccaaagattccgagtcctgtggtactgccaggagaaccgggggctggggtgatgggtaaggagaggcaccattagccccgccaggca

SEQ ID NO: 647368 - DNA, 120 bp, Artificial Sequence
  ENSG00000182575_41 (sequence is synthesized)
gaggcaagatggggtgggggcggcacctgccaattatgccaaagtcttggagtggcagctggcaccatcaccaaggcacaaatgccagcagagacctggcactcacctgggttgtgattc

SEQ ID NO: 647369 - DNA, 120 bp, Artificial Sequence
  ENSG00000182575_42 (sequence is synthesized)
catagggcccctgtctcctgttggtctcccaggctcaaaggctgacctgataattcaagtgaaggatgcctagttcaaggcctcccagttcctcatcccaggccacctggtcaggtggtc

SEQ ID NO: 647370 - DNA, 120 bp, Artificial Sequence
  ENSG00000182575_43 (sequence is synthesized)
ccaagggacaagctaggtcctcctgaactgcagaggctgccaataaactggcaacacaggtgttgcaggaagatatagctgggtcctcatcctgggtctgtaatttattagacgtgtggc

SEQ ID NO: 647371 - DNA, 120 bp, Artificial Sequence
  ENSG00000182575_44 (sequence is synthesized)
tttggacaaatgacataatttcccagagcctccttagataaaaaactagggctttgcttaccttggcgtattgttaggaaaattaaatgagttgctcaataaatgttacttcctcctgtc

SEQ ID NO: 647372 - DNA, 120 bp, Artificial Sequence
  ENSG00000182578_0 (sequence is synthesized)
gaagggcagacagagtgtccaaaagcgtgagagcacgaagtgaggagaaggtggagaagagagaagaggaagaggaagaggaagagaggaagcggagggaactgcggccaggctaaaagg

SEQ ID NO: 647373 - DNA, 120 bp, Artificial Sequence
  ENSG00000182578_1 (sequence is synthesized)
ggaagaagaggatcagcccaaggaggaggaagaggaaaacaagacaaacagccagtgcagaggagaggaacgtgtgtccagtgtcccgatccctgcggagctagtagctgagagctctgt

SEQ ID NO: 647374 - DNA, 120 bp, Artificial Sequence
  ENSG00000182578_2 (sequence is synthesized)
gccctgggcaccttgcagccctgcacctgcctgccacttccccaccgaggccatgggcccaggagttctgctgctcctgctggtggccacagcttggcatggtcagggaatcccagtgat

SEQ ID NO: 647375 - DNA, 120 bp, Artificial Sequence
  ENSG00000182578_3 (sequence is synthesized)
agagcccagtgtccctgagctggtcgtgaagccaggagcaacggtgaccttgcgatgtgtgggcaatggcagcgtggaatgggatggccccccatcacctcactggaccctgtactctga

SEQ ID NO: 647376 - DNA, 120 bp, Artificial Sequence
  ENSG00000182578_4 (sequence is synthesized)
tggctccagcagcatcctcagcaccaacaacgctaccttccaaaacacggggacctatcgctgcactgagcctggagaccccctgggaggcagcgccgccatccacctctatgtcaaaga

SEQ ID NO: 647377 - DNA, 120 bp, Artificial Sequence
  ENSG00000182578_5 (sequence is synthesized)
ccctgcccggccctggaacgtgctagcacaggaggtggtcgtgttcgaggaccaggacgcactactgccctgtctgctcacagacccggtgctggaagcaggcgtctcgctggtgcgtgt

SEQ ID NO: 647378 - DNA, 120 bp, Artificial Sequence
  ENSG00000182578_6 (sequence is synthesized)
gcgtggccggcccctcatgcgccacaccaactactccttctcgccctggcatggcttcaccatccacagggccaagttcattcagagccaggactatcaatgcagtgccctgatgggtgg

SEQ ID NO: 647379 - DNA, 120 bp, Artificial Sequence
  ENSG00000182578_7 (sequence is synthesized)
caggaaggtgatgtccatcagcatccggctgaaagtgcagaaagtcatcccagggcccccagccttgacactggtgcctgcagagctggtgcggattcgaggggaggctgcccagatcgt

SEQ ID NO: 647380 - DNA, 120 bp, Artificial Sequence
  ENSG00000182578_8 (sequence is synthesized)
gtgctcagccagcagcgttgatgttaactttgatgtcttcctccaacacaacaacaccaagctcgcaatccctcaacaatctgactttcataataaccgttaccaaaaagtcctgaccct

SEQ ID NO: 647381 - DNA, 120 bp, Artificial Sequence
  ENSG00000182578_9 (sequence is synthesized)
caacctcgatcaagtagatttccaacatgccggcaactactcctgcgtggccagcaacgtgcagggcaagcactccacctccatgttcttccgggtggtagagagtgcctacttgaactt

SEQ ID NO: 647382 - DNA, 120 bp, Artificial Sequence
  ENSG00000182578_10 (sequence is synthesized)
gagctctgagcagaacctcatccaggaggtgaccgtgggggaggggctcaacctcaaagtcatggtggaggcctacccaggcctgcaaggttttaactggacctacctgggacccttttc

SEQ ID NO: 647383 - DNA, 120 bp, Artificial Sequence
  ENSG00000182578_11 (sequence is synthesized)
tgaccaccagcctgagcccaagcttgctaatgctaccaccaaggacacatacaggcacaccttcaccctctctctgccccgcctgaagccctctgaggctggccgctactccttcctggc

SEQ ID NO: 647384 - DNA, 120 bp, Artificial Sequence
  ENSG00000182578_12 (sequence is synthesized)
cagaaacccaggaggctggagagctctgacgtttgagctcacccttcgataccccccagaggtaagcgtcatatggacattcatcaacggctctggcacccttttgtgtgctgcctctgg

SEQ ID NO: 647385 - DNA, 120 bp, Artificial Sequence
  ENSG00000182578_13 (sequence is synthesized)
gtacccccagcccaacgtgacatggctgcagtgcagtggccacactgataggtgtgatgaggcccaagtgctgcaggtctgggatgacccataccctgaggtcctgagccaggagccctt

SEQ ID NO: 647386 - DNA, 120 bp, Artificial Sequence
  ENSG00000182578_14 (sequence is synthesized)
ccacaaggtgacggtgcagagcctgctgactgttgagaccttagagcacaaccaaacctacgagtgcagggcccacaacagcgtggggagtggctcctgggccttcatacccatctctgc

SEQ ID NO: 647387 - DNA, 120 bp, Artificial Sequence
  ENSG00000182578_15 (sequence is synthesized)
aggagcccacacgcatcccccggatgagttcctcttcacaccagtggtggtcgcctgcatgtccatcatggccttgctgctgctgctgctcctgctgctattgtacaagtataagcagaa

SEQ ID NO: 647388 - DNA, 120 bp, Artificial Sequence
  ENSG00000182578_16 (sequence is synthesized)
tcgagagctatgagggcaacagttatactttcatcgaccccacgcagctgccttacaacgagaagtgggagttcccccggaacaacctgcagtttggtaagaccctcggagctggagcct

SEQ ID NO: 647389 - DNA, 120 bp, Artificial Sequence
  ENSG00000182578_17 (sequence is synthesized)
ttgggaaggtggtggaggccacggcctttggtctgggcaaggaggatgctgtcctgaaggtggctgtgaagatgctgaagtccacggcccatgctgatgagaaggaggccctcatgtccg

SEQ ID NO: 647390 - DNA, 120 bp, Artificial Sequence
  ENSG00000182578_18 (sequence is synthesized)
agctgaagatcatgagccacctgggccagcacgagaacatcgtcaaccttctgggagcctgtacccatggaggccctgtactggtcatcacggagtactgttgctatggcgacctgctca

SEQ ID NO: 647391 - DNA, 120 bp, Artificial Sequence
  ENSG00000182578_19 (sequence is synthesized)
actttctgcgaaggaaggctgaggccatgctgggacccagcctgagccccggccaggaccccgagggaggcgtcgactataagaacatccacctcgagaagaaatatgtccgcagggaca

SEQ ID NO: 647392 - DNA, 120 bp, Artificial Sequence
  ENSG00000182578_20 (sequence is synthesized)
gtggcttctccagccagggtgtggacacctatgtggagatgaggcctgtctccacttcttcaaatgactccttctctgagcaagacctggacaaggaggatggacggcccctggagctcc

SEQ ID NO: 647393 - DNA, 120 bp, Artificial Sequence
  ENSG00000182578_21 (sequence is synthesized)
gggacctgcttcacttctccagccaagtagcccagggcatggccttcctcgcttccaagaattgcatccaccgggacgtggcagcgcgtaacgtgctgttgaccaatggtcatgtggcca

SEQ ID NO: 647394 - DNA, 120 bp, Artificial Sequence
  ENSG00000182578_22 (sequence is synthesized)
agattggggacttcgggctggctagggacatcatgaatgactccaactacattgtcaagggcaatgcccgcctgcctgtgaagtggatggccccagagagcatctttgactgtgtctaca

SEQ ID NO: 647395 - DNA, 120 bp, Artificial Sequence
  ENSG00000182578_23 (sequence is synthesized)
cggttcagagcgacgtctggtcctatggcatcctcctctgggagatcttctcacttgggctgaatccctaccctggcatcctggtgaacagcaagttctataaactggtgaaggatggat

SEQ ID NO: 647396 - DNA, 120 bp, Artificial Sequence
  ENSG00000182578_24 (sequence is synthesized)
accaaatggcccagcctgcatttgccccaaagaatatatacagcatcatgcaggcctgctgggccttggagcccacccacagacccaccttccagcagatctgctccttccttcaggagc

SEQ ID NO: 647397 - DNA, 120 bp, Artificial Sequence
  ENSG00000182578_25 (sequence is synthesized)
aggcccaagaggacaggagagagcgggactataccaatctgccgagcagcagcagaagcggtggcagcggcagcagcagcagtgagctggaggaggagagctctagtgagcacctgacct

SEQ ID NO: 647398 - DNA, 120 bp, Artificial Sequence
  ENSG00000182578_26 (sequence is synthesized)
gctgcgagcaaggggatatcgcccagcccttgctgcagcccaacaactatcagttctgctgaggagttgacgacagggagtaccactctcccctcccacaaacttcaactcctccatgga

SEQ ID NO: 647399 - DNA, 120 bp, Artificial Sequence
  ENSG00000182578_27 (sequence is synthesized)
tggggcgacacggggagaacatacaaactctgccttcggtcatttcactcaacagctcggcccagctctgaaacttgggaaggtgagggattcaggggaggtcagaggatcccacttcct

SEQ ID NO: 647400 - DNA, 120 bp, Artificial Sequence
  ENSG00000182578_28 (sequence is synthesized)
gagcatgggccatcactgccagtcaggggctgggggctgagccctcacccccccctcccctactgttctcatggtgttggcctcgtgtttgctatgccaactagtagaaccttctttcct

SEQ ID NO: 647401 - DNA, 120 bp, Artificial Sequence
  ENSG00000182578_29 (sequence is synthesized)
aatccccttatcttcatggaaatggactgactttatgcctatgaagtccccaggagctacactgatactgagaaaaccaggctctttggggctagacagactggcagagagtgagatctc

SEQ ID NO: 647402 - DNA, 120 bp, Artificial Sequence
  ENSG00000182578_30 (sequence is synthesized)
cctctctgagaggagcagcagatgctcacagaccacactcagctcaggccccttggagcaggatggctcctctaagaatctcacaggacctcttagtctctgccctatacgccgccttca

SEQ ID NO: 647403 - DNA, 120 bp, Artificial Sequence
  ENSG00000182578_31 (sequence is synthesized)
ctccacagcctcacccctcccacccccatactggtactgctgtaatgagccaagtggcagctaaaagttgggggtgttctgcccagtcccgtcattctgggctagaaggcaggggacctt

SEQ ID NO: 647404 - DNA, 120 bp, Artificial Sequence
  ENSG00000182578_32 (sequence is synthesized)
ggcatgtggctggccacaccaagcaggaagcacaaactcccccaagctgactcatcctaactaacagtcacgccgtgggatgtctctgtccacattaaactaacagcattaatgcagtca

SEQ ID NO: 647405 - DNA, 120 bp, Artificial Sequence
  ENSG00000182578_33 (sequence is synthesized)
gcagggagcccatgggcccttggacagaggccctttggtgcccagggacttaagggacctgtgtgcgtggcagccacggcccatgctgatgagaaggaggccctcatgtccgagctgaag

SEQ ID NO: 647406 - DNA, 120 bp, Artificial Sequence
  ENSG00000182578_34 (sequence is synthesized)
atcatgagccacctgggccagcacgagaacatcgtcaaccttctgggagcctgtacccatggaggcatctcttgaggactgttggaagtgcaccacctcaggcccatccacccaggcctg

SEQ ID NO: 647407 - DNA, 77 bp, Artificial Sequence
  ENSG00000182578_35 (sequence is synthesized)
gagatgggatctcactatgttgtccaggctggtctggaactcctggccttatgcaatcctcctgcatcaatccctaa

SEQ ID NO: 647408 - DNA, 120 bp, Artificial Sequence
  ENSG00000182578_36 (sequence is synthesized)
acagacttttaagagatcgttattacagttaccctgaggataccaaaatggcctcatctgtcagaatgagggtgatgagagtacccttctgcaagggttactgtgaggattaaatggtaa

SEQ ID NO: 647409 - DNA, 120 bp, Artificial Sequence
  ENSG00000182578_37 (sequence is synthesized)
agcatgccaaggacttggcataggttttatactaaacttactttgactgggtttggggacctctgctgggtaggtctctctaggggtgtgtgttaatggcccctggaccctagggagctg

SEQ ID NO: 647410 - DNA, 120 bp, Artificial Sequence
  ENSG00000182578_38 (sequence is synthesized)
gtggtggtggacagtcggtagggatcctgcaggagtgtgagcagaagggttttgaggaggaagctgatgtcagggaaggagacctgctgaggatatctctgctggagtttgtttatccaa

SEQ ID NO: 647411 - DNA, 120 bp, Artificial Sequence
  ENSG00000182578_39 (sequence is synthesized)
ggcctggctaaggagccactctccaggagctttcccttaccctctcctgggatctctctcccatcttggagctcttacagtgcatggctgcattgggtgcaccttagtgccattttttgt

SEQ ID NO: 647412 - DNA, 120 bp, Artificial Sequence
  ENSG00000182578_40 (sequence is synthesized)
ttatttggggattggggtccagtagctccctactggacttcatttgttcattctttcatgcattcctttatggaaacatgaaaagacaatgatcacccagtgattatgggggaagcacaa

SEQ ID NO: 647413 - DNA, 120 bp, Artificial Sequence
  ENSG00000182578_41 (sequence is synthesized)
agggttggcactgggccccaggggcttctgtccctagagcccatggcctccactgcctgcctgcccacacaaagaccatgtgcaatgtgatcagaagctgagaggaccaggccagagggc

SEQ ID NO: 647414 - DNA, 120 bp, Artificial Sequence
  ENSG00000182578_42 (sequence is synthesized)
gaagggcagacagagtgtccaaaagcgtgagagcacgaagtgaggagaaggtggagaagagagaagaggaagaggaagaggaagagaggaagcggagggaactgcggccagggtcaggga

SEQ ID NO: 647415 - DNA, 120 bp, Artificial Sequence
  ENSG00000182580_0 (sequence is synthesized)
agcagaagtgagtacgtgagcggcgcagcaagatcccagctcggaccccggacggcgcgcgcccccgaagccccggatcccagtcgggcccgcagctgaccgccagattactgtgcatcc

SEQ ID NO: 647416 - DNA, 120 bp, Artificial Sequence
  ENSG00000182580_1 (sequence is synthesized)
cgaatcacgaccacctgcaccctcctgccccggcccgccccccaagtcctcaggcacccagctccccggcgccccggatcctcctggaccggtccgtccagattcccgcgggaccgacct

SEQ ID NO: 647417 - DNA, 120 bp, Artificial Sequence
  ENSG00000182580_2 (sequence is synthesized)
gtccgcatccccaggaccgccgggctcggtgcaccgcctcggtcccggagccgcccgcctggattgcattccctcctctcctggatctcctgggacccgacgcgagcctgccccggagcc

SEQ ID NO: 647418 - DNA, 80 bp, Artificial Sequence
  ENSG00000182580_3 (sequence is synthesized)
ggctcggctcctagagctgccacggccatggccagagcccgcccgccgccgccgccgtcgccgccgccggggcttctgcc

SEQ ID NO: 647419 - DNA, 120 bp, Artificial Sequence
  ENSG00000182580_4 (sequence is synthesized)
gtcgccgccgccggggcttctgccgctgctccctccgctgctgctgctgccgctgctgctgctgcccgccggctgccgggcgctggaagagaccctcatggacacaaaatgggtaacatc

SEQ ID NO: 647420 - DNA, 120 bp, Artificial Sequence
  ENSG00000182580_5 (sequence is synthesized)
tgagttggcgtggacatctcatccagaaagtgggtgggaagaggtgagtggctacgatgaggccatgaatcccatccgcacataccaggtgtgtaatgtgcgcgagtcaagccagaacaa

SEQ ID NO: 647421 - DNA, 120 bp, Artificial Sequence
  ENSG00000182580_6 (sequence is synthesized)
ctggcttcgcacggggttcatctggcggcgggatgtgcagcgggtctacgtggagctcaagttcactgtgcgtgactgcaacagcatccccaacatccccggctcctgcaaggagacctt

SEQ ID NO: 647422 - DNA, 120 bp, Artificial Sequence
  ENSG00000182580_7 (sequence is synthesized)
caacctcttctactacgaggctgacagcgatgtggcctcagcctcctcccccttctggatggagaacccctacgtgaaagtggacaccattgcacccgatgagagcttctcgcggctgga

SEQ ID NO: 647423 - DNA, 120 bp, Artificial Sequence
  ENSG00000182580_8 (sequence is synthesized)
tgccggccgtgtcaacaccaaggtgcgcagctttgggccactttccaaggctggcttctacctggccttccaggaccagggcgcctgcatgtcgctcatctccgtgcgcgccttctacaa

SEQ ID NO: 647424 - DNA, 120 bp, Artificial Sequence
  ENSG00000182580_9 (sequence is synthesized)
gaagtgtgcatccaccaccgcaggcttcgcactcttccccgagaccctcactggggcggagcccacctcgctggtcattgctcctggcacctgcatccctaacgccgtggaggtgtcggt

SEQ ID NO: 647425 - DNA, 120 bp, Artificial Sequence
  ENSG00000182580_10 (sequence is synthesized)
gccactcaagctctactgcaacggcgatggggagtggatggtgcctgtgggtgcctgcacctgtgccaccggccatgagccagctgccaaggagtcccagtgccgcccctgtccccctgg

SEQ ID NO: 647426 - DNA, 120 bp, Artificial Sequence
  ENSG00000182580_11 (sequence is synthesized)
gagctacaaggcgaagcagggagaggggccctgcctcccatgtccccccaacagccgtaccacctccccagccgccagcatctgcacctgccacaataacttctaccgtgcagactcgga

SEQ ID NO: 647427 - DNA, 120 bp, Artificial Sequence
  ENSG00000182580_12 (sequence is synthesized)
ctctgcggacagtgcctgtaccaccgtgccatctccaccccgaggtgtgatctccaatgtgaatgaaacctcactgatcctcgagtggagtgagccccgggacctgggtggccgggatga

SEQ ID NO: 647428 - DNA, 120 bp, Artificial Sequence
  ENSG00000182580_13 (sequence is synthesized)
cctcctgtacaatgtcatctgcaagaagtgccatggggctggaggggcctcagcctgctcacgctgtgatgacaacgtggagtttgtgcctcggcagctgggcctgacggagcgccgggt

SEQ ID NO: 647429 - DNA, 120 bp, Artificial Sequence
  ENSG00000182580_14 (sequence is synthesized)
ccacatcagccatctgctggcccacacgcgctacacctttgaggtgcaggcggtcaacggtgtctcgggcaagagccctctgccgcctcgttatgcggccgtgaatatcaccacaaacca

SEQ ID NO: 647430 - DNA, 120 bp, Artificial Sequence
  ENSG00000182580_15 (sequence is synthesized)
ggctgccccgtctgaagtgcccacactacgcctgcacagcagctcaggcagcagcctcaccctatcctgggcacccccagagcggcccaacggagtcatcctggactacgagatgaagta

SEQ ID NO: 647431 - DNA, 120 bp, Artificial Sequence
  ENSG00000182580_16 (sequence is synthesized)
ctttgagaagagcgagggcatcgcctccacagtgaccagccagatgaactccgtgcagctggacgggcttcggcctgacgcccgctatgtggtccaggtccgtgcccgcacagtagctgg

SEQ ID NO: 647432 - DNA, 120 bp, Artificial Sequence
  ENSG00000182580_17 (sequence is synthesized)
accacaagtgagagaggctctggggcccagcagctccaggagcagcttcccctcatcgtgggctccgctacagctgggcttgtcttcgtggtggctgtcgtggtcatcgctatcgtctgc

SEQ ID NO: 647433 - DNA, 120 bp, Artificial Sequence
  ENSG00000182580_18 (sequence is synthesized)
ctcaggaagcagcgacacggctctgattcggagtacacggagaagctgcagcagtacattgctcctggaatgaaggtttatattgacccttttacctacgaggaccctaatgaggctgtt

SEQ ID NO: 647434 - DNA, 120 bp, Artificial Sequence
  ENSG00000182580_19 (sequence is synthesized)
cgggagtttgccaaggagatcgacgtgtcctgcgtcaagatcgaggaggtgatcggagctggggaatttggggaagtgtgccgtggtcgactgaaacagcctggccgccgagaggtgttt

SEQ ID NO: 647435 - DNA, 120 bp, Artificial Sequence
  ENSG00000182580_20 (sequence is synthesized)
gtggccatcaagacgctgaaggtgggctacaccgagaggcagcggcgggacttcctaagcgaggcctccatcatgggtcagtttgatcaccccaatataatccggctcgagggcgtggtc

SEQ ID NO: 647436 - DNA, 120 bp, Artificial Sequence
  ENSG00000182580_21 (sequence is synthesized)
accaaaagtcggccagttatgatcctcactgagttcatggaaaactgcgccctggactccttcctccggctcaacgatgggcagttcacggtcatccagctggtgggcatgttgcggggc

SEQ ID NO: 647437 - DNA, 120 bp, Artificial Sequence
  ENSG00000182580_22 (sequence is synthesized)
attgctgccggcatgaagtacctgtccgagatgaactatgtgcaccgcgacctggctgctcgcaacatccttgtcaacagcaacctggtctgcaaagtctcagactttggcctctcccgc

SEQ ID NO: 647438 - DNA, 120 bp, Artificial Sequence
  ENSG00000182580_23 (sequence is synthesized)
ttcctggaggatgacccctccgatcctacctacaccagttccctgggcgggaagatccccatccgctggactgccccagaggccatagcctatcggaagttcacttctgctagtgatgtc

SEQ ID NO: 647439 - DNA, 120 bp, Artificial Sequence
  ENSG00000182580_24 (sequence is synthesized)
tggagctacggaattgtcatgtgggaggtcatgagctatggagagcgaccctactgggacatgagcaaccaggatgtcatcaatgccgtggagcaggattaccggctgccaccacccatg

SEQ ID NO: 647440 - DNA, 120 bp, Artificial Sequence
  ENSG00000182580_25 (sequence is synthesized)
gactgtcccacagcactgcaccagctcatgctggactgctgggtgcgggaccggaacctcaggcccaaattctcccagattgtcaataccctggacaagctcatccgcaatgctgccagc

SEQ ID NO: 647441 - DNA, 120 bp, Artificial Sequence
  ENSG00000182580_26 (sequence is synthesized)
ctcaaggtcattgccagcgctcagtctggcatgtcacagcccctcctggaccgcacggtcccagattacacaaccttcacgacagttggtgattggctggatgccatcaagatggggcgg

SEQ ID NO: 647442 - DNA, 120 bp, Artificial Sequence
  ENSG00000182580_27 (sequence is synthesized)
tacaaggagagcttcgtcagtgcggggtttgcatcttttgacctggtggcccagatgacggcagaagacctgctccgtattggggtcaccctggccggccaccagaagaagatcctgagc

SEQ ID NO: 647443 - DNA, 120 bp, Artificial Sequence
  ENSG00000182580_28 (sequence is synthesized)
agtatccaggacatgcggctgcagatgaaccagacgctgcctgtgcaggtctgacaccggctcccacggggaccctgaggaccgtgcagggatgccaagcagccggctggactttcggac

SEQ ID NO: 647444 - DNA, 120 bp, Artificial Sequence
  ENSG00000182580_29 (sequence is synthesized)
tcttggacttttggatgcctggccttaggctgtggcccagaagctggaagtttgggaaaggcccaagctgggacttctccaggcctgtgttccctccccaggaagtgcgccccaaacctc

SEQ ID NO: 647445 - DNA, 120 bp, Artificial Sequence
  ENSG00000182580_30 (sequence is synthesized)
ttcatattgaagatggattaggagagggggtgatgacccctccccaagcccctcagggcccagaccttcctgctctccagcaggggatccccacaacctcacacttgtctgttcttcagt

SEQ ID NO: 647446 - DNA, 120 bp, Artificial Sequence
  ENSG00000182580_31 (sequence is synthesized)
gctggaggtcctggcagggtcaggctggggtaagccggggttccacagggcccagccctggcaggggtctggccccccaggtaggcggagagcagtccctccctcaggaactggaggagg

SEQ ID NO: 647447 - DNA, 120 bp, Artificial Sequence
  ENSG00000182580_32 (sequence is synthesized)
ggactccaggaatggggaaatgtgacaccaccatcctgaagccagcttgcacctccagtttgcacagggatttgttctgggggctgagggccctgtccccacccccgcccttggtgctgt

SEQ ID NO: 647448 - DNA, 120 bp, Artificial Sequence
  ENSG00000182580_33 (sequence is synthesized)
ccgcccttggtgctgtcataaaagggcaggcaggggcaggctgaggagttgccctttgccccccagagactgactctcagagccagagatgggatgtgtgagtgtgtgtgtgtgtgtgtg

SEQ ID NO: 647449 - DNA, 120 bp, Artificial Sequence
  ENSG00000182580_34 (sequence is synthesized)
cgcgtgtgtgtgtgcacgcactggcctgcacagagagcatgggtgagcgtgtaaaagcttggccctgtgccctacaatggggccagctgggccgacagcagaataaaggcaataagatga

SEQ ID NO: 647450 - DNA, 120 bp, Artificial Sequence
  ENSG00000182580_35 (sequence is synthesized)
ggatgacccctccgatcctacctacaccagttccctggtacaggaagccgctgggagggagactgggggcggggcctatcagccaggggctcgggcctggggggcagcccggagtcacag

SEQ ID NO: 647451 - DNA, 120 bp, Artificial Sequence
  ENSG00000182580_36 (sequence is synthesized)
ttagcatcctagagccctcatgccacagagatgagccgccaccacttccctcagacccagggccttagccctcctggggccagccgttgctggagaagccctctcccatccctgcctgtg

SEQ ID NO: 647452 - DNA, 120 bp, Artificial Sequence
  ENSG00000182583_0 (sequence is synthesized)
atgtggacactgggagaaggaagtgagatggaaaagttctttgattgcatccaagaagtgaatggtcctcaagggcgaccattggctgggtagtggagtgttgaccaatcacagctcagg

SEQ ID NO: 647453 - DNA, 120 bp, Artificial Sequence
  ENSG00000182583_1 (sequence is synthesized)
ggcgtgattgtctcgtcctgggatcgcgagaggggtatatacagggaggccaggcagcctggagttagccgaccgttgcgagacgttgagctgcggaagatgagtccaaagccgagagcc

SEQ ID NO: 647454 - DNA, 120 bp, Artificial Sequence
  ENSG00000182583_2 (sequence is synthesized)
tcgggacctccggccaaggccacggaggcaggaaagaggaagtcctcctctcagccgagccccagtgacccgaagaagaagactaccaaggtggccaagaagggaaaagcagttcgtaga

SEQ ID NO: 647455 - DNA, 120 bp, Artificial Sequence
  ENSG00000182583_3 (sequence is synthesized)
gggagacgcgggaagaaaggggctgcgacaaagatggcggccgtgacggcacctgaggcggagagcgcgccagcggcacccggccccagcgaccagcccagccaggagctccctcagcac

SEQ ID NO: 647456 - DNA, 120 bp, Artificial Sequence
  ENSG00000182583_4 (sequence is synthesized)
gcccagccaggagctccctcagcacgagctgccgccggaggagccagtgagcgaggggacccagcacgaccccctgagtcaggaggccgagctggaggaaccactgagtcaggagagcga

SEQ ID NO: 647457 - DNA, 88 bp, Artificial Sequence
  ENSG00000182583_5 (sequence is synthesized)
cgagtcaggagagcgagatggaagaactaccgagtgtgtagacggccaagtactcccctatctccgagagcagcgactaagttcaggc

SEQ ID NO: 647458 - DNA, 120 bp, Artificial Sequence
  ENSG00000182583_6 (sequence is synthesized)
agtactcccctatctccgagagcagcgactaagttcaggcccagccgccagacctcagagatctcaccagcggggtgcttgccattctgaagataataaaatgaatgtgttgcaaattga

SEQ ID NO: 647459 - DNA, 120 bp, Artificial Sequence
  ENSG00000182583_7 (sequence is synthesized)
atgtggacactgggagaaggaagtgagatggaaaagttctttgattgcatccaagaagtgaatggtcctcaaggtgcagcagaggaatttgtaggagagagggatgattgacgtcttcat

SEQ ID NO: 647460 - DNA, 120 bp, Artificial Sequence
  ENSG00000182584_0 (sequence is synthesized)
gaagaacttaggctccggaggcagagccaaaggctgaaggggactactccctaggacagaggccgggaggtatcgggccgacgaagccgagtggcgcggaggagcggagccttcagcccc

SEQ ID NO: 647461 - DNA, 120 bp, Artificial Sequence
  ENSG00000182584_1 (sequence is synthesized)
gcggctgggccgagcccgaaggtggcgtcggtgtcggggagccgccgcgtgcaccggccgtcctccctgggccgcatcgcggtggtggtggaccagggctcgggcttcaccaaggcgggc

SEQ ID NO: 647462 - DNA, 120 bp, Artificial Sequence
  ENSG00000182584_2 (sequence is synthesized)
ttcgcgggcgagaaccagccgcgcatagtgctgaagagctctagcttggtgcccagctgggaccggccggtgctgcccggagcgccgggctgcgagctggcgggcggcgtggcgcgggcg

SEQ ID NO: 647463 - DNA, 120 bp, Artificial Sequence
  ENSG00000182584_3 (sequence is synthesized)
caccccatcaagcacggcgtggtggcggactgggaggcgctggaagggctgtgggagcgcctgctggtgggcggcctgcgggtgtgcccagagcagtggcccgtgctggtgagcgactcg

SEQ ID NO: 647464 - DNA, 120 bp, Artificial Sequence
  ENSG00000182584_4 (sequence is synthesized)
ccgttggcgccgcccgcgggccgcgaaagggtggcggagctgctgttcgagaccctggcagtgcccgcgtgccacatggctagcaccgcgttgctggcgctctgctccaccggcgcgttc

SEQ ID NO: 647465 - DNA, 120 bp, Artificial Sequence
  ENSG00000182584_5 (sequence is synthesized)
agcgggctggccgtggaggcgggcgcgggcgtgtgccacgccacgcccatctacgcgggtcactcgtggcaccaggccaccttccgactgaacgtggcaggcagcaccctgtcgcgctac

SEQ ID NO: 647466 - DNA, 120 bp, Artificial Sequence
  ENSG00000182584_6 (sequence is synthesized)
gaaccctgacctcttgcagcaggccctgccccgcaaggccatcacacatctcaagaagcgcagctgctacgtgtccctggacttcgagggcgacctccgcgaccccgcccgccaccatcc

SEQ ID NO: 647467 - DNA, 120 bp, Artificial Sequence
  ENSG00000182584_7 (sequence is synthesized)
ggccagtttcagcgtgggtaacgggtgctgcgtctgcctcagcagtgagcgcttccgctgccccgaacccatcttccagccgggcctgctgggccaggctgagcaggggctgcccgcgct

SEQ ID NO: 647468 - DNA, 120 bp, Artificial Sequence
  ENSG00000182584_8 (sequence is synthesized)
ggccttccgggcgctgcagaagatgcccaaaacgctgcggacacgcctggcagacaccgtggtgctagccggcggctccacactgtttcctggcttcgccgagcgcctggacaaggagct

SEQ ID NO: 647469 - DNA, 120 bp, Artificial Sequence
  ENSG00000182584_9 (sequence is synthesized)
ggaggcgcagtgccggcggcacggctacgcggccctgcggccccacctggtggccaagcatgggcgtggcatggctgtgtggaccggcggctccatggtggcctccctgcactccttcca

SEQ ID NO: 647470 - DNA, 120 bp, Artificial Sequence
  ENSG00000182584_10 (sequence is synthesized)
gcgccgctggataactcgggccatgtaccaggagtgtggctccaggctgctgtacgatgtgttcaactgagtcaggctggactggggggggtggcactgcgttgggggacagctctctat

SEQ ID NO: 647471 - DNA, 120 bp, Artificial Sequence
  ENSG00000182584_11 (sequence is synthesized)
ctaaagagtcaagtgtttggagctggcagggtcctcctggaggttggagctgactggatgggtcacccccataccctttctgggccaggagaaggtatttgggacccatgggaccctcat

SEQ ID NO: 647472 - DNA, 120 bp, Artificial Sequence
  ENSG00000182584_12 (sequence is synthesized)
tttgaactgcagtttgaatctccccaaccactgccagttcagagaatgccagtccagctgcctacccacagggccctactttatggcaataaaggtgatgccccacttgtgtccatgcca

SEQ ID NO: 647473 - DNA, 120 bp, Artificial Sequence
  ENSG00000182585_0 (sequence is synthesized)
aataaaaaccttccacccgtcagtctagaaggataagagaaagaaagttaagcaactacaggaaatggctttgggagttccaatatcagtctatcttttattcaacgcaatgacagcact

SEQ ID NO: 647474 - DNA, 120 bp, Artificial Sequence
  ENSG00000182585_1 (sequence is synthesized)
gaccgaagaggcagccgtgactgtaacacctccaatcacagcccagcaaggtaactggacagttaacaaaacagaagctgacaacatagaaggacccatagccttgaagttctcacacct

SEQ ID NO: 647475 - DNA, 120 bp, Artificial Sequence
  ENSG00000182585_2 (sequence is synthesized)
ttgcctggaagatcataacagttactgcatcaacggtgcttgtgcattccaccatgagctagagaaagccatctgcaggtgttttactggttatactggagaaaggtgtgagcacttgac

SEQ ID NO: 647476 - DNA, 120 bp, Artificial Sequence
  ENSG00000182585_3 (sequence is synthesized)
tttaacttcatatgctgtggattcttatgaaaaatacattgcaattgggattggtgttggattactattaagtggttttcttgttattttttactgctatataagaaagaggtgtctaaa

SEQ ID NO: 647477 - DNA, 120 bp, Artificial Sequence
  ENSG00000182585_4 (sequence is synthesized)
attgaaatcgccttacaatgtctgttctggagaaagacgaccactgtgaggcctttgtgaagaattttcatcaaggcatctgtagagatcagtgagcccaaaattaaagttttcagatga

SEQ ID NO: 647478 - DNA, 120 bp, Artificial Sequence
  ENSG00000182585_5 (sequence is synthesized)
aacaacaaaacttgtcaagctgactagactcgaaaataatgaaagttgggatcacaatgaaatgagaagataaaattcagcgttggcctttagactttgccatccttaaggagtgatgga

SEQ ID NO: 647479 - DNA, 120 bp, Artificial Sequence
  ENSG00000182585_6 (sequence is synthesized)
agccaagtgaacaagcctcagtgacacaagtcaaattcatagtttcactctgggttttttgttgttgtgtggttattattctcactacagaaagactgagtttcatgctcctggctatgt

SEQ ID NO: 647480 - DNA, 120 bp, Artificial Sequence
  ENSG00000182585_7 (sequence is synthesized)
cagatgtgaattttcatgggaataataatcaaccttgcagcaagccaaagcaatgcctcgcttgggttcttcatgttcttactacccagcgttttttaccacctagatgggcctctctaa

SEQ ID NO: 647481 - DNA, 120 bp, Artificial Sequence
  ENSG00000182585_8 (sequence is synthesized)
gtctatttgctcaatgaaccttatcccaaacttgttgttttcatggtgtctgaaagaatgtgatgtcagcttttagaatgaaatcagtgttaaggtacctccagtgaaccaaacatgtgt

SEQ ID NO: 647482 - DNA, 120 bp, Artificial Sequence
  ENSG00000182585_9 (sequence is synthesized)
cttaaatctaagccactgaaaacagaagggaatgtccaaggcaaatacaaatcatacacagcttgtaacaacatacagcctttctatgtgaaataatggaataaactaaagagtttctga

SEQ ID NO: 647483 - DNA, 120 bp, Artificial Sequence
  ENSG00000182585_10 (sequence is synthesized)
agactgaagctatctggatatcaagtctggagtaggcaaagcatttccatttctacatggattataaaactttgtgttggactcattggtccctaatgcttttgttcatcacttcttcca

SEQ ID NO: 647484 - DNA, 120 bp, Artificial Sequence
  ENSG00000182585_11 (sequence is synthesized)
aatcctggaagtctcctactgaataaaagtctacaattggccctaaaatagaaactgaaaaacaggacatagaattttttcaccagaccacagcatgtggaaactttctttatcattttt

SEQ ID NO: 647485 - DNA, 120 bp, Artificial Sequence
  ENSG00000182585_12 (sequence is synthesized)
tcatttttgaacacttgttaacagatttgcacatagagggagagaaaaaaaatggagtaacagtcaaaataataataatcagtatccaggccaggcgtggtggttcacgcctgtaatcct

SEQ ID NO: 647486 - DNA, 76 bp, Artificial Sequence
  ENSG00000182585_13 (sequence is synthesized)
taatcccagctactccagaggctgacacaggaggcaaccctgcactccaacctgggtgacaagagcgaaactccat

SEQ ID NO: 647487 - DNA, 120 bp, Artificial Sequence
  ENSG00000182585_14 (sequence is synthesized)
ctcaaaaaaaaaaaaaaaaatcagtatccttcctcttagttatatttctgccacttaattcaaacagtcatatgcaggtcgcttaatttatttgtgcttttgtttcatcttctacaaggc

SEQ ID NO: 647488 - DNA, 120 bp, Artificial Sequence
  ENSG00000182585_15 (sequence is synthesized)
cctcttagctctaaaacttgacagtggaataaggaaatgtttttccaaatctgcattgccggtgagatcctcaacatcagcatgttgagatggacctcaaccccacctctaaccctgaaa

SEQ ID NO: 647489 - DNA, 120 bp, Artificial Sequence
  ENSG00000182585_16 (sequence is synthesized)
ctaaccctgaaacacactactcgatattatcttaggtatgttttagggtttagtttgtaaaataataatttatttttgaaggaaatataaaatattaaagagtaataatagctatcattt

SEQ ID NO: 647490 - DNA, 120 bp, Artificial Sequence
  ENSG00000182585_17 (sequence is synthesized)
tctaaaacaatggactctttttttttccatttgtgatgtagataagcaagacaattttgatcatgagtggtgaaaagaggatcaaacttgactattcttgcaatggcagtccagcaacaa

SEQ ID NO: 647491 - DNA, 120 bp, Artificial Sequence
  ENSG00000182585_18 (sequence is synthesized)
gcctttcatttacattaaattataacttttcattcattcctaaaccaaacttaaaattctgctttcctttgagtagaaggtatttaacttgttttgtttttccttcagaaggaatttaat

SEQ ID NO: 647492 - DNA, 120 bp, Artificial Sequence
  ENSG00000182585_19 (sequence is synthesized)
gcaaacggattgcagtcagcactttctgaatgttttcacacagtatgcaaagcttacatcataccaaggagtggagagttgaagtttcctcccagtgactccagtgacagaccacaccta

SEQ ID NO: 647493 - DNA, 120 bp, Artificial Sequence
  ENSG00000182585_20 (sequence is synthesized)
gaaagcgtttctcttcctgagtatttcaaaaagatgtaaaagagctggggagagtatgggaagaaacaatacaggattgcctttaattaattaagaattgcctcctgataaaaggaaaaa

SEQ ID NO: 647494 - DNA, 120 bp, Artificial Sequence
  ENSG00000182585_21 (sequence is synthesized)
taagcaaagatgtggctttaactgaagtgtagccccagcctgattccacagggagatctagaatgtgaatagcagtgtagacctctcccaaggagatgaggcatctggatttcaatatcc

SEQ ID NO: 647495 - DNA, 120 bp, Artificial Sequence
  ENSG00000182585_22 (sequence is synthesized)
catattattcaatcatggattcatgtggggtgtctaaaattgaaatcgccttacaatgtctgttctggagaaagacgaccactgtgaggcctttgtgaagaattttcatcaaggcatctg

SEQ ID NO: 647496 - DNA, 120 bp, Artificial Sequence
  ENSG00000182585_23 (sequence is synthesized)
aggccctataatgtgtcaggcactgacatgtaaaatttttttaattaaaaaagagctgtaatctggcaaaaagtttctatgtaatatttttcatgccttttctcataaacccagacgagt

SEQ ID NO: 647497 - DNA, 120 bp, Artificial Sequence
  ENSG00000182585_24 (sequence is synthesized)
ggtaaaaatttgccttcagttgtaataggagagttcaaacgtacagtctcccttcaacctatctctgtctgcccatatcaaaattataaatgaggaggacagcaggccccaagaaagtag

SEQ ID NO: 647498 - DNA, 120 bp, Artificial Sequence
  ENSG00000182585_25 (sequence is synthesized)
ggactaagtatgtcttgttcaaaattgtatattcagtgacttacactatgcctagcacacaacacacactgagtaaatatttgttgagtgaaataaaatcaagaaacaagtaaaaactga

SEQ ID NO: 647499 - DNA, 120 bp, Artificial Sequence
  ENSG00000182591_0 (sequence is synthesized)
attcacaactcaggaggtaacttcagcaagctacctgcagccctctgtctgacatcatgtccttcaactgctccacaagaaattgctcttccaggcccattggaggacgctgcattgttc

SEQ ID NO: 647500 - DNA, 120 bp, Artificial Sequence
  ENSG00000182591_1 (sequence is synthesized)
cagtggcccaagttaccacgacttccaccactgatgctgactgcctgggcggcatctgtttgcccagttccttccagactggctcttggctcctggaccactgtcaagagacctgctgtg

SEQ ID NO: 647501 - DNA, 120 bp, Artificial Sequence
  ENSG00000182591_2 (sequence is synthesized)
agcccactgcttgccagccaacctgttaccggcgaacttcatgtgtctccaacccttgccaggtgacttgctctcgacaaactacctgtatttccaacccctgctcaactacctacagcc

SEQ ID NO: 647502 - DNA, 120 bp, Artificial Sequence
  ENSG00000182591_3 (sequence is synthesized)
gggaggagtctctactgtctgccagccagcctgtggggtctccaggacgtatcagcagtcctgcgtgtccagctgccgaagaacctgctaagtgtgtaggagccagtgagcgaatcaaga

SEQ ID NO: 647503 - DNA, 120 bp, Artificial Sequence
  ENSG00000182591_4 (sequence is synthesized)
ctccacgacctgccagctgtttccaggatcttccagcatgctgcttgtccctgaatagctcttcatagctgacccttcttgtgaccgcctgactgctggctactatccatgcacacgctg

SEQ ID NO: 647504 - DNA, 120 bp, Artificial Sequence
  ENSG00000182591_5 (sequence is synthesized)
tctttagcactctaaaatttttctggccagccctaagcttgttttaagggttgctcactggtgctgtgtatgcctctggatgtgtccagaagctttaccatccacaccccagtctctgat

SEQ ID NO: 647505 - DNA, 120 bp, Artificial Sequence
  ENSG00000182591_6 (sequence is synthesized)
gcttttgacatgttttcaccttgctgctgtatctcctggcctctgcttttgtgtctcacaaaaacagagcttgtctcaccatgtatttctcaataaacctgcattagttggcattgcaaa

SEQ ID NO: 647506 - DNA, 120 bp, Artificial Sequence
  ENSG00000182600_0 (sequence is synthesized)
gttaaccagcgcagtcctccgtgcgtcccgcccgccgctgccctcactcccggccaggatggcatcctgtctggccctgcgcatggcgctgctgctggtctccggggttctggcccctgc

SEQ ID NO: 647507 - DNA, 120 bp, Artificial Sequence
  ENSG00000182600_1 (sequence is synthesized)
cccgtggacaccggtcccccagcccccaccgtcgcgccaggacccgaggacagcaccgcgcaggagcggctggaccagggcggcgggtcgctggggcccggcgctatcgcggccatcgtg

SEQ ID NO: 647508 - DNA, 120 bp, Artificial Sequence
  ENSG00000182600_2 (sequence is synthesized)
cgtgatcgccgccctgctggccacctgcgtggtgctggcgctcgtggtcgtcgcgctgagaaagttttctgcctcctgaagcgaataaaggggccgcgcccggccgcggcgcgactcggc

SEQ ID NO: 647509 - DNA, 120 bp, Artificial Sequence
  ENSG00000182600_3 (sequence is synthesized)
gagccaggcccagcctggaaatggatgtcataagtgcacaggggtctagggaggcagagagcgaaagaggaaacaggagcgttttaggaaagactagagctgcctgagggtttggatcaa

SEQ ID NO: 647510 - DNA, 120 bp, Artificial Sequence
  ENSG00000182600_4 (sequence is synthesized)
caagagccgacctaccatccccatgttgagctttccagcgtttctggggcatcctgtctggttgccggggatggatggcccagggttggagtggtggtcaggggaggacaactggggtgg

SEQ ID NO: 647511 - DNA, 120 bp, Artificial Sequence
  ENSG00000182600_5 (sequence is synthesized)
cgaattccccgcaggggcgccggggcgtgcgtgagcgcacagcatgtccgagcccgcctgcgtgtggcgtgcacctgagcgcgcgcagggccgcgcggctcggcgtccccgtgcaccacg

SEQ ID NO: 647512 - DNA, 120 bp, Artificial Sequence
  ENSG00000182600_6 (sequence is synthesized)
ggctcggcgtccccgtgcaccacggctggagtgcctcaggagcgcgccgcatgtgcgtgcccggtgcgcgtgcgccggggccgccagggcatcggagcgggtgtgcggccagcggtctta

SEQ ID NO: 647513 - DNA, 120 bp, Artificial Sequence
  ENSG00000182600_7 (sequence is synthesized)
ccgcctcctctgcctgggcgcgggccgaggccctcgccgcgctccccggggcctgcctcccatcccgctccgctggggttcagagcgttccgtgaggagcagaggggcgtccccagctcc

SEQ ID NO: 647514 - DNA, 120 bp, Artificial Sequence
  ENSG00000182600_8 (sequence is synthesized)
ctccgtcaaacagccctttctgtttctggagtcctacaagtggaggcccaaatccgttcccatgttgaggcaaggccctggctgttccttcctctctggaaaccgccttgaactcttcct

SEQ ID NO: 647515 - DNA, 120 bp, Artificial Sequence
  ENSG00000182600_9 (sequence is synthesized)
ttgggacatgcctcctcgaccagccttgaaggggtgctcctctctcactacctggaaccaaacacccccttcctttgtgtacaagggcaataaagagtagaccttcatcttctttatttt

SEQ ID NO: 647516 - DNA, 120 bp, Artificial Sequence
  ENSG00000182600_10 (sequence is synthesized)
aatggtctaactggtgcaatcatgaagagagttaatggttaacagacattggccaataacaaaacaccccatggactgtgactcgagtatccaacaggcagtcagagctctcccggtctg

SEQ ID NO: 647517 - DNA, 120 bp, Artificial Sequence
  ENSG00000182600_11 (sequence is synthesized)
gggactgagaatgtctcctttctgctctctggtccctgggtaccccaaatcctgccaactcccaaccctataagcagagaagggctttgtggggggcacctcccttacactgaacagaca

SEQ ID NO: 647518 - DNA, 120 bp, Artificial Sequence
  ENSG00000182600_12 (sequence is synthesized)
ctcctcctgcccacccaccggccctgcccaatgggaggcagcaacgcactggcttcagcttcttagcctgggaaatacgatgttccacaggagcccgtgcccacgctgtggaacgagccg

SEQ ID NO: 647519 - DNA, 120 bp, Artificial Sequence
  ENSG00000182600_13 (sequence is synthesized)
gggaaatgtgagggctagtgcagcgctgagcccagacccctcacacagcgctaccggcaacttgcttaacctagaggtggggggtgacgtccctgtcggccccgtcacctggggccccag

SEQ ID NO: 647520 - DNA, 120 bp, Artificial Sequence
  ENSG00000182600_14 (sequence is synthesized)
ccgtcggctctcccagccagaggccgcgtggttttgggggacgtcttgactctgagtcctgcagccagggccccatccgcgggctcagaccagcagccccaagcccccctctgcccaggg

SEQ ID NO: 647521 - DNA, 120 bp, Artificial Sequence
  ENSG00000182600_15 (sequence is synthesized)
agcctcaggagcaggatgagtcgagagtcgacgccggacacggcccgcccctgcttcctactctcacccccaggcctggctgggggccggcagcccccacgcccacggttggtttgttca

SEQ ID NO: 647522 - DNA, 120 bp, Artificial Sequence
  ENSG00000182600_16 (sequence is synthesized)
gctctactcacctcacttcaccctcagagagtcggggcggagtgagggtgaggagcctggtccagggtccccacctcggaagcatttagagatgtaaactttgatcctttgatcatttaa

SEQ ID NO: 647523 - DNA, 120 bp, Artificial Sequence
  ENSG00000182600_17 (sequence is synthesized)
cctgctcagcacagcaggaagtgggaacttggtccctaccccagtccccagggcctttggagggaagggttggacagtttggaggccagcagaccccttggggacagcttaatgtatctg

SEQ ID NO: 647524 - DNA, 120 bp, Artificial Sequence
  ENSG00000182600_18 (sequence is synthesized)
aagattcctgagtgggaatgttgctggagggcaagctgcttctcttttttaaaaattcattttctctagcagctgttttggcccctttggtgtccctgagctccccatggcactgtttcc

SEQ ID NO: 647525 - DNA, 120 bp, Artificial Sequence
  ENSG00000182600_19 (sequence is synthesized)
tgccgtgactttctcctcctggacactggagcccaggtggtgcccgcgcacctctcacacactgggggatagggtcaaggcctcatccaagtctgttaacagcttcccactcaaccagtc

SEQ ID NO: 647526 - DNA, 120 bp, Artificial Sequence
  ENSG00000182600_20 (sequence is synthesized)
tccccaaaatacactgtgagttcaatgattctgcttataaaggagtgctatgaaactgacctattttcctaattggttaactgacttcatctcacataaccttgagtaaccaaagccttc

SEQ ID NO: 647527 - DNA, 120 bp, Artificial Sequence
  ENSG00000182600_21 (sequence is synthesized)
atcagagcggacgatccaacccaacatgctgtttcccatcctcaaaaggcacggggaccaatggccacccaactccttcccaaccctcccctccagggacgagagatggccccctctttc

SEQ ID NO: 647528 - DNA, 120 bp, Artificial Sequence
  ENSG00000182600_22 (sequence is synthesized)
cctttccccactctgcaagcactcccccaccaacgggtgcatcacagcccctcactgggaccagggggcctccctctccggtggaaccagtgtcacatgcctgtgcatctctgtgattct

SEQ ID NO: 647529 - DNA, 120 bp, Artificial Sequence
  ENSG00000182600_23 (sequence is synthesized)
cagagggtctgaggtccgagcaccctgctgtggcctgtgggaagacgctacaaagtcccactggatctaaaccagaggcctgttctggcgagcagggaaactgtgtcctggcagagatcg

SEQ ID NO: 647530 - DNA, 120 bp, Artificial Sequence
  ENSG00000182600_24 (sequence is synthesized)
tggtcctgggcacacaggacccctcagcacactgaggtggagctggggcgaggggagggggtgcgctctgggtaactgaaggtgtgaagggcccagggcctgtttctgggcagtgcagga

SEQ ID NO: 647531 - DNA, 120 bp, Artificial Sequence
  ENSG00000182600_25 (sequence is synthesized)
agtcccagccccatgcctgtggtgagatcccctgtagggccccccccaccatggacacttcggggcctctacggtcttccaaagctgtgtcctcatttccactgcagcagaggggcgtcc

SEQ ID NO: 647532 - DNA, 120 bp, Artificial Sequence
  ENSG00000182601_0 (sequence is synthesized)
ctcccctccgcgcctctcctctctcccggcagaaagttagcagcggggaaggaactccgggctgcaacagcgcgcggcggcggcggcagaggctgaagcagaagccgcggcggagccggg

SEQ ID NO: 647533 - DNA, 80 bp, Artificial Sequence
  ENSG00000182601_1 (sequence is synthesized)
gaagcgggggcgctgcagacggagcaggtgccgccggcgggtccgcgcgcccccctcggtccccttgcctgaggctgagg

SEQ ID NO: 647534 - DNA, 120 bp, Artificial Sequence
  ENSG00000182601_2 (sequence is synthesized)
cctccgcctccgcctccgcctccacctctggccgcgccgccgccgcccggcgcctctgctaaggggccgccggcgcgcaagctgctttttatgtgcaccttgtccctgtctgtcacctac

SEQ ID NO: 647535 - DNA, 120 bp, Artificial Sequence
  ENSG00000182601_3 (sequence is synthesized)
ctgtgctacagcctcctgggcggctcgggctccctgcaattccctctggcgctgcaggagtcgccgggcgccgccgccgagcccccgccgagcccgccgccaccctctctgctgcctacc

SEQ ID NO: 647536 - DNA, 80 bp, Artificial Sequence
  ENSG00000182601_4 (sequence is synthesized)
cgccgctggacaacgcgagccacggggagccgcccgagcccccagagcagccagccgcccccgggaccgacggctggggg

SEQ ID NO: 647537 - DNA, 120 bp, Artificial Sequence
  ENSG00000182601_5 (sequence is synthesized)
ctgccgagcggcggcggaggcgcccaggacgcctggctccggaccccgctggcccccagcgagatgatcacggctcagagcgcgctgccggagagggaagcgcaggagtccagcaccacc

SEQ ID NO: 647538 - DNA, 120 bp, Artificial Sequence
  ENSG00000182601_6 (sequence is synthesized)
gacgaggatctcgcaggccggagagcggccaacgggagcagcgagaggggcggcgccgtcagcacccccgactatggggagaagaagctgccacaggcgctcatcatcggggtcaagaaa

SEQ ID NO: 647539 - DNA, 120 bp, Artificial Sequence
  ENSG00000182601_7 (sequence is synthesized)
ggagggacccgcgcgctgctggaggcgatccgcgtgcacccggacgtgcgggcggtgggcgtagagccgcacttcttcgacaggaactacgaaaaggggttggagtggtacagaaatgtg

SEQ ID NO: 647540 - DNA, 120 bp, Artificial Sequence
  ENSG00000182601_8 (sequence is synthesized)
atgcccaagactttggatgggcaaataaccatggagaagactccaagttactttgtgacaaatgaggctcccaagcgcattcactccatggccaaggacatcaaactgattgtggtggtg

SEQ ID NO: 647541 - DNA, 120 bp, Artificial Sequence
  ENSG00000182601_9 (sequence is synthesized)
agaaaccccgtgaccagggccatctctgactacacgcagacactgtcaaagaaacccgagatccccacctttgaggtgctggccttcaaaaaccggaccctcgggctgatcgatgcttcc

SEQ ID NO: 647542 - DNA, 120 bp, Artificial Sequence
  ENSG00000182601_10 (sequence is synthesized)
tggagtgccattcgaatagggatctatgcgctgcatctggaaaactggctccagtatttccccctctcccagatcctctttgtcagtggtgagcgactcattgtggaccccgccggggaa

SEQ ID NO: 647543 - DNA, 120 bp, Artificial Sequence
  ENSG00000182601_11 (sequence is synthesized)
ctcaaacgtgttgtgactgagaagcatttctatttcaacaaaaccaaggggttcccttgcctaaagaagccagaagacagcagtgccccgaggtgcttaggcaagagcaaaggtcggact

SEQ ID NO: 647544 - DNA, 120 bp, Artificial Sequence
  ENSG00000182601_12 (sequence is synthesized)
catcctcgcattgacccagatgtcatccacagactgaggaaattctacaaacccttcaacttgatgttttaccaaatgactggtcaagattttcagtgggaacaggaagagggtgataaa

SEQ ID NO: 647545 - DNA, 120 bp, Artificial Sequence
  ENSG00000182601_13 (sequence is synthesized)
tgaggctagagaggcagaggaaggctagtcaataagctaaggaggctccttgcctgagtccttgaataccccagcttctgcagcttcacttgctggagtgccaagtagatctcctcctcc

SEQ ID NO: 647546 - DNA, 120 bp, Artificial Sequence
  ENSG00000182601_14 (sequence is synthesized)
ttcatgcagccaggattgcctccagtgctgttagcttaggcaaacaggtggatcccatggcatccccatggaggaaccaggcccatctgggcagcagcatctggttgaccagatggccac

SEQ ID NO: 647547 - DNA, 120 bp, Artificial Sequence
  ENSG00000182601_15 (sequence is synthesized)
cagaacccactgttcattcttatcttctgctagttaatatagcctgaagacagaggataaatagttgtcaatgtcagagacagtgctattaatgtatatgtgagcgacaaaaaaggtctg

SEQ ID NO: 647548 - DNA, 120 bp, Artificial Sequence
  ENSG00000182601_16 (sequence is synthesized)
ctttataggggttctcactctagcttggggagccagggttctagccctgtatctgtcatgggcacctgctgtctaaacctctgcttgggcttctccccagaatgcactttgtggctgagt

SEQ ID NO: 647549 - DNA, 120 bp, Artificial Sequence
  ENSG00000182601_17 (sequence is synthesized)
gctccaggactcctagggagcaaggtcctccctctaaggtgtttctagtcttctctttaaaggtctcatcccacaacccctgacttcctccctccccacatcatgaaggcagaggcatgc

SEQ ID NO: 647550 - DNA, 120 bp, Artificial Sequence
  ENSG00000182601_18 (sequence is synthesized)
acattcctcactgaaaaagaaaacacacacccacccacacacacacacacagaagaaaatgaaagctgacacacctcgaagccttctttccaagagccctctaaatggggttgggtctca

SEQ ID NO: 647551 - DNA, 120 bp, Artificial Sequence
  ENSG00000182601_19 (sequence is synthesized)
ctcttcatgagtatcctgggttgtgcagaagcttagcatatgcccttgtgttcggatcaggcccacagggctgctcaaagagtagagtaattgtaaccgaggtcagagctctggggttgg

SEQ ID NO: 647552 - DNA, 120 bp, Artificial Sequence
  ENSG00000182601_20 (sequence is synthesized)
cagagatgagtggccatatctgggggtaaaagaagaaatcctgtcctcttggtgggaggttaccttacctgaagaccatctctcccaagcactgtagttctgagcatgtttttggggtgg

SEQ ID NO: 647553 - DNA, 120 bp, Artificial Sequence
  ENSG00000182601_21 (sequence is synthesized)
actctgtcccctagggtccctagaagggcaaagaccagagagttgacaagtctgttattaggaataatccttagccatgtaatggagaaaggagcagtcagcattcttccaatttgcccc

SEQ ID NO: 647554 - DNA, 120 bp, Artificial Sequence
  ENSG00000182601_22 (sequence is synthesized)
accaccacctcctcgggcttcattttctctatttagagatggcagagagtgaggtagtggcgagaaagctgactccattcatcagatccagtttatgagggttgggggtgagcaagggct

SEQ ID NO: 647555 - DNA, 120 bp, Artificial Sequence
  ENSG00000182601_23 (sequence is synthesized)
gtctgcagaaacccccatcaagagctgctgaatgaagtgtcccttcccatcagtttgattcaattaaaatgcatcatttgacataaagcacttgttcacagatctccaaaaccaggaatt

SEQ ID NO: 647556 - DNA, 120 bp, Artificial Sequence
  ENSG00000182601_24 (sequence is synthesized)
gttctagtaaaactggaaatttgtatgagtggggggagttaaatctgttcagctgttattaaactgtcatttctcccgctaaatgaaaaccgtgttgttataaagcttaatgcaacctga

SEQ ID NO: 647557 - DNA, 120 bp, Artificial Sequence
  ENSG00000182601_25 (sequence is synthesized)
gctggatctgcattaaatgtcgaaaggaaggcggagaggggtgagacaagaggtgggaggtgaggcaggtgggagcctgaccctggagaaccccgcaggtggtgcttctgactttcagtt

SEQ ID NO: 647558 - DNA, 120 bp, Artificial Sequence
  ENSG00000182606_0 (sequence is synthesized)
agaaaactgctgaggaaggcacgggagggtggctgtgcgaggtactgccggggctgagctctcatggaggctctctctgttctctgaagtgcctttggagtttatgtctgcacatggcat

SEQ ID NO: 647559 - DNA, 120 bp, Artificial Sequence
  ENSG00000182606_1 (sequence is synthesized)
tggtttttcaattcgggcagcccgtcagggctcagcctctgccaggactctgccacggcaagctcattcggacaaacgcctgtgatgtgtgcaacagcaccgatcttccggaagtcgaga

SEQ ID NO: 647560 - DNA, 120 bp, Artificial Sequence
  ENSG00000182606_2 (sequence is synthesized)
tcattagcctgctggaggagcagctgccccattataagttaagagccgacaccatctacggttatgaccacgacgactggctccatacacctctcatttctccagatgccaacattgacc

SEQ ID NO: 647561 - DNA, 120 bp, Artificial Sequence
  ENSG00000182606_3 (sequence is synthesized)
tcacaaccgagcaaattgaagagacgttaaaatacttccttttatgtgctgaaagagttggccagatgactaagacatataatgacatagatgctgtcactcggcttcttgaggagaaag

SEQ ID NO: 647562 - DNA, 120 bp, Artificial Sequence
  ENSG00000182606_4 (sequence is synthesized)
agcgggatttagaattggccgctcgcatcggccagtcgttgttgaagaagaacaagaccctaaccgagaggaacgagctgctggaggagcaggtggaacacatcagggaggaggtgtctc

SEQ ID NO: 647563 - DNA, 120 bp, Artificial Sequence
  ENSG00000182606_5 (sequence is synthesized)
agctccggcatgagctgtccatgaaggatgagctgcttcagttctacaccagcgctgcggaggagagtgagcccgagtccgtttgctcaaccccgttgaagaggaatgagtcgtcctcct

SEQ ID NO: 647564 - DNA, 120 bp, Artificial Sequence
  ENSG00000182606_6 (sequence is synthesized)
cagtccagaattactttcatttggattctcttcaaaagaagctgaaagaccttgaagaggagaatgttgtacttcgatccgaggccagccagctgaagacagagaccatcacctatgagg

SEQ ID NO: 647565 - DNA, 120 bp, Artificial Sequence
  ENSG00000182606_7 (sequence is synthesized)
agaaggagcagcagctggtcaatgactgcgtgaaggagctgagggatgccaatgtccagattgctagtatctcagaggaactggccaagaagacggaagatgctgcccgccagcaagagg

SEQ ID NO: 647566 - DNA, 120 bp, Artificial Sequence
  ENSG00000182606_8 (sequence is synthesized)
agatcacacacctgctatcgcaaatagttgatttgcagaaaaaggcaaaagcttgcgcagtggaaaatgaagaacttgtccagcatctgggggctgctaaggatgcccagcggcagctca

SEQ ID NO: 647567 - DNA, 120 bp, Artificial Sequence
  ENSG00000182606_9 (sequence is synthesized)
cagccgagctgcgtgagctggaggacaagtacgcagagtgcatggagatgctgcatgaggcgcaggaggagctgaagaacctccggaacaaaaccatgcccaataccacgtctcggcgct

SEQ ID NO: 647568 - DNA, 120 bp, Artificial Sequence
  ENSG00000182606_10 (sequence is synthesized)
accactcactgggcctgtttcccatggattccttggcagcagagattgagggaacgatgcgcaaggagctgcagttggaagaggccgagtctccagacatcactcaccagaagcgtgtct

SEQ ID NO: 647569 - DNA, 120 bp, Artificial Sequence
  ENSG00000182606_11 (sequence is synthesized)
ttgagacagtaagaaacatcaaccaggttgtcaagcagagatctctgaccccttctcccatgaacatccccggctccaaccagtcctcggccatgaactccctcctgtccagctgcgtca

SEQ ID NO: 647570 - DNA, 120 bp, Artificial Sequence
  ENSG00000182606_12 (sequence is synthesized)
gcaccccccggtccagcttctacggcagcgacataggcaacgtcgtcctcgacaacaagaccaacagcatcattctggaaacagaggcagccgacctgggaaacgatgagcggagtaaga

SEQ ID NO: 647571 - DNA, 120 bp, Artificial Sequence
  ENSG00000182606_13 (sequence is synthesized)
agccggggacgccgggcaccccaggctcccacgacctggagacggcgctgaggcggctgtccctgcgccgggagaactacctctcggagaggaggttctttgaggaggagcaagagagga

SEQ ID NO: 647572 - DNA, 120 bp, Artificial Sequence
  ENSG00000182606_14 (sequence is synthesized)
agctccaggagctggcggagaagggcgagctgcgcagcggctccctcacacccactgagagcatcatgtccctgggcacgcactcccgcttctccgagttcaccggcttctctggcatgt

SEQ ID NO: 647573 - DNA, 120 bp, Artificial Sequence
  ENSG00000182606_15 (sequence is synthesized)
ccttcagcagccgctcctacctgcctgagaagctccagatcgtgaagccgctggaaggttccgccacacttcaccactggcagcagttggcccaacctcaccttgggggcatcctggacc

SEQ ID NO: 647574 - DNA, 120 bp, Artificial Sequence
  ENSG00000182606_16 (sequence is synthesized)
cccggcccggtgtggtcaccaagggcttccggacgctggatgttgacctggacgaagtgtactgccttaacgactttgaagaagatgacacaggtgaccacatttctctcccacgcctag

SEQ ID NO: 647575 - DNA, 120 bp, Artificial Sequence
  ENSG00000182606_17 (sequence is synthesized)
ctacctccactccagttcagcacccagagacctcagcgcaccatcctgggaagtgcatgtctcagaccaactccaccttcaccttcaccacctgtcgcatcctgcatccttcagatgagc

SEQ ID NO: 647576 - DNA, 120 bp, Artificial Sequence
  ENSG00000182606_18 (sequence is synthesized)
tcactcgggtcacaccaagccttaactcagccccaactccagcttgtggcagcaccagccacttgaaatccacgccggtggccacaccatgcactccacggagactgagcctggctgagt

SEQ ID NO: 647577 - DNA, 120 bp, Artificial Sequence
  ENSG00000182606_19 (sequence is synthesized)
ccttcactaacacccgtgagtccacgaccaccatgagcacatccctggggctcgtgtggctgttgaaggagcggggcatttctgctgccgtgtacgacccccagagctgggacagggccg

SEQ ID NO: 647578 - DNA, 120 bp, Artificial Sequence
  ENSG00000182606_20 (sequence is synthesized)
gccggggctccctcctgcactcctacacgcccaagatggctgtgatcccctctactccgccgaactcgcctatgcagacacccacatcctccccaccctcctttgagttcaagtgcacga

SEQ ID NO: 647579 - DNA, 120 bp, Artificial Sequence
  ENSG00000182606_21 (sequence is synthesized)
ccagaccgacgtgtccgtctccaacctcaacctcgtggacaaagtcaggaggtttggggtggccaaagtggtgaactcagggcgagcccatgtccccaccttgactgaggagcagggacc

SEQ ID NO: 647580 - DNA, 120 bp, Artificial Sequence
  ENSG00000182606_22 (sequence is synthesized)
cctcctctgtgggcccccggggccagcaccagcccttgttcccagaggcctggtacctgagggcctgcccctcagatgccccactgtcaccagtgccatcggtgggctgcagctcaatag

SEQ ID NO: 647581 - DNA, 120 bp, Artificial Sequence
  ENSG00000182606_23 (sequence is synthesized)
tggcatccggcggaatcgcagcttccccaccatggtgggatctagcatgcagatgaaagctcctgtgactctcacctcgggcatcttgatgggtgctaagctctccaaacaaactagctt

SEQ ID NO: 647582 - DNA, 120 bp, Artificial Sequence
  ENSG00000182606_24 (sequence is synthesized)
acggtgaggactggaggggggccggttgccctagaggagacccacgttctcctctcttgctcccacctccctctcttccccccacagtgcactccctccctctgcccttctctgtccacc

SEQ ID NO: 647583 - DNA, 120 bp, Artificial Sequence
  ENSG00000182606_25 (sequence is synthesized)
ccctcctaagctagacaaatcaacctcgtgcctaatggaggaagtgtggaaactttgtaaaatgtgtacataggacttggagaccttgtgtccgccctgctctttcttccgatcccacag

SEQ ID NO: 647584 - DNA, 120 bp, Artificial Sequence
  ENSG00000182606_26 (sequence is synthesized)
gaagtgcccctgcactgtcatcactctcacgaggacgtcacctgtgctaacctgggggaaggtggggtcctttcttctttccttttgagaagcactgaaactcccaagtgtgttcttatc

SEQ ID NO: 647585 - DNA, 120 bp, Artificial Sequence
  ENSG00000182606_27 (sequence is synthesized)
ccatggataggaaaccagtgaattccgtggctggcacaccacgagctgtcacgcggcacgggtcataacacatctgggtgtcatcggacacctcacctcgcccaccctgtaggagcgtaa

SEQ ID NO: 647586 - DNA, 120 bp, Artificial Sequence
  ENSG00000182606_28 (sequence is synthesized)
ggagcctccatcctcagccacgtgcagctgacgtggctttcctgatcggagggcttttcttttatgggtggcccagcttcttcaagaccttcactgctctgcctcagtggacagtcgttt

SEQ ID NO: 647587 - DNA, 120 bp, Artificial Sequence
  ENSG00000182606_29 (sequence is synthesized)
cttttttgaggtgtgaccttttgttttcatgccttccccttgaagtcatcctgtgttttgtaatcagctgtcaggccaaatgtctgacccgaaagagaatgtatttacactcatgctgcg

SEQ ID NO: 647588 - DNA, 120 bp, Artificial Sequence
  ENSG00000182606_30 (sequence is synthesized)
ttgttcagcagcccctctgtgttctgtgtgatttgttttatttttccttttttttacatatatatgcagggaagtaatggtactggtagtgtatgttttctatgtggttcaaatatgaat

SEQ ID NO: 647589 - DNA, 120 bp, Artificial Sequence
  ENSG00000182606_31 (sequence is synthesized)
ttcgaacacaccaagccgctaatgagatagcagcttttttctgggacccagagtcacaaccaaattgatttaagaccggacccaagacacctttaacaataggactgaaaggaaaaagga

SEQ ID NO: 647590 - DNA, 120 bp, Artificial Sequence
  ENSG00000182606_32 (sequence is synthesized)
tagggaaaaagcttattaaagaaatgtgtcaacaccaaatgtagaggggaagaaccacaaccaggcataataccaaaccggttccagggggaaacaaggctttggtattccgctggctcc

SEQ ID NO: 647591 - DNA, 120 bp, Artificial Sequence
  ENSG00000182606_33 (sequence is synthesized)
agcgctttttctgaaacccgaggctggccagggtgctgtcaccatgcggtctttgattgcagccattcaatgcccacatgcttttccttcttgtttcagaacagcacatggtcacaacaa

SEQ ID NO: 647592 - DNA, 120 bp, Artificial Sequence
  ENSG00000182606_34 (sequence is synthesized)
gatattttctttccctccaaagccttttgtctccttgtgcctctttttatccttaggaaaagatccaggtgcttgtgaaaagaatcatgaatgcaacaagggaggctggtcctgttgctg

SEQ ID NO: 647593 - DNA, 120 bp, Artificial Sequence
  ENSG00000182606_35 (sequence is synthesized)
tcgccgattaagttttaaacttttatttattatttatgtctgccgtattttaaataaacattctcgttccttccagtttcagtcatagtgtgtctgtggcattccagtccaaccatgtga

SEQ ID NO: 647594 - DNA, 120 bp, Artificial Sequence
  ENSG00000182606_36 (sequence is synthesized)
cttatttattctaatttgagggctgcactgtacaccatggtgtcctgtgacaccgtgttccagacatttatggaaggaaaacatcccatataaatgaaactgtcatgctgtgtcctcccc

SEQ ID NO: 647595 - DNA, 120 bp, Artificial Sequence
  ENSG00000182606_37 (sequence is synthesized)
ggcagcagaagatgtgtccttccattgagtgagggtaaccttatgtccaccaaggatactttgagaaagcccctaaggaacaagcctcagtcccacggtttcagactatttattctctga

SEQ ID NO: 647596 - DNA, 120 bp, Artificial Sequence
  ENSG00000182606_38 (sequence is synthesized)
acacaagagtattggttaattatgttctcagctctccctgctgttgtatgtgtgcattcactgcaagtaacttatatctttttatttgaatgtattttaaagcagtagatagaataacaa

SEQ ID NO: 647597 - DNA, 120 bp, Artificial Sequence
  ENSG00000182606_39 (sequence is synthesized)
aggaatatgaaaaccatggactgaatggaccattttatgtattcagagagagaagccactcatcattgccagaaataccatgtaaaaattggcagttcagaggttgcaatacttagtata

SEQ ID NO: 647598 - DNA, 120 bp, Artificial Sequence
  ENSG00000182606_40 (sequence is synthesized)
gtaaataaataaacggtcaacattgtgcaaccactaccaaaaagtgtgttgtaatgcatcaaaaatcaacacaattttattcactaatgagtatcaataaaataagttcaaatgatggaa

SEQ ID NO: 647599 - DNA, 120 bp, Artificial Sequence
  ENSG00000182606_41 (sequence is synthesized)
accacactggtattctgatttgtattttgtttttatcttttcatcaaggagacgatctctttatgtaagacttgaaagtgtttagctctttgcaaaattaaatgaaaggcatatacttca

SEQ ID NO: 647600 - DNA, 120 bp, Artificial Sequence
  ENSG00000182606_42 (sequence is synthesized)
gggtgatgctgggccaggagctttgtgtacacccctccacttcagctgagccagggcatgtctgcggcccaggccagggcgcagtgtgtgccctgggggcccaggcctgcatggctcctc

SEQ ID NO: 647601 - DNA, 120 bp, Artificial Sequence
  ENSG00000182606_43 (sequence is synthesized)
tgggtagggggtcgggggcacccccaaggatggtcccttagggtgatgttttggctttggggtgacttcagcaatgtccctgcgagacaagggcggggaagaagaatgttttgaatacga

SEQ ID NO: 647602 - DNA, 88 bp, Artificial Sequence
  ENSG00000182606_44 (sequence is synthesized)
acggtctggtgagggcaccacgataagtcctgtaaacttggcacctttcccggaggcagagttttgggccattctcacctctgttcca

SEQ ID NO: 647603 - DNA, 120 bp, Artificial Sequence
  ENSG00000182606_45 (sequence is synthesized)
cccggaggcagagttttgggccattctcacctctgttccaggcaccatccgtagtggttctctgtctgtagcttccgctcgtctgtgtgggtgatgattaaagcattctcattgcacagt

SEQ ID NO: 647604 - DNA, 120 bp, Artificial Sequence
  ENSG00000182606_46 (sequence is synthesized)
cccatcttggaggtgcatggcccatcagggatctttaaagtgggagcaggaaaggctgctaaaaaaaaaaaaaaaaaaaaaagtgggcttttgggtccctgaaaacatcagtgcccttct

SEQ ID NO: 647605 - DNA, 120 bp, Artificial Sequence
  ENSG00000182606_47 (sequence is synthesized)
tcctggtctgggtgtctccctgagtctaaggggaagattctcaagtcccctggtgatttccaagtggagctgagcagttttagggaaattgagtgctgggtcattcagaaggtaaatgag

SEQ ID NO: 647606 - DNA, 120 bp, Artificial Sequence
  ENSG00000182606_48 (sequence is synthesized)
atcatctgttacctgtacgctgtattaaaatagaaccaggaaaggctcaggatttcagacatttcatcagccttttcactttcccagcttcaatggaggtatatatgtcattttcttttc

SEQ ID NO: 647607 - DNA, 120 bp, Artificial Sequence
  ENSG00000182606_49 (sequence is synthesized)
agcttacacatgtgttcaaagtggatttttaaaaagtgttttagcaatactccttaaccaaataaaccttcggagaacgtcactaagcttttccagagagaagaccctagatgaagttgg

SEQ ID NO: 647608 - DNA, 120 bp, Artificial Sequence
  ENSG00000182606_50 (sequence is synthesized)
aaaagagctctggctgactccacccactgtccccaagcattaaaggtgtggccatgagtttacagaattacccacattccagttgccactgggatgaaaagctttgtgctcagagctctg

SEQ ID NO: 647609 - DNA, 120 bp, Artificial Sequence
  ENSG00000182606_51 (sequence is synthesized)
ggaatcatgggatcacatggttactgtttaccccaacagcatgctctgtctagactggacctcccagccccttgtgttgggaaggcaaagcttttgtggagtcaggggggagactgagaa

SEQ ID NO: 647610 - DNA, 120 bp, Artificial Sequence
  ENSG00000182606_52 (sequence is synthesized)
aaaatgaattaaccctgtgttgtcatcctcatgacattcctgaggattcaccaggttagaagtgaggacgtttatctttgtgattcataattttcatttgtgaaggccacaacactcccc

SEQ ID NO: 647611 - DNA, 120 bp, Artificial Sequence
  ENSG00000182606_53 (sequence is synthesized)
ttgaaatacagggcaggaaagagctgaggttcttggtggtgtctcccattcccctggctaatttcagacagctgtggtcaagggattttacttgggatcaacttttccttttttccttga

SEQ ID NO: 647612 - DNA, 120 bp, Artificial Sequence
  ENSG00000182606_54 (sequence is synthesized)
cattaattttagagaagtcatcaagtcatgtgatttgtttagcacataggtttatttatggtttgattttttttaggcagttatattactagattaagcttgtgagggaatgaaaatgtt

SEQ ID NO: 647613 - DNA, 120 bp, Artificial Sequence
  ENSG00000182606_55 (sequence is synthesized)
ttttatttgttatctacacactcgaaaaagagaaaccagctgcggtactgtcccatttttgtcatcagcaccagtgtccgtcaggaaggcaggtggtggtgcagaaacatgatgcctggc

SEQ ID NO: 647614 - DNA, 120 bp, Artificial Sequence
  ENSG00000182606_56 (sequence is synthesized)
tgattttcgtggctaaaggggtaggccttatgttgattgggatgctcccctacagccttacaggtagaatagaaggtgagttctggaagtgcaaagaagcaccattaagtgcatcttcta

SEQ ID NO: 647615 - DNA, 120 bp, Artificial Sequence
  ENSG00000182606_57 (sequence is synthesized)
gaagttgtacagaaggactaaagcttatcaagtcaacaaagaacttaccttggaggatagagagagagaagggaccaattatgaggactgacatcctggccactctccttaaaataaaca

SEQ ID NO: 647616 - DNA, 120 bp, Artificial Sequence
  ENSG00000182606_58 (sequence is synthesized)
ctgacatttttcttgcttgttctctctgtactcaaacctgtggcaaattcatcctagcaacgttatttgacgaggggcatgaacatttatagttgaaactgtagaaagggtcaggttgga

SEQ ID NO: 647617 - DNA, 120 bp, Artificial Sequence
  ENSG00000182606_59 (sequence is synthesized)
ggtgtgtaataaaaaagaattacctaggttgccaaaggtaatttaggaagggtctgatcatttagatgagagttctttggggcttattttctgggtaaggctcatctttaaaaactggct

SEQ ID NO: 647618 - DNA, 120 bp, Artificial Sequence
  ENSG00000182606_60 (sequence is synthesized)
tcagaggggagaggggagaacaatgaattggctctattttctctattgggaattacaggaccattttgattcttagaatgtaaaaagcatatcgctaagtaaatcatcctggaggtccca

SEQ ID NO: 647619 - DNA, 120 bp, Artificial Sequence
  ENSG00000182606_61 (sequence is synthesized)
agtagctctatgcctgcaatcatggagacacaggcagacagataagcttcatggggaaggcatggggcatcctctgtcttgggatttgtatccatggtggtctggtccctgccttttaat

SEQ ID NO: 647620 - DNA, 120 bp, Artificial Sequence
  ENSG00000182606_62 (sequence is synthesized)
ccgtcctctacgcttgggcttttctgttaccaaacagcactatcccaggaactattgtctgcctgggaacactcagtagggagacactttggagacaggaggtgatgaacctttttatgt

SEQ ID NO: 647621 - DNA, 120 bp, Artificial Sequence
  ENSG00000182606_63 (sequence is synthesized)
gcagctggtatgatagaaggaaattgggaaaacttgtatgctaggcacttttgtccagagcctgctgtcccatggagaaaaagttttaagcactgaaaaaatttgattaatgtatttaaa

SEQ ID NO: 647622 - DNA, 120 bp, Artificial Sequence
  ENSG00000182606_64 (sequence is synthesized)
tgtattatttgaagcatcattcacttgttgatttttacaatcccatgtcttaaaaaggatgaatccatgttattgtattgtaaataatttagatgattaaaatggattgtttaaaaagtt

SEQ ID NO: 647623 - DNA, 120 bp, Artificial Sequence
  ENSG00000182606_65 (sequence is synthesized)
agagtggggccgcgcgcgggagagccggagcgcagccttagcgtccccgagagtctcgaacgccccgacgacccccgcgtctcggaaccccggactccgagcccaggagcgccagagcgg

SEQ ID NO: 647624 - DNA, 80 bp, Artificial Sequence
  ENSG00000182606_66 (sequence is synthesized)
cccggccggctgcagcggagggaaccgaagccgccgggcggccggggccgggccgagaacgacgcggaggaagcccccac

SEQ ID NO: 647625 - DNA, 120 bp, Artificial Sequence
  ENSG00000182606_67 (sequence is synthesized)
gacgcggaggaagcccccaccgaggccccccggcaccgcgcctgctgccgggttgcgctccgtgcacctcttgcggattccctataaggagcccctgctggtgcaccagaactaccgggg

SEQ ID NO: 647626 - DNA, 120 bp, Artificial Sequence
  ENSG00000182606_68 (sequence is synthesized)
gccatctgcccaactgccccagactctggcagtggggcccccgatggcagtgggcacctccccgtgaaacctgccaagctggacgccacagctctgcacgacgacactttggccaactcc

SEQ ID NO: 647627 - DNA, 120 bp, Artificial Sequence
  ENSG00000182606_69 (sequence is synthesized)
gtgcccccttcggaggcatgcaaccatgcagtcctagcctgcagcctgggcatccctgaggaacactacataagcgaggctgtggaagatgctcccagctacagagggtaccgggatgcc

SEQ ID NO: 647628 - DNA, 120 bp, Artificial Sequence
  ENSG00000182606_70 (sequence is synthesized)
cctgggggactccctttggtccctgatccacctgcggaaggcggggcacctctgtcacgcctactcctttttcttccgcgacagccacccgcgctgctggtttgagttcctctgagggtg

SEQ ID NO: 647629 - DNA, 120 bp, Artificial Sequence
  ENSG00000182606_71 (sequence is synthesized)
attcagggctgctgtccagtgctgctttattggcagtgctgccagggtctccgttagctctctgcaaattgccttcctttctgctcctcctactccctccttcccccatagaatttttct

SEQ ID NO: 647630 - DNA, 120 bp, Artificial Sequence
  ENSG00000182606_72 (sequence is synthesized)
tttcattgcccactttactgttttggctccagactgtcgttaagaatgtacagcctaattctggtgtgtttcgggatattcttctgtccagtattctggaagggcggggaggcatggcag

SEQ ID NO: 647631 - DNA, 120 bp, Artificial Sequence
  ENSG00000182606_73 (sequence is synthesized)
cgttttacttgacgttgatggtgctgtgaagtccattctttcctctgcaagactactgactatgcagaaatttatcgaagcggattattatgaactagactggtattatgaagaatgctc

SEQ ID NO: 647632 - DNA, 120 bp, Artificial Sequence
  ENSG00000182606_74 (sequence is synthesized)
aagacattggaggccgaggcttccagaggggcccgccacaggcctgggagctggaggcatggctgaaggagatgagagaatggagtcctagttggaaggacgctcccgagggcacgaccg

SEQ ID NO: 647633 - DNA, 120 bp, Artificial Sequence
  ENSG00000182606_75 (sequence is synthesized)
gacaagcatgtgcactgtggtcttctagttctttcctttgcctttagaaccttagaaataaaaacttttgtggcggtagaggcactgctaactgattcaaaaattaattaggttttgcct

SEQ ID NO: 647634 - DNA, 120 bp, Artificial Sequence
  ENSG00000182606_76 (sequence is synthesized)
gtgggtgtgaggaatgcagaaaattaatgctttagcttttctgcagttttggtgtcggggagaggttccaagcaaactctattaaatggggatttttttttccccataaccacctgaatg

SEQ ID NO: 647635 - DNA, 120 bp, Artificial Sequence
  ENSG00000182606_77 (sequence is synthesized)
tgatttgtgggcttatgtgttctgatttgaacttcatatagcaaggttgtggcttttggcagatgcagtatgttctgagcgcggctcctagagtctacaatttggagtccaggaaggggt

SEQ ID NO: 647636 - DNA, 120 bp, Artificial Sequence
  ENSG00000182606_78 (sequence is synthesized)
ggctgtggagacaagtgagttttgtacctccgtaagccaccctttttcagggtcagttcatgtgttagtatcaggggcatctcagatgattaaactcatgggaaaaacttcctccttccc

SEQ ID NO: 647637 - DNA, 120 bp, Artificial Sequence
  ENSG00000182606_79 (sequence is synthesized)
ctttttttttttttttttttttaatttaggcacttataaaatgttttccctctacctgctgctactctgccaagagccaccaagtgcttatatttttcattttttactcctttagtttgg

SEQ ID NO: 647638 - DNA, 120 bp, Artificial Sequence
  ENSG00000182606_80 (sequence is synthesized)
tcattttttactcctttagtttggaaagccatatacgtttgagaaggtgttttaaaactctgtgttacacttacgatgcaaagccaaatcagaacttctgtaaggcagaactttcccaac

SEQ ID NO: 647639 - DNA, 120 bp, Artificial Sequence
  ENSG00000182606_81 (sequence is synthesized)
tttaaaaaaattattgtcccctctaaggagccttcttagacgttttttcctaatcaccccccaaagacattttaataccacatatatattgtttatgtactatatgtatatacataaaca

SEQ ID NO: 647640 - DNA, 120 bp, Artificial Sequence
  ENSG00000182606_82 (sequence is synthesized)
atacataagcaatacatctgtggtattaaaattaaaaagaatccaattatgtttacctcaaaagaacctgtttttgcttcttgggagcaatattgcccctgtgagactgcatgctataag

SEQ ID NO: 647641 - DNA, 120 bp, Artificial Sequence
  ENSG00000182606_83 (sequence is synthesized)
gtaaggttgtgcttgttaaagacccaagacatgactgggttccacagtctccaaaggaagagggtgggctagtttgtttttattattattttaaaattgtataattggggtctttcttag

SEQ ID NO: 647642 - DNA, 120 bp, Artificial Sequence
  ENSG00000182606_84 (sequence is synthesized)
agttcagaaaaggtatagcttactcttttttaattgtttatttagttgtaagcttggtgattgttttctgatccacattgtgtgtgttcttcaataaaatctttcatttctgcaatttta

SEQ ID NO: 647643 - DNA, 120 bp, Artificial Sequence
  ENSG00000182606_85 (sequence is synthesized)
cagttgagtcttttggccctgagagaccctgatctgtcttcctctaagagcaaaggaaaatagaagaggagatggctcaactgttcaaggttttatgtgctgaaagagttggccagatga

SEQ ID NO: 647644 - DNA, 120 bp, Artificial Sequence
  ENSG00000182612_0 (sequence is synthesized)
ccccgccatccctgcaactggaggaggggattttggaaagttgcgtctgagattacttctgctcgtcctcggaaacccaagcggcacaggaaagtccaaaaaggaagcaaagacgagcat

SEQ ID NO: 647645 - DNA, 120 bp, Artificial Sequence
  ENSG00000182612_1 (sequence is synthesized)
ccgaagtctcacccaaaaataactactgctgcgtattatagcgtattataattggggaaacagcattccaaacttctctccatgcacagactagcccagggccgcagtcaggaccagccc

SEQ ID NO: 647646 - DNA, 120 bp, Artificial Sequence
  ENSG00000182612_2 (sequence is synthesized)
agcagcccagccacagaggagccagcgaacctctcccggcgcctgtgctgggggctttctgttccagcgtcaaggatggaggagggggagaggagccccttactgtcccaggaaactgca

SEQ ID NO: 647647 - DNA, 120 bp, Artificial Sequence
  ENSG00000182612_3 (sequence is synthesized)
ggccagaagcccctctctgtgcacaggccacccacctcaggctgcctaggtccagtgcccagggaggaccaggcggaggcctggggctgcagctgctgtcccccggagaccaagcaccag

SEQ ID NO: 647648 - DNA, 120 bp, Artificial Sequence
  ENSG00000182612_4 (sequence is synthesized)
gccttgagtggcacccccaagaaaggaccagccccttccctctccccagggagcagctgcgtcaagtatctgatcttcctctccaacttccccttctccctgctggggctgctggccctg

SEQ ID NO: 647649 - DNA, 120 bp, Artificial Sequence
  ENSG00000182612_5 (sequence is synthesized)
gccatcgggctctggggcctggctgtcaaggggtctctgggaagtgatctgggggggcccctgcccgcagaccccatgctggggctggcactgggagggctggtggtcagcgcagtgagc

SEQ ID NO: 647650 - DNA, 120 bp, Artificial Sequence
  ENSG00000182612_6 (sequence is synthesized)
ctggctggctacctgggcgccctctgtgagaacacctgcctgttacgtggcttctctgggggcatccttgccttcctggtgcttgaggccgtggcgggggccctggtggtggccctctgg

SEQ ID NO: 647651 - DNA, 120 bp, Artificial Sequence
  ENSG00000182612_7 (sequence is synthesized)
tggccatcgcccactaccaggacgacccagacctgcgcttcctcctcgaccaagtccagctcgggctgaggtgctgcggagctgcctcctaccaggactggcagcagaacctgtacttta

SEQ ID NO: 647652 - DNA, 120 bp, Artificial Sequence
  ENSG00000182612_8 (sequence is synthesized)
actgcagctcccccggggtgcaggcctgcagccttcccgcctcctgctgcatcgacccccgcgaagatggagcctctgtcaacgaccagtgcggcttcggggtcctgcgcctggatgcgg

SEQ ID NO: 647653 - DNA, 120 bp, Artificial Sequence
  ENSG00000182612_9 (sequence is synthesized)
acgcagctcagagagtggtgtacctggagggctgcggcccgccgctccggcggtggctgcgcgcgaacctggctgcctcgggcggctacgcaatcgcggtggtgctgctgcagggcgcgg

SEQ ID NO: 647654 - DNA, 80 bp, Artificial Sequence
  ENSG00000182612_10 (sequence is synthesized)
ctgctgcagggcgcggagctcctgctggccgcccggctactcggggccctcgctgcccgcaggggggcggcgtacggccc

SEQ ID NO: 647655 - DNA, 120 bp, Artificial Sequence
  ENSG00000182612_11 (sequence is synthesized)
tgccaagcccgcccggggctgagcgcacgccccgaggtccgagaccgccacgcacagggatacagggggcgcctccgcccggctaaaaagcgcggcctgcgccgccgccgccgcctgatt

SEQ ID NO: 647656 - DNA, 120 bp, Artificial Sequence
  ENSG00000182612_12 (sequence is synthesized)
gatttcgctcgggcttcgggtgacttcgccgcaggacctacccagctcgctcacttcgctcgctccgcgtcccccatgccagcccccaacgcagggcgcccggcgaagccacgggactgg

SEQ ID NO: 647657 - DNA, 120 bp, Artificial Sequence
  ENSG00000182612_13 (sequence is synthesized)
cgggaggagcacgcggggccggaggaaatcctgaagctgaccctcacctccgagcccccactcccaccccagccgcacagttcccacctcctggcacctccctcccctggggccgccacc

SEQ ID NO: 647658 - DNA, 120 bp, Artificial Sequence
  ENSG00000182612_14 (sequence is synthesized)
ccttctgggctcgtgatggtggagctaaggtccaggcctctccctcccgagtgcatttttggggagatagtaaatgttttattcgggtgtatcattcatacagtaaagacaccaatcttc

SEQ ID NO: 647659 - DNA, 120 bp, Artificial Sequence
  ENSG00000182612_15 (sequence is synthesized)
catgcatgcacacgtatacccacatgtacacgcatatccacactggcacgtctcgtgctcacaggtttcacgtgtgtggacacacacctacacactcctctacactgacatgaacatgtt

SEQ ID NO: 647660 - DNA, 120 bp, Artificial Sequence
  ENSG00000182612_16 (sequence is synthesized)
cttgtgcacacacaaaacagcctcacactcaggcacacactcacactcaaacatgttcatacacacacgtgtcatgcacacaaggtataggggtgcttgcctctccttgttctatgggct

SEQ ID NO: 647661 - DNA, 120 bp, Artificial Sequence
  ENSG00000182612_17 (sequence is synthesized)
cagggccccaatcagccctgcggcccccagaacgtgcagggtgactctgttccccccgccagggccaggaggactacccaggagcttagttgagaagctgagcccacaaacttagaaagt

SEQ ID NO: 647662 - DNA, 75 bp, Artificial Sequence
  ENSG00000182612_18 (sequence is synthesized)
acttgaatccaggaggtggaggttgcagccaaaacagcaccactgcattccagcatgggcaacagagcgagcatc

SEQ ID NO: 647663 - DNA, 120 bp, Artificial Sequence
  ENSG00000182612_19 (sequence is synthesized)
gacttgaatccaggaggtggaggttgcagccaaaacagcaccactgcattccagcatgggcaacagagcgagcatccatctcaaagaaaaaaggccgggcgcggtagctcacgcctgtaa

SEQ ID NO: 647664 - DNA, 75 bp, Artificial Sequence
  ENSG00000182612_20 (sequence is synthesized)
ggggaaacagcattccaaacttctctccatgcacagccaaggtggacggatcacctgaggtcaaaagttcgagac

SEQ ID NO: 647665 - DNA, 78 bp, Artificial Sequence
  ENSG00000182612_21 (sequence is synthesized)
cggagaatctcttgaagcgaagaggcggaggttagaatgaactgagttggtgccactgcactccagtctgggcgacag

SEQ ID NO: 647666 - DNA, 120 bp, Artificial Sequence
  ENSG00000182612_22 (sequence is synthesized)
agacttcatctcaaaaaaaaaaaaaaaagacgtcacttcacagattctaaggatttttggagttggataccaggaaaccggaagactaaatgtatacatatttcacaacatcacaattac

SEQ ID NO: 647667 - DNA, 120 bp, Artificial Sequence
  ENSG00000182612_23 (sequence is synthesized)
gaagactaaatgtatacatatttcacaacatcacaattactgtgacagtttttttaaactatgttaaattacattaattgattaaattatgttagtaattgtattagtttgctcagggtg

SEQ ID NO: 647668 - DNA, 120 bp, Artificial Sequence
  ENSG00000182612_24 (sequence is synthesized)
gagtttaattcacacagagccagcttgtacaggttactgaggttttattactactcaaaaaaaattagtgtccttgagaattcagggatcagagttttttgttttttgtttttttttgtt

SEQ ID NO: 647669 - DNA, 60 bp, Artificial Sequence
  ENSG00000182612_25 (sequence is synthesized)
caaagtgctgggactatagacgtgagccaccgtgcccggctggggatccgcggttttaag

SEQ ID NO: 647670 - DNA, 120 bp, Artificial Sequence
  ENSG00000182612_26 (sequence is synthesized)
cgtgagccaccgtgcccggctggggatccgcggttttaaggataatttggtgggtatggggtcagaaagtagggagtgttgattggttgggtcagaggtgaaatgatagggagtcaaaac

SEQ ID NO: 647671 - DNA, 83 bp, Artificial Sequence
  ENSG00000182612_27 (sequence is synthesized)
gattggttgggtcagaggtgaaatgatagggagtcaaaactgtcctcttgtgctgagtcggttcctgggtgggggccacaaga

SEQ ID NO: 647672 - DNA, 120 bp, Artificial Sequence
  ENSG00000182612_28 (sequence is synthesized)
tctgcaaaatatctcaagcgctgatctgttttttaatagtgatgttatcctgagaagcaatttgggaggtttagaatcttgtagcctccagctacatgactcctaaaccataatttctaa

SEQ ID NO: 647673 - DNA, 120 bp, Artificial Sequence
  ENSG00000182612_29 (sequence is synthesized)
atttctaatcttatggctaatttgttagtcctgaaaaggcagtcttgtccccaggtaggaagggagtttgttttgcaaagggctgttaccatctttgtttcaaagctaaactataaacta

SEQ ID NO: 647674 - DNA, 64 bp, Artificial Sequence
  ENSG00000182612_30 (sequence is synthesized)
cctcccgaagttagttcagttaagtccgatctctttaactgtaataattatctcagttataaga

SEQ ID NO: 647675 - DNA, 120 bp, Artificial Sequence
  ENSG00000182613_0 (sequence is synthesized)
atggagacgtgggtgaaccagtcctacacagatggcttcttcctcttaggcatcttctcccacagtactgctgaccttgtcctcttctccgtggttatggcggtcttcacagtggccctc

SEQ ID NO: 647676 - DNA, 120 bp, Artificial Sequence
  ENSG00000182613_1 (sequence is synthesized)
tgtgggaatgtcctcctcatcttcctcatctacatggaccctcaccttcacacccccatgtacttcttcctcagccagctctccctcatggacctcatgttggtctgtaccaatgtgcca

SEQ ID NO: 647677 - DNA, 120 bp, Artificial Sequence
  ENSG00000182613_2 (sequence is synthesized)
aagatggcagccaacttcctgtctggcaggaagtccatctcctttgtgggctgtggcatacaaattggcctctttgtctgtcttgtgggatctgaggggctcttgctgggactcatggct

SEQ ID NO: 647678 - DNA, 120 bp, Artificial Sequence
  ENSG00000182613_3 (sequence is synthesized)
ggcttgatccagatggtggtagtaatgaatttcccctactgtggcttgaggaaggtgaaccatttcttctgtgagatgctatccttgttgaagctggcctgtgtagacacatccctgttt

SEQ ID NO: 647679 - DNA, 120 bp, Artificial Sequence
  ENSG00000182613_4 (sequence is synthesized)
gagaaggtgatatttgcttgctgtgtcttcatgcttctcttcccattctccatcatcgtggcctcctatgctcacattctagggactgtgctgcaaatgcactctgctcaggcctggaaa

SEQ ID NO: 647680 - DNA, 120 bp, Artificial Sequence
  ENSG00000182613_5 (sequence is synthesized)
aaggccctggccacctgctcctcccacctgacagctgtcaccctcttctatggggcagccatgttcatctacctgaggcctaggcactaccgggcccccagccatgacaaggtggcctct

SEQ ID NO: 647681 - DNA, 120 bp, Artificial Sequence
  ENSG00000182613_6 (sequence is synthesized)
atcttctacacggtccttactcccatgctcaaccccctcatttacagcttgaggaacagggaggtgatgggggcactgaggaaggggctggaccgctgcaggatcggcagccagcactga

SEQ ID NO: 647682 - DNA, 120 bp, Artificial Sequence
  ENSG00000182613_7 (sequence is synthesized)
gttcagtacctatgtgggcagtgggaggcggttctggaacctggccagagccagggtgtcctggaggcaggtgggaatcctgggtgggctcagggcactgctcctggctccacctctcct

SEQ ID NO: 647683 - DNA, 120 bp, Artificial Sequence
  ENSG00000182613_8 (sequence is synthesized)
gccagcaccagctccttccctgagcctgtttctccctctgagaggaggctgtggtctgtgtgagcctcgctctctgagcctgaggggccactggaggctgagggtgccgtgggctccaca

SEQ ID NO: 647684 - DNA, 120 bp, Artificial Sequence
  ENSG00000182613_9 (sequence is synthesized)
gcccgatgagtagtcggtgcgggctgaggaaggaggttggggctgcggctcctcctgtcccctgacccagtgggagcaaaaacaggaggatgagtgcatggctctgatgctaggaactcc

SEQ ID NO: 647685 - DNA, 120 bp, Artificial Sequence
  ENSG00000182613_10 (sequence is synthesized)
taattctctcattttcagtcttggtttcctcgtgaattatgatgattgtgacaccctcagacttggaaggtctttttaaacactacatcagttctttctttctttctttctttctttctt

SEQ ID NO: 647686 - DNA, 89 bp, Artificial Sequence
  ENSG00000182613_11 (sequence is synthesized)
tctttctttctttctttctttcttttgttctttctttcgttctttctttctcttcctctttctctttctttctttttctttcagtgaca

SEQ ID NO: 647687 - DNA, 85 bp, Artificial Sequence
  ENSG00000182613_12 (sequence is synthesized)
ctgagtagctgggattacaggtgcgtgccccacacctgactaattttttagtaagggatccactattgttgtagagacaatgttt

SEQ ID NO: 647688 - DNA, 84 bp, Artificial Sequence
  ENSG00000182613_13 (sequence is synthesized)
ctcaagcaatccaccttacagccaacatcagtactttttatctgatgaagaaacaacttttcctcccaatcttttgtgtactaa

SEQ ID NO: 647689 - DNA, 120 bp, Artificial Sequence
  ENSG00000182613_14 (sequence is synthesized)
atgaagaaacaacttttcctcccaatcttttgtgtactaattattttacactatacattgaaaatgaatataggacattgtaaatcagcactgtgcagaaataagacattgggattgctg

SEQ ID NO: 647690 - DNA, 120 bp, Artificial Sequence
  ENSG00000182613_15 (sequence is synthesized)
tcactcattatttaaaattggaattacttctactagaagaagacgttgagctgagcctcctaactctccttgctaatgttttattctgtgcttactctgtgggagacttcgctctgtgat

SEQ ID NO: 647691 - DNA, 120 bp, Artificial Sequence
  ENSG00000182613_16 (sequence is synthesized)
ctatgtgtagacgtagatcccacctgcatgatgtttatatgatgtctcacaacagttgtagcccaaccctagggtcttaaatgaacaacttacagatgacagaaaataagcctttatagt

SEQ ID NO: 647692 - DNA, 120 bp, Artificial Sequence
  ENSG00000182613_17 (sequence is synthesized)
acatgcttgcttgtgtattcagtggaaatcccccaagcctgctgtctcctcaccacgtcctagcagtgtgtgctgctctgtgtcagctcagcttctgtaaggagaaaactggctgaactc

SEQ ID NO: 647693 - DNA, 120 bp, Artificial Sequence
  ENSG00000182613_18 (sequence is synthesized)
cttccccttcggggaatgaagactggagcatggtgacagaatttcatctgctatttgaaaacctattttcagaatttcagtgtgaactatttgcaggacttgtatccatccttccaagct

SEQ ID NO: 647694 - DNA, 120 bp, Artificial Sequence
  ENSG00000182613_19 (sequence is synthesized)
ctgtacctgtcctatttgcagtaaaattctcttttcatggaaaaaaaatatctccattgaaggcggagagaaaagaggccagaactggtcctgaggattagactaaaccccagggaggtg

SEQ ID NO: 647695 - DNA, 120 bp, Artificial Sequence
  ENSG00000182613_20 (sequence is synthesized)
tttgctgggcttcaggctttggagaggtggagggaagtggcacccagggcctaccgtggttgactttagattgtccactcagcttaattctcacaggaaacattctgtggtgaaaatatt

SEQ ID NO: 647696 - DNA, 120 bp, Artificial Sequence
  ENSG00000182613_21 (sequence is synthesized)
atgcccattttacaggagaggaagctagggctcaaatcggtaagtccctgcctcatcgtccagttttcttcttcacctccccatgggaaagactggtttgtcagcgcagctgagatgagc

SEQ ID NO: 647697 - DNA, 120 bp, Artificial Sequence
  ENSG00000182613_22 (sequence is synthesized)
aaacaacttcggaggaggctccttcccttgggggtttaattgcctgaaaaggtgtctccaaggactggtgaaaatagaagtaactttccttagtcacggggctgcaagattttccactgt

SEQ ID NO: 647698 - DNA, 120 bp, Artificial Sequence
  ENSG00000182613_23 (sequence is synthesized)
gtagatggatcttagtgtattctgtgaccacttgctgatatcacttaggtaatgcccaacctaccaaattaatttaagctctataatatcaaatatctttctgtgtattctcctcatttt

SEQ ID NO: 647699 - DNA, 120 bp, Artificial Sequence
  ENSG00000182613_24 (sequence is synthesized)
catcatatctttttgccttgtacacatttctatttgccccaaattcttctcttccaggaagcatccctgattaacctcatgcccactcagatttctctgggattttgcacccttcaaccc

SEQ ID NO: 647700 - DNA, 120 bp, Artificial Sequence
  ENSG00000182613_25 (sequence is synthesized)
gtaagtaccttgagtgtttcaaccacaactctttatctatagccactgaacccctagactggaagaaaatttagagcaaacttaatccagcccccttccgtgatgcagaattttggatca

SEQ ID NO: 647701 - DNA, 120 bp, Artificial Sequence
  ENSG00000182613_26 (sequence is synthesized)
taatcacccaagcaaaagtttcaccagcctttaccttatctagtcccatgatggggaaattcctatttcattttaattgcatttcattggcataggcttgatgtccttaattcatttccc

SEQ ID NO: 647702 - DNA, 120 bp, Artificial Sequence
  ENSG00000182613_27 (sequence is synthesized)
gcacaaggaccagggaattccattgaaaattatctactgaacgccactagcacccagaaatgtggtaagttccatgtcacaaaaaggttccacagggtcctcttatgtccaggcacacac

SEQ ID NO: 647703 - DNA, 120 bp, Artificial Sequence
  ENSG00000182613_28 (sequence is synthesized)
ttcagttcactaatcaatgctccttatgaaacaagagttgcataactagtctcagtgtgagcaactgcaaacttagagatgtgtaattgttagagatttgtaagaaaataatatagagag

SEQ ID NO: 647704 - DNA, 78 bp, Artificial Sequence
  ENSG00000182613_29 (sequence is synthesized)
gtgtaattgttagagatttgtaagaaaataatatagagaggaaatacatgtggggggggggcaggtgcgcaaggtggg

SEQ ID NO: 647705 - DNA, 120 bp, Artificial Sequence
  ENSG00000182613_30 (sequence is synthesized)
cccatctctacaaaaagtacaaaaatcagccgggcgtggttacttgggaggctgagttccttgggaggctgaggcggaaggattgcttgagcttaggaggctgaggctgcaatgacccat

SEQ ID NO: 647706 - DNA, 120 bp, Artificial Sequence
  ENSG00000182613_31 (sequence is synthesized)
cactgcactccagcctgggccacagagcagaagcctgtctcgaaaataaataagtaaataaataaataaacaaaaaataaaaagaaaacatgtgaaagcacaggagagtaaaagaagcaa

SEQ ID NO: 647707 - DNA, 120 bp, Artificial Sequence
  ENSG00000182613_32 (sequence is synthesized)
caggagagtaaaagaagcaagaatcttgccaggggacatgggagtttttgttacttgcttcacttttgtgtatgcctgacattttttataattaacagtttaaaatgctcaaggccagtt

SEQ ID NO: 647708 - DNA, 120 bp, Artificial Sequence
  ENSG00000182613_33 (sequence is synthesized)
ttttttttgccaactaccttaccaaatcctttcccatcaagttgtctgttcattttattgggtgattttggggcatagatgtgacaaatcttcattgcaatcagttaggtcaatgttttg

SEQ ID NO: 647709 - DNA, 120 bp, Artificial Sequence
  ENSG00000182613_34 (sequence is synthesized)
tcagttaggtcaatgttttgtgtgtgtgtgtgaatataaaaaattgcttgaagccaggcatggtggctcattcctataatcccagctgataatggggaggccaaggtgggaggatcactt

SEQ ID NO: 647710 - DNA, 120 bp, Artificial Sequence
  ENSG00000182613_35 (sequence is synthesized)
cgctgcagtgtcactgcaccccagccagggcaactcagagagatcctatctctacagattagaaatgttccatttcagctggacagggtttctcatgtctgtaatcccagcactttggga

SEQ ID NO: 647711 - DNA, 120 bp, Artificial Sequence
  ENSG00000182621_0 (sequence is synthesized)
actcgctctctccctctgtgtatagaggatgtgctgaatggtgcgctttgaggcggcggcggcggaggagcagaatccgccgcgactggcagcctcggctgaccggctcggcttctcttc

SEQ ID NO: 647712 - DNA, 120 bp, Artificial Sequence
  ENSG00000182621_1 (sequence is synthesized)
cttcgccttccgaggctcctcatccaccgcgggctccagacctcgcgtcccgcccggggcatggccgggcgctgcgcccccgcgcgctctgcctgctgagcggcgccggagggaggtgcg

SEQ ID NO: 647713 - DNA, 80 bp, Artificial Sequence
  ENSG00000182621_2 (sequence is synthesized)
ccgggaggccggggaggccggcggggagcagagtcgagcgcctccggagcagagaaaggagcccgcgccccgcgccccgc

SEQ ID NO: 647714 - DNA, 120 bp, Artificial Sequence
  ENSG00000182621_3 (sequence is synthesized)
gccgcccggagcccagatgagcccagatggccggggctcaacccggagtgcacgccttgcaactcaagcccgtgtgcgtgtccgacagcctcaagaagggcaccaaattcgtcaagtggg

SEQ ID NO: 647715 - DNA, 120 bp, Artificial Sequence
  ENSG00000182621_4 (sequence is synthesized)
atgatgactcaactattgttactccaattattttgaggactgaccctcagggatttttcttttactggacagatcaaaacaaggagacagagctactggatctcagccttgtcaaagatg

SEQ ID NO: 647716 - DNA, 120 bp, Artificial Sequence
  ENSG00000182621_5 (sequence is synthesized)
ccagatgtgggagacacgccaaagctcccaaggaccccaaattacgtgaacttttggatgtggggaacatcgggcgcctggagcagcgcatgatcacagtggtgtatgggcctgacctcg

SEQ ID NO: 647717 - DNA, 120 bp, Artificial Sequence
  ENSG00000182621_6 (sequence is synthesized)
tgaacatctcccatttgaatctcgtggctttccaagaagaagtggccaaggaatggacaaatgaggttttcagtttggcaacaaacctgctggcccaaaacatgtccagggatgcatttc

SEQ ID NO: 647718 - DNA, 120 bp, Artificial Sequence
  ENSG00000182621_7 (sequence is synthesized)
tggaaaaagcctatactaaacttaagctgcaagtcactccagaagggcgtattcctctcaaaaacatatatcgcttgttttcagcagatcggaagcgagttgaaactgctttagaggctt

SEQ ID NO: 647719 - DNA, 120 bp, Artificial Sequence
  ENSG00000182621_8 (sequence is synthesized)
gtagtcttccatcttcaaggaatgattcaatacctcaagaagatttcactccagaagtgtacagagttttcctcaacaacctttgccctcgacctgaaattgataacatcttttcagaat

SEQ ID NO: 647720 - DNA, 120 bp, Artificial Sequence
  ENSG00000182621_9 (sequence is synthesized)
ttggtgcaaaaagcaaaccatatcttaccgttgatcagatgatggattttatcaaccttaagcagcgagatcctcggcttaatgaaatactttatccacctctaaaacaagagcaagtcc

SEQ ID NO: 647721 - DNA, 120 bp, Artificial Sequence
  ENSG00000182621_10 (sequence is synthesized)
aagtattgattgagaagtatgaacccaacaacagcctcgccagaaaaggacaaatatcagtggatgggttcatgcgctatctgagtggagaagaaaacggagtcgtttcacctgagaaac

SEQ ID NO: 647722 - DNA, 120 bp, Artificial Sequence
  ENSG00000182621_11 (sequence is synthesized)
tggatttgaatgaagacatgtctcagcccctttctcactatttcattaattcctcgcacaacacctacctcacagctggccaactggctggaaactcctctgttgagatgtatcgccaag

SEQ ID NO: 647723 - DNA, 120 bp, Artificial Sequence
  ENSG00000182621_12 (sequence is synthesized)
tgctcctgtctggttgtcgctgtgtggagctggactgctggaagggacggactgcagaagaggaacctgtcatcacccatggcttcaccatgacaactgaaatatctttcaaggaagtga

SEQ ID NO: 647724 - DNA, 120 bp, Artificial Sequence
  ENSG00000182621_13 (sequence is synthesized)
tagaagcaattgcggagtgtgcatttaagacttcaccttttccaattctcctttcgtttgagaaccatgtggattccccaaagcagcaagccaagatggcggagtactgccgactgatct

SEQ ID NO: 647725 - DNA, 120 bp, Artificial Sequence
  ENSG00000182621_14 (sequence is synthesized)
ttggggatgcccttctcatggagcccctggaaaaatatccactggaatctggagttcctcttccaagccctatggatttaatgtataaaattttggtgaaaaataagaagaaatcacaca

SEQ ID NO: 647726 - DNA, 120 bp, Artificial Sequence
  ENSG00000182621_15 (sequence is synthesized)
agtcatcagaaggaagcggcaaaaagaagctctcagaacaagcctccaacacctacagtgactcctccagcatgttcgagccctcatccccaggagccggagaagctgatacggaaagtg

SEQ ID NO: 647727 - DNA, 120 bp, Artificial Sequence
  ENSG00000182621_16 (sequence is synthesized)
acgacgacgatgatgatgatgactgtaaaaaatcttcaatggatgaggggactgctggaagtgaggctatggccacagaagaaatgtctaatctggtgaactatattcagccagtcaagt

SEQ ID NO: 647728 - DNA, 120 bp, Artificial Sequence
  ENSG00000182621_17 (sequence is synthesized)
ttgagtcatttgaaatttcaaaaaaaagaaataaaagttttgaaatgtcttccttcgtggaaaccaaaggacttgaacaactcaccaagtctccagtggaatttgtagaatataacaaaa

SEQ ID NO: 647729 - DNA, 120 bp, Artificial Sequence
  ENSG00000182621_18 (sequence is synthesized)
tgcagcttagcaggatatatccaaaaggaacacgtgtggattcatccaactatatgcctcagctcttctggaatgcaggttgtcagatggtggcacttaatttccagacaatggacctgg

SEQ ID NO: 647730 - DNA, 120 bp, Artificial Sequence
  ENSG00000182621_19 (sequence is synthesized)
ctatgcaaataaatatggggatgtatgaatacaacgggaagagtggctacagattgaagccagagttcatgaggaggcctgacaagcattttgatccatttactgaaggcatcgtagatg

SEQ ID NO: 647731 - DNA, 120 bp, Artificial Sequence
  ENSG00000182621_20 (sequence is synthesized)
ggatagtggcaaacactttgtctgttaagattatttcaggtcagtttctttctgataagaaagttgggacttacgtggaagtagatatgtttggtttgcctgtggatacaaggaggaagg

SEQ ID NO: 647732 - DNA, 120 bp, Artificial Sequence
  ENSG00000182621_21 (sequence is synthesized)
catttaagaccaaaacatcccaaggaaatgctgtgaatcctgtctgggaagaagaacctattgtgttcaaaaaggtggttcttcctactctggcctgtttgagaatagcagtttatgaag

SEQ ID NO: 647733 - DNA, 120 bp, Artificial Sequence
  ENSG00000182621_22 (sequence is synthesized)
aaggaggtaaattcattggccaccgtatcttgccagtgcaagccattcggccaggctatcactatatctgtctaaggaatgaaaggaaccagcctctgacgctgcctgctgtctttgtct

SEQ ID NO: 647734 - DNA, 120 bp, Artificial Sequence
  ENSG00000182621_23 (sequence is synthesized)
acatagaagtgaaagactatgtgccagacacatatgcagatgtcatcgaagctttatcaaacccaatccgatatgtgaacctgatggaacagagagctaagcaattggctgctttgacac

SEQ ID NO: 647735 - DNA, 120 bp, Artificial Sequence
  ENSG00000182621_24 (sequence is synthesized)
tggaagatgaagaagaagtaaagaaagaggctgatcctggagaaacaccatcagaggctccaagtgaagcgagaacgactccagcagaaaatggggtgaatcacactacaaccctgacac

SEQ ID NO: 647736 - DNA, 120 bp, Artificial Sequence
  ENSG00000182621_25 (sequence is synthesized)
ccaagccaccctcccaggctctccacagccagccagctccaggttctgtaaaggcacctgccaaaacagaagatcttattcagagtgtcttaacagaagtggaagcacagaccatcgaag

SEQ ID NO: 647737 - DNA, 120 bp, Artificial Sequence
  ENSG00000182621_26 (sequence is synthesized)
aactaaagcaacagaaatcgtttgtgaaacttcaaaagaaacactacaaagaaatgaaagacctggttaagagacaccacaagaaaaccactgaccttatcaaagaacacactaccaagt

SEQ ID NO: 647738 - DNA, 120 bp, Artificial Sequence
  ENSG00000182621_27 (sequence is synthesized)
ataatgaaattcagaatgactacttgagaaggagagccgctttggaaaagtccgccaaaaaggacagtaagaaaaaatcggaacccagcagccctgatcatggttcatcaacgattgagc

SEQ ID NO: 647739 - DNA, 120 bp, Artificial Sequence
  ENSG00000182621_28 (sequence is synthesized)
aagacctcgctgctctggatgctgaaatgacccaaaagttaatagacttgaaggacaaacaacagcagcagctgcttaatcttcggcaagaacagtattatagtgaaaaataccagaagc

SEQ ID NO: 647740 - DNA, 120 bp, Artificial Sequence
  ENSG00000182621_29 (sequence is synthesized)
attaaactgcttattcaaaagttgacggatgtcgcagaagagtgtcagaacaatcagttaaagaagctcaaagaaatctgtgagaaagaaaagaaagaattaaagaagaaaatggataaa

SEQ ID NO: 647741 - DNA, 120 bp, Artificial Sequence
  ENSG00000182621_30 (sequence is synthesized)
aagaggcaggagaagataacagaagctaaatccaaagacaaaagtcagatggaagaggagaagacagagatgatccggtcatatatccaggaagtggtgcagtatatcaagaggctagaa

SEQ ID NO: 647742 - DNA, 120 bp, Artificial Sequence
  ENSG00000182621_31 (sequence is synthesized)
gaagcgcaaagtaaacggcaagaaaaactcgtagagaaacacaaggaaatacgtcagcagatcctggatgaaaagcccaagctgcaggtggagctggagcaagaataccaagacaaattc

SEQ ID NO: 647743 - DNA, 120 bp, Artificial Sequence
  ENSG00000182621_32 (sequence is synthesized)
aaaagactgcccctcgagattttggaattcgtgcaggaagccatgaaaggaaagatcagtgaagacagcaatcacggttctgcccctctctccctgtcctcagaccctggaaaagtgaac

SEQ ID NO: 647744 - DNA, 120 bp, Artificial Sequence
  ENSG00000182621_33 (sequence is synthesized)
cacaagactccctccagtgaggagctgggaggagacatcccaggaaaagaatttgatactcctctgtgaatgctcctgccaggccttcagaaattgcatggccactccagcgtcatcgga

SEQ ID NO: 647745 - DNA, 120 bp, Artificial Sequence
  ENSG00000182621_34 (sequence is synthesized)
ctctctcttattacaaagatcactgcccaggaccatcttcccgagaagcatcccttagcctaaaatccacaccaaagggagagttccagaggaatccatgaagaattcccatgcccaggc

SEQ ID NO: 647746 - DNA, 120 bp, Artificial Sequence
  ENSG00000182621_35 (sequence is synthesized)
tccatgtgtcatgtggaaacctccacaggtctgctagtgaagaatgcatgtatgtgagatttttgttttctttccaatagcaaattcaaagcaagcaacttgcaggctccatggaacttt

SEQ ID NO: 647747 - DNA, 120 bp, Artificial Sequence
  ENSG00000182621_36 (sequence is synthesized)
taatgaaggacagtgtcttctttgaagaaaatcaagctcgtgtttttattcgaagctctggtgtaaaatatttcaaagtcatagaaatagtttgagaaatgcatagcattatttaacact

SEQ ID NO: 647748 - DNA, 120 bp, Artificial Sequence
  ENSG00000182621_37 (sequence is synthesized)
attgaacagccgactttgagcattgtttcttctaactgcccctcaactaccattatcttcaagtcaacatgcatattacattttcatcctttgctttgcaagcactggtggcttgcagtt

SEQ ID NO: 647749 - DNA, 120 bp, Artificial Sequence
  ENSG00000182621_38 (sequence is synthesized)
tgctaatttatttatcatagagtcatcaatgtatttgttgctgacatggttttattagatactgtagtgattcaaataagttttctatttgaaaaaaaaaatcacttgattgtatccttg

SEQ ID NO: 647750 - DNA, 120 bp, Artificial Sequence
  ENSG00000182621_39 (sequence is synthesized)
cccagtgaagccatcctaagacttagcaatatggattgtacatttggctgcatgagcaagtcggccgcacacttccagacagtgtgctgtttgaattgactatttgcactcaaagtctgg

SEQ ID NO: 647751 - DNA, 120 bp, Artificial Sequence
  ENSG00000182621_40 (sequence is synthesized)
gtattcattggttattggcctgaaatgatcaaataactacaaatgatctgttgaataaaaatagttgagctgatatatgttaagcagatattcaatcagaatgaacaggttccggtggtt

SEQ ID NO: 647752 - DNA, 120 bp, Artificial Sequence
  ENSG00000182621_41 (sequence is synthesized)
attttgccgtttgacattttttatggttcatttatttttaatatagagaggaagattgaatatttatctagagaatacaaagacccacatgtaaatgataggtattatctccatgtatat

SEQ ID NO: 647753 - DNA, 120 bp, Artificial Sequence
  ENSG00000182621_42 (sequence is synthesized)
atgtacccacttagtcatgtaagtgcatatacacatacacacacatgagtgtagacatgtgtttattaattgacaatgacccaaatctcttccacaagacttaaaaccaaattcagggac

SEQ ID NO: 647754 - DNA, 120 bp, Artificial Sequence
  ENSG00000182621_43 (sequence is synthesized)
aaatggatagagaagaaaagggtcaaacatcgagattacatggatgttaaattatatggagacgctaagaaataattgatggagccattgatgcaaaccgaagtagatttagaacttata

SEQ ID NO: 647755 - DNA, 120 bp, Artificial Sequence
  ENSG00000182621_44 (sequence is synthesized)
tgaatttgatttatattttgcaagatcaaaaattagatgttaagtatcagattttaagcttgttttaatggtcaaaaaattaggacagaaataatatggacatttattagtatcttccat

SEQ ID NO: 647756 - DNA, 120 bp, Artificial Sequence
  ENSG00000182621_45 (sequence is synthesized)
aaaaaacttccattatatatttactaagtatatttaattcacttaactctgtctttataagttcctattttagatggaataagagaaacaaattatatcaaggtaaaactgatcaaaagc

SEQ ID NO: 647757 - DNA, 120 bp, Artificial Sequence
  ENSG00000182621_46 (sequence is synthesized)
aagagaaacaaattatatcaaggtaaaactgatcaaaagcataattgaaagttctgaaaaaagaaaaataataatatgtagaaaaatgtaacttagagagtaacacatgaacattgaagt

SEQ ID NO: 647758 - DNA, 120 bp, Artificial Sequence
  ENSG00000182621_47 (sequence is synthesized)
taaaacccagaagccagatgctcacagttttattttactttaaaataaacctgtctgactgtagctttgtgaaatatcttaaaacgcaaaaaccaattgtgtcctgaaaattgtttcaag

SEQ ID NO: 647759 - DNA, 120 bp, Artificial Sequence
  ENSG00000182621_48 (sequence is synthesized)
atttttatgaaaattattttatttaactttaagcaataactagagattacaattaaattttaatcaaaatgaaggcttagttcaaacataaggaaacagtgtttgattaaaaaaaacaca

SEQ ID NO: 647760 - DNA, 120 bp, Artificial Sequence
  ENSG00000182621_49 (sequence is synthesized)
aaaacacatctagtaagacgtaaggggaaaatcacatcctctttggagatgattatattttgatctgaagggtttggggtgttcattagacacttaataaaacttaacttccaatgaaaa

SEQ ID NO: 647761 - DNA, 120 bp, Artificial Sequence
  ENSG00000182621_50 (sequence is synthesized)
agaaatcttttgtaaatcattctacttttgcactttgaaagaaaggcgttaatcataaagaagcaagaatggtcaaaatcgaatgctgcatttttataaacaaaattacagactgtctga

SEQ ID NO: 647762 - DNA, 120 bp, Artificial Sequence
  ENSG00000182621_51 (sequence is synthesized)
aattgaagaagaatgaactaataatagcattcataaccaaacacaatgatgattattgcagaacattgtatcacattttagtccagagatagaataaagttgaataaccttgacttacac

SEQ ID NO: 647763 - DNA, 120 bp, Artificial Sequence
  ENSG00000182621_52 (sequence is synthesized)
aaaactgttttggtagttggatttcattatcttagtgaatttagtcattttacaatatgtttgtatttggccatttactgtaatcacatttttatatctgtacaatgacactttttgcag

SEQ ID NO: 647764 - DNA, 120 bp, Artificial Sequence
  ENSG00000182621_53 (sequence is synthesized)
ttgtggggtagtgtgtaacactgtccatcttgcatcattgaaactactacaatgatactatcatttaataatattaatattacttgaaatagactaagataaagaaaaggggtctgtatg

SEQ ID NO: 647765 - DNA, 120 bp, Artificial Sequence
  ENSG00000182621_54 (sequence is synthesized)
atgtgcagttttgtgcctttatgtatttgccttgttctttgtcgaatgtgtgaaattccgtactgtggtttttcctataatagaaagtagagctgtgtattaaattagactgtgtctctc

SEQ ID NO: 647766 - DNA, 120 bp, Artificial Sequence
  ENSG00000182621_55 (sequence is synthesized)
tgatacctttacactactgagaatagcatggttttggccatgtaaaccaattttcaaagttctaatgacatagccatgtgtttttggttttttatatttcattttaaaatttgagtatca

SEQ ID NO: 647767 - DNA, 120 bp, Artificial Sequence
  ENSG00000182621_56 (sequence is synthesized)
ccatacattaattaatactcctgtagtagataagctgtcattaagtaattcccaaaaaaagggccatttgcttgcattactttgaatttaatgttgcgcttgtgcactgtgttaatattg

SEQ ID NO: 647768 - DNA, 120 bp, Artificial Sequence
  ENSG00000182621_57 (sequence is synthesized)
tttgtgatggattggacgttgtgactcttgccttttaagaagaaaaaaaagataggacaaagtatttgaagctcttaaaatgtacatattttggttcttctatctcaaattatttaaaat

SEQ ID NO: 647769 - DNA, 120 bp, Artificial Sequence
  ENSG00000182621_58 (sequence is synthesized)
gcataattcacatttttgtaataattctatgcaattttgtggcatgatgtttcttccacttgtaattttatgtgctttcatcacaaatccaaaggaaagaataaaaatttcttaacacaa

SEQ ID NO: 647770 - DNA, 120 bp, Artificial Sequence
  ENSG00000182621_59 (sequence is synthesized)
cctcaagctctcaagtggtgaccaccgtccttccggccaggtaggactggatgggaggggtcgcttttgagagaagggtggtgtgtagccatccagttttcaggcatcacggacttgctc

SEQ ID NO: 647771 - DNA, 120 bp, Artificial Sequence
  ENSG00000182621_60 (sequence is synthesized)
gtttgtccttcatcctccctttctctacattcccatcttttttttctgctaaagttcccagccacacccatgatcatttcctcatcctttctgccttcctctggtattaatttctccatc

SEQ ID NO: 647772 - DNA, 120 bp, Artificial Sequence
  ENSG00000182621_61 (sequence is synthesized)
attgtgctctctcttcctgacataaatctcattcttccatattgtcttcttcctctttctccattttgtttctctattggcaaatttggcttcctttttaatctggattttctctcttgc

SEQ ID NO: 647773 - DNA, 120 bp, Artificial Sequence
  ENSG00000182621_62 (sequence is synthesized)
gcaaagttgggctgggagccgcggggggaaggaaggacccagcgagcgagggtggcggggaaggggggcgggggggaggaggagggaggagggaaaagagcggttagggggggcgccggg

SEQ ID NO: 647774 - DNA, 120 bp, Artificial Sequence
  ENSG00000182621_63 (sequence is synthesized)
ttacaaatttcacttgataatttacatggaaatatgaaagggttctttctccaagtgtcttgcaattgacttggaatcagcgagttaaacaaaagggactgagcctctaactctgggaat

SEQ ID NO: 647775 - DNA, 120 bp, Artificial Sequence
  ENSG00000182621_64 (sequence is synthesized)
ttcaaggctccagttacagcaaatgacatgctgtcccctccacctatgtctatgcaggtctgccttgggaaccacctcacacatcagtgccttcgctgtccatctgtgtatgttattcaa

SEQ ID NO: 647776 - DNA, 120 bp, Artificial Sequence
  ENSG00000182621_65 (sequence is synthesized)
attcacataagttaagataaagatccaggatgataaaaaccaatcctgatgggtgggattagagaattacttctttctgtagttaataacacaaagcaatcctgttcaggttctttggat

SEQ ID NO: 647777 - DNA, 120 bp, Artificial Sequence
  ENSG00000182621_66 (sequence is synthesized)
tgaccaccgtccttccggccagtcatgacaagaaataattggcttgtgagaatcaacattgaagctggaaaaatgatggcatccgaacaagtagacacagccctagtcaaggcaataaac

SEQ ID NO: 647778 - DNA, 120 bp, Artificial Sequence
  ENSG00000182621_67 (sequence is synthesized)
tacactaaagacagaggagaaagactcaaagttgttctaacatgtgagtacctaggggtgctgcatgccgttgtgtggtttgtgtactgcatagttgtactcagccaaggaagtggatga

SEQ ID NO: 647779 - DNA, 120 bp, Artificial Sequence
  ENSG00000182621_68 (sequence is synthesized)
ggccacagctttaacatgggctgctgtctgcccagaaggataatcttttccttattttatatctcatttcaggggttctccaacttctgaaatccatccagaaactccctgtatttgggt

SEQ ID NO: 647780 - DNA, 120 bp, Artificial Sequence
  ENSG00000182621_69 (sequence is synthesized)
aacagtattataactttttgcaccagggcttttttgtttgtttgttaatattaattgatttttcttatgttctttatgaaagaataactcatccattaatgaaaccaaatgtgaacttag

SEQ ID NO: 647781 - DNA, 120 bp, Artificial Sequence
  ENSG00000182621_70 (sequence is synthesized)
tgccttctgtgtagaaaaggctaggaatacatattgtgggagattcattacatcactggccttaatactacaccttctcatgttcccccttggctgtgtaactttctagtgtccatatgc

SEQ ID NO: 647782 - DNA, 120 bp, Artificial Sequence
  ENSG00000182621_71 (sequence is synthesized)
tctctcttggggtggccagtgtgacttgctttggccaatgggatattagcaaccatgacataacccgaggcttataaagttgcctgctcattgggacttgtttcactgttgcatcccagt

SEQ ID NO: 647783 - DNA, 120 bp, Artificial Sequence
  ENSG00000182621_72 (sequence is synthesized)
tattcacatcactccagctgacagccaaccaacaaacagccagacacgtgagcccaaccaagatcagaagaactgtcccactgagcatagtctaaattgctaacatgcaaatgcatgaaa

SEQ ID NO: 647784 - DNA, 120 bp, Artificial Sequence
  ENSG00000182621_73 (sequence is synthesized)
cagaccacagcaaggtaatcttacagcccaggactcagctgctgcaatctctgtgaaaggttctgctcatgaaacagagacaaccatgtgtggtgcctgcattcttggcctgcggggagt

SEQ ID NO: 647785 - DNA, 120 bp, Artificial Sequence
  ENSG00000182621_74 (sequence is synthesized)
ggaaaggagacaaagagtaaaacacggtgggaaagaagaaaaagaggttaagaaaagcaaatgtgcctactccaggtaattttgacttagggaccctgattaacttacacactaattaaa

SEQ ID NO: 647786 - DNA, 120 bp, Artificial Sequence
  ENSG00000182621_75 (sequence is synthesized)
ccatttccagattttgtgcagtctgaaagcagcccattttccccaacaccaggtcgctcaagatgaccacaggaaggttgtcatcttcatgtctaaaagccagttgacactcaagggtgt

SEQ ID NO: 647787 - DNA, 120 bp, Artificial Sequence
  ENSG00000182621_76 (sequence is synthesized)
catttcacttcagtgaaatgagaagcttcacagatgtgtagactctgaaaaatctaactggaaaacaatacagggaaatagcaatactaggcatcaaagcagcaaaaaaactactcaatt

SEQ ID NO: 647788 - DNA, 120 bp, Artificial Sequence
  ENSG00000182621_77 (sequence is synthesized)
atctgatatggggattatcaatggaataaatgtggggtttgttgtttgttgttgggattgttgtgggttttgtttcattttttagggtctcacttttctccaccaattagatctgtgctg

SEQ ID NO: 647789 - DNA, 120 bp, Artificial Sequence
  ENSG00000182621_78 (sequence is synthesized)
tgagccacacaggttttgagtacatgttttgggactttatatcggtcagactttgccatggtaacactgtgtaacgagcagccccaaaaatctcagtggtggtcaaaagcaaacctttat

SEQ ID NO: 647790 - DNA, 120 bp, Artificial Sequence
  ENSG00000182621_79 (sequence is synthesized)
ttctcattcatgggttttcagtttgttcaggctaaaagtaaaatacacagattcttcacctgtctttcattccatgctgaaggagcaattgactgcctgggacatacttttctcataaca

SEQ ID NO: 647791 - DNA, 120 bp, Artificial Sequence
  ENSG00000182621_80 (sequence is synthesized)
gaggcaagggtgaaaaacaccaagtcatcttgattatgcaatcccatttttaatgtaaacaatgtcatgtctgcttctatttcattgagcaaagcaagtcatataggcaagcccaacatc

SEQ ID NO: 647792 - DNA, 120 bp, Artificial Sequence
  ENSG00000182621_81 (sequence is synthesized)
agtggggtgataaagcacactctccaatggaaggaggaggggagcatgatcatttgctgaacagtaatgcaagatagcacaagacttgtctggggtgagagagagatcaaagctgtggat

SEQ ID NO: 647793 - DNA, 120 bp, Artificial Sequence
  ENSG00000182621_82 (sequence is synthesized)
cccacccagtcttcaaccaaagcaatgtggctttgacctgttttctgtcttggacttgaataatactttatttgaaagaagtgttaaattgtttattaaaaaaaaagacaagtttgaaaa

SEQ ID NO: 647794 - DNA, 120 bp, Artificial Sequence
  ENSG00000182621_83 (sequence is synthesized)
ggtggatttctgcatgatgaaattatgagactcacccgtaatacgctggaaaaactgatggccttacctcttacccatgtggtgcccatccaaagcaagatgctgtcataagttttagta

SEQ ID NO: 647795 - DNA, 120 bp, Artificial Sequence
  ENSG00000182621_84 (sequence is synthesized)
gcactcttcagatgactcagacaaggaaagcatgatccaacacctctaatagcccagtaatacatatgatatttgaaaggcccttcacttaccatgttaaccattcagttaaatcctcca

SEQ ID NO: 647796 - DNA, 120 bp, Artificial Sequence
  ENSG00000182621_85 (sequence is synthesized)
tcaaccatcagatccaaactttcaatgcccaggacggaaatcttttcaaccagcacatcaaatggcttttcctccttctatagaacttataaaaatgatcttttcagttaccattttact

SEQ ID NO: 647797 - DNA, 120 bp, Artificial Sequence
  ENSG00000182621_86 (sequence is synthesized)
ggtccatctgtattctattttcagtgcacttctgttcattttggaattaggaagcgtacaaattctttttatatttaattttaacattcaagttaggcatattttgaagaaaaagatatt

SEQ ID NO: 647798 - DNA, 120 bp, Artificial Sequence
  ENSG00000182621_87 (sequence is synthesized)
gcaatgattgcatttgtccactagagggcaggaacttacttctgtggttcattctgcactttttttttcactacccacctaagaaaaatctagtcaatgcgactgaagtactaccacctt

SEQ ID NO: 647799 - DNA, 120 bp, Artificial Sequence
  ENSG00000182621_88 (sequence is synthesized)
ctgaatcttctttccttgataattgcttaattggaatttaaatctttgaatcaaattaagaaactagacattcctagtttctgtttctatcacaatttccagtaccagatttttattcac

SEQ ID NO: 647800 - DNA, 120 bp, Artificial Sequence
  ENSG00000182621_89 (sequence is synthesized)
tcataaaaacaaataatgggggagaaataaaatattgacttctgctgattctcttgagtgggataaggaatttggtttttgcactttggcttacagatccatatagtggaattattcgat

SEQ ID NO: 647801 - DNA, 120 bp, Artificial Sequence
  ENSG00000182621_90 (sequence is synthesized)
ctttcaattataatatcagaaagttcaattttagtattgtactcctataggtgctttttttcatttttcagccattgttttgcttaacttatttaactttgtatgtacggatgccttttt

SEQ ID NO: 647802 - DNA, 120 bp, Artificial Sequence
  ENSG00000182621_91 (sequence is synthesized)
agtgcaacagggtagttctttgagaattatgtttacatgtagacatctctatctcagcagcaagttaagttattattacggttccttaagctgctgttatcatagagtggactgctgtaa

SEQ ID NO: 647803 - DNA, 120 bp, Artificial Sequence
  ENSG00000182621_92 (sequence is synthesized)
tagaaaaatttagtctttagcatatagtccatattcaaatacttgttcacagtttcctgtgtgacctctggcaagttacatgacttttaataaagtttttagtaaagacttttaataaca

SEQ ID NO: 647804 - DNA, 120 bp, Artificial Sequence
  ENSG00000182621_93 (sequence is synthesized)
attcaaaagtaagaacaagaagacctgattcatcatgatttaggaatggcttgtaggatagactggggacataaccacacactttttgctttcaaaatgtataactgagcagttagcagt

SEQ ID NO: 647805 - DNA, 120 bp, Artificial Sequence
  ENSG00000182621_94 (sequence is synthesized)
tagctgtcttttgtttccaacctaattcaattgagaagtgatataagaggaaagaaatatcccaactgcagagaagtcttcagtcaagtctcaagataatttttttaagtgatgtcaatg

SEQ ID NO: 647806 - DNA, 120 bp, Artificial Sequence
  ENSG00000182621_95 (sequence is synthesized)
cttaatccccaatatgacagttttgagaggtagggcctttaagaggaaattaagagcttccatgattaatgggttaatgaattaatggattatcatcggagaggaactggtggctttata

SEQ ID NO: 647807 - DNA, 120 bp, Artificial Sequence
  ENSG00000182621_96 (sequence is synthesized)
agaagagaaaaacagacctgagctagcatgttcttccccctcaccatctgattccctgtgccacctctgccaaagtggagagtccccactagcaagaagacttttgccagatgtgccctc

SEQ ID NO: 647808 - DNA, 120 bp, Artificial Sequence
  ENSG00000182621_97 (sequence is synthesized)
tccaccttggacttcccagcctttgtaactgtaggaaatacattttgattcctatatattatacagtttcaagtattctgctatatgcatcagaaaacagagtaagactgaaaattggta

SEQ ID NO: 647809 - DNA, 120 bp, Artificial Sequence
  ENSG00000182621_98 (sequence is synthesized)
ccaagaggtggggtttttgctgataacaaatatctgaaaatgtagaagcagctttggaactgggtaatgaacagaggctgaaaaaagtttatagagctagctagaaacagccaagacttg

SEQ ID NO: 647810 - DNA, 70 bp, Artificial Sequence
  ENSG00000182621_99 (sequence is synthesized)
caccctgcaggtggagctggagcaagaataccaagacaaattcaaaagactgcccctcgagattttggaa

SEQ ID NO: 647811 - DNA, 120 bp, Artificial Sequence
  ENSG00000182621_100 (sequence is synthesized)
gcaagaaaaactcgtagagaaacacaaggaaatacgtcagcagatcctggatgaaaagcccaagatccagaccgtgaactcagtcatgagatggctgccctagctccacacatcataacc

SEQ ID NO: 647812 - DNA, 120 bp, Artificial Sequence
  ENSG00000182621_101 (sequence is synthesized)
tcttccatcttcaagggtggaaaaagctaatgaggctgcgaaaagtgagcagagctgtggaaaggctcccccaaaacattttcaccttcattttataaagcaaaataaaatgcttgaacc

SEQ ID NO: 647813 - DNA, 120 bp, Artificial Sequence
  ENSG00000182621_102 (sequence is synthesized)
tgcttgctattgcttttttgttagatgctttggaataggaaaaatataacaattaaggtcctgtccccgacttcaacaaatatttcttgagctcttactatgtgcccataggcattgaga

SEQ ID NO: 647814 - DNA, 120 bp, Artificial Sequence
  ENSG00000182621_103 (sequence is synthesized)
atatggtggtgaagaaaatgaaactcaaggtttcaaggacaatagagtcttctggggaaactagccaataagcatgccaacaaatgcgtctgtaaactgggggaagtgctataaaaagaa

SEQ ID NO: 647815 - DNA, 120 bp, Artificial Sequence
  ENSG00000182621_104 (sequence is synthesized)
agactggagaactactattgagaagaagggaagctcattccagaaaaagaaaacaatgctcgcaaatccctgaggctggaaataatttccctactggatttaagcaactgagaaaagacc

SEQ ID NO: 647816 - DNA, 120 bp, Artificial Sequence
  ENSG00000182621_105 (sequence is synthesized)
ttctggataacctctggtaaaatataataatcaaaatatttaacttatgaatctagctaagggaaagaaggaatagaaaattaaatgtatgaaccaattccccgtaaattgtaattttct

SEQ ID NO: 647817 - DNA, 120 bp, Artificial Sequence
  ENSG00000182621_106 (sequence is synthesized)
aaacaactggattctgagcagtcaataaatacacattgagtaatctactatgtttattatatgttcaaactttcagaccaatgtcaattgcaggcaaatttaaaaggaaaatgagattca

SEQ ID NO: 647818 - DNA, 120 bp, Artificial Sequence
  ENSG00000182621_107 (sequence is synthesized)
ttcaaataacatgagttatgtttaaattagaaaaaattatctctaacaaattaaatgtaatgataattatctgaagttggagaaaactttaaaaaacctctatgctaaaactttgaaaaa

SEQ ID NO: 647819 - DNA, 120 bp, Artificial Sequence
  ENSG00000182621_108 (sequence is synthesized)
tattcatagtaaagtataatttacttggatgacttatagaattagaatgctttttaaaaatctaaaaaccaaagactgtttcagagctaggaaataaatgtttctgtgaactgactatga

SEQ ID NO: 647820 - DNA, 120 bp, Artificial Sequence
  ENSG00000182621_109 (sequence is synthesized)
tgtatcaaaactctgttttaaatctctgtgataatttcattcctacataacaatgactctagaaaatatccactaattagcaaaaaattttggccatattcacaagaggtattttaaaca

SEQ ID NO: 647821 - DNA, 120 bp, Artificial Sequence
  ENSG00000182621_110 (sequence is synthesized)
agccacggaagaaaagggttatataaatcatagttggttctgcgtaaatgggagcatattttgtagccaagtcatttaagctagatttaattgtgctctgtaaatagatatattaccaga

SEQ ID NO: 647822 - DNA, 120 bp, Artificial Sequence
  ENSG00000182621_111 (sequence is synthesized)
aacacagtggatgtcctgttgagatttctttttaaaacatgatattactgcacattgttggggataaataaggcacttgaacttgtatcctggctgacgtgatccactagaataacatat

SEQ ID NO: 647823 - DNA, 120 bp, Artificial Sequence
  ENSG00000182621_112 (sequence is synthesized)
tcctttagaagatgctactctttagaaatcacagttgctagcctgaagttaccctaattgttaaaaggtagtactgtatccaaagagagagacaaagcaattactgtccttctgttaaca

SEQ ID NO: 647824 - DNA, 120 bp, Artificial Sequence
  ENSG00000182621_113 (sequence is synthesized)
acccaagcatattttccagtgagacccttgaaaactgttccgtgttcaaaaaattaccactttacccacaaactttctgagaactgaaaatagtttatttgcaccaaattcccttgattt

SEQ ID NO: 647825 - DNA, 120 bp, Artificial Sequence
  ENSG00000182621_114 (sequence is synthesized)
aaggcttattaacttgaaaagagctcagtgacatctggaattgtataatagtcttgccacagcactggcatacggagttgcattttaacgaagaagatcaggaataaacccatgtatttg

SEQ ID NO: 647826 - DNA, 120 bp, Artificial Sequence
  ENSG00000182621_115 (sequence is synthesized)
tttgtttcaaataataaagtttactgtagttggtgggcacacatgtaatacaaagagaaattaattattttaaatttgaagaattgtataaattttactaaatactatgaataaaatgta

SEQ ID NO: 647827 - DNA, 120 bp, Artificial Sequence
  ENSG00000182621_116 (sequence is synthesized)
ataacttctgtgtgtaacttattagtatgttgcctttcttctgtgccttacatcctgaatataaatcagaagcaatcacttttgtagttgtgattcttaatatgactaatatcaaaattc

SEQ ID NO: 647828 - DNA, 120 bp, Artificial Sequence
  ENSG00000182621_117 (sequence is synthesized)
tactttaaaaccaaattaagtattccgttcattatgagtgatttacttgtagttatttcatgtattccatggctaattcaatgttttatttatagtttcagaataaaaatattgacagta

SEQ ID NO: 647829 - DNA, 120 bp, Artificial Sequence
  ENSG00000182621_118 (sequence is synthesized)
tggatttgaaggttgcccatgaagattgttggttccatgtcaaactaaagcatttcttgagggtttttcttcatggcttaaaaacgttgtgccttaaagctgtgattttattaataaaat

SEQ ID NO: 647830 - DNA, 120 bp, Artificial Sequence
  ENSG00000182621_119 (sequence is synthesized)
gaggcattcggaggctaaacatccacaaggttagttccctgaacccctataaaccttgctatttatatctcttcctcaactctgaggccctcaccctacatcggctgcagtacagattca

SEQ ID NO: 647831 - DNA, 120 bp, Artificial Sequence
  ENSG00000182621_120 (sequence is synthesized)
gcctttagcgacggaattatgtactgaaacactcatttctgtgccgctgcagtggttagctttgatttttatagagatgcacatgagaaaacagtctgagcctggagagtgacttgtggg

SEQ ID NO: 647832 - DNA, 120 bp, Artificial Sequence
  ENSG00000182621_121 (sequence is synthesized)
agacacgccaaagctcccaaggtaggaggttgagtgttgtgcatgcaccagatgctgccttgattgtttggctgtgtcacaatatcaattaattgccccaattaaaagtttctatgttat

SEQ ID NO: 647833 - DNA, 120 bp, Artificial Sequence
  ENSG00000182621_122 (sequence is synthesized)
agatgttgtaaaacacaatagccagtatgccctaaacactttcacttttattaaaagacggaaacaatgaacaaatatgtgggctcttggacagaggggcttgctttatgtcctctaatt

SEQ ID NO: 647834 - DNA, 120 bp, Artificial Sequence
  ENSG00000182621_123 (sequence is synthesized)
aaaaagacaacgacaacaatgcccaagttactgggtaattctaaatgattaaaaagtacttgaaattatttgaaaaaatctttgaacctcgtaaacatatgggaactaaccgttagacat

SEQ ID NO: 647835 - DNA, 120 bp, Artificial Sequence
  ENSG00000182621_124 (sequence is synthesized)
gatgaatagaactcccatatagctgaaatgctctgcaattgaaatgattccatccacaatgccaaaaggtgtatagtcttaattctgcaaatgttactagtaaagatcagcatactttgg

SEQ ID NO: 647836 - DNA, 120 bp, Artificial Sequence
  ENSG00000182621_125 (sequence is synthesized)
gatgaattgtgtgcagtgtcatttgttttggtttgaaaaacttactgaagaaatattcaaagaagtgtttgcagtctgtttattttttgaagataatttttaaatattggatgaagaaca

SEQ ID NO: 647837 - DNA, 120 bp, Artificial Sequence
  ENSG00000182621_126 (sequence is synthesized)
taattttttaagcttagatgatctggtaggatatagtagcaggatatgttgtcttgccatcaaagttaaaagctattcttcattttatttaaaatttagtactttacatacttcatttct

SEQ ID NO: 647838 - DNA, 120 bp, Artificial Sequence
  ENSG00000182621_127 (sequence is synthesized)
atccaggaagtggtgcagtatatcaagaggctagaagaagcgcaaagtaaacggcaagaaaaactcgtagagaaacacaaggaaatacgtcagcagatcctggatgaaaagcccaaggta

SEQ ID NO: 647839 - DNA, 120 bp, Artificial Sequence
  ENSG00000182621_128 (sequence is synthesized)
cctgcaaaagactgaatttttgtcatatttagcatgtgttaaaatttcacctaaaaataattcagctgccaagtataagtgcaattaaaatacttctaaataatggcatcaacttaagaa

SEQ ID NO: 647840 - DNA, 120 bp, Artificial Sequence
  ENSG00000182621_129 (sequence is synthesized)
gacatgggctgttctgagaccccacagccatgaatcgcctaatcattctgacagatttctgcagatgctgtgctcaggtcactgagtttcccagttgtcagtggtgaactggagcggagg

SEQ ID NO: 647841 - DNA, 120 bp, Artificial Sequence
  ENSG00000182621_130 (sequence is synthesized)
tcttcagacacactgttcccttcaggaaacaagggacaaaagggctgccctgaggagacttgggaaagtgacatttcctcaggctcgaggacatcccgaggttctgctcatgaaacagag

SEQ ID NO: 647842 - DNA, 120 bp, Artificial Sequence
  ENSG00000182621_131 (sequence is synthesized)
ccgtgggcgtaggaccctccgagccaggcttgtcccatggcctctcatagaaatcatggaccatggaagaacaagaatatggtagacatgaaggaaatgtagagggactcaactattgtt

SEQ ID NO: 647843 - DNA, 120 bp, Artificial Sequence
  ENSG00000182621_132 (sequence is synthesized)
tacatgcttgttcccattctgctatgaactcacattgccaagtgtccaaaaaccattcttacataattgggggagagaaaattgccagacttcactgaaaaaataaataaaagcaaattt

SEQ ID NO: 647844 - DNA, 120 bp, Artificial Sequence
  ENSG00000182621_133 (sequence is synthesized)
caatgaagggaatatcaatgcataaaaaaagtgaattttgaaaatcgagacatgttcttcaattattctgtaaatggatctttatttctacaggctttgcattatttttcaaacaaaaat

SEQ ID NO: 647845 - DNA, 120 bp, Artificial Sequence
  ENSG00000182621_134 (sequence is synthesized)
ttttatgctttttaagataatacatatttattttgaaaataatggaaaattcagtaagtattttaaaaacaaactgccaggaatgctaccaactcagagattccacagtgttgactttta

SEQ ID NO: 647846 - DNA, 120 bp, Artificial Sequence
  ENSG00000182621_135 (sequence is synthesized)
gctttgtaatctatgtcttttttgtctacatataaatgctttttttatgtaactactcatttaaaataaatacatatatattcatatatacatatataaacacacactcacctaagtgcc

SEQ ID NO: 647847 - DNA, 120 bp, Artificial Sequence
  ENSG00000182621_136 (sequence is synthesized)
atagagagacatgaatttcaatagctgcatactaagcatatttcacaattcgctaaaaacttatttctattccctaaatttcttttggaaaatattttaaaaacagaattactaacgtta

SEQ ID NO: 647848 - DNA, 120 bp, Artificial Sequence
  ENSG00000182621_137 (sequence is synthesized)
aaagatgtgaacagtttaagtacctttatgaatattgccaaattgtctgtaaaaaatgttgtgctacattactccgctgtcagcaatgtttaatatgacgtggcctctcatttgcgatct

SEQ ID NO: 647849 - DNA, 120 bp, Artificial Sequence
  ENSG00000182628_0 (sequence is synthesized)
ctgcggaatgtcaactattcaacatggaggcggaggtcgataagctggaactgatgttccagaaagctgagtctgatctggattacattcaatacaggctggaatatgaaatcaagacta

SEQ ID NO: 647850 - DNA, 120 bp, Artificial Sequence
  ENSG00000182628_1 (sequence is synthesized)
atcatcctgattcagcaagtgagaaaaatccagttacactcttaaaggaattgtcagtgataaagtctcgatatcaaactttgtatgcccgctttaaaccagttgctgttgagcagaaag

SEQ ID NO: 647851 - DNA, 120 bp, Artificial Sequence
  ENSG00000182628_2 (sequence is synthesized)
agagtaagagccgcatttgtgctactgtgaaaaagactatgaatatgatacaaaaactacagaagcaaacagacctggagctgtcaccactgactaaagaagagaaaactgcggcagagc

SEQ ID NO: 647852 - DNA, 120 bp, Artificial Sequence
  ENSG00000182628_3 (sequence is synthesized)
aattcaaatttcacatgccagatttatgaagaaatggacttggaaaggaaattctaacagagaagagcttaattccggagaaatttaggaagatgtcttgttaacccttgatgtctagag

SEQ ID NO: 647853 - DNA, 120 bp, Artificial Sequence
  ENSG00000182628_4 (sequence is synthesized)
attgggggctggtgaagggggtttggcttcaatgactggataatgatatctttcatgagagagattataagaagaagggcagataatatatgaataaagttcagccaaaaggatcaaatg

SEQ ID NO: 647854 - DNA, 120 bp, Artificial Sequence
  ENSG00000182628_5 (sequence is synthesized)
agaataaaacgatttaaatatatgtacacacgcatgcacacacacacttagtcttgtaatttcaggccagaaattctcaacactattttgcatctgttttctttttctaagtcatgataa

SEQ ID NO: 647855 - DNA, 120 bp, Artificial Sequence
  ENSG00000182628_6 (sequence is synthesized)
tatagatgttctggtctatcataaaagaatgtttatgtacatttcagtcattcggtatgtggctttgtaaattaaagtataggcaaaacatttgtgttatacatgatatataatttcatt

SEQ ID NO: 647856 - DNA, 120 bp, Artificial Sequence
  ENSG00000182628_7 (sequence is synthesized)
ttgtaaatgttgattgcacatgtggtcacattattgttgagactgcttttatgtgacctgtagtctcccacagaacctaaagtaataagctggcttttctgtgatagccacgtttgcgta

SEQ ID NO: 647857 - DNA, 120 bp, Artificial Sequence
  ENSG00000182628_8 (sequence is synthesized)
tttctttccctatttcccttgcctgctaatgttgaacagcatgaacttgctttctgatgctgttttagactgtccctgttgtatctcaataatatctttgttttccttcagcctttatta

SEQ ID NO: 647858 - DNA, 120 bp, Artificial Sequence
  ENSG00000182628_9 (sequence is synthesized)
ctataattgttcattctacatgaaagctaggaaactgaaattagaagagcacttatctgctacttgccagttttgcgtgagtgtgttatatgtatgtgtcaatttccctttaaaataact

SEQ ID NO: 647859 - DNA, 120 bp, Artificial Sequence
  ENSG00000182628_10 (sequence is synthesized)
atttattttaaaataactattggcaataaggaaactgttcaaagtagaggcagatcttgatagaaagatgttaatcacagggttgtttataatagcaatatacatacacatttggctagt

SEQ ID NO: 647860 - DNA, 120 bp, Artificial Sequence
  ENSG00000182628_11 (sequence is synthesized)
caagttgccaataaattattactgttaatgttctgggaaatgctgaaactatgctaagtgggggagagggaaagcaggtattgcagttttgtagtgaagattgggctttggagtcatatc

SEQ ID NO: 647861 - DNA, 120 bp, Artificial Sequence
  ENSG00000182628_12 (sequence is synthesized)
tgagatgtaagtagcagcttttaaattctagctatgaccctgtgcagatcacttaacttttgagtgtcaggatgtttggaaggacaagacaggaaagtgttttaatacagggttcagtat

SEQ ID NO: 647862 - DNA, 120 bp, Artificial Sequence
  ENSG00000182628_13 (sequence is synthesized)
ttagtaagccttcaataagtgatattacatacatgtaataaaaactaagcattgaaaggactaggaaaaatgcatcaaatgttagttctgcaggttatagaattatacttttatgtaatt

SEQ ID NO: 647863 - DNA, 120 bp, Artificial Sequence
  ENSG00000182628_14 (sequence is synthesized)
ttaaaatttcagttatgaacatgtttgtccattaacaaacttataatagctgaaaaacagggttgtgagaacagcttcagttaaaattgtcctgtctagtttgaatatttcaagaacaga

SEQ ID NO: 647864 - DNA, 120 bp, Artificial Sequence
  ENSG00000182628_15 (sequence is synthesized)
acaggcatgagctaccgtgcctggcccccttttttttaattacagagaaataagttacaccttagtatcagatattaattttcttcagtgttcaggcaattagtatttagaaagctcttg

SEQ ID NO: 647865 - DNA, 120 bp, Artificial Sequence
  ENSG00000182628_16 (sequence is synthesized)
ttcttcagtgttcaggcaattagtatttagaaagctcttgtcatgagatggctctgggatgtgatgatgattgttgggattgaaaaaacggtagtatcatggagagatcataataaattc

SEQ ID NO: 647866 - DNA, 120 bp, Artificial Sequence
  ENSG00000182628_17 (sequence is synthesized)
ttagtattaaaagtggttttgctttcagttagggagaaaaattagattgtactatttttcctctatgatttccttcagttatcttccaaatgttgttttttccccacagcccccttaaca

SEQ ID NO: 647867 - DNA, 120 bp, Artificial Sequence
  ENSG00000182628_18 (sequence is synthesized)
ttgttctctatgcacttctcaatacattttcatttgtttctcaagcctctttgtggatgactcctaaatataacttcttccactagctctagatccgtatttccaataaaatcccctacc

SEQ ID NO: 647868 - DNA, 120 bp, Artificial Sequence
  ENSG00000182628_19 (sequence is synthesized)
tgaatattcaagttaaacatgtccagaatacttactgattttattgttaatagccactattctgttgtctggaattaaaacctgtataactaatttgcatccctttatcttcttagtcaa

SEQ ID NO: 647869 - DNA, 120 bp, Artificial Sequence
  ENSG00000182628_20 (sequence is synthesized)
taaaacctacaatcctctttctaaaatggtcatagtatacaacctctacattatcttcacacctccttaatttagatcttttgtttctcatttggattataattgttttctcctatgtga

SEQ ID NO: 647870 - DNA, 120 bp, Artificial Sequence
  ENSG00000182628_21 (sequence is synthesized)
ccagaaagctgagtctgatctggattacattcaatacaggctggaatatgaaatcaagactaatcatcctgattcagcaagtgagctgtcaccactgactaaagaagagaaaactgcggc

SEQ ID NO: 647871 - DNA, 120 bp, Artificial Sequence
  ENSG00000182628_22 (sequence is synthesized)
gtcaactattcaacatggaggcggaggtcgataagctggaactgatggtgagtgcaaagtgaaggagatctactgggtagtttatttttcccccatggcctcggaggtggggcacaattt

SEQ ID NO: 647872 - DNA, 120 bp, Artificial Sequence
  ENSG00000182628_23 (sequence is synthesized)
gagatgttgagtgacagctgtccaatggaggccctccgtgctagtacggcttgcggcttaagcgccgccgcggtctgcggaatgtcaactattcaacatggaggcggaggtcgataagct

SEQ ID NO: 647873 - DNA, 78 bp, Artificial Sequence
  ENSG00000182628_24 (sequence is synthesized)
acattcaatacaggctggaatatgaaatcaagactaatcatcctgattcagcaagtgagacagagtctcactctgttg

SEQ ID NO: 647874 - DNA, 120 bp, Artificial Sequence
  ENSG00000182631_0 (sequence is synthesized)
ggggagttatgcgccagtgccccagtgaccgcgggacacggagaggggaagtctgcgttgtacataaggacctagggactccgagcttggcctgagaacccttggacgccgagtgcttgc

SEQ ID NO: 647875 - DNA, 120 bp, Artificial Sequence
  ENSG00000182631_1 (sequence is synthesized)
cttacgggctgcactcctcaactctgctccaaagcagccgctgagctcaactcctgcgtccagggcgttcgctgcgcgccaggacgcgcttagtacccagttcctgggctctctcttcag

SEQ ID NO: 647876 - DNA, 120 bp, Artificial Sequence
  ENSG00000182631_2 (sequence is synthesized)
tagctgctttgaaagctcccacgcacgtcccgcaggctagcctggcaacaaaactggggtaaaccgtgttatcttaggtcttgtcccccagaacatgacctagaggtacctgcgcatgca

SEQ ID NO: 647877 - DNA, 120 bp, Artificial Sequence
  ENSG00000182631_3 (sequence is synthesized)
gatggccgatgcagccacgatagccaccatgaataaggcagcaggcggggacaagctagcagaactcttcagtctggtcccggaccttctggaggcggccaacacgagtggtaacgcgtc

SEQ ID NO: 647878 - DNA, 120 bp, Artificial Sequence
  ENSG00000182631_4 (sequence is synthesized)
gctgcagcttccggacttgtggtgggagctggggctggagttgccggacggcgcgccgccaggacatcccccgggcagcggcggggcagagagcgcggacacagaggcccgggtgcggat

SEQ ID NO: 647879 - DNA, 120 bp, Artificial Sequence
  ENSG00000182631_5 (sequence is synthesized)
tctcatcagcgtggtgtactgggtggtgtgcgccctggggttggcgggcaacctgctggttctctacctgatgaagagcatgcagggctggcgcaagtcctctatcaacctcttcgtcac

SEQ ID NO: 647880 - DNA, 120 bp, Artificial Sequence
  ENSG00000182631_6 (sequence is synthesized)
caacctggcgctgacggactttcagtttgtgctcaccctgcccttctgggcggtggagaacgctcttgacttcaaatggcccttcggcaaggccatgtgtaagatcgtgtccatggtgac

SEQ ID NO: 647881 - DNA, 120 bp, Artificial Sequence
  ENSG00000182631_7 (sequence is synthesized)
gtccatgaacatgtacgccagcgtgttcttcctcactgccatgagtgtgacgcgctaccattcggtggcctcggctctgaagagccaccggacccgaggacacggccggggcgactgctg

SEQ ID NO: 647882 - DNA, 120 bp, Artificial Sequence
  ENSG00000182631_8 (sequence is synthesized)
cggccggagcctgggggacagctgctgcttctcggccaaggcgctgtgtgtgtggatctgggctttggccgcgctggcctcgctgcccagtgccattttctccaccacggtcaaggtgat

SEQ ID NO: 647883 - DNA, 120 bp, Artificial Sequence
  ENSG00000182631_9 (sequence is synthesized)
gggcgaggagctgtgcctggtgcgtttcccggacaagttgctgggccgcgacaggcagttctggctgggcctctaccactcgcagaaggtgctgctgggcttcgtgctgccgctgggcat

SEQ ID NO: 647884 - DNA, 120 bp, Artificial Sequence
  ENSG00000182631_10 (sequence is synthesized)
tacctgctgctggtgcgcttcatcgccgaccgccgcgcggcggggaccaaaggaggggccgcggtagccggaggacgcccgaccggagccagcgcccggagactgtcgaaggtcaccaaa

SEQ ID NO: 647885 - DNA, 120 bp, Artificial Sequence
  ENSG00000182631_11 (sequence is synthesized)
tcagtgaccatcgttgtcctgtccttcttcctgtgttggctgcccaaccaggcgctcaccacctggagcatcctcatcaagttcaacgcggtgcccttcagccaggagtatttcctgtgc

SEQ ID NO: 647886 - DNA, 120 bp, Artificial Sequence
  ENSG00000182631_12 (sequence is synthesized)
caggtatacgcgttccctgtgagcgtgtgcctagcgcactccaacagctgcctcaaccccgtcctctactgcctcgtgcgccgcgagttccgcaaggcgctcaagagcctgctgtggcgc

SEQ ID NO: 647887 - DNA, 120 bp, Artificial Sequence
  ENSG00000182631_13 (sequence is synthesized)
atcgcgtctccttcgatcaccagcatgcgccccttcaccgccactaccaagccggagcacgaggatcaggggctgcaggccccggcgccgccccacgcggccgcggagccggacctgctc

SEQ ID NO: 647888 - DNA, 120 bp, Artificial Sequence
  ENSG00000182631_14 (sequence is synthesized)
tactacccacctggcgtcgtggtctacagcggggggcgctacgacctgctgcccagcagctctgcctactgacgcaggcctcaggcccagggcgcgccgtcggggcaaggtggccttccc

SEQ ID NO: 647889 - DNA, 120 bp, Artificial Sequence
  ENSG00000182631_15 (sequence is synthesized)
cgggcggtaaagaggtgaaaggatgaaggagggctggggggggccccatttaagaagtaggtgggaggaggatgggcagagcatggaggaggagcctgtggataggccgaggaccttctc

SEQ ID NO: 647890 - DNA, 120 bp, Artificial Sequence
  ENSG00000182631_16 (sequence is synthesized)
tggagaggagatgcttcgaaatcgggtggagagaggaaattggcaaagggatagagacgagccccacgggccagacagccaacctccgctccgcaccccacagcctctccttactcttcc

SEQ ID NO: 647891 - DNA, 120 bp, Artificial Sequence
  ENSG00000182631_17 (sequence is synthesized)
cacgctgagtagtgtgggggcgcccagaagcgaagacaagcagcaaaaatgtagagaaattggcacggggagcggggcttagccaaatgatgcacagacaattgtgcccgtttattccag

SEQ ID NO: 647892 - DNA, 120 bp, Artificial Sequence
  ENSG00000182631_18 (sequence is synthesized)
cgacttctgcggagagggcagccgtcggcacaaacactcctttgcgtcttggcaaacgagactgcagcagcgccaaggtcctacttgctgcggggctgccccaggaatctagagctggta

SEQ ID NO: 647893 - DNA, 120 bp, Artificial Sequence
  ENSG00000182631_19 (sequence is synthesized)
ggcaagaaacgcttttggagttaagaaaaagaactgaccatcctggtccgcccacaggagaaacggcaaaggaaagccacctccaatggagtcattatgacaattatcattccggactgg

SEQ ID NO: 647894 - DNA, 120 bp, Artificial Sequence
  ENSG00000182631_20 (sequence is synthesized)
gccagcgggaacaccctgagcccgacctagctgcacagccccggagctcagacgttagcagggggataacacctgtcaccagcttgggagagccattctctggggagtgtcgtcgctgcg

SEQ ID NO: 647895 - DNA, 120 bp, Artificial Sequence
  ENSG00000182634_0 (sequence is synthesized)
atgtccaacgccaccctactgacagcgttcatcctcacgggccttccccatgccccagggctggacgcccccctctttggaatcttcctggtggtttacgtgctcactgtgctggggaac

SEQ ID NO: 647896 - DNA, 120 bp, Artificial Sequence
  ENSG00000182634_1 (sequence is synthesized)
ctcctcatcctgctggtgatcagggtggattctcacctccacacccccatgtactacttcctcaccaacctgtccttcattgacatgtggttctccactgtcacggtgcccaaaatgctg

SEQ ID NO: 647897 - DNA, 120 bp, Artificial Sequence
  ENSG00000182634_2 (sequence is synthesized)
atgaccttggtgtccccaagcggcaggactatctccttccacagctgcgtggctcagctctattttttccacttcctggggagcaccgagtgtttcctctacacagtcatgtcctatgat

SEQ ID NO: 647898 - DNA, 120 bp, Artificial Sequence
  ENSG00000182634_3 (sequence is synthesized)
ctgcactctgctgtccagaccatattgactttccatttgccctactgtggacccaaccagatccagcactacttctgtgacgcaccgcccatcctgaaactggcctgtgcagacacctca

SEQ ID NO: 647899 - DNA, 120 bp, Artificial Sequence
  ENSG00000182634_4 (sequence is synthesized)
gccaacgagatggtcatctttgtgaatattgggctagtggcctcgggctgctttgtcctgatagtgctgtcctatgtgtccatcgtctgttccatcctgcggatccgcacctcagagggg

SEQ ID NO: 647900 - DNA, 120 bp, Artificial Sequence
  ENSG00000182634_5 (sequence is synthesized)
aggcacagagcctttcagacctgtgcctcccactgtatcgtggtcctttgcttctttggccctggtcttttcatttacctgaggccaggctccagggacgccttgcatggggttgtggcc

SEQ ID NO: 647901 - DNA, 120 bp, Artificial Sequence
  ENSG00000182634_6 (sequence is synthesized)
gttttctacaccacgctgactcctcttttcaaccctgttgtgtacaccctgagaaacaaggaggtaaagaaagctctgttgaagctgaaaaatgggtcagtatttgctcagggtgaatag

SEQ ID NO: 647902 - DNA, 120 bp, Artificial Sequence
  ENSG00000182634_7 (sequence is synthesized)
agataattagctcctttataactaaaacccatatttactattattaaatttaaaaaagaaataggaaaaaaatcattccctgcacaaggagttttcagatccagagtgtcatagttattc

SEQ ID NO: 647903 - DNA, 120 bp, Artificial Sequence
  ENSG00000182634_8 (sequence is synthesized)
attttggaagttgatttttggctaaataaaaaggtttatggaatgatggccatccaatgcagaatcaactttagcagatgcatttggaaaaaattccaagtgtttatcatgatgtcaaca

SEQ ID NO: 647904 - DNA, 120 bp, Artificial Sequence
  ENSG00000182634_9 (sequence is synthesized)
cattatcttcactcataaggactgtagagctaacggagtgtctcctaagacatcaaattcatattaagttctatttaaaaagagtttcttctgtggtttcatctttgcaagaaaagaaaa

SEQ ID NO: 647905 - DNA, 120 bp, Artificial Sequence
  ENSG00000182634_10 (sequence is synthesized)
attaaattaaaccttcaacataagcattatacttgaatggagcatttcaattattcagtcttaatttttaattggacagttaattaatttttcatttttttctgcagagtgtttgttaga

SEQ ID NO: 647906 - DNA, 120 bp, Artificial Sequence
  ENSG00000182634_11 (sequence is synthesized)
atcctagttaaagcagccatttcacggtgataatctaagagaaaggataatagtctattcttttcacgttccattaagtaatcagaaaagtaatttattttcttatataaatattttcca

SEQ ID NO: 647907 - DNA, 120 bp, Artificial Sequence
  ENSG00000182634_12 (sequence is synthesized)
tatattgaaaaattcattatagcattcataaataactacataatttaatatccataagataaaatttttactttagaaaatactagacaaaaaggcttggttctcaagaagaatggcttt

SEQ ID NO: 647908 - DNA, 120 bp, Artificial Sequence
  ENSG00000182634_13 (sequence is synthesized)
attcacattcatgggccaataaaaaccatataactctttaatatttttttcttactttggcctgaaagatttctgagagtaaatatttgtccatttatgcactgtatacactgtacacat

SEQ ID NO: 647909 - DNA, 120 bp, Artificial Sequence
  ENSG00000182634_14 (sequence is synthesized)
tgtattggtctctgatgacaactatctagactttccttccatatttgtggagctgccaatctcttatcctcaatggcaagtttccattttcagcaattttaaaattatttttataagtac

SEQ ID NO: 647910 - DNA, 120 bp, Artificial Sequence
  ENSG00000182634_15 (sequence is synthesized)
cagaggataaataataaatatacaaaaatgatcaaataatcttagagacaaaaatatgcagtcaaaaactgttaagagtatcccttaatttagaataaagtactagataatatttcccat

SEQ ID NO: 647911 - DNA, 120 bp, Artificial Sequence
  ENSG00000182634_16 (sequence is synthesized)
gtaattagactatgtctgcaagtcacattcgtttgtttgacttaaagtatatgaaatggactctgtacactctctgggtaggtaaggctcagaccatgaaccttataatctgtcatccaa

SEQ ID NO: 647912 - DNA, 120 bp, Artificial Sequence
  ENSG00000182634_17 (sequence is synthesized)
ataaatacatatatttaaagtgtaaataaatttttctcaaaataaatgtttaatttaaataccacaggtatcctggtcatgccaactctgcctagcatagcatgaagagtaaaagaaaac

SEQ ID NO: 647913 - DNA, 120 bp, Artificial Sequence
  ENSG00000182634_18 (sequence is synthesized)
tagaaggcagctgctagaactgaaaagcatttctcaaactcctcagatttgcagcagctgcatttcaaagatgctttagcaagaatgctcctttgtgccaactttccatatcttgctcca

SEQ ID NO: 647914 - DNA, 120 bp, Artificial Sequence
  ENSG00000182634_19 (sequence is synthesized)
agtaaactgtgcggtgatattgagaagaaaaacatactaacttggtaagcatgagctacataaaccatgacacagtacatgaagcatgaactacataaaccatgatcagtataagaggta

SEQ ID NO: 647915 - DNA, 120 bp, Artificial Sequence
  ENSG00000182634_20 (sequence is synthesized)
aatttttggttttcacaccaagaaaccagattgctatggaccaattatataattcagctcatttctcaaaggaaaaaactgaggtagacataaaccaaaattacttagtcattggattca

SEQ ID NO: 647916 - DNA, 120 bp, Artificial Sequence
  ENSG00000182634_21 (sequence is synthesized)
cttggattcttacacttctctgtaacatcacgctgttatatctaacttaccattacctaaaatgttatgggatatttattgggtgttaagtcacatgctaaacagtagatacgcaaaaac

SEQ ID NO: 647917 - DNA, 120 bp, Artificial Sequence
  ENSG00000182634_22 (sequence is synthesized)
aatagacaaggtctctgcattcaccaaagtcattgtctggcaagggggaaaaatatgttgcattgtccaggttacattgttgtaagtgcaatggatgcccaaggagagattcattattag

SEQ ID NO: 647918 - DNA, 120 bp, Artificial Sequence
  ENSG00000182634_23 (sequence is synthesized)
ttttgacttggaaagatgctaaaggattcaaaatactatggcaatatgtatcacacacaaccattttgaaagtaaattattgataaacatatataagaagaatgtcagtctttatttaat

SEQ ID NO: 647919 - DNA, 120 bp, Artificial Sequence
  ENSG00000182634_24 (sequence is synthesized)
tgaaaatgttgttgaaataattttagaatcgcatgaagttgtaagaaataacacagtgatagttcttgttataccttgcccagtttcccccaatggtaacagttagcaaaattgtagtgc

SEQ ID NO: 647920 - DNA, 120 bp, Artificial Sequence
  ENSG00000182634_25 (sequence is synthesized)
aatatcacaactgggatattgacattattataatccacaaatcttattcagatttttctagttttactcacgtgtatgtgtgtgtatttgttaaatactatacagttttaacaccagtgt

SEQ ID NO: 647921 - DNA, 120 bp, Artificial Sequence
  ENSG00000182636_0 (sequence is synthesized)
gcacttcctctccaggaatccgcggagggagcgcaggctcgaagagctcctggacgcagaggccctgcccttgccagacggcgcagacatgtcagaacaaagtaaggatctgagcgaccc

SEQ ID NO: 647922 - DNA, 120 bp, Artificial Sequence
  ENSG00000182636_1 (sequence is synthesized)
taactttgcagccgaggcccccaactccgaggtgcacagcagccctggggtttcggagggggttcctccgtccgcgaccctggcagagccgcagagccctcctctaggcccgacggccgc

SEQ ID NO: 647923 - DNA, 120 bp, Artificial Sequence
  ENSG00000182636_2 (sequence is synthesized)
tggcagagccgcagagccctcctctaggcccgacggccgctccgcaggccgcgccgcctccccaggccccgaacgacgagggcgacccgaaggccctgcagcaggctgcggaggagggcc

SEQ ID NO: 647924 - DNA, 120 bp, Artificial Sequence
  ENSG00000182636_3 (sequence is synthesized)
accgccagccccggcgcagctggtgcagaaggcgcacgagctcatgtggtacgtgctggtcaaggaccagaagaagatgatcatctggtttccagacatggtgaaagatgtcatcggcag

SEQ ID NO: 647925 - DNA, 120 bp, Artificial Sequence
  ENSG00000182636_4 (sequence is synthesized)
ctacaagaagtggtgcaggagcatcctccggcgcaccagcctcatcctcgcccgggtgttcgggctgcacctgaggctaaccagcctgcacaccatggagtttgcgctggtcaaagcgct

SEQ ID NO: 647926 - DNA, 120 bp, Artificial Sequence
  ENSG00000182636_5 (sequence is synthesized)
ggagcccgaggagctggacagggtggcgctgagcaaccgcatgcccatgacaggcctcctgctcatgatcctgagcctcatctacgtgaagggccgcggcgccagagagagcgccgtctg

SEQ ID NO: 647927 - DNA, 120 bp, Artificial Sequence
  ENSG00000182636_6 (sequence is synthesized)
gaacgtgctgcgcatcctggggctgcggccctggaagaagcactccaccttcggggacgtgcggaagctcatcactgaggagttcgtccaaatgaattacctgaagtaccagcgcgtccc

SEQ ID NO: 647928 - DNA, 120 bp, Artificial Sequence
  ENSG00000182636_7 (sequence is synthesized)
ccccaggcctggccctcccgatacagagaagctctggaggaggccagagctctgcgggaggctaatcccactgcccactaccctcgcagcagtgtctctgaggactagcaaagtctggag

SEQ ID NO: 647929 - DNA, 120 bp, Artificial Sequence
  ENSG00000182636_8 (sequence is synthesized)
gcagatgaatggtttctgaccctcaccagggctgtggaagggtgggggtgggtcattatagtattcaggatttacagtgcagtattcacgtgtaacttttaagttttcagtacagtgctt

SEQ ID NO: 647930 - DNA, 120 bp, Artificial Sequence
  ENSG00000182636_9 (sequence is synthesized)
ttatacctttaatgcaatgttgtattcatttgggtactattgtgtagtatttaggatgtatgcatgtttgtttatatgtaagcttggttggtgctttcgcttttgtgctacctttcttgg

SEQ ID NO: 647931 - DNA, 120 bp, Artificial Sequence
  ENSG00000182636_10 (sequence is synthesized)
atttttgtaccagagatgtgctaaactgatgaaatacattgagaaagtttccatcttattcttttatatgggactgatgatgtgtgttggggtagactgctcctgcagagtttggaagaa

SEQ ID NO: 647932 - DNA, 120 bp, Artificial Sequence
  ENSG00000182636_11 (sequence is synthesized)
gtcaccagcaaagccggcctaaccaagaaaagtcaaggcccttcatgaccttgctgggcacagaaaacaccctcgtggagtacactaatttgaactggactggtctcagtgtgagcactt

SEQ ID NO: 647933 - DNA, 120 bp, Artificial Sequence
  ENSG00000182636_12 (sequence is synthesized)
ggcacactttactaaacacatatacaaccccaccgtgagtcaactttaaagtaaacattaaagattcttgtgatacaatcatttttggaaaagtgtactttatcattttaacaaagcagt

SEQ ID NO: 647934 - DNA, 120 bp, Artificial Sequence
  ENSG00000182636_13 (sequence is synthesized)
atggttgggaatgagacaattctctattttacagtgtatacagatacaactatttcccctaatagggtgggaaaaatcgctactcatgattactcctaaatttgtgaagtttatagttct

SEQ ID NO: 647935 - DNA, 120 bp, Artificial Sequence
  ENSG00000182636_14 (sequence is synthesized)
attgtctttaaatgtaactcatgtttatttcaaaaacattcacaaatatagaaaagtatacaaaacaaaacagtaagattgtctgtaatcacatcatatgggaataaaaaacaaaaataa

SEQ ID NO: 647936 - DNA, 120 bp, Artificial Sequence
  ENSG00000182645_0 (sequence is synthesized)
actggctccagccttagggaaggttttggccgtgggttttgttggcacgtaccattttgctgaaagacagagcaccttgaggacgttatccctaaaatgagagaggactgggattgaaag

SEQ ID NO: 647937 - DNA, 120 bp, Artificial Sequence
  ENSG00000182645_1 (sequence is synthesized)
gctgactacagaaatggctgctgcccagacgccctcaaaagccaaggatcctcagagttggttataaaatatttaagggcgagaaaaggatcgcaggagccaggccctgagatgagcttg

SEQ ID NO: 647938 - DNA, 120 bp, Artificial Sequence
  ENSG00000182645_2 (sequence is synthesized)
gagtccctgtttcagcacatcatcttcaccgagcatcaggcggaggagagtcgccgtttgatgcgagaagtaaggtcggaaataaccagatgtcgtgaaaaaattaagaaagcaacggag

SEQ ID NO: 647939 - DNA, 120 bp, Artificial Sequence
  ENSG00000182645_3 (sequence is synthesized)
gagctgaatgaagagaaaatcaagctggaatctaaggttcaacagttttttgaaaaatccttcttcttacagcttttgaaagctcatgaaaatgctttagaaaaacagtacagtgaaatt

SEQ ID NO: 647940 - DNA, 120 bp, Artificial Sequence
  ENSG00000182645_4 (sequence is synthesized)
acaaaccataggaatatgcttcttcaaacctttgaggctataaagaaacaaatgatagaggaggaagacaaatttattaaggaaattacagactttaataatgattatgaaataacaaag

SEQ ID NO: 647941 - DNA, 120 bp, Artificial Sequence
  ENSG00000182645_5 (sequence is synthesized)
aaaagagagcttttgatgaaagaaaatgtcaagattgaaatatctgacttagaaaaccaagcaaacatgttgaaaagtgaaatgaagtcaatggaacatgatagtagccagttaaatgaa

SEQ ID NO: 647942 - DNA, 120 bp, Artificial Sequence
  ENSG00000182645_6 (sequence is synthesized)
aataaaaatcagtgaaaagcctcaaaatgatacagaatgcttaagacttaaaaaagaattagaactttataaggaagatgacatggaaagtgtttatgaagctctccaaacagaaataga

SEQ ID NO: 647943 - DNA, 120 bp, Artificial Sequence
  ENSG00000182645_7 (sequence is synthesized)
atttttggagttgacattggcacagaaagatcttcaggaaagcaaataacttacagagaattgatcagccatctgagatttgatcagaatatctgagaatcaaatctttgtgatagatat

SEQ ID NO: 647944 - DNA, 120 bp, Artificial Sequence
  ENSG00000182645_8 (sequence is synthesized)
atgaatggtacccgttacaacggatccttgtgggaaatatggggtttaaaatattcaaattgttattatctagaaatgatgtgttagccctttaagataatttttgtcttgttactcaaa

SEQ ID NO: 647945 - DNA, 120 bp, Artificial Sequence
  ENSG00000182645_9 (sequence is synthesized)
ctttaagagttcttctgtggtttgattttgtttctaaaagaaggaaaaggagaagaagtagataccgtgttcccaggcttcttatatgcccctgaacctcaagctgtcctattctttcta

SEQ ID NO: 647946 - DNA, 120 bp, Artificial Sequence
  ENSG00000182645_10 (sequence is synthesized)
atctatataatatggtttggatctgtgtccatgcccaaatctcatgttgaattgtgatccccactgttggaggtgggtcctgataggaggtgattgggtcatgggggtgggtttctcatg

SEQ ID NO: 647947 - DNA, 120 bp, Artificial Sequence
  ENSG00000182645_11 (sequence is synthesized)
aatagcttagcaccattcttcttggtactgtccttgagttctcctgagagctagttgtttactagtgtatagcacttctccactttgctcctgctgccaccgtatgagatgtctcactcc

SEQ ID NO: 647948 - DNA, 120 bp, Artificial Sequence
  ENSG00000182645_12 (sequence is synthesized)
ttgctcctgctgccaccgtatgagatgtctcactccccctttgccttcagtcatgattggaaacttcctgaggcctccctagaagcagaagtcactatgcttcctgtacagcctgcagaa

SEQ ID NO: 647949 - DNA, 120 bp, Artificial Sequence
  ENSG00000182652_0 (sequence is synthesized)
atgaaaaaagaacaagattctaatgtgacagaatttgttcttctgggcctatcatcttcttgggagctgcagctatttctcttcttactatttttgtttttttacattgctattgtcctg

SEQ ID NO: 647950 - DNA, 120 bp, Artificial Sequence
  ENSG00000182652_1 (sequence is synthesized)
ggaaacctcttgatagtggtaacagtgcaagcccatgctcacctgctccaatctcctatgtattattttttaggtcatctctctttcattgacctatgcctgagctgtgttactgtgcca

SEQ ID NO: 647951 - DNA, 120 bp, Artificial Sequence
  ENSG00000182652_2 (sequence is synthesized)
aagatgttaggggatttcctacagcagggcaagagcatctctttttcaggatgcctggcccagatctacttcctccactttctaggagccagtgagatgtttttgctgacagtcatggcc

SEQ ID NO: 647952 - DNA, 120 bp, Artificial Sequence
  ENSG00000182652_3 (sequence is synthesized)
atccactctatcatgcaggtcatactagtcatccagctgcctttctgtgggcccaatgaactggacaacttctactgtgatgtcccacaagtcatcaagctggcctgcatggacacctat

SEQ ID NO: 647953 - DNA, 120 bp, Artificial Sequence
  ENSG00000182652_4 (sequence is synthesized)
gtggtagaggtgctggtgatagccaacagtggtctgctgtctcttgtctgcttcttggtcttactattctcttatgctatcatcctgatcaccctgagaacacacttctgccagggccag

SEQ ID NO: 647954 - DNA, 120 bp, Artificial Sequence
  ENSG00000182652_5 (sequence is synthesized)
aacaaggtcttctctacctgtgcttctcacctgacagtggtcagcctgatcttcgtgccatgcgtattcatctatttgaggcctttctgcagcttctctgtggataagatattctccttg

SEQ ID NO: 647955 - DNA, 120 bp, Artificial Sequence
  ENSG00000182652_6 (sequence is synthesized)
ttttacacagtgattacacctatgttgaaccccctcatctacacactcagaaatactgatatgaagacagctatgaagaagctgaggataaaaccatgtggcattccattgccttgttaa

SEQ ID NO: 647956 - DNA, 120 bp, Artificial Sequence
  ENSG00000182652_7 (sequence is synthesized)
gcccattttgctggcctgaggctgaagagagggttgataggatgaatggcaggataaaatcttccttccttgaaaccacatagcttctgacaagcaaagatgtcacttgatattcttggc

SEQ ID NO: 647957 - DNA, 120 bp, Artificial Sequence
  ENSG00000182652_8 (sequence is synthesized)
tttgaaaaacacactctttcttggaagactcttaactcatcttgtacatgggtaaaaaccactttgatgacgttggtataaaagaggagatagcataaagattataatggatcactcttg

SEQ ID NO: 647958 - DNA, 120 bp, Artificial Sequence
  ENSG00000182652_9 (sequence is synthesized)
attacaatttaaaagcataggtggcactctagaaagccacctatgccttttgaccataatcaagagaactcaggaactcagtagaatttactggccacaaacgataacaagcattaattg

SEQ ID NO: 647959 - DNA, 120 bp, Artificial Sequence
  ENSG00000182652_10 (sequence is synthesized)
aaagatcaacttttctatctttatgtctctaagtactgttcatttattcaattttttccactttttaatctattcaaatgaaagaagatatatctctttttgtgttcagttcctccagca

SEQ ID NO: 647960 - DNA, 120 bp, Artificial Sequence
  ENSG00000182652_11 (sequence is synthesized)
tttaatgattcctagtgttaggaagttccttctgatgtctcatcagatccttttctgaagtagtgtgaatttctttgttctgttataacaaagcctgagaacagtaacaaccacctatgt

SEQ ID NO: 647961 - DNA, 120 bp, Artificial Sequence
  ENSG00000182652_12 (sequence is synthesized)
gtagtatttacctcagaactgtgttccacagtgtcccaagttttagaaatgtagtcaggcatcagtctaatgaacatatgctcttaacaaagtttatgcgtgagagaaaggaagtccagg

SEQ ID NO: 647962 - DNA, 120 bp, Artificial Sequence
  ENSG00000182652_13 (sequence is synthesized)
agtgcaggggtgatggaagctgttagtattctgttgtagaggcttctcaagaagaggtacctagtttcacactgagtttttctttgattggaattacagtgggggtgaatagataagctg

SEQ ID NO: 647963 - DNA, 120 bp, Artificial Sequence
  ENSG00000182652_14 (sequence is synthesized)
gctcttcaactgaccataatgtttaagagttttaacctctaaaggaacagaggaagaaatgaactgtgattgaaagcactcatttttgagatgctcacagttattacctctgagtctcaa

SEQ ID NO: 647964 - DNA, 120 bp, Artificial Sequence
  ENSG00000182652_15 (sequence is synthesized)
acatgctttgaggaataaatttacttaacttcatttttgagaatgaactcagagttaagtgacttgcccatgaccacttagaagaaatgcaatcaatcaagaaagctctttgtaatccca

SEQ ID NO: 647965 - DNA, 79 bp, Artificial Sequence
  ENSG00000182652_16 (sequence is synthesized)
gcaatcaatcaagaaagctcttctgaagtcaggagtttgagaccagcttgagcaatatggagaaaccccgtctctacta

SEQ ID NO: 647966 - DNA, 120 bp, Artificial Sequence
  ENSG00000182667_0 (sequence is synthesized)
aacttacaaagtgttggatgtcccccgttcgaactgagggactgcagaccgcctctgggtagctggatgaagcccaccccgtccccttctggtaccaaagtgcttactcctctccaaagt

SEQ ID NO: 647967 - DNA, 120 bp, Artificial Sequence
  ENSG00000182667_1 (sequence is synthesized)
gccgtgtctgaactgccgctgggaagaagcggctcctgagacgcgcccacacctttcacctgccgcgcgcttccccctcctcggccaccttcccggcggaagcagcgaggagggagcccc

SEQ ID NO: 647968 - DNA, 120 bp, Artificial Sequence
  ENSG00000182667_2 (sequence is synthesized)
ctttggccgtcctccgtggaaccggttttccgaggctggcaaaagccgaggctggatttgggggaggaatattagactcggaggagtctgcgcgcttttctcctccccgcgcctcccggt

SEQ ID NO: 647969 - DNA, 120 bp, Artificial Sequence
  ENSG00000182667_3 (sequence is synthesized)
cgccgcgggttcaccgctcagtccccgcgctcgctccgcaccccacccacttcctgtgctcgcccggggggcgtgtgccgtgcggctgccggagttcggggaagttgtggctgtcgagaa

SEQ ID NO: 647970 - DNA, 120 bp, Artificial Sequence
  ENSG00000182667_4 (sequence is synthesized)
tgggggtctgtgggtacctgttcctgccctggaagtgcctcgtggtcgtgtctctcaggctgctgttccttgtacccacaggagtgcccgtgcgcagcggagatgccaccttccccaaag

SEQ ID NO: 647971 - DNA, 120 bp, Artificial Sequence
  ENSG00000182667_5 (sequence is synthesized)
ctatggacaacgtgacggtccggcagggggagagcgccaccctcaggtgcactattgacaaccgggtcacccgggtggcctggctaaaccgcagcaccatcctctatgctgggaatgaca

SEQ ID NO: 647972 - DNA, 120 bp, Artificial Sequence
  ENSG00000182667_6 (sequence is synthesized)
agtggtgcctggatcctcgcgtggtccttctgagcaacacccaaacgcagtacagcatcgagatccagaacgtggatgtgtatgacgagggcccttacacctgctcggtgcagacagaca

SEQ ID NO: 647973 - DNA, 120 bp, Artificial Sequence
  ENSG00000182667_7 (sequence is synthesized)
accacccaaagacctctagggtccacctcattgtgcaagtatctcccaaaattgtagagatttcttcagatatctccattaatgaagggaacaatattagcctcacctgcatagcaactg

SEQ ID NO: 647974 - DNA, 120 bp, Artificial Sequence
  ENSG00000182667_8 (sequence is synthesized)
gtagaccagagcctacggttacttggagacacatctctcccaaagcggttggctttgtgagtgaagacgaatacttggaaattcagggcatcaccagggagcagtcaggggactacgagt

SEQ ID NO: 647975 - DNA, 120 bp, Artificial Sequence
  ENSG00000182667_9 (sequence is synthesized)
gcagtgcctccaatgacgtggccgcgcccgtggtacggagagtaaaggtcaccgtgaactatccaccatacatttcagaagccaagggtacaggtgtccccgtgggacaaaaggggacac

SEQ ID NO: 647976 - DNA, 120 bp, Artificial Sequence
  ENSG00000182667_10 (sequence is synthesized)
tgcagtgtgaagcctcagcagtcccctcagcagaattccagtggtacaaggatgacaaaagactgattgaaggaaagaaaggggtgaaagtggaaaacagacctttcctctcaaaactca

SEQ ID NO: 647977 - DNA, 120 bp, Artificial Sequence
  ENSG00000182667_11 (sequence is synthesized)
tcttcttcaatgtctctgaacatgactatgggaactacacttgcgtggcctccaacaagctgggccacaccaatgccagcatcatgctatttggtccaggcgccgtcagcgaggtgagca

SEQ ID NO: 647978 - DNA, 120 bp, Artificial Sequence
  ENSG00000182667_12 (sequence is synthesized)
acggcacgtcgaggagggcaggctgcgtctggctgctgcctcttctggtcttgcacctgcttctcaaattttgatgtgagtgccacttccccacccgggaaaggctgccgccaccaccac

SEQ ID NO: 647979 - DNA, 120 bp, Artificial Sequence
  ENSG00000182667_13 (sequence is synthesized)
acagcctcatgggacagaaatttgagggaggggaacaaagaatactttggggggaaaaaagttttaaaaaagaaattgaaaattgccttgcagatatttaggtacaatggagttttcttt

SEQ ID NO: 647980 - DNA, 120 bp, Artificial Sequence
  ENSG00000182667_14 (sequence is synthesized)
tcccaaacgggaagaacacagcacacccggcttggacccactgcaagctgcatcgtgcaacctctttggtgccagtgtgggcaagggctcagcctctctgcccacagagtgcccccacgt

SEQ ID NO: 647981 - DNA, 120 bp, Artificial Sequence
  ENSG00000182667_15 (sequence is synthesized)
ggaacattctggagctggccatcccaaattcaatcagtccatagagacgaacagaatgagaccttccggcccaagcgtggcgctgcgggcactttggtagactgtgccaccacggcgtgt

SEQ ID NO: 647982 - DNA, 120 bp, Artificial Sequence
  ENSG00000182667_16 (sequence is synthesized)
gttgtgaaacgtgaaataaaaagagcaagaaagaaaaaggaaacaaaataagaccgtctgacagcaacaacggtcccacaaacaagtcacaaaagataccgttaaacttttttttttttt

SEQ ID NO: 647983 - DNA, 120 bp, Artificial Sequence
  ENSG00000182667_17 (sequence is synthesized)
tatcattttactacatgaacatcatggataacaagggattctgattcattattaatttcattaattatattttctgatatgagtctagaacttactgcaaaaacaagacaaaactaaaaa

SEQ ID NO: 647984 - DNA, 120 bp, Artificial Sequence
  ENSG00000182667_18 (sequence is synthesized)
aatacaactgagaagggtgaagagaagtatgtttgttaaacagtaaaaatgaatagtatacttcttaactaggtttacaactggtggaccacacaccaggcactaatcacctggtgagga

SEQ ID NO: 647985 - DNA, 120 bp, Artificial Sequence
  ENSG00000182667_19 (sequence is synthesized)
tttggcatatccaccaaaaaatgcatccgatttaaccaacatctccaccagcgctacggactcctcccaattctgacatctcttgcagacaatactatgctctctacacactgtttagaa

SEQ ID NO: 647986 - DNA, 120 bp, Artificial Sequence
  ENSG00000182667_20 (sequence is synthesized)
atggaaaggtgatctgcactgtatcttgggtttgttggctatgcttcctttgatgacatatattatacagtatatatatacatatattttttttgttagagttctagccattttatttct

SEQ ID NO: 647987 - DNA, 120 bp, Artificial Sequence
  ENSG00000182667_21 (sequence is synthesized)
ccgcagggtcctttctcagacattactgcatgctgtatatggcgttagctgtgtgttgatcttctaaaagatgatagagtttactggtaattgtgtaatcagctcctgcctttttatttt

SEQ ID NO: 647988 - DNA, 120 bp, Artificial Sequence
  ENSG00000182667_22 (sequence is synthesized)
cttgggttatttacatgtcagagacatttataaaaagtgaaaggataaaaaaaaaaaaaaacaactaataccgggcgcagcatctttccaggtgtggctctgcgctaggccaccccaggt

SEQ ID NO: 647989 - DNA, 120 bp, Artificial Sequence
  ENSG00000182667_23 (sequence is synthesized)
ggccccgctttctccattctgccctgtggcgttaacagacagcaagcagctgaacaagcagtaccgtcagtacccacttgctttagcccattatgggaatctctgatgcctttgtgacca

SEQ ID NO: 647990 - DNA, 120 bp, Artificial Sequence
  ENSG00000182667_24 (sequence is synthesized)
ctggagagtttaatcctcttggtttattttatttcccacctttgtgtgagtgtgtatgaaagagaagaaaatgcaatttttaggtaatcttttttttttttcccctcccctgaaagtctg

SEQ ID NO: 647991 - DNA, 120 bp, Artificial Sequence
  ENSG00000182667_25 (sequence is synthesized)
ggaacctgagagtcctcggggaggggtcctggatgtgatgagggaaagggggattgggggatccgggagggtggggttgtctctgacttgacattaaaaagtgttccatgtccctcttca

SEQ ID NO: 647992 - DNA, 120 bp, Artificial Sequence
  ENSG00000182667_26 (sequence is synthesized)
agtaagtaagtgacatttcattctgctcatccccaaggcaaagttggatgtttttaaagtggaaaaaaaaatgaacggaaaaagaaacggggaaggtgggaagaggtggaaatggaaggg

SEQ ID NO: 647993 - DNA, 120 bp, Artificial Sequence
  ENSG00000182667_27 (sequence is synthesized)
acactaagaggcttctgtgattttggatttgttttatatatggcagatctctagaatggagtgcccgtgcgcagcggagatgccaccttccccaaagctatggacaacgtgacggtccgg

SEQ ID NO: 647994 - DNA, 120 bp, Artificial Sequence
  ENSG00000182667_28 (sequence is synthesized)
ggagataattacggagaagtcatactctctcacaccctcggctttcttgttgtgtccttcagcaaaacagtggatttaaatctccttgcacaagcttgagagcaacacaatctatcagga

SEQ ID NO: 647995 - DNA, 120 bp, Artificial Sequence
  ENSG00000182667_29 (sequence is synthesized)
ccttctgtccaacttggtccaggtctggtgtcctggatgtgctgctgaagagacaggttccgggggtggtgagcgcatgtacctgtggggtgggctgcgcagactggatatggtcacata

SEQ ID NO: 647996 - DNA, 120 bp, Artificial Sequence
  ENSG00000182667_30 (sequence is synthesized)
gtgccagccactcaccagcctgagatggagatgatgatgatggagagcttcagaggggctgctcaggcttttcccagatatactacaagcaagagaatggctggcaggcacttggtggcc

SEQ ID NO: 647997 - DNA, 120 bp, Artificial Sequence
  ENSG00000182667_31 (sequence is synthesized)
cttcaggtaaaggtttgttctctgatcctcaacagagatgagttatccttattctacgcatctggggtccagggcacatttctggttgtcattttgcagttagaagctaaattttccagt

SEQ ID NO: 647998 - DNA, 120 bp, Artificial Sequence
  ENSG00000182667_32 (sequence is synthesized)
cattttcattgagtggaactaggaattgtttttttcatttttgttccaataatatattttctcaggaaattatcttgtaattattgctcttcttggcttttttctcccctaagttttagt

SEQ ID NO: 647999 - DNA, 78 bp, Artificial Sequence
  ENSG00000182667_33 (sequence is synthesized)
taagatttcatccaattccaagactgtgttatgtttaaaaccagacttttaatgcacttttggaagtacaggtatgcc

SEQ ID NO: 648000 - DNA, 120 bp, Artificial Sequence
  ENSG00000182667_34 (sequence is synthesized)
atcctgatgatctcaaaatccccttctagaggggctctcagccttcactctgcagatcaagaagcccaccagtcctcacccacccgactcccaccttccctgcccctgggagccagcttt

SEQ ID NO: 648001 - DNA, 120 bp, Artificial Sequence
  ENSG00000182667_35 (sequence is synthesized)
acccagacgagttctgctcccagcctctaaaatgcagaacgggctgctgctttcaaagctatacttcgatggagtttcctatactagtgaaatctgttttaaatgaacatcaagaatagc

SEQ ID NO: 648002 - DNA, 120 bp, Artificial Sequence
  ENSG00000182667_36 (sequence is synthesized)
ggaaaatatggactcgaatctacgccgactggcaccaagcggcatgtgagaaacgtgaggaaaaaaagtccagctcttcctgctcgtcagctgggccctcccccttccagaaagctaact

SEQ ID NO: 648003 - DNA, 120 bp, Artificial Sequence
  ENSG00000182667_37 (sequence is synthesized)
tgtgctctgagctgggcaagaagaggggagagggtgcagaacgggagagctgggtgggagggcccctcaaggccagggtcagaggttagcagggtatcagtggacatggagagggaggaa

SEQ ID NO: 648004 - DNA, 120 bp, Artificial Sequence
  ENSG00000182667_38 (sequence is synthesized)
aaaaaagagagagacacagaaagaaatggagagagagggacagagagacagggaggaggcagacagaaagagaaagaacaagagatacagtttacatgtatacaaagtagtatatgtata

SEQ ID NO: 648005 - DNA, 120 bp, Artificial Sequence
  ENSG00000182667_39 (sequence is synthesized)
gtacatgtataaaagtagatctcagaagtgggaaaaggaaaatgaaaaagaatgttcatgtttcattctataatggaaaagatcccgagataggagaaaaatactttggaatgccaaaaa

SEQ ID NO: 648006 - DNA, 120 bp, Artificial Sequence
  ENSG00000182667_40 (sequence is synthesized)
attccctcagagccgaagttaagggagaaataataatacaggcacaggaggaccagcagcagccagagaggagaagtgacagggaccgaggcaaatccagtctctccccgggtttcaaga

SEQ ID NO: 648007 - DNA, 120 bp, Artificial Sequence
  ENSG00000182667_41 (sequence is synthesized)
atttgagaaacacacctcttaaagatgaaatcagctgtgcgagagtgtgaggcccaggaaacctgggagtctgctgtataaatacagcaagtggctcacactcatccacccaagtgagca

SEQ ID NO: 648008 - DNA, 120 bp, Artificial Sequence
  ENSG00000182667_42 (sequence is synthesized)
accttccccaaagctatggacaacgtgacggtccggcagggggagagcgccaccctcagttgaaactcggctgttccctggattatttccactcctggagtcctcaaaagtggctgtttt

SEQ ID NO: 648009 - DNA, 120 bp, Artificial Sequence
  ENSG00000182667_43 (sequence is synthesized)
tctcccacaccttgcttaccctgaggcctgaaagttggataaacgtcctccttgctactcattatggctgctggacatttctttttcacctttctcgacatatccagttagggtgcagca

SEQ ID NO: 648010 - DNA, 120 bp, Artificial Sequence
  ENSG00000182667_44 (sequence is synthesized)
ttcgtgctctgggccagcagaaacacgtggcattatggaagggttttctcacctggagagaaatgtccctttgttccctttcttgggccactcatgttaatacagtgctgcaccccctga

SEQ ID NO: 648011 - DNA, 120 bp, Artificial Sequence
  ENSG00000182667_45 (sequence is synthesized)
agctgtgcctccaaccagattataggagtaataactaaatcaacagcggttggctttgtgagtgaagacgaatacttggaaattcagggcatcaccagggagcagtcaggggactacgag

SEQ ID NO: 648012 - DNA, 120 bp, Artificial Sequence
  ENSG00000182667_46 (sequence is synthesized)
ggaggctaggagaacagctattccagtgttgcagtagaatttattcccattcggactccctgactttgtgtttaaataggaggaaatcaaagctaaattaaagtatctcccaaaattgta

SEQ ID NO: 648013 - DNA, 120 bp, Artificial Sequence
  ENSG00000182667_47 (sequence is synthesized)
aaaagagctgaaatctcattcacagtttggttatgatgggaaagcttcctccccatggtggacgaatggtgtcaaaacggccagtgggatcaatcagcctgacttgctcgcagaatcctc

SEQ ID NO: 648014 - DNA, 120 bp, Artificial Sequence
  ENSG00000182667_48 (sequence is synthesized)
aaaagaagaaaaagaagaagaaaaaaaatcatgaaaaccatccagccaaaaatgcacaattctatctcttgggcaatcttcacggggctggctgctctgtgtctcttccaaggtaagtga

SEQ ID NO: 648015 - DNA, 120 bp, Artificial Sequence
  ENSG00000182667_49 (sequence is synthesized)
cggtggagattcctttcctcaggacggaaggtccaggtggtgactgtggcttttgagatgatgatggctttgttctttgaaaggggtttgtcctgtgacacaatggccagcacttttgct

SEQ ID NO: 648016 - DNA, 120 bp, Artificial Sequence
  ENSG00000182667_50 (sequence is synthesized)
aagaggaatggaatgctatacctacggaaggccacccatccaacaggggcattgaccaatgaaaagtccacagctttggtaagaaactgaggcctggaagcagtgcgggatggaggggat

SEQ ID NO: 648017 - DNA, 120 bp, Artificial Sequence
  ENSG00000182667_51 (sequence is synthesized)
cggccgcagcgcgcatttgggctccgaggaagttgaccgaggcggctgccgcaggatcccgggcccggatcgcacgaagcccgcgcggccgtctcctccgcgcgccacccctgcgcctcc

SEQ ID NO: 648018 - DNA, 120 bp, Artificial Sequence
  ENSG00000182667_52 (sequence is synthesized)
cgcgagctccacttcccatctgctattgtttccgattgttttccggtggcgagcccggctccgaaacttacaaagtgttggatgtcccccgttcgaactgagggactgcagaccgcctct

SEQ ID NO: 648019 - DNA, 120 bp, Artificial Sequence
  ENSG00000182667_53 (sequence is synthesized)
gggtagctggatgaagcccaccccgtccccttctggagtgcccgtgcgcagcggagatgccaccttccccaaagctatggacaacgtgacggtccggcagggggagagcgccaccctcag

SEQ ID NO: 648020 - DNA, 120 bp, Artificial Sequence
  ENSG00000182667_54 (sequence is synthesized)
agagtgtgtgtgcgtgtgtgtgtgtgtgtgtgcccgcgcgcgtgtgttgtagctctgtcaatccttggattagaaccaatgattgcagcttgtaggagggctgtccagggccagattgta

SEQ ID NO: 648021 - DNA, 120 bp, Artificial Sequence
  ENSG00000182667_55 (sequence is synthesized)
tgtcttccataggaagaattttctaacacaacaaacaggtgaggacacgactcgtctttacaagctctctgtggtgcttcccagcatggagcagatccacaaaagaactctgaggggcgt

SEQ ID NO: 648022 - DNA, 120 bp, Artificial Sequence
  ENSG00000182667_56 (sequence is synthesized)
agcaaggagaccaaacacaggcacccagggagagcgcctggcatagccacagggccattgagatctgccacagggggtgtttgcccgctctcagtcgtctcccgagctgcagagtcccca

SEQ ID NO: 648023 - DNA, 120 bp, Artificial Sequence
  ENSG00000182670_0 (sequence is synthesized)
ctgaactagttgccagtgatcttgaaacgtgacagtaaccaagagataaataggtgacaatgacaggaaaattagatgtagtaaaagagagtgtttgagagcagaagctatggcaactaa

SEQ ID NO: 648024 - DNA, 120 bp, Artificial Sequence
  ENSG00000182670_1 (sequence is synthesized)
agactggatttgaatccttcctagcttggtgacatgagcaaattacttgatttaagtgagcattttcccatctgtacagtggagataacgataattgtgcctgctaagaagaattgctgt

SEQ ID NO: 648025 - DNA, 120 bp, Artificial Sequence
  ENSG00000182670_2 (sequence is synthesized)
gaagattagtgaaataatgcatgtaaaacatttggtacagtatgtgacacatagtacaaatagtttgctaggaagattgttattattcttcacttgtgatattgtgaagttttcatacag

SEQ ID NO: 648026 - DNA, 120 bp, Artificial Sequence
  ENSG00000182670_3 (sequence is synthesized)
caaattggacatcatgagatggattgattaaataaatagatttgaacttcaaggactggtagtgttcttgctttggaaagaagaaacttggtttatcctaataatagtaggataataatg

SEQ ID NO: 648027 - DNA, 120 bp, Artificial Sequence
  ENSG00000182670_4 (sequence is synthesized)
gtgaagtgataggtacaagtaatagtgtttatgatgcgctggtgatgataggaaaagaaagccattatatgggcaagagctagaagtaataaaatggtgcatttttcagtgatgtttggc

SEQ ID NO: 648028 - DNA, 120 bp, Artificial Sequence
  ENSG00000182670_5 (sequence is synthesized)
ctatgtagctattctctgataactataaaaatccttattattgaagattcttcaggaaaaaaaacccttagtctgaaactttaccaccaatcccccttgccccccattgaaatacgtatt

SEQ ID NO: 648029 - DNA, 120 bp, Artificial Sequence
  ENSG00000182670_6 (sequence is synthesized)
tttaaaacatggcttttgataatgtgagggttttttcctttttgcgatttagcagtgctgattgtgtattgcagtagttgtgagagcattagaagcagcagtcgataggaggatggaagg

SEQ ID NO: 648030 - DNA, 120 bp, Artificial Sequence
  ENSG00000182670_7 (sequence is synthesized)
tctggatgccgccttggggagttaggagattggcagacttaccctgtaccactctagccctactcctttgcccaagacagaaacacactgagatggataggagaatatgagcagttgata

SEQ ID NO: 648031 - DNA, 120 bp, Artificial Sequence
  ENSG00000182670_8 (sequence is synthesized)
ggaaagttctcagtggagtcaggatttaggttaggccaggagattgagaatataacagtttgtgtatgatgaaatggcatatttcacagaatgcagtaaaagcaggtagggtacaagtgc

SEQ ID NO: 648032 - DNA, 120 bp, Artificial Sequence
  ENSG00000182670_9 (sequence is synthesized)
agcaacaggaagatgtcttttcttcattcagcaaacacttatttgagagcttaccatgtgctaggcacatacaaagataaataagatgcccttgatgatcctctatttaaaggagacatg

SEQ ID NO: 648033 - DNA, 120 bp, Artificial Sequence
  ENSG00000182670_10 (sequence is synthesized)
taaacaggttaacttagagtagagatggtgaatatgtgaacctgaggaaaggaagaaatagattaaattatctggagagagaggaaaagtcagcagaatggggacgagaatctttcggag

SEQ ID NO: 648034 - DNA, 120 bp, Artificial Sequence
  ENSG00000182670_11 (sequence is synthesized)
ctcagtgttctgataggagttatttccttgggcataggttccaagtatttttctaatataccatagaagccaggaaaactttcttctgttatctcaaatgatttaattactgacttgagt

SEQ ID NO: 648035 - DNA, 120 bp, Artificial Sequence
  ENSG00000182670_12 (sequence is synthesized)
ttgtgttgtctccttagacttgtgcaccatggacaattttgctgagggagatttcactgtggcggattatgccttgttagaagattgccctcacgtggatgattgtgtctttgctgctga

SEQ ID NO: 648036 - DNA, 120 bp, Artificial Sequence
  ENSG00000182670_13 (sequence is synthesized)
atttatgagcaatgattatgttcgtgtgactcagctttactgtgatggggtgggtgtgcaatataaagattatatccaaagtgagaggaatttggaatttgacatctgcagtatatggtg

SEQ ID NO: 648037 - DNA, 120 bp, Artificial Sequence
  ENSG00000182670_14 (sequence is synthesized)
tagtaaaccaatttctgtcctgcaagattattgcgatgccattaaaataaacatcttctggccacttctgtttcaacatcaaaacagttccgtaatatcacgattgcatccctgtgtgga

SEQ ID NO: 648038 - DNA, 120 bp, Artificial Sequence
  ENSG00000182670_15 (sequence is synthesized)
cgccaacaattcacgtgcttctgagataaatttgaagaaactacaacatcttgagttgatggaagatattgtggatttggcaaagaaagttgctaatgattcattccttattggaggctt

SEQ ID NO: 648039 - DNA, 120 bp, Artificial Sequence
  ENSG00000182670_16 (sequence is synthesized)
attgagaattggttgtaaaatagaaaataaaatcttggcaatggaagaagctctgaattggataaaatatgcaggcgatgtaacaattctaactaaattaggatcaattgacaattgttg

SEQ ID NO: 648040 - DNA, 120 bp, Artificial Sequence
  ENSG00000182670_17 (sequence is synthesized)
gcctatgttaagtattttctttactgaatacaagtaccacataactaaaattgtaatggaagactgcaatttgcttgaagaacttaaaactcaaagttgtatggattgtatagaggaagg

SEQ ID NO: 648041 - DNA, 120 bp, Artificial Sequence
  ENSG00000182670_18 (sequence is synthesized)
agaactaatgaaaatgaaaggaaatgaagagttttccaaagaaagatttgatatagctattatctattacaccagagccattgaatatagacctgaaaactaccttctttatggtaaccg

SEQ ID NO: 648042 - DNA, 120 bp, Artificial Sequence
  ENSG00000182670_19 (sequence is synthesized)
agctctttgttttcttcgtactggacagtttagaaatgcactcggtgatggaaagagagccactattctgaagaacacttggccaaagggtcattatcgttattgtgatgctctttctat

SEQ ID NO: 648043 - DNA, 120 bp, Artificial Sequence
  ENSG00000182670_20 (sequence is synthesized)
gctgggggaatatgactgggccctgcaagcaaacataaaagctcaaaaactctgtaaaaatgaccctgagggaatcaaggatctaattcagcagcatgtaaagttacaaaaacaaataga

SEQ ID NO: 648044 - DNA, 120 bp, Artificial Sequence
  ENSG00000182670_21 (sequence is synthesized)
agacctacaaggtcgaacagcaaataaggatccaattaaagccttttatgaaaacagggcctacacacctaggagtttatcagcacctatatttactacttcacttaactttgtggagaa

SEQ ID NO: 648045 - DNA, 120 bp, Artificial Sequence
  ENSG00000182670_22 (sequence is synthesized)
ggaaagagatttcagaaaaattaatcacgaaatggccaacggtggtaatcagaatctaaaggtggcggatgaggcgttgaaggtagatgattgtgactgtcatcctgaattttcaccacc

SEQ ID NO: 648046 - DNA, 120 bp, Artificial Sequence
  ENSG00000182670_23 (sequence is synthesized)
atcaagtcagcctccaaaacataaaggaaaacaaaaatctcgaaacaatgaatcagaaaagttcagttctagttcaccattgactttaccagcagatttgaagaacatcttggagaaaca

SEQ ID NO: 648047 - DNA, 120 bp, Artificial Sequence
  ENSG00000182670_24 (sequence is synthesized)
gttttctaaatcttccagagctgcacaccaggattttgctaatataatgaaaatgctgagaagcttaattcaagatggctatatggccttattggagcagcgttgccgcagcgctgcaca

SEQ ID NO: 648048 - DNA, 120 bp, Artificial Sequence
  ENSG00000182670_25 (sequence is synthesized)
ggcctttacagagttgctgaacggtttagatcctcaaaaaataaagcaattgaacctggccatgattaactatgttttggtcgtctatggacttgccatttctctccttggaataggaca

SEQ ID NO: 648049 - DNA, 120 bp, Artificial Sequence
  ENSG00000182670_26 (sequence is synthesized)
gcctgaggaattatctgaagccgaaaaccagtttaagaggattattgaacactaccccagtgagggccttgattgcttggcctactgtggaattggaaaagtatatttgaaaaaaaacag

SEQ ID NO: 648050 - DNA, 120 bp, Artificial Sequence
  ENSG00000182670_27 (sequence is synthesized)
atttctagaagctctcaatcactttgagaaagcaagaaccttgatttatcgtcttcctggagtgttaacttggcccacgagtaatgtgattattgaagagtctcagccacaaaaaataaa

SEQ ID NO: 648051 - DNA, 120 bp, Artificial Sequence
  ENSG00000182670_28 (sequence is synthesized)
gatgctgttagagaaatttgttgaagaatgcaagttccctccagtgccagatgccatttgttgctatcagaagtgccatggatattctaagatccagatatacataactgatccagactt

SEQ ID NO: 648052 - DNA, 120 bp, Artificial Sequence
  ENSG00000182670_29 (sequence is synthesized)
taagggttttatacgcatcagctgttgccagtactgtaaaatagaatttcacatgaattgctggaagaagttaaaaactacaacctttaatgataaaattgacaaggattttctacaagg

SEQ ID NO: 648053 - DNA, 120 bp, Artificial Sequence
  ENSG00000182670_30 (sequence is synthesized)
aatatgtcttacccctgactgtgaaggtgtcatttctaagattatcatcttcagcagtggtggtgaagttaaatgtgaatttgaacacaaggtcataaaagaaaaggttcctccaagacc

SEQ ID NO: 648054 - DNA, 120 bp, Artificial Sequence
  ENSG00000182670_31 (sequence is synthesized)
tattctgaaacagaaatgttctagcctagagaaactaagactgaaagaagacaaaaaattgaagagaaagatccaaaaaaaagaagcaaaaaagttagcacaagaaagaatggaggagga

SEQ ID NO: 648055 - DNA, 120 bp, Artificial Sequence
  ENSG00000182670_32 (sequence is synthesized)
cttaagagaaagtaatccacccaaaaatgaagagcagaaagaaactgtagacaatgttcagcgttgtcagttccttgatgacagaattctacagtgtataaagcagtatgctgacaagat

SEQ ID NO: 648056 - DNA, 120 bp, Artificial Sequence
  ENSG00000182670_33 (sequence is synthesized)
taaatccggcatacagaatacagccatgcttctcaaagaattgctttcttggaaagttttgagcacagaagactatacaacctgtttttctagcagaaattttctaaatgaagcagtgga

SEQ ID NO: 648057 - DNA, 120 bp, Artificial Sequence
  ENSG00000182670_34 (sequence is synthesized)
ctatgttattcgccacttgattcaagaaaataacagagtaaagacaagaatatttctgcatgttttgagtgagcttaaagaagtggagcccaaattagccgcctggatccaaaaacttaa

SEQ ID NO: 648058 - DNA, 120 bp, Artificial Sequence
  ENSG00000182670_35 (sequence is synthesized)
tagctttggcttagatgccacaggaactttcttttctcgttatggagcatctcttaaactgcttgattttagtatcatgactttcctctggaatgagaaatatggtcacaaactagactc

SEQ ID NO: 648059 - DNA, 120 bp, Artificial Sequence
  ENSG00000182670_36 (sequence is synthesized)
tatagaaggaaagcaacttgattatttctctgagccagcatcattgaaggaagcccgttgtttaatatggctgctagaagaacacagagacaagttcccagcattgcatagtgctttaga

SEQ ID NO: 648060 - DNA, 120 bp, Artificial Sequence
  ENSG00000182670_37 (sequence is synthesized)
gaaaaacaaaagcaagaaaaagaagccaaaggattcaaagcctatgttagttgggtctggaacaacttcagtaacttcaaataatgagatcatcacttcaagtgaagaccatagcaatcg

SEQ ID NO: 648061 - DNA, 120 bp, Artificial Sequence
  ENSG00000182670_38 (sequence is synthesized)
aaattcagattctgcaggcccatttgcagtgcctgaccatcttcggcaagatgtagaagaattcgaagctctctatgaccaacacagtaacgaatatgttgtccgcaataagaagctatg

SEQ ID NO: 648062 - DNA, 120 bp, Artificial Sequence
  ENSG00000182670_39 (sequence is synthesized)
ggacatgaacccaaaacaaaaatgttcaactctatatgattacttctctcagtttttggaggaacatggtcccttggacatgagtaacaagatgttctctgcagaatatgagtttttccc

SEQ ID NO: 648063 - DNA, 120 bp, Artificial Sequence
  ENSG00000182670_40 (sequence is synthesized)
agaagaaactcgacagatactagaaaaagcaggaggtttaaaaccttttctcttgggatgccctcgttttgttgtgattgacaactgtattgcactgaagaaggttgcatcacggctcaa

SEQ ID NO: 648064 - DNA, 120 bp, Artificial Sequence
  ENSG00000182670_41 (sequence is synthesized)
gaaaaaaaggaagaagaaaaacattaaaacaaaagtagaagaaatttcaaaagcaggggagtatgtacgagttaaactacaactgaatccagctgctagggaatttaaaccagatgtaaa

SEQ ID NO: 648065 - DNA, 120 bp, Artificial Sequence
  ENSG00000182670_42 (sequence is synthesized)
gtctaaaccagtgtcagattcatcttcagcaccagcttttgaaaatgtgaaacccaaacctgtgtctgcaaattctcccaagccagcttgtgaagatgtgaaggccaaaccagtatccga

SEQ ID NO: 648066 - DNA, 120 bp, Artificial Sequence
  ENSG00000182670_43 (sequence is synthesized)
caattcttctagacaagtttctgaggatgggcaacccaaaggggtctcttctaattctcctaaaccaggctctgaggatgcaaattacaagcgagtctcctgtaattcccccaaaccggt

SEQ ID NO: 648067 - DNA, 120 bp, Artificial Sequence
  ENSG00000182670_44 (sequence is synthesized)
tcttgaggatgtgaaaccaacttattgggctcaatcccatttggtcacaggatactgtacgtatcttcctttccagagatttgatatcacccagacaccgccagcatacataaacgtgtt

SEQ ID NO: 648068 - DNA, 120 bp, Artificial Sequence
  ENSG00000182670_45 (sequence is synthesized)
accaggtttgccccagtacaccagcatatatacacccttggccagcctttctcctgaatatcagctaccaagatcagtaccagtggtgccgtcttttgtagccaatgacagagcagataa

SEQ ID NO: 648069 - DNA, 120 bp, Artificial Sequence
  ENSG00000182670_46 (sequence is synthesized)
aaatgctgctgcctattttgagggtcatcatttgaatgctgagaatgttgctggtcaccagattgcctctgaaacacagatccttgagggctctttgggaatatctgtaaagtcacactg

SEQ ID NO: 648070 - DNA, 120 bp, Artificial Sequence
  ENSG00000182670_47 (sequence is synthesized)
cagcacaggtgatgctcatacagtcctgagtgagtctaacagaaatgatgagcactgtggaaattctaacaacaaatgtgaagtaattccagaaagcaccagtgcagtaacaaacattcc

SEQ ID NO: 648071 - DNA, 120 bp, Artificial Sequence
  ENSG00000182670_48 (sequence is synthesized)
acacgtgcagatggttgccatacaggtatcttggaacataatacaccaagaagtcaatactgagccatataatccttttgaggaacgacaaggggaaatttcacggattgaaaaggagca

SEQ ID NO: 648072 - DNA, 120 bp, Artificial Sequence
  ENSG00000182670_49 (sequence is synthesized)
ccaagtattacaagaccaacttcaagaagtgtatgaaaattatgagcagataaaacttaagggcttagaagagaccagggacctggaagagaagttgaaaaggcacttagaagaaaacaa

SEQ ID NO: 648073 - DNA, 120 bp, Artificial Sequence
  ENSG00000182670_50 (sequence is synthesized)
gatctcaaagacggaattagattggttccttcaagatttggaaagagaaattaaaaaatggcaacaggaaaaaaaagaaatccaagaaagactaaaatcactgaagaagaaaattaaaaa

SEQ ID NO: 648074 - DNA, 120 bp, Artificial Sequence
  ENSG00000182670_51 (sequence is synthesized)
ggtttcaaatgccagtgaaatgtatacccagaaaaatgatggaaaggaaaaggaacatgaattacatctggatcagtcccttgaaatcagcaacacacttacaaatgagaaaatgaaaat

SEQ ID NO: 648075 - DNA, 120 bp, Artificial Sequence
  ENSG00000182670_52 (sequence is synthesized)
agaagagtatataaagaaagggaaagaggattatgaagagagtcatcagagagctgtggctgcagaggtatccgtacttgaaaactggaaggagagtgaagtgtataagctacagatcat

SEQ ID NO: 648076 - DNA, 120 bp, Artificial Sequence
  ENSG00000182670_53 (sequence is synthesized)
ggagtcacaagcagaagcctttctgaagaagctggggctgattagccgtgatcctgcagcatatcctgacatggagtctgatatacgttcatgggaattgtttctttctaatgttacaaa

SEQ ID NO: 648077 - DNA, 120 bp, Artificial Sequence
  ENSG00000182670_54 (sequence is synthesized)
agaaattgagaaagcaaagtctcagtttgaagaacaaattaaggcaattaaaaatggttctcggctcagtgaactttctaaagtgcagatttctgagctttcatttcctgcctgtaacac

SEQ ID NO: 648078 - DNA, 120 bp, Artificial Sequence
  ENSG00000182670_55 (sequence is synthesized)
ggttcatcccgagttactccctgagtcttcaggcgacgatggccaagggcttgtgacttctgcaagcgacgtgactggaaaccacgcagcacttcacagggatcctagtgtgttctctgc

SEQ ID NO: 648079 - DNA, 120 bp, Artificial Sequence
  ENSG00000182670_56 (sequence is synthesized)
tggtgattccccaggggaggctccttctgcgctgttgccagggccaccccctggtcagcctgaagccactcagctgacagggccaaaacgggctggccaggcagctctgtcagaacgaag

SEQ ID NO: 648080 - DNA, 120 bp, Artificial Sequence
  ENSG00000182670_57 (sequence is synthesized)
ccctgtggctgatcggaagcagcctgttcctccaggacgtgctgcgcgttcaagccagtctccaaaaaagccgttcaatagtattattgagcacctgtcagtggtattcccatgttacaa

SEQ ID NO: 648081 - DNA, 120 bp, Artificial Sequence
  ENSG00000182670_58 (sequence is synthesized)
cagcactgagcttgctggttttattaaaaaagtgcgaagcaaaaacaagaactcactctcaggattgagtattgatgaaattgtccaaagagtgacagaacacattctagatgaacagaa

SEQ ID NO: 648082 - DNA, 120 bp, Artificial Sequence
  ENSG00000182670_59 (sequence is synthesized)
aaagaaaaagccaaacccaggaaaggacaagaggacttatgagcccagctctgccacccccgtgaccaggtcctcccagggctcaccctcggtggttgttgcaccatcacccaaaaccaa

SEQ ID NO: 648083 - DNA, 120 bp, Artificial Sequence
  ENSG00000182670_60 (sequence is synthesized)
ggggcagaaagcagaagatgtccctgtgaggattgcactgggtgcaagttcctgtgaaatatgccacgaggtgttcaaatcaaaaaacgtgcgtgtgctcaaatgtgggcacaagtatca

SEQ ID NO: 648084 - DNA, 120 bp, Artificial Sequence
  ENSG00000182670_61 (sequence is synthesized)
caaagggtgctttaagcagtggcttaaagggcagagcgcttgcccggcctgccagggtcgtgatctcctgacagaagagtcaccttctggaagaggctggcccagtcagaatcaggagct

SEQ ID NO: 648085 - DNA, 120 bp, Artificial Sequence
  ENSG00000182670_62 (sequence is synthesized)
gccttcctgctcttctaggtagtcacacttcactaaagtgtcatccaccagtgtgttgaatccgaagaatgacaattttctaccactggtgtaaaaaacaaacatttgaagacccttgtg

SEQ ID NO: 648086 - DNA, 120 bp, Artificial Sequence
  ENSG00000182670_63 (sequence is synthesized)
cattgtgtgtcacaaagctaaatacatggaaatcgttaatatcgctgatattaagtaatttccccactctgagtgaatactttgatgattgccaacagtggctaataaaatgacggctac

SEQ ID NO: 648087 - DNA, 120 bp, Artificial Sequence
  ENSG00000182670_64 (sequence is synthesized)
cacactcatgggtcactggggctgcgcagggctctttgaggtgggtggcttcttttggaaagtactatgaacgtctcgaagcagtattctagtgataagaattcttaacatagccaagcg

SEQ ID NO: 648088 - DNA, 120 bp, Artificial Sequence
  ENSG00000182670_65 (sequence is synthesized)
ccccacgtttgttccccacgtttgttccccttttctgtttgaaaaacctgttctggtagctccacaagagagatgatactgactttttaaattttttacaagagtctgtattcctgatat

SEQ ID NO: 648089 - DNA, 120 bp, Artificial Sequence
  ENSG00000182670_66 (sequence is synthesized)
gcctatatttttcctcaaagattctgcattttaaggatgggcataagcaaactatattttaataatttatagttaatgttaaaatattggctgatttagaccaaaagattcaaatctcct

SEQ ID NO: 648090 - DNA, 120 bp, Artificial Sequence
  ENSG00000182670_67 (sequence is synthesized)
ctttgtgaaatcccatctgcatttgattttttattattttatgttcccccgttagattgttttaagtgtttgcttttcatcttttatagatgtaatctgattttcaaaaatcattaacac

SEQ ID NO: 648091 - DNA, 120 bp, Artificial Sequence
  ENSG00000182670_68 (sequence is synthesized)
tttttaattagtatcgactaagactttttccccctggaatcgaggctgtgtgtccgtcatcccagcccccggttggagcctgctctttgaactccgctgccttccttagcagcttctgtc

SEQ ID NO: 648092 - DNA, 120 bp, Artificial Sequence
  ENSG00000182670_69 (sequence is synthesized)
ctcttctgtgagtcagtcagcgagtgcttgggatccgcatccagccgtgctgagcacacaacaggctgtgtgtggaaatggccaccaccattctccttccccaccccaccacaaaaagag

SEQ ID NO: 648093 - DNA, 120 bp, Artificial Sequence
  ENSG00000182670_70 (sequence is synthesized)
aagctgtgtctttagacaaccctgaggtatctgtgttacaatcgttctgtgtttgatatttgtgtaaagtatgcatgcagtcttgtactgtgacctaagaacaaaactgtaactgcatta

SEQ ID NO: 648094 - DNA, 120 bp, Artificial Sequence
  ENSG00000182670_71 (sequence is synthesized)
gaaaccatgaaaaaattagatattgttttgtgacttttagacagtggtaaatatagaaccatgaattctggtcacattccatttctctccaacatgaaggatcaaaaaatgtttttcaat

SEQ ID NO: 648095 - DNA, 120 bp, Artificial Sequence
  ENSG00000182670_72 (sequence is synthesized)
gtgttctttgttccactggaaacttagagtcatgagtttatgagctgatttggtcaccttcctctgcctttgttcactgtgagttctgatgtcttagtgacttagttcttagaagctcac

SEQ ID NO: 648096 - DNA, 120 bp, Artificial Sequence
  ENSG00000182670_73 (sequence is synthesized)
gccttagtttgaaacagattctccacggtggtccccaaaacactgtctgcatatccataagaattgagcgctatgggtgttaacgtgcatgaggatcagtttgcagcagcaagtacaaaa

SEQ ID NO: 648097 - DNA, 120 bp, Artificial Sequence
  ENSG00000182670_74 (sequence is synthesized)
ggagaagaggaacatccgttgaatgagtgtgttttgtacataacttcagatacttgtgaacatgccttatatttgtccaacaactgtcagaataaagaacattctaaaatgagaagttca

SEQ ID NO: 648098 - DNA, 120 bp, Artificial Sequence
  ENSG00000182670_75 (sequence is synthesized)
tgtattctttaaatattatgtctcattagtctcttctctcctgctggaactttaactggatatatatatacactaaactgtttccagatcacttattctttatctttcatattttttatc

SEQ ID NO: 648099 - DNA, 120 bp, Artificial Sequence
  ENSG00000182670_76 (sequence is synthesized)
tctttgtttctctttaccagaatttacagtgctggataatttcataaggcatatattttagttcaccaattttctcttcaactgtgcctaatatcctctgtaacccatcctgtctctttt

SEQ ID NO: 648100 - DNA, 70 bp, Artificial Sequence
  ENSG00000182670_77 (sequence is synthesized)
actgtgcctaatatcctctgtaacccatcctgtctcttttttttcttttaacaattgcatttttaattac

SEQ ID NO: 648101 - DNA, 69 bp, Artificial Sequence
  ENSG00000182670_78 (sequence is synthesized)
atttttaatttctaaaagttctgcctggttcttttttgatatgtccagtcattcttcatgttctcatgt

SEQ ID NO: 648102 - DNA, 120 bp, Artificial Sequence
  ENSG00000182670_79 (sequence is synthesized)
tcttttttgatatgtccagtcattcttcatgttctcatgttatatgctgatttttgtgactctatagctattctgtagactatatcagacattcccaatgtctgatatccttgaggaggg

SEQ ID NO: 648103 - DNA, 120 bp, Artificial Sequence
  ENSG00000182670_80 (sequence is synthesized)
ggatgtctaaatttattgcttttttgtttttttttctgttgtctctcctcaatgtagctgtcacctcatgtgtttggtgatcattgattatgaacttctgtttgatctttgtggtgatct

SEQ ID NO: 648104 - DNA, 120 bp, Artificial Sequence
  ENSG00000182670_81 (sequence is synthesized)
tgagagtctaatttgaggatgcttgctttctgaaagcatttctatcagctttgtctgggagccagaaagtttagctggcatcacttttgagttcctacattttgcttctggcccagggct

SEQ ID NO: 648105 - DNA, 120 bp, Artificial Sequence
  ENSG00000182670_82 (sequence is synthesized)
cagtgtcctgatcctattactgctcttggcaccactacttgtagcactaaactgtagccaggtttaatttctagctcaaggtttgttgcttttgcgtggagagggtgccttcacatgttc

SEQ ID NO: 648106 - DNA, 120 bp, Artificial Sequence
  ENSG00000182670_83 (sequence is synthesized)
ccctatttctatgagctcagcaaaaacatccaaaaagtgtttttttttttaatctaggatatacctttttcctcccaacagtacattcccccagagtgtatagttgaccataactgatgg

SEQ ID NO: 648107 - DNA, 120 bp, Artificial Sequence
  ENSG00000182670_84 (sequence is synthesized)
gatcagaagctctttattttaatatttaattttagtagtatatttttgtttgattgtattataaaaaattttatggtaccaagcaagctttcttggtgataccaacatttccattaaaac

SEQ ID NO: 648108 - DNA, 120 bp, Artificial Sequence
  ENSG00000182670_85 (sequence is synthesized)
tagtttacatctaagttaagatttgagttatcctaaagaaaagtattaagtaaatagcagtacagatggcaaatggattgcacaatatatcctctggatccatagtgaccctgcagagat

SEQ ID NO: 648109 - DNA, 120 bp, Artificial Sequence
  ENSG00000182670_86 (sequence is synthesized)
aaacctgtgatggtcaaacaatgtgaaaactgctgtcagagacatgggcagggtgctcttgtttacagagaagaggtgcaaaaatcaacttgatggtagtgggaagatcaggaaatgctt

SEQ ID NO: 648110 - DNA, 120 bp, Artificial Sequence
  ENSG00000182670_87 (sequence is synthesized)
cctgaaattgagtattaagaactaatagacattaggtggttgcagaataagttttgtttaggaaggacaagcagttgggtatgactggcttctaggttgtgtgttgtggagtgactgggg

SEQ ID NO: 648111 - DNA, 120 bp, Artificial Sequence
  ENSG00000182670_88 (sequence is synthesized)
ataaaagcaggagcaagatcacaaaaggtcttctatgcttatattagggaagttggactttattctcaagctgaagggaagctgttgcatggttttaagcagtaaagtgatatgatcaga

SEQ ID NO: 648112 - DNA, 120 bp, Artificial Sequence
  ENSG00000182670_89 (sequence is synthesized)
gttttagaggatgccaagattgaaggcaagtctgaccagttaggagactgcttgttaaattagttcagaggagaaacagtgaaggcagtggcactgggcatgaagaagtatatgtgtgct

SEQ ID NO: 648113 - DNA, 120 bp, Artificial Sequence
  ENSG00000182670_90 (sequence is synthesized)
aattttagatttcttagggaagcagaaatgacaagagttagtggtccattggacagaaatattgaaggagactggggagtctaggttgactcccagggtttaggtttgggcagtaaaatg

SEQ ID NO: 648114 - DNA, 120 bp, Artificial Sequence
  ENSG00000182670_91 (sequence is synthesized)
acatgtagaacaattaactgataaacagcatacagaaagaggaaagaacttcatttcatatgtttgtttttgaggaaaagatgtttgtttttgaacttcctgattcagaggggcttgtgg

SEQ ID NO: 648115 - DNA, 120 bp, Artificial Sequence
  ENSG00000182670_92 (sequence is synthesized)
gacatcttggttaagatcctgtagtagttctagtagggtctagaagtcaagagatacaaccccgcctggaaggatttgggagtcttcagcatttggaattttggaagccattgtttactg

SEQ ID NO: 648116 - DNA, 120 bp, Artificial Sequence
  ENSG00000182670_93 (sequence is synthesized)
cagtgcatatgagataatttaaactggtacatagataaacacttgaaaaaattttaatagataggaatttaatgtgtatgagaaacataacttgcacatctaacctttgataatcatgga

SEQ ID NO: 648117 - DNA, 120 bp, Artificial Sequence
  ENSG00000182670_94 (sequence is synthesized)
cattatcacttaggccaagtgagctcaataaaagggaaatattaactaaaaatatatgtgatacatggaaatggcaaaaatcacggtgaagctatgcaaacgatgcaagttcagaaagtg

SEQ ID NO: 648118 - DNA, 120 bp, Artificial Sequence
  ENSG00000182670_95 (sequence is synthesized)
ctgtgttaagtcatgggtgtggtggataaattcacccaaggagagagtaagagtgagaagaaaagagagttgacattgggtggcggggaatggagaagaagaacccatgaaggaaactga

SEQ ID NO: 648119 - DNA, 120 bp, Artificial Sequence
  ENSG00000182670_96 (sequence is synthesized)
caggagtacaagcacagtagactttgaaatatattgttgcttgtctatttcttttaaataattatgtttctgttttctttatttctatttctgttgcattttaaaaattaatttataaat

SEQ ID NO: 648120 - DNA, 120 bp, Artificial Sequence
  ENSG00000182670_97 (sequence is synthesized)
taaatatttttattttacaagatttctgcatttatttcccattgtcaatataaaaatactgaatttattgttgtcaactttttttggattaacttgaaactataaacatgttgtaaaaac

SEQ ID NO: 648121 - DNA, 80 bp, Artificial Sequence
  ENSG00000182670_98 (sequence is synthesized)
acgtgacgcacctcgcttcaacgccgccacccgctccctcccgccgtcggctgacgtggagggccggaggtggcggcggc

SEQ ID NO: 648122 - DNA, 120 bp, Artificial Sequence
  ENSG00000182670_99 (sequence is synthesized)
agatttatatgccttttaaaaatgtattcttactagtttttcactagaaatcagaacttttctttgttaaaatagagtttttgccagcacttaaatattcttaacatttaacaggctaga

SEQ ID NO: 648123 - DNA, 120 bp, Artificial Sequence
  ENSG00000182670_100 (sequence is synthesized)
atacttcattcattcatttcttccctctccatatccatttttgcctttttactattaagtgttgattcattaaaaaaatgaggcacaaacattaattttaaactttttttttaattaaga

SEQ ID NO: 648124 - DNA, 120 bp, Artificial Sequence
  ENSG00000182670_101 (sequence is synthesized)
aggtgtttgggaaaatgagatatgtagttaagtgatttctgatttatcttagaatttaaaaaaagtttttattttgttatatatggctgaaaaagagaatttcttttttttattatttat

SEQ ID NO: 648125 - DNA, 120 bp, Artificial Sequence
  ENSG00000182670_102 (sequence is synthesized)
aagttggttaaaatatctcaaccactgaattattatgctaaatacccatttttgggaaacgtttctgtttttcaggtatacaagaaaatccttgactggttctttggcagaaatacttaa

SEQ ID NO: 648126 - DNA, 120 bp, Artificial Sequence
  ENSG00000182670_103 (sequence is synthesized)
gtggttaaaagagtatgcttaggctttatatataataacaacagtgacagcagcagctattctgattgagtgcagacatatgttaagcattattttaagtgctttgcatatgttatttgg

SEQ ID NO: 648127 - DNA, 80 bp, Artificial Sequence
  ENSG00000182670_104 (sequence is synthesized)
ctcccgccgtcggctgacgtggagggccggaggtggcggcggcggcggcggcggctgctgctgctgctgcccgcgtccga

SEQ ID NO: 648128 - DNA, 120 bp, Artificial Sequence
  ENSG00000182670_105 (sequence is synthesized)
cgcgttaccccagtgcctgtgttcaagtcacccctattttactccataatggccccaaagcatgggagtaatgatgctggtcaatcagatatgccatagagaagcaatatattgcttcct

SEQ ID NO: 648129 - DNA, 120 bp, Artificial Sequence
  ENSG00000182670_106 (sequence is synthesized)
ttaagtgaaaagctgaaagttctcaacccaataaggaaagagaaaagatcgtatcctgaggttgctaagatctatggtcagaacaaatctacccatgatattgtgaagaaggaaaaagaa

SEQ ID NO: 648130 - DNA, 61 bp, Artificial Sequence
  ENSG00000182670_107 (sequence is synthesized)
tacatttggaaagtcttactgacatgcagaaatagtacagaaaaacatacaaataggaatg

SEQ ID NO: 648131 - DNA, 66 bp, Artificial Sequence
  ENSG00000182670_108 (sequence is synthesized)
tgtgcctactaaaaattcaaaaaattagccgggtgtactggcatgtgcctgtaatcctagctactt

SEQ ID NO: 648132 - DNA, 120 bp, Artificial Sequence
  ENSG00000182670_109 (sequence is synthesized)
gaatgctatgcataggtacaatgtcgaaatgtgcaagaaatacttcagaaatattaaaagtagttattcctgggtagttgtgattgtgactctgggtgactttttccctttgttttattt

SEQ ID NO: 648133 - DNA, 120 bp, Artificial Sequence
  ENSG00000182670_110 (sequence is synthesized)
ttctgtattttccaaatttcctataatggacatatattatatggattttttttaattaaaattatcttttgactagataatatacatggaaaattcacaaagtacacatatgcaagatat

SEQ ID NO: 648134 - DNA, 120 bp, Artificial Sequence
  ENSG00000182670_111 (sequence is synthesized)
ggtttcccgtttagtcagccattttgcccttggtttctaaactacacttgtgtcaaagccaaataaggaatagaacatggcctatgccagtagtatgaggagttattttaaggctttagt

SEQ ID NO: 648135 - DNA, 120 bp, Artificial Sequence
  ENSG00000182670_112 (sequence is synthesized)
gtactatatggaaatgtaaatatttagttttctcacaaaaccatctgtatattcctacagacagccgctgtactgtgttaaggaaacaagatagtggtgaagcaccgtttagttcaacca

SEQ ID NO: 648136 - DNA, 120 bp, Artificial Sequence
  ENSG00000182670_113 (sequence is synthesized)
cgtcggctgacgtggagggccggaggtggcggcggcggcggcggcggctgctgctgctgctgcccgcgtccgaggctcgcgggcggcgggcccggacttgtgcaccatggacaattttgc

SEQ ID NO: 648137 - DNA, 120 bp, Artificial Sequence
  ENSG00000182670_114 (sequence is synthesized)
gttatgcagcttttagatggcttaagccgtggataaaccgaggctatctagactagaggaatggatgggcttgacacagtcttccatcaataccactgtcctcaacgggttctgacaaga

SEQ ID NO: 648138 - DNA, 120 bp, Artificial Sequence
  ENSG00000182670_115 (sequence is synthesized)
aatgagctgcacatgtctttaggttattgctactggctaggtccagaattgcatttattttgtgctgtttgaaggtgaatttgtatgctttcaagatcagatgaataggttggcaacttg

SEQ ID NO: 648139 - DNA, 120 bp, Artificial Sequence
  ENSG00000182670_116 (sequence is synthesized)
gctagcctcttgtgaaaattgaggtgcctgtctgaaatattgcctggcagaaggttttccactttccacttctgagagctgagaggcacaccagggtgtttctgctctctttcatgagtg

SEQ ID NO: 648140 - DNA, 120 bp, Artificial Sequence
  ENSG00000182670_117 (sequence is synthesized)
ttgaatgctagacacacaaggaagatccttctaataccttgctgcaacaggaggtgaatcagagtagaagtacagaagctaggtagtttggtgaggtaaaggccaagagcagcttgtgga

SEQ ID NO: 648141 - DNA, 120 bp, Artificial Sequence
  ENSG00000182670_118 (sequence is synthesized)
tctatccttgtacctccttgctgatggtctagcttgtggtttaataccatctacatttcactaaagccaggtcagcagcattgttcctttgtttcttattaggcaatcaccaatatatat

SEQ ID NO: 648142 - DNA, 120 bp, Artificial Sequence
  ENSG00000182670_119 (sequence is synthesized)
tggatgcctattttattcacgaagtgttttaccacactggttttgctggtgtttcctacctcctcacacattgtctatatgatttgctcagtaatgtagggataatgttttcagagtcca

SEQ ID NO: 648143 - DNA, 120 bp, Artificial Sequence
  ENSG00000182670_120 (sequence is synthesized)
tagtatatataactcctgatcaggtgactagatggtgtgacttaaggaaagaacacgttgccagtaattcagatgtgccattgacacaggaggacccatgcctgagaaagacttttatct

SEQ ID NO: 648144 - DNA, 120 bp, Artificial Sequence
  ENSG00000182670_121 (sequence is synthesized)
gagttactgagattaagatgttttgaagctcccaagcagagggatgctggatctgctgtggaaatctggctgagcagctgcagggacagctgggggtaaagcatccaccctcccccagtt

SEQ ID NO: 648145 - DNA, 120 bp, Artificial Sequence
  ENSG00000182670_122 (sequence is synthesized)
tggcgaggatgcactcctcagctgttctggaaggccagacttcttatctgctgtcattgaagcaagaattgagatgtccaaagagaacagaaatgggacaatttaatactagaaaggaat

SEQ ID NO: 648146 - DNA, 120 bp, Artificial Sequence
  ENSG00000182670_123 (sequence is synthesized)
gaagaacacttggccaaagccaggagctgcacttagagataacaatgaaaagctgagtgaaggggagacggctggatggaagatctagcctgagcacatcccccatctgtctgcactctt

SEQ ID NO: 648147 - DNA, 120 bp, Artificial Sequence
  ENSG00000182674_0 (sequence is synthesized)
ccctgtgtgcgcgccgggccggctagctgcggggcgggggagcggcgccccagagcgccccgcctagcctcccgcgcgcagcctctaccctgctccgccacagacacacacccaccaagc

SEQ ID NO: 648148 - DNA, 120 bp, Artificial Sequence
  ENSG00000182674_1 (sequence is synthesized)
ccgcggccgccgccgccgctgcgcctcgggcagccccagcgagcggcaactcccgggctggcgcggctcgctttctggctccttccgcgcggcgagctcagccccgctcgatttttcctc

SEQ ID NO: 648149 - DNA, 120 bp, Artificial Sequence
  ENSG00000182674_2 (sequence is synthesized)
ccgcgcggcgagctcagccccgctcgatttttcctcttctgttccagccctctcttgtctgggtggctgtggcggcggcagggggatggggaccccgtgtggggaaggggttgaagatcg

SEQ ID NO: 648150 - DNA, 120 bp, Artificial Sequence
  ENSG00000182674_3 (sequence is synthesized)
atgaagattattgttcttttaaaggatgccttagcttcctcccgccgcctttcctctgagccttcctactagagaccgtgaaccagagtcagggatgtaaagacagggggaaagcacgcc

SEQ ID NO: 648151 - DNA, 120 bp, Artificial Sequence
  ENSG00000182674_4 (sequence is synthesized)
gggagctccagccagccggggagaccctcctctctgtggaggggagggggatttccagcgacaggtcattggcgaaggggatcgtcgcggggagaggctccccggagggagcggggaatc

SEQ ID NO: 648152 - DNA, 120 bp, Artificial Sequence
  ENSG00000182674_5 (sequence is synthesized)
ccacagccctttgtggtgcccgagcccgtgccgcctgctgagcggggtctgtgggagctagctttgtcagtggaaatgcctgccccagagggatattgcttcagttgacctcatttttta

SEQ ID NO: 648153 - DNA, 120 bp, Artificial Sequence
  ENSG00000182674_6 (sequence is synthesized)
aggaccctggctctgcggctttgtccagttcaaaatggcagaaaaggctcccccgggcttaaacaggaagacttcaaggtcgacactttcccttcctccagagcctgtggacattatccg

SEQ ID NO: 648154 - DNA, 120 bp, Artificial Sequence
  ENSG00000182674_7 (sequence is synthesized)
gagcaaaacatgctccaggagagttaagatcaatgtggggggcctcaaccacgaagtcctgtggagaacgctggacaggctgcccaggacgcgcctggggaagcttcgagactgcaacac

SEQ ID NO: 648155 - DNA, 120 bp, Artificial Sequence
  ENSG00000182674_8 (sequence is synthesized)
acacgagagcctcctggaagtgtgcgacgactataatctgaacgagaacgagtatttctttgatcggcatccaggagccttcacttccattttaaatttctaccggaccgggaaactcca

SEQ ID NO: 648156 - DNA, 120 bp, Artificial Sequence
  ENSG00000182674_9 (sequence is synthesized)
tatgatggaagaaatgtgtgcactttcgtttggccaagaacttgattactgggggattgatgagatctacttggagtcctgctgccaggccagatatcatcaaaaaaaagaacaaatgaa

SEQ ID NO: 648157 - DNA, 120 bp, Artificial Sequence
  ENSG00000182674_10 (sequence is synthesized)
cgaagaactgaggcgagaggcagagactatgcgagagcgagaaggagaagagtttgataatacctgctgccctgataaaaggaagaaactgtgggacttgctggagaaacctaactcatc

SEQ ID NO: 648158 - DNA, 120 bp, Artificial Sequence
  ENSG00000182674_11 (sequence is synthesized)
agtggctgcaaagatcctggccatcgtgtctatcctgttcattgtgctttccaccattgctttgtctctcaatacgctgccggagctgcaggaaacggacgaatttggacaactcaatga

SEQ ID NO: 648159 - DNA, 120 bp, Artificial Sequence
  ENSG00000182674_12 (sequence is synthesized)
caaccgccaattagcacacgtggaggctgtgtgtattgcatggtttaccatggagtaccttttgcgattcttatcctcaccaaataaatggaagttcttcaaaggcccactgaatgtcat

SEQ ID NO: 648160 - DNA, 120 bp, Artificial Sequence
  ENSG00000182674_13 (sequence is synthesized)
tgatttgctggccatcttgccgtactatgtcaccatttttctgacggagtccaacaagagcgtgctgcagttccaaaacgtgaggcgcgtggtccagatcttccgaatcatgcgcatcct

SEQ ID NO: 648161 - DNA, 120 bp, Artificial Sequence
  ENSG00000182674_14 (sequence is synthesized)
caggatcctgaaactcgccaggcattcgacaggcctgcagtctctgggtttcacccttaggcggagttacaatgaattgggcttgttgatattgtttctggccatggggataatgatatt

SEQ ID NO: 648162 - DNA, 120 bp, Artificial Sequence
  ENSG00000182674_15 (sequence is synthesized)
gatgaagatgctaccaagttcaccagtatccctgcatcattttggtgggccaccatcaccatgaccactgttggctatggtgacatttaccctaaaacattactagggaaaattgtggga

SEQ ID NO: 648163 - DNA, 120 bp, Artificial Sequence
  ENSG00000182674_16 (sequence is synthesized)
ggtctgtgctgtattgctggggttctggttattgcccttcctatcccaattattgtgaacaatttttctgagttttacaaggagcagaaacgccaagagaaagcaattaaaaggagggag

SEQ ID NO: 648164 - DNA, 120 bp, Artificial Sequence
  ENSG00000182674_17 (sequence is synthesized)
gctcttgagcgggccaaaaggaacggaagcatcgtttctatgaacttaaaagatgccttcgctcgaagtatggaactgatagatgtggctgttgagaaggccggagagtccgccaacaca

SEQ ID NO: 648165 - DNA, 120 bp, Artificial Sequence
  ENSG00000182674_18 (sequence is synthesized)
aaggactccgccgacgataatcacctgtcgccaagccggtggaagtgggccaggaaggctctgtcggaaacaagctccaacaagtctttcgagaataagtaccaggaggttagccaaaaa

SEQ ID NO: 648166 - DNA, 120 bp, Artificial Sequence
  ENSG00000182674_19 (sequence is synthesized)
gactcccacgagcagctgaacaacacgtcttcctccagcccacagcatctgagtgcccagaaactggagatgctatacaatgaaatcaccaagacacagcctcattctcacccaaaccca

SEQ ID NO: 648167 - DNA, 120 bp, Artificial Sequence
  ENSG00000182674_20 (sequence is synthesized)
gactgccaagaaaagcctgagaggccatctgcatatgaagaagagattgaaatggaagaagtggtgtgtccacaggagcagctggccgtggcacagaccgaggtcattgtggacatgaag

SEQ ID NO: 648168 - DNA, 120 bp, Artificial Sequence
  ENSG00000182674_21 (sequence is synthesized)
agcacctccagcatcgacagcttcaccagctgtgccaccgacttcacagagacagagagatcgccgctgccgccgccctccgcctctcacttgcagatgaagttcccaaccgacctccca

SEQ ID NO: 648169 - DNA, 120 bp, Artificial Sequence
  ENSG00000182674_22 (sequence is synthesized)
gggacagaagagcaccaaagagctaggggccccccgtttctaactctatccagagagaaaggacctgctgccagggatggcacgctggagtatgccccagttgacataactgtgaacctc

SEQ ID NO: 648170 - DNA, 120 bp, Artificial Sequence
  ENSG00000182674_23 (sequence is synthesized)
gatgccagtggctcccagtgtgggctacatagtcctttgcagtctgacaatgccaccgacagtcctaagagctctctaaaaggcagcaacccactaaagtccagatccctcaaagtgaac

SEQ ID NO: 648171 - DNA, 120 bp, Artificial Sequence
  ENSG00000182674_24 (sequence is synthesized)
tttaaggaaaatagaggcagtgcaccacagaccccgcccagcacagccaggccactgccagtcaccacagctgacttttcgctcactaccccgcagcacatcagtaccatcctcttagaa

SEQ ID NO: 648172 - DNA, 120 bp, Artificial Sequence
  ENSG00000182674_25 (sequence is synthesized)
gaaaccccctcccagggagacagacccttgctgggcactgaggtttcagcgccttgtcagggaccttccaaagggctgtcccccaggtttcccaagcagaaactgttccctttctcttca

SEQ ID NO: 648173 - DNA, 120 bp, Artificial Sequence
  ENSG00000182674_26 (sequence is synthesized)
agagagaggaggagcttcactgaaatagatactggtgacgacgaagacttcttagagctcccaggggcaagggaggagaagcaggtggactccagcccaaattgctttgcagataagcct

SEQ ID NO: 648174 - DNA, 120 bp, Artificial Sequence
  ENSG00000182674_27 (sequence is synthesized)
agtgatgggagagaccctttaagagaagagggcagtgtgggctcttcctccccgcaggacacaggtcacaactgtaggcaagacatttaccatgctgtgagtgaagtcaaaaaggacagt

SEQ ID NO: 648175 - DNA, 120 bp, Artificial Sequence
  ENSG00000182674_28 (sequence is synthesized)
agtcaagaagggtgcaagatggaaaatcacttgtttgccccagaaattcattccaacccaggagacacaggttattgtcccacacgtgaaaccagcatgtgactagttacaaaagcaata

SEQ ID NO: 648176 - DNA, 120 bp, Artificial Sequence
  ENSG00000182674_29 (sequence is synthesized)
aattgaaacaaaacaaaacaaaacaaaacttgtttcttaaaaatgcggttaataatgcctgtgaactaaaaaaatgggaagccctccccaaaaaaagtgcataaaatgttatttttgcat

SEQ ID NO: 648177 - DNA, 120 bp, Artificial Sequence
  ENSG00000182674_30 (sequence is synthesized)
ggcatgaacagtttagcttaagtactgtttaaataatgagtcaagactgcattttgtaacaaaccaacaaaaatgactgaagaacagtgaacaaataaaaagagctctattaggaaccaa

SEQ ID NO: 648178 - DNA, 120 bp, Artificial Sequence
  ENSG00000182676_0 (sequence is synthesized)
cgacaggagccctcaagctgatctggtcgggaccggatacattattaaccccagtgcagtagggtccccaggggcaacctgccccacagcgcccaagatgcctagcagaactgcccgcta

SEQ ID NO: 648179 - DNA, 120 bp, Artificial Sequence
  ENSG00000182676_1 (sequence is synthesized)
tgcccgctacagcccacggcagcggcggcggcggatgctggctgatcgcagcgtgcgtttccctaatgatgtcctgttcttggaccacatccggcagggtgacctggagcaggtggggcg

SEQ ID NO: 648180 - DNA, 120 bp, Artificial Sequence
  ENSG00000182676_2 (sequence is synthesized)
cttcatccggactcggaaagtctccctggccaccatccacccctcaggcctggccgccttgcatgaagccgtgctctctggaaacctggaatgcgtgaagctgctggtcaaatacggggc

SEQ ID NO: 648181 - DNA, 120 bp, Artificial Sequence
  ENSG00000182676_3 (sequence is synthesized)
taccttatctccctgggagcggacagggatgcaaccaacgacgatggcgacctgccctccgacctcatcgacccggactacaaggagctggtggagctcttcaaagggaccacgatggac

SEQ ID NO: 648182 - DNA, 120 bp, Artificial Sequence
  ENSG00000182676_4 (sequence is synthesized)
tcaaagggaccacgatggactgagccagctttgcccgcccgcccccgcgcccagggccgcctccctggagaagccgcgcgtcgcccatgggccagcacgtgccccacccgtgggccaggg

SEQ ID NO: 648183 - DNA, 120 bp, Artificial Sequence
  ENSG00000182676_5 (sequence is synthesized)
acgaccccgccacccctcctaggcctggctttgtccccaggtgaattttttactgtgacactttttactttttcaataaacgtgactcccaggtgagggggcctgggtctacacacgtgg

SEQ ID NO: 648184 - DNA, 120 bp, Artificial Sequence
  ENSG00000182676_6 (sequence is synthesized)
tgacattcaccagcgagatgaggcgggctggacacccctgcacattgcctgcagcgatgggtaccctgacatagccaggtgagggggccctgggtctacacaggcttgaacccgacccct

SEQ ID NO: 648185 - DNA, 120 bp, Artificial Sequence
  ENSG00000182676_7 (sequence is synthesized)
ccgggcctcagtgggtccccaggatgggagccccaaaatgtagcccgggtggtgtcggcaagaaccctagaggctgggggcggtggctcacgcctgcgcctgtaatcccagcactttggg

SEQ ID NO: 648186 - DNA, 85 bp, Artificial Sequence
  ENSG00000182676_8 (sequence is synthesized)
gcggatcacctgaggtcaggagttcgtgacaagaaccctctcactactaaaaatacaaaattagccacaggctgaggcaggagaa

SEQ ID NO: 648187 - DNA, 81 bp, Artificial Sequence
  ENSG00000182676_9 (sequence is synthesized)
agagcgaaattctgtctcaaaaaacaaaaaaaacaaaaaaagaaccctgcaaaccctagaggcttctggaatcctgtttct

SEQ ID NO: 648188 - DNA, 120 bp, Artificial Sequence
  ENSG00000182676_10 (sequence is synthesized)
gaaccctgcaaaccctagaggcttctggaatcctgtttctgcctttgtcctcaatagaaccaacttgaaaagctggccacagcttccaaagggtcaggtttcttcctcctcaccctaccc

SEQ ID NO: 648189 - DNA, 120 bp, Artificial Sequence
  ENSG00000182676_11 (sequence is synthesized)
ggaccttaggaccccaaggtgggggacacacaggtgaccccaggactctggccctctgacccgggttggggcgagcactctcctggctcctccccgcttcagccagagcgacctttacac

SEQ ID NO: 648190 - DNA, 120 bp, Artificial Sequence
  ENSG00000182685_0 (sequence is synthesized)
tgccgtctcaccacgggtgggaggactcaaagtagatgggtaactggggttccaactccagagctggaatgccaactgcccactcccagcctggttcagaggaagatgttttgaagaatg

SEQ ID NO: 648191 - DNA, 120 bp, Artificial Sequence
  ENSG00000182685_1 (sequence is synthesized)
agggaaagccaggcacaaagggaagccagggaagcaaagggccctggagtgaagctggtgggctgccgtgtcagagcgcccagggcagggagcagagctcagaagtaatgctggcccggg

SEQ ID NO: 648192 - DNA, 89 bp, Artificial Sequence
  ENSG00000182685_2 (sequence is synthesized)
gcagggagcagagctcagaagtaatgctggcacgctttggaaggctgaggcaggtggattacttgagatcaggagttcaagaccagcct

SEQ ID NO: 648193 - DNA, 120 bp, Artificial Sequence
  ENSG00000182685_3 (sequence is synthesized)
gcgagactccgtctcaaaaaaaaaaaagttgggctaggcgggcccccgaggctggcctgactgtcccaggggcacaggctccagcaggctgcctgtctgtggtccaggcttcaggaaccc

SEQ ID NO: 648194 - DNA, 120 bp, Artificial Sequence
  ENSG00000182685_4 (sequence is synthesized)
ggtccaggcttcaggaacccccggtcttgggtgtgcgggggctgggaagtggctgggggtgcacagtcccacacctgtcattcactgaacaggcacgtattgacagcttgtggcgtgtca

SEQ ID NO: 648195 - DNA, 120 bp, Artificial Sequence
  ENSG00000182685_5 (sequence is synthesized)
ggccctgtgcccaactctgggagtcaaggataacctgacagactcaggccactttaggaaaacgaaatccaccccaaccacacttagcgagtcaccctggccgggcctgggctgccctcc

SEQ ID NO: 648196 - DNA, 120 bp, Artificial Sequence
  ENSG00000182685_6 (sequence is synthesized)
caggtgggaggaggggctgtcctggctctgacctggatatcagatccagagctgagggggaggcgcagggtcaggaggggaggggttctgttctgagtttcccctggccaaggctgcaga

SEQ ID NO: 648197 - DNA, 120 bp, Artificial Sequence
  ENSG00000182685_7 (sequence is synthesized)
caagggacgcagacaatcggcacattgtgagcaggggctgcaggatggaaccagcaagctgctgtgctgagcgccccaaacctgggcctacaggggtgaagaccaagccctcctgcgggg

SEQ ID NO: 648198 - DNA, 120 bp, Artificial Sequence
  ENSG00000182685_8 (sequence is synthesized)
gctggagagccgtgagcctgctcctgctgctgctgctgctggtgctggccgctgtgggggttgtggctggagggcttcttggctctgctcagggccctcccaagccaaggctgcagacgc

SEQ ID NO: 648199 - DNA, 120 bp, Artificial Sequence
  ENSG00000182685_9 (sequence is synthesized)
tgcgaatgaccctcccgagcccccacatgccccggcccaaccaaaccatcctggtggacgtggcccggaacgcggcgaccatcacagtgaccccacctcagagcaaccacagctgggcgg

SEQ ID NO: 648200 - DNA, 120 bp, Artificial Sequence
  ENSG00000182685_10 (sequence is synthesized)
tgctgttcgacgggcagagcggctgcatctgttaccgccctgaggagcaccaggtctgcttcctccgcctgatggaggacagtgatcgggagaccctgcggctgctggtggatacctcca

SEQ ID NO: 648201 - DNA, 120 bp, Artificial Sequence
  ENSG00000182685_11 (sequence is synthesized)
aggtccaagaggcttgggtccccagccaggacacccaccacacccaggagctgctggcagtgcaggggagcctcgaagtggaccccgcccaggcgggggctttggtgcagcgcctgtgca

SEQ ID NO: 648202 - DNA, 120 bp, Artificial Sequence
  ENSG00000182685_12 (sequence is synthesized)
tgaggacccccatctactgggcccggcgagcagaggggccccggagacagcggctgatttatctctgcatcgacatctgcttcccgagcaacatctgcgtgtcggtctgcttttattacc

SEQ ID NO: 648203 - DNA, 120 bp, Artificial Sequence
  ENSG00000182685_13 (sequence is synthesized)
tcccagactgagcccccgacctggcccagcctggcccgtccccaatccagtgggctggccaggccacctgcaccagggaggacagctgctggcagggactaataaacccttccacctggc

SEQ ID NO: 648204 - DNA, 120 bp, Artificial Sequence
  ENSG00000182685_14 (sequence is synthesized)
gagattcacggcaccctcgccacagggccccggagacagcggctgatttatctctgcatcgacatctgcttcccgagcaacatctgcgtgtcggtctgcttttattacctcccagactga

SEQ ID NO: 648205 - DNA, 120 bp, Artificial Sequence
  ENSG00000182687_0 (sequence is synthesized)
agagtcgcactaggagttgcagcggccgcagccccgggagcttcccgctcgcggagacccagacggctgcaggagcccgggcagcctcggggtcagcggcaccatgaacgtctcgggctg

SEQ ID NO: 648206 - DNA, 120 bp, Artificial Sequence
  ENSG00000182687_1 (sequence is synthesized)
cccaggggccgggaacgcgagccaggcgggcggcgggggaggctggcaccccgaggcggtcatcgtgcccctgctcttcgcgctcatcttcctcgtgggcaccgtgggcaacacgctggt

SEQ ID NO: 648207 - DNA, 120 bp, Artificial Sequence
  ENSG00000182687_2 (sequence is synthesized)
gctggcggtgctgctgcgcggcggccaggcggtcagcactaccaacctgttcatccttaacctgggcgtggccgacctgtgtttcatcctgtgctgcgtgcccttccaggccaccatcta

SEQ ID NO: 648208 - DNA, 120 bp, Artificial Sequence
  ENSG00000182687_3 (sequence is synthesized)
caccctggacggctgggtgttcggctcgctgctgtgcaaggcggtgcacttcctcatcttcctcaccatgcacgccagcagcttcacgctggccgccgtctccctggacaggtatctggc

SEQ ID NO: 648209 - DNA, 120 bp, Artificial Sequence
  ENSG00000182687_4 (sequence is synthesized)
catccgctacccgctgcactcccgcgagctgcgcacgcctcgaaacgcgctggcagccatcgggctcatctgggggctgtcgctgctcttctccgggccctacctgagctactaccgcca

SEQ ID NO: 648210 - DNA, 120 bp, Artificial Sequence
  ENSG00000182687_5 (sequence is synthesized)
gccgcgccatggacatctgcaccttcgtcttcagctacctgcttcctgtgctggttctcggcctgacctacgcgcgcaccttgcgctacctctggcgcgccgtcgacccggtggccgcgg

SEQ ID NO: 648211 - DNA, 120 bp, Artificial Sequence
  ENSG00000182687_6 (sequence is synthesized)
gctcgggtgcccggcgcgccaagcgcaaggtgacacgcatgatcctcatcgtggccgcgctcttctgcctctgctggatgccccaccacgcgctcatcctctgcgtgtggttcggccagt

SEQ ID NO: 648212 - DNA, 120 bp, Artificial Sequence
  ENSG00000182687_7 (sequence is synthesized)
tcccgctcacgcgcgccacttatgcgcttcgcatcctctcgcacctggtctcctacgccaactcctgcgtcaaccccatcgtttacgcgctggtctccaagcacttccgcaaaggcttcc

SEQ ID NO: 648213 - DNA, 120 bp, Artificial Sequence
  ENSG00000182687_8 (sequence is synthesized)
gcacgatctgcgcgggcctgctgggccgtgccccaggccgagcctcgggccgtgtgtgcgctgccgcgcggggcacccacagtggcagcgtgttggagcgcgagtccagcgacctgttgc

SEQ ID NO: 648214 - DNA, 120 bp, Artificial Sequence
  ENSG00000182687_9 (sequence is synthesized)
acatgagcgaggcggcgggggcccttcgtccctgccccggcgcttcccagccatgcatcctcgagccctgtcctggcccgtcctggcagggcccaaaggcaggcgacagcatcctgacgg

SEQ ID NO: 648215 - DNA, 120 bp, Artificial Sequence
  ENSG00000182687_10 (sequence is synthesized)
ttgatgtggcctgaaagcacttagcgggcgcgctgggatgtcacagagttggagtcattgttgggggaccgtggggagagctttgcctgttaataaaacgcacaaaccatttcacacaca

SEQ ID NO: 648216 - DNA, 120 bp, Artificial Sequence
  ENSG00000182698_0 (sequence is synthesized)
atggcagtggatgtggaattcggagtcgcgggctggtgggaagctgcagccccgctcagcccctcggccgtggccgctaccttcactgagacttggccggggagtgagcgcgccgagcct

SEQ ID NO: 648217 - DNA, 120 bp, Artificial Sequence
  ENSG00000182698_1 (sequence is synthesized)
gggaggatacagcacccactgtggcctgggagctccgaggggctccagctgcttgtctgcttcctgctgctgaacagctgcccggggggctgcagcgacactagtgcccacgatggtcag

SEQ ID NO: 648218 - DNA, 120 bp, Artificial Sequence
  ENSG00000182698_2 (sequence is synthesized)
gaccaagtaggagtggggcagctttggcccctccaaggatttgccaccccagtcttccagcatttacaggttgtgctccagcagattataccccaaggtctgttctggaaggatgacatc

SEQ ID NO: 648219 - DNA, 120 bp, Artificial Sequence
  ENSG00000182698_3 (sequence is synthesized)
ggcacttttccccactaaaaccactgagagccccctggccaaggtgaacagggatcagtgctttacctccgaagtggtttctaaggccctgaaacaagaggtggccaaccctgtcaagat

SEQ ID NO: 648220 - DNA, 120 bp, Artificial Sequence
  ENSG00000182698_4 (sequence is synthesized)
tacctataggtgttcatatggggggctggacatgatgcaggcgccgggaccctctaaggaagaaattatctataagatcatgcggcttctctgggccacttcctactgtgggccgcaacc

SEQ ID NO: 648221 - DNA, 120 bp, Artificial Sequence
  ENSG00000182698_5 (sequence is synthesized)
ctgtggctgattgagacctcatgtgaagcctccctgccccagcacccttcccattgcccttcagaggagcagttcttggatgacccagatttgaatcattaaagtagactctcatgcaaa

SEQ ID NO: 648222 - DNA, 120 bp, Artificial Sequence
  ENSG00000182698_6 (sequence is synthesized)
ctattcccatgtgctcagctttctgagcctctgcgcatctgaacttctacaggctgctctttgtaaatctggttatctgtaagttggtaccaagagtgaatgaggcccaggggttgaaga

SEQ ID NO: 648223 - DNA, 120 bp, Artificial Sequence
  ENSG00000182698_7 (sequence is synthesized)
atatggcaagtggtgatggaggaagggaaaaattaaagaagacttgaagtggacaaagcggcctggtagtgggaacagaggtcaggggtccaggagtgacagtacaaggaagctgcttct

SEQ ID NO: 648224 - DNA, 120 bp, Artificial Sequence
  ENSG00000182698_8 (sequence is synthesized)
tgccagcagactgcatccccaagaaccatgcctgaaggatgggaaggcacttttccccactaaaaccactgagcaagaggagaaacttcaactcctattccccagtgagactcacagccc

SEQ ID NO: 648225 - DNA, 120 bp, Artificial Sequence
  ENSG00000182698_9 (sequence is synthesized)
cctggccaaggtgaacagggatcagtgctttacctccgaagtggtttctaaggccctgaaacaagaggtggccaaccctgtcaagggcttctctgggccacttcctactgtgggccgcaa

SEQ ID NO: 648226 - DNA, 120 bp, Artificial Sequence
  ENSG00000182700_0 (sequence is synthesized)
gaaagatttttgagtctacaactgacaaaatgtcttcttcaaattaaaaaaaattgagaagcagcactttaagtctaactctacaccattttattgcatgtattagttttattaatgatt

SEQ ID NO: 648227 - DNA, 120 bp, Artificial Sequence
  ENSG00000182700_1 (sequence is synthesized)
tttggtgcatgcctttgggcttattcaaaagtgtacaataggaaagtatatttcctttcttagaaaggagatgttttctactttgcaacatgtgattacaaaaatcttcctctgtgggaa

SEQ ID NO: 648228 - DNA, 120 bp, Artificial Sequence
  ENSG00000182700_2 (sequence is synthesized)
gattaaccatgtattgaactactgaaaagtatatatttttagatatacagaaggaatctacatggagcagcattcagacctatatagaagtcatagcattctgtataggaccaaaaagga

SEQ ID NO: 648229 - DNA, 120 bp, Artificial Sequence
  ENSG00000182700_3 (sequence is synthesized)
aataacattaaacacttaaacagacgttgttgggtagaaatacctttagatcttgcatttacttccaaaaagaaaaaatgccacagaagtttgctgaaaacttttgtcgtttgaattttc

SEQ ID NO: 648230 - DNA, 120 bp, Artificial Sequence
  ENSG00000182700_4 (sequence is synthesized)
tctgtcagtgtatttagcccaaatacaacagctttgggttagcacacacataagaatcaaaaaaacaaagctcactaaataaatcagtctggtttgccaatccagcttgactgaaataag

SEQ ID NO: 648231 - DNA, 120 bp, Artificial Sequence
  ENSG00000182700_5 (sequence is synthesized)
taaaccaatcacttgcaacatgaaaaactgtccaactcctctaaggttctgacaaaataaccttggctgatgtgggaagactcccactttgattactgacctgacagtgaagattcatgc

SEQ ID NO: 648232 - DNA, 120 bp, Artificial Sequence
  ENSG00000182700_6 (sequence is synthesized)
ttgacatgatttcagacttgacaatgtctgtttaaggagctatggtacagtttgctaattcaatcccagatacctgttgattacctgtgagatctagagtccaaagtagccagcagccat

SEQ ID NO: 648233 - DNA, 120 bp, Artificial Sequence
  ENSG00000182700_7 (sequence is synthesized)
atccctgagtgctctgtgcccatcagatatcttaaagtaagcagggttgggacaggtcacagcttggatgattgacctcaggtgccgtagacagccccagattcaagaattgtatctgct

SEQ ID NO: 648234 - DNA, 120 bp, Artificial Sequence
  ENSG00000182700_8 (sequence is synthesized)
ttcttggcagtcgtcactgaactaatgtcccatactgtgttacttactgtagatgctctcttttagaggaggcccagagcacacatcctaatcgctagcggtactcagagagggggtgct

SEQ ID NO: 648235 - DNA, 120 bp, Artificial Sequence
  ENSG00000182700_9 (sequence is synthesized)
aactctgatgccctggccaaattccagtttagggatgtgggtcttcttcttgtcattctaattggaaatgtgcatcacttcccatttttcttactgatctcagtgcaaactacactagtc

SEQ ID NO: 648236 - DNA, 120 bp, Artificial Sequence
  ENSG00000182700_10 (sequence is synthesized)
tgtttctttgccctggtctcaagtctctaagacgctggtgtgtattatgtgggctaagttcatgtgttatcctaaggcacaagagttgaggaatgggtgagcttggtgtcagagcactgt

SEQ ID NO: 648237 - DNA, 120 bp, Artificial Sequence
  ENSG00000182700_11 (sequence is synthesized)
gtggttggagggtggactcttgtgatgctgtggggatgaaattggccctcttttagcataagttggggagtgtgcactggctggaggcttccagaggcttccagccatgaggtgtgagct

SEQ ID NO: 648238 - DNA, 120 bp, Artificial Sequence
  ENSG00000182700_12 (sequence is synthesized)
gaaaccaatttttcctctttccttatagcatgttgagaaaatctgttgggttttcagcagtcagggaaggccggagttctgctttaatctgggtaactgaggctaatatgagcaagactt

SEQ ID NO: 648239 - DNA, 120 bp, Artificial Sequence
  ENSG00000182700_13 (sequence is synthesized)
tggttaattaactgggttctcagatgccacagactccgtgagaagtcaccattattttcaatggttgtgatagaatttcccccagtagccattattttaagattatattgcagagttgct

SEQ ID NO: 648240 - DNA, 120 bp, Artificial Sequence
  ENSG00000182700_14 (sequence is synthesized)
cttactgtaaatattgtaagattgtaatactgtcgatattttattaaccaacaaatgttaatctatgtgaaatcagacttattttaaatgtgcttcttatttactgtgtgtggtccctgt

SEQ ID NO: 648241 - DNA, 120 bp, Artificial Sequence
  ENSG00000182700_15 (sequence is synthesized)
tgctgacagtattaagttatattctgatgtaagattaactttattaaagaatgtaaacattaatgtttccttatgggaaaacaaataaagtataaagaagacaattcttttcattgaaat

SEQ ID NO: 648242 - DNA, 120 bp, Artificial Sequence
  ENSG00000182700_16 (sequence is synthesized)
atactgtgtatttacacttgctagacccagcaccacttataaatttagtacactgttcagaattttagttaacacagctgacatggttgtgctctgtttgaaagtctaagaataggtatt

SEQ ID NO: 648243 - DNA, 120 bp, Artificial Sequence
  ENSG00000182700_17 (sequence is synthesized)
gttggaatatacagtttgtatttgtctgctgtgaatcataatcttgaaatttctaatcaagtttgtaaaatttttatagtgaaacattttaatgacaatttaaaaatttatcttctctaa

SEQ ID NO: 648244 - DNA, 120 bp, Artificial Sequence
  ENSG00000182700_18 (sequence is synthesized)
agaatggtcaaaacaatatcctttcagaaatagaattgttctttaatatctttccaaaatgactttggttaaatggaccagatgtatattagttaaaatttaggactaagttgttgatat

SEQ ID NO: 648245 - DNA, 120 bp, Artificial Sequence
  ENSG00000182700_19 (sequence is synthesized)
tctttgagtttacaagttaatccttattggagatgtgccaatatacagttagaatatcattaatttgcactgtttggggaccccatttaagaatgctgaattttgccaactaagaagtaa

SEQ ID NO: 648246 - DNA, 120 bp, Artificial Sequence
  ENSG00000182700_20 (sequence is synthesized)
gcaaatgcaatttaaaaagtaaatttgagcattctgtattaaatatgtgcagttattatcacatgaagaaacgcagtgtgtcgggctgtaatattaccatatttgctgtcatgttctccc

SEQ ID NO: 648247 - DNA, 120 bp, Artificial Sequence
  ENSG00000182700_21 (sequence is synthesized)
atctcagtgctgggaaatcaccatgtggaaaccaagcaaacgtgttgtgcatcagccggcttgagtttgttcaatatcaaagctgaaaactagcgaggtctgctgtactgcttattgaag

SEQ ID NO: 648248 - DNA, 120 bp, Artificial Sequence
  ENSG00000182700_22 (sequence is synthesized)
tgcttattgaagtattgtgattattttaggcattgattcttacaaaatatatactgtaacagtatactttgtacagatttaaattttatttgaaaaaatgaaataaagtaggcaaaaaaa

SEQ ID NO: 648249 - DNA, 120 bp, Artificial Sequence
  ENSG00000182700_23 (sequence is synthesized)
tttttcatgtgactgtataatcagatcagtcttttgtttcagtgctttttgggggaaggggtctggttgcgatcttggattttttttttttttgataggtggaaactttttaggactcag

SEQ ID NO: 648250 - DNA, 120 bp, Artificial Sequence
  ENSG00000182700_24 (sequence is synthesized)
tagcaggtatacttatgcttatgaattggctgcaagcattaagtgtgctctcatactagagaactctatcttctattttattttaaggtaggtttgcttatttttaaaaatgttatgtga

SEQ ID NO: 648251 - DNA, 120 bp, Artificial Sequence
  ENSG00000182700_25 (sequence is synthesized)
atggcctccctatcctggcatactgggtcatttaaaaaattctctggtggtatgacagtgaacctagccatcatgttgaagagaagggaaaccttttcccaaagatcatgctccattctc

SEQ ID NO: 648252 - DNA, 120 bp, Artificial Sequence
  ENSG00000182700_26 (sequence is synthesized)
atggaaggttttttgttttctgtcagttacaataaaaaaaatgtaattatcatggatacatactagttatacatacttatggggtacatgtaacattttgaaacaagcgtacaatgtact

SEQ ID NO: 648253 - DNA, 120 bp, Artificial Sequence
  ENSG00000182700_27 (sequence is synthesized)
gattaaatcaggatgattggggtatccatcacctgaagtatgtataatttcttcgttttaggaacattctaattccactcttagttatttgaaatatataataaattatttttaatagtt

SEQ ID NO: 648254 - DNA, 120 bp, Artificial Sequence
  ENSG00000182704_0 (sequence is synthesized)
cgggccgccggggtgagcgtgccgaggcggctgtggcgcaggcttccagcccccaccatgccgtggcccctgctgctgctgctggccgtgagtggggcccagacaacccggccatgcttc

SEQ ID NO: 648255 - DNA, 120 bp, Artificial Sequence
  ENSG00000182704_1 (sequence is synthesized)
cccgggtgccaatgcgaggtggagaccttcggccttttcgacagcttcagcctgactcgggtggattgtagcggcctgggcccccacatcatgccggtgcccatccctctggacacagcc

SEQ ID NO: 648256 - DNA, 120 bp, Artificial Sequence
  ENSG00000182704_2 (sequence is synthesized)
cacttggacctgtcctccaaccggctggagatggtgaatgagtcggtgttggcggggccgggctacacgacgttggctggcctggatctcagccacaacctgctcaccagcatctcaccc

SEQ ID NO: 648257 - DNA, 120 bp, Artificial Sequence
  ENSG00000182704_3 (sequence is synthesized)
actgccttctcccgccttcgctacctggagtcgcttgacctcagccacaatggcctgacagccctgccagccgagagcttcaccagctcacccctgagcgacgtgaaccttagccacaac

SEQ ID NO: 648258 - DNA, 120 bp, Artificial Sequence
  ENSG00000182704_4 (sequence is synthesized)
cagctccgggaggtctcagtgtctgccttcacgacgcacagtcagggccgggcactacacgtggacctctcccacaacctcattcaccgcctcgtgccccaccccacgagggccggcctg

SEQ ID NO: 648259 - DNA, 120 bp, Artificial Sequence
  ENSG00000182704_5 (sequence is synthesized)
cctgcgcccaccattcagagcctgaacctggcctggaaccggctccatgccgtgcccaacctccgagacttgcccctgcgctacctgagcctggatgggaaccctctagctgtcattggt

SEQ ID NO: 648260 - DNA, 120 bp, Artificial Sequence
  ENSG00000182704_6 (sequence is synthesized)
ccgggtgccttcgcggggctgggaggccttacacacctgtctctggccagcctgcagaggctccctgagctggcgcccagtggcttccgtgagctaccgggcctgcaggtcctggacctg

SEQ ID NO: 648261 - DNA, 120 bp, Artificial Sequence
  ENSG00000182704_7 (sequence is synthesized)
tcgggcaaccccaagcttaactgggcaggagctgaggtgttttcaggcctgagctccctgcaggagctggacctttcgggcaccaacctggtgcccctgcctgaggcgctgctcctccac

SEQ ID NO: 648262 - DNA, 120 bp, Artificial Sequence
  ENSG00000182704_8 (sequence is synthesized)
ctcccggcactgcagagcgtcagcgtgggccaggatgtgcggtgccggcgcctggtgcgggagggcacctacccccggaggcctggctccagccccaaggtggccctgcactgcgtagac

SEQ ID NO: 648263 - DNA, 120 bp, Artificial Sequence
  ENSG00000182704_9 (sequence is synthesized)
acccgggattctgctgccaggggccccaccatcttgtgacaaatggtgtggcccagggccacataacagactgctgtcctgggctgcctcaggtcccgagtaacttatgttcaatgtgcc

SEQ ID NO: 648264 - DNA, 120 bp, Artificial Sequence
  ENSG00000182704_10 (sequence is synthesized)
ggctttggacctgggagccacacctaggagcaaagtctcacccctttgtctacgttgcttccccaaaccatgagcagagggacttcgatgccaaaccagactcgggtcccctcctgcttc

SEQ ID NO: 648265 - DNA, 120 bp, Artificial Sequence
  ENSG00000182704_11 (sequence is synthesized)
ccttccccacttatcccccaagtgccttccctcatgcctgggccggcctgacccgcaatgggcagagggtgggtgggaccccctgctgcagggcagagttcaggtccactgggctgagtg

SEQ ID NO: 648266 - DNA, 120 bp, Artificial Sequence
  ENSG00000182704_12 (sequence is synthesized)
tccccttgggcccatggcccagtcactcaggggcgagtttcttttctaacatagccctttctttgccatgaggccatgaggcccgcttcatccttttctatttccctagaaccttaatgg

SEQ ID NO: 648267 - DNA, 120 bp, Artificial Sequence
  ENSG00000182704_13 (sequence is synthesized)
tagaaggaattgcaaagaatcaagtccacccttctcatgtgacagatggggaaactgaggccttgagaaggaaaaaggctaatctaagttcctgcgggcagtggcatgactggagcacag

SEQ ID NO: 648268 - DNA, 120 bp, Artificial Sequence
  ENSG00000182704_14 (sequence is synthesized)
cctcctgcctcccagcccggacccaatgcactttcttgtctcctctaataagccccaccctccccgcctgggctccccttgctgcccttgcctgttccccattagcacaggagtagcagc

SEQ ID NO: 648269 - DNA, 120 bp, Artificial Sequence
  ENSG00000182704_15 (sequence is synthesized)
agcaggacaggcaagagcctcacaagtgggactctgggcctctgaccagctgtgcggcatgggctaagtcactctgcccttcggagcctctggaagcttagggcacattggttccagcct

SEQ ID NO: 648270 - DNA, 120 bp, Artificial Sequence
  ENSG00000182704_16 (sequence is synthesized)
agccagtttctcaccctgggttggggtcccccagcatccagactggaaacctacccattttcccctgagcatcctctagatgctgccccaaggagttgctgcagttctggagcctcatct

SEQ ID NO: 648271 - DNA, 120 bp, Artificial Sequence
  ENSG00000182704_17 (sequence is synthesized)
ggctgggatctccaaggggcctcctggattcagtccccactggccctgagcacgacagcccttcttaccctcccaggaatgccgtgaaaggagacaaggtctgcccgacccatgtctatg

SEQ ID NO: 648272 - DNA, 120 bp, Artificial Sequence
  ENSG00000182704_18 (sequence is synthesized)
ctctacccccagggtagcatctcagcttccgaaccctgggctgtttccttagtcttcattttataaaagttgttgcctttttaacggagtgtcactttcaaccggcctcccctacccctg

SEQ ID NO: 648273 - DNA, 120 bp, Artificial Sequence
  ENSG00000182704_19 (sequence is synthesized)
ctggccggggatggagacatgtcatttgtaaaagcagaaaaaggttgcatttgttcacttttgtaatattgtcctgggcctgtgttggggtgttgggggaagctgggcatcagtggccac

SEQ ID NO: 648274 - DNA, 120 bp, Artificial Sequence
  ENSG00000182704_20 (sequence is synthesized)
atgggcatcaggggctggccccacagagaccccacagggcagtgagctctgtcttcccccacctgcctagcccatcatctatctaaccggtccttgatttaataaacactataaaaagtt

SEQ ID NO: 648275 - DNA, 120 bp, Artificial Sequence
  ENSG00000182704_21 (sequence is synthesized)
tgcagaaaggaaatgtggggttggagtagagtccctactggggcaccgcctagtggagctgtgagaagaggggcaccatcctctagaccgcagaatggcagatccactaacagcttgcac

SEQ ID NO: 648276 - DNA, 120 bp, Artificial Sequence
  ENSG00000182704_22 (sequence is synthesized)
tggaaaagctgcagacactcaacgccagtccgtgaaagcagccagaaaggaggctgcaccctgcaaagccacgggggtggagctgcccaagactgtgggaacccacctcttgcatcagca

SEQ ID NO: 648277 - DNA, 88 bp, Artificial Sequence
  ENSG00000182704_23 (sequence is synthesized)
taagatttgactgccctgctggattttgaacttgcctggggcctgtagcccctttgttttggctaatttcttccatgtggaacagctg

SEQ ID NO: 648278 - DNA, 75 bp, Artificial Sequence
  ENSG00000182704_24 (sequence is synthesized)
gactgccctgctggattttgaacttgcctggggcctgtagcccctttgttttggctaatttcttccatgtggaac

SEQ ID NO: 648279 - DNA, 67 bp, Artificial Sequence
  ENSG00000182704_25 (sequence is synthesized)
tgcttttgattttacaggctcgtaggtggaagggacttgtctcagatgagacattggactgtggact

SEQ ID NO: 648280 - DNA, 87 bp, Artificial Sequence
  ENSG00000182704_26 (sequence is synthesized)
aatgtgagaacatgagatttgggagggaccaggggtggaatgatatggtttagctgtgcccgtattcccatgtgttgtgggagggac

SEQ ID NO: 648281 - DNA, 85 bp, Artificial Sequence
  ENSG00000182704_27 (sequence is synthesized)
cttcagcttttgcttcctcctcattctctcttgccgccgccatgtaagaagtgccttttgccttccaccatgattgttagacctt

SEQ ID NO: 648282 - DNA, 120 bp, Artificial Sequence
  ENSG00000182704_28 (sequence is synthesized)
acattgcccaatttctgcaccccgaggccctccaaagtctaggagaagctcctgggaggtccagggcccaagaccaaagcctctatcaactctcccacctgtgaactgcccctctcccaa

SEQ ID NO: 648283 - DNA, 120 bp, Artificial Sequence
  ENSG00000182704_29 (sequence is synthesized)
agaccccggctgggaggaagaggcgagcggtgggtcccaggctccggccctgggctggggagaggaagggacagggcggctggcgttgccctccccgcgcttcttggaaagagtgtgatc

SEQ ID NO: 648284 - DNA, 120 bp, Artificial Sequence
  ENSG00000182704_30 (sequence is synthesized)
cagagttgcgtctgtttggtagggagacaggctccgctttgagacccactctccgtttgcagcccgcccccggggtagggggccaaccctcggacccgcccccaccatgccgtggcccct

SEQ ID NO: 648285 - DNA, 120 bp, Artificial Sequence
  ENSG00000182712_0 (sequence is synthesized)
gttctgttcagtatttggcaatcacttcatccactactgcagtgcacccacccttgggcctggggggagggagtgggttgaaaaactgctcaagaaacagaagtttagcaagggtcatga

SEQ ID NO: 648286 - DNA, 120 bp, Artificial Sequence
  ENSG00000182712_1 (sequence is synthesized)
agaatactgcaagtgaaactgcagagagaggttacgtaggcagaaagcaagtcaacaaaagcacttagtcaggatccgtaacttgaaattgactcctttggaaattgccatagaaccctt

SEQ ID NO: 648287 - DNA, 120 bp, Artificial Sequence
  ENSG00000182712_2 (sequence is synthesized)
aatggacatcatcggctggacctgggatctgatgaatcccacaaaagtcagcaccttctacagaacagatgccctgatcaccaaggacttggtactgatttagagagaagagagcagctc

SEQ ID NO: 648288 - DNA, 120 bp, Artificial Sequence
  ENSG00000182712_3 (sequence is synthesized)
cgcttatttgccctgcagcaattcacctgcctttccttctcccatcctttttctggatatgccgcagaaggatccgtgccagaagcaagcctgtgagatacagaaatgtttacaagccaa

SEQ ID NO: 648289 - DNA, 120 bp, Artificial Sequence
  ENSG00000182712_4 (sequence is synthesized)
cagctacatggaatcaaagtgtcaggctgtcatccaagaactgcgtaagtgttgtgctcagtatcccaagggaagatctgtcgtctgttcaggatttgaaaaagaagaggaagaaaacct

SEQ ID NO: 648290 - DNA, 120 bp, Artificial Sequence
  ENSG00000182712_5 (sequence is synthesized)
aacacggaagtctgcatcaaagtaaagttcttctgaagtgctgctccatgtttccaccaaatgaattttttttatcctcctgactcttcaggccaggtagcagcaaatagcaaatgaaaa

SEQ ID NO: 648291 - DNA, 120 bp, Artificial Sequence
  ENSG00000182712_6 (sequence is synthesized)
agtcagctacaaaagttaatgaatatgccatctatgcagaacaggcagaaatataaacacattaaaagacaaatatgtagaatgtaatatactgagctgctaaaataaacctgtttaaga

SEQ ID NO: 648292 - DNA, 120 bp, Artificial Sequence
  ENSG00000182712_7 (sequence is synthesized)
gtactctgtgagcggcgcccgggcgcctgggcaggcgcctcccgagtaccggcgcccattttgcccgcccgctaaggagacccgtgcgcggcctacacgcttgggggacagccctttaag

SEQ ID NO: 648293 - DNA, 120 bp, Artificial Sequence
  ENSG00000182712_8 (sequence is synthesized)
acgacatctccgcgaacgccggcctcttgagccagggggacgctcttttgaaagtcagtcccaaaacagttaaggttttattttattttgttttatttccaagtcacagcccccgaatct

SEQ ID NO: 648294 - DNA, 120 bp, Artificial Sequence
  ENSG00000182712_9 (sequence is synthesized)
cgtacaactctccctggaccacttccggttgccggcccgcgcctcataacttcggttcgagtgacctcggcccgggatgcccctcggctcaccccgggctcacgtcgcgatcctggcttg

SEQ ID NO: 648295 - DNA, 120 bp, Artificial Sequence
  ENSG00000182718_0 (sequence is synthesized)
gctcagcatttggggacgctctcagctctcggcgcacggcccagggtgaaaatgtttgccattaaactcacatgaagtaggaaatatttatatggatacaaaaggcacctgcatgggata

SEQ ID NO: 648296 - DNA, 120 bp, Artificial Sequence
  ENSG00000182718_1 (sequence is synthesized)
atgtcaaatttcatagatactgctttgtgcttccttcaaaatgtctactgttcacgaaatcctgtgcaagctcagcttggagggtgatcactctacacccccaagtgcatatgggtctgt

SEQ ID NO: 648297 - DNA, 120 bp, Artificial Sequence
  ENSG00000182718_2 (sequence is synthesized)
caaagcctatactaactttgatgctgagcgggatgctttgaacattgaaacagccatcaagaccaaaggtgtggatgaggtcaccattgtcaacattttgaccaaccgcagcaatgcaca

SEQ ID NO: 648298 - DNA, 120 bp, Artificial Sequence
  ENSG00000182718_3 (sequence is synthesized)
gagacaggatattgccttcgcctaccagagaaggaccaaaaaggaacttgcatcagcactgaagtcagccttatctggccacctggagacggtgattttgggcctattgaagacacctgc

SEQ ID NO: 648299 - DNA, 120 bp, Artificial Sequence
  ENSG00000182718_4 (sequence is synthesized)
tcagtatgacgcttctgagctaaaagcttccatgaaggggctgggaaccgacgaggactctctcattgagatcatctgctccagaaccaaccaggagctgcaggaaattaacagagtcta

SEQ ID NO: 648300 - DNA, 120 bp, Artificial Sequence
  ENSG00000182718_5 (sequence is synthesized)
caaggaaatgtacaagactgatctggagaaggacattatttcggacacatctggtgacttccgcaagctgatggttgccctggcaaagggtagaagagcagaggatggctctgtcattga

SEQ ID NO: 648301 - DNA, 120 bp, Artificial Sequence
  ENSG00000182718_6 (sequence is synthesized)
agaaagtatttgataggtacaagagttacagcccttatgacatgttggaaagcatcaggaaagaggttaaaggagacctggaaaatgctttcctgaacctggttcagtgcattcagaaca

SEQ ID NO: 648302 - DNA, 120 bp, Artificial Sequence
  ENSG00000182718_7 (sequence is synthesized)
agcccctgtattttgctgatcggctgtatgactccatgaagggcaaggggacgcgagataaggtcctgatcagaatcatggtctcccgcagtgaagtggacatgttgaaaattaggtctg

SEQ ID NO: 648303 - DNA, 120 bp, Artificial Sequence
  ENSG00000182718_8 (sequence is synthesized)
aattcaagagaaagtacggcaagtccctgtactattatatccagcaagacactaagggcgactaccagaaagcgctgctgtacctgtgtggtggagatgactgaagcccgacacggcctg

SEQ ID NO: 648304 - DNA, 120 bp, Artificial Sequence
  ENSG00000182718_9 (sequence is synthesized)
agcgtccagaaatggtgctcaccatgcttccagctaacaggtctagaaaaccagcttgcgaataacagtccccgtggccatccctgtgagggtgacgttagcattacccccaacctcatt

SEQ ID NO: 648305 - DNA, 120 bp, Artificial Sequence
  ENSG00000182718_10 (sequence is synthesized)
ttagttgcctaagcattgcctggccttcctgtctagtctctcctgtaagccaaagaaatgaacattccaaggagttggaagtgaagtctatgatgtgaaacactttgcctcctgtgtact

SEQ ID NO: 648306 - DNA, 120 bp, Artificial Sequence
  ENSG00000182718_11 (sequence is synthesized)
gtgtcataaacagatgaataaactgaatttgtactttagaaacacgtactttgtggccctgctttcaactgaattgtttgaaaattaaacgtgcttggggttcagctggtgaggctgtcc

SEQ ID NO: 648307 - DNA, 120 bp, Artificial Sequence
  ENSG00000182718_12 (sequence is synthesized)
ctgtaggaagaaagctctgggactgagctgtacagtatggttgcccctatccaagtgtcgctatttaagttaaatttaaatgaaataaaataaaataaaatcagttcctgagtcacacaa

SEQ ID NO: 648308 - DNA, 120 bp, Artificial Sequence
  ENSG00000182718_13 (sequence is synthesized)
gctcagcatttggggacgctctcagctctcggcgcacggcccaggttatcttgtagcatagcaacttcggatttcactctacccggagagtttcccgcttggttgaacacattggcctca

SEQ ID NO: 648309 - DNA, 120 bp, Artificial Sequence
  ENSG00000182718_14 (sequence is synthesized)
gcctcgcctagggaggatgtggcgggtataaaagccccacccaggccagccggctctgctcagcatttggggacgctctcagctctcggcgcacggcccagcttccttcaaaatgtctac

SEQ ID NO: 648310 - DNA, 120 bp, Artificial Sequence
  ENSG00000182718_15 (sequence is synthesized)
ctcagcatttggggacgctctcagctctcggcgcacggcccaggtaagcggggcgcgccctgcccgcccgcgatgggccgccagctagcggggtgtggagacgctgggaagaaggcttcc

SEQ ID NO: 648311 - DNA, 120 bp, Artificial Sequence
  ENSG00000182718_16 (sequence is synthesized)
cgctcttctggctcttccgtgacgcattacaacagccatccaggccggtccagttacgctgcattccttcctccttcccatttcggcggacctgcatccagctagagactagcagattga

SEQ ID NO: 648312 - DNA, 120 bp, Artificial Sequence
  ENSG00000182718_17 (sequence is synthesized)
cagattgaatcgatattcattaagttaggaatgatggagcctggctctgtcacccagcctggagtgtagtcgcacgatctctcctcactgtagcctccgcctcccaggttcaagtgattc

SEQ ID NO: 648313 - DNA, 120 bp, Artificial Sequence
  ENSG00000182718_18 (sequence is synthesized)
gctcagcatttggggacgctctcagctctcggcgcacggcccagagacgctcttctggctcttccgtgacgcattacaacagccatccaggccggtccacttccttcaaaatgtctactg

SEQ ID NO: 648314 - DNA, 120 bp, Artificial Sequence
  ENSG00000182718_19 (sequence is synthesized)
ctctcagctctcggcgcacggcccaggtaagcggggcgcgccctgcccgcccgcgatgggccgccagctagcggggtgtggagacgctgggaagaagggttatcttgtagcatagcaact

SEQ ID NO: 648315 - DNA, 120 bp, Artificial Sequence
  ENSG00000182718_20 (sequence is synthesized)
gcaacatagcaagacccagtctcaaaaaataaatacataataataataaaaaaccctcgttcacctaaacagatctataatttatagaatgtaaagcagcaatattcaggcaatattaag

SEQ ID NO: 648316 - DNA, 120 bp, Artificial Sequence
  ENSG00000182718_21 (sequence is synthesized)
gaagatttttggtaagactggggcagcagaggtgcccttgatgggcaagggccaggagtgttaacacagtcctgcttagtaatttcttcccttcttccaagtctgtcgattatctaaagg

SEQ ID NO: 648317 - DNA, 120 bp, Artificial Sequence
  ENSG00000182718_22 (sequence is synthesized)
actgcctgctacgaggccgcgcagagatgccccaggcgcggagagaagcggagcacagccgtgctagggacaggggcgccaccctgggcgggactgagcttccttcaaaatgtctactgt

SEQ ID NO: 648318 - DNA, 120 bp, Artificial Sequence
  ENSG00000182718_23 (sequence is synthesized)
gtgattcggcttactgcaacttctgccatgtggactcaaatgattcatctcagcctcccaaactgctgggattacagtcataagccaccacacccaaaacctagatcttggttttagatt

SEQ ID NO: 648319 - DNA, 120 bp, Artificial Sequence
  ENSG00000182718_24 (sequence is synthesized)
agatatatgtagaacaaagctcccacataccctctaggagggaagatattaccagaattatgatgaggtcccaagatctcacaggctttgctgtgtgctggggacagctcatcatcctac

SEQ ID NO: 648320 - DNA, 120 bp, Artificial Sequence
  ENSG00000182718_25 (sequence is synthesized)
taattcttgactctcagccttaggccaaggagaattatgtatcttttataaaagatatgtaaactacttgagatagtttcaagtgaaacaatcggctgtttgtgaaataaagaagaaaat

SEQ ID NO: 648321 - DNA, 120 bp, Artificial Sequence
  ENSG00000182718_26 (sequence is synthesized)
gggacgctctcagctctcggcgcacggcccaggcggccaggccctgttgaaaatacaatatgtgggccataaaacactgaaattgagttgcagacttgaaggcctggatttcccaaccct

SEQ ID NO: 648322 - DNA, 120 bp, Artificial Sequence
  ENSG00000182718_27 (sequence is synthesized)
gaaagtgcttcatgccaagtgacatcattcttcctgccggtctctttccacccactccaaccccagatcaggataccagcagagagaggctgtgagagcatgaagctgcaacaagtcagt

SEQ ID NO: 648323 - DNA, 120 bp, Artificial Sequence
  ENSG00000182718_28 (sequence is synthesized)
agggagcaaacaaatattgattcagatcaggccacagaagagacaagctggagcaagtgctgtgtgtccctcctgctcagtttgatcgaggtcactgggccgaattccaggaattctggg

SEQ ID NO: 648324 - DNA, 120 bp, Artificial Sequence
  ENSG00000182718_29 (sequence is synthesized)
cagctctcggcgcacggcccaggttatcttgtagcatagcaacttcggatttcactctacccggagagtttcccgcttggttgaacacattggcctcaggaaggtgtggatgaggtcacc

SEQ ID NO: 648325 - DNA, 120 bp, Artificial Sequence
  ENSG00000182718_30 (sequence is synthesized)
acatactctcgccaaaccagttttatgaaaatatttagactaaacaaagtgaagagaatagaaagctgtatttgcatgtgtgcagtttccttgatcaaagaatattaagcaaaaagagac

SEQ ID NO: 648326 - DNA, 120 bp, Artificial Sequence
  ENSG00000182718_31 (sequence is synthesized)
caaagcaggagtcactgcaatttaaatgtcgttcctgtctatttcaggacgcagctctactctgttttctttattcttggggtgattatgttgatgacctgtcttgtctctgttgagata

SEQ ID NO: 648327 - DNA, 120 bp, Artificial Sequence
  ENSG00000182718_32 (sequence is synthesized)
aatttaccaccaattgagcactccttattggcagggattgggtgtatcaattccgagaactgtatgattgcaaaggtggaaagccaattcatcaggctattgttttgctgccccattaag

SEQ ID NO: 648328 - DNA, 120 bp, Artificial Sequence
  ENSG00000182718_33 (sequence is synthesized)
tatattaactggaagatgacttcatttcaaccatttcaaatcttaaatacaacagattcagtcctttatggaatgagttaaggtcagaaaatctgtccatcgtctttctcataaatactt

SEQ ID NO: 648329 - DNA, 120 bp, Artificial Sequence
  ENSG00000182718_34 (sequence is synthesized)
taatatcttccaagtatcattggactaagaaagtaattatgggtaataataaagattccaattaagaattagggcaacatgaaaatgctactaatttcgattcacatcgtagctttcagg

SEQ ID NO: 648330 - DNA, 120 bp, Artificial Sequence
  ENSG00000182718_35 (sequence is synthesized)
tccttctcaatatgtttaattacttgtgagaaatacagaagtagtggctggttcggcaagcccatcaccttttatgagaagtagaagactcagttttatcctgtctgaacaggttgcatt

SEQ ID NO: 648331 - DNA, 120 bp, Artificial Sequence
  ENSG00000182718_36 (sequence is synthesized)
agccatggggaacattttgtttttgcattcacacatcagtctccccaggttctgtttacacagaggaagagaaagactggctagtttagtagtccatcccaacccaaggcagaccatctc

SEQ ID NO: 648332 - DNA, 120 bp, Artificial Sequence
  ENSG00000182718_37 (sequence is synthesized)
tgaggtttagtttttacagtcgtaagatgggaattgcatctgtttgcaaaaactactccaatatcgtcagatgaaatggtccaaggagtagaaattagcataatgaatcgctgtgcttca

SEQ ID NO: 648333 - DNA, 120 bp, Artificial Sequence
  ENSG00000182718_38 (sequence is synthesized)
gctcagcatttggggacgctctcagctctcggcgcacggcccagcttccttcaaaatgtctactgttcacgaaatcctgtgcaagctcagcttggagggtgatgtaagtatatcactttc

SEQ ID NO: 648334 - DNA, 120 bp, Artificial Sequence
  ENSG00000182718_39 (sequence is synthesized)
actttatataatttttgcaagttggacatctctctggataaccatattactctctatccttgtacatctaaggaagatggggacaattcagacagtcatcatttggttctcctctttctt

SEQ ID NO: 648335 - DNA, 120 bp, Artificial Sequence
  ENSG00000182718_40 (sequence is synthesized)
gacactggaatggctggaattttattctgccatacttagcatgtcattggtaataactgttatgatggtacatgacttttaatgtcatgtcctgggattttattactggttggcataagc

SEQ ID NO: 648336 - DNA, 120 bp, Artificial Sequence
  ENSG00000182718_41 (sequence is synthesized)
cacagccatatcaaaactaattctgcatcttttggatttcttacagtgtccaggaagttattccagatgaagacttatacttttattttatttattaatttattcattttttgagatgga

SEQ ID NO: 648337 - DNA, 120 bp, Artificial Sequence
  ENSG00000182718_42 (sequence is synthesized)
tgacagtgacttgggtcacatggtgcaagaccctctgtattgttcatggtacttgccatcaaaatgttcaaattaatggagcctgtgaaagcacaggttgtatggagtataaagcctata

SEQ ID NO: 648338 - DNA, 120 bp, Artificial Sequence
  ENSG00000182718_43 (sequence is synthesized)
gagtttttttaaaatcttttttcttcttgaaacgtgtgcatgctgtttttgggaacaatacaaactgcatgttgaagtcagacaaattcaggtgctaaataatttgtttctctaatggac

SEQ ID NO: 648339 - DNA, 120 bp, Artificial Sequence
  ENSG00000182718_44 (sequence is synthesized)
ttagattgtatttgctatcaggttttataagagggctttttgtgtagcctctgaagttactctagtatatttcttatgtgtggagaggtggggcagaaatagaaaatgtcacatgttccc

SEQ ID NO: 648340 - DNA, 120 bp, Artificial Sequence
  ENSG00000182718_45 (sequence is synthesized)
cattattttaaggaaagaaaagataactttgtctcactaatttcatttcagacaagtggattttataggtaataggttcaattctcgatttaatttcatttccagagacactataaaatg

SEQ ID NO: 648341 - DNA, 120 bp, Artificial Sequence
  ENSG00000182718_46 (sequence is synthesized)
acacaaaacttttccccctcactgttgtttttggaacaagacgacatatctcctggtaaatgcagtcatacatgatatggctcaatgcctggactgcctgccttgtaaataaccgatggc

SEQ ID NO: 648342 - DNA, 120 bp, Artificial Sequence
  ENSG00000182718_47 (sequence is synthesized)
actcttaataaatgggaaaatgtttttccttagatttcatccacattttatagctaccatagcaaacacactgagtatttcaaaatagcactttgcctttttcctgaatgtgtgctccat

SEQ ID NO: 648343 - DNA, 120 bp, Artificial Sequence
  ENSG00000182718_48 (sequence is synthesized)
gtcatcaagttcatcttactggaaagtttaagtggtgaaattagatggaacatactttgataatgcattgcatgtcaggttataaatatgaactggatttaatatttggccaagatagtc

SEQ ID NO: 648344 - DNA, 120 bp, Artificial Sequence
  ENSG00000182718_49 (sequence is synthesized)
ctcacaagtgcgtttggaaacatttgtcaaatgctgaacttagatttctggcctctcctgggagtcatctagatataggaaggcatcttagatgctcacctatacagtctcagtgctaat

SEQ ID NO: 648345 - DNA, 120 bp, Artificial Sequence
  ENSG00000182718_50 (sequence is synthesized)
aaaatggaatggcgtgggtgctgggtggtttataatgtgatgcctgtgggtggagaagtaactcacggatcttggccttttcactcttcacagaaactgcgccaaggccaagtcatcaca

SEQ ID NO: 648346 - DNA, 120 bp, Artificial Sequence
  ENSG00000182718_51 (sequence is synthesized)
ttatacgggcattatgtgctgggggggttggggtgggttgcaggatgggagccttgatgatgaggatgggcagtgatgctgcctccaccagccatcagccaaccacaaccacaatgtaca

SEQ ID NO: 648347 - DNA, 120 bp, Artificial Sequence
  ENSG00000182718_52 (sequence is synthesized)
tcctctttgtctgcccttagctttgggactgggtagcagggagagggaaaactataagagcatttcaaagaaggagggaagttaataccttgaaaggagaactgacgtagaagcactcca

SEQ ID NO: 648348 - DNA, 120 bp, Artificial Sequence
  ENSG00000182718_53 (sequence is synthesized)
ttgtccttacctcaatctggaatgggagattcccatctgtcagatcaggaaggataatgagctttgaaaagcactgaaaggctgggcgtgagccaccacgcctgtaatcccagcactttg

SEQ ID NO: 648349 - DNA, 89 bp, Artificial Sequence
  ENSG00000182718_54 (sequence is synthesized)
tttgggaggccaagatgggaggatcactacacggcgaaatcctgtctctacaaaaaatatgaaaaaattagcccggtgtggtggcaggt

SEQ ID NO: 648350 - DNA, 120 bp, Artificial Sequence
  ENSG00000182718_55 (sequence is synthesized)
gtaatcccagatactcaggaggctgatgtgggaggatcatctgagcccaggaggttgaggctgcactgagccatgatcacaccattgcattccagcatgggcaacagagtgagaccctac

SEQ ID NO: 648351 - DNA, 120 bp, Artificial Sequence
  ENSG00000182718_56 (sequence is synthesized)
tatggtttagaaggcaataagaaatcttaggaagagtggagggtggtaggcacaagggatggtattaataaaggcagagggaaggatacagaggagagggggggaaacacaaggaggatg

SEQ ID NO: 648352 - DNA, 120 bp, Artificial Sequence
  ENSG00000182718_57 (sequence is synthesized)
tgggccgtctggccagaccaccttggtgccacagtggtgaccaaagtaaagaggtgggagaagctgcttccctcatttatctgaattgtaagctcagcaacactggcccagtagaaattc

SEQ ID NO: 648353 - DNA, 120 bp, Artificial Sequence
  ENSG00000182718_58 (sequence is synthesized)
atgtacctgtagcagaaacttagctaaacacccttgtccttgaggcatttccacattttcagcttatttcgaattgttgccagcccagtttaatggtcttcagagccatcctgagtaaat

SEQ ID NO: 648354 - DNA, 120 bp, Artificial Sequence
  ENSG00000182718_59 (sequence is synthesized)
gctggcttcaggtctccagctttgcattgtctacttttgatctctcactaaaagtaagatgagaagttgaaattgagacagcatattctaaactagctgagcctttgaagaattcttatt

SEQ ID NO: 648355 - DNA, 120 bp, Artificial Sequence
  ENSG00000182718_60 (sequence is synthesized)
agaaaaaatgaaattgcttgcgtgaagtgtgatggtgtgttaatacctacctagttacctagtatgagaatgatctgaattgttaaaagaaacaataggaaaacatattaggcattgtta

SEQ ID NO: 648356 - DNA, 120 bp, Artificial Sequence
  ENSG00000182718_61 (sequence is synthesized)
cccttgcatctgcagtggaaggatgtgacatgtatgtgcatttttacaattggaggtttgtgatttggagaccgtttagattttgtaatttcccgcagtgccaactagactgcctgtggt

SEQ ID NO: 648357 - DNA, 120 bp, Artificial Sequence
  ENSG00000182718_62 (sequence is synthesized)
aaatgcccaggaaatattgctgactcactgactttgattaggagctcagtcttgcactggagtctcaatatttagcatcttgtgtctttgagctattaaactatggtattgattgacatt

SEQ ID NO: 648358 - DNA, 120 bp, Artificial Sequence
  ENSG00000182718_63 (sequence is synthesized)
ctaacttggtaacagattgttgccagggaggagtaagagaacaggaggagagaggggtgtgttgtggaaactcacgtatgcacttgggttctgcaggcctcagagacccctggtttaaaa

SEQ ID NO: 648359 - DNA, 120 bp, Artificial Sequence
  ENSG00000182718_64 (sequence is synthesized)
ccgtggtggaacttagtattgcagaggatttctagatttcccttagcctgtcctattttgcagcccttttccattgcattaggtcacttctggtttgtggcccagggccagggcatcctc

SEQ ID NO: 648360 - DNA, 120 bp, Artificial Sequence
  ENSG00000182718_65 (sequence is synthesized)
agtttctttctttgcccttgcttcctcccaaggcaagtcacatacctcattttatacttggagtgaattaactaaatcccctgtgcctgcatcagaaattcagctgcatttttgaaagtg

SEQ ID NO: 648361 - DNA, 120 bp, Artificial Sequence
  ENSG00000182718_66 (sequence is synthesized)
ggtttgcactgtcactgcagagttgtcaattttgtataataggatttcttatcctgcaaaacctcatggacaagtggactttgggagccagagaagggatgggcggctctcaagtcctgg

SEQ ID NO: 648362 - DNA, 120 bp, Artificial Sequence
  ENSG00000182718_67 (sequence is synthesized)
cctggatttatgtgccagagccttggccgtgtgacttagggaaggtcactttgcctctatctgtggtcatgcaggacccagtgggaagtgaccttctggtttctttttcactgcgtttac

SEQ ID NO: 648363 - DNA, 120 bp, Artificial Sequence
  ENSG00000182718_68 (sequence is synthesized)
ttctcatggaagaatttgcccatatagtcctttgtctggggtggagttgtctttgtggagctgattgctaatattaacacattaacatggaggaaggggcatttcccctgtgaatcccta

SEQ ID NO: 648364 - DNA, 120 bp, Artificial Sequence
  ENSG00000182718_69 (sequence is synthesized)
gggacgctctcagctctcggcgcacggcccaggttatcttgtagcatagcaacttcggatttcactctacccggagagtttcccgcttggttgaacacattggcctcaggaagggtgaaa

SEQ ID NO: 648365 - DNA, 120 bp, Artificial Sequence
  ENSG00000182718_70 (sequence is synthesized)
gaagggaagagagctcaaaggtcctgcagggtggaagtctgcatttcacagttttataagtgtcttttgtatcctttaatatagtgcaggctcagcgtatgcttgggtgaaaatgtttgc

SEQ ID NO: 648366 - DNA, 120 bp, Artificial Sequence
  ENSG00000182718_71 (sequence is synthesized)
tattcattaagttaggaatggttggtggtcctaagagcctcagcaaccgagaggagtcttgttatttaaaaaacaacgatactgggcgtggtcgtgggcctgtagtcccagctgctcaag

SEQ ID NO: 648367 - DNA, 120 bp, Artificial Sequence
  ENSG00000182718_72 (sequence is synthesized)
gctcagcatttggggacgctctcagctctcggcgcacggcccagcttccttcaaaatgtctactgttcacgaaatcctgtgcaagctcagcttggagggtgatgaacttgcatcagcact

SEQ ID NO: 648368 - DNA, 120 bp, Artificial Sequence
  ENSG00000182718_73 (sequence is synthesized)
attccagcaggaaaacaggatggaggaaggtacaaagcatgaatgagcctggcctgtccagcagtggcacatggagcggtgaagagtgaagatgtgggggaatgaggctgcccagcttcc

SEQ ID NO: 648369 - DNA, 120 bp, Artificial Sequence
  ENSG00000182732_0 (sequence is synthesized)
gactgtggaagcacgagcttacataagtggttaggcaagctggcgtgtggacttgtgtgggatgggtgcaggtctgcatataaatcatgttcctgggtttctgggtgtgaagcgcacacc

SEQ ID NO: 648370 - DNA, 120 bp, Artificial Sequence
  ENSG00000182732_1 (sequence is synthesized)
gacggggacgagagcgcagaggatggcgcttttagatacttccagtcttccgatgttgtgatcgcagtgtgagtgaagacactcaggatggctcaaggatccggggatcaaagagcagtg

SEQ ID NO: 648371 - DNA, 120 bp, Artificial Sequence
  ENSG00000182732_2 (sequence is synthesized)
ggggttgctgacccagaggagagttctccaaacatgatcgtttactgcaaaattgaagacatcattacaaagatgcaagatgacaagacagggggtgtgcccatcagaacagtcaagagc

SEQ ID NO: 648372 - DNA, 120 bp, Artificial Sequence
  ENSG00000182732_3 (sequence is synthesized)
tttctctccaaaatccccagtgtcgtcacaggtactgacattgtgcagtggcttatgaagaacctttccattgaggacccagttgaagcaatacacttggggagccttatcgctgcccag

SEQ ID NO: 648373 - DNA, 120 bp, Artificial Sequence
  ENSG00000182732_4 (sequence is synthesized)
ggctacatctttccaatctcagaccatgttctcaccatgaaggatgatggcaccttttatcgtttccaggctccgtacttctggccttcgaactgctgggaacctgaaaacactgactat

SEQ ID NO: 648374 - DNA, 120 bp, Artificial Sequence
  ENSG00000182732_5 (sequence is synthesized)
gccatctatctctgtaagaggacaatgcaaaataaagcaaggctggaactggcagattatgaagcagaaaacttagcaagactccagagggcctttgcgaggaagtgggaattcatcttt

SEQ ID NO: 648375 - DNA, 120 bp, Artificial Sequence
  ENSG00000182732_6 (sequence is synthesized)
atgcaagcagaagcacaagtaaagattgaccggaaaaaagacaagacagaaaggaaaattttggatagtcaagaacgagccttttgggatgtccacaggcctgtgccaggctgtgtgaac

SEQ ID NO: 648376 - DNA, 120 bp, Artificial Sequence
  ENSG00000182732_7 (sequence is synthesized)
acaacagaaatggatatccgaaaatgtcgacgtttgaagaatccacaaaaggttaaaaagtccgtgtatggcgtgactgaagagtcccaggcacagagcccggtgcatgtactcagccaa

SEQ ID NO: 648377 - DNA, 120 bp, Artificial Sequence
  ENSG00000182732_8 (sequence is synthesized)
ccaatcaggaaaacaacaaaagaggacatccggaaacagataacatttttgaacgcacagatcgacagacattgtttgaaaatgtccaaagtggctgaaagtttaattgcctacacggaa

SEQ ID NO: 648378 - DNA, 120 bp, Artificial Sequence
  ENSG00000182732_9 (sequence is synthesized)
caatatgtggaatatgaccctttgataacaccagctgagccatccaacccttggatcagcgatgacgttgctttgtgggacatagagatgagcaaagagcccagccaacagcgagtaaaa

SEQ ID NO: 648379 - DNA, 120 bp, Artificial Sequence
  ENSG00000182732_10 (sequence is synthesized)
agatggggcttctctttcgatgagatattgaaggaccaggtggggcgggaccagtttctacgattcctggagtccgaattcagttcagaaaacctcaggttctggctggctgtccaagat

SEQ ID NO: 648380 - DNA, 120 bp, Artificial Sequence
  ENSG00000182732_11 (sequence is synthesized)
cttaagaaacaacccctacaggatgtggccaagagggtagaagaaatctggcaagagtttctggctccaggggctccaagtgcaatcaacctggattctcacagctatgagataaccagt

SEQ ID NO: 648381 - DNA, 120 bp, Artificial Sequence
  ENSG00000182732_12 (sequence is synthesized)
caaaatgtcaaagatggagggagatatacatttgaagacgcccaggagcacatctacaagctgatgaagagtgacagctatgcccgcttcctccggtcaaatgcttaccaggatttgctg

SEQ ID NO: 648382 - DNA, 120 bp, Artificial Sequence
  ENSG00000182732_13 (sequence is synthesized)
ctggccaagaagaagggaaagtcgctggcgggcaagcgcctcacgggcctgatgcagtcctcctgaccgttcctaccgcaggtccagggcctgggcccgcggaccccacaggcaggcggc

SEQ ID NO: 648383 - DNA, 120 bp, Artificial Sequence
  ENSG00000182732_14 (sequence is synthesized)
ggcgctccacatctgcggacagagtttccttacgaggagacttggtcactgtgaaggagaaagagtgagggcaatgaagggcgatggtggggagactcggtgggtgaatggggagaccag

SEQ ID NO: 648384 - DNA, 120 bp, Artificial Sequence
  ENSG00000182732_15 (sequence is synthesized)
aaagaaagagtccacagagcctgggctgggcccggtggaggctcctgtttacagccctctcttctttgtacagttgtattccaacactccactcgctaagaggccctgatcccagctcat

SEQ ID NO: 648385 - DNA, 120 bp, Artificial Sequence
  ENSG00000182732_16 (sequence is synthesized)
tcaggggagaacacgtcgtggggttcctgtcacgactatcacttgagattatattattatcctcactccctcgctgtctggagacggtcacaccttctggcaaattcaagaggcatgagt

SEQ ID NO: 648386 - DNA, 120 bp, Artificial Sequence
  ENSG00000182732_17 (sequence is synthesized)
ggaccgagagcacatccagcatttgcatcacctccctggcacctcccatagttacagccactacatccccaccgccgcctgtcatccctcacgtctctgtggccacccgggtgtcactgc

SEQ ID NO: 648387 - DNA, 120 bp, Artificial Sequence
  ENSG00000182732_18 (sequence is synthesized)
cagcaccaggcactgctttcacgtaaaatgtccaaatcacatcttcagcaagaaagcaacctcacggattgccccgcctcaaggtctttccaccctctttgagatcagcgttcggagagg

SEQ ID NO: 648388 - DNA, 120 bp, Artificial Sequence
  ENSG00000182732_19 (sequence is synthesized)
tccccgccagcccggtggctgccctcaggtcccgtcacatgtctcaagggtccagcgttcgaggaagcactgttgtagatgacagagctttttgtttcacagctgcggggattctgctga

SEQ ID NO: 648389 - DNA, 120 bp, Artificial Sequence
  ENSG00000182732_20 (sequence is synthesized)
ccatcttttagaaaattatttcataatttattctggctttgcccccttgctccttggtttattccctcatgttttactcaaaataaacatggccatgaactcaggggccattgggattct

SEQ ID NO: 648390 - DNA, 120 bp, Artificial Sequence
  ENSG00000182732_21 (sequence is synthesized)
cccctctggcagccccaggtgggagctgggagggtccccagcccaggaggtggctggattgcagggctggcagcccccacgtggtggcatcctgacaggcacagtgagacccttgctggg

SEQ ID NO: 648391 - DNA, 120 bp, Artificial Sequence
  ENSG00000182732_22 (sequence is synthesized)
tcaggtctcctttgtgtgtgaagctggggcagagtatgctacgaagggaccaggccaggccacagggctctcctcccagtctttatctgaaggcccagccaaagcacccctctaaaccgg

SEQ ID NO: 648392 - DNA, 120 bp, Artificial Sequence
  ENSG00000182732_23 (sequence is synthesized)
ccctgtgtgtgtgtgtcaaaatgaccatttgccaacctggctgtgaggtaatgtatgtaaagcaccgagtcaggtgcctgatacgcagtaggtgcttagcaaacggtagctaatactatc

SEQ ID NO: 648393 - DNA, 120 bp, Artificial Sequence
  ENSG00000182732_24 (sequence is synthesized)
atcattgtcattgttattgtgacacccatgagcccacagacagagctgtattaagtaacctgttttgaatccagacattcactcccccacttgctatgactaccctcctttgatctattt

SEQ ID NO: 648394 - DNA, 120 bp, Artificial Sequence
  ENSG00000182732_25 (sequence is synthesized)
ttggtcataggtaaaaaaaaaaatctctcttgggagcatataaacaaaaaacatagaagcaataaagcgatcgctggtatttcttttctcatgcagccaaattcgccagctggtgaccaa

SEQ ID NO: 648395 - DNA, 120 bp, Artificial Sequence
  ENSG00000182732_26 (sequence is synthesized)
aggctcagatgcttgcttatttgcagacccggcctcctgggtgctccccagtgacccatctttccaccccaccacctccaagtcctgtctatgtctgcttccacacagccctgtccccag

SEQ ID NO: 648396 - DNA, 120 bp, Artificial Sequence
  ENSG00000182732_27 (sequence is synthesized)
ggcaccagccttctgtccctcacagcagtgccatcgcgggcattaggagtcttcgttatgttgtatccttgtgagttcttgactaccatgcccaagtttcccccactggcaatggttcct

SEQ ID NO: 648397 - DNA, 120 bp, Artificial Sequence
  ENSG00000182732_28 (sequence is synthesized)
ctcttggaggtacagtggaaaccagagagatgacagatgttgagtcctcagtgtctcagaggcagcaattcttgctggacacctgcacatgctcagcacagaggctggtactttggaggc

SEQ ID NO: 648398 - DNA, 120 bp, Artificial Sequence
  ENSG00000182732_29 (sequence is synthesized)
actaaccacttgatgagtaaatcaatggcataaagccccattccaagttatggggtcttttgacaggcccctttcatcctctttctctttgtataaacctcatgtttcagaacaaaatta

SEQ ID NO: 648399 - DNA, 120 bp, Artificial Sequence
  ENSG00000182732_30 (sequence is synthesized)
cagtctaagttcatttgcccccagccttgcccaaggatccccgggctgtgctgacccctaggcatagggcaaagggtgttcccaagcagcaggcacctcagtgccctcagttatccaggg

SEQ ID NO: 648400 - DNA, 120 bp, Artificial Sequence
  ENSG00000182732_31 (sequence is synthesized)
caaggggcctggctgccccctgctcctccccatgatgcaggggctttctaagccaggctgcagacagggcagggttggcttcttggccattccctctgtgcccccttctccttctgactg

SEQ ID NO: 648401 - DNA, 120 bp, Artificial Sequence
  ENSG00000182732_32 (sequence is synthesized)
gtctcaccctggagatccccagaggatctgaccagagccaggtggactgtggccctgagatggagctggctgcaggcttacaagcacctctggggacatccagaggggagggtcagtaag

SEQ ID NO: 648402 - DNA, 120 bp, Artificial Sequence
  ENSG00000182732_33 (sequence is synthesized)
cacaacggagctagggagacttcagatggactcaaacccagagcaataatactctcacaccaccccacagctaaggcactcatgttccccagtagatcaagccagaagctttgcaagaag

SEQ ID NO: 648403 - DNA, 120 bp, Artificial Sequence
  ENSG00000182732_34 (sequence is synthesized)
ggagtggaacgaggctgcctatccaaggtccatctaccacgcagaacttggtcatgcaagtacatttggaaaatctggtcttggcccgtcccccattggcctggtctacacagccaaaaa

SEQ ID NO: 648404 - DNA, 120 bp, Artificial Sequence
  ENSG00000182732_35 (sequence is synthesized)
ttcagactagattagatgtttgcaggcaattctgtagcaaagcaaattcccctaccccgtcccttccccctagaagctgccttagcctccctgactgggtgtggtctctgggcctaggac

SEQ ID NO: 648405 - DNA, 120 bp, Artificial Sequence
  ENSG00000182732_36 (sequence is synthesized)
tcctccctatgaggaaaagtgctctccagccacatcttggcagccccacaaccacagcatcagggcagctgcagcaagtgaccacccacccgtcgggttagacacacaaggcaccaggca

SEQ ID NO: 648406 - DNA, 120 bp, Artificial Sequence
  ENSG00000182732_37 (sequence is synthesized)
ctggcatctgactaaaataacctttccctacatgggaagaggaaagcttgtaggctggcacatataaacgtccagccgcagccagatggcctgaactaagcagcaggaactctctgggct

SEQ ID NO: 648407 - DNA, 120 bp, Artificial Sequence
  ENSG00000182732_38 (sequence is synthesized)
ggggaggagcctcctgcccttctagaaagtgatgcgtcagctttgttctcctgggaaggtgttgctataccccaggaacaaagcagggcccaactgccagtgcagtcagctgggcctgcg

SEQ ID NO: 648408 - DNA, 120 bp, Artificial Sequence
  ENSG00000182732_39 (sequence is synthesized)
ctccaggctcaccaccgctaagtggtcaggtaccgggccagcatcctgggagggacctcttgcgactctgagttgcagcttggactagctgaacacatggggacatgctccaggggcttc

SEQ ID NO: 648409 - DNA, 120 bp, Artificial Sequence
  ENSG00000182732_40 (sequence is synthesized)
ttccctggcaggattcctgggatttcaaactacctcaccaacaggacgctgaaccaggagcctgccacccaactggcccccttggtgattgtggaaggtgatgtttttcctaaaatgcat

SEQ ID NO: 648410 - DNA, 120 bp, Artificial Sequence
  ENSG00000182732_41 (sequence is synthesized)
ccctcctgttctgctccatatacatgtgcttcaaaaaccaccaccaggaaagccttcccagaagagggaaaggattaagggctctcttcctttgggccctgcagaatgtattggagggag

SEQ ID NO: 648411 - DNA, 120 bp, Artificial Sequence
  ENSG00000182732_42 (sequence is synthesized)
gtgttgctgcaaggtccaggagctgggaaactctgggctcggggggagataatgcaccaccagcctcaaaaaggagctgcccaagttgaatatgtagcaaagaccatgggataagttgaa

SEQ ID NO: 648412 - DNA, 120 bp, Artificial Sequence
  ENSG00000182732_43 (sequence is synthesized)
tagtggccagacgaatcactaataactcaccatgggaccctctgaagagaggcctgtgctcgtgtaaccatagcaacagcagatgccagcaacctactcattagtaccacccagtgataa

SEQ ID NO: 648413 - DNA, 120 bp, Artificial Sequence
  ENSG00000182732_44 (sequence is synthesized)
ggcatcccctgggctagacccaggggccataaagtagcaaagtagcaaatgtagcaataaagggcccgggtctatacggggacagggtccaaatgaccaggacttggccctctccccagc

SEQ ID NO: 648414 - DNA, 120 bp, Artificial Sequence
  ENSG00000182732_45 (sequence is synthesized)
cccgatgagggctcagagccagctgctgtcagctgtctggggagggaaggccctgctccataccaggggtccctgttctatactctaagcccactcaccgcatgatcacggactcatcgg

SEQ ID NO: 648415 - DNA, 120 bp, Artificial Sequence
  ENSG00000182732_46 (sequence is synthesized)
aatggcctcctcttagtgcatgtggttctctttagtttatttttctggaatttggggattggaccccagaaccaaacatgctggtacagtctaaaaataaatgacttgaacccacttcaa

SEQ ID NO: 648416 - DNA, 120 bp, Artificial Sequence
  ENSG00000182732_47 (sequence is synthesized)
agcgcgccggggacaccctgtgcgccccgagtcccggcaccatgcgacccgccgcgcgtcctcgcgggcccggggcttcgctcttcgctcgctgagcccctgcgctcgccaccacggaaa

SEQ ID NO: 648417 - DNA, 120 bp, Artificial Sequence
  ENSG00000182732_48 (sequence is synthesized)
ctcgccaccacggaaactcggaaagaggaggcgaggctgtggggagcggcgcggagacggactagacttcccctccgcccccaagaggctgccggtccccggttccctgggcttctccag

SEQ ID NO: 648418 - DNA, 120 bp, Artificial Sequence
  ENSG00000182732_49 (sequence is synthesized)
ctttatcatgaacctggcgcaaggttggctttaggaaaaattctggagccagagggagagtcaaggcaattctttggttgctaagtgtgagtgaagacactcaggatggctcaaggatcc

SEQ ID NO: 648419 - DNA, 120 bp, Artificial Sequence
  ENSG00000182732_50 (sequence is synthesized)
gaacggcttcgcgagttggggcagctcctcgcgctcggccctgctcggcggcgagagctccgcctgggcgccgcgttcctacagccgccggagccgccaggcgccgagggaacggacaga

SEQ ID NO: 648420 - DNA, 120 bp, Artificial Sequence
  ENSG00000182732_51 (sequence is synthesized)
gccaagaagaagccagaaagtgagcaaggtcgtagaacttccctagaaaagttcactcgcagtgtgggatgaaaatgcaaaaaagagcaagcggctccctctgcagaaggtgcacccttg

SEQ ID NO: 648421 - DNA, 120 bp, Artificial Sequence
  ENSG00000182732_52 (sequence is synthesized)
aatgcaaaataaagcaaggctggaactggcagattatgaagcactccccactggaagaggagtcctgagaaatccagcctttggttttgctcctggagataccagcaggtggcaaagact

SEQ ID NO: 648422 - DNA, 120 bp, Artificial Sequence
  ENSG00000182732_53 (sequence is synthesized)
aagtgctgtgtgagttgcattcttgtaaaacaccttcatgaagagaggaatcaggtgaaccatagagacttcagacttaatgggaaaacttagcaagactccagagggcctttgcgagga

SEQ ID NO: 648423 - DNA, 120 bp, Artificial Sequence
  ENSG00000182732_54 (sequence is synthesized)
aagttcactcgcagtgtgaatgtgcagaacacaaggcctgcgggtgcctggtctatcttcatggctgctttgccaatggccgtgtggctccgcacaccaagaagctgccacgggctgtca

SEQ ID NO: 648424 - DNA, 120 bp, Artificial Sequence
  ENSG00000182732_55 (sequence is synthesized)
gagtcaaggcttctgggacttccttcactccatgatggcctgagagaaggacagagcctgcctcagtcctgtccggggagcagcagcaccgcagcagagggggccagagaaagagcatcc

SEQ ID NO: 648425 - DNA, 120 bp, Artificial Sequence
  ENSG00000182732_56 (sequence is synthesized)
aatggcaggagtctggcaaggcgacagcactgccaatgtcacggtcaaggagaggagacccaactctgcctgtggtccagactggaaagttcaaagagaagtcagagagcttcaagtctg

SEQ ID NO: 648426 - DNA, 120 bp, Artificial Sequence
  ENSG00000182732_57 (sequence is synthesized)
aggacttcaaaggctaagaagaaaagacagactgtcaagcaaggaccgaaagcctggccttaacatcatagcacattacactgggaaatggagatggagcatccaagacaacacttaacc

SEQ ID NO: 648427 - DNA, 120 bp, Artificial Sequence
  ENSG00000182732_58 (sequence is synthesized)
caaccttgtaatcttctgcagcaaaagtggtgggggaattctgatacgtgctctgtcctggttaatactagaaggttctgaggcatccataattctaaataattaaaggagtcaatcaat

SEQ ID NO: 648428 - DNA, 120 bp, Artificial Sequence
  ENSG00000182732_59 (sequence is synthesized)
gagcaaggtcgtagaacttccctagaaaagttcactcgcagtgtgcttctcttctagggatgaaaatgcaaaaaagagcaagcggctccctctgcagaaggtgcacccttgatcgcccag

SEQ ID NO: 648429 - DNA, 120 bp, Artificial Sequence
  ENSG00000182732_60 (sequence is synthesized)
tcctttggaggaggccgacaccctcatacatggctctaatgcccattttttctaagaactagaggaaagaaaaattataggaacttttgataactccagcccagatctcatggatgaagg

SEQ ID NO: 648430 - DNA, 120 bp, Artificial Sequence
  ENSG00000182732_61 (sequence is synthesized)
gagcaaggtcgtagaacttccctagaaaagttcactcgcagtgtgtgtctgcagcttctcttctagggatgaaaatgcaaaaaagagcaagcggctccctctgcagaaggtgcacccttg

SEQ ID NO: 648431 - DNA, 120 bp, Artificial Sequence
  ENSG00000182732_62 (sequence is synthesized)
aaatgttcaactctgaagattgagcaagctttgagttcctggaaaccacagtggaacccagctgtgggtgattgaaccttttaagtgctgtgtgtgaacaagccacggaagcttgagaga

SEQ ID NO: 648432 - DNA, 120 bp, Artificial Sequence
  ENSG00000182732_63 (sequence is synthesized)
aagaattctctacccagttcctccagcagttactagaaaagggcgtaaatgagtcatcccatgccttggggtaactgctgtaatggggtttcccacagtccgctgtgggagctggaggaa

SEQ ID NO: 648433 - DNA, 120 bp, Artificial Sequence
  ENSG00000182732_64 (sequence is synthesized)
ggagggggctcatgtcacacagtccttataattggaatgcaccagctcaggatggtctactttattgctgtgatttgaaaggaaagtttaagaataaataaagctctactcccaatgcca

SEQ ID NO: 648434 - DNA, 120 bp, Artificial Sequence
  ENSG00000182732_65 (sequence is synthesized)
ccagaaagtgagcaaggtcgtagaacttccctagaaaagttcactcgcagtgtgtgctgctggcgcagagtcagaatggccgctgcatttcacccccgaggtggcttccttccagcagtg

SEQ ID NO: 648435 - DNA, 120 bp, Artificial Sequence
  ENSG00000182732_66 (sequence is synthesized)
aaataaggcagaaaggaatgccggcctcgagcaaggacaccggttcatgcccaaatcacttctgctttcagccaacagactgtttctgccaaaagatggacgcagctagatttttttttt

SEQ ID NO: 648436 - DNA, 120 bp, Artificial Sequence
  ENSG00000182732_67 (sequence is synthesized)
ttttgtaccgataatctgtcttaaaacttggagaggatctcttttcccctgtgaagtcaggaaaatgacagcaagcagcatggattggagcttctaaaatcacctctgctttgaccttga

SEQ ID NO: 648437 - DNA, 120 bp, Artificial Sequence
  ENSG00000182732_68 (sequence is synthesized)
ggggccgtggtagaggggagacagcaccggcttagaaaccccacggctcggctctagtcccagcatcagtggagcaccaaggggagaaagtattcatcactgaggtactgacattgtgca

SEQ ID NO: 648438 - DNA, 120 bp, Artificial Sequence
  ENSG00000182732_69 (sequence is synthesized)
caccaacaaaaagtacagaaatgcagaaaagttggcactaaattagccctaaatagaagggtctgaaacaaaaaggcaggacgtcaccttgttcaatttcagtgggaaacacacatatca

SEQ ID NO: 648439 - DNA, 120 bp, Artificial Sequence
  ENSG00000182732_70 (sequence is synthesized)
aaatcataagctggactttgaagaatacacaggataatagtagacgaagaagcaggagagagaatattccaagctggaggaccaaatgaggaaagaggtggccgtgggactctcccactc

SEQ ID NO: 648440 - DNA, 120 bp, Artificial Sequence
  ENSG00000182732_71 (sequence is synthesized)
cataaggtcctgagaggacacgtagatgccgactagctgtatggagcgtgctgttctaggcatccacgtgtctgttataaaccagacaagattgatgatccgagttccacacagtgtcgg

SEQ ID NO: 648441 - DNA, 120 bp, Artificial Sequence
  ENSG00000182732_72 (sequence is synthesized)
ggcagttgccctgagtccaaggaagacctcagaaggttcactaggcccagcaggatccaccacttaccaaacccatgattaataggaacagagctccggtcatctctatatccagctgag

SEQ ID NO: 648442 - DNA, 120 bp, Artificial Sequence
  ENSG00000182732_73 (sequence is synthesized)
tgatgtacattttcatgtggcacccaaatcatcctgcaaaaaggaccctgagccctcaggaaccgcagggagcctgcagagctcccagggtcctcagggccttcccacaggggctcagca

SEQ ID NO: 648443 - DNA, 120 bp, Artificial Sequence
  ENSG00000182742_0 (sequence is synthesized)
agtatattttgtgggcaattcccagaaattaatggctatgagttcttttttgatcaactcaaactatgtcgaccccaagttccctccatgcgaggaatattcacagagcgattacctacc

SEQ ID NO: 648444 - DNA, 120 bp, Artificial Sequence
  ENSG00000182742_1 (sequence is synthesized)
cagcgaccactcgcccgggtactacgccggcggccagaggcgagagagcagcttccagccggaggcgggcttcgggcggcgcgcggcgtgcaccgtgcagcgctacgcggcctgccggga

SEQ ID NO: 648445 - DNA, 80 bp, Artificial Sequence
  ENSG00000182742_2 (sequence is synthesized)
ggtctgtcccctcgggctcctgcgccgccacccgccggggccctcctcccggagcccggccagcgctgcgaggcggtcag

SEQ ID NO: 648446 - DNA, 120 bp, Artificial Sequence
  ENSG00000182742_3 (sequence is synthesized)
cgaggcggtcagcagcagccccccgccgcctccctgcgcccagaaccccctgcaccccagcccgtcccactccgcgtgcaaagagcccgtcgtctacccctggatgcgcaaagttcacgt

SEQ ID NO: 648447 - DNA, 120 bp, Artificial Sequence
  ENSG00000182742_4 (sequence is synthesized)
gagcacggtaaaccccaattacgccggcggggagcccaagcgctctcggaccgcctacacgcgccagcaggtcttggagctggagaaggaatttcactacaaccgctacctgacacggcg

SEQ ID NO: 648448 - DNA, 120 bp, Artificial Sequence
  ENSG00000182742_5 (sequence is synthesized)
ccggagggtggagatcgcccacgcgctctgcctctccgagcgccagatcaagatctggttccagaaccggcgcatgaagtggaaaaaagaccacaagttgcccaacaccaagatccgctc

SEQ ID NO: 648449 - DNA, 120 bp, Artificial Sequence
  ENSG00000182742_6 (sequence is synthesized)
cggcaggctcagccggagggccccctggccggcccaatggaggcccccgcgcgctctagtgcccccgcacgcgggagccacgaacctcggggtgggggtgggcagtgagtgcaggggatg

SEQ ID NO: 648450 - DNA, 120 bp, Artificial Sequence
  ENSG00000182742_7 (sequence is synthesized)
aggggatggggtggggggacaggagggggccctggggcctgggccccggaaaaatctatctgccctcccccacactttatatacgaataaacgcagaagagggggaggggaagctttatt

SEQ ID NO: 648451 - DNA, 120 bp, Artificial Sequence
  ENSG00000182742_8 (sequence is synthesized)
aaaaagaaaaagcaagaagaaggaagaaagaaaaagacagaaagagaaataggaggaggctgcagctcctcgttttcagctttggcgaagatggatccacgtttcatctttaatcacgcc

SEQ ID NO: 648452 - DNA, 120 bp, Artificial Sequence
  ENSG00000182742_9 (sequence is synthesized)
aggtccaggcccatctgtcttgtttcctctgccgaggagaagacgggcctcggtggcgaccattacctcgacacccgctaacaaatgaggcccggctcggccgcctccgcctctgctact

SEQ ID NO: 648453 - DNA, 120 bp, Artificial Sequence
  ENSG00000182742_10 (sequence is synthesized)
gccgctgctggaagacagcctggatttcctttctttgtcccccactcccgatacccagcgaaagcaccctctgactgccagatagtgcagtgttttggtcacggtaacacacacacactc

SEQ ID NO: 648454 - DNA, 120 bp, Artificial Sequence
  ENSG00000182742_11 (sequence is synthesized)
tccctcatctttcgtgcccattcactgagggccagaatgactgctcacccacttccaccgtggggttgggggtgggcaacagaggaggggagcaagtagggaagggggtggccttgacaa

SEQ ID NO: 648455 - DNA, 120 bp, Artificial Sequence
  ENSG00000182742_12 (sequence is synthesized)
ctcaggagtgagcaggaaaattgagtccaaggaaaaagagagactcagagacccgggagggccttcctctgaaaggccaagccaagccatgcttggcagggtgaggggccagttgagttc

SEQ ID NO: 648456 - DNA, 120 bp, Artificial Sequence
  ENSG00000182742_13 (sequence is synthesized)
tgggagctgggcactactctgccagtccagagttgtacagcagaagcctctctcctagactgaaaatgaatgtgaaactaggaaataaaatgtgcccctcccagtctgggaggaggatgt

SEQ ID NO: 648457 - DNA, 120 bp, Artificial Sequence
  ENSG00000182742_14 (sequence is synthesized)
tgcagagccctctcccatagtttattatgttgcatcgtttattattattattgataatattattattactatttttttgtgtcatgtgagtcctctctccttttctctttctgacattcc

SEQ ID NO: 648458 - DNA, 120 bp, Artificial Sequence
  ENSG00000182742_15 (sequence is synthesized)
aaaaccaggccccttcctacctctggggctgcttgagtctagaacccttcgtatgtgtgaatatctgtgtgctgtacagagtgacaatagaaataaatgtttggtttcttgtgaccagca

SEQ ID NO: 648459 - DNA, 80 bp, Artificial Sequence
  ENSG00000182747_0 (sequence is synthesized)
gcccccgccgccctcactccgctgctcccggctcctcgcgcgcaggtcgcggagctccgccaccgctgggtgcggcgagg

SEQ ID NO: 648460 - DNA, 120 bp, Artificial Sequence
  ENSG00000182747_1 (sequence is synthesized)
ccggcgcgatgcggcagctgtgccggggccgcgtgctgggcatctcggtggccatcgcgcacggggtcttctcgggctccctcaacatcttgctcaagttcctcatcagccgctaccagt

SEQ ID NO: 648461 - DNA, 120 bp, Artificial Sequence
  ENSG00000182747_2 (sequence is synthesized)
tctccttcctgaccctggtgcagtgcctgaccagctccaccgcggcgctgagcctggagctgctgcggcgcctcgggctcatcgccgtgccccccttcggtctgagcctggcgcgctcct

SEQ ID NO: 648462 - DNA, 120 bp, Artificial Sequence
  ENSG00000182747_3 (sequence is synthesized)
tcgcgggggtcgcggtgctctccacgctgcagtccagcctcacgctctggtccctgcgcggcctcagcctgcccatgtacgtggtcttcaagcgctgcctgcccctggtcaccatgctca

SEQ ID NO: 648463 - DNA, 120 bp, Artificial Sequence
  ENSG00000182747_4 (sequence is synthesized)
tcggcgtcctggtgctcaagaacggcgcgccctcgccaggggtgctggcggcggtgctcatcaccacctgcggcgccgccctggcaggagccggcgacctgacgggcgaccccatcgggt

SEQ ID NO: 648464 - DNA, 120 bp, Artificial Sequence
  ENSG00000182747_5 (sequence is synthesized)
acgtcacgggagtgctggcggtgctggtgcacgctgcctacctggtgctcatccagaaggccagcgcagacaccgagcacgggccgctcaccgcgcagtacgtcatcgccgtctctgcca

SEQ ID NO: 648465 - DNA, 120 bp, Artificial Sequence
  ENSG00000182747_6 (sequence is synthesized)
ccccgctgctggtcatctgctccttcgccagcaccgactccatccacgcctggaccttcccgggctggaaggacccggccatggtctgcatcttcgtggcctgcatcctgatcggctgcg

SEQ ID NO: 648466 - DNA, 120 bp, Artificial Sequence
  ENSG00000182747_7 (sequence is synthesized)
ccatgaacttcaccacgctgcactgcacctacatcaattcggccgtgaccaccagcttcgtgggtgtggtgaagagcatcgccaccatcacggtgggcatggtggccttcagcgacgtgg

SEQ ID NO: 648467 - DNA, 120 bp, Artificial Sequence
  ENSG00000182747_8 (sequence is synthesized)
agcccacctctctgttcattgccggcgtggtggtgaacaccctgggctctatcatttactgtgtggccaagttcatggagaccagaaagcaaagcaactacgaggacctggaggcccagc

SEQ ID NO: 648468 - DNA, 120 bp, Artificial Sequence
  ENSG00000182747_9 (sequence is synthesized)
gggagggaggaaatggccggtcagaaggtggggaggcagcaggtggccccgctcaggagagcaggcaagaggtcaggggcagcccccgaggagtcccgctggtggctgggagctctgaag

SEQ ID NO: 648469 - DNA, 120 bp, Artificial Sequence
  ENSG00000182747_10 (sequence is synthesized)
aagggagcaggaggtcgttaaaagatgcttacctcgaggtatggaggttggttaggggaaccaggtatatgaagaaggattatttgatagaaaacgaggagttacccagtccttgagaag

SEQ ID NO: 648470 - DNA, 120 bp, Artificial Sequence
  ENSG00000182747_11 (sequence is synthesized)
gaggtgcatgtacgtacctatgtgcatacacttattttatatgttagaaatgacgtgttttaatgagaggcctccccgttttattctttgaggagtggggaagggaagaaaagaaagaag

SEQ ID NO: 648471 - DNA, 120 bp, Artificial Sequence
  ENSG00000182747_12 (sequence is synthesized)
ctgaaaggtactgacacagagcaacaaaattagcacctgtgtgaattatttagtgtgacttcacctgaggcatcacagagacaaaagaatgtgaagctacttaacaaagtaaggcaacgt

SEQ ID NO: 648472 - DNA, 120 bp, Artificial Sequence
  ENSG00000182747_13 (sequence is synthesized)
ttctgcttcagactcctggcacatttactttttgtcattataaccataactaaatatctgcatgtaccaagagtccctaagccaccccctccaaagatggagtgtagaaatgatgacagc

SEQ ID NO: 648473 - DNA, 120 bp, Artificial Sequence
  ENSG00000182747_14 (sequence is synthesized)
acttagtaagttcaaagatgacattcagggatgcattttttgatgatagaactacagtttttatcgccagctgggcaaagagtatattgctgaaatgatatataaatatattgaattgat

SEQ ID NO: 648474 - DNA, 120 bp, Artificial Sequence
  ENSG00000182747_15 (sequence is synthesized)
gtttactgtttatagtcatctgaaatatcatatttactctgattctactcacttgttttttaaaaataagtgtcctattattgtattatatattgatagaaactgttaaagctattttga

SEQ ID NO: 648475 - DNA, 120 bp, Artificial Sequence
  ENSG00000182747_16 (sequence is synthesized)
aaatatgagttcttagctttaatcatgaagtctgaagtttgctttcagtaattattttaaaagttgttttggttcattgctttataatatttattattgaatgccaaacctgttcttttt

SEQ ID NO: 648476 - DNA, 120 bp, Artificial Sequence
  ENSG00000182747_17 (sequence is synthesized)
tttactgtgtccaatattctttcaagcaaatgcaatggctggaatataattcagaattaactgaaacccagccagaagagggaccacctgtaaagcaagtcctttcaagtttcactgcac

SEQ ID NO: 648477 - DNA, 120 bp, Artificial Sequence
  ENSG00000182747_18 (sequence is synthesized)
atcccaaaccatgttacaaaaagagcaactgctatattcacattatgatatttttctatcttaaatttgtcaaaataaagtatgagtctaactattaaaggatacattgttagaaattta

SEQ ID NO: 648478 - DNA, 120 bp, Artificial Sequence
  ENSG00000182749_0 (sequence is synthesized)
tgaattcaaaacagttactctgaatggtctttgctaagaacaatttaatgattaagtaaggtcagtgtccttggaagtccaaactctagccagatttccctggtctacacccctagggat

SEQ ID NO: 648479 - DNA, 120 bp, Artificial Sequence
  ENSG00000182749_1 (sequence is synthesized)
aaggtaaatgtttaagcacacagtgaacttcctgaggcccccaaatctaatggaactagctattgagggctaaaagaggatggtttttttagaaaactcgaagcaaatctctcaggctgg

SEQ ID NO: 648480 - DNA, 120 bp, Artificial Sequence
  ENSG00000182749_2 (sequence is synthesized)
ggatatttcaaagactactactattattattaataacaattgcaatatttgttgagtccctaaatgaagctaaaactttgttctaataaatttaatctttacagcaacctatgaggtaga

SEQ ID NO: 648481 - DNA, 120 bp, Artificial Sequence
  ENSG00000182749_3 (sequence is synthesized)
taatattgtcattcccatgagggagctaaggatcagagaaggtaagtcacttgtctaaggtcacatagctagcatgttatgcaatcaggagtcaaacctggtttgtctgaatctgaagtc

SEQ ID NO: 648482 - DNA, 120 bp, Artificial Sequence
  ENSG00000182749_4 (sequence is synthesized)
catctgctctgtgcacttttataccgtctgctttttcctttattcctaaccttcttccattctgattcccactgagtagtggacaggaaccactgaagtttgcctgacaccatcaaccag

SEQ ID NO: 648483 - DNA, 120 bp, Artificial Sequence
  ENSG00000182749_5 (sequence is synthesized)
gccctagtcacctggctttgcctttgccctgctgtgtgatcttagctccctgcccaggcccacagccatggccatggcccagaaactcagccacctcctgccgagtctgcggcaggtcat

SEQ ID NO: 648484 - DNA, 120 bp, Artificial Sequence
  ENSG00000182749_6 (sequence is synthesized)
ccaggagcctcagctatctctgcagccagagcctgtcttcacggtggatcgagctgaggtgccgccgctcttctggaagccgtacatctatgcgggctaccggccgctgcatcagacctg

SEQ ID NO: 648485 - DNA, 120 bp, Artificial Sequence
  ENSG00000182749_7 (sequence is synthesized)
gcgcttctatttccgcacgctgttccagcagcacaacgaggccgtgaatgtctggacccacctgctggcggccctggtactgctgctgcggctggccctctttgtggagaccgtggactt

SEQ ID NO: 648486 - DNA, 120 bp, Artificial Sequence
  ENSG00000182749_8 (sequence is synthesized)
ctggggagacccacacgccctgcccctcttcatcattgtccttgcctctttcacctacctctccttcagtgccttggctcacctcctgcaggccaagtctgagttctggcattacagctt

SEQ ID NO: 648487 - DNA, 120 bp, Artificial Sequence
  ENSG00000182749_9 (sequence is synthesized)
cttcttcctggactatgtgggggtggccgtgtaccagtttggcagtgccttggcacacttctactatgctatcgagcccgcctggcatgcccaggtgcaggctgtttttctgcccatggc

SEQ ID NO: 648488 - DNA, 120 bp, Artificial Sequence
  ENSG00000182749_10 (sequence is synthesized)
tgcctttctcgcctggctttcctgcattggctcctgctataacaagtacatccagaaaccaggcctgctgggccgcacatgccaggaggtgccctccgtcctggcctacgcactggacat

SEQ ID NO: 648489 - DNA, 120 bp, Artificial Sequence
  ENSG00000182749_11 (sequence is synthesized)
tagtcctgtggtgcatcgtatcttcgtgtcctccgaccccaccacggatgatccagctcttctctaccacaagtgccaggtggtcttctttctgctggctgctgccttcttctctacctt

SEQ ID NO: 648490 - DNA, 120 bp, Artificial Sequence
  ENSG00000182749_12 (sequence is synthesized)
catgcccgagcgctggttccctggcagctgccatgtcttcgggcagggccaccaacttttccacatcttcttggtgctgtgcacgctggctcagctggaggctgtggcactggactatga

SEQ ID NO: 648491 - DNA, 120 bp, Artificial Sequence
  ENSG00000182749_13 (sequence is synthesized)
cctcttcctgctcacggtgggcagcagcatcctcactgcattcctcctgagccagctggtacagcgcaaacttgatcagaagaccaagtgaagggggatggcatctggtagggagggagg

SEQ ID NO: 648492 - DNA, 120 bp, Artificial Sequence
  ENSG00000182749_14 (sequence is synthesized)
tatagttgggggacaggggtctgggtttggctccaggtgggaacaaggcctggtaaagttgtttgtgtctggcccacagtgactctctgtgcacgactcaactgccaagggcatcactgg

SEQ ID NO: 648493 - DNA, 120 bp, Artificial Sequence
  ENSG00000182749_15 (sequence is synthesized)
ccaattcttggatttagggattggctaggagttgctggggtccactcctgggcctgccccagctccttgcccagggagagggaaagagttaacggtgtgggccactccagcttgcccttc

SEQ ID NO: 648494 - DNA, 120 bp, Artificial Sequence
  ENSG00000182749_16 (sequence is synthesized)
cactgccactcactggggtgaggctgggggtcagcttggtgaggattggggcttctagattgtctaggcaggaggtgaaacttaggccagagtcagatttgagctgagccaggggaggcc

SEQ ID NO: 648495 - DNA, 120 bp, Artificial Sequence
  ENSG00000182749_17 (sequence is synthesized)
ttggcaacctacttctactcagatttcattgctggatgcggaaggggtaggcccaaaatatatacaggatcttactgtcccttgaagcccagccacaagtgttggagctgcagagagacc

SEQ ID NO: 648496 - DNA, 120 bp, Artificial Sequence
  ENSG00000182749_18 (sequence is synthesized)
ccaaaggtagtagattgtgccagatacaaatgggtcccatccagtgcttcatactccttcagtcactatcccagacagtgagccccagatctcctagctctggcttctgtgtcccacacg

SEQ ID NO: 648497 - DNA, 120 bp, Artificial Sequence
  ENSG00000182749_19 (sequence is synthesized)
gcctgttcccagcttctctcctggttcccttgttacggattcatttatccattcagtgtttcctgggcctctgctcagaggcaggtcaccactgggccctgtggatcaatgcaagatgac

SEQ ID NO: 648498 - DNA, 82 bp, Artificial Sequence
  ENSG00000182749_20 (sequence is synthesized)
gtttcgctcttgttggctaggctggagtaaaatggtgcgatctcggctcactgcacctccgcctcccaggttcaagcgattt

SEQ ID NO: 648499 - DNA, 88 bp, Artificial Sequence
  ENSG00000182749_21 (sequence is synthesized)
tggccgacaaaggctttgatatcagaatgaactgtcaagggaggtgctggagagggattaacctgtgctgcctgggaccctcagggtc

SEQ ID NO: 648500 - DNA, 120 bp, Artificial Sequence
  ENSG00000182749_22 (sequence is synthesized)
ggagagggattaacctgtgctgcctgggaccctcagggtcttaggttggggagtgtgaataggagtttgcagatggagaataggaagggcattccaggcagagggaaacctgtgcagaga

SEQ ID NO: 648501 - DNA, 120 bp, Artificial Sequence
  ENSG00000182749_23 (sequence is synthesized)
ccaagaggtgtggaaggaaaagtggggttggggctgggtggtctggattatggcctggatgcaataaagtactgtgacagtagccacctctttgttttttgtctcctgtttccgggaggg

SEQ ID NO: 648502 - DNA, 120 bp, Artificial Sequence
  ENSG00000182749_24 (sequence is synthesized)
gcccctgctcacattactggaggttttccggaggaagctggggcccctgggagtggacacagggtgcagggagcagttcttgttttatctttgctgggggatggggttggggccttatat

SEQ ID NO: 648503 - DNA, 120 bp, Artificial Sequence
  ENSG00000182749_25 (sequence is synthesized)
accatatctatatatacaaaatttgtttggcaagggagtgggcggcagttttattactaaagttttataagtagttaaaataatgtgtttaaaatatgataatcccactttatgatctga

SEQ ID NO: 648504 - DNA, 120 bp, Artificial Sequence
  ENSG00000182752_0 (sequence is synthesized)
agagcatcttttggggggagggaattcagcggatcagtcttaagaggagcttttttttggagcgagaaatcatataaaataaaatgaaataaaacaaggaggaaggcaaccagctgttag

SEQ ID NO: 648505 - DNA, 120 bp, Artificial Sequence
  ENSG00000182752_1 (sequence is synthesized)
gggaaaaataaggcagataaaggagcggggagagaaattaattgccaaccaggaggagttgggctgtatttttcaaaggtggggagagtggagcacacaccttgaggaggaaagcgagaa

SEQ ID NO: 648506 - DNA, 120 bp, Artificial Sequence
  ENSG00000182752_2 (sequence is synthesized)
agaaaagaaaaaagcaagtggaaaggggggctcgcccaagaagggtgaagaagcgaagaaagtcgaggcgccgaggctcccaaagctggcagctccgggtggcggtgcaggggcgaaggg

SEQ ID NO: 648507 - DNA, 120 bp, Artificial Sequence
  ENSG00000182752_3 (sequence is synthesized)
gggtggcggtgcaggggcgaagggggggcggggggaaccgtcggacatgcggctctggagttgggtgctgcacctggggctgctgagcgccgcgctgggctgcgggctggccgagcgtcc

SEQ ID NO: 648508 - DNA, 120 bp, Artificial Sequence
  ENSG00000182752_4 (sequence is synthesized)
cagcagcgggaggcgaggggcgccaccgaggagccgagcccgccgagccgggcgctctatttcagcgggcgaggcgagcagctgcgcctccgggccgacctcgagctgccccgggacgcg

SEQ ID NO: 648509 - DNA, 120 bp, Artificial Sequence
  ENSG00000182752_5 (sequence is synthesized)
gctgccccgggacgcgttcacgctgcaagtgtggctgcgagcggaggggggccagaggtctccggcagtgatcacagggctgtatgacaaatgttcttatatctcacgtgaccgaggatg

SEQ ID NO: 648510 - DNA, 120 bp, Artificial Sequence
  ENSG00000182752_6 (sequence is synthesized)
ggtcgtgggcattcacaccatcagtgaccaagacaacaaagacccacgctactttttctccttgaagacagaccgagcccggcaagtgaccaccatcaatgcccaccgcagctacctccc

SEQ ID NO: 648511 - DNA, 120 bp, Artificial Sequence
  ENSG00000182752_7 (sequence is synthesized)
aggccagtgggtatacctagctgccacctatgatgggcagttcatgaagctctatgtgaatggtgcccaggtggccacctctggggaacaagtgggtggcatattcagcccactgaccca

SEQ ID NO: 648512 - DNA, 120 bp, Artificial Sequence
  ENSG00000182752_8 (sequence is synthesized)
gaagtgcaaagtgctcatgttagggggcagtgccctgaatcacaactaccggggctacatcgagcacttcagtctgtggaaggtggccaggactcagcgggagatactgtctgacatgga

SEQ ID NO: 648513 - DNA, 120 bp, Artificial Sequence
  ENSG00000182752_9 (sequence is synthesized)
aacccatggcgcccacactgctctacctcagctcctcctccaggagaactgggacaatgtgaagcatgcctggtcccccatgaaggatggcagcagccccaaagtggaattcagcaatgc

SEQ ID NO: 648514 - DNA, 120 bp, Artificial Sequence
  ENSG00000182752_10 (sequence is synthesized)
ccacggctttctgctggacacgagtctggagcctcctctgtgcggacagacattgtgtgacaacacagaggtcattgccagctacaatcagctctcaagtttccgccagcccaaggtggt

SEQ ID NO: 648515 - DNA, 120 bp, Artificial Sequence
  ENSG00000182752_11 (sequence is synthesized)
gcgctaccgcgtggtcaacctctatgaagatgatcataagaacccgacggtgacgcgcgagcaggtggacttccagcaccatcagctggctgaggccttcaagcaatacaacatctcctg

SEQ ID NO: 648516 - DNA, 120 bp, Artificial Sequence
  ENSG00000182752_12 (sequence is synthesized)
ggagctggacgtgctggaggtgagcaactcctcccttcgccgccgcctcatcctggccaactgtgacatcagcaagattggggatgagaactgtgaccccgagtgcaaccacacgctgac

SEQ ID NO: 648517 - DNA, 120 bp, Artificial Sequence
  ENSG00000182752_13 (sequence is synthesized)
gggccacgacggcggggattgccgccacctgcgccaccctgccttcgtgaagaagcagcacaacggggtgtgtgacatggactgcaactatgaacggttcaactttgatggtggagagtg

SEQ ID NO: 648518 - DNA, 120 bp, Artificial Sequence
  ENSG00000182752_14 (sequence is synthesized)
ctgtgaccctgaaatcaccaatgtcactcagacttgctttgaccccgactctccacacagagcctacttggatgttaatgagctgaagaacattcttaaattggatggatcaacacatct

SEQ ID NO: 648519 - DNA, 120 bp, Artificial Sequence
  ENSG00000182752_15 (sequence is synthesized)
caatattttctttgcaaaatcctcagaggaggagttggcaggagtagcaacttggccatgggacaaggaggccctgatgcacttaggtggcattgtcttgaacccatctttctatggcat

SEQ ID NO: 648520 - DNA, 120 bp, Artificial Sequence
  ENSG00000182752_16 (sequence is synthesized)
gcctgggcacacccacaccatgatccatgagattggtcacagcctgggcctctatcacgtcttccgaggcatctcagaaatccagtcctgcagtgacccctgcatggagacagagccctc

SEQ ID NO: 648521 - DNA, 120 bp, Artificial Sequence
  ENSG00000182752_17 (sequence is synthesized)
cttcgagactggagacctctgcaatgataccaacccagcccctaaacacaagtcctgtggtgacccagggccaggaaatgacacctgtggctttcatagcttcttcaacactccttacaa

SEQ ID NO: 648522 - DNA, 120 bp, Artificial Sequence
  ENSG00000182752_18 (sequence is synthesized)
caacttcatgagctatgcagatgacgactgtacggactccttcacgcccaatcaagtcgccagaatgcactgttacctggacctggtctaccagggctggcagccctccaggaaaccagc

SEQ ID NO: 648523 - DNA, 120 bp, Artificial Sequence
  ENSG00000182752_19 (sequence is synthesized)
gcctgttgccctcgccccccaagttctgggccacacaacggactctgtgacactggagtggttcccacctatagatggccatttctttgaaagagaattgggatcagcatgtcatctttg

SEQ ID NO: 648524 - DNA, 120 bp, Artificial Sequence
  ENSG00000182752_20 (sequence is synthesized)
cctggaagggagaatcctggtgcagtatgcttccaacgcttcctccccaatgccctgcagcccatcaggacactggagccctcgtgaagcagaaggtcatcctgatgttgaacagccctg

SEQ ID NO: 648525 - DNA, 120 bp, Artificial Sequence
  ENSG00000182752_21 (sequence is synthesized)
taagtccagtgtccgcacctggagcccaaattcagctgtcaacccacacacggttcctccagcctgccctgagcctcaaggctgctacctcgagctggagttcctctaccccttggtccc

SEQ ID NO: 648526 - DNA, 120 bp, Artificial Sequence
  ENSG00000182752_22 (sequence is synthesized)
tgagtctctgaccatttgggtgacctttgtctccactgactgggactctagtggagctgtcaatgacatcaaactgttggctgtcagtgggaagaacatctccctgggtcctcagaatgt

SEQ ID NO: 648527 - DNA, 120 bp, Artificial Sequence
  ENSG00000182752_23 (sequence is synthesized)
cttctgtgatgtcccactgaccatcagactctgggacgtgggcgaggaggtgtatggcatccaaatctacacgctggatgagcacctggagatcgatgctgccatgttgacctccactgc

SEQ ID NO: 648528 - DNA, 120 bp, Artificial Sequence
  ENSG00000182752_24 (sequence is synthesized)
agacaccccactctgtctacagtgtaagcccctgaagtataaggtggtccgggaccctcctctccagatggatgtggcctccatcctacatctcaataggaaattcgtagacatggatct

SEQ ID NO: 648529 - DNA, 120 bp, Artificial Sequence
  ENSG00000182752_25 (sequence is synthesized)
aaatcttggcagtgtgtaccagtattgggtcataactatttcaggaactgaagagagtgagccatcacctgctgtcacatacatccatggaagtgggtactgtggcgatggcattataca

SEQ ID NO: 648530 - DNA, 120 bp, Artificial Sequence
  ENSG00000182752_26 (sequence is synthesized)
aaaagaccaaggtgaacaatgcgacgacatgaataagatcaatggtgatggctgctcccttttctgccgacaagaagtctccttcaattgtattgatgaacccagccggtgctatttcca

SEQ ID NO: 648531 - DNA, 120 bp, Artificial Sequence
  ENSG00000182752_27 (sequence is synthesized)
tgatggtgatggggtatgtgaggagtttgaacaaaaaaccagcattaaggactgtggtgtctacacgccccagggattcctggatcagtgggcatccaatgcttcagtatctcatcaaga

SEQ ID NO: 648532 - DNA, 120 bp, Artificial Sequence
  ENSG00000182752_28 (sequence is synthesized)
ccagcaatgcccaggctgggtcatcatcggacagccagcagcatcccaggtgtgtcgaaccaaggtgatagatctcagtgaaggcatttcccagcatgcctggtacccttgcaccatcag

SEQ ID NO: 648533 - DNA, 120 bp, Artificial Sequence
  ENSG00000182752_29 (sequence is synthesized)
ctacccatattcccagctggctcagaccactttttggctccgggcgtatttttctcaaccaatggttgccgcagctgtcattgtccacctggtgacggatgggacatattatggggacca

SEQ ID NO: 648534 - DNA, 120 bp, Artificial Sequence
  ENSG00000182752_30 (sequence is synthesized)
aaagcaggagaccatcagcgtgcagctgcttgataccaaagatcagagccacgatctaggcctccatgtcctgagctgcaggaacaatcccctgattatccctgtggtccatgacctcag

SEQ ID NO: 648535 - DNA, 120 bp, Artificial Sequence
  ENSG00000182752_31 (sequence is synthesized)
ccagcccttctaccacagccaggcggtacgtgtgagcttcagttcgcccctggtcgccatctcgggggtggccctccgttccttcgacaactttgaccccgtcaccctgagcagctgcca

SEQ ID NO: 648536 - DNA, 120 bp, Artificial Sequence
  ENSG00000182752_32 (sequence is synthesized)
gagaggggagacctacagccctgccgagcagagctgcgtgcacttcgcatgtgagaaaactgactgtccagagctggctgtggagaatgcttctctcaattgctccagcagcgaccgcta

SEQ ID NO: 648537 - DNA, 120 bp, Artificial Sequence
  ENSG00000182752_33 (sequence is synthesized)
ccacggtgcccagtgtactgtgagctgccggacaggctacgtgctccagatacggcgggatgatgagctgatcaagagccagacgggacccagcgtcacagtgacctgtacagagggcaa

SEQ ID NO: 648538 - DNA, 120 bp, Artificial Sequence
  ENSG00000182752_34 (sequence is synthesized)
gtggaataagcaggtggcctgtgagccagtcgactgcagcatcccagatcaccatcaagtctatgctgcctccttctcctgccctgagggcaccacctttggcagtcaatgttccttcca

SEQ ID NO: 648539 - DNA, 120 bp, Artificial Sequence
  ENSG00000182752_35 (sequence is synthesized)
gtgccgtcaccctgcacaattgaaaggcaacaacagcctcctgacctgcatggaggatgggctgtggtccttcccagaggccctgtgtgagctcatgtgcctcgctccaccccctgtgcc

SEQ ID NO: 648540 - DNA, 120 bp, Artificial Sequence
  ENSG00000182752_36 (sequence is synthesized)
caatgcagacctccagaccgcccggtgccgagagaataagcacaaggtgggctccttctgcaaatacaaatgcaagcctggataccatgtgcctggatcctctcggaagtcaaagaaacg

SEQ ID NO: 648541 - DNA, 120 bp, Artificial Sequence
  ENSG00000182752_37 (sequence is synthesized)
ggccttcaagactcagtgtacccaggatggcagctggcaggagggagcttgtgttcctgtgacctgtgacccacctccaccaaaattccatgggctctaccagtgtactaatggcttcca

SEQ ID NO: 648542 - DNA, 120 bp, Artificial Sequence
  ENSG00000182752_38 (sequence is synthesized)
gttcaacagtgagtgtaggatcaagtgtgaagacagtgatgcctcccagggacttgggagcaatgtcattcattgccggaaagatggcacctggaacggctccttccatgtctgccagga

SEQ ID NO: 648543 - DNA, 120 bp, Artificial Sequence
  ENSG00000182752_39 (sequence is synthesized)
gatgcaaggccagtgctcggttccaaacgagctcaacagcaacctcaaactgcagtgccctgatggctatgccatagggtcggagtgtgccacctcgtgcctggaccacaacagcgagtc

SEQ ID NO: 648544 - DNA, 120 bp, Artificial Sequence
  ENSG00000182752_40 (sequence is synthesized)
catcatcctgccaatgaacgtgaccgtgcgtgacatcccccactggctgaaccccacacgggtagagagagttgtctgcactgctggtctcaagtggtatcctcaccctgctctgattca

SEQ ID NO: 648545 - DNA, 120 bp, Artificial Sequence
  ENSG00000182752_41 (sequence is synthesized)
ctgtgtcaaaggctgtgagcccttcatgggagacaattattgtgatgccatcaacaaccgagccttttgcaactatgacggtggggattgctgcacctccacagtgaagaccaaaaaggt

SEQ ID NO: 648546 - DNA, 120 bp, Artificial Sequence
  ENSG00000182752_42 (sequence is synthesized)
caccccattccctatgtcctgtgatctacaaggtgactgtgcttgtcgggacccccaggcccaagaacacagccggaaagacctccggggatacagccatggctaaggaaggacaagaag

SEQ ID NO: 648547 - DNA, 120 bp, Artificial Sequence
  ENSG00000182752_43 (sequence is synthesized)
ttgtcaaagaattcccaacgccaggacccacatccctttggtattgatttcacagtcagctgctcaacggaatggcctctccacaccagggatccttagcacccaaccggtctgccttta

SEQ ID NO: 648548 - DNA, 120 bp, Artificial Sequence
  ENSG00000182752_44 (sequence is synthesized)
gctggatgatgaaatggattcccatcccaaagtctgagatggattgcatatacagtgtgcagtcccagagcctcctaaaattctagccatttgtcacacaaccacagcaagaaacgtgtt

SEQ ID NO: 648549 - DNA, 120 bp, Artificial Sequence
  ENSG00000182752_45 (sequence is synthesized)
ctatatctagagtgtgcccatctgtgtttagtacacatgcatgcatacacacccatacaaacatctgtgtgagggcagttctggagatgagcagagagagaccggaataaactcaatctt

SEQ ID NO: 648550 - DNA, 120 bp, Artificial Sequence
  ENSG00000182752_46 (sequence is synthesized)
ttctttcccaagctcctagccaacactatccttgggagaaagaaatttgcagaaactgctaagaccaagtgtggagatgtcaagctagttcacactctgaggctcagaatatgtaggaca

SEQ ID NO: 648551 - DNA, 120 bp, Artificial Sequence
  ENSG00000182752_47 (sequence is synthesized)
tgcacaattgtgcagtcctttgggattggaagtgaaacagtctgtgatcccctaccttctagggaactaggacctaggaagaggtaaagattatcaggtatgcaaagcgccccaattctt

SEQ ID NO: 648552 - DNA, 120 bp, Artificial Sequence
  ENSG00000182752_48 (sequence is synthesized)
ctgctgccatgggggattttaccccaactccagggttcgaggccaatctgagaatggcttaggattgcaatgtcaaggtattatatcagccccttgcttgaggcttgaggtcataatatc

SEQ ID NO: 648553 - DNA, 120 bp, Artificial Sequence
  ENSG00000182752_49 (sequence is synthesized)
cctctaggacttacctgttcccccagatcttgccttgggaccacatttgctgctacttttcctgctgctctatcctatacattgaataatccaagatggtagaactaggttaggaaaaat

SEQ ID NO: 648554 - DNA, 120 bp, Artificial Sequence
  ENSG00000182752_50 (sequence is synthesized)
tccacacaaccaaacagtctgccttaaaagtgacccacatttttccatagctcctcactttttagcccttctgcaagagaaaaaccctcatgggtccacatggtgagaagttaagtttcc

SEQ ID NO: 648555 - DNA, 120 bp, Artificial Sequence
  ENSG00000182752_51 (sequence is synthesized)
tgtaagtgggcctctcaccctggaaaggagttgagggacatcagatgctggaaccctcactgaaagtccagaatgtctaagccagtgttagattttgtaaacaagtggaacagtgttaaa

SEQ ID NO: 648556 - DNA, 120 bp, Artificial Sequence
  ENSG00000182752_52 (sequence is synthesized)
tttctatgatgttggagccatccagagactactggaattgtcgagacttttggattattatccttatccttatcctaatcttcctagcccttcaggctagagtaggctttgatcctgaga

SEQ ID NO: 648557 - DNA, 120 bp, Artificial Sequence
  ENSG00000182752_53 (sequence is synthesized)
accttgctgttgctctgaggagatataattctgggagaaagaatcttttataagaacagtacagattgttctcaagagggccatcagaaggaagccaaagagttcacagcctcagcacca

SEQ ID NO: 648558 - DNA, 120 bp, Artificial Sequence
  ENSG00000182752_54 (sequence is synthesized)
acaactcaacatggtcatcatgttttctatatggtttttccagctagcagtactcccttccatacctgtgactgggcagtgcttttctctctcccatgtctagcctccaaaagttaagtg

SEQ ID NO: 648559 - DNA, 120 bp, Artificial Sequence
  ENSG00000182752_55 (sequence is synthesized)
aaaattagtcaactgcacgtggaagcccccaccactttggggatctctttatttcttttcagccagggacctgtccactccctttgaattaatatgggaagaaattaatacaggatgaac

SEQ ID NO: 648560 - DNA, 120 bp, Artificial Sequence
  ENSG00000182752_56 (sequence is synthesized)
tggagagaagggttgagtgtggcatactttctgaaacctggagctgggaattgcggagaagggaaggtctagactagttacatcacatagggattactgtaaatcaagtcatctcaagtc

SEQ ID NO: 648561 - DNA, 120 bp, Artificial Sequence
  ENSG00000182752_57 (sequence is synthesized)
tagtgaagacagccaacagaaacaaaacctagcatagggatagaaaataccatgcacgtgtgcagccccacctaattcctgcatccaaggcaggtgttgttaatctatcatagcacttaa

SEQ ID NO: 648562 - DNA, 120 bp, Artificial Sequence
  ENSG00000182752_58 (sequence is synthesized)
aaaaaaaaaaaaaaagagaccaaaaataactttaggaaccaccatattatatcactcccaatagcactgacctggtgatcaaaaacacttgagaagacatctattggccatctctggcca

SEQ ID NO: 648563 - DNA, 120 bp, Artificial Sequence
  ENSG00000182752_59 (sequence is synthesized)
attacactaagaaacatatcaaggtgcttttggcacaggtgcccacaaatacggatgcagtgctgagatagtttatgagacttgtaccatttcacaaactctgaaattgggttccatatt

SEQ ID NO: 648564 - DNA, 120 bp, Artificial Sequence
  ENSG00000182752_60 (sequence is synthesized)
ggcaaggctgccacagttgttaagaataatcctctatgtttcttcctcacaaaaccatatctcatttatatccagaccattacttcactataattacaaggacaaattattagcaagaaa

SEQ ID NO: 648565 - DNA, 120 bp, Artificial Sequence
  ENSG00000182752_61 (sequence is synthesized)
taagaatagtattagaagaattgatcctattttgaacccctctccagtatcttcacactcttgtcaactctccaggcctctctcttgccctgagttatcagcctgtgtggtgttaactac

SEQ ID NO: 648566 - DNA, 120 bp, Artificial Sequence
  ENSG00000182752_62 (sequence is synthesized)
cttagaaggtacaagctaagaaatgtaacagtatcaaccctcccagttgcttaattatacccataggtaatacaaaaagctctgaagacccaaagatgacattactaatgatgtgatttc

SEQ ID NO: 648567 - DNA, 120 bp, Artificial Sequence
  ENSG00000182752_63 (sequence is synthesized)
aggagccacagaagaaccttaccagcttccctcaaatcagtccttatcctctttctatcttcactcccatcatcatctattttcacactatccagctaagcaaagattcctggaggctga

SEQ ID NO: 648568 - DNA, 120 bp, Artificial Sequence
  ENSG00000182752_64 (sequence is synthesized)
cttgtatcttcagactcacagagtgaattcagctcttctgaatcaagacccacccagtctctttcattcagacctgttgctaacaaatttatatttgccaaggatattaggcaaaagagg

SEQ ID NO: 648569 - DNA, 120 bp, Artificial Sequence
  ENSG00000182752_65 (sequence is synthesized)
ctacttgattggtggccaacctcgtgcccacatggaaggtatctttaatagggtcttttcaaaccttagtggaggagggtcagctcaatttgggcaatgcatttgttcccagtttcattt

SEQ ID NO: 648570 - DNA, 120 bp, Artificial Sequence
  ENSG00000182752_66 (sequence is synthesized)
tcttcctgggaattaactcgtcatttcattccttcagtcatcttctgtgtaggtgaccggagcactgagaggcagctctgatgcactattgtgtgtcagcagctcaaaggccctaaaaca

SEQ ID NO: 648571 - DNA, 120 bp, Artificial Sequence
  ENSG00000182752_67 (sequence is synthesized)
ctgaaggttctgcatctgaagtattagattgttagcagcaaaatatgaaagatgaggtggacagtcctctaagccctatttagggaagcttttccaagccacaatcttaactacctaccc

SEQ ID NO: 648572 - DNA, 120 bp, Artificial Sequence
  ENSG00000182752_68 (sequence is synthesized)
aaaggatttgcattacccccagattctgtgccaacaaccttttaaggaaatacagtccttgggaaatgagttttgatggtgaattggggtgttaaggaagggaaagattgtcatagatgg

SEQ ID NO: 648573 - DNA, 120 bp, Artificial Sequence
  ENSG00000182752_69 (sequence is synthesized)
tagggctttgaaaatgcagggtatcagctgccactcctggcttcaacacattgagtcactgcctagacggttctcttggtcttattcccatcctggccaatgcttaaatactatttgttg

SEQ ID NO: 648574 - DNA, 120 bp, Artificial Sequence
  ENSG00000182752_70 (sequence is synthesized)
aaaataattctttgagacagatttcagctacctcccttccaggttcgatttaacttggttgtaattgtcaatttgttgttataggtcttacctgtgtgaaagaaagaaaaagaaagaaag

SEQ ID NO: 648575 - DNA, 120 bp, Artificial Sequence
  ENSG00000182752_71 (sequence is synthesized)
aaagaaagagaaaggaaattataaggtcaagttaacagttttgaggttttgtgtttttttctggaactacttcaagtgagaaaataaaaaaaaatggtgacaaagctgtacagatagaga

SEQ ID NO: 648576 - DNA, 120 bp, Artificial Sequence
  ENSG00000182752_72 (sequence is synthesized)
taatagaagacaaagagattaaaaggaaataaaaatgcatgattaaaaactaagaataaaaaacctatttttatgtttcctaaaggaaattgtttattctacagcctcagtaggtagaca

SEQ ID NO: 648577 - DNA, 120 bp, Artificial Sequence
  ENSG00000182752_73 (sequence is synthesized)
caaacataaagatttccctagaagacatagagtgggatttgataacactgtctgttattttctgtacattgtggtaggtccaggaaatatgacattttcccccttgatgtgttattgttg

SEQ ID NO: 648578 - DNA, 120 bp, Artificial Sequence
  ENSG00000182752_74 (sequence is synthesized)
ttgttgggtggggtgggcattttgtttatttgtttggtggcaatcagtggtagtagggagtgggagggcttatattggtttttccagctattaaggggacatattgtgtcgttgtgcttt

SEQ ID NO: 648579 - DNA, 120 bp, Artificial Sequence
  ENSG00000182752_75 (sequence is synthesized)
tcacgttataaaatgtttatatttaccagtacagcactgggctttataaagactgcactcagaaccacactgcacagtccagttttttaaaaagctgctacatgacagacaggtaatccc

SEQ ID NO: 648580 - DNA, 120 bp, Artificial Sequence
  ENSG00000182752_76 (sequence is synthesized)
actgagtgagttttgagaaacaaatcaaacgaagtaaacaagaaacataaaaaccaaatagcaaatgaataaaagcctgttcttgtaacttattcaacttttgccaaattcctaccaatc

SEQ ID NO: 648581 - DNA, 120 bp, Artificial Sequence
  ENSG00000182752_77 (sequence is synthesized)
acttgctttttaaaagaaatgtataatagccaaaagagaaattatgtccctgttgtacagaagttagaatttttgactccaggcagcagtttgctcagtgatcttgaacaagttatccaa

SEQ ID NO: 648582 - DNA, 120 bp, Artificial Sequence
  ENSG00000182752_78 (sequence is synthesized)
ttgcctctacatttgcatcagtttctctagctgcaaaatggggataatactatatacctacctcacagtgggagggcaggagattttgaggccctgaggttttaggtgggctgtgagggc

SEQ ID NO: 648583 - DNA, 120 bp, Artificial Sequence
  ENSG00000182752_79 (sequence is synthesized)
caacgcttgacacaaagtccatgggttattattcaagaatgcacaggcccatcggccttttagaaagacaagacagggagtgcttgtttgatatttcaaggaataaagccggagctcctg

SEQ ID NO: 648584 - DNA, 120 bp, Artificial Sequence
  ENSG00000182752_80 (sequence is synthesized)
aattgtagtccaccttaaaagagagacctgtattggagaatattttatttttttggcaaatttgatcttaccctttaccagttctataatttggttaaaagctgattatgtcctacaatg

SEQ ID NO: 648585 - DNA, 120 bp, Artificial Sequence
  ENSG00000182752_81 (sequence is synthesized)
tcaaagtcagctaactgtcgtctacttaagacttctggtcatttccaacttatagaggaagggagtctctaaaatctcttcttcagaaggcacctcacttctcagacttaaaattccaca

SEQ ID NO: 648586 - DNA, 120 bp, Artificial Sequence
  ENSG00000182752_82 (sequence is synthesized)
tcaagtgttccattaaaagaagataaggcattctgagtgcaaacaaatgggggcttcttaaactacacaccagcagtcagtgaggaaaactttgaacaattattgagttgctttcttggg

SEQ ID NO: 648587 - DNA, 120 bp, Artificial Sequence
  ENSG00000182752_83 (sequence is synthesized)
actttgaacaattattgagttgctttcttgggtctctataatcaataacctgtctgcagatatctatctatataaagatattatatataaatataaatttacatatatatgcacatgtat

SEQ ID NO: 648588 - DNA, 120 bp, Artificial Sequence
  ENSG00000182752_84 (sequence is synthesized)
acttaaatgtaatatttacaaaataaaactgtgatctcgtctagagaaaatgtattcatattacaaactgctcttccatatttatgtaccatattatacctttttattattgttataatt

SEQ ID NO: 648589 - DNA, 120 bp, Artificial Sequence
  ENSG00000182752_85 (sequence is synthesized)
attatgggtatttctaattaatatgatgttgaaacctgtttggcaccttctggaagctaccaaaaaaatgacactccattgaagtgcttaaaagctgttctcataagaattcttctggcc

SEQ ID NO: 648590 - DNA, 120 bp, Artificial Sequence
  ENSG00000182752_86 (sequence is synthesized)
gaaaaaaaaaaagaaaaagaagaaagacacaaagaaaataatctaaacaccaaaaactaaacacaattccaatcctttttctgtacctcacgcgcataaatttgctgctcctattttttt

SEQ ID NO: 648591 - DNA, 120 bp, Artificial Sequence
  ENSG00000182752_87 (sequence is synthesized)
tttgctgctcctatttttttttctgtttatgtgtttttatggatctaagttaaatcttttggcaatatataaaaatgtaaatagtaaactttatttattaagaatgtcatcttttttaat

SEQ ID NO: 648592 - DNA, 120 bp, Artificial Sequence
  ENSG00000182752_88 (sequence is synthesized)
acacaattgttcatctaatttattttttctatacagttttaaatactcagacatattttgctgttcatgatatttttatcctgttctcatggatttgttttcccatactgttttctctga

SEQ ID NO: 648593 - DNA, 120 bp, Artificial Sequence
  ENSG00000182752_89 (sequence is synthesized)
tctcaattacaggttggatctcacaaataataatgtcagagacagaaatattttgccactgttgattactatactttaaagttctatattatgaaaatatataatagcttgtacgcttca

SEQ ID NO: 648594 - DNA, 120 bp, Artificial Sequence
  ENSG00000182752_90 (sequence is synthesized)
cagctgcttgataccaaagatcagagccacgatctagaccccaagaaggagagagactgagtaagagccatttccccgttgtacatgtcaccatctgagacccaaagagaggcactgaga

SEQ ID NO: 648595 - DNA, 120 bp, Artificial Sequence
  ENSG00000182752_91 (sequence is synthesized)
ccagaatctactgatttttttcattcatttatggacacgctcatacattcgttcatttgattgtccatttgttcatttacttattcaataaacatcgactatgcacctccaagcagatac

SEQ ID NO: 648596 - DNA, 120 bp, Artificial Sequence
  ENSG00000182752_92 (sequence is synthesized)
tcttcaaacactaggaatacgaagtgggaaatgcctaggcttttaaaaagcttaccctggaaagaagccagaaactcagtggctgataacaaaaagcaaataattaataataataataat

SEQ ID NO: 648597 - DNA, 120 bp, Artificial Sequence
  ENSG00000182752_93 (sequence is synthesized)
aataactgatatgattcactcatagcaggtcccagaaatcaaggaaaaaagctaagggaaaaagggcttatcttagaagacatccaggaggggtgtcagatctgagcctctggatgaggg

SEQ ID NO: 648598 - DNA, 120 bp, Artificial Sequence
  ENSG00000182752_94 (sequence is synthesized)
tagatgctctacccactccaacatttgtctcaaagggcctctccacctttctgaactttggtcttcccatcggtcaaaaaaagagttgtctgcactgctggtctcaagtggtatcctcac

SEQ ID NO: 648599 - DNA, 80 bp, Artificial Sequence
  ENSG00000182759_0 (sequence is synthesized)
ggaggaggcggcgacgcgggcccggggtcgcccgagacacctggccagcggtgcccctagcgcgccgccccggagttgac

SEQ ID NO: 648600 - DNA, 120 bp, Artificial Sequence
  ENSG00000182759_1 (sequence is synthesized)
ggaggaggcggcgacgcgggcccggggtcgcccgagacacctggccagcggtgcccctagcgcgccgccccggagttgaccacgtgaaacttttccctgcgcccctcggcgccgccgccc

SEQ ID NO: 648601 - DNA, 80 bp, Artificial Sequence
  ENSG00000182759_2 (sequence is synthesized)
gggcgcgggccccgggcgatggccgcggagctggcgatgggcgccgagctgcccagcagcccgctggccatcgagtacgt

SEQ ID NO: 648602 - DNA, 120 bp, Artificial Sequence
  ENSG00000182759_3 (sequence is synthesized)
ccagcagcccgctggccatcgagtacgtcaacgacttcgacctgatgaagttcgaggtgaagaaggagcctcccgaggccgagcgcttctgccaccgcctgccgccaggctcgctgtcct

SEQ ID NO: 648603 - DNA, 120 bp, Artificial Sequence
  ENSG00000182759_4 (sequence is synthesized)
gagcgcttctgccaccgcctgccgccaggctcgctgtcctcgacgccgctcagcacgccctgctcctccgtgccctcctcgcccagcttctgcgcgcccagcccgggcaccggcggcggc

SEQ ID NO: 648604 - DNA, 120 bp, Artificial Sequence
  ENSG00000182759_5 (sequence is synthesized)
gcgcccccgggccgccgagcgggggccccggcgccgtcgggggcacctcggggaagccggcgctggaggatctgtactggatgagcggctaccagcatcacctcaaccccgaggcgctca

SEQ ID NO: 648605 - DNA, 120 bp, Artificial Sequence
  ENSG00000182759_6 (sequence is synthesized)
ccgaggcgctcaacctgacgcccgaggacgcggtggaggcgctcatcggcagcggccaccacggcgcgcaccacggcgcgcaccacccggcggccgccgcagcctacgaggctttccgcg

SEQ ID NO: 648606 - DNA, 89 bp, Artificial Sequence
  ENSG00000182759_7 (sequence is synthesized)
gggcttcgcgggcggcggcggagcggacgacatgggcgccggccaccaccacggcgcgcaccacgccgcccaccatcaccacgccgtgg

SEQ ID NO: 648607 - DNA, 120 bp, Artificial Sequence
  ENSG00000182759_8 (sequence is synthesized)
gacacggcggtggcgcgggccaccacgtgcgcctggaggagcgcttctccgacgaccagctggtgtccatgtcggtgcgcgagctgaaccggcagctccgcggcttcagcaaggaggagg

SEQ ID NO: 648608 - DNA, 120 bp, Artificial Sequence
  ENSG00000182759_9 (sequence is synthesized)
tcatccggctcaagcagaagcggcgcacgctcaagaaccgcggctacgcgcagtcctgccgcttcaagcgggtgcagcagcggcacattctggagagcgagaagtgccaactccagagcc

SEQ ID NO: 648609 - DNA, 120 bp, Artificial Sequence
  ENSG00000182759_10 (sequence is synthesized)
aggtggagcagctgaagctggaggtggggcgcctggccaaagagcgggacctgtacaaggagaaatacgagaagctggcgggccggggcggccccgggagcgcgggcggggccggtttcc

SEQ ID NO: 648610 - DNA, 120 bp, Artificial Sequence
  ENSG00000182759_11 (sequence is synthesized)
cccggcggggccaagggcacggccgacttcttcctgtaggcgccggaccccgagcccgcgccgccgtcgccggggacaagttcgcgcaggcctctcggggcctcggctcggactccgcgg

SEQ ID NO: 648611 - DNA, 120 bp, Artificial Sequence
  ENSG00000182759_12 (sequence is synthesized)
cggactccgcggtacaggacgtggacaccaggcccggcccggccgtgctggccccggtgccaagtctgcgggcgcggggctggaggccccttcgctcccggtccccgttcgcgcgcgtcg

SEQ ID NO: 648612 - DNA, 120 bp, Artificial Sequence
  ENSG00000182759_13 (sequence is synthesized)
gtcctgaggttgagcggagaacggtgatttctaaggaaacttgagccaggtctaacttctttccaagcgtccgcttgtacatacgttgaacgtggttctccgttcccaccttcgccctgc

SEQ ID NO: 648613 - DNA, 120 bp, Artificial Sequence
  ENSG00000182759_14 (sequence is synthesized)
cagcctagagggaccgcgctgccgtcccttcccgggtggcccctgcctgcccccgccctccttcgttctcttctcagcctccctttccttgccttttttaacttcccctccccgttttaa

SEQ ID NO: 648614 - DNA, 120 bp, Artificial Sequence
  ENSG00000182759_15 (sequence is synthesized)
aatcggtcttattttcgaagtatttataattattatgcttggtgattagaaaagaaaaccttggaggaagccccttctttccccagccggggtccgccctcagtcgcgagtcacagcatg

SEQ ID NO: 648615 - DNA, 120 bp, Artificial Sequence
  ENSG00000182759_16 (sequence is synthesized)
agtcgctcgccaggaggggcccggcccctgcctgccccctccccgcttgcccccgaccctgctaccggcgttccttggaggtcgaagccagggacgtcacccgtgctgtgtccaggcctg

SEQ ID NO: 648616 - DNA, 120 bp, Artificial Sequence
  ENSG00000182759_17 (sequence is synthesized)
ctgtcctactatgctcaaccgggggtggggggaggggggtgagtcctgtgctcagtcgggtgggggctggcccggatcccgagctgctgtctctctatgcaccagaacatatctgtaact

SEQ ID NO: 648617 - DNA, 120 bp, Artificial Sequence
  ENSG00000182759_18 (sequence is synthesized)
cctggggaaatacatcttgttttaaccttcaagagaagtgaaagaaaaaagtaatgcacagtatttctagcagaaaatttttttttttaagaggaggcttgggccagagccttctggcat

SEQ ID NO: 648618 - DNA, 120 bp, Artificial Sequence
  ENSG00000182759_19 (sequence is synthesized)
ggggcgggtggagaaagtgtttttattttaatttaaattgtgtttcgttttgtttgtggaatctttctttaatgcttcgtcgctctttggactagccgggagagagggcgaggaggcggg

SEQ ID NO: 648619 - DNA, 120 bp, Artificial Sequence
  ENSG00000182759_20 (sequence is synthesized)
tgctccaggccctgtaggctgggccaggcgcctgggggatctgcccgttttcggaggccctcaggggccatcagtgggattccagccgctccacacccctcccctgagcactcggagtgg

SEQ ID NO: 648620 - DNA, 120 bp, Artificial Sequence
  ENSG00000182759_21 (sequence is synthesized)
aaggcgcgccgactcgttgaaagttttgttgtgtagttggttttcgttgagttcttttttcatttgctacgaaactgagaaaaagaaaaaaatacacaaaataaatctgttcagatccaa

SEQ ID NO: 648621 - DNA, 120 bp, Artificial Sequence
  ENSG00000182759_22 (sequence is synthesized)
gtctcagacggagagctgtgccctcattcacctttggaacctctgacctgaggcaccttgagacgcaataatattaataccttaactgcaagactccgcgactcacagagagatgtaagt

SEQ ID NO: 648622 - DNA, 120 bp, Artificial Sequence
  ENSG00000182768_0 (sequence is synthesized)
gcgtcgacatggcggttaccctgagtctcttgctgggcgggcgcgtttgcgccgccgtcactcgctgtgggttcgcgacccggggggtggcgggcccaggccctattggccgggagccgg

SEQ ID NO: 648623 - DNA, 120 bp, Artificial Sequence
  ENSG00000182768_1 (sequence is synthesized)
accccgattccgactgggagccggaggaacgggagctgcaggaggtggagagcaccctgaaacgacagaaacaagcaatccgattccagaaaattcggaggcaaatggaggcgcctggtg

SEQ ID NO: 648624 - DNA, 120 bp, Artificial Sequence
  ENSG00000182768_2 (sequence is synthesized)
ccccgcccaggaccctgacgtgggaagccatggagcagatacggtatttacatgaggaatttccagagtcctggtcagttcccaggttggctgaaggctttgatgtcagcactgatgtga

SEQ ID NO: 648625 - DNA, 120 bp, Artificial Sequence
  ENSG00000182768_3 (sequence is synthesized)
tccgaagagttttaaaaagcaagtttttacccacattggagcagaagctgaagcaggatcaaaaagtccttaagaaagctgggcttgcccactcgctgcagcacctccggggctctggaa

SEQ ID NO: 648626 - DNA, 120 bp, Artificial Sequence
  ENSG00000182768_4 (sequence is synthesized)
atacctcaaagctgctccctgcaggccactctgtatcaggctctttgcttatgccagggcatgaagcctcatctaaagacccaaatcacagcacagctttgaaagtgatagagtcagaca

SEQ ID NO: 648627 - DNA, 120 bp, Artificial Sequence
  ENSG00000182768_5 (sequence is synthesized)
ctcacaggacaaatacaccaaggagaaggaagggaagaaataaagaaatccaggacctggaggagagctttgtgcctgttgctgcacccctaggtcatccaagagagctgcagaagtact

SEQ ID NO: 648628 - DNA, 120 bp, Artificial Sequence
  ENSG00000182768_6 (sequence is synthesized)
ccagtgattctgagagccccagaggaactggcagtggtgcgttgccaagtggtcagaagctggaggagttgaaggcagaggagccagataacttcagcagcaaagtagtgcagaggggcc

SEQ ID NO: 648629 - DNA, 120 bp, Artificial Sequence
  ENSG00000182768_7 (sequence is synthesized)
gagagttctttgacagcaacgggaacttcctgtacagaatttgagtcggggcttggcttatggagatgcctcgtgaaacacagctgggcaagtattaatgtatatggaacagcctggatt

SEQ ID NO: 648630 - DNA, 120 bp, Artificial Sequence
  ENSG00000182768_8 (sequence is synthesized)
tctgcatatggataagccaccttggaataggaagaggtgttgagcctggactgtgggaggaaagagctgcgtggatagattcaaacttcctgtggtagtgctcccagtctgacctctgta

SEQ ID NO: 648631 - DNA, 120 bp, Artificial Sequence
  ENSG00000182768_9 (sequence is synthesized)
gaccttcagtactcactcttcttgcttaggctctctgtgtgttgaaagccatcccgtgttgcatgtgttgttacaattttctgtgatacttgcaatttatgtttgagaagaagtgaaaag

SEQ ID NO: 648632 - DNA, 120 bp, Artificial Sequence
  ENSG00000182768_10 (sequence is synthesized)
tttgccttctgacctcatttccttcttgatcagtgaacactaacattttggggacaacttagtcaattggttttccttacaacaaaataaagtaaaatgtagcagtctgcctctttggtg

SEQ ID NO: 648633 - DNA, 120 bp, Artificial Sequence
  ENSG00000182768_11 (sequence is synthesized)
ctctttggggtgggatggtttacctgtgaaccttggagagagggaaggacaaaggcagaaaggaaggatccctggtcagtaaacattgggagagagatggaaccagaggaatttcccagc

SEQ ID NO: 648634 - DNA, 120 bp, Artificial Sequence
  ENSG00000182768_12 (sequence is synthesized)
aaagggctctgtgcagagcatcctgcttagtgagggattctgacaactgaaaactggacgcctttcttttagttgctggggttctggcagagattgggaaatgaggggttggcagaaaat

SEQ ID NO: 648635 - DNA, 120 bp, Artificial Sequence
  ENSG00000182768_13 (sequence is synthesized)
acaaagcaggcaaaggctttagggcccttataatctccagccacattttaaagtttatattaagagctgggcatggcagaatgtgcctacagtcccagttacttgggaggccgaggtggg

SEQ ID NO: 648636 - DNA, 90 bp, Artificial Sequence
  ENSG00000182768_14 (sequence is synthesized)
taacagtgagacccccatctctaaataaaatcaatcgatcttcaattatgtctcattatacagtttacttaaccagatttttacaatggt

SEQ ID NO: 648637 - DNA, 120 bp, Artificial Sequence
  ENSG00000182768_15 (sequence is synthesized)
tctcattatacagtttacttaaccagatttttacaatggtgccatggtgtaggcaatcccggattaagaggtcccttttacaaataaggaaatagactttaagatggctgccagtaagtg

SEQ ID NO: 648638 - DNA, 120 bp, Artificial Sequence
  ENSG00000182768_16 (sequence is synthesized)
gcagtgctgggacttaactcgggtctcatcattaatccagggcttctggaattccgggaatatggcactgtctgccataattttgttaatttactgcttgttttagaaatacatctgtta

SEQ ID NO: 648639 - DNA, 120 bp, Artificial Sequence
  ENSG00000182768_17 (sequence is synthesized)
taactagaaattcggggacagcttagtcaatttgttttccttacaagcaaaataaagtaaaatgtagcagtctgctcattagtgctctggtgggatggtttacctgtgaaccttggagaa

SEQ ID NO: 648640 - DNA, 120 bp, Artificial Sequence
  ENSG00000182768_18 (sequence is synthesized)
ccatgtcctgctttcacaatttaccaggaaaaatggctactccgaatttaaatatatgtaggacattaatggaaacacctacattccaactcagtcattgccactctgtagaatcttact

SEQ ID NO: 648641 - DNA, 120 bp, Artificial Sequence
  ENSG00000182768_19 (sequence is synthesized)
gctatttcaaatgtccaattacagcaattaaaatactgattactgttgcttttatcaattattattgataacttgaggatctgttctcagtataaatgacaaagccctgtcacatgccaa

SEQ ID NO: 648642 - DNA, 120 bp, Artificial Sequence
  ENSG00000182768_20 (sequence is synthesized)
gcaaaattctacgatccagatgctggtaatacaacagtgggcagataggacctttgctgtcactgccctgtcactatcatgtagttcatagtagaagcttatcagtatttttatggtttt

SEQ ID NO: 648643 - DNA, 120 bp, Artificial Sequence
  ENSG00000182768_21 (sequence is synthesized)
gttatatttatggtatttaattgttaaagatgtgttagatgctgtttgattgtttaaatttgcatttctcactcctgcaaatatctgatcatgccatacccttttcgcagtgggctatag

SEQ ID NO: 648644 - DNA, 88 bp, Artificial Sequence
  ENSG00000182768_22 (sequence is synthesized)
atatctgatcatgccatacccttttcgcagtgggctatagaaacctaaaggctgttcttaaaactttgttttttaatttatttttgac

SEQ ID NO: 648645 - DNA, 79 bp, Artificial Sequence
  ENSG00000182768_23 (sequence is synthesized)
cctcctatatttttcttttgagacagggtctcactcttgtcgtccacactggagtacagtggctcaatcttgcctcact

SEQ ID NO: 648646 - DNA, 73 bp, Artificial Sequence
  ENSG00000182768_24 (sequence is synthesized)
ctggcctttatttttcttttgagacagggtctcactcttgtcgtccacactggagtacagtggctcattcttc

SEQ ID NO: 648647 - DNA, 64 bp, Artificial Sequence
  ENSG00000182768_25 (sequence is synthesized)
gacagggtcttgctctgtcatccatactattctcattccttagcctcccgagtagctgggacta

SEQ ID NO: 648648 - DNA, 61 bp, Artificial Sequence
  ENSG00000182768_26 (sequence is synthesized)
aactattctcatttatttttagtagagataggatttcactatcttggccaggctggtctcg

SEQ ID NO: 648649 - DNA, 88 bp, Artificial Sequence
  ENSG00000182768_27 (sequence is synthesized)
tcttggccaggctggtctcgaactcctgtgatgctgagattacaacgtgagccaccacgtgaggcaggcggatcacctgaggtcagga

SEQ ID NO: 648650 - DNA, 120 bp, Artificial Sequence
  ENSG00000182768_28 (sequence is synthesized)
ccttgggtgacagtgagactccatctcaaacaaacaaacacctccaatgctgtatctcaaataccatgtctacccttcttcctgctttacttcatctattacacaagtaatacatactca

SEQ ID NO: 648651 - DNA, 120 bp, Artificial Sequence
  ENSG00000182768_29 (sequence is synthesized)
ttaaagaaaaagacaagcaaaatgaaaacaaaagtcatccctgatcccaccagtgaagagttactatcctaccaacatttttctaagcatatgtacaactttaagacaagcacgaaagaa

SEQ ID NO: 648652 - DNA, 82 bp, Artificial Sequence
  ENSG00000182768_30 (sequence is synthesized)
ttctaagcatatgtacaactttaagacaagcacgaaagaataatactgtgccaggcgcggtggctcacgcctgtggtcccaa

SEQ ID NO: 648653 - DNA, 120 bp, Artificial Sequence
  ENSG00000182768_31 (sequence is synthesized)
tctctactaaaaatacgagaattagcgactcccagccgccgcccgggcccgcgcgctcctccgccgcgctccgctcggctcctctcgaccccacaccgccggtcgacatgatccgctgcg

SEQ ID NO: 648654 - DNA, 120 bp, Artificial Sequence
  ENSG00000182768_32 (sequence is synthesized)
gcctggcctgcgagcgctgccgctggatcctgaccctgctcctactcagcgccatcgccttcgacatcatcgcgctggccggccgcggctggctgcagtcgagcgaccgcgtccagacgt

SEQ ID NO: 648655 - DNA, 120 bp, Artificial Sequence
  ENSG00000182768_33 (sequence is synthesized)
cctcgctgtggtggagatgtttccttccacaggggcggcggcggcggcagcgggtcctaagaggacggctgccacagcctcatggagtacgcgtggggtcgagcagcgctgccatgcttt

SEQ ID NO: 648656 - DNA, 120 bp, Artificial Sequence
  ENSG00000182768_34 (sequence is synthesized)
tctggggcgtcagcatcctggtgatctgtttcatcctctccttcttcgtcctgtgtgtaccccagatacttgtcttcctaagagtgattggaggtctccttgccttggctgctgtgttcc

SEQ ID NO: 648657 - DNA, 120 bp, Artificial Sequence
  ENSG00000182768_35 (sequence is synthesized)
agatcatctccctggtaatttaccccgtgaagtacactcaaccttcaaccttcatgccaagccccgctgtcacttccatctataactgggcctgcggctttgggtgggcagccatgatta

SEQ ID NO: 648658 - DNA, 120 bp, Artificial Sequence
  ENSG00000182768_36 (sequence is synthesized)
tcctcattggctgtgctttcttctgctgctgcctccccagctgcgaagatgacctcctgggcaataccaagcccaggtacttctacacatccgcctaacttgggaatgagtgtgggagaa

SEQ ID NO: 648659 - DNA, 120 bp, Artificial Sequence
  ENSG00000182768_37 (sequence is synthesized)
aatcgccactgccaagatggactccagaagaagaaactgtttctctaggctacttcgaacttattttttggcagtgttcatattctcaaactagtcaaaaatgctaaaataatttgggag

SEQ ID NO: 648660 - DNA, 120 bp, Artificial Sequence
  ENSG00000182768_38 (sequence is synthesized)
aaaatatttttaaagtagtgttatagtttcatgttcatcttttattatgttttgtgaagttgtgtcttttcactaattacctatactatgccaatatttccttatatctacccataacat

SEQ ID NO: 648661 - DNA, 120 bp, Artificial Sequence
  ENSG00000182768_39 (sequence is synthesized)
ttatgctatgtttgtaagagaatatgaacatgaaacttaacactttataaggtaaaaatgagatggtttccaagatttaataattggatcaagttcttgttatttccaaatagaatggac

SEQ ID NO: 648662 - DNA, 120 bp, Artificial Sequence
  ENSG00000182768_40 (sequence is synthesized)
tggatcaagttcttgttatttccaaatagaatggacttggtctgttaagggctaaggagaagaggaaggtaatggtaaaaattgtcaatgactggccgggtgtggtggctcacgcttgta

SEQ ID NO: 648663 - DNA, 86 bp, Artificial Sequence
  ENSG00000182768_41 (sequence is synthesized)
agtgaaccgagattgtgccattgcactacagcctggtaattgtcaatgaccaaacattctaaaagaaatgccaaaaaaaaagcttt

SEQ ID NO: 648664 - DNA, 120 bp, Artificial Sequence
  ENSG00000182768_42 (sequence is synthesized)
tgaccaaacattctaaaagaaatgccaaaaaaaaagctttttttttcaagccttcaaactatttaaggaagcaaaatagtttcctaaatgcatattgtttgtgagaatttctcattaata

SEQ ID NO: 648665 - DNA, 68 bp, Artificial Sequence
  ENSG00000182768_43 (sequence is synthesized)
ttcctaaatgcatattgtttgtgagaatttctcattaatatcctgaataatgatggcgtgatctcggc

SEQ ID NO: 648666 - DNA, 89 bp, Artificial Sequence
  ENSG00000182768_44 (sequence is synthesized)
ataattcattcttgctaagcttcatgttgactctatatatcatctaagaaagtattgttttgtggtccaaacctgttgccgtggttagt

SEQ ID NO: 648667 - DNA, 120 bp, Artificial Sequence
  ENSG00000182768_45 (sequence is synthesized)
aagtattgttttgtggtccaaacctgttgccgtggttagtaaggctttcttaggtgtgaaatatttagatgaaattttctcttttaaagttctgtatagggttagggtgttggaaaatgc

SEQ ID NO: 648668 - DNA, 120 bp, Artificial Sequence
  ENSG00000182768_46 (sequence is synthesized)
tatattaataaatctgtagtgttttgtgtttataggttcagaaccagagtaactggattgaaagatggactgatagattagatatatcagtctaatttatcatgactgatagatctggtt

SEQ ID NO: 648669 - DNA, 120 bp, Artificial Sequence
  ENSG00000182768_47 (sequence is synthesized)
aagttgtgtactaaaggattaggagagcccttcctgtcacaaaagtgccactaaaacagcctaaggagaaaaatggcttgcttttctaaacttcagatgtatctgggctctaatcatata

SEQ ID NO: 648670 - DNA, 120 bp, Artificial Sequence
  ENSG00000182768_48 (sequence is synthesized)
gacaggcttctgatagattgcaactgtaagtagaaacctacatatagttaaaatcctggtctttcttggtaaacagatttaaaatgtctgatgtaaaacatgccacaggagaattcaggg

SEQ ID NO: 648671 - DNA, 120 bp, Artificial Sequence
  ENSG00000182768_49 (sequence is synthesized)
atttgagtttccctgaatagcatatatatgatgcatcaaatgggttattactattttttaccatttccacttacataatgaaaaacaattcattttaaatatcacattattattttgtaa

SEQ ID NO: 648672 - DNA, 120 bp, Artificial Sequence
  ENSG00000182768_50 (sequence is synthesized)
gtcatggaaaagggcaattgaagttttcattatgaagttttcccaataaaccaggaattctaaacttgaaaaaaaaaaatagaattagccaggtatggttgcacaggcctgtaatcccag

SEQ ID NO: 648673 - DNA, 120 bp, Artificial Sequence
  ENSG00000182768_51 (sequence is synthesized)
ctgaggcaggagaatcacctgaacctgagaggcagaggcttcagtgagccgaggccacaccactgcactccggccttggtgacagagactctgcctcgaaagataaaaataataatgaaa

SEQ ID NO: 648674 - DNA, 120 bp, Artificial Sequence
  ENSG00000182768_52 (sequence is synthesized)
ataataatgaaagtaatattgggattatactgtacattctttcttacatgtatggtgaatatattttgacaataaatatctttacatcagttaaaataaccacctcatattttgttttat

SEQ ID NO: 648675 - DNA, 120 bp, Artificial Sequence
  ENSG00000182768_53 (sequence is synthesized)
tgttttatggaatataatattattttgttgtatgaagtcaaatattagattgaaccatatatctgaccattttttacctataaaaatagcagttacctgtagtcccagctacttaggagg

SEQ ID NO: 648676 - DNA, 120 bp, Artificial Sequence
  ENSG00000182768_54 (sequence is synthesized)
ggagaatcccttgagcacaggagttcaaggctacagtgagctatataattattcttttgttgtgggacattttggtcatttctaaattttcaccactgttgtgataaacctcttttagcg

SEQ ID NO: 648677 - DNA, 120 bp, Artificial Sequence
  ENSG00000182768_55 (sequence is synthesized)
tcagcttgaagcagggcctcgtgccccggcgctccaggccgcgcccccttggcgccgggtgtcctgccgctgcttgcgcagcggcccttgtttcttcttacccgttgttaggggcgcagc

SEQ ID NO: 648678 - DNA, 120 bp, Artificial Sequence
  ENSG00000182768_56 (sequence is synthesized)
gtcaggtgttcagctcccctgggaccactggtcccttcattagtgacgtatttcatcatcagtttagagagttcggcatgcttacaggcagttattgttctaggtgttagctttctgggt

SEQ ID NO: 648679 - DNA, 120 bp, Artificial Sequence
  ENSG00000182768_57 (sequence is synthesized)
gtacggagcagctctaagccggcaacatggcccggttgcccttgcgatcaaagagaagagggctgggcgctccatgatttagcctgaggctcttcaaacatccattctgcttccacgcat

SEQ ID NO: 648680 - DNA, 120 bp, Artificial Sequence
  ENSG00000182771_0 (sequence is synthesized)
agttcgctcctcgccggggctcagacacacagccagcccagagccgccacgccggcccggccgccgccgccaccgcctcagcctcccccgaagccgctctagccgcgggaagcgccgctg

SEQ ID NO: 648681 - DNA, 80 bp, Artificial Sequence
  ENSG00000182771_1 (sequence is synthesized)
gctcaagctgccagcaccgccgcagccgccaccggagccggagcgggagcccgaccgcgctgggctgggctgggctgggc

SEQ ID NO: 648682 - DNA, 80 bp, Artificial Sequence
  ENSG00000182771_2 (sequence is synthesized)
cacgggcgggctcggctctcccggggagcggcccgggactgcaccgggaccagcgcctccccgcttcgcgctgccctcgg

SEQ ID NO: 648683 - DNA, 120 bp, Artificial Sequence
  ENSG00000182771_3 (sequence is synthesized)
cctcgccccgggcccgggtggatgagccgcgcgcccgggggacatggaagcgctgacgctgtggcttctcccctggatatgccagtgcgtgtcggtgcgggccgactccatcatccacat

SEQ ID NO: 648684 - DNA, 120 bp, Artificial Sequence
  ENSG00000182771_4 (sequence is synthesized)
cggtgccatcttcgaggagaacgcggccaaggacgacagggtgttccagttggcggtatccgacctgagcctcaacgatgacatcctgcagagcgagaagatcacctactccatcaaggt

SEQ ID NO: 648685 - DNA, 120 bp, Artificial Sequence
  ENSG00000182771_5 (sequence is synthesized)
catcgaggccaacaacccattccaggctgtgcaggaagcctgtgacctcatgacccaggggattttggccttggtcacgtccactggctgtgcatctgccaatgccctgcagtccctcac

SEQ ID NO: 648686 - DNA, 120 bp, Artificial Sequence
  ENSG00000182771_6 (sequence is synthesized)
ggatgccatgcacatcccacacctctttgtccagcgcaacccgggagggtcgccacgcaccgcatgccacctgaaccccagccccgatggtgaggcctacacactggcttcgagaccacc

SEQ ID NO: 648687 - DNA, 120 bp, Artificial Sequence
  ENSG00000182771_7 (sequence is synthesized)
cgtccgcctcaatgatgtcatgctcaggctggtgacggagctgcgctggcagaagttcgtcatgttctacgacagcgagtatgatatccgtgggcttcaaagctttctggaccaggcctc

SEQ ID NO: 648688 - DNA, 120 bp, Artificial Sequence
  ENSG00000182771_8 (sequence is synthesized)
gcggctgggccttgacgtctctttacaaaaggtggacaagaacattagccacgtattcaccagcctcttcaccacgatgaagacagaggagctgaatcgctaccgggacacgcttcgccg

SEQ ID NO: 648689 - DNA, 120 bp, Artificial Sequence
  ENSG00000182771_9 (sequence is synthesized)
cgccatcctgctgctcagcccacagggagcccactccttcatcaacgaggccgtggagaccaacctggcttccaaggacagccactgggtctttgtgaatgaggaaatcagtgacccgga

SEQ ID NO: 648690 - DNA, 120 bp, Artificial Sequence
  ENSG00000182771_10 (sequence is synthesized)
gatcctggatctggtccatagtgcccttggaaggatgaccgtggtccggcaaatctttccgtctgcaaaggacaatcagaaatgcacgaggaacaaccaccgcatctcctccctgctctg

SEQ ID NO: 648691 - DNA, 120 bp, Artificial Sequence
  ENSG00000182771_11 (sequence is synthesized)
cgacccccaggaaggctacctccagatgctgcagatctccaacctctatctgtatgacagtgttctgatgctggccaacgcctttcacaggaagctggaggaccggaagtggcatagcat

SEQ ID NO: 648692 - DNA, 120 bp, Artificial Sequence
  ENSG00000182771_12 (sequence is synthesized)
ggcgagcctcaactgcatacggaaatccactaagccatggaatggtgggaggtccatgctggataccatcaaaaagggccacatcactggcctcactggggtgatggagtttcgggagga

SEQ ID NO: 648693 - DNA, 120 bp, Artificial Sequence
  ENSG00000182771_13 (sequence is synthesized)
cagttcgaatccctatgtccagtttgaaatccttggcactacctatagtgagacttttggcaaagacatgcgcaagttggcgacatgggactcagagaagggcttgaatggcagcttgca

SEQ ID NO: 648694 - DNA, 120 bp, Artificial Sequence
  ENSG00000182771_14 (sequence is synthesized)
agagaggcccatgggcagccgcctccaaggattgactcttaaagtggtgactgtcttggaagagcctttcgtgatggtggctgagaacatcctaggacagcccaagcgctacaaagggtt

SEQ ID NO: 648695 - DNA, 120 bp, Artificial Sequence
  ENSG00000182771_15 (sequence is synthesized)
ctccatagatgtcctggatgcactggccaaggctctgggctttaaatatgagatttaccaagcccctgatggcaggtacggtcaccagctccataacacctcctggaacgggatgatcgg

SEQ ID NO: 648696 - DNA, 120 bp, Artificial Sequence
  ENSG00000182771_16 (sequence is synthesized)
ggagctcatcagcaagagagcagacttggccatctctgccatcaccatcaccccagagagggagagcgttgtggacttcagcaagcggtacatggactattcagtggggattctaattaa

SEQ ID NO: 648697 - DNA, 120 bp, Artificial Sequence
  ENSG00000182771_17 (sequence is synthesized)
gaagcccgaggagaaaatcagcatcttctccctctttgctccatttgatttcgctgtgtgggcctgcattgcagcagccatccctgtggttggtgtgctgatatttgtgttgaacaggat

SEQ ID NO: 648698 - DNA, 120 bp, Artificial Sequence
  ENSG00000182771_18 (sequence is synthesized)
acaggctgtgagggctcagagtgctgcccagcccaggccgtcagcttctgccactctgcacagcgccatctggattgtctatggagccttcgtacagcaaggtggcgaatcttccgtgaa

SEQ ID NO: 648699 - DNA, 120 bp, Artificial Sequence
  ENSG00000182771_19 (sequence is synthesized)
ctccatggccatgcgcatcgtgatgggcagctggtggctcttcacgctcattgtgtgctcctcctacacagccaaccttgctgccttcctcacagtgtccaggatggacaaccccataag

SEQ ID NO: 648700 - DNA, 120 bp, Artificial Sequence
  ENSG00000182771_20 (sequence is synthesized)
gactttccaggacctgtccaaacaagtggaaatgtcttatggcactgtccgggattctgctgtatatgagtacttccgagccaagggcaccaaccccctggagcaggacagcacgtttgc

SEQ ID NO: 648701 - DNA, 120 bp, Artificial Sequence
  ENSG00000182771_21 (sequence is synthesized)
tgaactctggcggaccatcagcaagaacggaggggctgacaactgcgtgtccagtccttcagaaggcatcaggaaggcaaagaaggggaactacgccttcctgtgggatgtggccgtggt

SEQ ID NO: 648702 - DNA, 120 bp, Artificial Sequence
  ENSG00000182771_22 (sequence is synthesized)
ggaatacgcagccctgacggatgacgactgctcggtgactgtcatcggcaacagcatcagcagcaagggttacgggattgccctgcagcatggcagcccctacagggacctcttctccca

SEQ ID NO: 648703 - DNA, 120 bp, Artificial Sequence
  ENSG00000182771_23 (sequence is synthesized)
gaggatcctggagctgcaggacacaggggacctggatgtgctgaagcagaagtggtggccgcacatgggccgctgtgacctcaccagccatgccagcgcccaggccgacggcaaatccct

SEQ ID NO: 648704 - DNA, 120 bp, Artificial Sequence
  ENSG00000182771_24 (sequence is synthesized)
caagctgcacagcttcgccggggtcttctgcatcctggccattggcctgctcctggcctgcctggtggctgccctggagttgtggtggaacagcaaccggtgccaccaggagacccccaa

SEQ ID NO: 648705 - DNA, 120 bp, Artificial Sequence
  ENSG00000182771_25 (sequence is synthesized)
cggcgcatgaacagcctcatggatgaagacattgctcacaagcagatttccccagcgtcgattgagctctcggccctggagatggggggcctggctcccacccagaccttggagccgaca

SEQ ID NO: 648706 - DNA, 120 bp, Artificial Sequence
  ENSG00000182771_26 (sequence is synthesized)
cgggagtaccagaacacccagctctcggtcagcacctttctgccagagcagagcagccatggcaccagccggacactctcatcagggcccagcagcaacctgccgctgccgctgagcagc

SEQ ID NO: 648707 - DNA, 120 bp, Artificial Sequence
  ENSG00000182771_27 (sequence is synthesized)
tcggcgaccatgccctccatgcagtgcaaacacaggtcacccaacggggggctgttccggcagagcccggtgaagacccccatccccatgtccttccagcccgtgcctggaggcgtcctt

SEQ ID NO: 648708 - DNA, 120 bp, Artificial Sequence
  ENSG00000182771_28 (sequence is synthesized)
ccagaggctctggacacctcccacgggacctccatctgactgcgccgcctgccctcctgcccaccctcccacccacccgaccagcagagctttttaatacaagaaaacaacaacacaaac

SEQ ID NO: 648709 - DNA, 120 bp, Artificial Sequence
  ENSG00000182771_29 (sequence is synthesized)
cacacacactcgcacacacacacatacacagagactctttcatttttcttgtacatatgtgtaaataatgacagaatggagtggggtaaaagtgtattttgaatattcccaattttcgaa

SEQ ID NO: 648710 - DNA, 120 bp, Artificial Sequence
  ENSG00000182771_30 (sequence is synthesized)
gtcagtaaaaaaacacaaaaactgtatgaatgactttgtaaattttgttctatatgaataaaaaggcaaattacttgtgatcattctgaagtgccaaaggagcccccccattcctgggcc

SEQ ID NO: 648711 - DNA, 120 bp, Artificial Sequence
  ENSG00000182771_31 (sequence is synthesized)
tttctgagggcaggaggggcgaccagataaggagcccctctctgctgggggagaagggaagacgaggaaccccacatgccactcgctgccttgtcccacagcttgctgccccatttcttt

SEQ ID NO: 648712 - DNA, 120 bp, Artificial Sequence
  ENSG00000182771_32 (sequence is synthesized)
gctcctggcacctcgtcccttttagtccctcagcttgataaagagtgagtttggagcccgcattgggctggcccactgggttgctgtgctgtagggtgatcggctgttctgggtagcctg

SEQ ID NO: 648713 - DNA, 120 bp, Artificial Sequence
  ENSG00000182771_33 (sequence is synthesized)
gggctgaggaggtgccctggactcagggctatcctgtcctgtcttggatcttgcgggacgagttagtcaccgctgtgtgtgttgcagtgtgcctctgccccatgggcccgagagaagctg

SEQ ID NO: 648714 - DNA, 120 bp, Artificial Sequence
  ENSG00000182771_34 (sequence is synthesized)
acaattacccatagtgaggtaattgagggctttgatactgagctgttctcatatcatactgttggccttgtttttcattttcttttcaaaattagaagaatcaaaaagtgatagaatatt

SEQ ID NO: 648715 - DNA, 120 bp, Artificial Sequence
  ENSG00000182771_35 (sequence is synthesized)
gggggaaggagggcagactccatcgtttcctcagggagactgggcggaggtggggttggtctggaagaaggtccatgggggcagggagttgcgaggtggggttagttgcatggaccaggt

SEQ ID NO: 648716 - DNA, 120 bp, Artificial Sequence
  ENSG00000182771_36 (sequence is synthesized)
gaggtggtggaacaaaaggccaggtagaggaagaatattcccttgggtttggacccatggtcccaggtgagagaaggaagtgaggccatagatgcagggagtagaagctttgtggtgtca

SEQ ID NO: 648717 - DNA, 120 bp, Artificial Sequence
  ENSG00000182771_37 (sequence is synthesized)
ggcaaacggactctgttagtaagagttgggggaggtgcccaggtgggtggaccagtactccaggtgatggggcatgctgagaaatagagaaaagagaccatgtttatttgggtaggagga

SEQ ID NO: 648718 - DNA, 120 bp, Artificial Sequence
  ENSG00000182771_38 (sequence is synthesized)
agccttgccttgcgccttaggtgagaagcataagtgtaactcccatccaccagggaagttgcttgtagccccaaaagtaaaggcctatctctgggtcataaatcctgcaggcagtccaac

SEQ ID NO: 648719 - DNA, 120 bp, Artificial Sequence
  ENSG00000182771_39 (sequence is synthesized)
aaacagggctggctccagcacaaactctcccttccacctttacgaccctctccagaccagacctggagtcctcttcaagcagcaatccaacccagagcaggggccctccccactcaggca

SEQ ID NO: 648720 - DNA, 120 bp, Artificial Sequence
  ENSG00000182771_40 (sequence is synthesized)
tctgataacctctgagatttccaggcctatccctgtgcaggtacagctgcagggaagcccagttttctaagcctaggaccacctaacagcgccccctccttcagttgccctttctgaggc

SEQ ID NO: 648721 - DNA, 120 bp, Artificial Sequence
  ENSG00000182771_41 (sequence is synthesized)
aactaaactacagaatcagggaaagaaccattaggagtggaactgggggaatctgagttgtgtcacttcagttcctctcctaaagacaaaggttagtctgatctccagacccgtcagaat

SEQ ID NO: 648722 - DNA, 120 bp, Artificial Sequence
  ENSG00000182771_42 (sequence is synthesized)
ggaatacacagcccacatctgtcactgaaggaggtggagctcccacagccagcagtaatcagggagctgagagcctggttctgtgatcatggagaaatacaaagtcctattgattgcttc

SEQ ID NO: 648723 - DNA, 120 bp, Artificial Sequence
  ENSG00000182771_43 (sequence is synthesized)
ttctatagccttgtagagtttctagagagatgtatttatgagggtgataactagcccaggattgatttctttcctaaagtccctagtgacatgattgagcagtaaagaacggccaaatca

SEQ ID NO: 648724 - DNA, 120 bp, Artificial Sequence
  ENSG00000182771_44 (sequence is synthesized)
cacagtcagctaaaagcactgtggggaagagagtgtttataattatgttatttattgctggatgctgagaatggtctgatattcgtgctacctaggcaatccattgacatttctccaatc

SEQ ID NO: 648725 - DNA, 120 bp, Artificial Sequence
  ENSG00000182771_45 (sequence is synthesized)
agagcatgtggaccttggagccaggcatgctcagagaagcctaggtgggctaccatgaccccgaggaagagcaggctttgttttccatcagcacgttgggggccctgccctgaatggtca

SEQ ID NO: 648726 - DNA, 120 bp, Artificial Sequence
  ENSG00000182771_46 (sequence is synthesized)
atttttcacatatatatctctctatttttttaatcaaactctggtctcactgccttatctcacaccaactctgtttcctcattgccccctgagatggcctgtcttctggggtatagcttg

SEQ ID NO: 648727 - DNA, 120 bp, Artificial Sequence
  ENSG00000182771_47 (sequence is synthesized)
tctggggtatagcttggatgtcttcttggatggttctgcttagaatgagtgtcaaggaggaaagagagggagatggaggatgtgtttgtgcgcctgtgtgtgtgtgtttgtgtgtgtgtg

SEQ ID NO: 648728 - DNA, 120 bp, Artificial Sequence
  ENSG00000182771_48 (sequence is synthesized)
agagagagagagagagagagaccagcatcttcaagagaagtattctgcttatacaaaatccttaacacctcatggtgttattcttcaccatgtttatatatatatatatatatttttttt

SEQ ID NO: 648729 - DNA, 120 bp, Artificial Sequence
  ENSG00000182771_49 (sequence is synthesized)
tttagaattttctacccttggcatgaggggaaatgattgatattcaagcaagttctctaggaaaaaaaaaaacttcccaactcagatttctgtgtcagctcagaatgtatctttttttca

SEQ ID NO: 648730 - DNA, 120 bp, Artificial Sequence
  ENSG00000182771_50 (sequence is synthesized)
tgctttgctctttggatttataactctgtttagactattccatacattttaggtatattttgtgccttcagacactgcaaataataatcagcatttggattaaagttgtttaataataaa

SEQ ID NO: 648731 - DNA, 120 bp, Artificial Sequence
  ENSG00000182774_0 (sequence is synthesized)
gtttcctcttttaccaaggacccgccaacatgggccgcgttcgcaccaaaaccgtgaagaaggcggcccgggtcatcatagaaaagtactacacgcgcctgggcaacgacttccacacga

SEQ ID NO: 648732 - DNA, 120 bp, Artificial Sequence
  ENSG00000182774_1 (sequence is synthesized)
acaagcgcgtgtgcgaggagatcgccattatccccagcaaaaagctccgcaacaagatagcaggttatgtcacgcatctgatgaagcgaattcagagaggcccagtaagaggtatctcca

SEQ ID NO: 648733 - DNA, 120 bp, Artificial Sequence
  ENSG00000182774_2 (sequence is synthesized)
caggaggaggagagagaaaggagagacaattatgttcctgaggtctcagccttggatcaggagattattgaagtagatcctgacactaaggaaatgctgaagcttttggacttcggcagt

SEQ ID NO: 648734 - DNA, 120 bp, Artificial Sequence
  ENSG00000182774_3 (sequence is synthesized)
ctgtccaaccttcaggtcactcagcctacagttgggatgaatttcaaaacgcctcggggacctgtttgaattttttctgtagtgctgtattattttcaataaatctgggacaacagcctt

SEQ ID NO: 648735 - DNA, 120 bp, Artificial Sequence
  ENSG00000182774_4 (sequence is synthesized)
gttgtgaacttaggcctgtgtcatgactggccgcggtgaccctgggtcgaaggtagccaccgtcagacctcttgctttgaagctacgttgcttttagttgtcaacttttttctttctttt

SEQ ID NO: 648736 - DNA, 120 bp, Artificial Sequence
  ENSG00000182774_5 (sequence is synthesized)
ctgcaggaggaggagagagaaaggagagacaattatgttcctgaggtaaactttctggatatttgggcttctggctaatcctcaaatgataaagctatgggttcttggcttccaaaggga

SEQ ID NO: 648737 - DNA, 120 bp, Artificial Sequence
  ENSG00000182774_6 (sequence is synthesized)
ctcttctggaaccagttaagtctattccatatttcatgagagcccttaatgttgatttgatgactgctgtcgtggctcgattgtttgcccctaatatagtattctttggtgtaaacacag

SEQ ID NO: 648738 - DNA, 120 bp, Artificial Sequence
  ENSG00000182774_7 (sequence is synthesized)
acttcaagtgttctgaatactgaatgagggcatgggaaggtaaggccagaagaacaggtcatcggggtctgtaatactgtaagagactgctcaccttgtgagaggaatgctatccttgtg

SEQ ID NO: 648739 - DNA, 120 bp, Artificial Sequence
  ENSG00000182774_8 (sequence is synthesized)
cagctcctcttccccatatttaagaacctggggagaggaggaggagaggtgagtgataatctcattgattggtattttgaccctacctcgtttccttgtaggtctcagccttggatcagg

SEQ ID NO: 648740 - DNA, 120 bp, Artificial Sequence
  ENSG00000182774_9 (sequence is synthesized)
acgttgccccctttgtgtcagccctggctgaatctgcctgcttttcttctgtgaaggcattcctttggtgtctccatgctaaccactcagaaatgagctttggtccatttccaggacttc

SEQ ID NO: 648741 - DNA, 120 bp, Artificial Sequence
  ENSG00000182774_10 (sequence is synthesized)
aagtgtttgctggattcctaaagtggtattttcctggtcaaaaaccatcagtaggtcttattatccaaggtcacccagctagtaagtggcagagttgggaatcccatctaaacttgtagc

SEQ ID NO: 648742 - DNA, 120 bp, Artificial Sequence
  ENSG00000182774_11 (sequence is synthesized)
cactaaactggactgctttcataaggggtgtagcggaagttgtgtgcattgagttagttcgccacaagatcatgattcccaaatctagtggcttccaggacaccttttctctcttggctg

SEQ ID NO: 648743 - DNA, 120 bp, Artificial Sequence
  ENSG00000182774_12 (sequence is synthesized)
catgtactttcccagcttcagaaaaacatcaccagtacagctacagccccgctgtgggtcttttcttcctgaaataaccactgcgctgaatgcagcatttttgttgaaactaaaatgggt

SEQ ID NO: 648744 - DNA, 120 bp, Artificial Sequence
  ENSG00000182774_13 (sequence is synthesized)
ttctgaggaccaaataggacatggagttccaggtataagttgggcccttggcttcttgccctgcctaccagcctgaacttgtttgagggcagggtctgctcttgcctccctcccttctgc

SEQ ID NO: 648745 - DNA, 120 bp, Artificial Sequence
  ENSG00000182774_14 (sequence is synthesized)
ttgatgccttgtgtacttgggcccttcacaaatgttgattagattagtaatagctcttacccagggctggtcctggaaagcaagtggcactgtgtattctcaaagggacagagttttgct

SEQ ID NO: 648746 - DNA, 120 bp, Artificial Sequence
  ENSG00000182774_15 (sequence is synthesized)
ttagaggacatttggcaatgtccagacacatttttcgttctcatagccaggggatacctgctaacttctaaggggtagaggccaaggatgttgctaaactttctgcaatacacagtacag

SEQ ID NO: 648747 - DNA, 120 bp, Artificial Sequence
  ENSG00000182774_16 (sequence is synthesized)
ctgcctataacaaagaatgtccagcccaggatgtctacgttgccaagattgagaaacggtgttttagagtgattgataggaaggggttgtgaaaacagatacaaatggcatggtacattg

SEQ ID NO: 648748 - DNA, 120 bp, Artificial Sequence
  ENSG00000182774_17 (sequence is synthesized)
ggtaaaagtcatagagttgtaaatggggataccacatggtcaggtgtgtgttgaaggaagatcactctggaaaagtgggaggcattgagaaccctgttggctcttaaagggtccttcagg

SEQ ID NO: 648749 - DNA, 120 bp, Artificial Sequence
  ENSG00000182774_18 (sequence is synthesized)
tcgcctctggacccccttgagagtgctgtggctctaggggcctgtgttttcttctggggtccactcacagatctcaccagtaactgctcactgaatccattttctcgttccaggacttcg

SEQ ID NO: 648750 - DNA, 120 bp, Artificial Sequence
  ENSG00000182774_19 (sequence is synthesized)
gttttggctcgaggccgccatcctccacaatcgtcccccatctgcagcttcccgcggtcctcagcccacagagaggccctgggccgggaaggcgcagagccctgtcaggctggagcgcaa

SEQ ID NO: 648751 - DNA, 120 bp, Artificial Sequence
  ENSG00000182774_20 (sequence is synthesized)
cgggccggcggcttccgcattaagcccggcgcccggcactgtttagccgggccctctccggctcagcgcagccggcggtccccaaccacaccggccggggctcggcgccgcactcttccc

SEQ ID NO: 648752 - DNA, 120 bp, Artificial Sequence
  ENSG00000182774_21 (sequence is synthesized)
acatacaaggcactacttaggtagttcacgagtatcttcattgcactttgatgttttttctatggcttatcttagtccttttgcatacttgggtgaaagcatgggcttcatgggcggttg

SEQ ID NO: 648753 - DNA, 120 bp, Artificial Sequence
  ENSG00000182774_22 (sequence is synthesized)
ccagcaaaaagctccgcaacaagatagcaggttgcagttactgttcgagagatttataggcatatggcctggaagaatagtgccaaagtcaacgtattaattgccaattatgtcacgcat

SEQ ID NO: 648754 - DNA, 120 bp, Artificial Sequence
  ENSG00000182782_0 (sequence is synthesized)
accacacagacacacacctccttgctggagcattcactaggcgaggcgctccatcggactcactagccgcactcatgaatcggcaccatctgcaggatcactttctggaaatagacaaga

SEQ ID NO: 648755 - DNA, 120 bp, Artificial Sequence
  ENSG00000182782_1 (sequence is synthesized)
agaactgctgtgtgttccgagatgacttcattgtcaaggtgttgccgccggtgttggggctggagtttatcttcgggcttctgggcaatggccttgccctgtggattttctgtttccacc

SEQ ID NO: 648756 - DNA, 120 bp, Artificial Sequence
  ENSG00000182782_2 (sequence is synthesized)
tcaagtcctggaaatccagccggattttcctgttcaacctggcagtggctgactttctactgatcatctgcctgcccttcctgatggacaactatgtgaggcgttgggactggaagtttg

SEQ ID NO: 648757 - DNA, 120 bp, Artificial Sequence
  ENSG00000182782_3 (sequence is synthesized)
gggacatcccttgccggctgatgctcttcatgttggctatgaaccgccagggcagcatcatcttcctcacggtggtggcggtagacaggtatttccgggtggtccatccccaccacgccc

SEQ ID NO: 648758 - DNA, 120 bp, Artificial Sequence
  ENSG00000182782_4 (sequence is synthesized)
tgaacaagatctccaatcggacagcagccatcatctcttgccttctgtggggcatcactattggcctgacagtccacctcctgaagaagaagatgccgatccagaatggcggtgcaaatt

SEQ ID NO: 648759 - DNA, 120 bp, Artificial Sequence
  ENSG00000182782_5 (sequence is synthesized)
tgtgcagcagcttcagcatctgccataccttccagtggcacgaagccatgttcctcctggagttcttcctgcccctgggcatcatcctgttctgctcagccagaattatctggagcctgc

SEQ ID NO: 648760 - DNA, 120 bp, Artificial Sequence
  ENSG00000182782_6 (sequence is synthesized)
ggcagagacaaatggaccggcatgccaagatcaagagagccatcaccttcatcatggtggtggccatcgtctttgtcatctgcttccttcccagcgtggttgtgcggatccgcatcttct

SEQ ID NO: 648761 - DNA, 120 bp, Artificial Sequence
  ENSG00000182782_7 (sequence is synthesized)
ggctcctgcacacttcgggcacgcagaattgtgaagtgtaccgctcggtggacctggcgttctttatcactctcagcttcacctacatgaacagcatgctggaccccgtggtgtactact

SEQ ID NO: 648762 - DNA, 120 bp, Artificial Sequence
  ENSG00000182782_8 (sequence is synthesized)
cttctccactttgatcaaccgctgcctccagaggaagatgacaggtgagccagataataaccgcagcacgagcgtcgagctcacaggggaccccaacaaaaccagaggcgctccagaggc

SEQ ID NO: 648763 - DNA, 120 bp, Artificial Sequence
  ENSG00000182782_9 (sequence is synthesized)
gttaatggccaactccggtgagccatggagcccctcttatctgggcccaacctctccttaaataaccatgccaagaagggacattgtcaccaagaaccaggatctctggagaaacagttg

SEQ ID NO: 648764 - DNA, 120 bp, Artificial Sequence
  ENSG00000182782_10 (sequence is synthesized)
ggctgttgcatcgagtaatgtcactggactcggcctaaggtttcctggaacttccagattcagagaatgcgatttagggaaacggtggcagatgagtgggagactggttgcaaggtgtga

SEQ ID NO: 648765 - DNA, 120 bp, Artificial Sequence
  ENSG00000182782_11 (sequence is synthesized)
ccgcaggaatcctggaggaatagagagtaaagcttctaggcatctgaaacttttgcttcatctctgacgctcgcaggactgaagatgggcaaattgtaggcatttctgctgagcagagtt

SEQ ID NO: 648766 - DNA, 120 bp, Artificial Sequence
  ENSG00000182782_12 (sequence is synthesized)
ggagccagagatctacttgtgacttgttggccttcttcccacatctgcctcagactggagggggctcagctcctggggtgatatctagcctgcttgtgagctctagcagggataaggaga

SEQ ID NO: 648767 - DNA, 120 bp, Artificial Sequence
  ENSG00000182782_13 (sequence is synthesized)
gctgagattggagggaattgtgttgctcctggagggagcccaggcatcattaaacaagccagtaggtcacctggcttccgtggaccaattcatctttcagacaagctttagcagaaatgg

SEQ ID NO: 648768 - DNA, 120 bp, Artificial Sequence
  ENSG00000182782_14 (sequence is synthesized)
actcagggaagagactcacacgctttggttaatatctgtgtttccggtgggtgtaataggggattagccccagaagggactgagctaaacagtgttattatgggaaaggaaatggcattg

SEQ ID NO: 648769 - DNA, 120 bp, Artificial Sequence
  ENSG00000182782_15 (sequence is synthesized)
ctgctttcaaccagcgactaatgcaatccattcctctcttgtttatagtaatctaagggttgggcagttaaaacggcttcaggatagaaagctgtttcccacctctgtttgcttttaaca

SEQ ID NO: 648770 - DNA, 120 bp, Artificial Sequence
  ENSG00000182782_16 (sequence is synthesized)
ttaaaagggaaatgtgcctctgccccacagttagaggggtgcacgttcctcctggttccttcgcttgtgtttctgtacttaccaaaaatctaccatttcaataaattttgataggagaca

SEQ ID NO: 648771 - DNA, 120 bp, Artificial Sequence
  ENSG00000182783_0 (sequence is synthesized)
acctcatggccaacatcaccaggatggccaaccacactggaaggttggatttcatcctcatgggactcttcagacaatccaaacatccagctctacttagtgtggtcatctttgtggttt

SEQ ID NO: 648772 - DNA, 120 bp, Artificial Sequence
  ENSG00000182783_1 (sequence is synthesized)
tcctgaaggcgttgtctggaaatgctgtcctgatccttctgatacactgtgacgcccacctccacagccccatgtactttttcatcagtcaattgtctctcatggacatggcgtacattt

SEQ ID NO: 648773 - DNA, 120 bp, Artificial Sequence
  ENSG00000182783_2 (sequence is synthesized)
ctgtcactgtgcccaagatgctcctggaccaggtcatgggtgtgaataaggtctcagcccctgagtgtgggatgcagatgttcctctatctgacactagcaggttcggaatttttccttc

SEQ ID NO: 648774 - DNA, 120 bp, Artificial Sequence
  ENSG00000182783_3 (sequence is synthesized)
tagccaccatggcctatgaccgctacgtggccatctgccatcctctccgttaccctgtcctcatgaaccatagggtctgtcttttcctggcatcgggctgctggttcctgggctcagtgg

SEQ ID NO: 648775 - DNA, 120 bp, Artificial Sequence
  ENSG00000182783_4 (sequence is synthesized)
agattcatcatttcttctgtgaagtccctgctgtaacgatcctgtcctgctcagacacctcactctatgagaccctcatgtacctatgctgtgtcctcatgctcctcatccctgtgacga

SEQ ID NO: 648776 - DNA, 120 bp, Artificial Sequence
  ENSG00000182783_5 (sequence is synthesized)
tcatttcaagctcctatttactcatcctcctcaccgtccacaggatgaactcagcagagggccggaaaaaggcctttgccacctgctcctcccacctgactgtggtcatcctcttctatg

SEQ ID NO: 648777 - DNA, 120 bp, Artificial Sequence
  ENSG00000182783_6 (sequence is synthesized)
gggctgccgtctacacctacatgctccccagctcctaccacacccctgagaaggacatgatggtatctgtcttctataccatcctcactccggtgctgaaccctttaatctatagtctta

SEQ ID NO: 648778 - DNA, 120 bp, Artificial Sequence
  ENSG00000182783_7 (sequence is synthesized)
ggaataaggatgtcatgggggctctgaagaaaatgttaactgtgagattcgtcctttaggaaattataaagtaggaaatttggatataaagatttattttccttttctctacccatcaga

SEQ ID NO: 648779 - DNA, 120 bp, Artificial Sequence
  ENSG00000182783_8 (sequence is synthesized)
tccctgttattccttagactctcatacaatgatgcctcatctcatattcatctcattttgaggaattctttcactgtgtggaaactctattttatagtctttgtccatccaaaattcttt

SEQ ID NO: 648780 - DNA, 120 bp, Artificial Sequence
  ENSG00000182783_9 (sequence is synthesized)
ggtgttcaaatgatgagagggaaagagggagggagatagagaggggcaatgaaacaaactgagttcaatgttgctgccacacatgagtatgggtaaagggtatataggtattaattgtac

SEQ ID NO: 648781 - DNA, 120 bp, Artificial Sequence
  ENSG00000182783_10 (sequence is synthesized)
tattgttttttaatgatttttgtgaagttgaaatcatttacaaataattaaataccaggcttttctccctttttgaaaatattctcctttctgcttggtggcagtgtgacatcttagaaa

SEQ ID NO: 648782 - DNA, 120 bp, Artificial Sequence
  ENSG00000182783_11 (sequence is synthesized)
tcatgctcatttcattatatctaatcattaccgagaaaatccagtcatcgccccttctttattgagggctacatttttctgcatggtccaattctgatggcgtctagtggatttatctct

SEQ ID NO: 648783 - DNA, 120 bp, Artificial Sequence
  ENSG00000182783_12 (sequence is synthesized)
ccgaaataattactgccatgtggtgtattgaggatgtaggaccacataagtgactgcagaaaaaatatgacacctgagtggaaggagttttaaggaaggttacctgcccagggtgattcc

SEQ ID NO: 648784 - DNA, 120 bp, Artificial Sequence
  ENSG00000182783_13 (sequence is synthesized)
tgagctgagatttcaaacatgtaacttgttatacaaacaagcagagggatggcatcaacattcaatccttcatttatttaacaagcattttgtactattttataattaaaaatagttaaa

SEQ ID NO: 648785 - DNA, 120 bp, Artificial Sequence
  ENSG00000182783_14 (sequence is synthesized)
taagattaaattttgaatagcacatggcttttaccaaggagtttgaaaaatacatgtagttgtttatgcaaacaaatgtaagaaaataaataagctgttttgatactcgtgtgaagggtg

SEQ ID NO: 648786 - DNA, 120 bp, Artificial Sequence
  ENSG00000182783_15 (sequence is synthesized)
cagctcataaggacacactaattctatctgtgacatctgagttcaaacaaggagctgagaggagactccggggctcagtgctgaatagtgacgaaaagttaccctcagatgagtgtgtga

SEQ ID NO: 648787 - DNA, 120 bp, Artificial Sequence
  ENSG00000182783_16 (sequence is synthesized)
tgttggagccaggggaacttgctgagacacgctgcaagggaaaaggcacagcatgagcaaagacagggctgagcaagcgagagagatcaatgcccagtagatctttcttatttcatgtta

SEQ ID NO: 648788 - DNA, 120 bp, Artificial Sequence
  ENSG00000182783_17 (sequence is synthesized)
ggcttatttcttgcccttgtgtggcccagggttttacaaacaatagtgaaatgatcagatttgtattttagaaatgttatttgtgtggtgatcaattggagatgtgcaagaccaaaaaca

SEQ ID NO: 648789 - DNA, 120 bp, Artificial Sequence
  ENSG00000182783_18 (sequence is synthesized)
tagagaccaggtacatgagaatggtgatctaaatgatgttgatctaagtggagtcgaccatgcctttacccgagaataggctgataggagggcatttgaggtggggcctgctgaacctgt

SEQ ID NO: 648790 - DNA, 120 bp, Artificial Sequence
  ENSG00000182783_19 (sequence is synthesized)
tacctaaaagcatacatgtggtagctgcatgctataacttcctaattggctatgtacaacttgcgaataatcaggtgttttcaacagtacacattcttcttttctctcaccacactcaat

SEQ ID NO: 648791 - DNA, 120 bp, Artificial Sequence
  ENSG00000182791_0 (sequence is synthesized)
agtaacccctcggctttctgttcctggacggtggcggccgccggctctatgatggagcccccgaagcccgagcctgagctccagcggttttaccaccggctgctgcgtccgctgtcgctc

SEQ ID NO: 648792 - DNA, 120 bp, Artificial Sequence
  ENSG00000182791_1 (sequence is synthesized)
ttccccactaggacgacgtccccagagcctcagaagcgccccccgcaggagggccggattctgcagtccttccctctggcgaagctgacggtggcgtcgctgtgcagccaggtggccaag

SEQ ID NO: 648793 - DNA, 120 bp, Artificial Sequence
  ENSG00000182791_2 (sequence is synthesized)
ctgctggccggcagcgggatagcagcgggagtgcctcctgaggcccgactacgtctcatcaaggtcatcctggacgagctgaagtgcagctggcgggagccgcccgccgaacttagtctg

SEQ ID NO: 648794 - DNA, 120 bp, Artificial Sequence
  ENSG00000182791_3 (sequence is synthesized)
agccacaaaaacaaccagaagctgcggaagcggctcgaggcctacgtgctgctgagcagcgagcagctcttcttgcgctacctgcacctgctggtgaccatgtcgactcccaggggggtc

SEQ ID NO: 648795 - DNA, 120 bp, Artificial Sequence
  ENSG00000182791_4 (sequence is synthesized)
ttcactgaatcagccaccctcacccggttggccgccagcctcgccagggactgcacactcttccttactagtcccaacgtctaccgtggcctgcttgccgacttccaggccctgctgagg

SEQ ID NO: 648796 - DNA, 120 bp, Artificial Sequence
  ENSG00000182791_5 (sequence is synthesized)
gcagagcaggcctctggggatgtggacaagctgcaccctgtctgccccgctgggacgttcaagctgtgccctatcccctggcctcacagcactggcttcgcccaagtgcagtgctctaac

SEQ ID NO: 648797 - DNA, 120 bp, Artificial Sequence
  ENSG00000182791_6 (sequence is synthesized)
ctcaacctgaactacctcatccaactcagccgtccaccagagtttctcaatgagccaggaaggatggatccagtgaaggaattgaagtccatccctcggttgaagaggaaaaagcctttc

SEQ ID NO: 648798 - DNA, 120 bp, Artificial Sequence
  ENSG00000182791_7 (sequence is synthesized)
cactggctgccctccataggaaagaagagagaaatcgacatcagttcctcacagatggtgtcgctgcccagctatcctgtggcccccaccagcagggcttccccctcgcctttctgccct

SEQ ID NO: 648799 - DNA, 120 bp, Artificial Sequence
  ENSG00000182791_8 (sequence is synthesized)
gagctccggagaggccaatccatgccctccctgcgtgagggctggaggctggcagatgagttgggccttcctccactcccatctcgccccttaaccccgctggtcttggctacagagagc

SEQ ID NO: 648800 - DNA, 120 bp, Artificial Sequence
  ENSG00000182791_9 (sequence is synthesized)
aaaccagagctgactgggctcatcgtggctgaggatctgaagcagttgataaagaagatgaagttggaggggactcgctacccaccactggactcaggcctgcctcctctcctgggggtt

SEQ ID NO: 648801 - DNA, 120 bp, Artificial Sequence
  ENSG00000182791_10 (sequence is synthesized)
gtgacccgtcacccagctgcagggcatcgcctggaggagctggagaagatgttgaggaacctccaggaggaagaagcctctgggcagtgggacccccagccccccaaatcctttccactt

SEQ ID NO: 648802 - DNA, 120 bp, Artificial Sequence
  ENSG00000182791_11 (sequence is synthesized)
cacccacagccagtgaccattactttgaagcttagaaatgaggtcgtggtccaggcggctgccgtacgggtctctgatagaaacttcttagactctttccacattgagggggccggagcc

SEQ ID NO: 648803 - DNA, 120 bp, Artificial Sequence
  ENSG00000182791_12 (sequence is synthesized)
ccatctggctggtgaactggatcccaaagccattgaaaaaatggatattgataactttgttggcagtactaccagggaggtctacaaggagttgatgagccatgtctcttctgaccactt

SEQ ID NO: 648804 - DNA, 120 bp, Artificial Sequence
  ENSG00000182791_13 (sequence is synthesized)
acattttgatcaagggcccctagttgagcctgcagcagataaagactggtcgaccttcctgtcctcagcctttctacgtcaagaaaaacagcctcaaatcatcaaccctgagctggttgg

SEQ ID NO: 648805 - DNA, 120 bp, Artificial Sequence
  ENSG00000182791_14 (sequence is synthesized)
actttactcccagagagcaaacactttacagtccaatactaagaagatgccctccctcccatcactccaagctaccaaaagctgggagaagtggtcaaacaaggcctccttgatgaactc

SEQ ID NO: 648806 - DNA, 120 bp, Artificial Sequence
  ENSG00000182791_15 (sequence is synthesized)
atggaaaaccaccttgtctgtggatgactacttcaagtacctcaccaaccatgaaacagatttccttcatgtcatctttcaaatgcatgaagaagaggttcctgtggagattgtggcccc

SEQ ID NO: 648807 - DNA, 120 bp, Artificial Sequence
  ENSG00000182791_16 (sequence is synthesized)
tgccagagagtccctagagattcagcaccctcccccattgctagaagatgaagaaccagactttgtgccaggagagtgggattggaacactgtgctagagcacaggctaggagctgggaa

SEQ ID NO: 648808 - DNA, 120 bp, Artificial Sequence
  ENSG00000182791_17 (sequence is synthesized)
gacaccccacctgggagaaccccacaaaattctgagcctgcagaagcatctggaacaactgtggtctgtgcttgaggtccctgacaaggaccaggtggacatgaccattaaatatagctc

SEQ ID NO: 648809 - DNA, 120 bp, Artificial Sequence
  ENSG00000182791_18 (sequence is synthesized)
caaagcccgcctgaggcagctgccttcattggtgaatgcctgggagcgggccctgaagcccattcagctgcgggaggcattgctggcgagactagagtggtttgagggacaagcttccaa

SEQ ID NO: 648810 - DNA, 120 bp, Artificial Sequence
  ENSG00000182791_19 (sequence is synthesized)
tcccaaccgcttcttcaaaaagaccaacttgagctccagtcacttcctggaggagaatcaggtccgaagccatctccacaggaagctcaacttaatggagtcttctttggtttccctcct

SEQ ID NO: 648811 - DNA, 120 bp, Artificial Sequence
  ENSG00000182791_20 (sequence is synthesized)
ggaggagatagagttaatctttggcgagccagtgatcttcaaggggcggccctacctggacaagatgaagagtgacaaagtggagatgctctattggctgcaacagcagcggcgggttcg

SEQ ID NO: 648812 - DNA, 120 bp, Artificial Sequence
  ENSG00000182791_21 (sequence is synthesized)
ccacctggtctcggccctgaaggatccccaccagtcaaccctgttcaggagctcagcagccagcctttagtagctcctgggaatacccctattactccttgaccaggcccagtgccctca

SEQ ID NO: 648813 - DNA, 120 bp, Artificial Sequence
  ENSG00000182791_22 (sequence is synthesized)
aatgcctccctcacccctaaatggccagcagctcatctagacctctttactgctttggaagaagaaatatttgtctatatctgggagtggagggttcaggaacattatgcttccaactat

SEQ ID NO: 648814 - DNA, 120 bp, Artificial Sequence
  ENSG00000182791_23 (sequence is synthesized)
gaagggattgagactaaaactattgttttcttagtgaaattctcatgaaagaatccccaagcctagtagtcccattatgtcaagccttgcacaatacaagccaaatctcctatatcaaaa

SEQ ID NO: 648815 - DNA, 120 bp, Artificial Sequence
  ENSG00000182793_0 (sequence is synthesized)
agttgcccagccacgacagtgacagagtttaacaaactaagcttagagaaacctccaggagactgctatcatggcagagaagcccaagctccactactccaatgcacggggcagtatgga

SEQ ID NO: 648816 - DNA, 120 bp, Artificial Sequence
  ENSG00000182793_1 (sequence is synthesized)
gtccattcggtggctcctggctgcagctggagtagagttggaagagaaatttctagaatctgcagaagatttggacaagttaagaaatgatgggagtttgctgttccagcaagtaccaat

SEQ ID NO: 648817 - DNA, 120 bp, Artificial Sequence
  ENSG00000182793_2 (sequence is synthesized)
ggttgagattgacgggatgaagctggtgcagaccagagccattcttaactacattgccagcaaatacaacctttatgggaaagacatgaaggagagagccctgattgatatgtacacaga

SEQ ID NO: 648818 - DNA, 120 bp, Artificial Sequence
  ENSG00000182793_3 (sequence is synthesized)
tagtagatttgactgaaatgatccttcttctgctcatatgtcaaccagaggaaagagatgccaagactgccttggtcaaagagaaaataaaaaatcgctacttccctgcctttgaaaaag

SEQ ID NO: 648819 - DNA, 120 bp, Artificial Sequence
  ENSG00000182793_4 (sequence is synthesized)
tcttaaagagccacagacaagactaccttgttggcaacaagctgagctgggctgacattcacctggtggaacttttctactacgtggaagagcttgactcgagtcttatctccagcttcc

SEQ ID NO: 648820 - DNA, 120 bp, Artificial Sequence
  ENSG00000182793_5 (sequence is synthesized)
ctctgctgaaggccctgaaaaccagaatcagcaacctgcccacggtgaagaagtttctgcagcctggcagccagagaaagcctcccatggatgagaaatctttagaagaagcaaggaaga

SEQ ID NO: 648821 - DNA, 120 bp, Artificial Sequence
  ENSG00000182793_6 (sequence is synthesized)
ttttcaggttttaataaagcagctatggaggccaagaacatgccagaccaatattctacagtttgcaacaatgaagtgctttacctaagtgtggattgtgcctcttgtaaagctaataaa

SEQ ID NO: 648822 - DNA, 120 bp, Artificial Sequence
  ENSG00000182795_0 (sequence is synthesized)
agtggcagggtgggggccaggcagcacagatgaagcatttacctatctaggtaagtcaggaggagctcaaaaggagaagaaaacagtaggaggcaggggaagcagcctctgtctccatct

SEQ ID NO: 648823 - DNA, 120 bp, Artificial Sequence
  ENSG00000182795_1 (sequence is synthesized)
ctgccctttgaaacaaaagggtatttcttttctctcttcagcccccaacccagtggaggcccggcttgggacattgttcacttcccctcgcttcccctctagaagccccctttgccatcc

SEQ ID NO: 648824 - DNA, 120 bp, Artificial Sequence
  ENSG00000182795_2 (sequence is synthesized)
ctgcaccttgtttcgggtgatgcccgagagggagctgtggccagcggggactggctcagaacccgtgacccgtgtcggcagctgtgacagcatgatgagcagcacctccacccgctctgg

SEQ ID NO: 648825 - DNA, 120 bp, Artificial Sequence
  ENSG00000182795_3 (sequence is synthesized)
atctagtgatagcagctacgacttcctgtccactgaagagaaggagtgtctgctcttcctggaggagaccattggctcactggacacggaggctgacagcggactgtccactgacgagtc

SEQ ID NO: 648826 - DNA, 120 bp, Artificial Sequence
  ENSG00000182795_4 (sequence is synthesized)
tgagccagccacaactcccagaggtttccgagcactgcccataacccaacccactccccggggaggtccagaggagaccatcactcagcaaggacgaacgccaaggacagtaactgagtc

SEQ ID NO: 648827 - DNA, 120 bp, Artificial Sequence
  ENSG00000182795_5 (sequence is synthesized)
cagctcatcccaccctcctgagccccagggcctaggcctcaggtctggctcctacagcctccctaggaatatccacattgccagaagccagaacttcaggaaaagcaccacccaggctag

SEQ ID NO: 648828 - DNA, 120 bp, Artificial Sequence
  ENSG00000182795_6 (sequence is synthesized)
cagtcacaaccctggagaaccggggaggcttgcgccagagcctgagaaagaacaggtcagccagagcagccaacccaggcaggcacctgccagcccccaggaggctgcccttgacttgga

SEQ ID NO: 648829 - DNA, 120 bp, Artificial Sequence
  ENSG00000182795_7 (sequence is synthesized)
cgtggtgctcatccctccgccagaagctttccgggacacccagccagagcagtgtagggaagccagcctgcccgaggggccaggacagcagggccacacaccccagctccacacaccatc

SEQ ID NO: 648830 - DNA, 120 bp, Artificial Sequence
  ENSG00000182795_8 (sequence is synthesized)
cagctcccaggaaagagagcagactccttcagaagccatgtcccaaaaagccaaggaaacagtctcaaccaggtacacacaaccccagcctcctcctgcagggttgcctcagaatgcaag

SEQ ID NO: 648831 - DNA, 120 bp, Artificial Sequence
  ENSG00000182795_9 (sequence is synthesized)
agctgaagatgctcccctctcatcaggggaggacccaaacagccgactagctcccctcacaacccctaagccccggaagctgccacctaatattgttctgaagagcagccgaagcagttt

SEQ ID NO: 648832 - DNA, 120 bp, Artificial Sequence
  ENSG00000182795_10 (sequence is synthesized)
ccacagtgacccccagcactggctgtcccgccacactgaggctgcccctggagattctggcctgatctcctgttcactgcaagagcagagaaaagcacgtaaagaagctctagagaagct

SEQ ID NO: 648833 - DNA, 120 bp, Artificial Sequence
  ENSG00000182795_11 (sequence is synthesized)
ggggctaccccaggatcaagatgagcctggactccacttaagtaagcccaccagctccatcagacccaaggagacacgggcccagcatctgtccccagctccaggtctggctcagcctgc

SEQ ID NO: 648834 - DNA, 120 bp, Artificial Sequence
  ENSG00000182795_12 (sequence is synthesized)
agctccagcccaggcctcagcagctattcctgctgctgggaaggctctggctcaagctccggctccagctccaggtccagctcagggacctttgccaatgaagtctccagctccaggcaa

SEQ ID NO: 648835 - DNA, 120 bp, Artificial Sequence
  ENSG00000182795_13 (sequence is synthesized)
tgttgcagctagcaaatctatgccaatttctatccctaaggccccaagggcaaacagtgccctgactccaccgaagccagagtcagggctgactctccaggagagcaacacccctggcct

SEQ ID NO: 648836 - DNA, 120 bp, Artificial Sequence
  ENSG00000182795_14 (sequence is synthesized)
gagacagatgaacttcaagtccaacactctggagcgctcaggcgtgggactgagcagctacctttcaactgagaaagatgccagccccaaaaccagcacttctctgggaaagggctcctt

SEQ ID NO: 648837 - DNA, 120 bp, Artificial Sequence
  ENSG00000182795_15 (sequence is synthesized)
cttggacaagatctcgcccagtgtcttacgtaattctcggccccgcccggcctccctgggcacggggaaagattttgcaggtatccaggtaggcaagctggctgacctggagcaggagca

SEQ ID NO: 648838 - DNA, 120 bp, Artificial Sequence
  ENSG00000182795_16 (sequence is synthesized)
gagctccaagcgcctgtcctaccaaggacagagccgtgacaagcttcctcgccccccctgtgtcagtgtcaagatctccccaaagggtgtccccaatgaacacagaagggaggccctgaa

SEQ ID NO: 648839 - DNA, 120 bp, Artificial Sequence
  ENSG00000182795_17 (sequence is synthesized)
gaagctgggactgttgaaggagtagactctgcgaccagtacagaccctgtcctggctgaacaagaagagacacatgctccacttgggagcctttgccaccacgcaactcagggctcaaga

SEQ ID NO: 648840 - DNA, 120 bp, Artificial Sequence
  ENSG00000182795_18 (sequence is synthesized)
tgaatgggagggagagatttgagtccaagcatacatttatattcagtgttgtgccattgagttcccatgtggatcattctgaaggtgatctccacaagagggtgtgtgtgtgtgtgtttg

SEQ ID NO: 648841 - DNA, 120 bp, Artificial Sequence
  ENSG00000182795_19 (sequence is synthesized)
gtgtgtgtgtggagggggggccgctggatacatcactgaagctattgatataacacaatgagtcactgttcagaattttgctcttgttagatgttttcttacattgggtagagtccagcc

SEQ ID NO: 648842 - DNA, 120 bp, Artificial Sequence
  ENSG00000182795_20 (sequence is synthesized)
tagtgagagctgagtgaaggggctggccatgcctgagacaaaaagtcaaatgagacaatggacgtgtcaatgacttgaaaaaaagtcacatccagcaaatgcagggtcacatgaaatatg

SEQ ID NO: 648843 - DNA, 120 bp, Artificial Sequence
  ENSG00000182795_21 (sequence is synthesized)
ggcctcctggaatccctacagtggatggagactggctcataccttgccagatccctctctcagttccagccttctggacaaggcctgggctaagaggagctgattcgttatctcttcacc

SEQ ID NO: 648844 - DNA, 120 bp, Artificial Sequence
  ENSG00000182795_22 (sequence is synthesized)
gcaggataagtgaccacatatttatgccactacctccaccagggagagtccttctccacaggcttgataaattcaatcaccaactgtgctgtcgtccctgactctgctactcccgttctt

SEQ ID NO: 648845 - DNA, 120 bp, Artificial Sequence
  ENSG00000182795_23 (sequence is synthesized)
cctgctttcctgctccgtatctcagtctgcactgaccccagggctgggctgacatcaagatgggagcccagcccacgggctttataaacacccaagaaccgtttcagatcttctctgtgc

SEQ ID NO: 648846 - DNA, 120 bp, Artificial Sequence
  ENSG00000182795_24 (sequence is synthesized)
tgatgcaggtagttttaaatttttctcagttccagtgatagaaaacccacacaatacatcctctgccagtcttaatagaatatcagaggtaagaggggcctcagagaagctctgacgcag

SEQ ID NO: 648847 - DNA, 120 bp, Artificial Sequence
  ENSG00000182795_25 (sequence is synthesized)
tgctgctggggaagggaagtgactaaccccgggtcagcctgccatttagggaaagagctgaggttcttacccttgttgcatgctgccacctctccttagccagtgctcttgtacatccac

SEQ ID NO: 648848 - DNA, 120 bp, Artificial Sequence
  ENSG00000182795_26 (sequence is synthesized)
acagcaccctaaggagccatagtcaccatcaaagactcaaccctaaggcccttcaagatctcaaagtgccttctgaagcatcagagattaaatattgttcaaactaatagttattgctgt

SEQ ID NO: 648849 - DNA, 120 bp, Artificial Sequence
  ENSG00000182795_27 (sequence is synthesized)
ggcttttaattttatctttggaagatagctatatggtaactcatcattaaccagaacacctctcccctcaaattccgtgaccaagttgtgcagcttgagcaaatgccgaaagagggtatt

SEQ ID NO: 648850 - DNA, 120 bp, Artificial Sequence
  ENSG00000182795_28 (sequence is synthesized)
atgggtgggtggtgtgggcttgcaaatacaagcttggaggtgagacatggccagacatgactcctgcttccccttaggaagtaaatcttacttatggttgtgaactgcttggagtccagg

SEQ ID NO: 648851 - DNA, 120 bp, Artificial Sequence
  ENSG00000182795_29 (sequence is synthesized)
atgcccagatgtgaggggcagatgaagggaatgttgctggaaaggtgccttttaaggctgctgagaatttctggactgtgtcctgatggacgcagcaccatcaaagcccagaatttctga

SEQ ID NO: 648852 - DNA, 120 bp, Artificial Sequence
  ENSG00000182795_30 (sequence is synthesized)
aaacggtgacaaggttaacataaggacaacaaatactccaccctgtcatggtatgtgaggtgtgggtgtggcggtttctgtgtacgtttgctcatacacgcacatccaaaagcctgtgcc

SEQ ID NO: 648853 - DNA, 120 bp, Artificial Sequence
  ENSG00000182795_31 (sequence is synthesized)
tcattcctggccatgggtgaggacttggtctgtcacggctgatgaggactcccacaaccggccaagttatgtcttattatacacccccagaaagagagaaagctgccttctggaggactg

SEQ ID NO: 648854 - DNA, 120 bp, Artificial Sequence
  ENSG00000182795_32 (sequence is synthesized)
attccacatgctatattcagctgagttgatttctgtgtctatttcaacccataacctgaagaatgatcaccttattccttattcattaattttcttgattaatagggaaacttgggaata

SEQ ID NO: 648855 - DNA, 120 bp, Artificial Sequence
  ENSG00000182795_33 (sequence is synthesized)
gctataaagtaaaacttgggtggaacctggggccctggcatcacacaagtgtgattaggatggtcaaggtcatcaggagtacagcctattatattcccacatcctgagaaaggtcatttc

SEQ ID NO: 648856 - DNA, 120 bp, Artificial Sequence
  ENSG00000182795_34 (sequence is synthesized)
tcccacacacgacaaagtcacagacatcctgcacctgccactaggcatcctcatcctactgacatgcccatttctccagttttcttaatctgagactcccttcccttgttttttaaagat

SEQ ID NO: 648857 - DNA, 120 bp, Artificial Sequence
  ENSG00000182795_35 (sequence is synthesized)
accgtgcttctccacatcctcatccttcaaggagcatattttgctcttaggatggtctttgggattcaagaatagaataataaatccaaacttggtcattcccattttgaagagatgcaa

SEQ ID NO: 648858 - DNA, 120 bp, Artificial Sequence
  ENSG00000182795_36 (sequence is synthesized)
gagggcccagtgaggacatccgcctccctgaaagtggtgctagacagagctgaggtcattgtatctgtgtatccacataggatttctcttaattcagcttgaattgatggggagggaggt

SEQ ID NO: 648859 - DNA, 120 bp, Artificial Sequence
  ENSG00000182795_37 (sequence is synthesized)
aagagtagggtcagagttactcatcccttttcaaagaattgtgggtggaagtttgtaaaggccattcatttgattttcaaaatcaaagcgacagctctacttccacttggccttagatct

SEQ ID NO: 648860 - DNA, 120 bp, Artificial Sequence
  ENSG00000182795_38 (sequence is synthesized)
ctgctataccctgccatagccttgatgccactgggcacaagccacctgccaaatacaggagtggcctctcccagcctggcatgataggggggtctgtgccctcagatgtgttgacagctg

SEQ ID NO: 648861 - DNA, 120 bp, Artificial Sequence
  ENSG00000182795_39 (sequence is synthesized)
ctcttctgaattgccacacctgtgctacacttggaattctgtgctctgactctgcagggtaggaccacgtgccatctcacacagaggtcaaccgatgagcccactcactcgtacatgcct

SEQ ID NO: 648862 - DNA, 120 bp, Artificial Sequence
  ENSG00000182795_40 (sequence is synthesized)
tcttccacagtgggaagcatgatctggcaggggccgccctgtaggctggggatgggctgctgtgtgaatgttgacgttcgtttcatggagaaaggggaggtgaaagattgaagagcaggt

SEQ ID NO: 648863 - DNA, 120 bp, Artificial Sequence
  ENSG00000182795_41 (sequence is synthesized)
tcctgtcaatgttctgagttcgagctggaggtgtagattgaatagtctacatggtctgtgagtgtgtgagatgaacccttccatcctttgacacctggttgtatgtgtaggctaagaagg

SEQ ID NO: 648864 - DNA, 120 bp, Artificial Sequence
  ENSG00000182795_42 (sequence is synthesized)
aaggaccctcctgtcagtgtgcaaagctgtaatctcatggactagaggagagggggccaaggggatggacaggagaagtcatgcagaatctaagcaggaatgcagatagaacacatctag

SEQ ID NO: 648865 - DNA, 120 bp, Artificial Sequence
  ENSG00000182795_43 (sequence is synthesized)
gctcttttccccaggagagtgatgatggagcatatagatctggctcaaattcagcctccatcacttaccagtcaggaaccctggcgatatcactttaactttctgaacctcagagtcttc

SEQ ID NO: 648866 - DNA, 120 bp, Artificial Sequence
  ENSG00000182795_44 (sequence is synthesized)
acctataagacggggaaaataataccaccctttcaagattgttgagataaataagtgatataaaacatgtaaagcttagttctggccacagtgtagctactcaataaatgataatactac

SEQ ID NO: 648867 - DNA, 120 bp, Artificial Sequence
  ENSG00000182798_0 (sequence is synthesized)
ggaagtgaggatcttcgtctgagggacgccacctcaggctaccagaaccccaagactggttgggtatcaagggtgttgcctgtagtgagctgaggatggagtcccaggactggtcaagta

SEQ ID NO: 648868 - DNA, 120 bp, Artificial Sequence
  ENSG00000182798_1 (sequence is synthesized)
gcaaggtgaagatcctgagccctcagtagacagggctgcacggagcgtttcagcagagggctttggttgcaagactggctgccccaggtcagcggagaaaggagtcccaggctctgtggg

SEQ ID NO: 648869 - DNA, 120 bp, Artificial Sequence
  ENSG00000182798_2 (sequence is synthesized)
gagtgaaggtgcccacctcctgcaccctcttgcctgctgcccctaagcacagtcatcatgcctcgcggtcaggcgagtaagcgccgtgcccgtgagaaacgccgccaggctcgaggtgaa

SEQ ID NO: 648870 - DNA, 120 bp, Artificial Sequence
  ENSG00000182798_3 (sequence is synthesized)
gaccaatgtctcgggggtgctcaagccaccgcagcagagaaggaaaagctgccatcctcctcctctcctgcatgccagagtcctccccagagcttccccaatgcaggcattcctcaggag

SEQ ID NO: 648871 - DNA, 120 bp, Artificial Sequence
  ENSG00000182798_4 (sequence is synthesized)
tcccagagagccagctaccccagctctcctgcttcagctgtttcactcacaagttctgatgaaggtgccaagggccaaaagggggaaagtcccaactccttccatggcccgtcctcctct

SEQ ID NO: 648872 - DNA, 120 bp, Artificial Sequence
  ENSG00000182798_5 (sequence is synthesized)
caacaagtatataaggaaagagcccattacgagggaagccatgctgaaggttatcaacagaaagtacaagcagcacttccctgagatcctccggagaagcactgagaacgtagaggtggt

SEQ ID NO: 648873 - DNA, 120 bp, Artificial Sequence
  ENSG00000182798_6 (sequence is synthesized)
ctttggcctctacctgaaggaaatggaccccagccgtcagtcctatgtgcttgttggcaagctggactttcccaatcaaggaagcttgagcgatggcgggggctttcccctgagcgggct

SEQ ID NO: 648874 - DNA, 120 bp, Artificial Sequence
  ENSG00000182798_7 (sequence is synthesized)
cctgatggttctcctgagcaccatcttcatgcatggcaaccgtgccactgaggaagagatgtgggaatgcctgaatgcattggggatgtataagggtaggaagcacttcatctatgggga

SEQ ID NO: 648875 - DNA, 120 bp, Artificial Sequence
  ENSG00000182798_8 (sequence is synthesized)
gccccaggagcttgtcaccaaagatttggtgcgagaggggtacctggagtaccagcaggtgcccagcagcgatcctccacgctacgagttcctgtggggtcccagggcccgtgctgaaac

SEQ ID NO: 648876 - DNA, 120 bp, Artificial Sequence
  ENSG00000182798_9 (sequence is synthesized)
cagcaaaatgaaagtcctggagtttgtggccaagctcaatgataccgttgccagtacctacaagtcccggtatgaggaggctctgagagaggaggaagagcaagccagagccagagcggt

SEQ ID NO: 648877 - DNA, 120 bp, Artificial Sequence
  ENSG00000182798_10 (sequence is synthesized)
agccagggatagcgccagggccagggctagcaggtcctttcagccctagtgaagtctcaggcaatcctcactaagagattgaaaagcctgtccaccatctcagtatttgggggtgaggtg

SEQ ID NO: 648878 - DNA, 120 bp, Artificial Sequence
  ENSG00000182798_11 (sequence is synthesized)
gatgctctaacgagggtagtgactctgtctaaaggcaaaagcacagttcagctgagggaggagaactggacactcattggagtcccggagaggacactgagtacactggagaggacttct

SEQ ID NO: 648879 - DNA, 120 bp, Artificial Sequence
  ENSG00000182798_12 (sequence is synthesized)
atgcaaaaagggggcccgagcagagccccgccccgctttcagccctgggagacccagcagggacttgattggatgtggctcactccgacatccgcccgcctgggaagctgccggaagtga

SEQ ID NO: 648880 - DNA, 120 bp, Artificial Sequence
  ENSG00000182809_0 (sequence is synthesized)
gcgccttccttcctgagccctgccctccacccaaggagccttcagcaccacagacagtgttggggcggggcgcgggcgggggcggagcgggacatggagacccggacagggctgggggcc

SEQ ID NO: 648881 - DNA, 120 bp, Artificial Sequence
  ENSG00000182809_1 (sequence is synthesized)
gtgcccgccgggaatctgactccgctcccgcggcgcggctgttgctatggaaaccgagcaacaaagggaagcgggacaggcgccgcgcgcggcggggtgggggtggggttctcccggagc

SEQ ID NO: 648882 - DNA, 120 bp, Artificial Sequence
  ENSG00000182809_2 (sequence is synthesized)
ctgcgaccccttcccgcggcggagcgcagcctgggcgcccagggccgggagtgttggacccctaggcccaagtcactagggctccccgagagccgagggccaggctccccgcaccctgcc

SEQ ID NO: 648883 - DNA, 80 bp, Artificial Sequence
  ENSG00000182809_3 (sequence is synthesized)
ccgacgtcgccatggaaacagccggggcgcgggcggcgccgcggtcgcccgggcgggcccctgtagacgccacctccggc

SEQ ID NO: 648884 - DNA, 120 bp, Artificial Sequence
  ENSG00000182809_4 (sequence is synthesized)
cgggcaggcggggctgggcgcgggcggcggcggcccggaggagaacgggcggagggcgcgggccgaccgggcgcaccgaccatggcctccaaatgccccaagtgcgacaagaccgtgtac

SEQ ID NO: 648885 - DNA, 120 bp, Artificial Sequence
  ENSG00000182809_5 (sequence is synthesized)
ccaaatgccccaagtgcgacaagaccgtgtacttcgccgagaaggtgagctccctggggaaggactggcacaagttctgcctcaagtgcgagcgctgcagcaagacgctgacgcccgggg

SEQ ID NO: 648886 - DNA, 120 bp, Artificial Sequence
  ENSG00000182809_6 (sequence is synthesized)
tcggacccaaaggcgtgaacatcgggggcgcgggctcctacatctacgagaagcccctggcggaggggccgcaggtcaccggccccatcgaggtccccgcggcccgagcagaggagcgga

SEQ ID NO: 648887 - DNA, 120 bp, Artificial Sequence
  ENSG00000182809_7 (sequence is synthesized)
aggcgagcggccccccgaaggggcccagcagagcctccagtgtcaccactttcaccggggagcccaacacgtgcccgcgctgcagcaagaaggtgtacttcgctgagaaggtgacgtctc

SEQ ID NO: 648888 - DNA, 120 bp, Artificial Sequence
  ENSG00000182809_8 (sequence is synthesized)
tgggcaaggattggcaccggccctgcctgcgctgcgagcgctgcgggaagacactgacccccggcgggcacgcggagcacgacggccagccctactgccacaagccctgctatggaatcc

SEQ ID NO: 648889 - DNA, 120 bp, Artificial Sequence
  ENSG00000182809_9 (sequence is synthesized)
tcttcggacccaagggagtgaacaccggtgcggtgggcagctacatctatgaccgggaccccgaaggcaaggtccagccctaggctacagcggctctcatgatgtgggctcacctgcgcc

SEQ ID NO: 648890 - DNA, 120 bp, Artificial Sequence
  ENSG00000182809_10 (sequence is synthesized)
ccagaccctgcaggggcccccctgcttggctctgctgggagagtgctcagccgcccagtcctgcctgcaagcccagggcgagtattggaggaggggcagccacgggcagagcaccatgcc

SEQ ID NO: 648891 - DNA, 120 bp, Artificial Sequence
  ENSG00000182809_11 (sequence is synthesized)
catccccgagtctctggtgtgtctgccccctctggcatcctctgggcgtcccatgatcccttctgtgtctgcgtgtccgaatccccgtgtgaccctgtcccagcattttcccgccgaccc

SEQ ID NO: 648892 - DNA, 120 bp, Artificial Sequence
  ENSG00000182809_12 (sequence is synthesized)
tgcgtgtccccgtggcgctgtccgctctccctctcctgctgcccacccacctgccagtgttatttatgctcccttcgtgggtgatggccacgccctcaccatgtccctggcagagggctt

SEQ ID NO: 648893 - DNA, 120 bp, Artificial Sequence
  ENSG00000182809_13 (sequence is synthesized)
ccctccgggatcccctgcctggtgcccacactgcctcgcaagcgctcgccaccctcacgtggctcacctgctgttgagccttgtgctgtcaataaacggtttgaggattgcaggattgtc

SEQ ID NO: 648894 - DNA, 120 bp, Artificial Sequence
  ENSG00000182809_14 (sequence is synthesized)
cccacggcgagccggcctgcacgttctggaagcctccaggtgatgggtcgggggagtctgtggactcctccctcagcacccaccttctgccccagcacgacggccagccctactgccaca

SEQ ID NO: 648895 - DNA, 120 bp, Artificial Sequence
  ENSG00000182809_15 (sequence is synthesized)
agtgaagcagagaggagggccgggaccaacagggcgcctgccctggtcgccccatacccagaatgcggccaggctgcagggaaggccgccactgggcttccccggctcacaggctggagg

SEQ ID NO: 648896 - DNA, 120 bp, Artificial Sequence
  ENSG00000182809_16 (sequence is synthesized)
gggttgaggggaggttgtattttgcccgtcccagaggggagggaccggatttggcctggagtgcttctggcgtggctgggagccgaggggcttccggctgcctctcctggagcccgctca

SEQ ID NO: 648897 - DNA, 120 bp, Artificial Sequence
  ENSG00000182809_17 (sequence is synthesized)
gccctcagtctctgtcccagcgagggctgtctctgtaaggcttagggtgggagacggtccccagggcccttctgcagtccaactgcccatgactttaccccaggccgggccaggccagcc

SEQ ID NO: 648898 - DNA, 120 bp, Artificial Sequence
  ENSG00000182809_18 (sequence is synthesized)
tggggctctccagggtctcggccaacagtcctgtggacagcccggaaaggcctgcctgcctggcccgcccagcctctcagcggaaaacaaaggcgcttcagacccggctggcttctgtcc

SEQ ID NO: 648899 - DNA, 120 bp, Artificial Sequence
  ENSG00000182809_19 (sequence is synthesized)
tgcctgggaggcactgtgagggcgagggtccagaatcctgcccaccctcacaccaggctgcccccgcagctcatacctgagtagaacccaggctgggatgtcggagcacattgaggaggc

SEQ ID NO: 648900 - DNA, 120 bp, Artificial Sequence
  ENSG00000182809_20 (sequence is synthesized)
caccccagagcccatgcagccagggtgggcagctggttttcttctgagccattagacccaatcgattctgtgttcccaactcggacccgtaatgtgtggccattgacccacccagtgggt

SEQ ID NO: 648901 - DNA, 120 bp, Artificial Sequence
  ENSG00000182809_21 (sequence is synthesized)
ctgagggccagttccctgcccccacttggcccacgtcccagagctggccagagcacagtgctggcagccctgggctgcagctgccacggccgatagccaccgagacttccttgctgctgc

SEQ ID NO: 648902 - DNA, 120 bp, Artificial Sequence
  ENSG00000182809_22 (sequence is synthesized)
tggagtggttctggtcagagggctctaagctggtgcagccttgtggttgggctggtgtcctggaggctggccctggccatgcccagagggttgtaccagggccacggagagccagtattc

SEQ ID NO: 648903 - DNA, 120 bp, Artificial Sequence
  ENSG00000182809_23 (sequence is synthesized)
acagccctctacctagtaggccacctgggggatcccatctcactgccaggagcagcacccttgggcctctcagagtgggcttcgccctagccagatgcccctccccgatatctgccagac

SEQ ID NO: 648904 - DNA, 120 bp, Artificial Sequence
  ENSG00000182809_24 (sequence is synthesized)
aaagggggctgggccacttgctgagaaagggagctgggagagccactggtcctcggccacctgaggggcttggccagattctgccgggcagggtgggcccagcctgcatgctccctcccc

SEQ ID NO: 648905 - DNA, 120 bp, Artificial Sequence
  ENSG00000182809_25 (sequence is synthesized)
ccagggcctgcagcttgtccccttcccttcagaattccggctctgctgggcccttcctgcccctccccacctcttcctgcctggctccctagggaggcccctgcttccatccactgggaa

SEQ ID NO: 648906 - DNA, 120 bp, Artificial Sequence
  ENSG00000182809_26 (sequence is synthesized)
gcagtccagtagccccagtgtgggggtgggaggcagtggcagagggtcccggaccctcagcagctgccctcagatcttccatgccagtggcagccaggggcattacggcggggggagagc

SEQ ID NO: 648907 - DNA, 120 bp, Artificial Sequence
  ENSG00000182809_27 (sequence is synthesized)
tcagggtttaggacgaggaatccacagacagatgagggtcccgcctggaggacccacggggacggggcctggccttcccatgagggagctggaggttctggggctgcacctttgactcag

SEQ ID NO: 648908 - DNA, 120 bp, Artificial Sequence
  ENSG00000182809_28 (sequence is synthesized)
cagcggggtgctgccagccccatcagggcccagttggtggggatcaggggcgtgtcagtgcgaggcaggtgtgagagggagagcagcatgtgttgaagcaggtgcactgcagaggcagcc

SEQ ID NO: 648909 - DNA, 120 bp, Artificial Sequence
  ENSG00000182809_29 (sequence is synthesized)
ccctcggcctgccctgggacctgctgggaggggcgtggcgctggcgctggggagggctgggggtcccggccgccgtggatccccgcccagagtccctgccaccctggaaagcctagtgcc

SEQ ID NO: 648910 - DNA, 120 bp, Artificial Sequence
  ENSG00000182809_30 (sequence is synthesized)
ggctggggaccttggggcaggtggtctccctccagaagagccctgtgttcagccagccctgtcctccagagcaagccccacaggtagcaagccccacaggtagcaaagtcagggagggta

SEQ ID NO: 648911 - DNA, 120 bp, Artificial Sequence
  ENSG00000182809_31 (sequence is synthesized)
atggcttagccccaggctcccaagctgggcagaacagggcagggagctggagagggtttggcagtgggcccatgaatccagcctgggcaaggccctgctgtgagggacccctagggaccc

SEQ ID NO: 648912 - DNA, 120 bp, Artificial Sequence
  ENSG00000182809_32 (sequence is synthesized)
ctgggcctgccagggaggaagggctgcccagaaaaggtactgactgatgcctcctcaccatcttctgccttggctggcacaggtcccaagtgcagagggggagctggtcaggctggtcag

SEQ ID NO: 648913 - DNA, 120 bp, Artificial Sequence
  ENSG00000182809_33 (sequence is synthesized)
tcgggcgggggggcggggggcatgtttctggcctgctgtcaccatggaaatggcagtggctgcagggtgtgtgtgcaagggaggagggtgctgccacagagagcccagccaggaccacca

SEQ ID NO: 648914 - DNA, 120 bp, Artificial Sequence
  ENSG00000182809_34 (sequence is synthesized)
ggaggagaacgggcggagggcgcgggccgaccgggcgcaccgaccatggcctccaaatgccccaagtgcgacaagaccgtgtacttcgcatgacgggaagccgttctgccacaagccgtg

SEQ ID NO: 648915 - DNA, 120 bp, Artificial Sequence
  ENSG00000182809_35 (sequence is synthesized)
gagtgcgcgcccgggccccggacccccgcccccgcccccgccccggggctcggcctcactcctccccctttccagctgagaaggtgacgtctctgggcaaggattggcaccggccctgcc

SEQ ID NO: 648916 - DNA, 120 bp, Artificial Sequence
  ENSG00000182810_0 (sequence is synthesized)
atcgccagcctccagtcctgcctccacgacgcgcccttccccaaggctggccgggtctggatgtcgccatcccctattcggagctacagacctcgcagctgaactcttaaaaagaacctc

SEQ ID NO: 648917 - DNA, 120 bp, Artificial Sequence
  ENSG00000182810_1 (sequence is synthesized)
gcttcttcctcacggtgctccagctccacacaccgtactgagcctcgccagccaccgtacgcgaggtcgcggcgcgtccgtgacgtcactgatgtgcgcttctcccgcactaagggaaac

SEQ ID NO: 648918 - DNA, 120 bp, Artificial Sequence
  ENSG00000182810_2 (sequence is synthesized)
atggctctaacgcggccggtgcggctcttttccctcgtgactcggttgctcctggcgccgcgacggggcctcacggtccgcagtcccgacgaacccctgccggtggtgcgcatcccagtg

SEQ ID NO: 648919 - DNA, 120 bp, Artificial Sequence
  ENSG00000182810_3 (sequence is synthesized)
gctctacagcggcagttggaacagcggcagagcaggcggcggaacctcccgaggccggtgctggttcgacccggaccgctgctggtttcggcgcggcggccggagttgaaccagccggcg

SEQ ID NO: 648920 - DNA, 120 bp, Artificial Sequence
  ENSG00000182810_4 (sequence is synthesized)
cgcctcacactgggccgttgggagcgcgcgccgctagcctctcaaggctggaagagtcgacgcgcgcgtcgggaccacttctccatcgagcgcgcgcaacaggaggcgccagcggtgcga

SEQ ID NO: 648921 - DNA, 120 bp, Artificial Sequence
  ENSG00000182810_5 (sequence is synthesized)
aagctctcgtctaagggcagctttgctgacctgggcctggagccccgtgtgctgcacgcactacaggaggctgcgcctgaagtcgttcagcccacaaccgtgcagtctagcaccatcccc

SEQ ID NO: 648922 - DNA, 120 bp, Artificial Sequence
  ENSG00000182810_6 (sequence is synthesized)
tcactacttcgcggccgccatgtcgtttgcgccgcagaaaccggcagtggcaagactctcagctacctcctgccgctgcttcaacggctcttgggccagccaagcctggactcccttcct

SEQ ID NO: 648923 - DNA, 120 bp, Artificial Sequence
  ENSG00000182810_7 (sequence is synthesized)
atccccgcgccccgaggcctggtccttgttccttcccgagaattggcccaacaggtgcgggctgtggcccaacccttgggccgctccttgggcctgctggtgcgggacctggagggaggc

SEQ ID NO: 648924 - DNA, 120 bp, Artificial Sequence
  ENSG00000182810_8 (sequence is synthesized)
cacggcatgcgtaggatcaggctgcagctgtccagacagccttcagcagatgtgcttgtggccactccaggggctctgtggaaggccctgaaaagtcgactgatcagtctggagcaactc

SEQ ID NO: 648925 - DNA, 120 bp, Artificial Sequence
  ENSG00000182810_9 (sequence is synthesized)
gtgttggatgaggcagacacactgctggatgaaagcttcctggaactggtggactacatcttagagaagagccacatagcagaaggcccagctgacttggaagaccccttcaatcccaaa

SEQ ID NO: 648926 - DNA, 120 bp, Artificial Sequence
  ENSG00000182810_10 (sequence is synthesized)
gctcagttagtgctggtaggagccacatttcccgaaggtgtaggccagttgctgaataaagtcgccagcccagatgctgtcaccaccatcaccagctccaagctccactgtatcatgcct

SEQ ID NO: 648927 - DNA, 120 bp, Artificial Sequence
  ENSG00000182810_11 (sequence is synthesized)
catgtgaaacagacatttctgagactgaagggagcagataaggtggccgagctggtgcacatcctcaagcatcgtgacagagcagaaaggactggtccctcaggaactgttctggtgttc

SEQ ID NO: 648928 - DNA, 120 bp, Artificial Sequence
  ENSG00000182810_12 (sequence is synthesized)
tgtaatagctccagcactgtgaactggctgggatatattctggatgaccacaaaatccaacacctaaggttgcaggggcaaatgccagccttgatgagggtaggaatcttccagtccttc

SEQ ID NO: 648929 - DNA, 120 bp, Artificial Sequence
  ENSG00000182810_13 (sequence is synthesized)
cagaagagctcccgagacatacttctctgcacagacatagcctctcggggcctggacagcactggtgtggagctggttgtcaattatgatttccccccaacgctgcaagattacatccac

SEQ ID NO: 648930 - DNA, 120 bp, Artificial Sequence
  ENSG00000182810_14 (sequence is synthesized)
agagcagggagagtgggccgtgtggggagcgaggtgccaggcaccgtcatcagttttgtgacccatccctgggatgtgagcctggttcagaagattgagctggcggctcgccgaaggaga

SEQ ID NO: 648931 - DNA, 120 bp, Artificial Sequence
  ENSG00000182810_15 (sequence is synthesized)
agtcttccaggactagcatcctcggtgaaagagcctttgccccaagcaacctgattttgacaaatctgattaaaatgtgatgctagaacagggatctttcccagtatcttgagtgggtga

SEQ ID NO: 648932 - DNA, 120 bp, Artificial Sequence
  ENSG00000182810_16 (sequence is synthesized)
ccacacttgtcagtgggaggctctgggctgccctgtcggctccttgagggcgggatgaactgctttgtgacttggaaaggtacgctgctggccagcattggagaagaagctgctgagcat

SEQ ID NO: 648933 - DNA, 120 bp, Artificial Sequence
  ENSG00000182810_17 (sequence is synthesized)
ggctttctgtagtctttagcaagacacaagtggattttgactttgtatcatgtcatgatttctaacaataaatgatgtttttatgtgcctcccctaagaataattagcaccggggcggaa

SEQ ID NO: 648934 - DNA, 120 bp, Artificial Sequence
  ENSG00000182816_0 (sequence is synthesized)
attcaaactcagagaatctttccactataactcagctgaactcacatctcccgtcaacatgtcctacaactgctgctctggaaacttctcctcccgctcctgtggtgactacctgcgcta

SEQ ID NO: 648935 - DNA, 120 bp, Artificial Sequence
  ENSG00000182816_1 (sequence is synthesized)
cccagcatcctcacgtggcttttcctaccccagcaatctggtctacagcactgacctctgctctcccagcacctgccagctgggttcctctctctataggggctgtcaggagatctgctg

SEQ ID NO: 648936 - DNA, 120 bp, Artificial Sequence
  ENSG00000182816_2 (sequence is synthesized)
ggagcccaccagctgccagacgtcctatgtggagtccagcccctgccagacctcctgctaccgccccagaacctccttgctctgcagtccttgcaagacgacttactctgggtctctagg

SEQ ID NO: 648937 - DNA, 120 bp, Artificial Sequence
  ENSG00000182816_3 (sequence is synthesized)
gagctgctactcagtgggctgtgggtccagtggtgtcagatccctgggttatggaagctgtggcttcccttccctcggctatggatctggattctgccgcccaacctacttggcttctag

SEQ ID NO: 648938 - DNA, 120 bp, Artificial Sequence
  ENSG00000182816_4 (sequence is synthesized)
gagctgccagtctccttgttacagaccagcctatggatcaaccttctgcagatcaacttgctgaatttccagaccttttaagcaaagtgtctcagtctctacgtagagctgttatcatag

SEQ ID NO: 648939 - DNA, 120 bp, Artificial Sequence
  ENSG00000182816_5 (sequence is synthesized)
gcatttccagcaatgtgagctaacccctcttactactagctcttcatcctttctctggcatcaagtactggctggacaggctagttctttcagactgtgaaattaatgaatgagcaaaat

SEQ ID NO: 648940 - DNA, 120 bp, Artificial Sequence
  ENSG00000182816_6 (sequence is synthesized)
atagagtcaaatgtctataattttgaaacaagtgattcgttatcacgtaagttcatcttataaagtatatggaagttcagttttgtttcacgtaataaattcatttactgttgattccaa

SEQ ID NO: 648941 - DNA, 120 bp, Artificial Sequence
  ENSG00000182827_0 (sequence is synthesized)
agaggtcagcaggaagtcgatacgtggctgccgtctgtccccgctgaggaggtgcagcagccggagatggcggcggtgctgaacgcagagcgactcgaggtgtccgtcgacggcctcacg

SEQ ID NO: 648942 - DNA, 120 bp, Artificial Sequence
  ENSG00000182827_1 (sequence is synthesized)
actcgaggtgtccgtcgacggcctcacgctcagcccggacccggaggagcggcctggggcggagggcgccccgctgctgccgccaccgctgccaccgccctcgccacctggatccggtcg

SEQ ID NO: 648943 - DNA, 120 bp, Artificial Sequence
  ENSG00000182827_2 (sequence is synthesized)
gagcccggggaggcggcggctgggggcgcggcggaggaggcgcggcggctggagcagcgctggggtttcggcctggaggagttgtacggcctggcactgcgcttcttcaaagaaaaagat

SEQ ID NO: 648944 - DNA, 120 bp, Artificial Sequence
  ENSG00000182827_3 (sequence is synthesized)
ggcaaagcatttcatccaacttatgaagaaaaattgaagcttgtggcactgcataagcaagttcttatgggcccatataatccagacacttgtcctgaggttggattctttgatgtgttg

SEQ ID NO: 648945 - DNA, 120 bp, Artificial Sequence
  ENSG00000182827_4 (sequence is synthesized)
gggaatgacaggaggagagaatgggcagccctgggaaacatgtctaaagaggatgccatggtggagtttgtcaagctcttaaataggtgttgccatctcttttcaacatatgttgcgtcc

SEQ ID NO: 648946 - DNA, 120 bp, Artificial Sequence
  ENSG00000182827_5 (sequence is synthesized)
cacaaaatagagaaggaagagcaagaaaaaaaaaggaaggaggaagaggagcgaaggcggcgtgaagaggaagaaagagaacgtctgcaaaaggaggaagagaaacgtaggagagaagaa

SEQ ID NO: 648947 - DNA, 120 bp, Artificial Sequence
  ENSG00000182827_6 (sequence is synthesized)
gaggaaaggcttcgacgggaggaagaggaaaggagacggatagaagaagaaaggcttcggttggagcagcaaaagcagcagataatggcagctttaaactcccagactgccgtgcagttc

SEQ ID NO: 648948 - DNA, 120 bp, Artificial Sequence
  ENSG00000182827_7 (sequence is synthesized)
cagcagtatgcagcccaacagtatccagggaactacgaacagcagcaaattctcatccgccagttgcaggagcaacactatcagcagtacatgcagcagttgtatcaagtccagcttgca

SEQ ID NO: 648949 - DNA, 120 bp, Artificial Sequence
  ENSG00000182827_8 (sequence is synthesized)
cagcaacaggcagcattacagaaacaacaggaagtagtagtggctgggtcttccttgcctacatcatcaaaagtgaatgcaactgtaccaagtaatatgatgtcagttaatggacaggcc

SEQ ID NO: 648950 - DNA, 120 bp, Artificial Sequence
  ENSG00000182827_9 (sequence is synthesized)
aaaacacacactgacagctccgaaaaagaactggaaccagaagctgcagaagaagccctggagaatggaccaaaagaatctcttccagtaatagcagctccatccatgtggacacgacct

SEQ ID NO: 648951 - DNA, 120 bp, Artificial Sequence
  ENSG00000182827_10 (sequence is synthesized)
cagatcaaagacttcaaagagaagattcagcaggatgcagattccgtgattacagtgggccgaggagaagtggtcactgttcgagtacccacccatgaagaaggatcatatctcttttgg

SEQ ID NO: 648952 - DNA, 120 bp, Artificial Sequence
  ENSG00000182827_11 (sequence is synthesized)
gaatttgccacagacaattatgacattgggtttggggtgtattttgaatggacagactctccaaacactgctgtcagcgtgcatgtcagtgagtccagcgatgacgacgaggaggaagaa

SEQ ID NO: 648953 - DNA, 120 bp, Artificial Sequence
  ENSG00000182827_12 (sequence is synthesized)
gaaaacatcggttgtgaagagaaagccaaaaagaatgccaacaagcctttgctggatgagattgtgcctgtgtaccgacgggactgtcatgaggaggtgtatgctggcagccatcaatat

SEQ ID NO: 648954 - DNA, 120 bp, Artificial Sequence
  ENSG00000182827_13 (sequence is synthesized)
ccagggagaggagtctatctcctcaagtttgacaactcctactctttgtggcggtcaaaatcagtctactacagagtctattatactagataaaaatgttgttacaaagtctggagtcta

SEQ ID NO: 648955 - DNA, 120 bp, Artificial Sequence
  ENSG00000182827_14 (sequence is synthesized)
tcttgctgggaatcaaaatttccttgagactctttagcattcatactttggggttaaaggagattcctcagactcatccagcccttgggtgctgaccagcagagtcactagtggatgctg

SEQ ID NO: 648956 - DNA, 120 bp, Artificial Sequence
  ENSG00000182827_15 (sequence is synthesized)
aagttacatgagctacatgttaaatatttaaagtctccaaaataaaacaccccaacgttgaccttacccggctgatggttagccccttgctgcctgctccatgtgtcttatgagagcccg

SEQ ID NO: 648957 - DNA, 120 bp, Artificial Sequence
  ENSG00000182827_16 (sequence is synthesized)
tagttacagtgtcctctaatttgaaatccataagttaacaagtctatatcaggtgcagctggctttgattaaaggccatttttaaaacttaaaaactcaacacctcacagattataatag

SEQ ID NO: 648958 - DNA, 120 bp, Artificial Sequence
  ENSG00000182827_17 (sequence is synthesized)
aaaaagaaatggcctcagtttgatctcgttcagaatgacccagattgtttctgctttgggtgcagctgtttagttcagagttatattacagagaattattttctgagataatcttaaact

SEQ ID NO: 648959 - DNA, 120 bp, Artificial Sequence
  ENSG00000182827_18 (sequence is synthesized)
agaatgttcaaaactaattgataattgaagtatcaagatacgtagaacacctcagagatttttcttcaggaacttccacaaactttgaatccttgtatctttatttggtattcatactac

SEQ ID NO: 648960 - DNA, 120 bp, Artificial Sequence
  ENSG00000182827_19 (sequence is synthesized)
tagtagcaaaatacaggttttttgttttgttttgttttgttttggcttcatagagtatctcaaattgaaacttttctgcacaaagaataaaattaaggattttataaactcaaattggca

SEQ ID NO: 648961 - DNA, 120 bp, Artificial Sequence
  ENSG00000182827_20 (sequence is synthesized)
cctactgaattaaaatacataaaatcatttaaatataattcagcatatgggaagtaacattgcactaatatggaaatcactgccagagacagtctattttcttttaatttgttactactt

SEQ ID NO: 648962 - DNA, 120 bp, Artificial Sequence
  ENSG00000182827_21 (sequence is synthesized)
agtcacaaaccccacattattccagtttggaattacttattaaggagaattggaaatacatatgcccatgcttaaattttatagctttaatttgtgttatttctttattgacgggaagag

SEQ ID NO: 648963 - DNA, 120 bp, Artificial Sequence
  ENSG00000182827_22 (sequence is synthesized)
gtacatctttttttccttactgaaaacaaatatggattaattgcctcaaatttgtataagtgattggctagtgattcttgttttcagaagggagagtggtatagatagaaaatgacaaag

SEQ ID NO: 648964 - DNA, 120 bp, Artificial Sequence
  ENSG00000182827_23 (sequence is synthesized)
atggcaatatacacttaatgttgttattgtatgttgttactgaagtacttagatttttaaaatttcaaatcctaaatcacttcttgtaggagggttttcattaactgcagtatatacagt

SEQ ID NO: 648965 - DNA, 120 bp, Artificial Sequence
  ENSG00000182827_24 (sequence is synthesized)
tcactacatatgggttgtttgagttttttgtgtgctgtatttctttctgttttttaatacctggttttgtacatatctaactctgttctcttttggttgttcagaaactggatttttttt

SEQ ID NO: 648966 - DNA, 120 bp, Artificial Sequence
  ENSG00000182827_25 (sequence is synthesized)
ttcttaagcagtgcttaatttgtgttttttaattttgattcagaagtagtcccagctcataggtgttcatactgttacatccagaacatttgtcaggctctctgtcagctttcatgtaca

SEQ ID NO: 648967 - DNA, 120 bp, Artificial Sequence
  ENSG00000182827_26 (sequence is synthesized)
tatggtatagaaaccatggagttaggcacttcctggattttttttttatgagaaaaatactgtatttaaaatgtaaaataaacttttaaaaagcaggcactaatatatatttcttccagc

SEQ ID NO: 648968 - DNA, 120 bp, Artificial Sequence
  ENSG00000182827_27 (sequence is synthesized)
ctttgattacaaatttgtccttgcacatgttaagatgaattatctcctaaaaatatcattgttcttgggagcagtgtatgttactttacatagcagcggttcctgtcatgtgttcatgtc

SEQ ID NO: 648969 - DNA, 120 bp, Artificial Sequence
  ENSG00000182827_28 (sequence is synthesized)
agaatatttttggttttaaactttcttattgcctttggctgttgattagtacagtacaagtgcgatttcaaaaagatcttgaaagtaatatatttaatcaattaaaatgtttatctgtaa

SEQ ID NO: 648970 - DNA, 120 bp, Artificial Sequence
  ENSG00000182831_0 (sequence is synthesized)
gctcagtcttggggtgggctccgcggtgcaggccgagctgcgcggagggctcggcgatcagcggcggcggcggcagtggggaggccgcagcgccatgggggggcgttagacaggctgcgg

SEQ ID NO: 648971 - DNA, 120 bp, Artificial Sequence
  ENSG00000182831_1 (sequence is synthesized)
gttagacaggctgcggcggccgaggcgaggggcggcagcggttatctggtccgcggcgaccttcggccgggcccgggggtgggaaggcctggggcgggggtcgtccctggttgcacgggg

SEQ ID NO: 648972 - DNA, 120 bp, Artificial Sequence
  ENSG00000182831_2 (sequence is synthesized)
gccgtcggggtgcaggaggcctgggccgctgaaaggagaaggcgccgtcggtcgccaggccctgccgccgggccgcttgacgacgacgctcccgcgggggccccgcctgaggaggacgcg

SEQ ID NO: 648973 - DNA, 120 bp, Artificial Sequence
  ENSG00000182831_3 (sequence is synthesized)
cgcggcggcggtggcggcgaggccgcgggaggccgcggaggatggaggagcggaaggaggagggcgaggccgagatccaggagcacgggcccgagcactggttctccaagtgggagcggc

SEQ ID NO: 648974 - DNA, 120 bp, Artificial Sequence
  ENSG00000182831_4 (sequence is synthesized)
agtgcctggccgaggccgaacaggacgagcagctgccccccgagctgcaggaggaggcggcggccgccgcgcagcccgagcacaagcagcagaagctgtggcacctcttccagaactcgg

SEQ ID NO: 648975 - DNA, 120 bp, Artificial Sequence
  ENSG00000182831_5 (sequence is synthesized)
ccaccgccgtggcccagctctacaaagaccgagtgtgtcagcagccaggactttctctctgggtccccttccaaaacgcagccaccgccgtcaccaatctctacaaagaaagcgtggata

SEQ ID NO: 648976 - DNA, 120 bp, Artificial Sequence
  ENSG00000182831_6 (sequence is synthesized)
cccatcaacgaagttttgatattggaattcagattggctatcagcgacgcaataaggatgtgttggcttgggttaaaaaacgcagaagaactattcgtcgagaagatttgatcagcttcc

SEQ ID NO: 648977 - DNA, 120 bp, Artificial Sequence
  ENSG00000182831_7 (sequence is synthesized)
tgtgtggaaaagttcctccaccacgaaactctagagctcccccaagactgactgtagtgtcccctaaccgagctacttcaacggaaactagctcatctgtagagactgatttgcaaccct

SEQ ID NO: 648978 - DNA, 120 bp, Artificial Sequence
  ENSG00000182831_8 (sequence is synthesized)
tccgggaagccatagctctgcatggtcttagtggtgcaatggctagtataagcgtgcgttcgagtaccccaggctctcctacacatgtaagcagtggatcgaatgctagtcgaaggagaa

SEQ ID NO: 648979 - DNA, 120 bp, Artificial Sequence
  ENSG00000182831_9 (sequence is synthesized)
atggactccatgatgtcgatttgaacactttcatatcagaagaaatggcactccacttggacaatggtggaactagaaagcgtacctcagcccagtgtggcgatgtcattacagactcac

SEQ ID NO: 648980 - DNA, 120 bp, Artificial Sequence
  ENSG00000182831_10 (sequence is synthesized)
caacccataaacgcaacagaatgatctaaactgcaaacattttcacacccaccatgctgcttgaaagccacttgatcctcaacatatactataattgcaaaggaaacatgaggccatctt

SEQ ID NO: 648981 - DNA, 120 bp, Artificial Sequence
  ENSG00000182831_11 (sequence is synthesized)
cccttgttcactgtttaagacaagtgaattctatagtggttgccataaaaggaagttctaggtatttatagtagatgcctcttgtaattatggctttcttaaaactataatcctagcaga

SEQ ID NO: 648982 - DNA, 120 bp, Artificial Sequence
  ENSG00000182831_12 (sequence is synthesized)
ggacatcagatattgtgtagtcgttagcaagatcatcataggcaaacatatatccgttccaaggctaaaagtgaccttaactgtatttattctcaaagggaaaggaaatatcagatgttt

SEQ ID NO: 648983 - DNA, 120 bp, Artificial Sequence
  ENSG00000182831_13 (sequence is synthesized)
atttggttatagaatgctttttttttttttgggtccatttcctgctgtgttgagtattttgcttcaacagtattgccaggttcctaaaattgtctaaaaacatgatttggcttccatttt

SEQ ID NO: 648984 - DNA, 120 bp, Artificial Sequence
  ENSG00000182831_14 (sequence is synthesized)
tgcagctgcactgtaccatgcacctggtttctatatagtaacagtgtgcaattctaattattggactgtgccctgtttttagttttcaaatcaatttctaattctggtgattgtgtgatg

SEQ ID NO: 648985 - DNA, 120 bp, Artificial Sequence
  ENSG00000182831_15 (sequence is synthesized)
taaagaggtgctatgatggtcatgcaattaatactaaatattgaatcaatgcccagagctttattggattcactttgtgtgtgttagtgctctaaagtagcagtattattattaaactgt

SEQ ID NO: 648986 - DNA, 120 bp, Artificial Sequence
  ENSG00000182831_16 (sequence is synthesized)
ccccagagtaaccctgtaggcctaaagtactcagttttaagacaaacactacttcccatgcggggtactttccttatggtaaatgtaaacatgtagactgcattcgaggtgacctaaagt

SEQ ID NO: 648987 - DNA, 120 bp, Artificial Sequence
  ENSG00000182831_17 (sequence is synthesized)
agagaggtcatgaactttgagaatgggcttcctttttggttcagtattagtgagagggagagggagatggatggtggggtaggttttctagtctatcattttacatttttcatggagtcc

SEQ ID NO: 648988 - DNA, 120 bp, Artificial Sequence
  ENSG00000182831_18 (sequence is synthesized)
ctgcttagtgcagtttccattggaatgggtggaagatgataaagctctcttttttatctactaataatgtgattgcaacttaaaatagcaaaacccaactctccctgtccctccaatccc

SEQ ID NO: 648989 - DNA, 120 bp, Artificial Sequence
  ENSG00000182831_19 (sequence is synthesized)
tctcctaaaaagttcagtttggaatctcattctggaaaagatggaatcgcatggagattctctagctgttaggtagacctaaataaaaagttctcaatagattcctcttttgagtaaata

SEQ ID NO: 648990 - DNA, 120 bp, Artificial Sequence
  ENSG00000182831_20 (sequence is synthesized)
taagacctcttgtagctacaatgttttagagcatgtttcatcttcatttttaatatcctgaactgaatgatagtgtttttttagatgaagaactgatgtcagcctgccaggtactgtaat

SEQ ID NO: 648991 - DNA, 120 bp, Artificial Sequence
  ENSG00000182831_21 (sequence is synthesized)
ttattctatcatattattatattatatatcaagtaggacagtgaaaaatgtttccttgcaaacttgtagtccagtatcagttacttcctatttttatccttaaaagaccattgcaaatca

SEQ ID NO: 648992 - DNA, 120 bp, Artificial Sequence
  ENSG00000182831_22 (sequence is synthesized)
gtgtaagggtttttccagtaattactcacagcactttgttaaagtttgcaatttcttcagccatttaataatatctttctgtgaagaaactttgctgagttaaccataaatgttcattca

SEQ ID NO: 648993 - DNA, 120 bp, Artificial Sequence
  ENSG00000182831_23 (sequence is synthesized)
ttgactgggtgggatgtgaatggaatgttagaaatgttgtgtgaattgaagttctgtattcattatagatgtagcccttatttaaaaaagtgaattccatactaaaactaggaatgaaag

SEQ ID NO: 648994 - DNA, 120 bp, Artificial Sequence
  ENSG00000182831_24 (sequence is synthesized)
atctgtcattttacctgaaacagacaagcctatgtattatgaatactttcaagcttccctttggaatatacaagacatgcgtttggagttacctttgtttttctatcgtaaatttagatt

SEQ ID NO: 648995 - DNA, 120 bp, Artificial Sequence
  ENSG00000182831_25 (sequence is synthesized)
ctggaattggggtttggtggtgcaatgtgttgctcacaagtggccagaactcctattcctaaaaggattttgagatggaggaacacatatttaattcccctttatgccttggttcttgct

SEQ ID NO: 648996 - DNA, 120 bp, Artificial Sequence
  ENSG00000182831_26 (sequence is synthesized)
cctctttccacgttggataacaattttttggttgttttgtttaagttggtgctctgaagcttaatctcagtaccctttactctgaattgtcaaattttgataaaacgtgccattttcttt

SEQ ID NO: 648997 - DNA, 120 bp, Artificial Sequence
  ENSG00000182831_27 (sequence is synthesized)
ggtaagagaaagcaggtcttaatgtctgccagaacacaatttatatgccttattggcttcattaaacttttagaaaactttagcatttgttacttttttccattgcgtttactttcaaat

SEQ ID NO: 648998 - DNA, 120 bp, Artificial Sequence
  ENSG00000182831_28 (sequence is synthesized)
gcacctaatgaatttgtcacccagtcgcaacttttcccttctctgtcccattgctttctcctttccccgacgcacagaataaacatgaagctcagcagtagaagcgtaatgatttccctc

SEQ ID NO: 648999 - DNA, 120 bp, Artificial Sequence
  ENSG00000182831_29 (sequence is synthesized)
aggaaaaacttctgacagctaggtttttcaagggtttccctgtgctagctgagatgcaaaacaaatcatggaagattgcatacctgtgtggtattttaaaaacaagttgactttttcagt

SEQ ID NO: 649000 - DNA, 120 bp, Artificial Sequence
  ENSG00000182831_30 (sequence is synthesized)
ttcttgaacggttaagggtggatttaaaaactagacagtttagttttggggaacagaagctctcttcgtcttaagccagattctctgattcttttagacgtcatagctccttagttctgc

SEQ ID NO: 649001 - DNA, 120 bp, Artificial Sequence
  ENSG00000182831_31 (sequence is synthesized)
tcctgtcgccctaacttggcatgggcaagttgaagttcatccttagactgcagcgttctgagcatggctgaagtattaaaatgtttaatattttttagagcaaaattgttggaaagcatt

SEQ ID NO: 649002 - DNA, 120 bp, Artificial Sequence
  ENSG00000182831_32 (sequence is synthesized)
tggctgaatctaaagacctgcagtcagattcttcaatgtggtttacccaactggagtagtgataaacaccttaatcataaaatgaataaaaacaaaaaaaccatggggcttgtctgcagt

SEQ ID NO: 649003 - DNA, 120 bp, Artificial Sequence
  ENSG00000182831_33 (sequence is synthesized)
tttgttttggtcatcacatctgaataactttttgatgcaatcaaatgaagtttaggcttttaaaaaagaattagctttctaaatgtttttttctaagggctactggaactcattaaactc

SEQ ID NO: 649004 - DNA, 120 bp, Artificial Sequence
  ENSG00000182831_34 (sequence is synthesized)
gaataattgtggctttgggcctgaagatttccattcaacagtgaaaactggctaacttcctttatagtgagagggatggccaacatccaacccagagggctagtcagcctcagaggccag

SEQ ID NO: 649005 - DNA, 120 bp, Artificial Sequence
  ENSG00000182831_35 (sequence is synthesized)
tgcaagacgccaagagatgattttgaaatggggccataagtttagaaaattatgaacagaatgattgagtttttggcctggctactacctctagtggtgactacgtcagcagattaatct

SEQ ID NO: 649006 - DNA, 120 bp, Artificial Sequence
  ENSG00000182831_36 (sequence is synthesized)
cattgcattttactttatgtagtatgttgtaacctggtgcttcattcattagattggtgactgaggtatttagtcatggtgaggatgggaatcttcagagatacattctggatttgtgga

SEQ ID NO: 649007 - DNA, 120 bp, Artificial Sequence
  ENSG00000182831_37 (sequence is synthesized)
ataaagtgactagaaaggttcttccagagcaaccccttgtttaaagttataagtgtttatggtacctgctaccccttctggaaagttgtcggctttgatggtttagatgaccttacccca

SEQ ID NO: 649008 - DNA, 120 bp, Artificial Sequence
  ENSG00000182831_38 (sequence is synthesized)
taaggccagcttctagcctccctttggaatatttgaggtgtgtgatgttttagtgggggcagcatttgagagacgagcaggcccgagcacccaggctggctgtcagaccgtgtgttgtgc

SEQ ID NO: 649009 - DNA, 120 bp, Artificial Sequence
  ENSG00000182831_39 (sequence is synthesized)
tgttgggtttgatgggatgagatatccagggttttacttcctataatgggatctgcaggctccttgtgaagttcagttagacagtagcctgtgacgtagcaagtcaagttttcgatggcc

SEQ ID NO: 649010 - DNA, 120 bp, Artificial Sequence
  ENSG00000182831_40 (sequence is synthesized)
cctcattttttttttatttagtgcttaaaaaaaagatttaaaacagcaaaaatcaagccacacagcagcttatagtatatacaggtcttttatacattagaagtaatatggtgaaatctt

SEQ ID NO: 649011 - DNA, 120 bp, Artificial Sequence
  ENSG00000182831_41 (sequence is synthesized)
cacacctggctattttttgtatttttgttagatacggggtttcaaatatggtgaaatcttgtgacagaatagtattcccttgtacagataagccttgatgcaggttacagattttttata

SEQ ID NO: 649012 - DNA, 120 bp, Artificial Sequence
  ENSG00000182831_42 (sequence is synthesized)
cagataagccttgatgcaggttacagattttttataattagtaatgcagcagtggagtgttttctttttcttgttttttgagatggagtctctgtcgctggagtgcggtggtgcgatccc

SEQ ID NO: 649013 - DNA, 120 bp, Artificial Sequence
  ENSG00000182831_43 (sequence is synthesized)
caaatttctgtagatgaactatctgggtcaaaaaaattcatctataaaatactgatgggtcttgccaaagtaccttctgcaaggtaccagttaatacttccatcagaaagtaagagcgcc

SEQ ID NO: 649014 - DNA, 120 bp, Artificial Sequence
  ENSG00000182831_44 (sequence is synthesized)
tgttcccttacatcgtagccagtgttgggtatttatacttcctttggcagaagtgacctttcagttttaatctgttttttacctgctcgtatgaaggaagactttttgcttgatatcacg

SEQ ID NO: 649015 - DNA, 120 bp, Artificial Sequence
  ENSG00000182831_45 (sequence is synthesized)
tgggtttgaatgctgactctactaccaggtctgggaacctaggtaagtttgcctctctgggctgttttctcatctgtgaaataaatagaaaacatagaaaaataaattaaaaaatgtgaa

SEQ ID NO: 649016 - DNA, 120 bp, Artificial Sequence
  ENSG00000182831_46 (sequence is synthesized)
ggtgcctgtggacccatttttcacggttaggtttaggtccagatatactgttttttgtcttacagtaaacagcttgctctagaaatgtttaatagaatgtaagctaagaacttaatatgg

SEQ ID NO: 649017 - DNA, 120 bp, Artificial Sequence
  ENSG00000182831_47 (sequence is synthesized)
gcgatttctgtcagctaacctatcctagaaaatgtttttagaaagttagtttgagcttattggtgttaaaatgacatatctttctgcagtgttgattagaatttatcgctttacacttat

SEQ ID NO: 649018 - DNA, 120 bp, Artificial Sequence
  ENSG00000182831_48 (sequence is synthesized)
gtgttgtacgtgtttttttcctcttctgaagtcaaagaggaagttcttgtgtcttaagaattctgttatatttctaatggtccatgacaggcaagtaaggtgggaaattgttgggttagt

SEQ ID NO: 649019 - DNA, 120 bp, Artificial Sequence
  ENSG00000182831_49 (sequence is synthesized)
tctcatgggacctgggacctcccttgacacctttcttacttggtttgctgtagatggtgggagaggatggatgtaagacttgaccttctgcctgtcgtccctcaggtcccttgcacttta

SEQ ID NO: 649020 - DNA, 120 bp, Artificial Sequence
  ENSG00000182831_50 (sequence is synthesized)
agaggcaggaccagcagagtgcagccagtgggcaggtggatctctatctccccaggccagacctgtcataagaaggcactcttggctaagggattttagtattgctggagaaacccggga

SEQ ID NO: 649021 - DNA, 120 bp, Artificial Sequence
  ENSG00000182831_51 (sequence is synthesized)
aatgtagtcagtgataagtctgttgttgcttgttgctgtctaatacagacttccaaatagagctgggagagttaacctgtgtgacagcattgaatactgctgtaggaaaaaaagcaacag

SEQ ID NO: 649022 - DNA, 120 bp, Artificial Sequence
  ENSG00000182831_52 (sequence is synthesized)
aataataagacttgcttgaaaccatgatggaaagatggatcacgcagatggctaagcaggtagaagtaattaggtcatgaatcctttttttcttttttttttttttttggagacggagtt

SEQ ID NO: 649023 - DNA, 82 bp, Artificial Sequence
  ENSG00000182831_53 (sequence is synthesized)
tttttttcggcccaggctggagtgcattggcgcgatattggctcaccgcgacctctacctctgggttcaagcgattctcctg

SEQ ID NO: 649024 - DNA, 120 bp, Artificial Sequence
  ENSG00000182831_54 (sequence is synthesized)
gtgagccactgcgcctggccatgagtcttgttgaaagttaacatttttgggccatagtacaggtcatctaaaacaaagtaacctggtaaggtactaagaaatagtggcatataaagaaac

SEQ ID NO: 649025 - DNA, 120 bp, Artificial Sequence
  ENSG00000182831_55 (sequence is synthesized)
tttatagacgttgaatcattgagactttataatacctgtagagatcttgttctctctggcaaaccgtagttctttcctgaaaccccaatgttgttttttcccttgatagtgtttaggaca

SEQ ID NO: 649026 - DNA, 120 bp, Artificial Sequence
  ENSG00000182831_56 (sequence is synthesized)
attaaaaacaaaaacatgaattgcaggaaagttcaggttgtgtggatgcagtactttaagactgcacactgttcctgacacagtggaatagttaggctgtcagaactttggaagctcagg

SEQ ID NO: 649027 - DNA, 120 bp, Artificial Sequence
  ENSG00000182831_57 (sequence is synthesized)
caaaaatgggattgatctgtttatgctgaattagagagtttcacatctttccccctaaagtttgggaaaacaattaactagaggtgtacatagtttgttagattaattttagcgcatggt

SEQ ID NO: 649028 - DNA, 120 bp, Artificial Sequence
  ENSG00000182831_58 (sequence is synthesized)
aatatttgatgcagttgtctctccttaagtattgtgattttcttcctttattaagagggttgtgggtcattccatgcttctcttaaggtatctttttactctgttttactgttatatttt

SEQ ID NO: 649029 - DNA, 120 bp, Artificial Sequence
  ENSG00000182831_59 (sequence is synthesized)
agaagatagttttaagaaacataaaaaccatgcttgttatcttaacgtagtagtagtgtacataatagtaaaaagggcaagccagccccctctgccctcgaaaaactgtattctccaact

SEQ ID NO: 649030 - DNA, 120 bp, Artificial Sequence
  ENSG00000182831_60 (sequence is synthesized)
cccactacattttctcatattgaatctgttccacctgtgatttattgttttcctgaactttgggagttttaagcaatgatacagttgaagggactgtttataattttcacatgtttaagt

SEQ ID NO: 649031 - DNA, 120 bp, Artificial Sequence
  ENSG00000182831_61 (sequence is synthesized)
tgtgaggctttaaaacttaaatataaggctttgtctaggaagaaaatgatctttaccttcaataaatttataatgtagcactaatccagtatagattggagactgaatgcattcttactc

SEQ ID NO: 649032 - DNA, 120 bp, Artificial Sequence
  ENSG00000182831_62 (sequence is synthesized)
ttagggttcatacctctaattcatgtggttaagacagtgttgtggtgaagtaatagggccccttgaaagaatctacagaaacataaattatactgagttgtgctgtactggtttgtgaga

SEQ ID NO: 649033 - DNA, 120 bp, Artificial Sequence
  ENSG00000182831_63 (sequence is synthesized)
acatcagtgtattaaggagaatggtagtttaatttgaatatttaaagaaagtaatttgaatggttctagtactagggccattattaactagtaacatagattagtgacttcaactgggtg

SEQ ID NO: 649034 - DNA, 120 bp, Artificial Sequence
  ENSG00000182831_64 (sequence is synthesized)
tccttattatctgatttgtctgaagtgaaaactgttaaggtgctcttttaaaatgtatttggaaacaccatagttagggtaaatacaatgtcacaattcactcttgcatattatttgctt

SEQ ID NO: 649035 - DNA, 120 bp, Artificial Sequence
  ENSG00000182831_65 (sequence is synthesized)
agccaaatttatgaattctaagttaggccaaattgaaggttttggagttttacattgtgggtgagtctaaattcatgcgtttggcaagcacaaggacatgggaaaagaatctggtatttt

SEQ ID NO: 649036 - DNA, 120 bp, Artificial Sequence
  ENSG00000182831_66 (sequence is synthesized)
gaggcaggcttgagtttataatgaaagcaaactcagttcctcttcatgtcctatgtatttaagagaggacagttttccctcagtttttttccccttccttacccctacccccatcaaata

SEQ ID NO: 649037 - DNA, 120 bp, Artificial Sequence
  ENSG00000182831_67 (sequence is synthesized)
cagcccaaccaaataactgtgttcttaatttaaaggaaaatggcagacttgacacctgctgaatatttcgtgtagacagagtatgacaatgaatgagatccccagtcattgcccttgtaa

SEQ ID NO: 649038 - DNA, 120 bp, Artificial Sequence
  ENSG00000182831_68 (sequence is synthesized)
gcctgggaacccagtttagtgggagagactaatgtaaacagctttaatcaaaagtatatcaattggccgggtgctgtggctcacacctataatgccggcactttgggaggccaaggtggg

SEQ ID NO: 649039 - DNA, 120 bp, Artificial Sequence
  ENSG00000182831_69 (sequence is synthesized)
ccaccctggccaacatggtgaaaccctctccctatttaaagaaaaaaaagtaaggcatatcaatttatggttatcaaataggtttttttttttttttttgagactgagtgtcgctctata

SEQ ID NO: 649040 - DNA, 120 bp, Artificial Sequence
  ENSG00000182831_70 (sequence is synthesized)
tttttttgagactgagtgtcgctctatagcccaggctggagtgtagtgctcactgcgacttccgcctcctgggttcaaatgattctcgtgcctcagtctcccgagtagctgggattgtag

SEQ ID NO: 649041 - DNA, 89 bp, Artificial Sequence
  ENSG00000182831_71 (sequence is synthesized)
agagatggggtttcatcatgttggcgaatgccttagcctcactgcttgcccctaagtggtgggattgcaggtgtgagccactgtgctgg

SEQ ID NO: 649042 - DNA, 120 bp, Artificial Sequence
  ENSG00000182831_72 (sequence is synthesized)
ccctaagtggtgggattgcaggtgtgagccactgtgctggcctcaaatagtttttatcaaagctacttcaattagtggttagcaaggcttaaagactaattcagtgctttattttgacac

SEQ ID NO: 649043 - DNA, 120 bp, Artificial Sequence
  ENSG00000182831_73 (sequence is synthesized)
ttgttcgcaacatgttgctttttttcctgtgtcctatgggacctagtcatctgtatgttagattcacagaggaattaaagagataaacatgcatgtgctaaattgatttctgtcttgctt

SEQ ID NO: 649044 - DNA, 120 bp, Artificial Sequence
  ENSG00000182831_74 (sequence is synthesized)
tgttatcctataataatgttataaaataacattattataaatttcccaagagttgaattaataccaacaactggtaactcgtttttatgtaaacagcatacttgagaccagaaatcttct

SEQ ID NO: 649045 - DNA, 120 bp, Artificial Sequence
  ENSG00000182831_75 (sequence is synthesized)
ggatcactttgtggatctctgcctgccattctcattggtcctctgttcatcccttttctagagcttctccttaccttggcttctcttctgccacattggcctgcctgacctgtcctcagg

SEQ ID NO: 649046 - DNA, 120 bp, Artificial Sequence
  ENSG00000182831_76 (sequence is synthesized)
ccctgtcactgccctagattacgtttcccatgtcttcacttccaaatctggacctctcgtttagaccttctctcctgactgccagatggcatgtcccactgtcctccggtgtacatctcc

SEQ ID NO: 649047 - DNA, 120 bp, Artificial Sequence
  ENSG00000182831_77 (sequence is synthesized)
aaattgtcccacaggcatttatctcagatgaagtttcaggttggactcattcttctgccccaacagcagaatgactcattgagccattgagccattcagcacattctctatatggcagat

SEQ ID NO: 649048 - DNA, 120 bp, Artificial Sequence
  ENSG00000182831_78 (sequence is synthesized)
tcggtgctgtctctggaaatacataaacatagagcgattcctttttctgttgaggcaaaatatggatttggttaatttctattcacgtcatgaatgtggtatgtggaaggtcttctgaga

SEQ ID NO: 649049 - DNA, 120 bp, Artificial Sequence
  ENSG00000182831_79 (sequence is synthesized)
gcagaaagggatgtttcacagcacagcccggctgtgtggtgctcagggcaggccctctggaggaggtgagcctgggctcttggcctaatgtttcagctctcactttccagtcctgagctg

SEQ ID NO: 649050 - DNA, 120 bp, Artificial Sequence
  ENSG00000182831_80 (sequence is synthesized)
ttgttgccagtccatctttcatgagaccattggagtgatctttctggtcttgtcacttcatggtttaaagtttccctgggcctacacagtgaagtccaaattcagcatggtattacaaga

SEQ ID NO: 649051 - DNA, 120 bp, Artificial Sequence
  ENSG00000182831_81 (sequence is synthesized)
cccttatgatccagtcttaaccattggttaggtatcctacccatactgtttatctcttgaatacctctatgctctttgacaagtccagcccctacgtgttcatacctcacttctgtgaca

SEQ ID NO: 649052 - DNA, 120 bp, Artificial Sequence
  ENSG00000182831_82 (sequence is synthesized)
cagccttgcttcagggctcccaatctctgtagcctccctgaactgtgcatttgctctgctgcttgatttgtttctgtgactgttccattctcctcgggacacatagcagggaccttgtct

SEQ ID NO: 649053 - DNA, 120 bp, Artificial Sequence
  ENSG00000182831_83 (sequence is synthesized)
tggtccttttttttttggctttaacagaacatagcaaagaacctgacataggtgtagtctgagtttaccactggggttatcacagaggtctgctaagtgaatacaacacagtggggaccc

SEQ ID NO: 649054 - DNA, 120 bp, Artificial Sequence
  ENSG00000182831_84 (sequence is synthesized)
agctacaatcagggaataatgtaacctgtttgcctagggtgctacatggtaatcttgaattagaacaactgagacttccatgggaccttagggtgataaccattaaacctactctttcag

SEQ ID NO: 649055 - DNA, 120 bp, Artificial Sequence
  ENSG00000182831_85 (sequence is synthesized)
tgtttactttgtaaaagcatcacactaaggaggttgtcatttaatcctcacacctaccctgggttattaacactgttgatgaagaaagccttacttggctaagatatggagcaggttagt

SEQ ID NO: 649056 - DNA, 120 bp, Artificial Sequence
  ENSG00000182831_86 (sequence is synthesized)
aagtggtagaatagatactccagtcctgtctccaaaatgcaaatttttttttaattaaaaaaatttctaattttcaatatatttatttttgattttttattttctgtagagttggagttt

SEQ ID NO: 649057 - DNA, 120 bp, Artificial Sequence
  ENSG00000182831_87 (sequence is synthesized)
cgccatgttgtccaggctggtctcgaactcatgggtgcaagccataccccaacctcgaccttccgaagtgttgggaatactggcatgagccatgatgcctggcctcaaaatgcataccct

SEQ ID NO: 649058 - DNA, 120 bp, Artificial Sequence
  ENSG00000182831_88 (sequence is synthesized)
taaccactatgctctcacatttttagatgtgggatttctgtctacgacgtcgcccccactaagacctagggcttaggtgtcgaggtgggaaagatcttgaggcttttcttctcaaaatta

SEQ ID NO: 649059 - DNA, 120 bp, Artificial Sequence
  ENSG00000182831_89 (sequence is synthesized)
atcagaaacgatgtgaattttatatctctttctgaggttttccccataagctaatcgggattagtagacttaaaggtgaatgaccaactgtatccctggttcactggttaggaagagtac

SEQ ID NO: 649060 - DNA, 120 bp, Artificial Sequence
  ENSG00000182831_90 (sequence is synthesized)
atagtctttgtgtataggctattttcctcggtaaccttgggcaacatgcttgacttctccaagccagtctcctttgtgaaaggtgatatacttacaagacattatattaaatgagaaccc

SEQ ID NO: 649061 - DNA, 120 bp, Artificial Sequence
  ENSG00000182831_91 (sequence is synthesized)
aggcaggttacctaccctaccatgacactggaagtattctttgccttaagaaaaggagaattgctggttggttccaggtccggtgggtaccctcatttcccctgggcaattttactgtaa

SEQ ID NO: 649062 - DNA, 120 bp, Artificial Sequence
  ENSG00000182831_92 (sequence is synthesized)
aaatagaccaaggatctcaaggcccagtggcttttgccttctgggatacttttttacctccctgtttagtagtaagggtcacattttaaattgcagctatcacactggagggatcagatc

SEQ ID NO: 649063 - DNA, 120 bp, Artificial Sequence
  ENSG00000182831_93 (sequence is synthesized)
atttagaactttgactgcttaaatattactcttgctaagatcttgagcttgtctcatgttgacagactagtgaagttggttacgttgtctgtctcctcactggagggagagattcagagt

SEQ ID NO: 649064 - DNA, 120 bp, Artificial Sequence
  ENSG00000182831_94 (sequence is synthesized)
tgccctgtccaacccagtgctatctctggaaagggttggattgaaatctagtctgccttcattctgaggtataatcatgagggttaggtgaaagggtcccgagtgagaagatggcatggg

SEQ ID NO: 649065 - DNA, 120 bp, Artificial Sequence
  ENSG00000182831_95 (sequence is synthesized)
tcctagggtggggagcccgatgccaagtcagacttcactcggtatgtttattcaaagccccactttcactcgtagcatatcataggtggtctctgcaagttgctgaccctgattcagact

SEQ ID NO: 649066 - DNA, 120 bp, Artificial Sequence
  ENSG00000182831_96 (sequence is synthesized)
gttccataaaagtcagacacttggttttagttcccaaactgattttgatgacattcttgactgcagggcttggagttaaccccactgggcctgagttgtctctctgtaaagttacacatc

SEQ ID NO: 649067 - DNA, 120 bp, Artificial Sequence
  ENSG00000182831_97 (sequence is synthesized)
atttcagactcaaaggcctctagcatgcagggtctggtgtcataataggcaccaatgggaaccattactgtcattgccttttttggctttaatcttcccaattgtaagttcctttcatgt

SEQ ID NO: 649068 - DNA, 120 bp, Artificial Sequence
  ENSG00000182831_98 (sequence is synthesized)
ttaaaacaagtttaaaagacagggggacttaggcatgctcaggcagtctagcctttaatgtaagaatttcaaaacataaaggaaaaaaaacttttttttttaagcagtactttgtgagtt

SEQ ID NO: 649069 - DNA, 120 bp, Artificial Sequence
  ENSG00000182831_99 (sequence is synthesized)
acaagacagcagcagctccttagtgttgattgccgaggcctttttggtttgaaaactctgcttcctttgtgaatttggtgttaggagttcttattgttattctgcagcctttactattgt

SEQ ID NO: 649070 - DNA, 120 bp, Artificial Sequence
  ENSG00000182831_100 (sequence is synthesized)
cctttatttactgaacacagtgaataccaagcactgtttattagaggttaggagtaggggcaggtgattaaaaaaacaaaaaagctaataatctcctcaagcaatttctggcctaataga

SEQ ID NO: 649071 - DNA, 120 bp, Artificial Sequence
  ENSG00000182831_101 (sequence is synthesized)
attatagtagacagtgaagtatctaaacccagggaatcagattgaggcaccatgtccatcgccttgagaattaataggctgcatttctgggttctcctttttttttttttttttgcccaa

SEQ ID NO: 649072 - DNA, 120 bp, Artificial Sequence
  ENSG00000182831_102 (sequence is synthesized)
ctgagtctttctgtggacttacatggaacttcttattctcttaaatcattaagttacttgacaatattcttggatttggagaaactggatgtagggccgtatgaaaaaatcattcgaaat

SEQ ID NO: 649073 - DNA, 120 bp, Artificial Sequence
  ENSG00000182831_103 (sequence is synthesized)
cagatttaggggtataaggttggataggaatgttttagaaagaagaatgtaaggcagataactaatttgtcacatccaaagtataaaactgctactttttccctagaaaagggaagctca

SEQ ID NO: 649074 - DNA, 120 bp, Artificial Sequence
  ENSG00000182831_104 (sequence is synthesized)
ttttaggcagcctaaaccagtaagattttcttcctcctccaagtgcagatttttgtacctttcgtttgtcaaaacattctttggccctatgcatgccagagtgatatagaaaggaagtta

SEQ ID NO: 649075 - DNA, 120 bp, Artificial Sequence
  ENSG00000182831_105 (sequence is synthesized)
ccacatttttttgagaacaaatcactcctgataaaatttcttagacaattgataatcattttaagaagaaatttaattgtatttagctctgtgtctcgcccctttggtgtcactcttcta

SEQ ID NO: 649076 - DNA, 120 bp, Artificial Sequence
  ENSG00000182831_106 (sequence is synthesized)
cctcttccatcactatagctaaatatttagaagtatatcttgacacctagcacaaatgttttggttaagtatcttaaaactgatggatggtatggctggggcagcatggctcacgcctgt

SEQ ID NO: 649077 - DNA, 120 bp, Artificial Sequence
  ENSG00000182831_107 (sequence is synthesized)
gagcaaaactcagtctcaaaaaacaaaacaaaaacctgttggtatagtacgaaagaaacgtcttgcagttttctgttgcagagaattaattagaaccaacctgttggattatacacattc

SEQ ID NO: 649078 - DNA, 120 bp, Artificial Sequence
  ENSG00000182831_108 (sequence is synthesized)
acctttcagaatcctttcttctctgtggaaacccacactctcagcagtgtgtgggaacacagtagattcttaaggaatgcttgttgaatgttgcagtctgcatcttcttgaagtaacaga

SEQ ID NO: 649079 - DNA, 120 bp, Artificial Sequence
  ENSG00000182831_109 (sequence is synthesized)
actgttggtagctgtttaaaagtaaaatgtgtctaaagaccttttggaaattaagatgtaagagattaatgcaccaaagcagtctcttaattacttaaaatgaattatttcaaagaatct

SEQ ID NO: 649080 - DNA, 120 bp, Artificial Sequence
  ENSG00000182831_110 (sequence is synthesized)
ttaattgaattttctgtgaagtctggaatttgtaaattatgtccctttgttcaaaccagcccctgaaaagaacaattaaggcaattaagatagcattaaagttttcaatgaagttggcat

SEQ ID NO: 649081 - DNA, 120 bp, Artificial Sequence
  ENSG00000182831_111 (sequence is synthesized)
tttctgtgtattaagattagatgttagctgctgaagtttgtggaggtcggacataaagcttccaacatcagtaatgcaaaattgtcttgaacctgcgataaaattttgttggactttttt

SEQ ID NO: 649082 - DNA, 120 bp, Artificial Sequence
  ENSG00000182831_112 (sequence is synthesized)
ttcattgcagtgaaaagggccatgtagcatgcctcaaagccaggttactcagcctagtccttgtttaagcagttttgatattcattcaagttcaattttctcactgattttatgattaat

SEQ ID NO: 649083 - DNA, 120 bp, Artificial Sequence
  ENSG00000182831_113 (sequence is synthesized)
ttcttggaaaatttgaaagttttcaagaagtaaaaaattaatatcttgttatcccagtatatagagattaacttcagttcaatgtttggtgcattttcttctagtctttttttcaatgta

SEQ ID NO: 649084 - DNA, 120 bp, Artificial Sequence
  ENSG00000182831_114 (sequence is synthesized)
taaatattaaagttatttcatagttgagatcatactgcatatatgattactgtatcttgcttttttcattttaacgtcgtgagcaattttcccatgacattacaaactgtctttgaaaaa

SEQ ID NO: 649085 - DNA, 120 bp, Artificial Sequence
  ENSG00000182831_115 (sequence is synthesized)
tggaaaacatttggggctgtcagcataactgaaaatgttttcttggtgtgacacatgtatctttgtaattggtttgatttagtgtgctttatttcaataaaaattcagtattataattta

SEQ ID NO: 649086 - DNA, 120 bp, Artificial Sequence
  ENSG00000182831_116 (sequence is synthesized)
cagattggggtggggagtggtatctacttcaaattactgaaatcttcctagtagaattcctttttaaatgtttgaactcccctggtacatcttaaacacgacattgacactgcaagtgct

SEQ ID NO: 649087 - DNA, 120 bp, Artificial Sequence
  ENSG00000182831_117 (sequence is synthesized)
tggatgtcctggcacctcagaacacaactttgtgcaaaaggagtgctgtgcatctgaatagtgcaattcatttccaatgcaagaatgccagtttcttagggcccccggtcaggatattac

SEQ ID NO: 649088 - DNA, 120 bp, Artificial Sequence
  ENSG00000182831_118 (sequence is synthesized)
ccacttggtttaagttgtgatttcaaatcccattttctatgggagatacactggtggaacaaatctgcagagggccctgcacctgcgctggtggatcaacggtgtcttctcacctccagg

SEQ ID NO: 649089 - DNA, 120 bp, Artificial Sequence
  ENSG00000182831_119 (sequence is synthesized)
gctagctgccttgccttccctcgtggggcttaagtggctgggaagcagatagacagtgtagatgaagtcctgggccactggctgctggactgaggcagtgagatgactgggctggcattt

SEQ ID NO: 649090 - DNA, 120 bp, Artificial Sequence
  ENSG00000182831_120 (sequence is synthesized)
gttctttctctgcctgtgtgtgacctctaactatgtgcctggaaactgaattacatgtaattaatgctgcaaacaggattttcttattgcctaagcatgaacttggtatgaaaataatag

SEQ ID NO: 649091 - DNA, 120 bp, Artificial Sequence
  ENSG00000182831_121 (sequence is synthesized)
ttaataatttactatgtaacttggattcttataacctggactgtaagtttgttttagctccagtgggagtttccttttcaaagtatgatgaaaccatcctcatcttttctacccctggac

SEQ ID NO: 649092 - DNA, 120 bp, Artificial Sequence
  ENSG00000182831_122 (sequence is synthesized)
taatcatttaaaatggatacagacactttaaaactgctgagtttatcttgtgttaagcaattaagacttctctgtctaatcatgctacttgttctgcttttgtcaattgatactctcata

SEQ ID NO: 649093 - DNA, 120 bp, Artificial Sequence
  ENSG00000182831_123 (sequence is synthesized)
ttgttctgcttttgtcaattgatactctcatagcccttttgaaaaagtatgtttttgtagaaattaagttgtatgccctcaggacgtacaacttggttttttttttttgttttttttgtt

SEQ ID NO: 649094 - DNA, 120 bp, Artificial Sequence
  ENSG00000182831_124 (sequence is synthesized)
tttagatttttctgtacttgtataggtctgattgtttatgtggcttagctaaggtttcctaaagcatcttctagtagctgtcattggtttgtaaaataaaatttgggctgtcaaaatgca

SEQ ID NO: 649095 - DNA, 120 bp, Artificial Sequence
  ENSG00000182836_0 (sequence is synthesized)
gtaaactctagcggggctagagcaaacattggattagcggcagcagcctgccagcctgcccgaggagtgctgggaccagcgcgctgcacgccgactggcacgatggcctcgtctcagggg

SEQ ID NO: 649096 - DNA, 120 bp, Artificial Sequence
  ENSG00000182836_1 (sequence is synthesized)
aaaaacgagctgaaattagccgactggatggcaactctgccggagagcatgcacagcatccccctcaccaatttagccattccagggtctcatgattccttcagcttctacattgatgaa

SEQ ID NO: 649097 - DNA, 120 bp, Artificial Sequence
  ENSG00000182836_2 (sequence is synthesized)
gcctctccagtaggtcctgagcagccagaaactgtccagaattttgtctctgtgtttggaactgtggccaaaaagctcatgcggaaatggttagccactcagacaatgaattttactggc

SEQ ID NO: 649098 - DNA, 120 bp, Artificial Sequence
  ENSG00000182836_3 (sequence is synthesized)
cagctaggagctggaattcgttattttgatcttcgaatttccaccaagcccagagaccccgacaatgaactctattttgctcatggtttgttcagtgccaaagtcaatgaaggccttgag

SEQ ID NO: 649099 - DNA, 120 bp, Artificial Sequence
  ENSG00000182836_4 (sequence is synthesized)
gagatcaatgcattcctcacagatcaccataaggaggtagtgttcttggacttcaaccacttttatgggatgcagaaatatcaccatgaaaaactggtccaaatgctgaaagacatctat

SEQ ID NO: 649100 - DNA, 120 bp, Artificial Sequence
  ENSG00000182836_5 (sequence is synthesized)
ggaaataaaatgtgcccagcgatttttgcccaggaagttagtttaaagtacctgtgggagaaggactatcaagtgctggtcttctaccatagtccagtggctctggaagtgccctttctc

SEQ ID NO: 649101 - DNA, 120 bp, Artificial Sequence
  ENSG00000182836_6 (sequence is synthesized)
tggcctgggcagatgatgccagcaccctgggccaacaccacagaccccgagaaactgatccagtttcttcaagcatccatcactgagagaagaaagaagggatcgttttttatatctcag

SEQ ID NO: 649102 - DNA, 120 bp, Artificial Sequence
  ENSG00000182836_7 (sequence is synthesized)
gtggtgctgacccccaaagctagcactgtggtcaaaggggtggcaagtggcctcagagaaacaatcacagaaagagctcttcctgccatgatgcagtgggtccgcacgcagaagccagga

SEQ ID NO: 649103 - DNA, 120 bp, Artificial Sequence
  ENSG00000182836_8 (sequence is synthesized)
gagagtggcatcaatattgtcactgccgattttgtagaacttggtgactttatcagcactgtcataaagctcaactatgtctttgatgaaggagaagccaacacttgatagcactacttg

SEQ ID NO: 649104 - DNA, 120 bp, Artificial Sequence
  ENSG00000182836_9 (sequence is synthesized)
gagtttccatgaataagatggagaaagctcattgtattagggcatactatctgtaaacactctgatcttcctattccactgagtctctgaagggaatagggctggtagtgggtgggaaaa

SEQ ID NO: 649105 - DNA, 120 bp, Artificial Sequence
  ENSG00000182836_10 (sequence is synthesized)
ggggaaaaactgtttcttcagtgattacaatcatactcttcattactataaatatttcatttcccatttgatgagcaaaatctacttctagtgttaggaataaaaaaaaaagaccagtaa

SEQ ID NO: 649106 - DNA, 120 bp, Artificial Sequence
  ENSG00000182836_11 (sequence is synthesized)
ctttgtttttcaaaattagtctttgtaacatagaattcatgagtgtttacttgattaggttctctatttccagcctatgactcctacgctgtctataccctgcaacctttctgctccctc

SEQ ID NO: 649107 - DNA, 120 bp, Artificial Sequence
  ENSG00000182836_12 (sequence is synthesized)
tcttgctcgctctttttaatcagatgctgtatgggaatcaaaacaattgaatgcccaacattttgtgtattacattgttgtcttaaaacttactagttttgtgggacttgttataatgct

SEQ ID NO: 649108 - DNA, 120 bp, Artificial Sequence
  ENSG00000182836_13 (sequence is synthesized)
ctatagtcatccacagttgggcaatcatagctaatttttggtcatagaaaatctgcatcaaatcagtttccatgcatcagtaatattgaaggtcataatcagtgatttttgttatatgaa

SEQ ID NO: 649109 - DNA, 120 bp, Artificial Sequence
  ENSG00000182836_14 (sequence is synthesized)
aataatagtgtttcacagtatttctatttaaggcagctataaatataggagaaaaatgtttttggagagctgtgaatgccaatttcagagggaaaaatggttgaggggtgaaagagatgt

SEQ ID NO: 649110 - DNA, 120 bp, Artificial Sequence
  ENSG00000182836_15 (sequence is synthesized)
atggcattttaatttggcaatctcttaaataatattgccctgcaagtacccagtaaatggtaaggtacaagtgtgttaaaattgaaaactctgaaaataactctttaaaaagccctctta

SEQ ID NO: 649111 - DNA, 120 bp, Artificial Sequence
  ENSG00000182836_16 (sequence is synthesized)
atgatgctcttgatgaaagaaaaagacagaaggaaggaagaagaaaaagactgcaagctttcctgccaatttgggattttcaaatatttaattctaaattccagattttaaggaagattt

SEQ ID NO: 649112 - DNA, 120 bp, Artificial Sequence
  ENSG00000182836_17 (sequence is synthesized)
ttcaagaaactgcaagtttttgacttgaaggaaagaaagaggaaggctggtagaagcagttagagcaatgtgtttgaaattatgtccatgaaatcacagggatctctgaaatatctttag

SEQ ID NO: 649113 - DNA, 120 bp, Artificial Sequence
  ENSG00000182836_18 (sequence is synthesized)
gaaacttgaaatttatgaggtctgaatggacttgtttaaaattggctctgactcctcacttctgagtttcatcctatccgagggatgagattaaggcagaggcaaaagtttcacacaaag

SEQ ID NO: 649114 - DNA, 120 bp, Artificial Sequence
  ENSG00000182836_19 (sequence is synthesized)
tttctgcaacctaacgtttaatagtccgggtctacagggaagaacaatgacacagcttgagcgttacttcctccttcgtgtcattgtgatatttgacaactctaaaaaataaaaaaaaaa

SEQ ID NO: 649115 - DNA, 120 bp, Artificial Sequence
  ENSG00000182836_20 (sequence is synthesized)
aacttagagcacaataatccttgcctatgtacttcacaggaatattgtgaggtgtttataaaattataaaatttgatgaaattcttacaattattaattattttattttcatgtttagaa

SEQ ID NO: 649116 - DNA, 120 bp, Artificial Sequence
  ENSG00000182836_21 (sequence is synthesized)
ataatcacaccccaatagtttcctaggataatacagtccatgcaaagtagggtcatagagaaataaaagcatgccctcagcttttaatgaacttaaatgtagcacatatggcttaatctc

SEQ ID NO: 649117 - DNA, 120 bp, Artificial Sequence
  ENSG00000182836_22 (sequence is synthesized)
ttagacttagataagggagttcaattcaaaaccatatatgtcaagaccacaaataatcaagagttgatttcaagattataaatactcatgatcagaaaatagtacttattagcaattaaa

SEQ ID NO: 649118 - DNA, 120 bp, Artificial Sequence
  ENSG00000182836_23 (sequence is synthesized)
gggaggaaaagaaattgtttatactgaagagaatgtttatgaggagtgtgtatgtacctgtggtataccaaatagcatacatgtacacacaaaaatgtgtgtatacatttgggttgtgtg

SEQ ID NO: 649119 - DNA, 120 bp, Artificial Sequence
  ENSG00000182836_24 (sequence is synthesized)
tatacatcttgccatatacaatatacaaacatatgcccattcctgtgatagcatacaaattcaaacatacagaaacacacacagatatggacacagtacaattcttcttttcaaatgaag

SEQ ID NO: 649120 - DNA, 120 bp, Artificial Sequence
  ENSG00000182836_25 (sequence is synthesized)
acattgataatattaaataatttaattttaagactgaaacccttaatattgtgtgaaaaagagtaataaaacctttgaaagtagagtagatgatcacatcaaagtatttttgtaaaagaa

SEQ ID NO: 649121 - DNA, 120 bp, Artificial Sequence
  ENSG00000182836_26 (sequence is synthesized)
ttctagtgtaggacttaattatttttaaaatatatttcttctcttctttccattttcccttcccttgtagttttattatctttctgtcttttacacctgctctttatgtgaaaatgtata

SEQ ID NO: 649122 - DNA, 120 bp, Artificial Sequence
  ENSG00000182836_27 (sequence is synthesized)
tgaatccttttaaaatgattaggattattgaaatgtatgtcccgtaaatttggtttttgggcagactttctctctaactggctattcattcatccttcaggaggatcttagccaagaata

SEQ ID NO: 649123 - DNA, 120 bp, Artificial Sequence
  ENSG00000182836_28 (sequence is synthesized)
tttgcaatgacacatgaatttaattttataaatataatggaaaacagatttttcatcatatcatgaataaaatatagaggtaactatgttgtattttcttgaacctagatactttctcat

SEQ ID NO: 649124 - DNA, 120 bp, Artificial Sequence
  ENSG00000182836_29 (sequence is synthesized)
agtgtttgcttagaattaactttgtcctatttgtcaactgggttctggaaaaaaacaaacatgatgaagcttttgaataattgtgcagttttttaactagggaaagctttgtactgctgc

SEQ ID NO: 649125 - DNA, 120 bp, Artificial Sequence
  ENSG00000182836_30 (sequence is synthesized)
taatgatatgcacccagaaaccttgttagacaaaaggcagtttcaagccaatgctatggtttccatgtggacatacagtgcctatgtagcaggcacttagagtaaatggacttgccttaa

SEQ ID NO: 649126 - DNA, 120 bp, Artificial Sequence
  ENSG00000182836_31 (sequence is synthesized)
gtgcctttgactgtcttctatccattagttctgccctggagcacactggggaagcaggctgcgggccttccaaaagtaaaaaatggtgatatgcaatcgaagcttatccttagcctatgc

SEQ ID NO: 649127 - DNA, 120 bp, Artificial Sequence
  ENSG00000182836_32 (sequence is synthesized)
acatttgtctcagctgggcattgtcttttcagagagcttgtagcacaagggctacacatgggcgccaagatggtggtagatacaccttggtgcactttttgttttacttgtttcttaaga

SEQ ID NO: 649128 - DNA, 120 bp, Artificial Sequence
  ENSG00000182836_33 (sequence is synthesized)
ctatttcacaagtcctgtgaggcaaaaaaacaaaacaaaacaaaacaaccaaacaaatacaatctaacttttacccaatctacagcaggaaatcaaaggagtgggtggaatgagagaaaa

SEQ ID NO: 649129 - DNA, 120 bp, Artificial Sequence
  ENSG00000182836_34 (sequence is synthesized)
tatgcaaagagatcatttttaagtttgatttcctgtctgtaattttcaaggactaatatagcaaatttttcttctgccattatcatttatgtctccctatttaccacacaataatgtaaa

SEQ ID NO: 649130 - DNA, 120 bp, Artificial Sequence
  ENSG00000182836_35 (sequence is synthesized)
tgcagagaatgaggaggcatcttttaaaagccttaggatattctatatgatgacctcaatattgactttcagccatactgggaaaacttacttttcatggagtgccacctaacagtgaat

SEQ ID NO: 649131 - DNA, 120 bp, Artificial Sequence
  ENSG00000182836_36 (sequence is synthesized)
gtattagagtataaaatgtttgccatgtatacacctgtatgtgcacatacacacattacacacacacacagaatgcacatttcacacacatatacttattattcaagttgaaactgcact

SEQ ID NO: 649132 - DNA, 120 bp, Artificial Sequence
  ENSG00000182836_37 (sequence is synthesized)
ctaatcaatctgagtctattgctgtttcaactcttaaaatcaatatctcctacattagtagatataaacataattcaaatatttaaatatttaagaggagaaaagtaactagaaaaccaa

SEQ ID NO: 649133 - DNA, 120 bp, Artificial Sequence
  ENSG00000182836_38 (sequence is synthesized)
tgaaaagtgaggccatcagaaatagaaaatgcctggcacgaacagtctatctaaattctcaatttcacttcaaattagagaatccataatggactagaatataaattacaaacacataca

SEQ ID NO: 649134 - DNA, 120 bp, Artificial Sequence
  ENSG00000182836_39 (sequence is synthesized)
cacatcttcacttaaagttgttttaagttctttgaagttctgacatgtttttagccagggttatttgttcaggttcttccttgttaggattccagactggaaagttggaagtctcaggaa

SEQ ID NO: 649135 - DNA, 120 bp, Artificial Sequence
  ENSG00000182836_40 (sequence is synthesized)
atgcatgtttccatgagttttttagtttcacagttttacagatccaacgacacaatcttttaatctttggtcactcaaccaaacaggagttccgtaggcagagtgctcactttgaattgc

SEQ ID NO: 649136 - DNA, 120 bp, Artificial Sequence
  ENSG00000182836_41 (sequence is synthesized)
taatagaaaataatgcacagtgtcctcaggatatgctaaacaaggtttttaagagcattttattttacagcactttagtcttttcagctagatttcagtgacactatggtgtaaatgcta

SEQ ID NO: 649137 - DNA, 120 bp, Artificial Sequence
  ENSG00000182836_42 (sequence is synthesized)
tatctgccataacttattggtggctcctgtgttacatacagttttaaataatgctctaaattgtttgttttcccaatgataatgataaagtgttctgtagaatttgtaaaacatgtcaat

SEQ ID NO: 649138 - DNA, 120 bp, Artificial Sequence
  ENSG00000182836_43 (sequence is synthesized)
tgaatctgttgaaaattgtgtaattgttatttcaattgtgatactattttgtaggtaatagttttaaacgtatatttgtatgagtcaaaagtatgtgcttgtatgtggtatgtgtgtgta

SEQ ID NO: 649139 - DNA, 120 bp, Artificial Sequence
  ENSG00000182836_44 (sequence is synthesized)
agtatataatatcttatcaaaaatcaaacttatcctaaagaaaaagggcacattgtgaccagccttaatttattaacacttttttgttgtttttgcaatttggatttaaaattgaaacag

SEQ ID NO: 649140 - DNA, 120 bp, Artificial Sequence
  ENSG00000182836_45 (sequence is synthesized)
aaattaagtttttgttaaaaatggtgtcttttaattttgtgaggaatgggctttagaacctatctgagttcccacaagcaaactgtccaccttgtgaggtaccccattgcttttcgtaat

SEQ ID NO: 649141 - DNA, 120 bp, Artificial Sequence
  ENSG00000182836_46 (sequence is synthesized)
aatcaaacatcaattcatatattaacttcattttcatacagactaatttgttttcatcaacaatagaaccagtacacctttaaagttgaccttcccaacatggcacccatttttctttaa

SEQ ID NO: 649142 - DNA, 120 bp, Artificial Sequence
  ENSG00000182836_47 (sequence is synthesized)
tgataaattttccatgaaaaattgtttctccaaaccattactttttaaaattcaatcttcccaagtaagatgaactgccttggtgttaggagagcttttaaaggcccatccatactaggt

SEQ ID NO: 649143 - DNA, 120 bp, Artificial Sequence
  ENSG00000182836_48 (sequence is synthesized)
ggttccaacatggttctcttctcgagaaaacaagcatgcaacccacacacttttctggtctgccccacgtgtagaattagtctagcaatagaaaactcatgactgacaaggatctacaca

SEQ ID NO: 649144 - DNA, 120 bp, Artificial Sequence
  ENSG00000182836_49 (sequence is synthesized)
tgtggtcatgcttgaagcaaaaattctgtgaccttctttgggcttggatctgattacagaatattaattaactttcttatttcctttctttctccatccttagttattccttttcaatat

SEQ ID NO: 649145 - DNA, 120 bp, Artificial Sequence
  ENSG00000182836_50 (sequence is synthesized)
ttagagttgccaggtaaaatacaggatatccagtgaaatttaaatttcagataaacagtatttctttagcatatttctcatatatttaatcagacatactttcactttaaaaaaagttta

SEQ ID NO: 649146 - DNA, 120 bp, Artificial Sequence
  ENSG00000182836_51 (sequence is synthesized)
tctgaaattcaaatgtaactgggtatgtcctatatattttttcctaaatctcacaattctatccacactgcctttctatctttttcagctgggctatctataaggggcgagatctacctc

SEQ ID NO: 649147 - DNA, 120 bp, Artificial Sequence
  ENSG00000182836_52 (sequence is synthesized)
cctccatacccttgtgttcagacaccttatgaatatctgcagtcataatgtccttcaagaaagaaaacattggtcagctctaggtcctgcaaatgctttttgaaggacgaactcaaatac

SEQ ID NO: 649148 - DNA, 120 bp, Artificial Sequence
  ENSG00000182836_53 (sequence is synthesized)
agatgggataatcaagtaaatatcttcataggatcaatgccaccatgttcaacacttccctttgccagcctgttgtgaggtccaagtttccccattaatcccttatatagcatttcccag

SEQ ID NO: 649149 - DNA, 120 bp, Artificial Sequence
  ENSG00000182836_54 (sequence is synthesized)
taactgggacaaccaaaaacacaccgacatattagaaatgctcctgaaaagtggcaacaccgcctaactcagtaccaggacctcttttaaattcaatttcttttttctttcagagagata

SEQ ID NO: 649150 - DNA, 120 bp, Artificial Sequence
  ENSG00000182836_55 (sequence is synthesized)
acaaacgaattcattatttcccccattcacatcttaccacaaattatttttatcaggttaaaactggtcatctacggaattgtagaaaggtgacataggaactgtcttcactgctggaag

SEQ ID NO: 649151 - DNA, 120 bp, Artificial Sequence
  ENSG00000182836_56 (sequence is synthesized)
aataaaagagtctgaggtatagacactgccctggtgacaccttctcagaacattgttgggggacaggggaggcaggcgcaagtaggggatagaatctgaccctgacatgcagctatcacc

SEQ ID NO: 649152 - DNA, 120 bp, Artificial Sequence
  ENSG00000182836_57 (sequence is synthesized)
tggcagagagactcgtcaaagcaaattataacgaccagtactatttttttttggaattgaaaacccaagaagccctaaaataagaacagtgagatcaaaggctggtttctaaaacaatgc

SEQ ID NO: 649153 - DNA, 120 bp, Artificial Sequence
  ENSG00000182836_58 (sequence is synthesized)
agaaaatagaaccatgttggaattcctaaattctagctttcaaatactactgtttccaacagtgaatccttgacagagactgaatgcagatggaattttgaaacattttcagtagctacc

SEQ ID NO: 649154 - DNA, 120 bp, Artificial Sequence
  ENSG00000182836_59 (sequence is synthesized)
tcctctcctgaaattcctataagtggcagaggaaaatccaaatcctttaatataacatgtccatctcatgactcctgcttacacacatttgtgttgatttgcttcatttctggaggatgg

SEQ ID NO: 649155 - DNA, 120 bp, Artificial Sequence
  ENSG00000182836_60 (sequence is synthesized)
gaatttgcagagctggtgacatttccttcattagacaccagaaattcaccagagagagacagatctgtgccttctctttttaggatctggttattgatactttaataaatgtggtgtaaa

SEQ ID NO: 649156 - DNA, 120 bp, Artificial Sequence
  ENSG00000182836_61 (sequence is synthesized)
gaaaatccatggctacagtctgtatagaaaatgtgaattttttaaataagattgtgttcttaatgtaaaaaataaaagtttatttgtattcagtgaaatgcctaataaagtcctggtacc

SEQ ID NO: 649157 - DNA, 120 bp, Artificial Sequence
  ENSG00000182836_62 (sequence is synthesized)
ggaaggaaggaaggaaggaaaggaagaaaggaagggagggaggaagggagggaagaagggagggaaggacagaaggaaggacgggaggaaggaaggaagggaggaaggaaggaaggaaga

SEQ ID NO: 649158 - DNA, 120 bp, Artificial Sequence
  ENSG00000182853_0 (sequence is synthesized)
agacgctacaggatggagcggggcgcaggagccaagctgctgccgctgctgctgcttctgcgggcgactggtttcacatgtgcacagacagatggccggaacggctacacggcggtcatc

SEQ ID NO: 649159 - DNA, 120 bp, Artificial Sequence
  ENSG00000182853_1 (sequence is synthesized)
gaagtgaccagcgggggtccctggggcgactgggcctggcctgagatgtgtcccgatggattcttcgccagcgggttctcgctcaaggtggagcctccccaaggcattcctggcgacgac

SEQ ID NO: 649160 - DNA, 120 bp, Artificial Sequence
  ENSG00000182853_2 (sequence is synthesized)
tgagccgctgtggtgtcgcggcggcgcctacctagtggctttctcgcttcgcgtggaggcacccacgaccctcggtgacaacacagcagcgaacaacgtgcgcttccgctgttcagacgg

SEQ ID NO: 649161 - DNA, 120 bp, Artificial Sequence
  ENSG00000182853_3 (sequence is synthesized)
cgaggaactgcaggggcctgggctgagctggggagactttggagactggagtgaccattgccccaagggcgcgtgcggcctgcagaccaagatccagggacctagaggcctcggcgatga

SEQ ID NO: 649162 - DNA, 120 bp, Artificial Sequence
  ENSG00000182853_4 (sequence is synthesized)
cactgcgctgaacgacgcgcgcttattctgctgccgcagttgaacggcgccgccgccgccgctctctcccgggccaggaggctagtcccacctcttgctattaaagcttctctgagttga

SEQ ID NO: 649163 - DNA, 120 bp, Artificial Sequence
  ENSG00000182854_0 (sequence is synthesized)
gtaaggatggcatgaagttcacaatgggagcatgataaactagataaacttcagctgcaagaaagactcaggtaagtaacatgaaaactgatcttggagtctgaggcaatgaatggaatg

SEQ ID NO: 649164 - DNA, 120 bp, Artificial Sequence
  ENSG00000182854_1 (sequence is synthesized)
aatcactctgtggtatcagaatttgtattcatgggactcaccaactcacgggagattcagcttctactttttgttttctctttgttgttctactttgcgagcatgatgggaaaccttgtc

SEQ ID NO: 649165 - DNA, 120 bp, Artificial Sequence
  ENSG00000182854_2 (sequence is synthesized)
attgtattcactgtaaccatggatgctcatctgcactcccccatgtatttcctcctggctaacctctcaatcattgatatggcattttgctcaattacagcccctaagatgatttgtgat

SEQ ID NO: 649166 - DNA, 120 bp, Artificial Sequence
  ENSG00000182854_3 (sequence is synthesized)
taagatgatttgtgatattttcaagaagcacaaggccatctcctttcggggatgtattactcagatcttctttagccatgctcttgggggcactgagatggtgctgctcatagccatggc

SEQ ID NO: 649167 - DNA, 120 bp, Artificial Sequence
  ENSG00000182854_4 (sequence is synthesized)
gccatatgtaaacctctccactacctgaccatcatgagcccaagaatgtgtctatactttttagccacttcctctatcattggccttatccactcattggtccaattagtttttgtggta

SEQ ID NO: 649168 - DNA, 120 bp, Artificial Sequence
  ENSG00000182854_5 (sequence is synthesized)
gatttacctttttgtggtcctaatatctttgacagtttttactgtgatctccctcggctcctcagacttgcctgtaccaacacccaagaactggagttcatggtcactgtcaatagtgga

SEQ ID NO: 649169 - DNA, 120 bp, Artificial Sequence
  ENSG00000182854_6 (sequence is synthesized)
ctcatttctgtgggctcctttgtcttgctggtaatttcctacatcttcattctgttcactgtttggaaacattcttctggtggtctagccaaggccctctctaccctgtcagctcatgtc

SEQ ID NO: 649170 - DNA, 120 bp, Artificial Sequence
  ENSG00000182854_7 (sequence is synthesized)
actgtggtcatcttgttctttgggccactgatgtttttctacacatggccttctcccacatcacacctggataaatatcttgctatttttgatgcatttattactccttttctgaatcca

SEQ ID NO: 649171 - DNA, 120 bp, Artificial Sequence
  ENSG00000182854_8 (sequence is synthesized)
ttttgtaaatggcttggctgtcaagatgtgtaactatggattactcctcatgctgattgcataaaagaaactgcaatttcagagaaatactgaagactcaggccatactatatgcctgaa

SEQ ID NO: 649172 - DNA, 120 bp, Artificial Sequence
  ENSG00000182854_9 (sequence is synthesized)
aatttatgaaatcatggtaacaatttcaccattaaattagaagtgatgttatcctttggcacagtgtgcatcaaagtgctaaatattaaatcttaatgtcttttgtaacctaccactttg

SEQ ID NO: 649173 - DNA, 120 bp, Artificial Sequence
  ENSG00000182854_10 (sequence is synthesized)
aaagaccttgttctaggtgagtgccatgtaattgaacaaataacaatactatgtcttttattttttctactggacagattattctattgatagacaaactacacattcaatctgtttacc

SEQ ID NO: 649174 - DNA, 120 bp, Artificial Sequence
  ENSG00000182854_11 (sequence is synthesized)
ctcactgcaacctctgcctctccggttcaagggttcgagtaattctcctgcctcagcctcctgagggctgggattacaggcgcccatcacaacccctggctaatttttgtatttttagta

SEQ ID NO: 649175 - DNA, 63 bp, Artificial Sequence
  ENSG00000182854_12 (sequence is synthesized)
gtttagtatctagctctcttgattttaattctttttgttcctaaagtgtttgctttctattgc

SEQ ID NO: 649176 - DNA, 120 bp, Artificial Sequence
  ENSG00000182854_13 (sequence is synthesized)
tttaattctttttgttcctaaagtgtttgctttctattgctccagtctctacatatttttgccaccttatcaggcttctttggccatctacaaaattgttagtcctatatttagaatatt

SEQ ID NO: 649177 - DNA, 120 bp, Artificial Sequence
  ENSG00000182854_14 (sequence is synthesized)
caaatttaaagttagagtggattaccaacaccatctgttccaatcccctcaaattacacgtactaaaatccaagaattgagcagtgactagtttgcccaaaggcacatagctggaaacca

SEQ ID NO: 649178 - DNA, 120 bp, Artificial Sequence
  ENSG00000182854_15 (sequence is synthesized)
tcaaagagagccaggcaccagaaaccatgactctgattgctaggtcagtgccctttcactttcagatcaattttgtttttgatttgatgttcatattccactcttccatctttatcattt

SEQ ID NO: 649179 - DNA, 120 bp, Artificial Sequence
  ENSG00000182858_0 (sequence is synthesized)
atctttactcagggcacagagggtctctgcggccgtagcggccggggctgcggtagccactttagatttgggcaaggactttagattcgggctctgttctgtttccgccgtcctgcttcc

SEQ ID NO: 649180 - DNA, 120 bp, Artificial Sequence
  ENSG00000182858_1 (sequence is synthesized)
tgccgaggctggcccaggcagccgcgcttcgaaggacgccgccgggagctgcggagcatgcgtggagtggcagtgctaacggctggtgtctcgcactgttggcctgtgaaggtacgtgaa

SEQ ID NO: 649181 - DNA, 120 bp, Artificial Sequence
  ENSG00000182858_2 (sequence is synthesized)
gctgaaagcctggaatggctggaaaggggtcatcaggcaggcggcccctgctgctggggctgctggtggccgtagccactgtccacctggtcatctgtccctacaccaaagtggaggaga

SEQ ID NO: 649182 - DNA, 120 bp, Artificial Sequence
  ENSG00000182858_3 (sequence is synthesized)
gcttcaacctgcaggccacacatgacctgctctaccactggcaagacctggagcagtacgaccatcttgagttccccggagtcgtccccaggacgttcctcgggccagtggtgatcgcag

SEQ ID NO: 649183 - DNA, 120 bp, Artificial Sequence
  ENSG00000182858_4 (sequence is synthesized)
tgttctccagccccgcggtttacgtgctttcgctgttagaaatgtccaagttttactctcagctaatagttagaggagtgcttggactcggcgtgatttttggactctggacgttacaaa

SEQ ID NO: 649184 - DNA, 120 bp, Artificial Sequence
  ENSG00000182858_5 (sequence is synthesized)
aggaagtgagacggcacttcggggccatggtggccaccatgttctgctgggtgacggccatgcagttccacctgatgttctactgcacgcggacactgcccaatgtgctggccctgcctg

SEQ ID NO: 649185 - DNA, 120 bp, Artificial Sequence
  ENSG00000182858_6 (sequence is synthesized)
tagtcctgctggccctcgcggcctggctgcggcacgagtgggcccgcttcatctggctgtcagccttcgccatcatcgtgttcagggtggagctgtgcctgttcctgggcctcctgctgc

SEQ ID NO: 649186 - DNA, 120 bp, Artificial Sequence
  ENSG00000182858_7 (sequence is synthesized)
tgctggccttgggcaaccgaaaggtttctgtagtcagagcccttcgccacgccgtcccggcagggatcctctgtttaggactgacggttgctgtggactcttatttttggcggcagctca

SEQ ID NO: 649187 - DNA, 120 bp, Artificial Sequence
  ENSG00000182858_8 (sequence is synthesized)
cttggccggaaggaaaggtgctttggtacaacactgtcctgaacaaaagctccaactgggggacctccccgctgctgtggtacttctactcagccctgccccgcggcctgggctgcagcc

SEQ ID NO: 649188 - DNA, 120 bp, Artificial Sequence
  ENSG00000182858_9 (sequence is synthesized)
tgctcttcatccccctgggcttggtagacagaaggacgcacgcgccgacggtgctggcactgggcttcatggcactctactccctcctgccacacaaggagctacgcttcatcatctatg

SEQ ID NO: 649189 - DNA, 120 bp, Artificial Sequence
  ENSG00000182858_10 (sequence is synthesized)
ccttccccatgctcaacatcacggctgccagaggctgctcctacctgctgaataactataaaaagtcttggctgtacaaagcggggtctctgcttgtgatcggacacctcgtggtgaatg

SEQ ID NO: 649190 - DNA, 120 bp, Artificial Sequence
  ENSG00000182858_11 (sequence is synthesized)
ccgcctactcagccacggccctgtatgtgtcccatttcaactacccaggtggcgtcgcaatgcagaggctgcaccagctggtgcccccccagacagacgtccttctgcacattgacgtgg

SEQ ID NO: 649191 - DNA, 120 bp, Artificial Sequence
  ENSG00000182858_12 (sequence is synthesized)
cagccgcccagacaggtgtgtctcggtttctccaagtcaacagcgcctggaggtacgacaagagggaggatgtgcagccggggacaggcatgctggcatacacacacatcctcatggagg

SEQ ID NO: 649192 - DNA, 120 bp, Artificial Sequence
  ENSG00000182858_13 (sequence is synthesized)
cggcccctgggctcctggccctctacagggacacacaccgggtcctggccagcgtcgtggggaccacaggtgtgagtctgaacctgacccaactgccccccttcaacgtccacctgcaga

SEQ ID NO: 649193 - DNA, 120 bp, Artificial Sequence
  ENSG00000182858_14 (sequence is synthesized)
caaagctggtgcttctggagaggctcccccggccgtcctgagggggaccaggcagccctcagcagccacaggccttccaggagctgttatcactaccagtttctggcacaattccagcac

SEQ ID NO: 649194 - DNA, 120 bp, Artificial Sequence
  ENSG00000182858_15 (sequence is synthesized)
aattatgacaattcagagaagcaagtcaaaggactgggcacctgcctctgacagacaccagaccaggtccagggcctcctccacagcctcagctggggctctcagcaccaaagaacgagg

SEQ ID NO: 649195 - DNA, 120 bp, Artificial Sequence
  ENSG00000182858_16 (sequence is synthesized)
ggcccaggtcttgttggcaccccgggagccactgcccagggtgatggtggccagctcagggcttcctgcgggtgactgtcgcccagaccaggtgccattcatgactaatcaggagcagcg

SEQ ID NO: 649196 - DNA, 120 bp, Artificial Sequence
  ENSG00000182858_17 (sequence is synthesized)
ggctcacccaggcacctgtctgccaggaggccacgtgtgtcctgcccacccagggggagctgtattttggcagcaccccacgcttgctgcccgagggcctcttggggcacctaagacagc

SEQ ID NO: 649197 - DNA, 120 bp, Artificial Sequence
  ENSG00000182858_18 (sequence is synthesized)
accccctctcaggggagaccatggtggccccggccgcacccccccaccctggtgccaccactgcaacttttgtattcacaggcatcccatctccatcacagataaaatcttaggagataa

SEQ ID NO: 649198 - DNA, 120 bp, Artificial Sequence
  ENSG00000182858_19 (sequence is synthesized)
acacattcaaaaaggaatgagataaaaagaataaggcaataaatgttgattggaacctctcaagattacagaaaataatgagaatgaaattttaaaaatgtttcctatgtgatagcttat

SEQ ID NO: 649199 - DNA, 120 bp, Artificial Sequence
  ENSG00000182858_20 (sequence is synthesized)
cacaggtgactattccaggtgttatggtaaagggacagcttggtgctgtcagcctcactgaccatgcatttataaagcaccaaagtgcgtgtgatgctgctgggcactggagatgggacc

SEQ ID NO: 649200 - DNA, 120 bp, Artificial Sequence
  ENSG00000182858_21 (sequence is synthesized)
gtgtgatgctgctgggcactggagatgggaccaggtgctgctgcacacgtatgcacacaccatgcatacatgcacacacaccacacacgcatgcacacagtgcacacgtgcacacaccat

SEQ ID NO: 649201 - DNA, 78 bp, Artificial Sequence
  ENSG00000182858_22 (sequence is synthesized)
tacacaccacacacagtgcacacgtgcacattaccatgcatccacacacagtgcacacgtgcacacactatgcatccg

SEQ ID NO: 649202 - DNA, 90 bp, Artificial Sequence
  ENSG00000182858_23 (sequence is synthesized)
tgcacacaccatgcatacacaccacacacagtgcacacgtgcacattaccatgcatccacacacagtgcacacgtgcacacactatgcat

SEQ ID NO: 649203 - DNA, 120 bp, Artificial Sequence
  ENSG00000182858_24 (sequence is synthesized)
tgcacacaccatgcatacacaccacacacagtgcacacgtgcacattaccatgcatacacacagtgcacgcgtgcacattaccatgcatacacagtgcacatgtgcacacaccatgcata

SEQ ID NO: 649204 - DNA, 85 bp, Artificial Sequence
  ENSG00000182858_25 (sequence is synthesized)
cacgtgcacacaccatgcatgtgcacatgtgcacacaccatgcatacacaccacacaccgtgcacacgtgcacacaccatgcata

SEQ ID NO: 649205 - DNA, 120 bp, Artificial Sequence
  ENSG00000182858_26 (sequence is synthesized)
gcacacaccatgcatacacaccacacacagtgcacacgtgcacattaccatgcatccacacacagtgcacacgtgcacactatgcatacagtgcacacatgcacacaccatgcatacaca

SEQ ID NO: 649206 - DNA, 77 bp, Artificial Sequence
  ENSG00000182858_27 (sequence is synthesized)
gtgcacacaccatgcatacacaccacacagtgcacatgtgcacacaccatgcatacacaccacagtgcacacgtgca

SEQ ID NO: 649207 - DNA, 90 bp, Artificial Sequence
  ENSG00000182858_28 (sequence is synthesized)
tgcacaccacacacagtgcacacgtgtacgttaccatgcatacacacagtgcacgcgtgcacattaccatgcatacacagtgcacacgtg

SEQ ID NO: 649208 - DNA, 120 bp, Artificial Sequence
  ENSG00000182858_29 (sequence is synthesized)
cacacaccatgcatacacaccacacacagtgcacacgtgcacattaccgtgcatacacacagtgcatgcgtgcacattaccatgcatacacacagtgcacacgtgcacacaccatgaata

SEQ ID NO: 649209 - DNA, 87 bp, Artificial Sequence
  ENSG00000182858_30 (sequence is synthesized)
acattaccgtgcatacacacagtgcatgcgtgcacattaccatgcatacacacagtgcacacgtgcacacaccatgaatacacacca

SEQ ID NO: 649210 - DNA, 120 bp, Artificial Sequence
  ENSG00000182858_31 (sequence is synthesized)
cacagtgcacacgtgcacattaccatgcatacaccacgcatgcacaatgcacgtgcacaccatgcatacacaccacacatgcatccacacacaatgcacagatgcgcacaccatgcatac

SEQ ID NO: 649211 - DNA, 120 bp, Artificial Sequence
  ENSG00000182858_32 (sequence is synthesized)
gatgcgcacaccatgcatacacaccatacatgcatgatcacacgtgcacacaccatacatacccaccacgcatgcacacacacaatgcacaggtgcacacaccatgcatacacaccacac

SEQ ID NO: 649212 - DNA, 120 bp, Artificial Sequence
  ENSG00000182858_33 (sequence is synthesized)
accatgcatacacaccacacaatgcaatcatgcacacaatgcacacgtgcacacaccatgcatacataccacacatgcacacacgtgtgcataaagacatgatttcttcctgtgctcttt

SEQ ID NO: 649213 - DNA, 120 bp, Artificial Sequence
  ENSG00000182858_34 (sequence is synthesized)
tcttcctgtgctctttgagagcttgtggctgttgcccaggtgccctggggctgcctctccacctgatgcctcctggttttcccattgcgtctggcgaacatctgtgcagacacttcctga

SEQ ID NO: 649214 - DNA, 120 bp, Artificial Sequence
  ENSG00000182858_35 (sequence is synthesized)
ctcccacagaggccagatggtgagggctggagagcaggcttcctggccccagcatcccacagacatgggctccctcccccatccatccacctgtgtgtctcaggtattcactggttatcc

SEQ ID NO: 649215 - DNA, 120 bp, Artificial Sequence
  ENSG00000182858_36 (sequence is synthesized)
acgctcgtttgttctcttttatcgctggccacatgtggattgcctcccgacttcagtggtctgtgagtcactcctgtctttaattatcctggtgttcaaagtgtacgagatttgctggcg

SEQ ID NO: 649216 - DNA, 120 bp, Artificial Sequence
  ENSG00000182858_37 (sequence is synthesized)
ggaaccctgccatgctctgcctgtgtgccgtgcctctccttcgagcacctcctcatgaccaggcatggcagggcgtcctcttgggcctctggcctcggccattgctctgtgggtcttggc

SEQ ID NO: 649217 - DNA, 120 bp, Artificial Sequence
  ENSG00000182858_38 (sequence is synthesized)
tccctttggtggggaacagcgttagagaccgggatctagacacgaggtgtgctcgatgccacggggtgcctgagctttaggccctttctgtggacaggctagggaggacaggcatgctgc

SEQ ID NO: 649218 - DNA, 120 bp, Artificial Sequence
  ENSG00000182858_39 (sequence is synthesized)
gtgcagttgcacacgtacatatgtaatatgtgtgtacagatctgaaacagcacagaaccgtgcctggattccgtcccaccttgcacggttctcccccaccccccatctccaccctgagga

SEQ ID NO: 649219 - DNA, 120 bp, Artificial Sequence
  ENSG00000182858_40 (sequence is synthesized)
ccctggcccccagcaacagcagcatcctcacgcatctgctagggagtccagtgcacgcctgctcgagagctccagtgcagctttgccacaggattgcaaaaacaaacccaccatgaagag

SEQ ID NO: 649220 - DNA, 120 bp, Artificial Sequence
  ENSG00000182858_41 (sequence is synthesized)
gtcgggattgtgtgcagttcactccctgcccacaactgcgggtgccgtcaagcactgtgctcatgagttccttgggtcggcttctccaccgtcagtgtagtggtgccttcgttggaaata

SEQ ID NO: 649221 - DNA, 120 bp, Artificial Sequence
  ENSG00000182858_42 (sequence is synthesized)
cagctgggttcatccttcccgtttgctttcagtcttgtgcctcccaccataccccacacccccatcctgttaggtttgtagagtgtgaccatccttctagatgtcaaaactgcccctgaa

SEQ ID NO: 649222 - DNA, 120 bp, Artificial Sequence
  ENSG00000182858_43 (sequence is synthesized)
gacagatgcagggagccactccctcctgtacctcctcctcgctttttggtaatgagcataattgtctcctggtttatctcccatgtgtttaattttgtaaagataaacattacacatata

SEQ ID NO: 649223 - DNA, 120 bp, Artificial Sequence
  ENSG00000182866_0 (sequence is synthesized)
gagacaggtggtggctacgacggcgaagggagctgagactgtccaggcagccaggttaggccaggaggaccatgtgaatggggccagagggctcccgggctgggcagggaccatgggctg

SEQ ID NO: 649224 - DNA, 120 bp, Artificial Sequence
  ENSG00000182866_1 (sequence is synthesized)
tggctgcagctcacacccggaagatgactggatggaaaacatcgatgtgtgtgagaactgccattatcccatagtcccactggatggcaagggcacgctgctcatccgaaatggctctga

SEQ ID NO: 649225 - DNA, 120 bp, Artificial Sequence
  ENSG00000182866_2 (sequence is synthesized)
ggtgcgggacccactggttacctacgaaggctccaatccgccggcttccccactgcaagacaacctggttatcgctctgcacagctatgagccctctcacgacggagatctgggctttga

SEQ ID NO: 649226 - DNA, 120 bp, Artificial Sequence
  ENSG00000182866_3 (sequence is synthesized)
gaagggggaacagctccgcatcctggagcagagcggcgagtggtggaaggcgcagtccctgaccacgggccaggaaggcttcatccccttcaattttgtggccaaagcgaacagcctgga

SEQ ID NO: 649227 - DNA, 120 bp, Artificial Sequence
  ENSG00000182866_4 (sequence is synthesized)
gcccgaaccctggttcttcaagaacctgagccgcaaggacgcggagcggcagctcctggcgcccgggaacactcacggctccttcctcatccgggagagcgagagcaccgcgggatcgtt

SEQ ID NO: 649228 - DNA, 120 bp, Artificial Sequence
  ENSG00000182866_5 (sequence is synthesized)
ttcactgtcggtccgggacttcgaccagaaccagggagaggtggtgaaacattacaagatccgtaatctggacaacggtggcttctacatctcccctcgaatcacttttcccggcctgca

SEQ ID NO: 649229 - DNA, 120 bp, Artificial Sequence
  ENSG00000182866_6 (sequence is synthesized)
tgaactggtccgccattacaccaatgcttcagatgggctgtgcacacggttgagccgcccctgccagacccagaagccccagaagccgtggtgggaggacgagtgggaggttcccaggga

SEQ ID NO: 649230 - DNA, 120 bp, Artificial Sequence
  ENSG00000182866_7 (sequence is synthesized)
gacgctgaagctggtggagcggctgggggctggacagttcggggaggtgtggatggggtactacaacgggcacacgaaggtggcggtgaagagcctgaagcagggcagcatgtccccgga

SEQ ID NO: 649231 - DNA, 120 bp, Artificial Sequence
  ENSG00000182866_8 (sequence is synthesized)
ggttcggctctacgctgtggtcacccaggagcccatctacatcatcactgaatacatggagaatgggagtctagtggattttctcaagaccccttcaggcatcaagttgaccatcaacaa

SEQ ID NO: 649232 - DNA, 120 bp, Artificial Sequence
  ENSG00000182866_9 (sequence is synthesized)
actcctggacatggcagcccaaattgcagaaggcatggcattcattgaagagcggaattatattcatcgtgaccttcgggctgccaacattctggtgtctgacaccctgagctgcaagat

SEQ ID NO: 649233 - DNA, 120 bp, Artificial Sequence
  ENSG00000182866_10 (sequence is synthesized)
tgcagactttggcctagcacgcctcattgaggacaacgagtacacagccagggagggggccaagtttcccattaagtggacagcgccagaagccattaactacgggacattcaccatcaa

SEQ ID NO: 649234 - DNA, 120 bp, Artificial Sequence
  ENSG00000182866_11 (sequence is synthesized)
gtcagatgtgtggtcttttgggatcctgctgacggaaattgtcacccacggccgcatcccttacccagggatgaccaacccggaggtgattcagaacctggagcgaggctaccgcatggt

SEQ ID NO: 649235 - DNA, 120 bp, Artificial Sequence
  ENSG00000182866_12 (sequence is synthesized)
gcgccctgacaactgtccagaggagctgtaccaactcatgaggctgtgctggaaggagcgcccagaggaccggcccacctttgactacctgcgcagtgtgctggaggacttcttcacggc

SEQ ID NO: 649236 - DNA, 120 bp, Artificial Sequence
  ENSG00000182866_13 (sequence is synthesized)
cacagagggccagtaccagcctcagccttgagaggccttgagaggccctggggttctccccctttctctccagcctgacttggggagatggagttcttgtgccatagtcacatggcctat

SEQ ID NO: 649237 - DNA, 120 bp, Artificial Sequence
  ENSG00000182866_14 (sequence is synthesized)
gcacatatggactctgcacatgaatcccacccacatgtgacacatatgcaccttgtgtctgtacacgtgtcctgtagttgcgtggactctgcacatgtcttgtacatgtgtagcctgtgc

SEQ ID NO: 649238 - DNA, 120 bp, Artificial Sequence
  ENSG00000182866_15 (sequence is synthesized)
atgtatgtcttggacactgtacaaggtacccctttctggctctcccatttcctgagaccacagagagaggggagaagcctgggattgacagaagcttctgcccacctacttttctttcct

SEQ ID NO: 649239 - DNA, 120 bp, Artificial Sequence
  ENSG00000182866_16 (sequence is synthesized)
cagatcatccagaagttcctcaagggccaggactttatctaatacctctgtgtgctcctccttggtgcctggcctggcacacatcaggagttcaataaatgtctgttgatgactgttgta

SEQ ID NO: 649240 - DNA, 120 bp, Artificial Sequence
  ENSG00000182866_17 (sequence is synthesized)
gtgtgaatttacttgtagcctgagggctcagagggagcaccggtttggagctgggaccccctattttagcttttctgtggctggtgaatggggatcccaggatctcacaatctcagggac

SEQ ID NO: 649241 - DNA, 120 bp, Artificial Sequence
  ENSG00000182866_18 (sequence is synthesized)
tgcggatccctggctgttggcttccacctctcccccacctactttctccccggtcttgccttccttgtcccccaccctgtaactccaggcttcctgccgatcccagctcggttctccctg

SEQ ID NO: 649242 - DNA, 120 bp, Artificial Sequence
  ENSG00000182866_19 (sequence is synthesized)
gaatttacttgtagcctgagggctcagagggagcaccggtttggagctgggaccccctattttagcttttctgtggctggtgaatggggatcccaggatctcacaatctcagccccctct

SEQ ID NO: 649243 - DNA, 120 bp, Artificial Sequence
  ENSG00000182866_20 (sequence is synthesized)
caatccgccggcttccccactgcaagacaacctggttatcgctctgcacagctatgagccctctcacgacggagatctgggctttgagaagggggaacagctccgcatcctggagcagtg

SEQ ID NO: 649244 - DNA, 120 bp, Artificial Sequence
  ENSG00000182866_21 (sequence is synthesized)
agtccctctccaccttgctctggcggagtccgtgagggagcggcgatctccgcgacccgcagccctcctgcggcccttgaccagctcggggtggccgcccttgggacaaaattcgaggct

SEQ ID NO: 649245 - DNA, 120 bp, Artificial Sequence
  ENSG00000182866_22 (sequence is synthesized)
cagtattgctgagccagggttgggggaggctggcttaaggggtggaggggtctttgagggagggtctcaggtcgacggctgagcgagccacactgacccacctccgtggcgcaggagcgg

SEQ ID NO: 649246 - DNA, 120 bp, Artificial Sequence
  ENSG00000182866_23 (sequence is synthesized)
cgagtggtggaaggcgcagtccctgaccacgggccaggaaggcttcatccccttcaattttgtggccaaagcgaacagcctggagcccgaaccgtaagtggggacccgtcgtgggggtgg

SEQ ID NO: 649247 - DNA, 120 bp, Artificial Sequence
  ENSG00000182866_24 (sequence is synthesized)
ggaggagaaaggtctgggggcctccccctggggcaacttgggccagcaactcttgcttctgcccacagggagtctagtggattttctcaagaccccttcaggcatcaagttgaccatcaa

SEQ ID NO: 649248 - DNA, 120 bp, Artificial Sequence
  ENSG00000182866_25 (sequence is synthesized)
acttgtagcctgagggctcagagggagcaccggtttggagctgggaccccctattttagcttttctgtggctggtgaatggggatcccaggatctcacaatctcaggtacttttggaact

SEQ ID NO: 649249 - DNA, 120 bp, Artificial Sequence
  ENSG00000182866_26 (sequence is synthesized)
gggatactgctctccctgctgtccctgccagagggtggaaatacaccttttcttctggcccaaagctcaagcaaggagggtttcttgagctttcctgccccctggagactcacctccagc

SEQ ID NO: 649250 - DNA, 80 bp, Artificial Sequence
  ENSG00000182870_0 (sequence is synthesized)
gtcactctgcaccggcgcggtggctgcggggcgggcaggacaggagccggcacagacaccgagcgccgcccgcccgcgcc

SEQ ID NO: 649251 - DNA, 80 bp, Artificial Sequence
  ENSG00000182870_1 (sequence is synthesized)
gaccccagccccgggcagccctctgcgctctgggggacccccggcggccgtggcccggcgcgctgagctggtgctgaagg

SEQ ID NO: 649252 - DNA, 120 bp, Artificial Sequence
  ENSG00000182870_2 (sequence is synthesized)
gagctggtgctgaagggacagctccggccgagccccgcagcccccgcagccccgggcggctcatggtccccgaagccgaagctgaagcccaggcccgggcggggatgctggggatgcccc

SEQ ID NO: 649253 - DNA, 120 bp, Artificial Sequence
  ENSG00000182870_3 (sequence is synthesized)
gtgaggcccccgctgcagccgtgttcatggcggtggccaggaagatccgaactttgctgacggtgaacatcctggtgttcgtgggcatcgtcctgttctccgtgtactgccgcctgcagg

SEQ ID NO: 649254 - DNA, 120 bp, Artificial Sequence
  ENSG00000182870_4 (sequence is synthesized)
gccgctcccaggagctcgtgcgcatcgtgagcggcgaccgccgggtgcgcagccgacacgccaaggtgggcacgctgggggaccgtgaggccatcctgcagcgcctggaccacctggagg

SEQ ID NO: 649255 - DNA, 120 bp, Artificial Sequence
  ENSG00000182870_5 (sequence is synthesized)
aggtggtctacaaccagctcaacggccttgccaagcccatcggcctggtggaggggccaggaggcctgggccagggtggcttggcggccaccctgcgtgatgacggccaggaggcggaag

SEQ ID NO: 649256 - DNA, 120 bp, Artificial Sequence
  ENSG00000182870_6 (sequence is synthesized)
gcaagtatgaggagtacggctacaacgctcagctcagcgaccgcatctccctcgatcggagcatccccgactaccggcccagaaagtgcagacagatgagctacgcccaggacctgcccc

SEQ ID NO: 649257 - DNA, 120 bp, Artificial Sequence
  ENSG00000182870_7 (sequence is synthesized)
aggtctccgtggtcttcatcttcgtcaatgaggcgctgtcggtcatcctgcgctccgtgcacagcgtggtcaaccacacgccctcccagctcctcaaggaggtcatcctggtggacgaca

SEQ ID NO: 649258 - DNA, 120 bp, Artificial Sequence
  ENSG00000182870_8 (sequence is synthesized)
acagtgacaacgtggaactcaagttcaatctggaccagtacgtcaacaagcggtacccaggcctcgtgaagattgtccgcaacagccggcgggaaggactgatccgcgcgcggctgcagg

SEQ ID NO: 649259 - DNA, 120 bp, Artificial Sequence
  ENSG00000182870_9 (sequence is synthesized)
gctggaaggcggccaccgccccagtcgtcggcttctttgatgcccacgtcgagttcaacacgggctgggccgagcccgcactgtcgcggatccgagaggaccggcgtcgcatcgtgctgc

SEQ ID NO: 649260 - DNA, 120 bp, Artificial Sequence
  ENSG00000182870_10 (sequence is synthesized)
cagccatcgacaacatcaagtacagcacgtttgaggtgcagcagtatgcgaacgccgcccatggctacaactggggcctctggtgcatgtacatcatccccccgcaggactggctggacc

SEQ ID NO: 649261 - DNA, 120 bp, Artificial Sequence
  ENSG00000182870_11 (sequence is synthesized)
gcggcgacgagtcagcacccatcaggaccccagccatgatcggctgctccttcgtagtggaccgcgagtacttcggagacattgggctgctggaccccggcatggaggtgtatggcggcg

SEQ ID NO: 649262 - DNA, 120 bp, Artificial Sequence
  ENSG00000182870_12 (sequence is synthesized)
ctgccctgctcccgcgtggcccacatcgagcgcaccaggaagccctacaacaacgacattgactactatgccaagcgcaacgccctgcgcgccgccgaggtgtggatggatgacttcaag

SEQ ID NO: 649263 - DNA, 120 bp, Artificial Sequence
  ENSG00000182870_13 (sequence is synthesized)
tcccacgtgtacatggcctggaacatccccatgtcgaacccaggggtggacttcggggacgtgtctgagaggctggccctgcgtcagaggctgaagtgtcgcagcttcaagtggtacctg

SEQ ID NO: 649264 - DNA, 120 bp, Artificial Sequence
  ENSG00000182870_14 (sequence is synthesized)
gagaacgtgtacccggagatgagggtctacaacaacaccctcacgtacggagaggtgagaaacagcaaagccagtgcctactgtctggaccagggagcggaggacggcgaccgggcgatc

SEQ ID NO: 649265 - DNA, 120 bp, Artificial Sequence
  ENSG00000182870_15 (sequence is synthesized)
ctctacccctgccacgggatgtcctcccagctggtgcggtacagcgctgatggactgctgcagctggggcctctgggctccacagccttcttgcctgactccaagtgtctggtggatgac

SEQ ID NO: 649266 - DNA, 120 bp, Artificial Sequence
  ENSG00000182870_16 (sequence is synthesized)
ggcacgggccgcatgcccaccctgaagaagtgtgaggatgtggcgcggccaacacagcggctgtgggacttcacccagagtggccccattgtgagccgggccacgggccgctgcctggag

SEQ ID NO: 649267 - DNA, 120 bp, Artificial Sequence
  ENSG00000182870_17 (sequence is synthesized)
gtggagatgtccaaagatgccaactttgggctccggctggtggtacagaggtgctcggggcagaagtggatgatcagaaactggatcaaacacgcacggcactgaccccacctccgcccg

SEQ ID NO: 649268 - DNA, 120 bp, Artificial Sequence
  ENSG00000182870_18 (sequence is synthesized)
gacccccacagacctcgggaaggcgctgggccgagccagtgtggctgagtgaccggggtgtgcccggcagacacagcaggacagggctctatgtgcggccaggacagcagaggctgaggg

SEQ ID NO: 649269 - DNA, 120 bp, Artificial Sequence
  ENSG00000182870_19 (sequence is synthesized)
gccggggtgtggctgagtgaccagggtgtcacccactgcatctggagtacagcttctcctaggacaggcggctctacccgagggagggcgtctggggacagtgatgccaactcaaacacg

SEQ ID NO: 649270 - DNA, 120 bp, Artificial Sequence
  ENSG00000182870_20 (sequence is synthesized)
tgccttctccacggtatctcctggccaggctgctgggacagccgccgcctctgcatgtaccacagccccccacgccccatagggaggccaagccccggaccatgcaccaggctgcaccct

SEQ ID NO: 649271 - DNA, 120 bp, Artificial Sequence
  ENSG00000182870_21 (sequence is synthesized)
ggtgtcttccacccgcaggcctcccatgctccaagcagcctcccccagcacttgcggccgctcagccctccaaccaagacctaagtcacacatcataatgcagctccttgtggtctggta

SEQ ID NO: 649272 - DNA, 120 bp, Artificial Sequence
  ENSG00000182870_22 (sequence is synthesized)
agaggggtgctggaggacatggacagcgacaaacctgaggccgtgtctaggaggctggcacgactgcttcagcagagaccaaataaagagaggattaggcagcagcactgtgtgtgtctt

SEQ ID NO: 649273 - DNA, 120 bp, Artificial Sequence
  ENSG00000182870_23 (sequence is synthesized)
cctgggagccgagctgggggttggggcccggtcccacctctttcccaggcacctgggccctgccgcagcccagccccttgcctgttttaataaatacagttttattggcgcccagccaca

SEQ ID NO: 649274 - DNA, 120 bp, Artificial Sequence
  ENSG00000182870_24 (sequence is synthesized)
tatgggaaggaggagggaagcggctgagcagggcaagagcgaaagtccactgcctggcaaggacagcctagacacgggggaaagaagggacatggaggggctgagccctgtcacacgtca

SEQ ID NO: 649275 - DNA, 120 bp, Artificial Sequence
  ENSG00000182870_25 (sequence is synthesized)
gtgttccccagcgtgaggcccgaggacaggattctgtggtgggtggggggaccgagtcaccgtggcctctgtactgggggtagacaaggaggctgaaactgctggaggtcgtcccagagg

SEQ ID NO: 649276 - DNA, 120 bp, Artificial Sequence
  ENSG00000182870_26 (sequence is synthesized)
ccagtgtgccaggcgcttctgaagacgggtgggcagacgatggaggacgaggctctgtcccgcccctgcagagcttccttcgttccggccccttccagcgaagggcagggctccgagcag

SEQ ID NO: 649277 - DNA, 120 bp, Artificial Sequence
  ENSG00000182870_27 (sequence is synthesized)
agacaacagacagaaacccagaaaccacctgccacgatgtgaacctgatgcagaaacgcggttcgctccctcgggatgcaaaggccaacttcagcctggcacggcggcgccgcggactcc

SEQ ID NO: 649278 - DNA, 120 bp, Artificial Sequence
  ENSG00000182870_28 (sequence is synthesized)
tgtccccggctgggctgagctgagcagcgaggaggctctgggttgccggaccggggtcagggagcctggcgttagctgcgtgctgtgtggtcatctcggcgaggagggagcggctccctc

SEQ ID NO: 649279 - DNA, 120 bp, Artificial Sequence
  ENSG00000182870_29 (sequence is synthesized)
gcaggggcaagcaccagagtgatgggaacagcccctgctgccaggagcccacggggggagtgtgcacgtgtgtgcgtgtgtgtggtgtatcctgtgtgcacgtggtatgttcatagatgt

SEQ ID NO: 649280 - DNA, 120 bp, Artificial Sequence
  ENSG00000182870_30 (sequence is synthesized)
gtagtgtctgtgcatgtgtgcgtgtgtgtggggtatgttcttgtgtgtggcatatgttcatgtgtgcgtgtgtgtggtgtctgcttatgtgtgcatgtgtgtgtggtgctgtagcttcta

SEQ ID NO: 649281 - DNA, 120 bp, Artificial Sequence
  ENSG00000182870_31 (sequence is synthesized)
attcagcccaagccacaacttagacttttaatgttacgttcaaacaaaaccatttggagactcacccacagctctgaggctttggacgacgcccgctcatcacctgccttcccctctgct

SEQ ID NO: 649282 - DNA, 120 bp, Artificial Sequence
  ENSG00000182870_32 (sequence is synthesized)
gagtgcaatgaattcaagctccataaaggccacacatggagccctgtgtgcgtctacagttctgggtcccgagatgaggcggtgaaacagcaaacccacacccagaacccctgccccagg

SEQ ID NO: 649283 - DNA, 120 bp, Artificial Sequence
  ENSG00000182870_33 (sequence is synthesized)
agccccagccagcaggagagcagggcaggggtgcaaagagcaagccgggggtgggggtgggagaggcagagcagcaggctggaggccggggctctggtgggattttacgttgagcacggg

SEQ ID NO: 649284 - DNA, 120 bp, Artificial Sequence
  ENSG00000182870_34 (sequence is synthesized)
gtgagcctcttgaagggtgagggcgtgtgtggccatccaggtgggggtggggagcgcaaaggccctggggcaggagcaggcctggagcgcaggccacagagccaggggccgggcgcaggt

SEQ ID NO: 649285 - DNA, 120 bp, Artificial Sequence
  ENSG00000182870_35 (sequence is synthesized)
gagtgagccaaagggaaccaagaggggatggtggagggagcggcctggctgagcaacccggggctttgaccttctcaggggcaatgggaagcctggaattgcatgggctggtgtggaggt

SEQ ID NO: 649286 - DNA, 120 bp, Artificial Sequence
  ENSG00000182870_36 (sequence is synthesized)
caccgtgaccttgccaggcctgggggtgcagccgcagtgcccagggaggtgagaaggggctggccaggctgcctgttgtgaagagcggagaagtatgagagagatgtggagcagggcgtc

SEQ ID NO: 649287 - DNA, 120 bp, Artificial Sequence
  ENSG00000182870_37 (sequence is synthesized)
gacctgcgatgggctggtgggagcaggagcgagctggcctcactgtgaatgtgaaaatgctggttggagcacaccacggtgggtacttccttcaacggctaaatgcgccgaaggcctcca

SEQ ID NO: 649288 - DNA, 120 bp, Artificial Sequence
  ENSG00000182870_38 (sequence is synthesized)
agcttgacagggttgaatttcctccaaggccctgggaggggcgccctgtgctccctggatggggccgacattcctggcctgtccccagctgcgtcgcctctgcccagccctcaatcactg

SEQ ID NO: 649289 - DNA, 120 bp, Artificial Sequence
  ENSG00000182870_39 (sequence is synthesized)
cagctctcaagtggtcctgggtgccgtgatcttgctgaactctgatgctttccaaataccataaacttagtttattttctgtctgacagaaacggcgccacttaagtcctgcaaagaacc

SEQ ID NO: 649290 - DNA, 120 bp, Artificial Sequence
  ENSG00000182870_40 (sequence is synthesized)
ctcgggttccactcaggctgagttattcgggggccactgctgaacggtttgcatttgtttcctctgtgacatcggagtggggaggacgctgcctccagcacagggccaggggccagggct

SEQ ID NO: 649291 - DNA, 120 bp, Artificial Sequence
  ENSG00000182870_41 (sequence is synthesized)
gctcacacagagctgctggagcctacagggtcccggctgtgggtcctgggctgcccgcccccaggaagggcaccttgccaccattgaagtggggcgagctgattcgggcacagctggaaa

SEQ ID NO: 649292 - DNA, 120 bp, Artificial Sequence
  ENSG00000182870_42 (sequence is synthesized)
agctgattcgggcacagctggaaaccaggaggcagccagcagcagcggccctgagcaagaacaggaaccccaggccgaggcgggcgcatcacacgagaccagcctggccaacatggtgaa

SEQ ID NO: 649293 - DNA, 120 bp, Artificial Sequence
  ENSG00000182870_43 (sequence is synthesized)
ccggcctgggcaacagagtaggactctgtctcaaaaataaagaagaaagaaagaaggagagtccggaagccactgctgcccccaccagcagagtggaactgtgatttcatagaacagaca

SEQ ID NO: 649294 - DNA, 120 bp, Artificial Sequence
  ENSG00000182870_44 (sequence is synthesized)
cagcctggcagcgagaatgaccacagtgctcacagccactcaggtggaatctcaggaactcaatgtcaggaggaggagtggggccctaaggcccgtgtgcgggagacagtggccatggcg

SEQ ID NO: 649295 - DNA, 120 bp, Artificial Sequence
  ENSG00000182870_45 (sequence is synthesized)
tcgagctcaaaggtgagccgggtgtggctggggatgggaaggcgtggcgcagagccacggggaaggcacacgaggtccagagacggcagcctgcgaagtggagggagggtggacgccggg

SEQ ID NO: 649296 - DNA, 120 bp, Artificial Sequence
  ENSG00000182870_46 (sequence is synthesized)
gtgatcacccactttcctagactgagcgttgggcacaggctttgtattgcttcattcatcgtcatatttgatgtatgtttgataaatatccctttaaaaattaaagacagtttgttaatt

SEQ ID NO: 649297 - DNA, 120 bp, Artificial Sequence
  ENSG00000182870_47 (sequence is synthesized)
gagagtgaagaggagcaggtccgaggcccatagagcacagccgagccccggggccacgcacggagcccacagccgagccccggggccacgcacggagcccacagctgagccctggggcca

SEQ ID NO: 649298 - DNA, 120 bp, Artificial Sequence
  ENSG00000182870_48 (sequence is synthesized)
tcagagccatctgacagaggaaggtctccaagtaccccgccccgtccccatcattcctcccgtcacctgggaggcttccagccgtgaggaaggcgcgacccgggccctgctctcccggcc

SEQ ID NO: 649299 - DNA, 120 bp, Artificial Sequence
  ENSG00000182870_49 (sequence is synthesized)
tgcctgttttatctcctagctcttgctgtaagggaggaaggctgcgtccggcactggttttcgaatccctgcaggccctcggtcccctgtggagtcctctggaggatcccagcaccgctg

SEQ ID NO: 649300 - DNA, 120 bp, Artificial Sequence
  ENSG00000182870_50 (sequence is synthesized)
gggcatgagggtgagtgcggccccggtgtccagggacagggtgagggcgagtgaggccacagcgtctgggaacaggatgagggcgagtgaggccgcggtgtccggggacggggtgagggc

SEQ ID NO: 649301 - DNA, 120 bp, Artificial Sequence
  ENSG00000182870_51 (sequence is synthesized)
gagtgtggctgcagcgtccggggatggggtgagggcgagtgcggccacggcatctggggacggggtgagggcgagtgaggccgcggtgtctggggacggggtgagggcgagtgcggccac

SEQ ID NO: 649302 - DNA, 120 bp, Artificial Sequence
  ENSG00000182870_52 (sequence is synthesized)
ggcatccggggacggggtgagggcgagtgcggccatggcgtctggggatggggtgagggcgagtgtggctgcagtgtccggggacagggtgagggcgagtgcagccatggtctagggaca

SEQ ID NO: 649303 - DNA, 120 bp, Artificial Sequence
  ENSG00000182870_53 (sequence is synthesized)
gggtgaggtccagggctcctgctcagcgcactgagccctctccagagcctaggctgaggcagctggaagccaagctgggcggccaaggctcccagggtccctgagctggagttggggaca

SEQ ID NO: 649304 - DNA, 120 bp, Artificial Sequence
  ENSG00000182871_0 (sequence is synthesized)
actgccccgatggctccctacccctgtggctgccacatcctgctgctgctcttctgctgcctggcggctgcccgggccaacctgctgaacctgaactggctttggttcaataatgaggac

SEQ ID NO: 649305 - DNA, 120 bp, Artificial Sequence
  ENSG00000182871_1 (sequence is synthesized)
accagccatgcagctaccacgatccctgagccccaggggcccctgcctgtgcagcccacagcagataccaccacacacgtgaccccccggaatggttccacagagccagcgacagcccct

SEQ ID NO: 649306 - DNA, 120 bp, Artificial Sequence
  ENSG00000182871_2 (sequence is synthesized)
ggcagccctgagccaccctcagagctgctggaagatggccaggacacccccacttctgccgagagcccggacgcgccagaggagaacattgccggtgtcggagccgagatcctgaacgtg

SEQ ID NO: 649307 - DNA, 120 bp, Artificial Sequence
  ENSG00000182871_3 (sequence is synthesized)
gccaaaggcatccggagcttcgtccagctgtggaatgacactgtccccactgagagcttggccagggcggaaaccctggtcctggagactcctgtgggcccccttgccctcgctgggcct

SEQ ID NO: 649308 - DNA, 120 bp, Artificial Sequence
  ENSG00000182871_4 (sequence is synthesized)
tccagcaccccccaggagaatgggaccactctctggcccagccgtggcattcctagctctccgggcgcccacacaaccgaggctggcaccttgcctgcacccaccccatcgcctccctcc

SEQ ID NO: 649309 - DNA, 120 bp, Artificial Sequence
  ENSG00000182871_5 (sequence is synthesized)
ctgggcaggccctgggcaccactcacggggccctcagtgccaccaccatcttcagagcgcatcagcgaggaggtggggctgctgcagctccttggggaccccccgccccagcaggtcacc

SEQ ID NO: 649310 - DNA, 120 bp, Artificial Sequence
  ENSG00000182871_6 (sequence is synthesized)
cagacggatgaccccgacgtcgggctggcctacgtctttgggccagatgccaacagtggccaagtggcccggtaccacttccccagcctcttcttccgtgacttctcactgctgttccac

SEQ ID NO: 649311 - DNA, 120 bp, Artificial Sequence
  ENSG00000182871_7 (sequence is synthesized)
atccggccagccacagagggcccaggggtgctgttcgccatcacggactcggcgcaggccatggtcttgctgggcgtgaagctctctggggtgcaggacgggcaccaggacatctccctg

SEQ ID NO: 649312 - DNA, 120 bp, Artificial Sequence
  ENSG00000182871_8 (sequence is synthesized)
ctctacacagaaccaggtgcaggccagacccacacagccgccagcttccggctccccgccttcgtcggccagtggacacacttagccctcagtgtggcaggtggctttgtggccctctac

SEQ ID NO: 649313 - DNA, 120 bp, Artificial Sequence
  ENSG00000182871_9 (sequence is synthesized)
gtggactgtgaggagttccagagaatgccgcttgctcggtcctcacggggcctggagctggagcctggcgccgggctcttcgtggctcaggcggggggagcggaccctgacaagttccag

SEQ ID NO: 649314 - DNA, 120 bp, Artificial Sequence
  ENSG00000182871_10 (sequence is synthesized)
ggggtgatcgctgagctgaaggtgcgcagggacccccaggtgagccccatgcactgcctggacgaggaaggcgatgactcagatggggcatccggagactctggcagcgggctcggggac

SEQ ID NO: 649315 - DNA, 120 bp, Artificial Sequence
  ENSG00000182871_11 (sequence is synthesized)
gcccgggagcttctcagggaggagacgggcgcggccctaaaacccaggctccccgcgccaccccccgtcaccacgccacccttggctggaggcagcagcacggaagattccagaagtgaa

SEQ ID NO: 649316 - DNA, 120 bp, Artificial Sequence
  ENSG00000182871_12 (sequence is synthesized)
gaagtcgaggagcagaccacggtggcttcgttaggagctcagacacttcctggctcagattctgtctccacgtgggacgggagtgtccggacccctgggggccgcgtgaaagagggcggc

SEQ ID NO: 649317 - DNA, 120 bp, Artificial Sequence
  ENSG00000182871_13 (sequence is synthesized)
ctgaaggggcagaaaggggagccaggtgttccgggcccacctggccgggcaggccccccaggatccccatgcctacctggtcccccgggtctcccgtgcccagtgagtcccctgggtcct

SEQ ID NO: 649318 - DNA, 120 bp, Artificial Sequence
  ENSG00000182871_14 (sequence is synthesized)
gcaggcccagcgttgcaaactgtccccggaccacaaggacccccagggcctccggggagggacggcacccctggaagggacggcgagccgggcgaccccggtgaagacggaaagccgggc

SEQ ID NO: 649319 - DNA, 120 bp, Artificial Sequence
  ENSG00000182871_15 (sequence is synthesized)
gacaccgggccacaaggcttccccgggactccaggggacgtaggtcccaagggcgacaagggagaccctggggttggagagagagggcccccaggaccccaagggcctccagggccccca

SEQ ID NO: 649320 - DNA, 120 bp, Artificial Sequence
  ENSG00000182871_16 (sequence is synthesized)
ggaccctccttcagacacgacaagctgaccttcattgacatggagggatctggcttcgggggcgatctggaggccctgcggggtcctcgaggcttccctggacctcccggaccccccggt

SEQ ID NO: 649321 - DNA, 120 bp, Artificial Sequence
  ENSG00000182871_17 (sequence is synthesized)
gtcccaggcctgcccggcgagccaggccgctttggggtgaacagctccgacgtcccaggacccgccggccttcctggtgtgcctgggcgcgagggtccccccgggtttcctggcctcccg

SEQ ID NO: 649322 - DNA, 120 bp, Artificial Sequence
  ENSG00000182871_18 (sequence is synthesized)
ggacccccaggccctccgggaagagaggggcccccaggaaggactgggcagaaaggcagcctgggtgaagcaggcgccccaggacataaggggagcaagggagcccccggtcctgctggt

SEQ ID NO: 649323 - DNA, 120 bp, Artificial Sequence
  ENSG00000182871_19 (sequence is synthesized)
gctcgtggggagagcggcctggcaggagcccccggacctgctggaccaccaggcccccctgggccccctgggcccccaggaccaggactccccgctggatttgatgacatggaaggctcc

SEQ ID NO: 649324 - DNA, 120 bp, Artificial Sequence
  ENSG00000182871_20 (sequence is synthesized)
ggggggcccttctggtcaacagcccgaagcgctgatgggccacagggacctcccggcctgccgggacttaagggggatcctggcgtgcctgggctgccgggggcgaagggagaagttgga

SEQ ID NO: 649325 - DNA, 120 bp, Artificial Sequence
  ENSG00000182871_21 (sequence is synthesized)
gcagatggagtccccgggttccccggcctccctggcagagagggcattgctgggccccaggggccaaagggagacagaggcagccggggagaaaagggagatccagggaaggacggagtc

SEQ ID NO: 649326 - DNA, 120 bp, Artificial Sequence
  ENSG00000182871_22 (sequence is synthesized)
gggcagccgggcctccctggcccccccggacccccgggacctgtggtctacgtgtcggagcaggacggatccgtcctgagcgtgccgggacctgagggccggccgggtttcgcaggcttt

SEQ ID NO: 649327 - DNA, 120 bp, Artificial Sequence
  ENSG00000182871_23 (sequence is synthesized)
cccggacctgcaggacccaagggcaacctgggctctaagggcgaacgaggctccccgggacccaagggtgagaagggtgaaccgggcagcatcttcagccccgacggcggtgccctgggc

SEQ ID NO: 649328 - DNA, 120 bp, Artificial Sequence
  ENSG00000182871_24 (sequence is synthesized)
aggagccaagggagagccgggcttccgaggacccccgggtccatacggacggccggggtacaagggagagattggctttcctggacggccgggtcgccccgggatgaacggattgaaagg

SEQ ID NO: 649329 - DNA, 120 bp, Artificial Sequence
  ENSG00000182871_25 (sequence is synthesized)
agagaaaggggagccgggagatgccagccttggatttggcatgaggggaatgcccggccccccaggacctccagggcccccaggccctccagggactcctgtttacgacagcaatgtgtt

SEQ ID NO: 649330 - DNA, 120 bp, Artificial Sequence
  ENSG00000182871_26 (sequence is synthesized)
tgctgagtccagccgccccgggcctccaggattgccagggaatcagggccctccaggacccaagggcgccaaaggagaagtgggcccccccggaccaccagggcagtttccgtttgactt

SEQ ID NO: 649331 - DNA, 120 bp, Artificial Sequence
  ENSG00000182871_27 (sequence is synthesized)
tcttcagttggaggctgaaatgaagggggagaagggagaccgaggtgatgcaggacagaaaggcgaaaggggggagcccgggggcggcggtttcttcggctccagcctgcccggcccccc

SEQ ID NO: 649332 - DNA, 120 bp, Artificial Sequence
  ENSG00000182871_28 (sequence is synthesized)
cggccccccaggccccccaggcccacgtggctaccctgggattccaggtcccaagggagagagcatccggggccagcccggcccacctggacctcagggaccccccggcatcggctacga

SEQ ID NO: 649333 - DNA, 120 bp, Artificial Sequence
  ENSG00000182871_29 (sequence is synthesized)
catcggctacgaggggcgccagggccctcccggccccccaggccccccagggcccccttcatttcctggccctcacaggcagactatcagcgttcccggccctccgggcccccctgggcc

SEQ ID NO: 649334 - DNA, 120 bp, Artificial Sequence
  ENSG00000182871_30 (sequence is synthesized)
tggaaccatgggcgcctcctcaggggtgaggctctgggctacacgccaggccatgctgggccaggtgcacgaggttcccgagggctggctcatcttcgtggccgagcaggaggagctcta

SEQ ID NO: 649335 - DNA, 120 bp, Artificial Sequence
  ENSG00000182871_31 (sequence is synthesized)
cgtccgcgtgcagaacgggttccggaaggtccagctggaggcccggacaccactcccacgagggacggacaatgaagtggccgccttgcagccccccgtggtgcagctgcacgacagcaa

SEQ ID NO: 649336 - DNA, 120 bp, Artificial Sequence
  ENSG00000182871_32 (sequence is synthesized)
gcgggagcacccccaccccaccgcgcggccctggcgggcagatgacatcctggccagcccccctcgcctgcccgagccccagccctaccccggagccccgcaccacagctcctacgtgca

SEQ ID NO: 649337 - DNA, 120 bp, Artificial Sequence
  ENSG00000182871_33 (sequence is synthesized)
ctcctacgtgcacctgcggccggcgcgacccacaagcccacccgcccacagccaccgcgacttccagccggtgctccacctggttgcgctcaacagccccctgtcaggcggcatgcgggg

SEQ ID NO: 649338 - DNA, 120 bp, Artificial Sequence
  ENSG00000182871_34 (sequence is synthesized)
catccgcggggccgacttccagtgcttccagcaggcgcgggccgtggggctggcgggcaccttccgcgccttcctgtcctcgcgcctgcaggacctgtacagcatcgtgcgccgtgccga

SEQ ID NO: 649339 - DNA, 120 bp, Artificial Sequence
  ENSG00000182871_35 (sequence is synthesized)
ccgcgcagccgtgcccatcgtcaacctcaaggacgagctgctgtttcccagctgggaggctctgttctcaggctctgagggtccgctgaagcccggggcacgcatcttctcctttgacgg

SEQ ID NO: 649340 - DNA, 120 bp, Artificial Sequence
  ENSG00000182871_36 (sequence is synthesized)
caaggacgtcctgaggcaccccacctggccccagaagagcgtgtggcatggctcggaccccaacgggcgcaggctgaccgagagctactgtgagacgtggcggacggaggctccctcggc

SEQ ID NO: 649341 - DNA, 120 bp, Artificial Sequence
  ENSG00000182871_37 (sequence is synthesized)
cacgggccaggcctcctcgctgctggggggcaggctcctggggcagagtgccgcgagctgccatcacgcctacatcgtgctctgcattgagaacagcttcatgactgcctccaagtagcc

SEQ ID NO: 649342 - DNA, 120 bp, Artificial Sequence
  ENSG00000182871_38 (sequence is synthesized)
accgcctggatgcggatggccggagaggaccggcggctcggaggaagcccccaccgtgggcagggagcggccggccagcccctggccccaggacctggctgccatactttcctgtatagt

SEQ ID NO: 649343 - DNA, 120 bp, Artificial Sequence
  ENSG00000182871_39 (sequence is synthesized)
tcacgtttcatgtaatcctcaagaaataaaaggaagccaaagagtgtatttttttaaaagtttaaaacagaagcctgatgctgacattcacctgccccaactctcccctgacctgtgagc

SEQ ID NO: 649344 - DNA, 120 bp, Artificial Sequence
  ENSG00000182871_40 (sequence is synthesized)
ccagctgggtcaggcagggtgcagtatcatgccctgtgcaacctcttggcctgatcagaccacggctcgatttctccaggatttcctgctttgggaagccgtgctcgccccagcaggtgc

SEQ ID NO: 649345 - DNA, 120 bp, Artificial Sequence
  ENSG00000182871_41 (sequence is synthesized)
tgacttcatctcccacctagcagcaccgttctgtgcacaaaacccagacctgttagcagacaggccccgtgaggcaatgggagctgaggccacactcagcacaaggccatctgggctcct

SEQ ID NO: 649346 - DNA, 120 bp, Artificial Sequence
  ENSG00000182871_42 (sequence is synthesized)
ccagggtgtgtgctcgccctgcggtagatgggagggaggctcaggtccctggggctagggggagccccttctgctcagctctgggccattctccacagcaaccccaggctgaagcaggtt

SEQ ID NO: 649347 - DNA, 120 bp, Artificial Sequence
  ENSG00000182871_43 (sequence is synthesized)
cccaagctcagaggcgcactgtgacccccagctccggcctgtcctccaacaccaagcacagcagcctggggctggcctcccaaatgagccatgagatgatacatccaaagcagacagctc

SEQ ID NO: 649348 - DNA, 120 bp, Artificial Sequence
  ENSG00000182871_44 (sequence is synthesized)
caccctggccgagtccaagctgggagattcaagggacccatgagttggggtctggcagcctcccatccagggcccccatctcatgcccctggctgggacgtggctcagccagcacttgtc

SEQ ID NO: 649349 - DNA, 120 bp, Artificial Sequence
  ENSG00000182871_45 (sequence is synthesized)
cagctgagcgccaggatggaacacggccacatcaaagaggctgaggctggcacaggacatgcggtagccagcacacagggcagtgagggagggctgtcatctgtgcactgcccatggaca

SEQ ID NO: 649350 - DNA, 120 bp, Artificial Sequence
  ENSG00000182871_46 (sequence is synthesized)
ggctggctccagatgcagggcagtcattggctgtctcctaggaaacccatatccttaccctccttgggactgaaggggaaccccggggtgcccacaggccgccctgcgggtgaacaaagc

SEQ ID NO: 649351 - DNA, 120 bp, Artificial Sequence
  ENSG00000182871_47 (sequence is synthesized)
agccacgaggtgcaacaaggtcctctgtcagtcacagccacccctgagatccggcaacatcaacccgagtcattcgttctgtggagggacaagtggactcagggcagcgccaggctgacc

SEQ ID NO: 649352 - DNA, 120 bp, Artificial Sequence
  ENSG00000182871_48 (sequence is synthesized)
acagcacagccaacacgcacctgcctcaggactgcgacgaaaccggtggggctggttctgtaattgtgtgtgatgtgaagccaattcagacaggcaaataaaagtgaccttttacactga

SEQ ID NO: 649353 - DNA, 120 bp, Artificial Sequence
  ENSG00000182871_49 (sequence is synthesized)
ccctgggcaccactcacggggccctcagtgccaccaccatcttcaggtagagcttctctctcctccttgctgggcggggcccctccctggggaagcctgcaggacccagacagccaagga

SEQ ID NO: 649354 - DNA, 120 bp, Artificial Sequence
  ENSG00000182871_50 (sequence is synthesized)
ctctcgcccgccgcagccgctcccagccagcagctccaacgccctgacgtccgcctgcgcacgccacttctgcaccccctggtgatgggctccctgggcaagcacgcggccccctccgcc

SEQ ID NO: 649355 - DNA, 120 bp, Artificial Sequence
  ENSG00000182871_51 (sequence is synthesized)
ttctcctctgggctcccgggcgcactgtctcaggtcgcagtcaccactttaaccagggacagcggtgcttgggtctcccacgtggctaactctgtggggccgggtcttgctaataactct

SEQ ID NO: 649356 - DNA, 120 bp, Artificial Sequence
  ENSG00000182871_52 (sequence is synthesized)
gccctgctcggggctgaccccgaggcccccgccggtcgctgcctgcccctgccaccctccctgccagtctgcggccacctgggcatctcacgcttctggctgcccaaccacctccaccac

SEQ ID NO: 649357 - DNA, 120 bp, Artificial Sequence
  ENSG00000182871_53 (sequence is synthesized)
gagagcggcgagcaggtgcgggccggggcacgggcgtgggggggcctgctgcagacgcactgccaccccttcctcgcctggttcttctgcctgctgctggtccccccatgcggcagcgtc

SEQ ID NO: 649358 - DNA, 120 bp, Artificial Sequence
  ENSG00000182871_54 (sequence is synthesized)
ccgccgcccgccccgccaccctgctgccagttctgcgaggccctgcaggatgcgtgttggagccgcctgggcgggggccggctgcccgtcgcctgtgcctcgctcccgacccaggaggat

SEQ ID NO: 649359 - DNA, 120 bp, Artificial Sequence
  ENSG00000182871_55 (sequence is synthesized)
gccatggcgtggccagcactgaagtgtggtcacacctagagccgccaccacaagcaggtcctggaccctcactgggtggtgaccacctcaccctgcgggaggaaggaagccccttctggg

SEQ ID NO: 649360 - DNA, 120 bp, Artificial Sequence
  ENSG00000182871_56 (sequence is synthesized)
gaggaggcagcatcccgcggcgctgacggtcctggggagagcatggcgccgaggtgcccctggccatggccgcggcggcggcgcctcctggacgtgctcgcgcccctggtcctgctgctc

SEQ ID NO: 649361 - DNA, 120 bp, Artificial Sequence
  ENSG00000182871_57 (sequence is synthesized)
cctggggcttaaggaaggcgagaggctcaggccccggacagggatgggagcaggtggcagccagcgcttcttaaactttcaaacttttggtaaagtttagtaaaatacttttgtgagcag

SEQ ID NO: 649362 - DNA, 120 bp, Artificial Sequence
  ENSG00000182871_58 (sequence is synthesized)
ttttgggtttaaagaaaagtgagctcaagcttctgaaagtggatgaacacatggcgtgtgaggggctcctggtgggtcatgtcacagtgaacgtttacaaagataaatgtcacctcacac

SEQ ID NO: 649363 - DNA, 120 bp, Artificial Sequence
  ENSG00000182871_59 (sequence is synthesized)
acccgataataagacaaggcgcctgacgggacgaggcggcaggggggctcaggccctccagggccacgtgacgtccacagcacggccccggctggggggcaggctgtcccgtggctctgc

SEQ ID NO: 649364 - DNA, 120 bp, Artificial Sequence
  ENSG00000182871_60 (sequence is synthesized)
accccgcgttataaacaccaaggtgggatgaaatgcatcctctctgcttagcacgggccttgctcaccagcctggctcctcagacacacctgggattgccccttccaggacaggccagcc

SEQ ID NO: 649365 - DNA, 120 bp, Artificial Sequence
  ENSG00000182871_61 (sequence is synthesized)
cctttcctgctttcccaaaatggtctgggtggcaggagtggccgctctgatccaggtgggtgcggccatgcttgcagggccccgggaaggtttaccttcgtgtggcaaaggtgaggacgg

SEQ ID NO: 649366 - DNA, 120 bp, Artificial Sequence
  ENSG00000182871_62 (sequence is synthesized)
gtagaagccccatgccgccgaaacggcctgtgacatccgtgggagcctccatggcagaacactgcacactgacacagccctgactcctggagccctcccaccttccaacacacccacctt

SEQ ID NO: 649367 - DNA, 120 bp, Artificial Sequence
  ENSG00000182871_63 (sequence is synthesized)
ccttctagagccctcccaccttccctctggaaccctcccaccttccctctggagccctcccaccttccctctagcactccctccctctcgccaccggccccctcctaggcctggccagcc

SEQ ID NO: 649368 - DNA, 120 bp, Artificial Sequence
  ENSG00000182871_64 (sequence is synthesized)
cctgcagcaccccagacagtgaatcccactccagtcccttcatctggccagggagaggctgccagtctcatagcagatgctgagctggtgcccactgtgtgccaggtgtgcttgtaggca

SEQ ID NO: 649369 - DNA, 120 bp, Artificial Sequence
  ENSG00000182871_65 (sequence is synthesized)
cccggatgcagccccatcctaactttcaggggctttggtcctgacaggaggaggcaggggatggcatcctagcaaacgcgtgctgggagggctgggtgctgggcagggagggcaacctgc

SEQ ID NO: 649370 - DNA, 120 bp, Artificial Sequence
  ENSG00000182871_66 (sequence is synthesized)
cgtggactgggagggctgggtgctgggcagggagggcaccctcctgtgggctgggagggccgggtgttggggagggagaggcgggtgctgggcagggagggcaccctcctgtgggctggg

SEQ ID NO: 649371 - DNA, 120 bp, Artificial Sequence
  ENSG00000182871_67 (sequence is synthesized)
gggtgctgggcagggagggcaccctgctgtggactgggagggccgggtgctgggcagggagcgtaccctggcacaggcttggaggggcaggtgctgggcagggagggcaccctcctgtgg

SEQ ID NO: 649372 - DNA, 120 bp, Artificial Sequence
  ENSG00000182871_68 (sequence is synthesized)
gctgggagggccaggtgctggggcgggagagtcgggtgctgggcagggagggcaccctggctcaggcccagccgcaggtcctgggtgaccctgctgctttcttccagctggaggcccgga

SEQ ID NO: 649373 - DNA, 120 bp, Artificial Sequence
  ENSG00000182872_0 (sequence is synthesized)
agtaggtggatggtggtcggagcgccgactcccttctcgtcgtcgccattttgagctggtgactgtggccggctgggagtaggcggcagtgagtttccctgggagggcagcgcgcttggc

SEQ ID NO: 649374 - DNA, 120 bp, Artificial Sequence
  ENSG00000182872_1 (sequence is synthesized)
gcttctcccctccccccgatctgcctccagtctcggacttggttgttgcgcgctccggctccggctgagctgggagagttggaggaggtggcggcgggcagaggtgatgtctgggagccc

SEQ ID NO: 649375 - DNA, 120 bp, Artificial Sequence
  ENSG00000182872_2 (sequence is synthesized)
ttccttgacagcccgggccgagaagagtccctgcaggaagcatcacccaggctggcagatcatggtagcagcagcgggggtggctgggaagtgaaacggagccagcggctgaggaggggc

SEQ ID NO: 649376 - DNA, 120 bp, Artificial Sequence
  ENSG00000182872_3 (sequence is synthesized)
cccagcagcccccgaaggccctatcaggacatggagtatgaaagacgtggtggtcgtggtgacaggactggccgctatggagccactgaccgctcgcaggatgatggtggggagaaccgc

SEQ ID NO: 649377 - DNA, 120 bp, Artificial Sequence
  ENSG00000182872_4 (sequence is synthesized)
agccgagaccacgactaccgggacatggactaccgttcatatcctcgcgagtatggcagccaggagggcaagcatgactatgacgactcatctgaggagcagagtgcggaggattcctac

SEQ ID NO: 649378 - DNA, 120 bp, Artificial Sequence
  ENSG00000182872_5 (sequence is synthesized)
gaggcctccccgggctccgagactcagcgtaggcggcggcggcggcacaggcacagccccaccggcccgccaggcttcccccgagacggcgactatcgggaccaggactatcggaccgag

SEQ ID NO: 649379 - DNA, 120 bp, Artificial Sequence
  ENSG00000182872_6 (sequence is synthesized)
caaggggaggaggaggaggaggaggaggatgaggaggaggaggagaaggccagtaacatcgtcatgctgaggatgctgccacaggcagccactgaggatgacatccgtggccagctgcag

SEQ ID NO: 649380 - DNA, 120 bp, Artificial Sequence
  ENSG00000182872_7 (sequence is synthesized)
tcgcacggcgtgcaagcacgggaggttcggctgatgcggaacaaatcttcaggtcagagccggggcttcgccttcgtcgagtttagtcacttgcaggacgctacacgatggatggaagcc

SEQ ID NO: 649381 - DNA, 120 bp, Artificial Sequence
  ENSG00000182872_8 (sequence is synthesized)
aatcagcactccctcaacatcctgggccagaaggtgtcgatgcactacagtgaccccaagcccaagatcaatgaggactggctgtgcaataagtgtggcgtccagaacttcaaacgccga

SEQ ID NO: 649382 - DNA, 120 bp, Artificial Sequence
  ENSG00000182872_9 (sequence is synthesized)
gagaagtgcttcaaatgtggcgtgcccaagtcagaggcagagcagaagctgcccctcggcacgaggctggatcagcagacactgccactgggtggccgggagctgagccagggcctgctt

SEQ ID NO: 649383 - DNA, 120 bp, Artificial Sequence
  ENSG00000182872_10 (sequence is synthesized)
cccctgccgcagccctaccaggcccagggagtcctggcctcccaagccctgtcacagggctcggagccaagctcagagaacgccaatgacaccatcattttgcgcaacctgaacccacac

SEQ ID NO: 649384 - DNA, 120 bp, Artificial Sequence
  ENSG00000182872_11 (sequence is synthesized)
agcaccatggattccatcctgggggccctggcaccctacgcggtgctgtcctcctccaacgtgcgcgtcataaaggacaagcagacccaactgaaccgcggctttgccttcatccagctc

SEQ ID NO: 649385 - DNA, 120 bp, Artificial Sequence
  ENSG00000182872_12 (sequence is synthesized)
tccaccatcgtggaggcagcccagctgctgcagatcctgcaggccctgcacccaccactcactatcgacggcaagaccatcaatgttgagtttgccaagggttctaagagggacatggcc

SEQ ID NO: 649386 - DNA, 120 bp, Artificial Sequence
  ENSG00000182872_13 (sequence is synthesized)
tccaatgaaggcagtcgcatcagtgctgcctctgtggccagcactgccattgctgcggcccagtgggccatctcacaggcctcccaaggtggggagggtacctgggccacctccgaggag

SEQ ID NO: 649387 - DNA, 120 bp, Artificial Sequence
  ENSG00000182872_14 (sequence is synthesized)
gctatggcaacagccagggcacagagtcttccctctatgcccatggctacctcaagggcaccaagggccctggcatcactggaaccaaaggggatcccactggagcaggtcccgaggcct

SEQ ID NO: 649388 - DNA, 120 bp, Artificial Sequence
  ENSG00000182872_15 (sequence is synthesized)
ccctagagcctggggccgactctgtgtcgatgcaggctttctctcgcgcccagcctggtgctgctcctggcatctaccaacaatcagccgaggcgagcagtagccagggcactgctgcca

SEQ ID NO: 649389 - DNA, 120 bp, Artificial Sequence
  ENSG00000182872_16 (sequence is synthesized)
acagccagtcgtataccatcatgtcacccgctgtgctcaaatctgagctccagagccctacccatcctagttctgctctcccaccggctaccagccccactgcccaggaatcctacagcc

SEQ ID NO: 649390 - DNA, 120 bp, Artificial Sequence
  ENSG00000182872_17 (sequence is synthesized)
agtaccctgttcccgacgtctctacctaccagtacgatgagacctccggctactactatgacccccagaccggcctctactatgaccccaactcccagtattactacaatgctcagagcc

SEQ ID NO: 649391 - DNA, 120 bp, Artificial Sequence
  ENSG00000182872_18 (sequence is synthesized)
agcagtacctgtactgggatggggagaggcggacctatgttcccgccctggagcagtcggccgacggacataaggagacaggggcaccctcgaaggagggcaaagagaagaaggagaagc

SEQ ID NO: 649392 - DNA, 120 bp, Artificial Sequence
  ENSG00000182872_19 (sequence is synthesized)
acaagaccaagacagctcaacagattgccaaggacatggaacgctgggcccgcagtctcaacaaacaaaaagaaaacttcaaaaatagcttccagcctatcagctccctgcgagatgacg

SEQ ID NO: 649393 - DNA, 120 bp, Artificial Sequence
  ENSG00000182872_20 (sequence is synthesized)
agaggcgggagtcagccactgcagatgctggctatgccatcctcgagaagaagggagcactagccgagagacagcacaccagcatggatctcccgaaattggccagtgacgaccgcccaa

SEQ ID NO: 649394 - DNA, 120 bp, Artificial Sequence
  ENSG00000182872_21 (sequence is synthesized)
gccctccgcgaggactggtggcagcctacagcggggagagtgacagtgaggaggagcaggagcgtgggggccctgagcgggaggagaagctcaccgactggcagaagctggcctgtctgc

SEQ ID NO: 649395 - DNA, 120 bp, Artificial Sequence
  ENSG00000182872_22 (sequence is synthesized)
tctgccgacgccagttccccagcaaagaggcgctcatccggcaccagcagctctcagggctccacaagcaaaaccttgagattcaccggcgagcccacttgtcagaaaacgagctagaag

SEQ ID NO: 649396 - DNA, 120 bp, Artificial Sequence
  ENSG00000182872_23 (sequence is synthesized)
cactagagaagaatgacatggagcaaatgaagtaccgggaccgtgcagctgaacgcagagaaaagtatggcatccccgagccgccagagcccaagaggaggaagtacggcggcatatcca

SEQ ID NO: 649397 - DNA, 120 bp, Artificial Sequence
  ENSG00000182872_24 (sequence is synthesized)
cagcctctgtagacttcgagcagcctactcgggacgggctgggcagtgacaacattggcagtcggatgctgcaggccatgggctggaaagagggcagcggcctgggccgcaagaagcagg

SEQ ID NO: 649398 - DNA, 120 bp, Artificial Sequence
  ENSG00000182872_25 (sequence is synthesized)
gcattgtaacgcctatcgaggcccaaacacgggtgcggggctccggcctgggtgcacggggcagctcctacggggtcacctcaaccgagtcctacaaggagacactgcacaagacaatgg

SEQ ID NO: 649399 - DNA, 120 bp, Artificial Sequence
  ENSG00000182872_26 (sequence is synthesized)
tgacccgcttcaacgaggcccagtgagcagcttcaagagcaacttctccacatgttgggtgtccatcctggggcagggaaggacagagtgttggatggctgggacggggccttgctcttg

SEQ ID NO: 649400 - DNA, 120 bp, Artificial Sequence
  ENSG00000182872_27 (sequence is synthesized)
tcggccagcccactccccagccagagagggcttgaccaaatcaaattgaggtggtgacttttgttggaaaattgggctgggatcacgtcctgttttgtaataaaagctgaaaagtctgca

SEQ ID NO: 649401 - DNA, 120 bp, Artificial Sequence
  ENSG00000182885_0 (sequence is synthesized)
agacagccacagagctcctggcgtgggcaaggctggccaaggatggcgacgcccaggggcctgggggccctgctcctgctcctcctgctcccgacctcaggtcaggaaaagcccaccgaa

SEQ ID NO: 649402 - DNA, 120 bp, Artificial Sequence
  ENSG00000182885_1 (sequence is synthesized)
gggccaagaaacacctgcctggggagcaacaacatgtacgacatcttcaacttgaatgacaaggctttgtgcttcaccaagtgcaggcagtcgggcagcgactcctgcaatgtggaaaac

SEQ ID NO: 649403 - DNA, 120 bp, Artificial Sequence
  ENSG00000182885_2 (sequence is synthesized)
ttgcagagatactggctaaactacgaggcccatctgatgaaggaaggtttgacgcagaaggtgaacacgcctttcctgaaggctttggtccagaacctcagcaccaacactgcagaagac

SEQ ID NO: 649404 - DNA, 120 bp, Artificial Sequence
  ENSG00000182885_3 (sequence is synthesized)
ttctatttctctctggagccctctcaggttccgaggcaggtgatgaaggacgaggacaagccccctgacagagtgcgacttcccaagagcctttttcgatccctgccaggcaacaggtct

SEQ ID NO: 649405 - DNA, 120 bp, Artificial Sequence
  ENSG00000182885_4 (sequence is synthesized)
gtggtccgcttggccgtcaccattctggacattggtccagggactctcttcaagggcccccggctcggcctgggagatggcagcggcgtgttgaacaatcgcctggtgggtttgagtgtg

SEQ ID NO: 649406 - DNA, 120 bp, Artificial Sequence
  ENSG00000182885_5 (sequence is synthesized)
ggacaaatgcatgtcaccaagctggctgagcctctggagatcgtcttctctcaccagcgaccgccccctaacatgaccctcacctgtgtattctgggatgtgactaaagggaccactgga

SEQ ID NO: 649407 - DNA, 120 bp, Artificial Sequence
  ENSG00000182885_6 (sequence is synthesized)
gactggtcttctgagggctgctccacggaggtcagacctgaggggaccgtgtgctgctgtgaccacctgacctttttcgccctgctcctgagacccaccttggaccagtccacggtgcat

SEQ ID NO: 649408 - DNA, 120 bp, Artificial Sequence
  ENSG00000182885_7 (sequence is synthesized)
atcctcacacgcatctcccaggcgggctgtggggtctccatgatcttcctggccttcaccattattctttatgcctttctgaggctttcccgggagaggttcaagtcagaagatgcccca

SEQ ID NO: 649409 - DNA, 120 bp, Artificial Sequence
  ENSG00000182885_8 (sequence is synthesized)
aagatccacgtggccctgggtggcagcctgttcctcctgaatctggccttcttggtcaatgtggggagtggctcaaaggggtctgatgctgcctgctgggcccggggggctgtcttccac

SEQ ID NO: 649410 - DNA, 120 bp, Artificial Sequence
  ENSG00000182885_9 (sequence is synthesized)
tacttcctgctctgtgccttcacctggatgggccttgaagccttccacctctacctgctcgctgtcagggtcttcaacacctacttcgggcactacttcctgaagctgagcctggtgggc

SEQ ID NO: 649411 - DNA, 120 bp, Artificial Sequence
  ENSG00000182885_10 (sequence is synthesized)
tctggagctatgctggttccgtgaagggacaaccatgtacgccctctatatcaccgtccacggctacttcctcatcaccttcctctttggcatggtggtcctggccctggtggtctggaa

SEQ ID NO: 649412 - DNA, 120 bp, Artificial Sequence
  ENSG00000182885_11 (sequence is synthesized)
gatcttcaccctgtcccgtgctacagcggtcaaggagcgggggaagaaccggaagaaggtgctcaccctgctgggcctctcgagcctggtgggtgtgacatgggggttggccatcttcac

SEQ ID NO: 649413 - DNA, 120 bp, Artificial Sequence
  ENSG00000182885_12 (sequence is synthesized)
cccgttgggcctctccaccgtctacatctttgcacttttcaactccttgcaaggtgtcttcatctgctgctggttcaccatcctttacctcccaagtcagagcaccacagtctcctcctc

SEQ ID NO: 649414 - DNA, 120 bp, Artificial Sequence
  ENSG00000182885_13 (sequence is synthesized)
tactgcaagattggaccaggcccactccgcatctcaagaataggaaggcacggccctgcaatatggactcagctctggctctctgtgtgaccttgggcagctccgtgcctctctctgtac

SEQ ID NO: 649415 - DNA, 120 bp, Artificial Sequence
  ENSG00000182885_14 (sequence is synthesized)
tccctcagtttccttctctgtacaatgtggctggggagggagaggatgggaccaggttggaccacgtggcatcagaggtcccatccagatccaactataggtccaagagtccacgtaagc

SEQ ID NO: 649416 - DNA, 120 bp, Artificial Sequence
  ENSG00000182885_15 (sequence is synthesized)
aggtttgcaaggctctaaagttcctatagtcctgagaccccctgccagcaaagagtgacagtcacctccatgccctgccctcattgcaaagccctcactcaccttctggtctcagcaagg

SEQ ID NO: 649417 - DNA, 120 bp, Artificial Sequence
  ENSG00000182885_16 (sequence is synthesized)
gaggagagtctgttgctggcatagccctggaaggagcccccagcctctcccctcctcctccttgtcactggcctcccacaactccccttctggctgcctgtaaccttgaggggcattcag

SEQ ID NO: 649418 - DNA, 120 bp, Artificial Sequence
  ENSG00000182885_17 (sequence is synthesized)
gaggccagcgttccctcaggcactgggggtttgttttggggggtgggagttgatcctcccacccagtctgcccctggtctctgcccatccaatcagagcccaccctcctggaagagaccc

SEQ ID NO: 649419 - DNA, 120 bp, Artificial Sequence
  ENSG00000182885_18 (sequence is synthesized)
ccgtgttcagagtgctggcagccctgcacgtgtccagggacactgcatttcaaagaaccactgagtgggtgagctaccttgggcaaaccccccactcctgactctgactgccacgtgggt

SEQ ID NO: 649420 - DNA, 120 bp, Artificial Sequence
  ENSG00000182885_19 (sequence is synthesized)
ggcccgacctctgacctgctgtcatcgtagaggtagaaagcaaacaatctggggctcagcacacctgggggtgctcccactcattcagtgtgtggggcccctgagcagaggctgggcatt

SEQ ID NO: 649421 - DNA, 120 bp, Artificial Sequence
  ENSG00000182885_20 (sequence is synthesized)
gccactaggacctgagctcctagagaacaaggacctgggtggcctcgcttactgttccagcccaggccaagcacagggtctggctcgtggcaaaccttgaataaatatttgttggctgaa

SEQ ID NO: 649422 - DNA, 120 bp, Artificial Sequence
  ENSG00000182885_21 (sequence is synthesized)
tccgcttggccgtcaccattctggacattggtccagggactctcttcaaggtgaggactcagggaagctccaaggttaagtgctaggtcctctgggggctccatgccacagtttgctgtc

SEQ ID NO: 649423 - DNA, 120 bp, Artificial Sequence
  ENSG00000182885_22 (sequence is synthesized)
actggagcctgccgagggatccaatggggacagagcaggcagtgagcctcttagtgtttctaatgcagcccgtggccatctcagacacctgtcactagagtctatggtcttcagactcac

SEQ ID NO: 649424 - DNA, 120 bp, Artificial Sequence
  ENSG00000182885_23 (sequence is synthesized)
actggtcacacgctctcagatgtttgacccccacacatgagtgccctttggcttgtctatgtgtcctgtgggtgctcgtgtgctctgtgtgtcctcgtgcatgcacaaacatgcacatcc

SEQ ID NO: 649425 - DNA, 120 bp, Artificial Sequence
  ENSG00000182885_24 (sequence is synthesized)
aggtatgtgcacccagaggtgtgcatccactcctgtgcagacgtgtgtacccctgagggctagtgtgctccccccaccagcctcctttctaccgaatgcacactcacgctaagaccctca

SEQ ID NO: 649426 - DNA, 120 bp, Artificial Sequence
  ENSG00000182890_0 (sequence is synthesized)
ccttcctagtcgcggggagtctgagaaagcgcacctgttccgcgaccgtcacgcacccctcctccgcctgccgcgatgtaccgctacctggccaaagcgctgctgccgtcccgggccggg

SEQ ID NO: 649427 - DNA, 120 bp, Artificial Sequence
  ENSG00000182890_1 (sequence is synthesized)
gcgttgctgggccggggccgcggacagcccgccgccgcctcgcagccggggctcgcattggccgcccggcgccactacagcgagttggtggccgaccgcgaggacgaccccaacttcttc

SEQ ID NO: 649428 - DNA, 120 bp, Artificial Sequence
  ENSG00000182890_2 (sequence is synthesized)
ttggtggccgaccgcgaggacgaccccaacttcttcaagatggtggagggcttcttcgatcgcggcgccagcatcgtggaggacaagttggtgaaggacctgaggacccaggaaagcgag

SEQ ID NO: 649429 - DNA, 120 bp, Artificial Sequence
  ENSG00000182890_3 (sequence is synthesized)
gagcagaagcggaaccgggtgcgcggcatcctgcggatcatcaagccctgcaaccatgtgctgagtctctccttccccatccggcgcgacgacggctcctgggaggtcatcgaaggctac

SEQ ID NO: 649430 - DNA, 120 bp, Artificial Sequence
  ENSG00000182890_4 (sequence is synthesized)
cgggcccagcacagccagcaccgcacgccctgcaagggaggtatccgttacagcactgatgtgagtgtagatgaagtaaaagctttggcttctctgatgacatacaagtgtgcagtggtt

SEQ ID NO: 649431 - DNA, 120 bp, Artificial Sequence
  ENSG00000182890_5 (sequence is synthesized)
gatgtgccgtttgggggtgctaaagctggtgttaagatcaatcccaagaactataccgaaaatgaattggaaaagatcacaaggaggttcaccatggagctagcaaagaagggctttatt

SEQ ID NO: 649432 - DNA, 120 bp, Artificial Sequence
  ENSG00000182890_6 (sequence is synthesized)
ggtcctggcgttgatgtgcctgctccagacatgaacacaggtgagcgggagatgtcctggattgctgatacctatgccagcaccatagggcactatgatattaatgcacacgcctgtgtt

SEQ ID NO: 649433 - DNA, 120 bp, Artificial Sequence
  ENSG00000182890_7 (sequence is synthesized)
actggtaaacccatcagccaagggggaatccatggacgcatctctgctactggccgtggtgtcttccatgggattgaaaacttcatcaatgaagcttcttacatgagcattttaggaatg

SEQ ID NO: 649434 - DNA, 120 bp, Artificial Sequence
  ENSG00000182890_8 (sequence is synthesized)
acaccagggtttagagataaaacatttgttgttcagggatttggtaatgtgggcctacactctatgagatatttacatcgttttggtgctaaatgtattgctgttggtgagtctgatggg

SEQ ID NO: 649435 - DNA, 120 bp, Artificial Sequence
  ENSG00000182890_9 (sequence is synthesized)
agtatatggaatccagatggtattgacccaaaggaactggaagacttcaaattgcaacatgggtccattctgggcttccccaaggcaaagccctatgaaggaagcatcttggaggtcgac

SEQ ID NO: 649436 - DNA, 120 bp, Artificial Sequence
  ENSG00000182890_10 (sequence is synthesized)
gtgccaatgggccaacaactccagaagctgataagatcttcctggagagaaacattttggttattccagatctctacttgaatgctggaggagtgacagtatcttactttgagtggctga

SEQ ID NO: 649437 - DNA, 120 bp, Artificial Sequence
  ENSG00000182890_11 (sequence is synthesized)
agaatctaaatcatgtcagctatggccgtttgaccttcaaatatgaaagggattctaactaccacttgctcctgtctgttcaagagagtttagaaagaaaatttggaaagcatggtggaa

SEQ ID NO: 649438 - DNA, 120 bp, Artificial Sequence
  ENSG00000182890_12 (sequence is synthesized)
ctattcccattgtacccacggcagagttccaagacagtatatcgggtgcatctgagaaagacattgtgcactctgccttggcatacacaatggagcgttctgccaggcaaattatgcaca

SEQ ID NO: 649439 - DNA, 120 bp, Artificial Sequence
  ENSG00000182890_13 (sequence is synthesized)
cagccatgaagtataacctgggattggacctgagaacagctgcctatgtcaatgccattgaaaaagtcttcaaagtgtacagtgaagctggtgtgaccttcacatagatggatcatggct

SEQ ID NO: 649440 - DNA, 120 bp, Artificial Sequence
  ENSG00000182890_14 (sequence is synthesized)
gacttcctcactaacctcttcacgtgtaacttctgcagacctaccacaagtttacatgtaaccacagaaatccctttctctcctgactcattactaatggataccattctcaacaagtca

SEQ ID NO: 649441 - DNA, 120 bp, Artificial Sequence
  ENSG00000182890_15 (sequence is synthesized)
atccaaatcagcccgttaaggagaaagaaattaatatacaagctgagtgtgaaagtagaaatcacctacaccagagagctattttggtattttgcctttaaataaaaagcctcctccata

SEQ ID NO: 649442 - DNA, 120 bp, Artificial Sequence
  ENSG00000182890_16 (sequence is synthesized)
tggctgtgcagccttgctctgtggcttttcccagcacaatcagtgctagtgctggggaagggacagtcaagagcagtcagttgcttacttattttgctctggatgagtctgggacacgct

SEQ ID NO: 649443 - DNA, 120 bp, Artificial Sequence
  ENSG00000182890_17 (sequence is synthesized)
gtaactttaacacatttaagaagaaggtgtgtggccttttcagaaggtggcatggtcctcaagtgagttcttagtattttatatcagcaaaataactcaattttgcagattgcaaacaaa

SEQ ID NO: 649444 - DNA, 120 bp, Artificial Sequence
  ENSG00000182890_18 (sequence is synthesized)
tataaaagctgtttctgtttatgaattttattcttttagaatagaataagtacatgctgctgtaataaaattgcctttaatcacttaacaagcctaaccttgactcagtgaatgcctata

SEQ ID NO: 649445 - DNA, 120 bp, Artificial Sequence
  ENSG00000182890_19 (sequence is synthesized)
aaaataataaatgaaaaaaaacagtatttttatatcataaaagtttcatttgtagcttatcattcacgtattgttgtccagcaaacattaaaagccctgtggataattacgttatcttca

SEQ ID NO: 649446 - DNA, 120 bp, Artificial Sequence
  ENSG00000182896_0 (sequence is synthesized)
gcgccgccccatcccccagtggtcctcatgtggaggctggcactaggcggggttttcctggcagccgcccaggcttgtgtcttctgtcgcctcccagcccacgacttgtcaggccgcctg

SEQ ID NO: 649447 - DNA, 120 bp, Artificial Sequence
  ENSG00000182896_1 (sequence is synthesized)
gctcggctctgcagccagatggaggccaggcagaaggaatgtggggcctccccagacttctcggcctttgccttagatgaggtgtccatgaacaaagtcacagagaagactcacagagtc

SEQ ID NO: 649448 - DNA, 120 bp, Artificial Sequence
  ENSG00000182896_2 (sequence is synthesized)
ctgagggtcatggaaatcaaagaggctgtctcctcactcccttcatattggagttggcttcgaaagaccaagctccctgagtacaccagggaagctctctgtccccccgcctgcccgttg

SEQ ID NO: 649449 - DNA, 120 bp, Artificial Sequence
  ENSG00000182896_3 (sequence is synthesized)
cctctgctgtctcctgcagggggcagcaccacgctgtacaactgctccacctgcaaggggacggaggtgtcctgctggccccgaaagcgctgcttcccaggaagtcaggatctttgggaa

SEQ ID NO: 649450 - DNA, 120 bp, Artificial Sequence
  ENSG00000182896_4 (sequence is synthesized)
aagtggcttgtgaagacgctgaaaacctcccagcctccagctctaaggggtatgcactcacaacttccacatcccttggaggggaaccagtcagccccttagtcccagctccaaagacag

SEQ ID NO: 649451 - DNA, 120 bp, Artificial Sequence
  ENSG00000182896_5 (sequence is synthesized)
tctccagaccctaaaacccagacatccctgcttctggttggtgagataatgaaaaacaagaaaatccccaaaaacccagatcccccacaatcccagtgtcagatggcctcccgggaaccc

SEQ ID NO: 649452 - DNA, 120 bp, Artificial Sequence
  ENSG00000182896_6 (sequence is synthesized)
aggcacccacagctggaaagttcctcccctccagccctcaaccaatcacatggctgtcaacaatgccaggaaaatatctacagaaggaaagaatcccctacgccactcccaccacaccca

SEQ ID NO: 649453 - DNA, 120 bp, Artificial Sequence
  ENSG00000182896_7 (sequence is synthesized)
cacccccttctgcctgttccgggaaagcgggggcatctgccccagaagctattccaggccctcctatgactgatggggaatccgggaatgcatgttctggaaaactcaccccactagagt

SEQ ID NO: 649454 - DNA, 120 bp, Artificial Sequence
  ENSG00000182896_8 (sequence is synthesized)
gagatcacatcagtgggttcgcgggcatgccctccctccatcgtgttaacagtttgaaatcctggcctccctcagaggcctccatcctgccaggcctaagtaaaacttgctgttcatggc

SEQ ID NO: 649455 - DNA, 120 bp, Artificial Sequence
  ENSG00000182898_0 (sequence is synthesized)
acagcccgctgccccacgttctacctgctctcgcttgtgaactagcctctcctgagtttgtaaagatgcctcagctcctgagaaatgtcctctgtgtaattgagacattccacaaatatg

SEQ ID NO: 649456 - DNA, 120 bp, Artificial Sequence
  ENSG00000182898_1 (sequence is synthesized)
ccagtgaggacagtaacggggcaacactgactggcagagagctgaaacaactcatccagggcgagtttggggacttttttcagccctgtgtccttcatgctgtggaaaaaaattcaaatc

SEQ ID NO: 649457 - DNA, 120 bp, Artificial Sequence
  ENSG00000182898_2 (sequence is synthesized)
ttctgaatattgacagtaatggcatcatcagttttgatgaatttgttcttgcaatcttcaacttgttgaacctctgttatcttgacataaaatcattactaagttctgaactaagacagg

SEQ ID NO: 649458 - DNA, 120 bp, Artificial Sequence
  ENSG00000182898_3 (sequence is synthesized)
tgactaaaccagagaaggagaagctagatgatgtggatgttcaggcaaccaccggagatggtcagtggacagtgggaacttcaccaactcaagaaaagaggatgcttccttcaggaatgg

SEQ ID NO: 649459 - DNA, 120 bp, Artificial Sequence
  ENSG00000182898_4 (sequence is synthesized)
catcatcatctcagctcatccctgaagaaagtggagcagttggaaataacagagtggacccatggagagaagccaagactcacaactttccaggagaagcatctgaacacaatgatccta

SEQ ID NO: 649460 - DNA, 120 bp, Artificial Sequence
  ENSG00000182898_5 (sequence is synthesized)
agaacaaacacctggaaggagatgaacaaagtcaggaagtggctcaagatatacaaacaacagaagacaatgaaggccaacttaagacaaataagccaatggcaggatcaaaaaagacca

SEQ ID NO: 649461 - DNA, 120 bp, Artificial Sequence
  ENSG00000182898_6 (sequence is synthesized)
gcagtcccacagagaggaagggacaagataaggagatctcccaggaaggagatgaaccagccagagagcaaagtgtttccaagataagagaccagtttggagaacaggaaggaaacttgg

SEQ ID NO: 649462 - DNA, 120 bp, Artificial Sequence
  ENSG00000182898_7 (sequence is synthesized)
caacccaaagttcaccaccaaaagaagcaacacaaagaccatgtgaagatcaggaagttagaacagaaaaggaaaaacactctaatatacaagaaccacccctacaaagagaagatgagc

SEQ ID NO: 649463 - DNA, 120 bp, Artificial Sequence
  ENSG00000182898_8 (sequence is synthesized)
ccagttcacagcatgctgacctgccagaacaagctgctgccaggtcaccatctcagacacagaaatcaactgattccaaggatgtctgtagaatgtttgacactcaagaaccaggaaagg

SEQ ID NO: 649464 - DNA, 120 bp, Artificial Sequence
  ENSG00000182898_9 (sequence is synthesized)
atgctgaccagacaccagctaaaacaaagaatttgggtgaacctgaggattatggcagaacatctgagacccaagaaaaagaatgtgaaacaaaggacctgccagtccaatatggtagca

SEQ ID NO: 649465 - DNA, 120 bp, Artificial Sequence
  ENSG00000182898_10 (sequence is synthesized)
gaaatggttcagaaacatctgacatgagagatgaaaggaaagagaggagaggtcctgaggcccatggaacagcagggcagaaagaacgtgacagaaaaactcggccactagtcctggaaa

SEQ ID NO: 649466 - DNA, 120 bp, Artificial Sequence
  ENSG00000182898_11 (sequence is synthesized)
cccaaacacaggatgggaagtatcaggaactccaaggattatcaaaatcaaaagatgctgaaaaaggttctgagacacaatatctaagctcagaaggaggagatcagactcaccctgaac

SEQ ID NO: 649467 - DNA, 120 bp, Artificial Sequence
  ENSG00000182898_12 (sequence is synthesized)
ttgaaggaacagcagtctcaggagaagaggcagaacacaccaaagaaggcacagcagaagcatttgtgaacagcaaaaacgcacctgcagcagaaaggacactgggggcaagagaaagaa

SEQ ID NO: 649468 - DNA, 120 bp, Artificial Sequence
  ENSG00000182898_13 (sequence is synthesized)
cacaagatttagcaccacttgagaagcagtctgtaggagaaaatactagggtcaccaagactcatgaccaaccagttgaggaggaggatggttaccagggggaggaccctgagtcaccat

SEQ ID NO: 649469 - DNA, 120 bp, Artificial Sequence
  ENSG00000182898_14 (sequence is synthesized)
tcacacagagtgatgaggggtcttctgaaactcccaacagcctggcttcagaggaaggcaatagcagctcagagacaggtgaactgcctgtgcaaggggactcccagagtcaaggggacc

SEQ ID NO: 649470 - DNA, 120 bp, Artificial Sequence
  ENSG00000182898_15 (sequence is synthesized)
gagagtctgtgcaaggaggtcacaataataacccagatacccagaggcagggaacacctggtgagaaaaacagagctctggaggcagtggtaccagcagtcagaggagaggatgtacagc

SEQ ID NO: 649471 - DNA, 120 bp, Artificial Sequence
  ENSG00000182898_16 (sequence is synthesized)
tcacagaggaccaggaacagcctgccagaggagaacacaagaatcaaggcccagggaccaaaggcccaggtgcagctgtggagcccaatggacacccagaagcacaggaatccacagcag

SEQ ID NO: 649472 - DNA, 120 bp, Artificial Sequence
  ENSG00000182898_17 (sequence is synthesized)
gagatgaaaatagaaagtccctggaaatagagatcacaggtgccctggatgaagacttcactgaccagctttccctaatgcagctccctggaaagggagatagcagaaatgaattaaagg

SEQ ID NO: 649473 - DNA, 120 bp, Artificial Sequence
  ENSG00000182898_18 (sequence is synthesized)
tccaaggcccaagtagcaaagaagagaaaggaagagcaacagaggcccagaatactctgttagaaagtctagatgaggacaattcagcctccctcaagatacaacttgaaacaaaggaac

SEQ ID NO: 649474 - DNA, 120 bp, Artificial Sequence
  ENSG00000182898_19 (sequence is synthesized)
ctgtaacatcagaggaggaagatgaaagtccccaagagctggcaggagaaggtggtgaccaaaaaagtccagccaagaaagagcacaattcttcagtcccctggtcaagtcttgaaaagc

SEQ ID NO: 649475 - DNA, 120 bp, Artificial Sequence
  ENSG00000182898_20 (sequence is synthesized)
agatgcagagagaccaagagccctgttctgtggagaggggtgcagtctattccagtccactataccagtacctacaggagaagatactgcagcaaacaaatgtaacccaagaggagcatc

SEQ ID NO: 649476 - DNA, 120 bp, Artificial Sequence
  ENSG00000182898_21 (sequence is synthesized)
aaaagcaagttcagatagcccaggcatcaggcccagagctttgcagtgtatccctcaccagtgagatctcagattgttctgtctttttcaactacagccaagcatcacaaccatatacca

SEQ ID NO: 649477 - DNA, 120 bp, Artificial Sequence
  ENSG00000182898_22 (sequence is synthesized)
ggggacttccacttgatgagagtcctgctggtgcacaggaaacaccagctccccaggccttggaagataagcaaggtcaccctcagagagagaggctggtactacaaagggaggcaagca

SEQ ID NO: 649478 - DNA, 120 bp, Artificial Sequence
  ENSG00000182898_23 (sequence is synthesized)
ccacaaagcaatgaatcattatcatctcaacatgcccccaatttctctcccaatcaccctcaatactcacgtgtacacattcagatgcagattaacaatcttttaaattctcttcctaaa

SEQ ID NO: 649479 - DNA, 120 bp, Artificial Sequence
  ENSG00000182898_24 (sequence is synthesized)
tttctacaaaaacaaataataaaatattcagcagtgggggacaccactaaagaaacatctgagcaaacaaatacagtcagtaaaactcctaccaaacaatgctacttccaaatgccaaaa

SEQ ID NO: 649480 - DNA, 120 bp, Artificial Sequence
  ENSG00000182898_25 (sequence is synthesized)
tgggctttgtcatgagacagtttatctcaatgtacctgtcattaaaaatggaaaaattccttccatatctttagcaggtgccagtttttccaactgattcattgaatttaaaatagagca

SEQ ID NO: 649481 - DNA, 120 bp, Artificial Sequence
  ENSG00000182898_26 (sequence is synthesized)
gtaggaaattataagactctgcaataatatctcataatcataaaatattaattcatatatatagattactctgcttcatgacatttcctagaagtatttcaagttcatcctaaaatttta

SEQ ID NO: 649482 - DNA, 120 bp, Artificial Sequence
  ENSG00000182898_27 (sequence is synthesized)
tccttcaaaataattttagacaatgccataacttaattatgattttctagcacttgattaaagtaaatttatgactctgctcatgttcaggtgcagctgaatctatcgccatggattcat

SEQ ID NO: 649483 - DNA, 120 bp, Artificial Sequence
  ENSG00000182898_28 (sequence is synthesized)
tctttcaattactcatccaacaaatttttattaaatcccactccttacacaaacttttcatagcttttggctcaaataaacaatcaagaataattatgagagaaaacacaaatctaaagt

SEQ ID NO: 649484 - DNA, 120 bp, Artificial Sequence
  ENSG00000182898_29 (sequence is synthesized)
atgtttgattttataagaagctcttgtaaccaaccatccagtgagtctactaagtgtttacctatatggtttgatgagggtattaaattaaaattgataattaaacaacctgatgatcaa

SEQ ID NO: 649485 - DNA, 120 bp, Artificial Sequence
  ENSG00000182899_0 (sequence is synthesized)
cttctcttaccgccatcttggctcctgtggaggtgagtgaagggtctgctgctgaaatttgggggcaaataaccggagtaggtttgttcctgtgccttggcgagtcgccggcctgctggg

SEQ ID NO: 649486 - DNA, 120 bp, Artificial Sequence
  ENSG00000182899_1 (sequence is synthesized)
aacgggacttctaaaaggaactatgtctggaaggctgtggtccaaggccatttttgctggctataagcggggtctccggaaccaaagggagcacacagctcttcttaaaattgaaggtgt

SEQ ID NO: 649487 - DNA, 120 bp, Artificial Sequence
  ENSG00000182899_2 (sequence is synthesized)
gtcactcctggcggcaaaccaaacaaaaccagagtcatctggggaaaagtaactcgggcccatggaaacagtggcatggttcgtgccaaattccgaagcaatcttcctgctaaggccatt

SEQ ID NO: 649488 - DNA, 120 bp, Artificial Sequence
  ENSG00000182899_3 (sequence is synthesized)
ggacacagaatccgagtgatgctgtacccctcaaggatttaaactaacgaaaaatcaataaataaatgtggatttgtgctcttgtatttttaagtggattaaaaaacttactaccttaaa

SEQ ID NO: 649489 - DNA, 120 bp, Artificial Sequence
  ENSG00000182899_4 (sequence is synthesized)
ttgctacatgcttaaaatgatagaggttgctcagcatttttggagtacaagggggtcagagagacatgtgatgaaaattacagggcgagtacagagatttagaagggaacgggttttaat

SEQ ID NO: 649490 - DNA, 120 bp, Artificial Sequence
  ENSG00000182899_5 (sequence is synthesized)
catgctggagtgtagtggtgctcgctgcagcctcacattcaaaggctcaagcaatcctcccttggcctttgaagtagctgggaccacaggctcatgccaccatccctgggtcatttttaa

SEQ ID NO: 649491 - DNA, 120 bp, Artificial Sequence
  ENSG00000182899_6 (sequence is synthesized)
attttttgtagagagggtctgactcttgcctatgctggcttcaaactcctgggctcaagcaatcctccttccttggcctctcctgaagtgctgggatacagttatgagccaccacacctg

SEQ ID NO: 649492 - DNA, 120 bp, Artificial Sequence
  ENSG00000182899_7 (sequence is synthesized)
ccaagtgctttgtgatactatgcatttgttcaatgcagattgggaaacttaaaatttgaatggagattatgttgatgggctttggcagttcatttggatagactgggatgagaagctctt

SEQ ID NO: 649493 - DNA, 120 bp, Artificial Sequence
  ENSG00000182899_8 (sequence is synthesized)
gggacttgtgactggacaaagcattccagtatattaaaataaaattaagccatattactccactcataaaaagcaatcctatggtaggtacatggaggttgggaatagtgcacggaaagg

SEQ ID NO: 649494 - DNA, 120 bp, Artificial Sequence
  ENSG00000182899_9 (sequence is synthesized)
tggcagctttctttggcttcatgttttaatctggtaaagttcaagattgcactttaagcaggcctcctaaatattttagatttcttggggatatgctaaaataaaacaactaaggcatca

SEQ ID NO: 649495 - DNA, 120 bp, Artificial Sequence
  ENSG00000182899_10 (sequence is synthesized)
ctttcctcagcttttctcccccagccattgcataaaagtcttacgtgtgtgtttctctttaaggcttcatttcttttcctgagtgttgcctactgataacggcatgcattttctcaggct

SEQ ID NO: 649496 - DNA, 73 bp, Artificial Sequence
  ENSG00000182899_11 (sequence is synthesized)
ctctgttgccgaggctggaatgcagtgacttggtctccctcaccgaaacctccgcctcccgggttcaagcaag

SEQ ID NO: 649497 - DNA, 120 bp, Artificial Sequence
  ENSG00000182899_12 (sequence is synthesized)
agtcatcccgtgatcacttcatggcatttcccctccctttccagtctttgttccatggtcacctcagtgagaccttccttggctatttaaaatggcaggtaattcctcctttctgtacac

SEQ ID NO: 649498 - DNA, 120 bp, Artificial Sequence
  ENSG00000182899_13 (sequence is synthesized)
acaaatatcctcacacttgtccttttttgctattttttcaatattgcctctgttatcatctgacctatgtattttccttaaacttacttggttatcatgtgaaagatttttgttttatag

SEQ ID NO: 649499 - DNA, 120 bp, Artificial Sequence
  ENSG00000182899_14 (sequence is synthesized)
ctcaggtgatgaagtgggtaaccagggttgagagccactcgtgtagaggtcaccttgaatttgtatccaactatatcagcttgtattcctcttctttccctttttaaaatcagcaacaca

SEQ ID NO: 649500 - DNA, 120 bp, Artificial Sequence
  ENSG00000182899_15 (sequence is synthesized)
gagatgaaacagaattctatttgggcaagagatgcgcttatgtatataaagcaaagaactgggattaaccccttggtgtcttcagtctttcttccggccaggacacacactccttggccc

SEQ ID NO: 649501 - DNA, 120 bp, Artificial Sequence
  ENSG00000182899_16 (sequence is synthesized)
ttctcttaccgccatcttggctcctgtggagttttgtcttcattctgaagtttgcttagataccagctgttctctgaggtttgaatgtcttgccggaccctgcgtttcatatggatgttc

SEQ ID NO: 649502 - DNA, 120 bp, Artificial Sequence
  ENSG00000182899_17 (sequence is synthesized)
tgacttctgaggacttctgtggttgtgaaattgacaccagtaaattatgctgcaaaatttgtgtattgcagaacactggagagatagtaattgaaagaattaggtgtttggttgtttgtt

SEQ ID NO: 649503 - DNA, 88 bp, Artificial Sequence
  ENSG00000182899_18 (sequence is synthesized)
gagatagtaattgaaagaattaggtgtttggttgtttgttttttgttttttttttgggggggtgcagtggcataatcacagcttattg

SEQ ID NO: 649504 - DNA, 120 bp, Artificial Sequence
  ENSG00000182901_0 (sequence is synthesized)
tgaccttggcggaggagggcacactgataattcttgtatcttgagagtggaccaagttttgggtgacatggcccaggggaataattatgggcagaccagcaacggggtggccgatgaatc

SEQ ID NO: 649505 - DNA, 120 bp, Artificial Sequence
  ENSG00000182901_1 (sequence is synthesized)
acccaacatgctggtgtacagaaagatggaagacgtcatagcacggatgcaagatgaaaaaaatggaattcctattcgtacggtcaaaagctttctttccaagatacctagcgtcttctc

SEQ ID NO: 649506 - DNA, 120 bp, Artificial Sequence
  ENSG00000182901_2 (sequence is synthesized)
tggttcagacattgttcaatggttgataaagaacttaactatagaagatccagtggaggcgctccatttgggaacattaatggctgcccacggctacttctttccaatctcagatcatgt

SEQ ID NO: 649507 - DNA, 120 bp, Artificial Sequence
  ENSG00000182901_3 (sequence is synthesized)
cctcacactcaaggatgatggcaccttttaccggtttcaaaccccctatttttggccatcaaattgttgggagccggaaaacacagattatgccgtttacctctgcaagagaacaatgca

SEQ ID NO: 649508 - DNA, 120 bp, Artificial Sequence
  ENSG00000182901_4 (sequence is synthesized)
aaacaaggcacgactggagctcgcagactatgaggctgagagcctggccaggctgcagagagcatttgcccggaagtgggagttcattttcatgcaagcagaagcacaagcaaaagtgga

SEQ ID NO: 649509 - DNA, 120 bp, Artificial Sequence
  ENSG00000182901_5 (sequence is synthesized)
caagaagagagacaagattgaaaggaagatccttgacagccaagagagagcgttctgggacgtgcacaggcccgtgcctggatgtgtaaatacaactgaagtggacattaagaagtcatc

SEQ ID NO: 649510 - DNA, 120 bp, Artificial Sequence
  ENSG00000182901_6 (sequence is synthesized)
cagaatgagaaacccccacaaaacacggaagtctgtctatggtttacaaaatgatattagaagtcacagtcctacccacacacccacaccagaaactaaacctccaacagaagatgagtt

SEQ ID NO: 649511 - DNA, 120 bp, Artificial Sequence
  ENSG00000182901_7 (sequence is synthesized)
acaacaacagataaaatattggcaaatacagttagatagacatcggttaaaaatgtcaaaagtcgctgacagtctactaagttacacggaacagtatttagaatacgacccgtttctttt

SEQ ID NO: 649512 - DNA, 120 bp, Artificial Sequence
  ENSG00000182901_8 (sequence is synthesized)
gccacctgacccttctaacccatggctgtccgatgacaccactttctgggaacttgaggcaagcaaagaaccgagccagcagagggtaaaacgatggggttttggcatggacgaggcatt

SEQ ID NO: 649513 - DNA, 120 bp, Artificial Sequence
  ENSG00000182901_9 (sequence is synthesized)
gaattcagctcggaaaatttaagattctggctggcagtggaggacctgaaaaagaggcctattaaagaagtaccctcaagagttcaggaaatatggcaagagtttctggctcccggagcc

SEQ ID NO: 649514 - DNA, 120 bp, Artificial Sequence
  ENSG00000182901_10 (sequence is synthesized)
cccagtgctattaacttggattccaagagttatgacaaaaccacacagaacgtgaaggaacctggacgatacacatttgaagatgctcaggagcacatttacaaactgatgaaaagtgat

SEQ ID NO: 649515 - DNA, 120 bp, Artificial Sequence
  ENSG00000182901_11 (sequence is synthesized)
tcatacccacgttttataagatccagtgcctatcaggagcttctacaggcaaagaaaaagggcagaaacatccctattttcccatgccataaaaactgtacaccaacactgagggccagc

SEQ ID NO: 649516 - DNA, 120 bp, Artificial Sequence
  ENSG00000182901_12 (sequence is synthesized)
actaacctgttatgaaaagaggggaaatctctcacgtccaagaggttaacaagccttgctcagtcttactaaacggatcatcttgtagcatgaatgcagactggagtcactgcacacact

SEQ ID NO: 649517 - DNA, 120 bp, Artificial Sequence
  ENSG00000182901_13 (sequence is synthesized)
ttgtagctcaatgttgtgacctggagcagaggacattagaacaagatgttgcatgagcaaaggacctaaattgttatttttgtgtgtacattccatctccaatggactcttccgtctcaa

SEQ ID NO: 649518 - DNA, 120 bp, Artificial Sequence
  ENSG00000182901_14 (sequence is synthesized)
tgcctccattccaaactgttgtctgctttctttctccttctactatgctggatctgtgtctcttcctttttaacaagttcaagtgaagtaaaaccttttctttttttccttctttctctc

SEQ ID NO: 649519 - DNA, 120 bp, Artificial Sequence
  ENSG00000182901_15 (sequence is synthesized)
tctctctctctcaaagcttcagttagacacacagttcactgaaaattcagtcagtcaaaaactggaagaactgtaaaagaaaaaagtatatatcaataagtatacatgtggcttcacatt

SEQ ID NO: 649520 - DNA, 120 bp, Artificial Sequence
  ENSG00000182901_16 (sequence is synthesized)
tattaaacaataaattccgcacagaaagtttcatttcaccaatgtgtcacagtcagaaacaaactcatgtcttcgtctgttgtctgtacattctccgttaatgtttctcgcatttatttt

SEQ ID NO: 649521 - DNA, 120 bp, Artificial Sequence
  ENSG00000182901_17 (sequence is synthesized)
tataccatatttaaagaagaaacaccttttactccaaatgtattaaagttgatcccttctctgtaaatttgtgtatgtttatattgttgttttatctttcattaaaagatgcagaatctc

SEQ ID NO: 649522 - DNA, 120 bp, Artificial Sequence
  ENSG00000182901_18 (sequence is synthesized)
gggcggcggcgaggcgagggtggcggtcgcctgagcagctagagccggggcggcgcggaatccgcatccgccgcgagtgtgatgaagctaccctgcctcgctgctccgcttgccgccagc

SEQ ID NO: 649523 - DNA, 120 bp, Artificial Sequence
  ENSG00000182901_19 (sequence is synthesized)
gtcgcgcgcacgggccgggcgtctcgactcccgcgcgcgctcggctggtcccagtccccgggagaagaagcggaggagggagagagccagcgaggcggcccaggggagcgggcgcgagtg

SEQ ID NO: 649524 - DNA, 120 bp, Artificial Sequence
  ENSG00000182902_0 (sequence is synthesized)
attctggacagcatatgacaaggacgaggacccctattctagccagttaaagctggacagaatttttaaaagcaatgaagccagttccttggatatatccacgggctttgctttgagaag

SEQ ID NO: 649525 - DNA, 120 bp, Artificial Sequence
  ENSG00000182902_1 (sequence is synthesized)
gaactgagtaggcagtgagaagagtcgagtgaagcctggcccgtgagtgcctcaacaactgagatgaacgtcgactcgcttgcaggcaagttgtcactcagcagcgatctgaactatatc

SEQ ID NO: 649526 - DNA, 120 bp, Artificial Sequence
  ENSG00000182902_2 (sequence is synthesized)
ctgggttccagaaaaggcagaggttcttaccgaaagcaggggaggaagccgcagcccaaggaggtcgtcacttgccgggaaggtggctcgggccaggctgcactcaaaacccgtgctctg

SEQ ID NO: 649527 - DNA, 120 bp, Artificial Sequence
  ENSG00000182902_3 (sequence is synthesized)
tccacactgctacggggccagagccaaggaagcttccacttcttcccccagacagccccaacagcggctaccccaaggagccagcagccttgtgtcctgggatccccagcccctgcagaa

SEQ ID NO: 649528 - DNA, 120 bp, Artificial Sequence
  ENSG00000182902_4 (sequence is synthesized)
tgacccaccaggatctgagcatcacagccaaactcatcaatggaggtgtagcagggctcgtgggggtgacctgcgtgttccccatcgacttggccaagactcgcctgcagaaccagcatg

SEQ ID NO: 649529 - DNA, 120 bp, Artificial Sequence
  ENSG00000182902_5 (sequence is synthesized)
ggaaagccatgtacaaaggaatgatcgactgcctgatgaagacggctcgggcggagggcttcttcggcatgtaccgaggggctgcagtgaacctcactctggtcactccagagaaggcca

SEQ ID NO: 649530 - DNA, 120 bp, Artificial Sequence
  ENSG00000182902_6 (sequence is synthesized)
tcaagctggcggccaacgactttttccggcggctgctcatggaagatgggatgcagcggaacctgaagatggagatgcttgccgggtgtggggctgggatgtgccaggtcgtggtgacct

SEQ ID NO: 649531 - DNA, 120 bp, Artificial Sequence
  ENSG00000182902_7 (sequence is synthesized)
gtcccatggaaatgctcaagattcagctgcaggatgctggacgcctggccgtccatcatcagggctcggcctcagcaccctccacctccaggtcctacacaactggttcggcttccaccc

SEQ ID NO: 649532 - DNA, 120 bp, Artificial Sequence
  ENSG00000182902_8 (sequence is synthesized)
acaggcgcccctctgccaccctcattgcctgggagctgctccgcactcagggcctggctgggctctacaggggcctgggtgccactctcctcagagacattcctttctccatcatctact

SEQ ID NO: 649533 - DNA, 120 bp, Artificial Sequence
  ENSG00000182902_9 (sequence is synthesized)
ctggggttcaacgagctcgccggtaaggcgtcctttgcacattccttcgtgtcaggctgtgtggcaggttccatagctgcggtcgcagtgacgcctctagatgttctgaaaactcgaatc

SEQ ID NO: 649534 - DNA, 120 bp, Artificial Sequence
  ENSG00000182902_10 (sequence is synthesized)
caaaccctcaagaaaggcctgggcgaggacatgtacagtgggatcaccgactgtgccaggaaactctggattcaggagggaccatctgccttcatgaaaggcgctggctgccgggcactg

SEQ ID NO: 649535 - DNA, 120 bp, Artificial Sequence
  ENSG00000182902_11 (sequence is synthesized)
gtcatagcacctctctttgggattgctcaaggggtctattttattgggattggagagcgcatcttaaagtgttttgactagacagagctggaggtcaagtccctgcgcttgccgccctct

SEQ ID NO: 649536 - DNA, 120 bp, Artificial Sequence
  ENSG00000182902_12 (sequence is synthesized)
ctctagctgtttcacttagcctagagggggcaagggcaggtggggccactctggcctgcctggtcctctgcgttgtagtgctacctcaatctcgggagaaacagccctatattctaacaa

SEQ ID NO: 649537 - DNA, 120 bp, Artificial Sequence
  ENSG00000182902_13 (sequence is synthesized)
gttgagcacagccttcttccccttcgtgtctacactcgttttcctttgtgggcacagctaccaggggcttttggaagcccctaaccacctacttttcaacaaaaatggtactttcgttgt

SEQ ID NO: 649538 - DNA, 120 bp, Artificial Sequence
  ENSG00000182902_14 (sequence is synthesized)
attaattgcaggaccttaacaggtagtcacaatagaagggttgtttctgtattttaacatttctatttcacagtcaaactcggcattcttcagtcagcttgaggatttagcattgttaat

SEQ ID NO: 649539 - DNA, 120 bp, Artificial Sequence
  ENSG00000182902_15 (sequence is synthesized)
cttggactccataacttatgagtcctagcactgattttgaggaaaaggaggatcagaagttcaagggaccgtgaaagccctcagagtcagcacctagtttgagaccaagcaccctttcga

SEQ ID NO: 649540 - DNA, 120 bp, Artificial Sequence
  ENSG00000182902_16 (sequence is synthesized)
atccctggatggctgagggggctgaggccggctctgactgggcagctcagcccctcccccagagcccagggtcttgcacacccctccctgtaaccaaggaacactctgaaataaaggtga

SEQ ID NO: 649541 - DNA, 120 bp, Artificial Sequence
  ENSG00000182902_17 (sequence is synthesized)
atggctaaaatctcatctgttcatcagtgggtacagcagataggctgcagtgaatgctatcaccatctacttttctacgtccatttcaaaaccaaacattaaaaagggcatagaagcaga

SEQ ID NO: 649542 - DNA, 120 bp, Artificial Sequence
  ENSG00000182902_18 (sequence is synthesized)
gtaaacagcaacctacttgccacctggggaggtgcagcgtggcttgactggatagtagcctctttgggttttgcttcaaacccaacctatttgaaggtgcagtgtgcggtgagagtctgg

SEQ ID NO: 649543 - DNA, 120 bp, Artificial Sequence
  ENSG00000182902_19 (sequence is synthesized)
aaccctgcagtggtgatgagggggaggcagagggagggaaactgaccacagaagggaaaaccagtccaagctggctgacactgaaagccacctctccctgcagctcagcagcgatctgaa

SEQ ID NO: 649544 - DNA, 120 bp, Artificial Sequence
  ENSG00000182902_20 (sequence is synthesized)
ccaggtttctgaagaacaagctgagtcctagggaagagcaagacccctgtcccccatataacatatacactacatctactgtggcaaatacgtacacacaagcatctgtgcacatatatg

SEQ ID NO: 649545 - DNA, 120 bp, Artificial Sequence
  ENSG00000182902_21 (sequence is synthesized)
ttattgttcaacatagtttaattgtttgggttcatcttctctaactacaaaattaagtttacagttctctttatcgtcccaagtttcttcctttgtgaaaggcccactatcatctactct

SEQ ID NO: 649546 - DNA, 120 bp, Artificial Sequence
  ENSG00000182902_22 (sequence is synthesized)
taccacttccaggtaaatccatctccaaatattttgttcacagtctgcctcccgcctgaaagataagaaaagttgagtgggttccaaggagtctgagaaagctttgttttctatttcccg

SEQ ID NO: 649547 - DNA, 120 bp, Artificial Sequence
  ENSG00000182902_23 (sequence is synthesized)
tcttccaaagctcctatacccagcagggtggggggccatgttatctaaactgtggctttacttttggctggaactaggtcacctcaagggctgaccgacttgaagccttcactgtgggaa

SEQ ID NO: 649548 - DNA, 120 bp, Artificial Sequence
  ENSG00000182902_24 (sequence is synthesized)
gtgcctgctctcttattatgaacaatagctggcattcccccccaggcacggtttccatagtcctcagcaaccctggagtgagttcgacgggaatgcaggcccagagaggagaggtcacag

SEQ ID NO: 649549 - DNA, 120 bp, Artificial Sequence
  ENSG00000182902_25 (sequence is synthesized)
tcaggatgcaaactcagttctgcctgaccttcagtccgtttgtgtgagaactgcacacgtggctccaggcctgcggaggagccagaggacgggccggggaagcttggggcagagcggtgc

SEQ ID NO: 649550 - DNA, 120 bp, Artificial Sequence
  ENSG00000182902_26 (sequence is synthesized)
tcccagctccagggacttcccgggttgcagcaagatgcctcacccgggtgagtgcggctgtcctgtctggaccagacctgggccagggaggctgaagagggtctctggacacctgtgggg

SEQ ID NO: 649551 - DNA, 120 bp, Artificial Sequence
  ENSG00000182902_27 (sequence is synthesized)
ctggggttccccactgtctgtgcccctgcccattcctggctgcatccgctccctaacctgcccctccctctgcctctctcctccccctgtcctccccctgtcctagcatcacagccaaac

SEQ ID NO: 649552 - DNA, 120 bp, Artificial Sequence
  ENSG00000182902_28 (sequence is synthesized)
cgttgctgcggggatggggccagggctgccagggggtccttcctgatgagcctctgtgctcttgggtggagacagaggcagctctgggtcctggtaaggcttccggagacccacagagca

SEQ ID NO: 649553 - DNA, 120 bp, Artificial Sequence
  ENSG00000182902_29 (sequence is synthesized)
caccccccgccaccgcctcagtaagagcaggcgagccctccctacctgcctgcctctctctgcctggctagaagcgaagagagagaggctgaaagggactgagggacggggcctgagctc

SEQ ID NO: 649554 - DNA, 120 bp, Artificial Sequence
  ENSG00000182902_30 (sequence is synthesized)
ctggcaaggagttctgggtggctcctccccagctcggtccagcgttgctgcggtccctgcggggtccccagccaggaggtaccttggacaatggatcccaagctggagttgagccggagc

SEQ ID NO: 649555 - DNA, 120 bp, Artificial Sequence
  ENSG00000182902_31 (sequence is synthesized)
tcgtatgcttgtgccgccgagaagcaaaacacaaaccctagacagccccgagctagcagccaatgggactggcttgtgcggcacagaggagcggaaccccagtccctgcgcctggcgcct

SEQ ID NO: 649556 - DNA, 120 bp, Artificial Sequence
  ENSG00000182902_32 (sequence is synthesized)
gtcactggaactgctgttttatcatcagcgaccccaccagcagcaacaaaaataaaatggcttcctgataaccaaactgaggagtccgtaagaaaaaaatacgtaaaaaggggagaatgt

SEQ ID NO: 649557 - DNA, 120 bp, Artificial Sequence
  ENSG00000182902_33 (sequence is synthesized)
agagttggtaggaaaagactcttctagcaaataaaccattgggggaaaggggaagagcagccagtgggacagggacactcatcccatttgttggatagagtcagaaggggtgggcacgag

SEQ ID NO: 649558 - DNA, 120 bp, Artificial Sequence
  ENSG00000182902_34 (sequence is synthesized)
gaagtggccgcccctgaccatggggtatcccaggcaacatccaagccaggaagcaagtgattttcttggcaataagtcaagaactggctcctggctactagtgtgaggggctcattcctg

SEQ ID NO: 649559 - DNA, 120 bp, Artificial Sequence
  ENSG00000182902_35 (sequence is synthesized)
agcaacctacttgccacctggggaggtgcagcgtggcttgactggatagtagcctctttgggttttgcttcaaacccaacctatttgaagctcagcagcgatctgaactatatcctgggt

SEQ ID NO: 649560 - DNA, 120 bp, Artificial Sequence
  ENSG00000182902_36 (sequence is synthesized)
tctgctaataagaggaagtaggcggggacgtggtcatcaccctgaggcccccaacccagctcctcacagtgggaataaatgagcacagctctacagtggagccagcagtctcgtgacaag

SEQ ID NO: 649561 - DNA, 120 bp, Artificial Sequence
  ENSG00000182903_0 (sequence is synthesized)
acagcggggcgtcacctcggacatacgaacagcgggcggtgttcccggctccgtggggccgtcttcccggcgagtccgcgacggtcgccgcccacggcgaggaacccttaacattcaggg

SEQ ID NO: 649562 - DNA, 120 bp, Artificial Sequence
  ENSG00000182903_1 (sequence is synthesized)
atgtggccatagaattctctccagaagagtggaaatgcctggaccctgcccagcagaatttgtatagagatgtgatgttggagaactacagaaacctggtctccctagctatgtgttctc

SEQ ID NO: 649563 - DNA, 120 bp, Artificial Sequence
  ENSG00000182903_2 (sequence is synthesized)
atttcacccaagactttttgccagtgcaggggatagaagattcattccacaaacttatactgagaagatatgagaaatgtgggcatgataatttacaattaaggaaaggctgtaaaagta

SEQ ID NO: 649564 - DNA, 120 bp, Artificial Sequence
  ENSG00000182903_3 (sequence is synthesized)
tgaacgtgtgtaaagtgcagaagggagtttataatggaattaataaatgcttgtcaaatactcagagcaaaatatttcaatgtaatgcacgtgtcaaagtttttagtaaatttgcaaatt

SEQ ID NO: 649565 - DNA, 120 bp, Artificial Sequence
  ENSG00000182903_4 (sequence is synthesized)
caaacaaagataagacaagacatactggagagaaacactttaaatgtaacgaatgtggcaagtcatttcagaagttctcagacctaactcaacataaaggaattcatgctggagagaaac

SEQ ID NO: 649566 - DNA, 120 bp, Artificial Sequence
  ENSG00000182903_5 (sequence is synthesized)
cataaaggaattcatgctggagagaaaccctacacttgtgaagaacgtggcaaagactttggatggtacacagacctgaatcaacacaagaaaattcatactggagagaaaccttacaaa

SEQ ID NO: 649567 - DNA, 120 bp, Artificial Sequence
  ENSG00000182903_6 (sequence is synthesized)
ggtcaacaaaccttactgcacataagagaattcacaacagagagaaagcttacacaggtgaagatcgtgacagagcctttggatggtccacaaacctgaatgaatataagaaaattcata

SEQ ID NO: 649568 - DNA, 120 bp, Artificial Sequence
  ENSG00000182903_7 (sequence is synthesized)
tgaatataagaaaattcatactggagataaaccctacaaatgtaaagaatgtgggaaagcctttatgcattcctcacacctgaataaacatgagaaaattcatactggagagaaacccta

SEQ ID NO: 649569 - DNA, 120 bp, Artificial Sequence
  ENSG00000182903_8 (sequence is synthesized)
aagtcatttcctcatcctcaagctttgctaaacataagaggattcatactggcgagaaaccctttaaatgtttagaatgtggtaaagcctttaatatttccacaacccttactaaacata

SEQ ID NO: 649570 - DNA, 84 bp, Artificial Sequence
  ENSG00000182903_9 (sequence is synthesized)
ctggagagaaaccctacacatgtgaagtatgtggcaaagcctttagacagtccgcaaacctttatgtacatagagaatgtggca

SEQ ID NO: 649571 - DNA, 85 bp, Artificial Sequence
  ENSG00000182903_10 (sequence is synthesized)
cgtacatcgaagactgtggcaaagcctttggacggtacacagccctgaatcaacacaagaaaattcatactggagagaaacctta

SEQ ID NO: 649572 - DNA, 120 bp, Artificial Sequence
  ENSG00000182903_11 (sequence is synthesized)
ctggagagaaaccttacaaatgtgaagagtgtggcaaagcctttaatagttcaacaaaccttactgcacataagagaattcacaccagagagaaaccctacacatgtgaagatcgtggca

SEQ ID NO: 649573 - DNA, 120 bp, Artificial Sequence
  ENSG00000182903_12 (sequence is synthesized)
cctacacatgtgaagatcgtggcagagcctttggattgtccacaaacctgaatgaatataagaaaattcatactggagataaaccctacaaatgtaaagaatgtgggaaagcctttatac

SEQ ID NO: 649574 - DNA, 120 bp, Artificial Sequence
  ENSG00000182903_13 (sequence is synthesized)
catactggaaagaaaccctacaaatgtaagcaatgtggcaaagtcattacctcatcctcaagctttgctaaacataagaggattcatactggcgagaaaccctttgaatgtttagaatgt

SEQ ID NO: 649575 - DNA, 120 bp, Artificial Sequence
  ENSG00000182903_14 (sequence is synthesized)
taaacataagaggattcatactggcgagaaaccctttgaatgtttagaatgtggtaaagcgtttactagttccacaacccttactaaacataggagaattcatactggagagaaacccta

SEQ ID NO: 649576 - DNA, 72 bp, Artificial Sequence
  ENSG00000182903_15 (sequence is synthesized)
ctggagagaaaccctacacatgtgaagtatgtggcaaagcctttagacagtccgcaatcctttatgtacata

SEQ ID NO: 649577 - DNA, 120 bp, Artificial Sequence
  ENSG00000182903_16 (sequence is synthesized)
ctggagagaaaccttacaaatgtgaagagtgtggcaaagcctttggacggtacacagacctgaatcaacacaagaaaattcatactggagagaaactttacaaatgtgaagagtgtggca

SEQ ID NO: 649578 - DNA, 120 bp, Artificial Sequence
  ENSG00000182903_17 (sequence is synthesized)
aagagtgtggcaaagactttgtatggtacacggacctgaatcaacagaagaaaatttacactggggagaaaccttacaaatgtgaagagtgtggcaaagcctttgccccatcaacagacc

SEQ ID NO: 649579 - DNA, 120 bp, Artificial Sequence
  ENSG00000182903_18 (sequence is synthesized)
tgaatcaacacacgaaaattcttactggagagcaaagttacaaatgtgaagagtgtggcaaagcctttggatggtccatagccctgaatcaacacaagaaaattcatactggagaaaaac

SEQ ID NO: 649580 - DNA, 120 bp, Artificial Sequence
  ENSG00000182903_19 (sequence is synthesized)
tttggatggtccacaaacctgaacgaatataagaaaattcatactggagataaactctacaaatgtaaagaatgtgggaaagtgtttaaacagtcctcacacctgaatagacatgagaaa

SEQ ID NO: 649581 - DNA, 120 bp, Artificial Sequence
  ENSG00000182903_20 (sequence is synthesized)
atactggaaagaaaccctacaaatgtaaggaatgtggcaaagtcattacgtcatcctcaagctttgctaaacataagaggattcatacaggtgagaaaccctttaaatgtttagaatgtg

SEQ ID NO: 649582 - DNA, 83 bp, Artificial Sequence
  ENSG00000182903_21 (sequence is synthesized)
gaggattcatacaggtgagaaaccctttaaatgtttagaatgtggtaaagcgtttactagttccacaacccttactaaacata

SEQ ID NO: 649583 - DNA, 84 bp, Artificial Sequence
  ENSG00000182903_22 (sequence is synthesized)
ttatgtacatagagaatgtggcaaaacctttagacagtctgcaaatctttatgcgcataagaaaattcatactggagagaaacc

SEQ ID NO: 649584 - DNA, 120 bp, Artificial Sequence
  ENSG00000182903_23 (sequence is synthesized)
acgtgtggagactgtggcaaaacctttagacagtctgcaaatctttatgcacataagaaaattcatactggagataaaaccatacaagtgtaaagaatgtggcaaagcctttaagtcata

SEQ ID NO: 649585 - DNA, 120 bp, Artificial Sequence
  ENSG00000182903_24 (sequence is synthesized)
ctacagcattcttaaacataagagaactcataccaggggaatgtcttacgaaggtgacgaatgtcgcggtctttaaatgctcctcaatcctttctaatcataagataattcataatgaag

SEQ ID NO: 649586 - DNA, 120 bp, Artificial Sequence
  ENSG00000182903_25 (sequence is synthesized)
agaaactctaaaatgtgaaaaatgtgagaaggcttttaatcacacctcaatctgttgtagacataagagtaattatattgatgagaagccaaattaaaattaaaaatgtggcaaagactt

SEQ ID NO: 649587 - DNA, 120 bp, Artificial Sequence
  ENSG00000182903_26 (sequence is synthesized)
ccaattctagtcagttcttaatgtaattcctactgaagaaaacacctggaaatacaaaaaatgtggcaaaacttgtaaccaatgcttagcatttttgcacatgatagtatttatatgtga

SEQ ID NO: 649588 - DNA, 120 bp, Artificial Sequence
  ENSG00000182903_27 (sequence is synthesized)
gactacttgtacaaacataaaaatatacaaaagctattgtctacttgaaatttatagttaataaaagcattataaatgtaatttctgttgaaagaccttttagaaaatataggccattaa

SEQ ID NO: 649589 - DNA, 120 bp, Artificial Sequence
  ENSG00000182903_28 (sequence is synthesized)
agtgaagaatagtcttaagacagagaatacaaagataaagagggctctagtacctgtacttgtatcccagaacttactatatgcattttgtactagaggaaaactctgaagcagttgctt

SEQ ID NO: 649590 - DNA, 120 bp, Artificial Sequence
  ENSG00000182903_29 (sequence is synthesized)
aaactttgttcaacatcagagaatttatattggagagaaatcctacaaatgtaataaatgtggaaaaacctctgttcagaaactgcaggttaagaaaccagaggccaggcgcggtggctc

SEQ ID NO: 649591 - DNA, 85 bp, Artificial Sequence
  ENSG00000182903_30 (sequence is synthesized)
gatcacctgaggtcgggagttcaaggacagcctgaccaatatggaaggacatggtggtgcatggctgtaatcccagctactcagg

SEQ ID NO: 649592 - DNA, 120 bp, Artificial Sequence
  ENSG00000182903_31 (sequence is synthesized)
ggtaacaagagtgaaactctgtctcaaaacaagataaaaagaaaagaaacaccagagaatttttactagaatataatttgtaggtgcagtaaatgtgaagaaatatttaggctaaaatta

SEQ ID NO: 649593 - DNA, 120 bp, Artificial Sequence
  ENSG00000182903_32 (sequence is synthesized)
agactatgtaaacatcagaggatttacagtagaaagaactaaggaactaacacttcagactttaaaataaatcagagtattaagtataacaaaagttgaacctgttagaaaatttccttg

SEQ ID NO: 649594 - DNA, 120 bp, Artificial Sequence
  ENSG00000182903_33 (sequence is synthesized)
ttgaaaagtaggtttttgaagagatatattcgaaatatattttttcacttgaaaaaagtaaaaatttttttcaaaagcaaataattcaactctaaaattatactatttcaacattctcat

SEQ ID NO: 649595 - DNA, 120 bp, Artificial Sequence
  ENSG00000182903_34 (sequence is synthesized)
attctcatttatgtgaaagcatgtgataaattgttgctgcgtcagagatatgagaaactcctttgcattaggtgggcattattcatagacttctacatgaaagagaagagaaataaaaga

SEQ ID NO: 649596 - DNA, 120 bp, Artificial Sequence
  ENSG00000182903_35 (sequence is synthesized)
tgcaccaggaaaatctgagcagagaggcttttagtggttgacttactgagtgatgcctgaagtaggtgttcagagtaatactttgcgttatactgagagagaatctgaattttagtagta

SEQ ID NO: 649597 - DNA, 120 bp, Artificial Sequence
  ENSG00000182903_36 (sequence is synthesized)
aattgttttgccaactgtatatttatgtaataagtgcaataaaatgcagtaaattttaaaattctcttaagataatgtgtgaacttaatttttgaaataaaaattgttattgtgttaaaa

SEQ ID NO: 649598 - DNA, 120 bp, Artificial Sequence
  ENSG00000182903_37 (sequence is synthesized)
ccgggatcttcggcggccttggcctgttgcttcagcctgagctcggttagggcctcacttccctgcttccacacctcagggaggcctcggtgattttgccagagcctcagcctccatcgc

SEQ ID NO: 649599 - DNA, 120 bp, Artificial Sequence
  ENSG00000182903_38 (sequence is synthesized)
agaagagccagtagtaaaacacaggtttgacttgcagtatccagaggaaatgtggagaaacacagttgtacagaagggaagaaaataggttgatactcctgttgcaggaccatttgaagt

SEQ ID NO: 649600 - DNA, 120 bp, Artificial Sequence
  ENSG00000182903_39 (sequence is synthesized)
ctgagagtttccaggatatgtcgttattgatccagctcaactttatgtatatgagaaacttggacagtctggacaatagaataaatgaagtcaataaaaccattcttttaacaaacttaa

SEQ ID NO: 649601 - DNA, 120 bp, Artificial Sequence
  ENSG00000182903_40 (sequence is synthesized)
taccataccttcagagtgttattttcctttttgtcataaggtgtctggaaatgaagtatggaaatgaaatcatgaataaagacccagttttcagaatctctccacgaagtagaggaactc

SEQ ID NO: 649602 - DNA, 120 bp, Artificial Sequence
  ENSG00000182903_41 (sequence is synthesized)
ataccaatccagaagagcctgaagaagatgttcaagctgaaagagtccaagcagcaaatgcactcactactccaaacttggaggaggaaccagtcataactgcaagctgtttacacaagg

SEQ ID NO: 649603 - DNA, 120 bp, Artificial Sequence
  ENSG00000182903_42 (sequence is synthesized)
aaaagtacttccattaaaatgataactgggtgcacagtgccaactgcaggagtggtggtgttacaaggcaacagagcatcagtaaggcaacagcgtgacaacagcctcaagttcttgggt

SEQ ID NO: 649604 - DNA, 120 bp, Artificial Sequence
  ENSG00000182903_43 (sequence is synthesized)
actgccctcaggagaactcactgtgtcccaaacttacaatgaaagagcatttggagttgtatgcagccgtgaaaggactgggcaaagatgctgctcttagtatttcatgattggtggaag

SEQ ID NO: 649605 - DNA, 120 bp, Artificial Sequence
  ENSG00000182903_44 (sequence is synthesized)
ctctcaagctccaggagcaacttaaggctcccgtgaaaactctatcagagggaataaagagaaagctatgcttcgtgctgagcatactggggaacccatcagtggtgcttctagacgagc

SEQ ID NO: 649606 - DNA, 120 bp, Artificial Sequence
  ENSG00000182903_45 (sequence is synthesized)
tgttcaccgggatggaccctgaggggcagcagcaaatgtggcagatacttcaggctaccattaaaaaccaggagaggggcgccctcttgaccacccattacatgtcagaggctaagtctc

SEQ ID NO: 649607 - DNA, 120 bp, Artificial Sequence
  ENSG00000182903_46 (sequence is synthesized)
tgtgtgaccgtgtggccatcatggtgtcaggaacgctaaggtgtattggttccattcaacagctgaaaagtttggtaaagattatttactagaaataaaaatgaaagaacctactcaggt

SEQ ID NO: 649608 - DNA, 120 bp, Artificial Sequence
  ENSG00000182903_47 (sequence is synthesized)
ggaagctctccacacagagattttgaagcttttcccacaggctgcttggcaggaaagatattcctctttaatggcatgtaagttacctgtggaggatgtccaccctctgtctcaggcctt

SEQ ID NO: 649609 - DNA, 120 bp, Artificial Sequence
  ENSG00000182903_48 (sequence is synthesized)
tttcaaattaaaggcagtgaaacagaccttcaacctggaggaatacagcctctctcaggctaccttggagcaggtgttcttagaactctgtaaagagcaggcgctgggaaatgttgatga

SEQ ID NO: 649610 - DNA, 120 bp, Artificial Sequence
  ENSG00000182903_49 (sequence is synthesized)
gtctccctaggtttgacttgcagtatccagaggaaatgtggagaaacacagttgtacagaagggaagaaaataggttgatactcctgttgcaggaccatttgaagtctgagagtttccag

SEQ ID NO: 649611 - DNA, 120 bp, Artificial Sequence
  ENSG00000182916_0 (sequence is synthesized)
gtaccagctccttactgccctgcagacaagcgtgccgtgcgtgcttgtggccaagggaaggaagagctggttgatccacagatagctccttcctccccgccccttcctttttgtttggag

SEQ ID NO: 649612 - DNA, 120 bp, Artificial Sequence
  ENSG00000182916_1 (sequence is synthesized)
gtcccaggatctgtgttcacagacatctgggggaagaaaaggagcaggaaactaccccgcacagagttaagcaggaaacaacaacaacatcatgcaaaaaccctgcaaagaaaacgaagg

SEQ ID NO: 649613 - DNA, 120 bp, Artificial Sequence
  ENSG00000182916_2 (sequence is synthesized)
aaagccaaagtgcagcgtgccaaagagggaggaaaaacgcccgtatggagaatttgaacgccagcaaacagaagggaattttagacagaggctgcttcagtctctcgaagaatttaaaga

SEQ ID NO: 649614 - DNA, 120 bp, Artificial Sequence
  ENSG00000182916_3 (sequence is synthesized)
ggacatagactataggcattttaaagatgaagaaatgacaagggagggagatgagatggaaaggtgtttggaagagataaggggtctgagaaagaaatttagggctctgcattctaacca

SEQ ID NO: 649615 - DNA, 120 bp, Artificial Sequence
  ENSG00000182916_4 (sequence is synthesized)
attattttctgttattaatgttgccactgctttctgtttgtctgcactttcttgataaatatttgctatcgttttactccagtcattcgatgttgctgagatttacatatgactcttgtc

SEQ ID NO: 649616 - DNA, 120 bp, Artificial Sequence
  ENSG00000182916_5 (sequence is synthesized)
aacatctcatcttttgacccaatcttattcatttaataagaggtctcattcatttgcatggaaaaatgctcattgtatattgcaaagtgaaaataacgagttgcaaaacagtgtatacat

SEQ ID NO: 649617 - DNA, 120 bp, Artificial Sequence
  ENSG00000182916_6 (sequence is synthesized)
atatgtgtgtatatatgtacactttatttgtacatttctatgtgacataatgcaaaggaaagtgtctgattttattatacaccaaaggttaacagtgaatctctgtgtgatctctttttt

SEQ ID NO: 649618 - DNA, 120 bp, Artificial Sequence
  ENSG00000182916_7 (sequence is synthesized)
tttctttttgcctatctgcatcttctcacttgccaaaaaatgaatatatgtttatgtgtgtatattacttgtgtcacaaaaaaccctaaagtagacagtaaaagaacttgtcaatcgcct

SEQ ID NO: 649619 - DNA, 120 bp, Artificial Sequence
  ENSG00000182916_8 (sequence is synthesized)
ttggaaggcaatgaaacacttaataaactctcaataacagaagcgtaaaaatgaaatgtaaacctccaattacctctggatctcttagccagagtaataaactggtaattattacagata

SEQ ID NO: 649620 - DNA, 120 bp, Artificial Sequence
  ENSG00000182919_0 (sequence is synthesized)
ggagctctagctcgcgtattctgaggaggcggggttggcctaggcgaagatccggactctgggtgttttgctaccgtgaccgtttagaaactgttcatacttggtgcgctgtggactctt

SEQ ID NO: 649621 - DNA, 120 bp, Artificial Sequence
  ENSG00000182919_1 (sequence is synthesized)
gtgataattaaccaagagtagctctatttgtccaacctcacacctaaagaagaaagaaaatggcttgtgctgagttttcttttcatgtaccaagtcttgaagagcttgctggagttatgc

SEQ ID NO: 649622 - DNA, 120 bp, Artificial Sequence
  ENSG00000182919_2 (sequence is synthesized)
agaaggggttaaaagataactttgctgatgtccaggtctctgtagttgattgccctgatttgactaaggaaccctttacctttcctgtaaaaggcatctgtgggaaaactagaattgcag

SEQ ID NO: 649623 - DNA, 120 bp, Artificial Sequence
  ENSG00000182919_3 (sequence is synthesized)
aagttggaggtgtgccttacttattgcctcttgtaaaccaaaaaaaagtttatgatctgaataaaattgcaaaagaaatcaagctgcctggagcctttattcttggagcaggagcaggtc

SEQ ID NO: 649624 - DNA, 120 bp, Artificial Sequence
  ENSG00000182919_4 (sequence is synthesized)
catttcagactctcgggttcaattctgagtttatgccagttattcagacagaaagtgaacacaagcctcctgtaaatggaagttactttgcccatgtgaaccctgcagatggagggtgcc

SEQ ID NO: 649625 - DNA, 120 bp, Artificial Sequence
  ENSG00000182919_5 (sequence is synthesized)
tactggagaaatacagtgagaaatgtcatgattttcagtgtgcattactggctaatctttttgccagtgaaggccaacctggcaaggtaattgaggtgaaagccaaaagaagaactggac

SEQ ID NO: 649626 - DNA, 120 bp, Artificial Sequence
  ENSG00000182919_6 (sequence is synthesized)
cacttaactttgtgacttgtatgagagagaccctggaaaaacattatggaaataagcctataggaatgggaggtactttcataattcagaagggaaaagtgaagtctcacattatgcctg

SEQ ID NO: 649627 - DNA, 120 bp, Artificial Sequence
  ENSG00000182919_7 (sequence is synthesized)
cagaattttcttcctgccccttgaactctgatgaagaagtgaataaatggttgcatttttatgaaatgaaagctcctttggtttgtctaccagtttttgtctccagagacccagggtttg

SEQ ID NO: 649628 - DNA, 120 bp, Artificial Sequence
  ENSG00000182919_8 (sequence is synthesized)
atttgcgactggagcacactcatttttttagtcgtcatggagaaggtggacactaccattatgacactactccagatatagtggaatatcttggatacttcttacctgcagagtttctct

SEQ ID NO: 649629 - DNA, 120 bp, Artificial Sequence
  ENSG00000182919_9 (sequence is synthesized)
atcgcattgatcaaccaaaagagacgcattcaattgggcgagattaaatcagctgatacttatttagaaaaagaaataattaaggttaattaattgattgacttattaattaatactgat

SEQ ID NO: 649630 - DNA, 61 bp, Artificial Sequence
  ENSG00000182919_10 (sequence is synthesized)
tgattgacttattaattaatactgatataaaaccaatagaaatgatcccacacacactgga

SEQ ID NO: 649631 - DNA, 120 bp, Artificial Sequence
  ENSG00000182919_11 (sequence is synthesized)
acatagcaagaccctgtctatttttttaaaaaagtaaaaaatagaaattatctcactacttaaatcccatttttttcacttcatatgaaagaacatattgatagtatattctatattatt

SEQ ID NO: 649632 - DNA, 120 bp, Artificial Sequence
  ENSG00000182919_12 (sequence is synthesized)
tcatagatctgtctgaaagagattgggaacaaaaatatctaattgagatattctttaattttttacatagcagctttattttttttattctgtagtatcagcgaaatcagtcatgtttat

SEQ ID NO: 649633 - DNA, 120 bp, Artificial Sequence
  ENSG00000182919_13 (sequence is synthesized)
accttgaatataaatatcaggaatcatgcaattatttctactatgtatttagtagtatcttatatttgtataacattattacattttgcaaattagtatcacaactgctaagtagatgtt

SEQ ID NO: 649634 - DNA, 120 bp, Artificial Sequence
  ENSG00000182919_14 (sequence is synthesized)
tctgagtattagaaaaatcagtgttattacctgcaggatattaaaaaacatttgaaaaagagaaaaagaaaaatcagtgtttagaaatgttgatagttattgaatctttgaattgaattt

SEQ ID NO: 649635 - DNA, 120 bp, Artificial Sequence
  ENSG00000182919_15 (sequence is synthesized)
taaaaatccattctagtaatcagagtatactttttttatagaacaaggtggcaggtggggagccctttacccttctggtgaagttaaaccatagaagtttacaatttgcctttcacaaac

SEQ ID NO: 649636 - DNA, 120 bp, Artificial Sequence
  ENSG00000182919_16 (sequence is synthesized)
attagcagtccgggcatggtggctgaagcctgtgatcccagcatgttgggaggccgagtgggaggattgcctgagcctaggagtttaaaccagcctgggcaccatggtgagaccccatct

SEQ ID NO: 649637 - DNA, 120 bp, Artificial Sequence
  ENSG00000182919_17 (sequence is synthesized)
ctattatttaaaatgtttcttaaataaaaaaaacacaaacattagcaactagttggctagccataattcctcccttgtttcgattgccagttagaagcaatttttatttcactggttatt

SEQ ID NO: 649638 - DNA, 120 bp, Artificial Sequence
  ENSG00000182919_18 (sequence is synthesized)
tgcaagagaaggggtaaaaaaacagcatcagagtgcaacactgaagtgagcttactttaatttgtaagtgaagctgttgctgaacatgaccactatcgttgctgaaatataaaattatac

SEQ ID NO: 649639 - DNA, 120 bp, Artificial Sequence
  ENSG00000182919_19 (sequence is synthesized)
tcactgattgtaatggttgaaattttcctgaataatcattagccaaagatcaactctctaatggtgctaatggcaatctagctaatgtgcaaatttaggaagtcttcagtactaagtaca

SEQ ID NO: 649640 - DNA, 120 bp, Artificial Sequence
  ENSG00000182919_20 (sequence is synthesized)
tacataattttcaaataatattttttaattgtctactttggatgttagctatgtcttgtgagtataaattccaattttaagcactattttgatgcaaaaaaatgaataaaaaatttaatt

SEQ ID NO: 649641 - DNA, 120 bp, Artificial Sequence
  ENSG00000182919_21 (sequence is synthesized)
attctgaggaggcggggttggcctaggcgaagatccggactctgggtgttttgctaccgtgaccgtttagaaacccttgtgtgttaaaatattggagaaggctcattctttgaccatgac

SEQ ID NO: 649642 - DNA, 120 bp, Artificial Sequence
  ENSG00000182919_22 (sequence is synthesized)
tcgaagtgtgtaacctttgtgctggacgccagtgttattccatagcacgcccaggtctcctccccacttttgcacctgtttcaacagaaactgttcatacttggtgcgctgtggactctt

SEQ ID NO: 649643 - DNA, 120 bp, Artificial Sequence
  ENSG00000182919_23 (sequence is synthesized)
agctctagctcgcgtattctgaggaggcggggttggcctaggcgaagatccggactctgggtgttttgctaccgtgaccgtttagtttggacaattccggggataaaaagtccgatcctt

SEQ ID NO: 649644 - DNA, 120 bp, Artificial Sequence
  ENSG00000182919_24 (sequence is synthesized)
aggcatgagccacagcgcccggcctataaatgttttccaagttttttatgtctaaaattaaatattatgtattttatgttctcttattaggacttgaactaaaatgtcttaaaaggatta

SEQ ID NO: 649645 - DNA, 120 bp, Artificial Sequence
  ENSG00000182919_25 (sequence is synthesized)
aaaatgtcttaaaaggattaaatgttttgtaacattattcaagatattctctttgcagagatacaaagattgactaattgcctcactttcttttcagtttatgccagttattcagacaga

SEQ ID NO: 649646 - DNA, 120 bp, Artificial Sequence
  ENSG00000182919_26 (sequence is synthesized)
gggcaagggccttgttcacgactgtagcactagtgcctttaactgctagcaaagtagccactcggatgattataccaaacactttactaaagctggggatctgtctagtggggaagacaa

SEQ ID NO: 649647 - DNA, 120 bp, Artificial Sequence
  ENSG00000182919_27 (sequence is synthesized)
acaataaatatataatatgtcaggtggtattaaatgctatgaaaagaaaggagtagatggactgtaaaggaggatgctatttttttgtggccatcccgcactgagacaggatgcattcca

SEQ ID NO: 649648 - DNA, 120 bp, Artificial Sequence
  ENSG00000182919_28 (sequence is synthesized)
ggatgcattccacactcaaaatttggttcacatgtccagactgatagccaagttcagtggctcacgcctgtaatcctagtacttagggagaccaaggcaggaggatcacttgaggccagg

SEQ ID NO: 649649 - DNA, 120 bp, Artificial Sequence
  ENSG00000182919_29 (sequence is synthesized)
gccagcctgggcaacagagagagacccccatctctgcaaaaaaagaaaaaaaattttttaattatctgggcatggttgtgcacacctgttgtcccagctgctcaggaggctgaggcacga

SEQ ID NO: 649650 - DNA, 80 bp, Artificial Sequence
  ENSG00000182919_30 (sequence is synthesized)
ttggcccagaagttggaggctacagtgagctatgattgtttcattgcactgtagcctgggcaacacagtgagaccctgtc

SEQ ID NO: 649651 - DNA, 120 bp, Artificial Sequence
  ENSG00000182919_31 (sequence is synthesized)
acacaccaacagagtatgaaagggttgttactcacataatgaagctttctggggaaagcagggcagctcctaagcaggatttgacaacagggaaggagactgacttggagttttttggtg

SEQ ID NO: 649652 - DNA, 120 bp, Artificial Sequence
  ENSG00000182919_32 (sequence is synthesized)
gttagggagtagggccagagtgatgtttcttgcatgtggtttgaatttcccactggtatcaaagaaggaaacacccaggcttgcttgctttatttttttaaagagatggtgtctcactat

SEQ ID NO: 649653 - DNA, 83 bp, Artificial Sequence
  ENSG00000182919_33 (sequence is synthesized)
tctggcgagcacccaggctttcttagcttgccagaggtgtagggcataaggggacgaggggtgggataaggcttaaaagccac

SEQ ID NO: 649654 - DNA, 120 bp, Artificial Sequence
  ENSG00000182919_34 (sequence is synthesized)
gcataaggggacgaggggtgggataaggcttaaaagccaccagcagtcaaacataaattaagtcagattcttaattacagatttcagatctgatttcagatcagagcttatttcaggtca

SEQ ID NO: 649655 - DNA, 120 bp, Artificial Sequence
  ENSG00000182919_35 (sequence is synthesized)
gattccaggtgtagagatcatctgaagcagtcctgggcctcttcacactacagataccaacactgcctttactcttccattagtgtcctccaaaatggggtgcatggacagcaggtacac

SEQ ID NO: 649656 - DNA, 120 bp, Artificial Sequence
  ENSG00000182919_36 (sequence is synthesized)
atgaccttccaaggggtgtgggaatattagaacatctatttatatattttatttcgtccttttaagtttctgtggttttgtgtacatttcttacgttagggatttcagttcaaaattgta

SEQ ID NO: 649657 - DNA, 120 bp, Artificial Sequence
  ENSG00000182919_37 (sequence is synthesized)
ttgctgatagacacaattcaaaaagcttggagaccaggtacattcacaccatctaatagagatgggggaaaagatcaaaatgcttttctttttaaattttttcttagttttctttcttta

SEQ ID NO: 649658 - DNA, 72 bp, Artificial Sequence
  ENSG00000182919_38 (sequence is synthesized)
tgcttttctttttaaattttttcttagttttctttctttatagagacagagtttcgcctctcagcctctcaa

SEQ ID NO: 649659 - DNA, 120 bp, Artificial Sequence
  ENSG00000182919_39 (sequence is synthesized)
gatactaatctctgtgtatgtgcacttatttgttacaaagtatacttggcatatattttattttttagttgcaatgatagaaaagcatatatttaaatatcaaattataattggatagat

SEQ ID NO: 649660 - DNA, 120 bp, Artificial Sequence
  ENSG00000182919_40 (sequence is synthesized)
tatcagaattgaacattaaatctatttaccaagaaagtatgtttatttgtaaatgaaaataaaaatttgaatttcaaaggctaatcattccataaaagtttccatttctattcgtaattt

SEQ ID NO: 649661 - DNA, 120 bp, Artificial Sequence
  ENSG00000182919_41 (sequence is synthesized)
aaattttattttgaaaaagtgatagtctaaggaactcatttaatttttggcctaaatgtgaaatatagaataaaaaacacacatatctattacagaaatacttgagatcctatatgtact

SEQ ID NO: 649662 - DNA, 120 bp, Artificial Sequence
  ENSG00000182919_42 (sequence is synthesized)
atacaaatcctatatgtactgttatctacaaccatttgaacacttatccataaacccctaataagtaccttttgcttcaagacctatattccttagacccaccattagaaaattggatgt

SEQ ID NO: 649663 - DNA, 85 bp, Artificial Sequence
  ENSG00000182919_43 (sequence is synthesized)
gacctatattccttagacccaccattagaaaattggatgttcactccagctatatgatatttaaaaaaaaaatgaatcagctggg

SEQ ID NO: 649664 - DNA, 120 bp, Artificial Sequence
  ENSG00000182919_44 (sequence is synthesized)
attagttttaaattttaaattacaataaaataaagtgtaagtattaaaaggccacttgtctatttctcacttggaatattaaatgctggaagctgtgtttgcctgtttatgaagatagaa

SEQ ID NO: 649665 - DNA, 120 bp, Artificial Sequence
  ENSG00000182919_45 (sequence is synthesized)
gacacagcgagactccgtctcaaaaatttgggaccgttaataaacagttatatatatttgggagattagattacatgtattaaatcaagaacaataaaagctggtatttgataaagtact

SEQ ID NO: 649666 - DNA, 120 bp, Artificial Sequence
  ENSG00000182919_46 (sequence is synthesized)
tgataaagtactaaagtaaatataacatcctaaatgtttgcaatagaatgattatagaggatatgttgttggaaagtaccagaactagaaacccagtttctaagcaacctgtgaatcttt

SEQ ID NO: 649667 - DNA, 120 bp, Artificial Sequence
  ENSG00000182919_47 (sequence is synthesized)
ggaaaattagaaaaaaaaatttggaagaatatttcaaatggctgaagatcaccgttccacttgctaaataggcatgttaagggcagaggccactcagattaatgaagtgttctattaaca

SEQ ID NO: 649668 - DNA, 120 bp, Artificial Sequence
  ENSG00000182919_48 (sequence is synthesized)
gttttaacgagaactcctgcagtactcttagaaacacccttaagagtcttgtctgtgttccctgttgtgattggcttggagtaggatacctgtctacctcatattacttatatttttccc

SEQ ID NO: 649669 - DNA, 120 bp, Artificial Sequence
  ENSG00000182923_0 (sequence is synthesized)
agttgccaaaacaaaggggatttggtgatggaggctttgttagaaggaatacaaaatcgagggcatggtgggggatttttgacatcttgtgaagcagaactacaggagctcatgaaacag

SEQ ID NO: 649670 - DNA, 120 bp, Artificial Sequence
  ENSG00000182923_1 (sequence is synthesized)
attgacataatggtggctcataaaaaatctgaatgggaaggacgtacacatgctctagaaacttgcttgaaaatccgtgaacaggaacttaagagtcttaggagtcagttggatgtgaca

SEQ ID NO: 649671 - DNA, 120 bp, Artificial Sequence
  ENSG00000182923_2 (sequence is synthesized)
cataaggaggttggaatgttgcatcagcaggtagaagaacatgaaaaaatcaagcaagagatgaccatggaatataagcaggagttgaagaaactacatgaagaattatgcatactgaag

SEQ ID NO: 649672 - DNA, 120 bp, Artificial Sequence
  ENSG00000182923_3 (sequence is synthesized)
agaagctatgaaaagcttcagaaaaagcaaatgagggaattcagaggaaataccaaaaatcacagggaagatcggtctgaaattgagaggttaactgcaaaaatagaggaattccgtcag

SEQ ID NO: 649673 - DNA, 120 bp, Artificial Sequence
  ENSG00000182923_4 (sequence is synthesized)
aaatcgctggactgggagaagcaacgcttgatttatcagcaacaggtatcttcactggaggcacaaaggaaggctctggctgaacaatcagagataattcaggctcagcttgtcaatcgg

SEQ ID NO: 649674 - DNA, 120 bp, Artificial Sequence
  ENSG00000182923_5 (sequence is synthesized)
aaacagaaattagagtctgtggaactttctagccaatcagaaattcaacacttaagcagtaaactggagcgggctaatgacactatctgtgccaatgagttggaaatagagcgcctcacc

SEQ ID NO: 649675 - DNA, 120 bp, Artificial Sequence
  ENSG00000182923_6 (sequence is synthesized)
atgagggtcaatgacttggttggaaccagtatgactgtcctacaggagcagcagcaaaaagaagaaaaattgagggaatctgaaaaactattagaggctctgcaggaagaaaagagagaa

SEQ ID NO: 649676 - DNA, 120 bp, Artificial Sequence
  ENSG00000182923_7 (sequence is synthesized)
ttgaaggcagctcttcagtctcaagaaaatctcatacatgaggccagaatacaaaaggagaagttacaagaaaaagtaaaggcaactaacactcaacatgctgtagaagctataaggcca

SEQ ID NO: 649677 - DNA, 120 bp, Artificial Sequence
  ENSG00000182923_8 (sequence is synthesized)
cgggaagaatctctggcagaaaagaagtacacctctcaagggcagggggacttagacagtgtgctctcccagttgaattttacccatactagtgaggaccttctgcaggcagaggtgact

SEQ ID NO: 649678 - DNA, 120 bp, Artificial Sequence
  ENSG00000182923_9 (sequence is synthesized)
tgtcttgaaggcagtttggaatctgtgagtgcaacgtgtaaacagctgagccaagaactaatggaaaaatatgaagaactgaagaggatggaagcacataacaatgaatacaaagcagag

SEQ ID NO: 649679 - DNA, 120 bp, Artificial Sequence
  ENSG00000182923_10 (sequence is synthesized)
attaagaagttgaaagaacagattttacagggtgaacaaagttacagttctgcactagaaggaatgaagatggaaatctcccatctaactcaggagttacatcagcgagatatcactatt

SEQ ID NO: 649680 - DNA, 120 bp, Artificial Sequence
  ENSG00000182923_11 (sequence is synthesized)
gcttccaccaaaggttcttcctcagacatggaaaagcgactcagagcagagatgcaaaaggcagaagacaaagcagtagagcataaggagattttggatcagctggagtcactcaaatta

SEQ ID NO: 649681 - DNA, 120 bp, Artificial Sequence
  ENSG00000182923_12 (sequence is synthesized)
gaaaatcgtcatctttctgaaatggtgatgaaattggaattgggtttacatgaggcaaaagagatttcactagcagacctccaggagaattatattgaggcattaaataaattagtgtct

SEQ ID NO: 649682 - DNA, 120 bp, Artificial Sequence
  ENSG00000182923_13 (sequence is synthesized)
gaaaatcaacaactacagaaagatttgatgaataccaaatctcagctggagatttctactcagatgtgcaaaaaacaaaatgacaggatctttaaaccaacacacagcagaacaactgag

SEQ ID NO: 649683 - DNA, 120 bp, Artificial Sequence
  ENSG00000182923_14 (sequence is synthesized)
ttcaagaatacagagttcaagccaacccatggccagcacagacatgatggaataaagactgagcactacaaaacagatcttcattctccaagaggacaagcgtcggatagtataaacccc

SEQ ID NO: 649684 - DNA, 120 bp, Artificial Sequence
  ENSG00000182923_15 (sequence is synthesized)
atgtctagggtgctaagccccctgagtcctcaaatcagcccttgcagctccaccaggtctttgacttcctactctctatgtaaaactcattctttgccttcagcgctagatacaaatgaa

SEQ ID NO: 649685 - DNA, 120 bp, Artificial Sequence
  ENSG00000182923_16 (sequence is synthesized)
gccaatttttctgacactatgtctgagagtatgaatgaccaagaagagtttatatcttcgtgttccttgcctgtatctccccttggttcaatagctaccagatttttggaagaggaggaa

SEQ ID NO: 649686 - DNA, 120 bp, Artificial Sequence
  ENSG00000182923_17 (sequence is synthesized)
ctgaggtctcatcacattctagagcgcttggatgcccatattgaagaactaaaaagagagagtgaaaagacagtgagacaattcacagccttaaagtagcctcttaaaaaaatcactatc

SEQ ID NO: 649687 - DNA, 120 bp, Artificial Sequence
  ENSG00000182923_18 (sequence is synthesized)
ttggaaataaaaataaacaccaaagagttactgtcatctgaagtagcagctctttaaaaacatgaagagataaaattataaaaatgatacatctaaagcagtggtgaagaaagctgaaaa

SEQ ID NO: 649688 - DNA, 120 bp, Artificial Sequence
  ENSG00000182923_19 (sequence is synthesized)
actgatacttttgataggcattttctctgcactggtttgtttaaaggacttcttccagcaataagttgaaagaataaaccactttgctagacttttttctcatacgaatatttattatca

SEQ ID NO: 649689 - DNA, 120 bp, Artificial Sequence
  ENSG00000182923_20 (sequence is synthesized)
taaagtgatacttaccttgctgacttaaatgtgaatagctatgtactaattgaaataaggattttatgatacatgttgaaaataaagtaactgcaggaactttctttaggggaaatgtgt

SEQ ID NO: 649690 - DNA, 120 bp, Artificial Sequence
  ENSG00000182923_21 (sequence is synthesized)
agaagcatggatttaggggtcaaacatacctggatcgatagactggttttgccacttaccagccaacggggcttgttatttactgggctggtagcccctcctagccaaggggctggtagt

SEQ ID NO: 649691 - DNA, 120 bp, Artificial Sequence
  ENSG00000182923_22 (sequence is synthesized)
gtgtaaagtcaggctggtagtgaataaggggggggtgtgctaaagaaccttatcaagcagtcctctcttgctcaacactcatgcagaggagagaggcagggagggcaagggactggctgt

SEQ ID NO: 649692 - DNA, 120 bp, Artificial Sequence
  ENSG00000182923_23 (sequence is synthesized)
tgaaacgatgggagttgataagatccaccagggaggctgtggagagagagaggagcaggaggctgggtttggggccctgaaagatgccagcatctgaggatcacaggaaatagatctagc

SEQ ID NO: 649693 - DNA, 120 bp, Artificial Sequence
  ENSG00000182923_24 (sequence is synthesized)
aaaggaactagaatgtgcagttacagatgagaaaggtcagtgtagtgtacttgccagctcaagggtgtggcctctgtgaaccctctttctgtagtggatctttcccatcagcgtaaaaca

SEQ ID NO: 649694 - DNA, 120 bp, Artificial Sequence
  ENSG00000182923_25 (sequence is synthesized)
tcctgttatttcccctttttaaataaaacctcagttttttttaatgcctctcttttactgctctgtatgtttgcttcccttcacccaaacacttctggaaagagttgtctgcagtgactc

SEQ ID NO: 649695 - DNA, 120 bp, Artificial Sequence
  ENSG00000182923_26 (sequence is synthesized)
tttccagttcctcaccccgccccaccgtagttctcttcctaaccctctccaacaccacttccatccccagactgctttcttgctcttgagttcaccagtgacctaatcagtgtctgagca

SEQ ID NO: 649696 - DNA, 120 bp, Artificial Sequence
  ENSG00000182923_27 (sequence is synthesized)
tcattcagcacagttggactctctcttggcttctgtgacctggaacttctggtttcctctctacctcatcctccactccatctcatggcttttcctcttctaacctctaagtcagagggc

SEQ ID NO: 649697 - DNA, 120 bp, Artificial Sequence
  ENSG00000182923_28 (sequence is synthesized)
cccctagagctctgtcatgggttttctccctcagcattctcttccctagaagtttccattccattctcaagctcttaataccacctataggccagtgacccttacatttattactaatct

SEQ ID NO: 649698 - DNA, 120 bp, Artificial Sequence
  ENSG00000182923_29 (sequence is synthesized)
tgacctctccccagagctgctgtcttagatacctagctgcttatgcgatgtcttcacttggatatctgacaaacatcttgtttccaagagagaactctttattctccctcttgctaagat

SEQ ID NO: 649699 - DNA, 120 bp, Artificial Sequence
  ENSG00000182923_30 (sequence is synthesized)
tccatatcaggacatagcattatgtttgccagttcctaggagttacttataattccttccttacccacatccgcatatccagtcatttgggaggtcctgtcatttcttcccccagaatct

SEQ ID NO: 649700 - DNA, 120 bp, Artificial Sequence
  ENSG00000182923_31 (sequence is synthesized)
tatctcagacccaaccgtttccctcctgcacttctaccacctgatccagactacttctctctcaccctgattctggcagtagcctcctaactgatagtactcacaccagtaattcaggga

SEQ ID NO: 649701 - DNA, 120 bp, Artificial Sequence
  ENSG00000182923_32 (sequence is synthesized)
ttcagggagcttctggagttatcctttagaaatgtaaatgaaacagtgtcaccactgcttcccttcagactcttccaaggcttctctttttttttttattgagacagagtctcactctgt

SEQ ID NO: 649702 - DNA, 75 bp, Artificial Sequence
  ENSG00000182923_33 (sequence is synthesized)
gagcttcccaaagtgctgggttataagcgtgagccactgcacccagccccaaggcttcttactgcactcagaata

SEQ ID NO: 649703 - DNA, 120 bp, Artificial Sequence
  ENSG00000182923_34 (sequence is synthesized)
actgcacccagccccaaggcttcttactgcactcagaataaaatccaaatgaattagtatagcctacagagtgtcaataatctgggcctaatcacccattgcatcatcctttactgtgct

SEQ ID NO: 649704 - DNA, 120 bp, Artificial Sequence
  ENSG00000182923_35 (sequence is synthesized)
ccacccatgctggcgtcctttctgtttattgagtgcagcaagctttaacctgttcgggtctttcatttgcagtttaccctgaatattccctttctcttacctcacctttgattggcgttt

SEQ ID NO: 649705 - DNA, 120 bp, Artificial Sequence
  ENSG00000182923_36 (sequence is synthesized)
tcccccttgcagacctgcactctggcatcctctcctgagcaagccttctttgattgctgcctcccaaacctgtttctccccatttctctagctcattggcctgtgttacttgcttcatag

SEQ ID NO: 649706 - DNA, 120 bp, Artificial Sequence
  ENSG00000182923_37 (sequence is synthesized)
tgctcactactatctgaaatcatttcattacttgatttatgtttgtactgtctatttctgtctttagaattaaaactccttgagggcaaggactttgcttctctggttcatggtgggatc

SEQ ID NO: 649707 - DNA, 120 bp, Artificial Sequence
  ENSG00000182923_38 (sequence is synthesized)
ctcatcacccagcacaagcccaacacttaggagaggctcagctagtttgaaccaatggaaaatgccattcctgaggtgcaccacatcgtttcttttgtgttggtgtgcatgctgtccttc

SEQ ID NO: 649708 - DNA, 120 bp, Artificial Sequence
  ENSG00000182923_39 (sequence is synthesized)
agtttgtctcctcttcccacaccctgtcatgtgctcctaaaactccccctttacttggctactttatctggcttggcaaagctttcccatatcccctgacccatgtcagggaacgtttct

SEQ ID NO: 649709 - DNA, 120 bp, Artificial Sequence
  ENSG00000182923_40 (sequence is synthesized)
cctcattgctgtcatggcaccctgtgtgtggctctgaccagactttgctatccgctttgatttctgtctttcaggggctaagtcctgcctacatcctcagtcagcatgctgcctaacaca

SEQ ID NO: 649710 - DNA, 120 bp, Artificial Sequence
  ENSG00000182923_41 (sequence is synthesized)
taacagatcctaagcaaatattgggtggatgaaaatcactaccattcaaggcttcattgtatttatcagtaaaactgaaataatatctaatggggtcgagaagatttactgaaaatatat

SEQ ID NO: 649711 - DNA, 120 bp, Artificial Sequence
  ENSG00000182923_42 (sequence is synthesized)
atttgaaagggctttgcagttttaagtactgtacctatgtgcattgctgttacattcaggagatttctgagttttagacagtcccaagcttcagcttaaaatctgtagactgcagcccgt

SEQ ID NO: 649712 - DNA, 120 bp, Artificial Sequence
  ENSG00000182923_43 (sequence is synthesized)
ttctgaaacgtttgtactacgtgttgactaggaggaacaatgacagactctgtagtcaccggaaatacttaaggaatcatgaggtactatgtatttccttaaattatactgttttttaaa

SEQ ID NO: 649713 - DNA, 120 bp, Artificial Sequence
  ENSG00000182923_44 (sequence is synthesized)
gctgaagtatctaatagttaatgggttgtccaaatttgtcagaacatttgactgtaatttaatgtctcaccatttttcaaaaagatatattaataccaaatattaaaatgtgtcaagact

SEQ ID NO: 649714 - DNA, 120 bp, Artificial Sequence
  ENSG00000182923_45 (sequence is synthesized)
gtgcttgcggcaaccctgtaaccgccggtgcgcaagttggaggggcaaggggctgccgtgtcctggtctggaggcggcccaggctgccttggtgattctggcttcgcggcctcatggctt

SEQ ID NO: 649715 - DNA, 120 bp, Artificial Sequence
  ENSG00000182923_46 (sequence is synthesized)
gcggccggtttgcgcaacggcctgcgaaccaccaggcgcgtccccgccggcttgggtccgccccgaagcccagtccctcggcctggcccgctatgccctgcacactggcggagtctggcg

SEQ ID NO: 649716 - DNA, 120 bp, Artificial Sequence
  ENSG00000182923_47 (sequence is synthesized)
tggcgcagcccggcgtggggttcggccccgccaggtggtcagcccttcctcggagtccaggtggctgggggcgcttcggagagtggccaggggcccccaaacccggggccgcagagcagt

SEQ ID NO: 649717 - DNA, 120 bp, Artificial Sequence
  ENSG00000182923_48 (sequence is synthesized)
caggatgtaccaaacgtggaagcggagacggggaggtctgggggtgccacgcaagtccctttcctcccgacacgagtgcagtaaagaaaaacggttatgagcgtaaagtgacagcctcgg

SEQ ID NO: 649718 - DNA, 120 bp, Artificial Sequence
  ENSG00000182923_49 (sequence is synthesized)
ccgatgggaatagggggaagtccgacactgagcaacgaacgcattcccgcgcctccaaaacctaggccgggggcgctggaaacccttaccggcacccggccaccgcggcagacgcttgct

SEQ ID NO: 649719 - DNA, 120 bp, Artificial Sequence
  ENSG00000182923_50 (sequence is synthesized)
ttggaattgggtttacatgagagatggggttttaccatgttgtccagtctggttttgaacttcgggattcaagcaatccgccagcctcagcgtcccaaagtgctggaattacaagtgtga

SEQ ID NO: 649720 - DNA, 120 bp, Artificial Sequence
  ENSG00000182923_51 (sequence is synthesized)
gctaccaccactggcagttaagaattttaacaatttgtcaatgaaacaagaatctcaattagagtctttatatacaatctgtactgttggaattttcaaataaatattgtaaagaaaatt

SEQ ID NO: 649721 - DNA, 120 bp, Artificial Sequence
  ENSG00000182923_52 (sequence is synthesized)
gttcatttgctcgcgtgcaggggaagtctggagaaggcattgtttcaattattaaaagtgtgggggcagtgggcggaacaaacgcgccgactacagaggctggacgtaagcttagcggtg

SEQ ID NO: 649722 - DNA, 120 bp, Artificial Sequence
  ENSG00000182923_53 (sequence is synthesized)
ttacatgaggtacataaatagaaacttaagtttttctactatccaagccttcaaaaaaattactttgtaaatatttacattataaagagagaattaagatcaacttagatccttttgcag

SEQ ID NO: 649723 - DNA, 120 bp, Artificial Sequence
  ENSG00000182923_54 (sequence is synthesized)
aaattttctcaaagaaaatgaaggtaaaacaatactggaagtgagcaaaatatgactctccactccagcagcaggaagggtttttgtttgtttttttgagacggggtttcactcttgtta

SEQ ID NO: 649724 - DNA, 89 bp, Artificial Sequence
  ENSG00000182923_55 (sequence is synthesized)
gcctccacctcccgggttcaaatgatgcacaggcatgcgccaccacacctggctgatgttgtattttcagtagaggcagggtttctcca

SEQ ID NO: 649725 - DNA, 120 bp, Artificial Sequence
  ENSG00000182923_56 (sequence is synthesized)
ttagcatatagtacatagtacctgacacttagtaagtatgcaatacatcctagatggtggtattattattattattattattgttaatgattattatgtttgttatctttttagaaagta

SEQ ID NO: 649726 - DNA, 120 bp, Artificial Sequence
  ENSG00000182923_57 (sequence is synthesized)
aataatttaattttaattttatttctacaagatattcacataataaaatattttagaatcttttatatccaaggacttttagtaggtgctataatgaacacaggctgaataagatagcat

SEQ ID NO: 649727 - DNA, 120 bp, Artificial Sequence
  ENSG00000182923_58 (sequence is synthesized)
gatagcattcttgcctttaagagagattttggatcagctgcaattactcaaattactctagcctttaagagactagagtaatctagtagcaaggataagaaatgcatacaagcttctgtg

SEQ ID NO: 649728 - DNA, 120 bp, Artificial Sequence
  ENSG00000182923_59 (sequence is synthesized)
aaaccagagagaacatgattagccaacagtgaattacagtatagatgctcttttaactgttttgttacaaaattcctataatttgcaaaatgactcatctattctgacccatcttttctt

SEQ ID NO: 649729 - DNA, 120 bp, Artificial Sequence
  ENSG00000182923_60 (sequence is synthesized)
ggtgtaggtcagatgtctgaaaattgtataaatgcttttttcctgcatttccagagagtattcctccaaaaagatatatggttccaacatgctccctgtttgctctgaaaaattctaatt

SEQ ID NO: 649730 - DNA, 120 bp, Artificial Sequence
  ENSG00000182923_61 (sequence is synthesized)
tcacaatccaggattgtggatactggggtggaagaacatgcaaaagactattatagagtaccttatttcaactggaaaaatgggggactatttttgtaatctttcagaagggtaagattc

SEQ ID NO: 649731 - DNA, 120 bp, Artificial Sequence
  ENSG00000182923_62 (sequence is synthesized)
tccaaacatcatgacgccatagaggattttacaacataaaaatgtgaagtttctggatggtaaaaggccctattaaaaaagactaatagggagaaaacagtttataatcagacaaaaggt

SEQ ID NO: 649732 - DNA, 120 bp, Artificial Sequence
  ENSG00000182923_63 (sequence is synthesized)
cagacaaaaggttaatgtaaattattaatatataaaaattccctacaaagataataaggaaaagataatctagtagaaaaataggcaaagaatgtagatagatacctcacagaattaata

SEQ ID NO: 649733 - DNA, 120 bp, Artificial Sequence
  ENSG00000182923_64 (sequence is synthesized)
cagctttgtaggagagctggtctctcccaactccttaaccactttcttgacttggcttgagaaaaaccacatttctctcattttttccttgttcatcactcctcagtctccattattcct

SEQ ID NO: 649734 - DNA, 120 bp, Artificial Sequence
  ENSG00000182923_65 (sequence is synthesized)
taaccacctagggtcatgtcattggacctttcctttcctttttttttttcctatctacgctcactcccctattgatcccattgaatttcatagctttaacactgtgtatatgctgacaat

SEQ ID NO: 649735 - DNA, 120 bp, Artificial Sequence
  ENSG00000182923_66 (sequence is synthesized)
tcctaaatttatatatctagccaagacctcgcctcttcatgacagaataactttcaactgcctgtttcctatctccactatgatgtctaaaatgtgtcaaacttaacatgtccaagctaa

SEQ ID NO: 649736 - DNA, 120 bp, Artificial Sequence
  ENSG00000182923_67 (sequence is synthesized)
aggtcctgtctttctcttcctcatctccccaacactgattcatgttttagttgataacaactcaatttgctcaacctaaaacctcggagtcatcctagacttctcttttctcagcatgat

SEQ ID NO: 649737 - DNA, 120 bp, Artificial Sequence
  ENSG00000182923_68 (sequence is synthesized)
agccagaatgattctgctgtaatgtaagtcaaattatatcacttcctatacaaaaaccttccagcagcttctcttaaaaatctgttatcctaatggcctacgtggtctcattcccagtta

SEQ ID NO: 649738 - DNA, 120 bp, Artificial Sequence
  ENSG00000182923_69 (sequence is synthesized)
tctctcttaccttgtcttctcctactttccctttcattcactttattccagccacaccaatttcctttctcacccttaaacacaccaggatgctcttatttcaaggctattctttccacc

SEQ ID NO: 649739 - DNA, 120 bp, Artificial Sequence
  ENSG00000182923_70 (sequence is synthesized)
cagaatattgtaacttcaccctcatctccctaggtgtttacttaaatgtttttcactcagtctggccatcccttttaaaaattacaaccccaactgtgaagacttcatgctctgttttct

SEQ ID NO: 649740 - DNA, 120 bp, Artificial Sequence
  ENSG00000182923_71 (sequence is synthesized)
ccaaaacgtgtattaccatctgctataccatacaagaaatgtgtcatctgttgcccccagttgagtaggactagggtttttgtttgttttgttaagtattgtatccctgactcctaaagc

SEQ ID NO: 649741 - DNA, 120 bp, Artificial Sequence
  ENSG00000182923_72 (sequence is synthesized)
gacagtgatagaaagattgagtttcctttccctttgatttgccccattttcataaatattgaaatcactttcttgatcatgcaatttgatgttactattgatccatcattaattttgaac

SEQ ID NO: 649742 - DNA, 120 bp, Artificial Sequence
  ENSG00000182923_73 (sequence is synthesized)
tgtttggctttgggttacaaatatttgttaaaatttggtacagattttctttgttattcaaacttttgcagttcctctgttgagataatacaaatttggatatcaaaggatattgtgtta

SEQ ID NO: 649743 - DNA, 120 bp, Artificial Sequence
  ENSG00000182923_74 (sequence is synthesized)
tctgaatctacttggttccttagttttagatactgggaagtaagatttgggttaccaagggacttatctgaaaatttaatctgttcaattcctgggtctggatatcaagaatttggatag

SEQ ID NO: 649744 - DNA, 120 bp, Artificial Sequence
  ENSG00000182923_75 (sequence is synthesized)
cgagggatatctgtaatcatactttaaaattttagttatcttagcatcagttttctgaaaattcactagaaaattataacaacccttaggtggcagcaaatcagtgaaaaacatctgaat

SEQ ID NO: 649745 - DNA, 120 bp, Artificial Sequence
  ENSG00000182923_76 (sequence is synthesized)
ccagtgcttaacatctgcgtgtcatactcctcaccatcagggtgttaaatttagaaagacagatatccagaggcacagtatgtgaggaagttagtattactctccagctctgttagctga

SEQ ID NO: 649746 - DNA, 120 bp, Artificial Sequence
  ENSG00000182923_77 (sequence is synthesized)
gtgagtaatggggctcccgctgtggagaaaggtgcaagcgtacccagggacatggggagaaattaaagttaaagggagtctgggaagtagtgacagtgaggagaagcactcagaaattaa

SEQ ID NO: 649747 - DNA, 120 bp, Artificial Sequence
  ENSG00000182923_78 (sequence is synthesized)
gtactctaattgcctcctcaggaattccgtcagaaatcgctggactgggagaagcaacgcttgatttatcagcaacaggtatcttcactggaggcacaaaggaaggctctggctgaacaa

SEQ ID NO: 649748 - DNA, 120 bp, Artificial Sequence
  ENSG00000182931_0 (sequence is synthesized)
agagcccaagaacactggtggccaaaggatggtgtcttgtgaaaggagggcaagcaaaagtgtaggacaaattttgctttgggattttggttacacctgcagactatcccacagaaggag

SEQ ID NO: 649749 - DNA, 120 bp, Artificial Sequence
  ENSG00000182931_1 (sequence is synthesized)
tgtgaaacaaataagatatgctgttcagccttctgtgggaacatttgtatgagcatcctatgagtgggagagtgggctgggatgtgcatcctgctccctgaacccttccatccgagactg

SEQ ID NO: 649750 - DNA, 120 bp, Artificial Sequence
  ENSG00000182931_2 (sequence is synthesized)
tgcccacatccgaagcacaaggacatcaaatcatcagcacaagaacatcaacaggaatgccaccctccccagtgtctgaactccctgtccctgtcaaataaaccagaacaaatgcccatg

SEQ ID NO: 649751 - DNA, 120 bp, Artificial Sequence
  ENSG00000182931_3 (sequence is synthesized)
gaacagcactgaaatcctttctcgcaatcttcctgcattgtacacaggcagctctgcagggaagtctgtgactgcctggccagacttagggctcacgctctggtcagagttatggcaccc

SEQ ID NO: 649752 - DNA, 120 bp, Artificial Sequence
  ENSG00000182931_4 (sequence is synthesized)
gtgctgctgctgcaggcccagggaggataccgtgacaagatgaggatgcagagaatcaaggtctgtgagaagcgacccagcatagatctatgcatccaccactgttcatatttccaaaag

SEQ ID NO: 649753 - DNA, 120 bp, Artificial Sequence
  ENSG00000182934_0 (sequence is synthesized)
gtgacgtgtcccgcgcttggcgcagcaggaagcggcggcgaacgcggcctgaattcccggcgccggccccagctcctctgccgctgccgccatgctcgacttcttcaccattttctccaa

SEQ ID NO: 649754 - DNA, 120 bp, Artificial Sequence
  ENSG00000182934_1 (sequence is synthesized)
gggcgggcttgtgctctggtgcttccagggcgttagcgactcatgcaccggacccgttaacgcgttgattcgttccgtgctgctgcaggaacggggaggtaacaactccttcacccatga

SEQ ID NO: 649755 - DNA, 120 bp, Artificial Sequence
  ENSG00000182934_2 (sequence is synthesized)
ggcactcacactcaagtataaactggacaaccagtttgagctggtgtttgtggttggttttcagaagatcctgacactgacatatgtagacaaattgatagatgacgtgcatcggctgtt

SEQ ID NO: 649756 - DNA, 120 bp, Artificial Sequence
  ENSG00000182934_3 (sequence is synthesized)
tcgggacaagtaccgcacagagatccaacagcaaagtgctttaagtttattaaatggcacttttgatttccaaaatgacttcctgcggctccttcgtgaagcagaggagagcagtaagat

SEQ ID NO: 649757 - DNA, 120 bp, Artificial Sequence
  ENSG00000182934_4 (sequence is synthesized)
ccgtgctcccactaccatgaagaaatttgaagattctgaaaaggccaagaaacctgtgaggtccatgattgagacacggggggaaaagcccaaggaaaaagcaaagaatagcaaaaaaaa

SEQ ID NO: 649758 - DNA, 120 bp, Artificial Sequence
  ENSG00000182934_5 (sequence is synthesized)
gggggccaagaaggaaggttctgatggtcctttggctaccagcaaaccagtccctgcagaaaagtcaggtcttccagtgggtcctgagaacggagtagaactttccaaagaggagctgat

SEQ ID NO: 649759 - DNA, 120 bp, Artificial Sequence
  ENSG00000182934_6 (sequence is synthesized)
ccgcaggaagcgcgaggagttcattcagaagcatgggaggggtatggagaagtccaacaagtccacgaagtcagatgctccaaaggagaagggcaaaaaagcaccccgggtgtgggaact

SEQ ID NO: 649760 - DNA, 120 bp, Artificial Sequence
  ENSG00000182934_7 (sequence is synthesized)
gggtggctgtgctaacaaagaagtgttggattacagtactcccaccaccaatggaacccctgaggctgccttgtctgaggacatcaacctgattcgagggactgggtctggggggcagct

SEQ ID NO: 649761 - DNA, 120 bp, Artificial Sequence
  ENSG00000182934_8 (sequence is synthesized)
tcaggatctggactgcagcagctctgatgacgaaggggctgctcaaaactctaccaaacctagtgcgaccaagggaacactgggtggcatgtttggtatgctgaagggccttgtgggttc

SEQ ID NO: 649762 - DNA, 120 bp, Artificial Sequence
  ENSG00000182934_9 (sequence is synthesized)
aaagagcttgagtcgtgaagacatggaatctgtgctggacaagatgcgtgatcatctcattgctaagaacgtggctgcagacattgccgtccagctctgtgaatctgttgccaacaagtt

SEQ ID NO: 649763 - DNA, 120 bp, Artificial Sequence
  ENSG00000182934_10 (sequence is synthesized)
ggaagggaaggtgatggggacgttcagcacggtgacttccacagtaaagcaagccctacaggagtccctggtgcagattctgcagccacagcgtcgtgtagacatgctccgggacatcat

SEQ ID NO: 649764 - DNA, 120 bp, Artificial Sequence
  ENSG00000182934_11 (sequence is synthesized)
ggatgcccagcgtcgccagcgcccttatgtcgtcaccttctgcggcgttaatggagtggggaaatctactaatcttgccaagatttccttctggttgttagagaatggcttcagtgtcct

SEQ ID NO: 649765 - DNA, 120 bp, Artificial Sequence
  ENSG00000182934_12 (sequence is synthesized)
atggtgcagttgtttgaaaagggctatggcaaggatgctgctggcattgccatggaagccattgcttttgcacgtaaccaaggctttgacgtggtgctggtggacacggcaggccgcatg

SEQ ID NO: 649766 - DNA, 120 bp, Artificial Sequence
  ENSG00000182934_13 (sequence is synthesized)
caagacaatgcccctctgatgactgccctggccaaactcattactgtcaatacacctgatttggtgctgtttgtaggagaagccttagtaggcaatgaagccgtggaccagctggtcaag

SEQ ID NO: 649767 - DNA, 120 bp, Artificial Sequence
  ENSG00000182934_14 (sequence is synthesized)
ttcaacagagccttggctgaccattctatggctcagacacctcggctcattgatggcattgttcttaccaaatttgataccattgatgacaaggtgggagctgctatttctatgacgtac

SEQ ID NO: 649768 - DNA, 120 bp, Artificial Sequence
  ENSG00000182934_15 (sequence is synthesized)
atcacaagcaaacccatcgtctttgtgggcaccggccagacctactgtgacctacgcagcctcaatgccaaggctgtggtggctgccctcatgaaggcttaacgtggctcttgcccaata

SEQ ID NO: 649769 - DNA, 120 bp, Artificial Sequence
  ENSG00000182934_16 (sequence is synthesized)
ccaaatcgccgctttccccacaagcccttcttcctgtatcaagaatgtgctttagagtatgtgagcaacctgtcttcagtgtagtacaaaggcagagtgagggggcttgtggctccttcc

SEQ ID NO: 649770 - DNA, 120 bp, Artificial Sequence
  ENSG00000182934_17 (sequence is synthesized)
aaccccactccccgttcagcacagccgccatctgcaaggaaggcctaatcatgttacaatcactgcccactgaccctctcccagcgggcctcccccttcctactcaggcacccccttcac

SEQ ID NO: 649771 - DNA, 120 bp, Artificial Sequence
  ENSG00000182934_18 (sequence is synthesized)
tctgcctacagactcagtcttattacagctttgaccaatggttggaacccaacaccagagctttgctaataattagtgtggtcaagagccgtctgagcctaatgagtcccagctgcatta

SEQ ID NO: 649772 - DNA, 120 bp, Artificial Sequence
  ENSG00000182934_19 (sequence is synthesized)
ggttaagagactcttccagagccagcgccaggtcttgaatggcacctctccctaggatacacagcctgcaggtccccaggacctggatgacacccgcctcactgtggcagtgtattgcct

SEQ ID NO: 649773 - DNA, 120 bp, Artificial Sequence
  ENSG00000182934_20 (sequence is synthesized)
gttaattgctgctaattctaattctgatgatgactcctactccattgtttaccccaaagcatcagctaggctggagtgatttgttacaaatgagcaaaagatgagtccttgcttccctca

SEQ ID NO: 649774 - DNA, 120 bp, Artificial Sequence
  ENSG00000182934_21 (sequence is synthesized)
gaaataaaaggagctcagctgcagcgttgcattgggcttcttggcctcccaactcttcccactcccagaatccagaagtaagctctgcatgttccccttcctgggaggaaaccaattgtc

SEQ ID NO: 649775 - DNA, 120 bp, Artificial Sequence
  ENSG00000182934_22 (sequence is synthesized)
agaaggatgtatgatgaccccctcccctcccatccttcacctcctaagcagtcctggcttttcctcatcactcccctctacagtgcctggtagacaagtgctacattgaagaacacaaac

SEQ ID NO: 649776 - DNA, 120 bp, Artificial Sequence
  ENSG00000182934_23 (sequence is synthesized)
ctcttgttaagacttgtcctgtagcttgatattacagatgtgctattagtgcaataaggtgaaggctgtctgcccagagaaataagtaatttatataagaaaataaatttcataaataaa

SEQ ID NO: 649777 - DNA, 120 bp, Artificial Sequence
  ENSG00000182934_24 (sequence is synthesized)
tcggcaaattccttaacctctaaacctctgtaacctagattttaagggttattgagaggattcagtgagttagtccttgtaatgtgcgtctgttctggatttctgggacaagagtctaat

SEQ ID NO: 649778 - DNA, 120 bp, Artificial Sequence
  ENSG00000182934_25 (sequence is synthesized)
ttactgttttagtccccttagctcagaaaggtgttaggcatttttgagagcattccttgagtttcacagctgcaacctcctccacctcccctttcagcggtgacttccacagtaaagcaa

SEQ ID NO: 649779 - DNA, 120 bp, Artificial Sequence
  ENSG00000182934_26 (sequence is synthesized)
actgctccgcgccaaacgccattcagacgagcgcgccaattggccagcggccctcagggctctgccccgcccaatgctctaggtggccgtctccccgtgacctctcctggagccccaccc

SEQ ID NO: 649780 - DNA, 120 bp, Artificial Sequence
  ENSG00000182934_27 (sequence is synthesized)
cctgaatttggtcaccttcatcctgttgtcctccttttcctgaatatgtttggtgatggccaagcatataatcaagtttttctcacattaccttggaaccaaatccagagcccaagacag

SEQ ID NO: 649781 - DNA, 120 bp, Artificial Sequence
  ENSG00000182934_28 (sequence is synthesized)
tgaacaggtagtcaaactaggactttttgagaggaagctgggaacgagcatgagtggtagtccaggtgttcagagttgactactttctttctctagcacgtaaccaaggctttgacgtgg

SEQ ID NO: 649782 - DNA, 120 bp, Artificial Sequence
  ENSG00000182934_29 (sequence is synthesized)
tgatgacaaggtaaacgtgagactggaggctggaatgggcgtcctgcacaaaggagctgaggctgcaaggaaatcttggctccagcgcttcctgttcctgagagggtgagtgaaaagtgg

SEQ ID NO: 649783 - DNA, 120 bp, Artificial Sequence
  ENSG00000182934_30 (sequence is synthesized)
tctctaaaatcaatttatttccatgatttgatgacctctctgaaggtggttcaaaggtggtaaattgatgtgttcaaagacattcctaatttgctacccagttctcattgtcctcttggg

SEQ ID NO: 649784 - DNA, 120 bp, Artificial Sequence
  ENSG00000182934_31 (sequence is synthesized)
ggatttgaatgaggggtaagttatacttggagcttcccaaaatgaaagagatagagcaatgtggacgttttcctcagagaccttagtgttcctgaccccacatcctttccccgtatcttc

SEQ ID NO: 649785 - DNA, 120 bp, Artificial Sequence
  ENSG00000182938_0 (sequence is synthesized)
atgggccgcggagcccgagcggcggctgcgcagtcccgctgggggagggcgtcgcgggcatcggtctcacctggacggacgatccgctcagcgcccgcagtcggtgaagcacaggagact

SEQ ID NO: 649786 - DNA, 120 bp, Artificial Sequence
  ENSG00000182938_1 (sequence is synthesized)
gaagcagccccggagaaggagaaccgagtggatgtgggggccgaggagagagcggccgccacccggccccggcagaagtcctggctggtgaggcatttctctctgctgctgcggcgggac

SEQ ID NO: 649787 - DNA, 120 bp, Artificial Sequence
  ENSG00000182938_2 (sequence is synthesized)
cggcaggcccagaaggctggacaactcttctcggggctcctggccctgaatgtggtgttcctgggtggcgccttcatctgcagcatgatcttcaacaaggtggccgtcactctgggtgac

SEQ ID NO: 649788 - DNA, 120 bp, Artificial Sequence
  ENSG00000182938_3 (sequence is synthesized)
gtgtggatcctgctggccacgctgaaggtcctctccctgctttggcttctctactatgtggcaagcaccacccgccgaccacacgccgtgctctaccaagatccccacgcggggcccctc

SEQ ID NO: 649789 - DNA, 120 bp, Artificial Sequence
  ENSG00000182938_4 (sequence is synthesized)
tgggtgcggggttccctagtgctcttcggcagctgcaccttctgcctcaacatcttccgagtgggctacgatgtgagccacatccgctgcaagtcacagctggaccttgtcttctctgtc

SEQ ID NO: 649790 - DNA, 120 bp, Artificial Sequence
  ENSG00000182938_5 (sequence is synthesized)
atcgagatggtcttcatcggcgtccagacctgggtgctctggaaacactgcaaagactgtgttcgggtccagaccaacttcactaggtgtggcctgatgctgaccctggccacaaacctg

SEQ ID NO: 649791 - DNA, 120 bp, Artificial Sequence
  ENSG00000182938_6 (sequence is synthesized)
ctgctgtgggttctggccgttaccaatgactccatgcaccgagagatcgaagctgagcttggcatcctcatggaaaaatccacaggcaatgagaccaacacctgtctgtgcctcaatgcc

SEQ ID NO: 649792 - DNA, 120 bp, Artificial Sequence
  ENSG00000182938_7 (sequence is synthesized)
cacgtggcaccccacatgggtgcccaccctgccaccgcacccttccacctgcacggggccatcttcgggccgctgctgggcctgctggtgctgctggcaggtgtgtgcgtctttgtgctc

SEQ ID NO: 649793 - DNA, 120 bp, Artificial Sequence
  ENSG00000182938_8 (sequence is synthesized)
ttccaaatcgaggccagtggccctgccattgcttgccagtacttcaccctctactatgccttctatgtggctgtgctgcccaccatgagtctggcgtgcctggcgggcacagccatacac

SEQ ID NO: 649794 - DNA, 120 bp, Artificial Sequence
  ENSG00000182938_9 (sequence is synthesized)
gggctggaggagagagagctggacacggtcaagaaccctacccgcagcctggatgtggtgctgctaatgggtgctgcactgggccagatgggcatcgcctatttctccatcgtggccatt

SEQ ID NO: 649795 - DNA, 120 bp, Artificial Sequence
  ENSG00000182938_10 (sequence is synthesized)
gtggccaagcgcccgcatgagctgctcaaccgcctcatcctggcctactcgctgctgctcatcctgcagcacatcgctcagaacctcttcatcatcgagggcctgcaccggcgcccactc

SEQ ID NO: 649796 - DNA, 120 bp, Artificial Sequence
  ENSG00000182938_11 (sequence is synthesized)
tgggagacagttcccgagggcctggcaggaaagcaggaggctgagcctccccgcagaggctccttgctggagctgggccagggcctgcagcgggcctcactggcctacatccactcctac

SEQ ID NO: 649797 - DNA, 120 bp, Artificial Sequence
  ENSG00000182938_12 (sequence is synthesized)
agccacctcaactggaagcggagggcactcaaggagatctcactcttcctcatcctctgcaatatcacactgtggatgatgcctgcatttggcatacacccggagtttgagaacgggcta

SEQ ID NO: 649798 - DNA, 120 bp, Artificial Sequence
  ENSG00000182938_13 (sequence is synthesized)
gaaaaggatttctacggctaccagatatggttcgccatcgtcaacttcggcctgcctctgggggtcttctaccgcatgcactctgtgggaggcctggtggaggtctacctgggggcctga

SEQ ID NO: 649799 - DNA, 120 bp, Artificial Sequence
  ENSG00000182938_14 (sequence is synthesized)
agcctgaggctctcaaggcctcctgctccccagagcctcactgaaggggagggcactgcctagagccagaggccaacagcaggggcctggacactgagcttctgatgcccacggccaggc

SEQ ID NO: 649800 - DNA, 120 bp, Artificial Sequence
  ENSG00000182938_15 (sequence is synthesized)
ctgggcacatgcctgccccctgccttcccaccacgatccgcaagccaagggtgcaccccaggaggctggcaggggccccctcacggctactctgtgggagggtcagacctacatgaccga

SEQ ID NO: 649801 - DNA, 120 bp, Artificial Sequence
  ENSG00000182938_16 (sequence is synthesized)
gtctggggagcttggcgaggggcacccctctccagccaggactcagaggtctgccccctgctgcgagaagagcacctggtccaagtgtggctctggacatcctcagagctcagagctccg

SEQ ID NO: 649802 - DNA, 120 bp, Artificial Sequence
  ENSG00000182938_17 (sequence is synthesized)
agctaggaggccagctcctctccccacacacctgtctcctaatgagctcattcattggctgccaggcagggttcaacagctctctcctgccgcataaaccctatttgtttaatggattgc

SEQ ID NO: 649803 - DNA, 120 bp, Artificial Sequence
  ENSG00000182944_0 (sequence is synthesized)
aacgaggaggaaggagagaaaatggcgtccacggattacagtacctatagccaagctgcagcgcagcagggctacagtgcttacaccgcccagcccactcaaggatatgcacagaccacc

SEQ ID NO: 649804 - DNA, 120 bp, Artificial Sequence
  ENSG00000182944_1 (sequence is synthesized)
caggcatatgggcaacaaagctatggaacctatggacagcccactgatgtcagctatacccaggctcagaccactgcaacctatgggcagaccgcctatgcaacttcttatggacagcct

SEQ ID NO: 649805 - DNA, 120 bp, Artificial Sequence
  ENSG00000182944_2 (sequence is synthesized)
cccactgtagaagggaccagtacaggttatactactccaactgccccccaggcatacagccagcctgtccaggggtatggcactggtgcttatgataccaccactgctacagtcaccacc

SEQ ID NO: 649806 - DNA, 120 bp, Artificial Sequence
  ENSG00000182944_3 (sequence is synthesized)
acccaggcctcctatgcagctcagtctgcatatggcactcagcctgcttatccagcctatgggcagcagccagcagccactgcacctacaagaccgcaggatggaaacaagcccactgag

SEQ ID NO: 649807 - DNA, 120 bp, Artificial Sequence
  ENSG00000182944_4 (sequence is synthesized)
actagtcaacctcaatctagcacagggggttacaaccagcccagcctaggatatggacagagtaactacagttatccccaggtacctgggagctaccccatgcagccagtcactgcacct

SEQ ID NO: 649808 - DNA, 120 bp, Artificial Sequence
  ENSG00000182944_5 (sequence is synthesized)
ccatcctaccctcctaccagctattcctctacacagccgactagttatgatcagagcagttactctcagcagaacacctatgggcaaccgagcagctatggacagcagagtagctatggt

SEQ ID NO: 649809 - DNA, 120 bp, Artificial Sequence
  ENSG00000182944_6 (sequence is synthesized)
caacaaagcagctatgggcagcagcctcccactagttacccaccccaaactggatcctacagccaagctccaagtcaatatagccaacagagcagcagctacgggcagcagagttcattc

SEQ ID NO: 649810 - DNA, 120 bp, Artificial Sequence
  ENSG00000182944_7 (sequence is synthesized)
cgacaggaccaccccagtagcatgggtgtttatgggcaggagtctggaggattttccggaccaggagagaaccggagcatgagtggccctgataaccggggcaggggaagagggggattt

SEQ ID NO: 649811 - DNA, 120 bp, Artificial Sequence
  ENSG00000182944_8 (sequence is synthesized)
gatcgtggaggcatgagcagaggtgggcggggaggaggacgcggtggaatgggcgctggagagcgaggtggcttcaataagcctggtggacccatggatgaaggaccagatcttgatcta

SEQ ID NO: 649812 - DNA, 120 bp, Artificial Sequence
  ENSG00000182944_9 (sequence is synthesized)
tgacaacagtgcaatttatgtacaaggattaaatgacagtgtgactctagatgatctggcagacttctttaagcagtgtggggttgttaagatgaacaagagaactgggcaacccatgat

SEQ ID NO: 649813 - DNA, 120 bp, Artificial Sequence
  ENSG00000182944_10 (sequence is synthesized)
ccacatctacctggacaaggaaacaggaaagcccaaaggcgatgccacagtgtcctatgaagacccacccactgccaaggctgccgtggaatggtttgatgggaaagattttcaagggag

SEQ ID NO: 649814 - DNA, 120 bp, Artificial Sequence
  ENSG00000182944_11 (sequence is synthesized)
caaacttaaagtctcccttgctcggaagaagcctccaatgaacagtatgcggggtggtctgccaccccgtgagggcagaggcatgccaccaccactccgtggaggtccaggaggcccagg

SEQ ID NO: 649815 - DNA, 120 bp, Artificial Sequence
  ENSG00000182944_12 (sequence is synthesized)
aggtcctgggggacccatgggtcgcatgggaggccgtggaggagatagaggaggcttccctccaagaggaccccggggttcccgagggaacccctctggaggaggaaacgtccagcaccg

SEQ ID NO: 649816 - DNA, 120 bp, Artificial Sequence
  ENSG00000182944_13 (sequence is synthesized)
agctggagactggcagtgtcccaatccgggttgtggaaaccagaacttcgcctggagaacagagtgcaaccagtgtaaggccccaaagcctgaaggcttcctcccgccaccctttccgcc

SEQ ID NO: 649817 - DNA, 120 bp, Artificial Sequence
  ENSG00000182944_14 (sequence is synthesized)
cccgggtggtgatcgtggcagaggtggccctggtggcatgcggggaggaagaggtggcctcatggatcgtggtggtcccggtggaatgttcagaggtggccgtggtggagacagaggtgg

SEQ ID NO: 649818 - DNA, 120 bp, Artificial Sequence
  ENSG00000182944_15 (sequence is synthesized)
cttccgtggtggccggggcatggaccgaggtggctttggtggaggaagacgaggtggccctggggggccccctggacctttgatggaacagatgggaggaagaagaggaggacgtggagg

SEQ ID NO: 649819 - DNA, 120 bp, Artificial Sequence
  ENSG00000182944_16 (sequence is synthesized)
acctggaaaaatggataaaggcgagcaccgtcaggagcgcagagatcggccctactagatgcagagaccccgcagagctgcattgactaccagatttattttttaaaccagaaaatgttt

SEQ ID NO: 649820 - DNA, 120 bp, Artificial Sequence
  ENSG00000182944_17 (sequence is synthesized)
taaatttataattccatatttataatgttggccacaacattatgattattccttgtctgtactttagtatttttcaccatttgtgaagaaacattaaaacaagttaaatggtagtgtgcg

SEQ ID NO: 649821 - DNA, 120 bp, Artificial Sequence
  ENSG00000182944_18 (sequence is synthesized)
ggacggaaccattccaaacagcctagtctcgtgctgagagcctctccggtttcacgctgagacccgctcacccccgctctggccccttagatgctattttggcccgagtgtcacgtcggg

SEQ ID NO: 649822 - DNA, 120 bp, Artificial Sequence
  ENSG00000182944_19 (sequence is synthesized)
cgctctttagagaggactgggacaagagttgcggacgcgaagaacgagtaagcggtggttcatccctcctgaccccacccccgtggcctggcccgatggtcgcgcccggggttgcgagat

SEQ ID NO: 649823 - DNA, 120 bp, Artificial Sequence
  ENSG00000182944_20 (sequence is synthesized)
tgtgagcatgctcagtatcattgtggagaaccaagagggcctcttaactgtaacaatgttcatggttgtgatgttttttttttttttttaaataaaattccaaatgtttataaagagtca

SEQ ID NO: 649824 - DNA, 120 bp, Artificial Sequence
  ENSG00000182944_21 (sequence is synthesized)
agcaaaccagcaaaggaaaaaagcaaaccctagcaaacctttcacaaatgttaaagagacactgctccattttagcagtgcgggtcattttgagtttaatgaatccccatcaaatggtgg

SEQ ID NO: 649825 - DNA, 120 bp, Artificial Sequence
  ENSG00000182944_22 (sequence is synthesized)
tatagtagatagctatgtgtgtttgtaaggtttgtagcttgcaagacgtgcactaataatattttatatgatctttcctggttggcaggacccatggatgaaggaccagatcttgatcta

SEQ ID NO: 649826 - DNA, 120 bp, Artificial Sequence
  ENSG00000182944_23 (sequence is synthesized)
tctgtctagaggaacagaatgatgaccctgatggctggttagggacactagtcagccattcactggacgcttcagagccttctgaagattgatttgacctgtcctgtgggtgcaatgctg

SEQ ID NO: 649827 - DNA, 120 bp, Artificial Sequence
  ENSG00000182944_24 (sequence is synthesized)
cctgaggctgtgccctaaagcatgggtgtacatagatcctcttgatagtgagtgtgtacctgttcacacaccacctttccttgtttatcttccttagttcaattggtgatttctgctgtg

SEQ ID NO: 649828 - DNA, 120 bp, Artificial Sequence
  ENSG00000182944_25 (sequence is synthesized)
agcagaggtgggcggggaggaggacgcggtggaatggggtaagagcaaaccttttctccttttacctaattttgtttcatccataggattttcagtggaaagaagggactgaaagacata

SEQ ID NO: 649829 - DNA, 120 bp, Artificial Sequence
  ENSG00000182944_26 (sequence is synthesized)
agaaattaatttctgcatttccatggacaatctgttgagctcaagccatcttctaaaacatggaaatgtcatctttgtggcatatattaagtggcagtttattttctttccctgccagta

SEQ ID NO: 649830 - DNA, 120 bp, Artificial Sequence
  ENSG00000182944_27 (sequence is synthesized)
tacttcgttgggtcggggagaacaaagaatggttttgaaaccagagctttcagttcccttcatggtttccagaggtgagaagcctctgtgggtagtagatttgggatggaacacacacaa

SEQ ID NO: 649831 - DNA, 120 bp, Artificial Sequence
  ENSG00000182944_28 (sequence is synthesized)
cccttctaatgaccctaagttgttaactaactgcctttgaatggttgtcttgaaatacctggtgtatatactgcagaaaaggaatgcagctgttttccacagtgtttgtccccaacttct

SEQ ID NO: 649832 - DNA, 120 bp, Artificial Sequence
  ENSG00000182944_29 (sequence is synthesized)
gtttgtactcagaatcgttgaacatatgaagattttggtcccataatccttaaactatagcctgaggtgcacctgattacatagagtttggatggagcaaagaaaaatccaatagcattt

SEQ ID NO: 649833 - DNA, 120 bp, Artificial Sequence
  ENSG00000182944_30 (sequence is synthesized)
agatcaatgacataaccctgctgcctctgcctgcccttcccctcccttctcccatccccttttccctatctggtgtctgtactttgatgaaggtgagctataatattggtggttaacata

SEQ ID NO: 649834 - DNA, 120 bp, Artificial Sequence
  ENSG00000182944_31 (sequence is synthesized)
atccagaaggcttagttctgtgtgtgttctgtccctatataaactggtaaagaaaaaaaaaagttatgcagaatgttagatatttacatttgatacggtgtgccactattcaaggaaaaa

SEQ ID NO: 649835 - DNA, 120 bp, Artificial Sequence
  ENSG00000182944_32 (sequence is synthesized)
ttaaatagcattttttaaaaaacagaatgaacttcaaaattaaagttgatttttaacttccatattagcaaatactcttcactactgaaagacagtactattttgcatattctgcataac

SEQ ID NO: 649836 - DNA, 120 bp, Artificial Sequence
  ENSG00000182944_33 (sequence is synthesized)
tttaagaaagtctttagtgaaatctttattggaagaaagtcatttgacaacaggcaaaaatttaatgattcggtatgaagtaaaatcaatcttctgatttggaaaatactctattataaa

SEQ ID NO: 649837 - DNA, 120 bp, Artificial Sequence
  ENSG00000182944_34 (sequence is synthesized)
ggtttcacttctttttggatgttttaaaatagacatagacacttgaaagtactatcatcacgtctcaaatcacctagaattcctagtatttttaaattgcaaatacaatttcaagtttat

SEQ ID NO: 649838 - DNA, 120 bp, Artificial Sequence
  ENSG00000182944_35 (sequence is synthesized)
ttaaatactccagaagttataatcctactaattgtgctagactttgctagtagagggggcccctctttctggatgagaagtctctcttgcagccatagaagagaccatggctttccccat

SEQ ID NO: 649839 - DNA, 120 bp, Artificial Sequence
  ENSG00000182944_36 (sequence is synthesized)
aggtttttcaacagactgtgaagcagtctgtcggatcctgtggggatagacgggcatttccctcgttgcccccctttttattgtggtgtggtgatggttttcagtgtcttgtacaggtaa

SEQ ID NO: 649840 - DNA, 120 bp, Artificial Sequence
  ENSG00000182944_37 (sequence is synthesized)
ggcactcaatgttgttaacatgccctttttcattgcctcagtattttgatattttcattggctgttaaacgtggaaactttttaacatgctttgtcgcatttatatgctacaggttacaa

SEQ ID NO: 649841 - DNA, 120 bp, Artificial Sequence
  ENSG00000182944_38 (sequence is synthesized)
agtgagagccttgtatacacttcaatacttaaaaagtacccgtactcagtactcagccggcagcataatgaaaagtgggactagacacggtgtccatatggagaggaaaaatatacatag

SEQ ID NO: 649842 - DNA, 120 bp, Artificial Sequence
  ENSG00000182944_39 (sequence is synthesized)
aatatttttaacaaaatgtattcattgtataaatggaatccttctgtaactttggtaactgcatacttgttgtttggtaatgaaccagaggaggtataatactctagaattgtgtaacat

SEQ ID NO: 649843 - DNA, 120 bp, Artificial Sequence
  ENSG00000182944_40 (sequence is synthesized)
taaagtgtaaacttttgtgtttaaagagagagaacattttatggtgtgtacttttaaaaaggaaacaaagctgcatgcaacagcttgaaattgtatattcaggtattaaaggtgcaatac

SEQ ID NO: 649844 - DNA, 120 bp, Artificial Sequence
  ENSG00000182944_41 (sequence is synthesized)
tggttagaaaaaactcagggcctcccactggggagctgcctttatttaattttaaagaaaacaaaatctaacccaaaaagtccaattcatatttccctctcccctctttaagtaatttta

SEQ ID NO: 649845 - DNA, 120 bp, Artificial Sequence
  ENSG00000182944_42 (sequence is synthesized)
catggccatagtcattattctaactgatatgtctataaagttgcacccccagtccgttgagccttggtatttgttgtaaattctcctttcacagcgattgttaaatctattcgtgccctg

SEQ ID NO: 649846 - DNA, 120 bp, Artificial Sequence
  ENSG00000182944_43 (sequence is synthesized)
caagcacacatgctgcatttttccttacctcatactgcctttacacatgaaagttatcggatagtcattggagggaatacatagaaatacactgttctcttctaggatttttaaaaatta

SEQ ID NO: 649847 - DNA, 120 bp, Artificial Sequence
  ENSG00000182944_44 (sequence is synthesized)
aacttcagaagaaaggggttatataaacctcaattcaatggaattcttaaaaacttcttaatttttacgttgaacaaaagttttggtttgtgtaatatttcttaccacctttttccttca

SEQ ID NO: 649848 - DNA, 83 bp, Artificial Sequence
  ENSG00000182944_45 (sequence is synthesized)
ttttggtttgtgtaatatttcttaccacctttttccttcaagttgtcagcacatagtaggtgtgttttctttttttgccactg

SEQ ID NO: 649849 - DNA, 120 bp, Artificial Sequence
  ENSG00000182944_46 (sequence is synthesized)
ttggctgcttttgtgggtactacagattaattaaaaggttatttattaacccagtgtctattgctgtaatctttagcatgacaaggccctaactgttgctgcatagttttatgacatgag

SEQ ID NO: 649850 - DNA, 120 bp, Artificial Sequence
  ENSG00000182944_47 (sequence is synthesized)
ttattgccctgatcacttttagttttttgtttttttaattgccctccttgtaaatcttatagacgtgtcatgtagtggggtgtaatcggtatatgaacggtagggtagatggtattagat

SEQ ID NO: 649851 - DNA, 120 bp, Artificial Sequence
  ENSG00000182944_48 (sequence is synthesized)
tctaatttaaataaatgaatgccttatgtggttgaccttaggactctgcaaaaacttaagcagttcagatgaacaacatgccaactcaaaaacttttattgcttggggcttcctgttttc

SEQ ID NO: 649852 - DNA, 120 bp, Artificial Sequence
  ENSG00000182944_49 (sequence is synthesized)
tggaactatgtatactttcatacacattttaactcagcagttttgacaaggacattactatctctgtgtataatttcagaatttccttttaatatttgaggtagagaagaaagagtatta

SEQ ID NO: 649853 - DNA, 120 bp, Artificial Sequence
  ENSG00000182944_50 (sequence is synthesized)
ttatattctgtgctacaaatggtgattgtacaaaaggaagctgatacttgtttctggccagtacatgaggacactttaaggccctaaatcttaactaaaatgggcagtcttgattcagga

SEQ ID NO: 649854 - DNA, 120 bp, Artificial Sequence
  ENSG00000182944_51 (sequence is synthesized)
tttattttaaatatggaagctttttctttagtgagatgtagactttttttttggatataaatgccagcacctagaccaaagttttgttttgttttgtttttttaagatagggtctctgtt

SEQ ID NO: 649855 - DNA, 120 bp, Artificial Sequence
  ENSG00000182944_52 (sequence is synthesized)
gttttgttttgttttgtttttttaagatagggtctctgttgcctaggctggatcttactgcagccttgacctcccagcctcaagcagtccacccacctcagcctcccaagtagctgggac

SEQ ID NO: 649856 - DNA, 120 bp, Artificial Sequence
  ENSG00000182944_53 (sequence is synthesized)
tgaaggctcacgccaccatgcccagctaagtttgtttattttttgtagaggcgaggtctcactatattgcccagggtggtctctaactcctaaactcaagcagtcctcccacctcagcct

SEQ ID NO: 649857 - DNA, 120 bp, Artificial Sequence
  ENSG00000182944_54 (sequence is synthesized)
gtacccattgaccatgaggaagaagagtccagcaccaggaatggttgtaacacctcctacaggaaaggtactctagttaggagctgcagactttcgtggttttggtcatgctccacgccg

SEQ ID NO: 649858 - DNA, 120 bp, Artificial Sequence
  ENSG00000182944_55 (sequence is synthesized)
aagtcccgaagggaaaggcatggatcctgcctggtctggcagaggcaggagctagggatagaatgcatcttgctttgcagcatacctgtgaaaccaggttttttctgacacctggttagt

SEQ ID NO: 649859 - DNA, 120 bp, Artificial Sequence
  ENSG00000182944_56 (sequence is synthesized)
gaaatactgaaggggaggagagactctagggtttacctccaatattgctgagcaggaaaaaggccttttgcttgtggtaggtaagtaagaggaatggagctgagtaacttgataacgagg

SEQ ID NO: 649860 - DNA, 120 bp, Artificial Sequence
  ENSG00000182944_57 (sequence is synthesized)
caggaatctgctttatgatgtgaaaacattaccttttaaatgtttgtttggagcaatatcgaagtttaattttaaataatttacaaaaaaaggataaactgtgttaagcaactataattt

SEQ ID NO: 649861 - DNA, 120 bp, Artificial Sequence
  ENSG00000182944_58 (sequence is synthesized)
atagcttatttttattaatcatgtgctcaagtaattaagcttgtgcttcacatgatgttagtgcttgggaccaaaagaaagtgattaaattaattactacccaaattacaggttttagtg

SEQ ID NO: 649862 - DNA, 120 bp, Artificial Sequence
  ENSG00000182944_59 (sequence is synthesized)
ctagaactagtacctggatcattttctaattattttaaaatgctatgtcatttgccttttaccttttcttctgggatgttttattcctgcttgagggtattttggggtaagtttgtttac

SEQ ID NO: 649863 - DNA, 120 bp, Artificial Sequence
  ENSG00000182944_60 (sequence is synthesized)
aaacttgttaagacgacctgctagcaaaatcagtacagacttggcaaaaacagacttgtctcctattcacagcattcaagagggggcagaaggaaccctgttttctgtagcatgacatgc

SEQ ID NO: 649864 - DNA, 120 bp, Artificial Sequence
  ENSG00000182944_61 (sequence is synthesized)
catttctgttaggtgtggttttagagcaaatgagacagttactttaccaaaaactaggtacattcagagaacttaggctttaaataccagtttgttgctactcttgcggaagggggaata

SEQ ID NO: 649865 - DNA, 120 bp, Artificial Sequence
  ENSG00000182944_62 (sequence is synthesized)
tttaaagggattcaatatcctgatggtttaaagtaagtggtttacaaattgttctgataatgagtgtctaggcagatctctgaggggacctgaaatctgatgcagctctcctttgttcta

SEQ ID NO: 649866 - DNA, 120 bp, Artificial Sequence
  ENSG00000182944_63 (sequence is synthesized)
aggaaaccctgggcctcatttggctctcccttgggagaggttgagggtgcacctttatgaacatggaaaggtttatcacagcagttaacccccacttgctcctcccctctataccaagct

SEQ ID NO: 649867 - DNA, 120 bp, Artificial Sequence
  ENSG00000182944_64 (sequence is synthesized)
cttctggtttttcacctgacggggtgggtgtttgggatctattttttcttgctaatttgccaagtattgcactattaataccagcccccgaaatgaaaggaaccaaccacactggtgtgt

SEQ ID NO: 649868 - DNA, 120 bp, Artificial Sequence
  ENSG00000182944_65 (sequence is synthesized)
acaatcagacaagcaaggttgtatattgaggaaatttgagcaagctgccctgaagaaaggcatagtgacaagatgagagagatgcattgtttggagatgtgtttagccagtgcccttctt

SEQ ID NO: 649869 - DNA, 120 bp, Artificial Sequence
  ENSG00000182944_66 (sequence is synthesized)
ccccacgagcccccccaaggctcagagcggtactggcttttaaagggaaaggccttcatttcttcgtttatccccccagcagcgctggagagcgaggtggcttcaataagcctggtggac

SEQ ID NO: 649870 - DNA, 120 bp, Artificial Sequence
  ENSG00000182944_67 (sequence is synthesized)
gtttttaggtatcacgttcctttttttaagtcagaggtatcaatatatatatcctgttgtaatcttttttaagtcctataaatagattgctcttgtgttactggatatatgtaaacaatt

SEQ ID NO: 649871 - DNA, 120 bp, Artificial Sequence
  ENSG00000182944_68 (sequence is synthesized)
acagactaaactgatcgtgtgcatatataatgcaaaaaagtacacgtgaagatattcttatacaaggtagctcctgaattcaagtcaaccacatctgatattcagctgaaagactagtca

SEQ ID NO: 649872 - DNA, 120 bp, Artificial Sequence
  ENSG00000182944_69 (sequence is synthesized)
tctgttctaactggaggaagtagtggctgtgttagactaaccaagaatccctgtagttcactcacagcctgtacactgtccttcacggtttaaggataattttctttatgccagtcatgt

SEQ ID NO: 649873 - DNA, 120 bp, Artificial Sequence
  ENSG00000182944_70 (sequence is synthesized)
cttatgtggtggtatcaaagtctgactacccctacgaggtggctgtgctcagtggatacctgtctgggcatagaaaatgccagggcaggcaaaccagcatcagaagatggctaaggcagg

SEQ ID NO: 649874 - DNA, 120 bp, Artificial Sequence
  ENSG00000182944_71 (sequence is synthesized)
agtggggcctatcctgttcacttccacactttggtctactttggtttttatgataaagcagggatagaggagaaaataacttagaattctgaaaaacttaaaagcggagaaacggtgaca

SEQ ID NO: 649875 - DNA, 120 bp, Artificial Sequence
  ENSG00000182944_72 (sequence is synthesized)
tttagtgacttactacatgtgagaaattggtacttttcctggattttgcctggacttttttctcccaaattagtatattctagtcatgcctaactatgctattctttgtctagatgaaca

SEQ ID NO: 649876 - DNA, 120 bp, Artificial Sequence
  ENSG00000182944_73 (sequence is synthesized)
tatgcaggggttgtggaaaccagaacttcgcctggagaacagagtgcaaccagtgtaaggccccaaagcctgaaggcttcctcccgccaccctttccgcccccgggtaggtgcaggtttc

SEQ ID NO: 649877 - DNA, 120 bp, Artificial Sequence
  ENSG00000182944_74 (sequence is synthesized)
atgagtgtcccctcagcttcctggtgctaaacctcttttcttatttgtgggcttggtaaactgcagttgccctctgcttaacaactttgagttgtcgtgtcctcatttctaaattgtcag

SEQ ID NO: 649878 - DNA, 120 bp, Artificial Sequence
  ENSG00000182944_75 (sequence is synthesized)
cccgatgccgagattgagtgaagtgtctggtttgttctgctgtgagagaaggaagcagagcagcttccacagtgtccacagggcctctgcagccacccactgactgctttcgccctgcta

SEQ ID NO: 649879 - DNA, 120 bp, Artificial Sequence
  ENSG00000182944_76 (sequence is synthesized)
tttttattagtttcataagtggtttaaaaatgatctatacaaaagagactaatgggtactgccggcattgtcttaggggttaataaggttaacctatggttacaaaacaaagggtaactt

SEQ ID NO: 649880 - DNA, 120 bp, Artificial Sequence
  ENSG00000182944_77 (sequence is synthesized)
gaagtattgagtaactgcttctgtaatatgggggagaataaatttttaaatttggtttatttagaggaaaaattttgacttaaatttaacactgatttggcacataagcattgagagtgt

SEQ ID NO: 649881 - DNA, 120 bp, Artificial Sequence
  ENSG00000182944_78 (sequence is synthesized)
accctgtaatgttaatcctttaggtgttttcatttgttgaacccccaaactttctaacatcacacacagcaaggtgctaatgaaaaactgcttcaggtgccatttgcagatccatgtcct

SEQ ID NO: 649882 - DNA, 120 bp, Artificial Sequence
  ENSG00000182944_79 (sequence is synthesized)
tttgaattatgtttcagcagtggcctcgcacgtttattcgcctgcgttaggccggcaggcctgttgatttcgtaggtcgacagaggagaggggaaaaaaggccagtagaagcaatcttaa

SEQ ID NO: 649883 - DNA, 120 bp, Artificial Sequence
  ENSG00000182944_80 (sequence is synthesized)
aggcacttgcaagcaagccccggttgggaactccaaaatgggagtagagtggtccttgatggaaggagcgtttaagagtgtcgcctagccatcacctgcagttcgcaatctgtgggtaca

SEQ ID NO: 649884 - DNA, 120 bp, Artificial Sequence
  ENSG00000182944_81 (sequence is synthesized)
agacaggaaaagttctgggcactccagagtttttggagtccagaatccagcaacttaaggacagtttaagaattctccccatctgtggtcaataaacagattacagtacctatagccaag

SEQ ID NO: 649885 - DNA, 120 bp, Artificial Sequence
  ENSG00000182950_0 (sequence is synthesized)
agacagccttagctgctcaagctggagaactgtcttccttcccagcttcctccgtgtctggggtgggggatgggggggtctcaggcagggatactctagccccttgactgctgtttagac

SEQ ID NO: 649886 - DNA, 120 bp, Artificial Sequence
  ENSG00000182950_1 (sequence is synthesized)
cctgctgtagctgctgctgctccctgcccagccccagccatgaaactgcccaaggggaccaggagctctgtgtactttgcacagcacccagaaaaggagccattgccctcaaggcaggag

SEQ ID NO: 649887 - DNA, 120 bp, Artificial Sequence
  ENSG00000182950_2 (sequence is synthesized)
gtcaagcagacccctgtcatcatggccaagatcaaaggtccggggcccgccaagtacctccggccatcctgcacgggctacatagatcatgacatctccatgttcaaggcaccagcttat

SEQ ID NO: 649888 - DNA, 120 bp, Artificial Sequence
  ENSG00000182950_3 (sequence is synthesized)
accctgcatagccggcactcagagaagcggatggtgtgccacagcagccctgggccttgctatctcttggatcccaaaataactcggtttggaatgtccagctgcccgcaggtccccatg

SEQ ID NO: 649889 - DNA, 120 bp, Artificial Sequence
  ENSG00000182950_4 (sequence is synthesized)
actactttgagaagatccacccaccgggggaacgcagggctccccagtacacgtttggctaccggcgcccatacagagtgatggacctcaacccggctcccaaccagtaccagatgccac

SEQ ID NO: 649890 - DNA, 120 bp, Artificial Sequence
  ENSG00000182950_5 (sequence is synthesized)
tcttgctggggcccaacacccctgtcagccgagctgctccctgctacagtctggcctccagggacaagaactggttctacaaggaggatgtggcaggaggccctggacctaccacgtacg

SEQ ID NO: 649891 - DNA, 120 bp, Artificial Sequence
  ENSG00000182950_6 (sequence is synthesized)
cccgacctgagccatccatctatcagaaccgcagccctacttacagcatggccaagcgcttcgcctaccctctggacctcacgccacggcctggccccggctcccacgaggtccagcagg

SEQ ID NO: 649892 - DNA, 120 bp, Artificial Sequence
  ENSG00000182950_7 (sequence is synthesized)
tcactgtgcacaagccccacatccctgctttcaccatgggcatcaagcactcactccacctgtgcccactggtcatcgacattcgtgactgaggcccctcttggggcactcactgcccct

SEQ ID NO: 649893 - DNA, 120 bp, Artificial Sequence
  ENSG00000182950_8 (sequence is synthesized)
catccccagaaattatttttctacaccaaattgagcaatttgaccaagatttctagtagcagagccggtacctgctgagtgtccggcacacagaagacattagagatacattttcatgta

SEQ ID NO: 649894 - DNA, 120 bp, Artificial Sequence
  ENSG00000182952_0 (sequence is synthesized)
ctgttcctggcggagccgggctccgctcgtcttctctgtcttagggctggtgctggccctgcccacgcctagggctccggcgcgtcacgggcctcagctgggattcccgcgcccctcgga

SEQ ID NO: 649895 - DNA, 120 bp, Artificial Sequence
  ENSG00000182952_1 (sequence is synthesized)
cggccacgagactcggacatctttccaggaacagcgtgaggaggacagaagcacccaacaggactgctcaagccacctgcgaacactgctgctaccatgcccaagagaaaggcaaaagga

SEQ ID NO: 649896 - DNA, 120 bp, Artificial Sequence
  ENSG00000182952_2 (sequence is synthesized)
gatgctaaaggtgataaagcaaaggtgaaggatgagccacagaggagatcagctcggttgtctgctaaaccagctcctccaaaaccagagcccaggcctaaaaaggcctctgcaaagaag

SEQ ID NO: 649897 - DNA, 120 bp, Artificial Sequence
  ENSG00000182952_3 (sequence is synthesized)
ggagagaagcttcccaaagggagaaaggggaaagcagatgctggaaaggatgggaacaaccctgcaaaaaaccgagatgcctctacactccagtcccagaaagcggaaggcactggggat

SEQ ID NO: 649898 - DNA, 120 bp, Artificial Sequence
  ENSG00000182952_4 (sequence is synthesized)
gccaagtgaaatgtacatttttgagagctctgtacttatagtgactctactgtttgaaatactatttttttaaatcaagttttataaaagtgtagaattttggcttttttaagttatgtt

SEQ ID NO: 649899 - DNA, 120 bp, Artificial Sequence
  ENSG00000182952_5 (sequence is synthesized)
gttagcacacaggacacttccttgttgtcttttgtggaaagggcaagtaccactaatagggtgtatctcagaaactgaattgaaataagggaaaataggattttctgtcctggtttttga

SEQ ID NO: 649900 - DNA, 120 bp, Artificial Sequence
  ENSG00000182952_6 (sequence is synthesized)
agattgttcttgattcccttgattcccaggagagattctctgacattcacgtgtcagccactttggcacggaagccttacagtgtggggaaccaaaacttcgtgtctcccctttccccga

SEQ ID NO: 649901 - DNA, 120 bp, Artificial Sequence
  ENSG00000182952_7 (sequence is synthesized)
tgccatcagcatagacttgacttccttaaaccgagagttttgatgtggccttggcaaccctaaaatcagctgtgttaggtaacaaaactcaggctttctgttgatgacatcgagatggtg

SEQ ID NO: 649902 - DNA, 120 bp, Artificial Sequence
  ENSG00000182952_8 (sequence is synthesized)
tgttttcagtttgtggattcatcctgctggttttactttagtccctccatgtcaaagtgggcctgagaaaagctcatacatgcctcatgtgaagtgtccaccctctctgaaaatctttct

SEQ ID NO: 649903 - DNA, 120 bp, Artificial Sequence
  ENSG00000182952_9 (sequence is synthesized)
tgttcaaaacagcaacgacatatcttgttaacttttacggtgacttttggaggaggggagtttggaaattgtaaaatgttatagattgttgcctatttcctgctgaaagtaaatgttttt

SEQ ID NO: 649904 - DNA, 120 bp, Artificial Sequence
  ENSG00000182952_10 (sequence is synthesized)
aaaaagtatcatataaagctgaatacaaattggtttggggggagatcctttcctacccaaagtcataaatatattctttactgccttgtggaaattttatagttttgcctttcacatttg

SEQ ID NO: 649905 - DNA, 120 bp, Artificial Sequence
  ENSG00000182952_11 (sequence is synthesized)
tctttagtctgtcctgaactgatttttgtgaaaattatgagttagaaattcaacttaacatttttcatattcgaagtggttgtctctgcactatttactgaaaagttcatcctttcccca

SEQ ID NO: 649906 - DNA, 120 bp, Artificial Sequence
  ENSG00000182952_12 (sequence is synthesized)
gtgatttgtaacactgcctctttcataaattaaatttttgtgtatgtgtgtgggtcttttgatggtttctattctgactgacatcaatttgtctaatcttgtagcagtacagtacagtcc

SEQ ID NO: 649907 - DNA, 120 bp, Artificial Sequence
  ENSG00000182952_13 (sequence is synthesized)
tgattattgcaactttaggaaaaggtctgataaaaaccaagatgcctccacattttgtcataattgtaaccaatttcacctctgtctccagtatcaccacaaaattgttcttccttggag

SEQ ID NO: 649908 - DNA, 120 bp, Artificial Sequence
  ENSG00000182952_14 (sequence is synthesized)
tgtcttggctattcttagccaactgttcctccatattacttctagaattagaccaacaatttataaatcaaacaaacccaagagcattgaaattttgattggatttgtattgaatttata

SEQ ID NO: 649909 - DNA, 120 bp, Artificial Sequence
  ENSG00000182952_15 (sequence is synthesized)
gattaatctggtaaaccatgtcatctttacaatgttgtcttccaatacatgaatatggtacagctcttcatttacttaggcctttgaaatatctttcaataaagtttataattttctcca

SEQ ID NO: 649910 - DNA, 120 bp, Artificial Sequence
  ENSG00000182957_0 (sequence is synthesized)
gtgtgcgttgcgctttctcccgcgatcgccctgccggtcgctagctccgagggcgcgcactggatcccaggctcctccgagagtgcggcgacctcggggctccgccggcaccggaggtgg

SEQ ID NO: 649911 - DNA, 120 bp, Artificial Sequence
  ENSG00000182957_1 (sequence is synthesized)
ctctgagggcagggacgtgttggacacgctgactttgtaggctccgccaagaggcgccgcaggaggtcgtccctgatggcccctggaggcgaagctcatcacaggatgaggaaaggacag

SEQ ID NO: 649912 - DNA, 120 bp, Artificial Sequence
  ENSG00000182957_2 (sequence is synthesized)
aggcacagagaacccccaagaggagatggggctctgggagacggccaaggcctcggccattctctgactacggccagctggccagccgcagtttgtctattcctgaagactcggttgctg

SEQ ID NO: 649913 - DNA, 120 bp, Artificial Sequence
  ENSG00000182957_3 (sequence is synthesized)
cagacccccagaaggaagaccgtgtggacgaggacccccaggcaagcatgacttctgccagccctgaagaccagaatgctccagtgggctgccccaaaggagcccggagaaggcgcccca

SEQ ID NO: 649914 - DNA, 120 bp, Artificial Sequence
  ENSG00000182957_4 (sequence is synthesized)
tttccgtgataggtggggtcagcttgtatgggaccaaccagacggaggaactggacaatcttctgacccaaccggcttccaggccgcccatgcctgctcaccaggtgccaccctacaagg

SEQ ID NO: 649915 - DNA, 120 bp, Artificial Sequence
  ENSG00000182957_5 (sequence is synthesized)
ctgtgtcggcccggttccggcccttcacattctcccagagcacccccattgggttggaccgtgtgggacgccggcggcagatgagagcatccaacgtttcttcagatggaggtactgagc

SEQ ID NO: 649916 - DNA, 120 bp, Artificial Sequence
  ENSG00000182957_6 (sequence is synthesized)
cctctgccttagtggatgacaacggtagtgaggaggacttcagctatgaagacctctgccaggccagccctcggtacctgcagcccggcggggagcagctggccatcaatgagctgatca

SEQ ID NO: 649917 - DNA, 120 bp, Artificial Sequence
  ENSG00000182957_7 (sequence is synthesized)
gtgatggcaacgtggtctgcgcagaagccctgtgggaccatgtgaccatggatgaccaggaactgggcttcaaagccggggatgtcatccaggttctggaagcctccaacaaggactggt

SEQ ID NO: 649918 - DNA, 120 bp, Artificial Sequence
  ENSG00000182957_8 (sequence is synthesized)
ggtggggccgcagtgaagataaggaagcctggttccccgcgagcttcgtcagattgcgagtgaatcaggaagagctgtcggaaaactccagcagcacccccagtgaggagcaggacgagg

SEQ ID NO: 649919 - DNA, 120 bp, Artificial Sequence
  ENSG00000182957_9 (sequence is synthesized)
aggccagccagagccgccacagacactgtgagaacaagcagcagatgcggaccaacgtcatccgggagatcatggacaccgagcgggtgtacatcaaacacctcagggacatctgtgagg

SEQ ID NO: 649920 - DNA, 120 bp, Artificial Sequence
  ENSG00000182957_10 (sequence is synthesized)
gctatatccgacagtgccgcaagcacacaggaatgttcaccgttgcgcagctagccactatttttggaaacattgaagatatttacaaattccaaagaaagtttctgaaagaccttgaga

SEQ ID NO: 649921 - DNA, 120 bp, Artificial Sequence
  ENSG00000182957_11 (sequence is synthesized)
aacagtacaacaaagaggaacctcacttaagtgaaataggatcttgctttcttcaaaatcaagagggctttgccatctattccgagtactgcaacaaccacccgggcgcctgcctggagc

SEQ ID NO: 649922 - DNA, 120 bp, Artificial Sequence
  ENSG00000182957_12 (sequence is synthesized)
tcgccaacctcatgaagcagggcaagtacagacatttctttgaagcctgccgcctgctgcagcagatgattgacatcgccatcgacgggttcctgctcacaccagtgcagaagatctgca

SEQ ID NO: 649923 - DNA, 120 bp, Artificial Sequence
  ENSG00000182957_13 (sequence is synthesized)
aatacccgctgcagctggccgagctgctcaagtataccacacaggaacacggtgattacagcaacataaaggcagcatatgaggccatgaagaatgtggcctgtctgatcaacgagcgca

SEQ ID NO: 649924 - DNA, 120 bp, Artificial Sequence
  ENSG00000182957_14 (sequence is synthesized)
agcgcaagctggagagcatcgacaagatagctcgctggcaggtgtctatcgtgggctgggagggactggatatcttagaccgaagctcagaattgattcattctggggagctgaccaaaa

SEQ ID NO: 649925 - DNA, 120 bp, Artificial Sequence
  ENSG00000182957_15 (sequence is synthesized)
tcactaagcaaggcaaaagccagcagcggacgttcttcctgtttgaccaccagctggtgtcctgcaagaaggacctgctgcgcagggacatgctgtactacaagggccggctggacatgg

SEQ ID NO: 649926 - DNA, 120 bp, Artificial Sequence
  ENSG00000182957_16 (sequence is synthesized)
atgagatggagcttgtggacctgggggatgggcgcgacaaggactgcaacctcagcgtgaaaaatgccttcaagctcgtcagtaggaccacagacgaggtttatttgttttgtgccaaaa

SEQ ID NO: 649927 - DNA, 120 bp, Artificial Sequence
  ENSG00000182957_17 (sequence is synthesized)
aacaagaagacaaggcgaggtggctgcaggcctgtgcagatgaaaggaggcgggtgcaagaggacaaggagatgggaatggaaatttcagaaaaccagaagaaacttgccatgttaaatg

SEQ ID NO: 649928 - DNA, 120 bp, Artificial Sequence
  ENSG00000182957_18 (sequence is synthesized)
ctcaaaaggcaggacatggaaagtcaaaaggctacaacaggtgccctgtggccccaccgcaccagggcctgcaccccatccaccagcgccacatcactatgcccacaagcgtcccccagc

SEQ ID NO: 649929 - DNA, 120 bp, Artificial Sequence
  ENSG00000182957_19 (sequence is synthesized)
agcaggtctttggcctggcggaacccaagaggaagtcctcgctcttctggcacaccttcaacaggctcacccccttccggaaatgaaaacaggaggctgtgcttccatggagctgggtgt

SEQ ID NO: 649930 - DNA, 120 bp, Artificial Sequence
  ENSG00000182957_20 (sequence is synthesized)
caagagaagaactgtctttgtttcttgtgtgcttcaatccagggaaagtttcttggacccagtgataaaaacttccttttagggatcaatgaaggagagaaggtcttggaatcaccttca

SEQ ID NO: 649931 - DNA, 120 bp, Artificial Sequence
  ENSG00000182957_21 (sequence is synthesized)
gtctttggagacccagctgcctttgtggaagggaggagacggtcatgacacaaagctttatcctacacagaaacacccgtgacccactatgagatggcccagatgtgggacccggtacca

SEQ ID NO: 649932 - DNA, 120 bp, Artificial Sequence
  ENSG00000182957_22 (sequence is synthesized)
tgctctaaagcgagtgattaggcagcagctgaagccacccctgctgatgatgagcaagtgcctgctgcaggtccaaacacagcatccagggctttgcagttcctaaggagtgatgaggtt

SEQ ID NO: 649933 - DNA, 120 bp, Artificial Sequence
  ENSG00000182957_23 (sequence is synthesized)
agaggatcacttctgcatttgattttcaaggatgccgtcaagacggggttgacacaatgctgcacgtgtctggtcacacttagaaattgagctcttactctcttctgtaatactggggga

SEQ ID NO: 649934 - DNA, 120 bp, Artificial Sequence
  ENSG00000182957_24 (sequence is synthesized)
cctacagctgccgtggggctgaccacggtgttccctggcatcgtctgtgtccacacagatgctaactggtagtgcaaatgtcatcctgcaaggttcctcttcctgcaagcaaagtggaga

SEQ ID NO: 649935 - DNA, 120 bp, Artificial Sequence
  ENSG00000182957_25 (sequence is synthesized)
gaaagaagatgcatctgtcaccttcatcagggtcctcagtgcagagcaacttacgcatcctcaagaatccactgcttttcaggcaaggagggagaaatcctgctgcacactggctttgtc

SEQ ID NO: 649936 - DNA, 120 bp, Artificial Sequence
  ENSG00000182957_26 (sequence is synthesized)
ccggagtcggattccctcctgcctgcacgccttcagtaactccgagcagaaatcacatcttgcccacatgctgtaacctaagaaactgctatgcaaggctgggtgctgtggctcatgcct

SEQ ID NO: 649937 - DNA, 120 bp, Artificial Sequence
  ENSG00000182957_27 (sequence is synthesized)
gcaccactgcactccagcctgggagatacagcgagactgtctccaaaaacaaaaacaaaaacaaaaaacattcaaacaactgtttgcaatataaaaagctcatttactgtaatatttatg

SEQ ID NO: 649938 - DNA, 120 bp, Artificial Sequence
  ENSG00000182957_28 (sequence is synthesized)
aaaaagctcatttactgtaatatttatgatacagtgaatatgaaaatgcactggtcagaaggcactctcaaagagccgcactgctcctgacatcgtccttagcaatgaagtcacaaagac

SEQ ID NO: 649939 - DNA, 120 bp, Artificial Sequence
  ENSG00000182957_29 (sequence is synthesized)
agccaaagcagtcctgcttcttggaaatcagaagctgcctttatcacatataaagccaaacagggcataaccatgtcacgtgagcatgtcatcaggcttctgaggacttgttctttataa

SEQ ID NO: 649940 - DNA, 120 bp, Artificial Sequence
  ENSG00000182957_30 (sequence is synthesized)
aaaaagaccttcacaaaatatcttggcttagagatagcagtctttattaacaaaggccacctaggctgacacctgcagataatcatctccttttctttgtctatgttgtacattttcatg

SEQ ID NO: 649941 - DNA, 120 bp, Artificial Sequence
  ENSG00000182957_31 (sequence is synthesized)
atataacttttaactatgtctagagaaggcaggctctgcaagagaggtgccctttcaacccgctcagtgccctggacaggagatgctgtgttaaactgttaatggatatctatatgagaa

SEQ ID NO: 649942 - DNA, 120 bp, Artificial Sequence
  ENSG00000182957_32 (sequence is synthesized)
gctcatttttgtatgctatccctgcagtttttttttttctaacaggcccatgtttgagaataaacaagtctgtgatgtcagagacaaaggtgtattcttcagtctgcaggtgtgtggcac

SEQ ID NO: 649943 - DNA, 120 bp, Artificial Sequence
  ENSG00000182957_33 (sequence is synthesized)
ctcccttctcccctgcagccccccacatccagagccgttcctgagagtgacatcatgcatcaagaaaacataaccttggtcctcaggtgaacccttggaacattctgtgaccgcctgatg

SEQ ID NO: 649944 - DNA, 120 bp, Artificial Sequence
  ENSG00000182957_34 (sequence is synthesized)
tccattctgagccaccttggcacacatgcttacaggcagcactgctaagggttcaggtgccccatggctgacagcccgagttgcttctgtggaccatcatgccgctcggcacgtcctgag

SEQ ID NO: 649945 - DNA, 120 bp, Artificial Sequence
  ENSG00000182957_35 (sequence is synthesized)
acagaagttgctgcaggaaggagcttctggagaggtcctgtggcatgtgtgggggtgtgtgtgtgtatgtttccttcttgaacagacattccaactttagatgtgtttatagaactgacc

SEQ ID NO: 649946 - DNA, 120 bp, Artificial Sequence
  ENSG00000182957_36 (sequence is synthesized)
tttttactaacaaaatacaatgatatatgttggaaactacttaatatgcttttcctgcacaccttagcaataactgtaggggtctctgctagagttgtttgtatgtacagcaattttgaa

SEQ ID NO: 649947 - DNA, 120 bp, Artificial Sequence
  ENSG00000182957_37 (sequence is synthesized)
caaattgttttaaatgtaatataagagaattagtttaaggaagtaaagagaatcatttgcttgtgttacattttcagtgaggattcagtttaagagtcattcttaggacttccatttcct

SEQ ID NO: 649948 - DNA, 120 bp, Artificial Sequence
  ENSG00000182957_38 (sequence is synthesized)
aatatttattcatgggtaatgaagaaatggtttgcattttgtggccagtcctaatttattttccagctgagccctaacttccggctcccacctacctccacggacttcctaacagagact

SEQ ID NO: 649949 - DNA, 120 bp, Artificial Sequence
  ENSG00000182957_39 (sequence is synthesized)
tatgaataccaggatgtgtttttgttaagtcaggttcaattcgttgcccctgtcagttttatagagtgtgagggtcactccattaaagatctctcctgggtggatcctacttggatgttc

SEQ ID NO: 649950 - DNA, 120 bp, Artificial Sequence
  ENSG00000182957_40 (sequence is synthesized)
aggtgattttgaaaactgctaacatttttaaaaggctagaacatcctttgacttcttgaaaatctgcatgtctggcttgggttttattaccacatgcctgagttcttcaagaatggaagg

SEQ ID NO: 649951 - DNA, 120 bp, Artificial Sequence
  ENSG00000182957_41 (sequence is synthesized)
ctcaagtattctcatcttccatttgccaaacttccttcctgatttgagtcacgtgttccacttggaaagaaagggaacagagagcctcctccatggacagtgtatgaatttcattgggaa

SEQ ID NO: 649952 - DNA, 120 bp, Artificial Sequence
  ENSG00000182957_42 (sequence is synthesized)
tcttgctctctcccgcctctatgcctttctctctttttaaccttactttacataatattatagatgggccaagaaaagaaaagatgacataacattttgatgaatttcacctattccatt

SEQ ID NO: 649953 - DNA, 120 bp, Artificial Sequence
  ENSG00000182957_43 (sequence is synthesized)
cttcacgtttcagaattggtcgactttgttagaagataattgaagtagccttgggtcaaaagcaaccttttcaattgtgatcatacctaaaacatataaaaaccctgccgtagattaaaa

SEQ ID NO: 649954 - DNA, 120 bp, Artificial Sequence
  ENSG00000182957_44 (sequence is synthesized)
gcaattataaaatcataaaattgaatgtttgcagaatcctggagcagtagatttctttgtctttggcctgcggactagaaagagggcagcagtagtatgctggagcttccctgggatacc

SEQ ID NO: 649955 - DNA, 120 bp, Artificial Sequence
  ENSG00000182957_45 (sequence is synthesized)
agccacatggtttcttttcattagatctgatttttgtttcccactgtagatctgattttgtagttgaaaacatttcaccaccatcaaacactatttctgaatattgtgcctttttatacc

SEQ ID NO: 649956 - DNA, 120 bp, Artificial Sequence
  ENSG00000182957_46 (sequence is synthesized)
tagcctagatgaaaaccgatgccattcttattcagaaaatccccccatcctacatgactgttatctagacataaagcaaagtgcatttaattcaaaatttggttcacaatataagtattt

SEQ ID NO: 649957 - DNA, 120 bp, Artificial Sequence
  ENSG00000182957_47 (sequence is synthesized)
tgtaaaagccagctgaaccagcattttatcaggtggaaatctctgcaagccaaattgctgatactccttcatgcagatcaacttggtgtcccagtcagaatagaacagcataattacctg

SEQ ID NO: 649958 - DNA, 120 bp, Artificial Sequence
  ENSG00000182957_48 (sequence is synthesized)
gagttagggggagtatttctgcactattacttgtcagggagagaagaaacttagaattgtccctcaaaggagtgtcaagaagtatgaataaatgtcctttcaccagctcacaggccagaa

SEQ ID NO: 649959 - DNA, 120 bp, Artificial Sequence
  ENSG00000182957_49 (sequence is synthesized)
atggaggacccaagtcaactaggtgaaactactagcagacccagctttcccataataacctaatctgcaaattgttctattaaagtctcattgttttcaggatgcaatgaaagtggattt

SEQ ID NO: 649960 - DNA, 120 bp, Artificial Sequence
  ENSG00000182957_50 (sequence is synthesized)
caaaaggctttggaaaaataagtggaacatgactgatcttgaaaaaaaaagcaaaagcttaaatatttgatacaagtttacttagctacaacatactttacattgttgcctttagttatc

SEQ ID NO: 649961 - DNA, 120 bp, Artificial Sequence
  ENSG00000182957_51 (sequence is synthesized)
tcacaggcactgacattttatatttagaaaatacttttaatctttctaatctttttttgtaaatattagtgtccattctgtatgactcgctaacctactttgcaaggctttgggcaacat

SEQ ID NO: 649962 - DNA, 120 bp, Artificial Sequence
  ENSG00000182957_52 (sequence is synthesized)
tttagctcattaacttcaagatgatgtgtcatctgtataggtcaaagaatgggacttctgaactgaggaatttgctgttgacagccaaagtatagtgtacaagattgatgtaacttgata

SEQ ID NO: 649963 - DNA, 120 bp, Artificial Sequence
  ENSG00000182957_53 (sequence is synthesized)
tgtatttttgttgaagttttttgtaaaaaaaaattatttacaatgttatttgaatgatttttttaaatgctgtgaatctatatttgttgttttgtatattaaaattcatttgccaaactc

SEQ ID NO: 649964 - DNA, 120 bp, Artificial Sequence
  ENSG00000182957_54 (sequence is synthesized)
gtttctgggcaggctctggccgggaacgcatacaacgtcaaagcagtgaataagcgatttctgcagttcccgtagctgccagcctgtgcagtcctctgtgatgcttggggaccggctcct

SEQ ID NO: 649965 - DNA, 120 bp, Artificial Sequence
  ENSG00000182957_55 (sequence is synthesized)
cggtcacaccccagtcctgctctgaaggttgccgttttccaaacagaaggatggtagctagaggggagatagcaagattctggagtctggaaagccttcacttggtttcttcagatggag

SEQ ID NO: 649966 - DNA, 120 bp, Artificial Sequence
  ENSG00000182957_56 (sequence is synthesized)
caaggcaggtgtgagtgccaggacggcattcctggagatgaaggcctggagctgcggtctgcggactcggcagtgcccgtggccatgacccaggctgccgtgcggccctgggcaccctgc

SEQ ID NO: 649967 - DNA, 120 bp, Artificial Sequence
  ENSG00000182957_57 (sequence is synthesized)
ctggagaacatgaccactgccccaaacggcctcgggccaggccccgcagccccctgtgcaggctcggacctgaaagacgccaagatggtgacctcccttgcgtgtggaaatggagtctgt

SEQ ID NO: 649968 - DNA, 120 bp, Artificial Sequence
  ENSG00000182957_58 (sequence is synthesized)
ggctgcagccctggtggcgacacggacacccaggaagccaaactcagcccagccaagcttgtgcgcctcttttccaccagtcggaagaggacgggtgcccaccccgagcggccccactcc

SEQ ID NO: 649969 - DNA, 120 bp, Artificial Sequence
  ENSG00000182957_59 (sequence is synthesized)
atggtcctggtggggaactcctccacatggaacaccctcgcctccttccggaaaatgggatcctttaagaaactgaagtcctcagtcctgaaaggaattcagagccgagaggggtcaaat

SEQ ID NO: 649970 - DNA, 120 bp, Artificial Sequence
  ENSG00000182957_60 (sequence is synthesized)
gcctgttcaaagggagaggcttcggagcatggcctgggaaagtccatcccaaatggcgctgtcccaggagcccaggcaagcaggggctcccccttagcaccgggaccagcatgtggtgcc

SEQ ID NO: 649971 - DNA, 120 bp, Artificial Sequence
  ENSG00000182957_61 (sequence is synthesized)
ctcaggccagcagagtggggcacattggatggctccgacctcgaggacacggacgatgccttccagcggagcacacaccgctcccgcagcctccgcagagcctacggcctgggccgcatc

SEQ ID NO: 649972 - DNA, 120 bp, Artificial Sequence
  ENSG00000182957_62 (sequence is synthesized)
tgcctgctggatgcgccccagaaccatgcgacacccacgatagccactggccaggtgcccgccgtgtgtgagattctcgtgagggaccctgaaaacaacagcatgggctacaggaggagc

SEQ ID NO: 649973 - DNA, 120 bp, Artificial Sequence
  ENSG00000182957_63 (sequence is synthesized)
aagagcacggacaatcttgcctttctgaagaagagctcctttaagcggaagtccacctccaatcttgcagacctcaggacggcccatgacgcacgggtaccacagaggaccctgagcagt

SEQ ID NO: 649974 - DNA, 120 bp, Artificial Sequence
  ENSG00000182957_64 (sequence is synthesized)
tcctccactgactcccaaaagcttgggtcaggaaggaccaaacgctggaggagcccgataagggccaaggactttgacagagtcttcaaacttgtgagcaatgtgactgaggctgcctgg

SEQ ID NO: 649975 - DNA, 120 bp, Artificial Sequence
  ENSG00000182957_65 (sequence is synthesized)
aggagggagagtcctaggagtggggccccatcccctggagaggccagcctgagacttcaggcacacagccggctgcatgacgactactcccgccgcgtctccaggagcactgagcaggac

SEQ ID NO: 649976 - DNA, 120 bp, Artificial Sequence
  ENSG00000182957_66 (sequence is synthesized)
agcaggcggggcggggcggtcatgcatgggaccactgcaacctgcaccgtggcccccggtttcggctcagccacctctaaggggccccacctagacgctgacactgccgtatttcctctt

SEQ ID NO: 649977 - DNA, 120 bp, Artificial Sequence
  ENSG00000182957_67 (sequence is synthesized)
gaaaccaaaagttcctgggcggtggaaagcgacagttcctgcacttgcagctctttgccaagcccgattgtccaggatgtgttgagcaaagactcctgtgacccaaacgctggcagccag

SEQ ID NO: 649978 - DNA, 120 bp, Artificial Sequence
  ENSG00000182957_68 (sequence is synthesized)
ttgacatttgaccctgagcagcctcccacccctctaaggcccaccacacccaagccccagagccctcagagcccccagagccccggggcaggaagtgccagctgtcacagcaatcacagt

SEQ ID NO: 649979 - DNA, 120 bp, Artificial Sequence
  ENSG00000182957_69 (sequence is synthesized)
gccctgtccgcgaattcagaggaaagtgaaggaagggcagaagagcctgctcagagagagccagggcctgtgtccttgcaggatcccctggaagccacacatggtgatgagggcagcaag

SEQ ID NO: 649980 - DNA, 120 bp, Artificial Sequence
  ENSG00000182957_70 (sequence is synthesized)
gcgcacccgggacagtttccagtcggcttctccgtgaccttcctcccccttccagctcggagcgggatgctgggatccctccaaggaccctctgaggacgtaggagggatgctgagacag

SEQ ID NO: 649981 - DNA, 120 bp, Artificial Sequence
  ENSG00000182957_71 (sequence is synthesized)
ggccagcttcaaaccttgtcaagctctgacaagggaagatgaagcctagttccagctaggggtgacctgtctatctgcattttttgagctgcagagtgatgggagtcatattcgctgcct

SEQ ID NO: 649982 - DNA, 120 bp, Artificial Sequence
  ENSG00000182957_72 (sequence is synthesized)
gtgcagcaccacaggcctgatgaaaatgaaatggcaacaccgtgcagatggcaaagcgtaggcctcacaaacatcctggccgtgaagagcttgtcttcaagagtagctggtgcagaaact

SEQ ID NO: 649983 - DNA, 120 bp, Artificial Sequence
  ENSG00000182957_73 (sequence is synthesized)
ccagaagaaaaggagaaggaggaggtaagggcagcggcgaggtccctcatgtgggcgaccctcctgcgggaagggagcttgcacaggtgttgcccttggtccctaacctgtcaaggtcag

SEQ ID NO: 649984 - DNA, 120 bp, Artificial Sequence
  ENSG00000182957_74 (sequence is synthesized)
tggccctctgctgaccttgttgcccttacagtattagtgggaatgggagttgtcaagttgctgtttaccaagttcagaagtaatctctatctcctttgaaataaattgacaatgtacgag

SEQ ID NO: 649985 - DNA, 120 bp, Artificial Sequence
  ENSG00000182957_75 (sequence is synthesized)
aagcacaccaataacaagtacttgttcagaatgtataaacaaccctgagagatgggttttatcatccacattcaacaggtgaaaaaacaaagaaagaaacttgaccaaggactcatactc

SEQ ID NO: 649986 - DNA, 120 bp, Artificial Sequence
  ENSG00000182957_76 (sequence is synthesized)
gagacaggctcatagcaggatcgctttgctggcagacacacctggctttgaatccagccccgcaacttggggaaagttacttaacatctttgagccacggtttcctccttcataaccaga

SEQ ID NO: 649987 - DNA, 120 bp, Artificial Sequence
  ENSG00000182957_77 (sequence is synthesized)
cagcaacactccaagatgcttgtgaggctctcaagaggatttattccagcgctgagcgcagtgcctggcgcacattaagatgccaggaagccggatgggtgattgctcaggtctgtccag

SEQ ID NO: 649988 - DNA, 120 bp, Artificial Sequence
  ENSG00000182957_78 (sequence is synthesized)
tgggcagccgtcagaaactgggagggctgacgagacaccagcccagagagctgtcagggagcggcagagcagaggagagggcccaggatggatcggcaggtgtcagccaggatggacggg

SEQ ID NO: 649989 - DNA, 120 bp, Artificial Sequence
  ENSG00000182957_79 (sequence is synthesized)
aggagccgtgctcagagccagcagccccaggacgagcagctcctggctaggaacagaagacaggcactgtgggacaagtcaaagggtgctttcatgtatcatcattccacttgaggctca

SEQ ID NO: 649990 - DNA, 120 bp, Artificial Sequence
  ENSG00000182963_0 (sequence is synthesized)
aaatccccctgagaggtgtatcggctgcttcagggaatagagcagatggggtgaaggtttttgcaaggcctttagtgacctgctttcaatttgctgcaattcttctgctttggctttttc

SEQ ID NO: 649991 - DNA, 120 bp, Artificial Sequence
  ENSG00000182963_1 (sequence is synthesized)
ctataggtgccagagttcatctgcttcatatttttactactgacgcatcttcctgtcgtatattcttagactgtggtgacttaagaatctttgggtcacctgttacatggtttctcctgc

SEQ ID NO: 649992 - DNA, 120 bp, Artificial Sequence
  ENSG00000182963_2 (sequence is synthesized)
cacctgtatggggaggagaagactggtattcaaactcaagcctgtttctatcttattctcattgatttttatgatacatagaaaactttgtttctttctgaaaatggcattttagtgatt

SEQ ID NO: 649993 - DNA, 120 bp, Artificial Sequence
  ENSG00000182963_3 (sequence is synthesized)
cattgttttctgtgggagaaagcttatgacctgctcttttctttttcccttccagagggaatctggaaaaattgcaatcaaaacatcatttctctaagaaaattttgggtaaccgaagtt

SEQ ID NO: 649994 - DNA, 120 bp, Artificial Sequence
  ENSG00000182963_4 (sequence is synthesized)
ctggacaacagggcataccaattcaatcaccatgagttggagcttcctgactcgcctgctagaggagattcacaaccattccacatttgtggggaagatctggctcactgttctgattgt

SEQ ID NO: 649995 - DNA, 120 bp, Artificial Sequence
  ENSG00000182963_5 (sequence is synthesized)
cttccggatcgtccttacagctgtaggaggagaatccatctattacgatgagcaaagcaaatttgtgtgcaacacagaacagccgggctgtgagaatgtctgttatgatgcgtttgcacc

SEQ ID NO: 649996 - DNA, 120 bp, Artificial Sequence
  ENSG00000182963_6 (sequence is synthesized)
tctctcccatgtacgcttctgggtgttccagatcatcctggtggcaactccctctgtgatgtacctgggctatgctatccacaagattgccaaaatggagcacggtgaagcagacaagaa

SEQ ID NO: 649997 - DNA, 120 bp, Artificial Sequence
  ENSG00000182963_7 (sequence is synthesized)
ggcagctcggagcaagccctatgcaatgcgctggaaacaacaccgggctctggaagaaacggaggaggacaacgaagaggatcctatgatgtatccagagatggagttagaaagtgataa

SEQ ID NO: 649998 - DNA, 120 bp, Artificial Sequence
  ENSG00000182963_8 (sequence is synthesized)
ggaaaataaagagcagagccaacccaaacctaagcatgatggccgacgacggattcgggaagatgggctcatgaaaatctatgtgctgcagttgctggcaaggaccgtgtttgaggtggg

SEQ ID NO: 649999 - DNA, 120 bp, Artificial Sequence
  ENSG00000182963_9 (sequence is synthesized)
ttttctgatagggcagtattttctgtatggcttccaagtccacccgttttatgtgtgcagcagacttccttgtcctcataagatagactgctttatttctagacccactgaaaagaccat

SEQ ID NO: 650000 - DNA, 120 bp, Artificial Sequence
  ENSG00000182963_10 (sequence is synthesized)
cttccttctgataatgtatggtgttacaggcctttgcctcttgcttaacatttgggagatgcttcatttagggtttgggaccattcgagactcactaaacagtaaaaggagggaacttga

SEQ ID NO: 650001 - DNA, 120 bp, Artificial Sequence
  ENSG00000182963_11 (sequence is synthesized)
ggatccgggtgcttataattatcctttcacttggaatacaccatctgctccccctggctataacattgctgtcaaaccagatcaaatccagtacaccgaactgtccaatgctaagatcgc

SEQ ID NO: 650002 - DNA, 120 bp, Artificial Sequence
  ENSG00000182963_12 (sequence is synthesized)
ctacaagcaaaacaaggccaacacagcccaggaacagcagtatggcagccatgaggagaacctcccagctgacctggaggctctgcagcgggagatcaggatggctcaggaacgcttgga

SEQ ID NO: 650003 - DNA, 120 bp, Artificial Sequence
  ENSG00000182963_13 (sequence is synthesized)
aaggccaaagtggggtccaaagctgggtccaacaaaagcactgccagtagcaaatcaggggatgggaagacctccgtctggatttaatcctggcgggcttaaaacctgtgcttttcatag

SEQ ID NO: 650004 - DNA, 120 bp, Artificial Sequence
  ENSG00000182963_14 (sequence is synthesized)
tttatggtaagcagcagctcactgaataatgacttccattgagtaaacatttggctctggttatcttcagggatgctgttggctcatgatccaagctcaggggactctggaggcggggct

SEQ ID NO: 650005 - DNA, 120 bp, Artificial Sequence
  ENSG00000182963_15 (sequence is synthesized)
gggctgagggagagaaagggaaacacagtgttcccaggcacatgttcttagcaataatacagttgcagaactttacatttgtgtcttccagatctggagaagaacagacatatttaaatc

SEQ ID NO: 650006 - DNA, 120 bp, Artificial Sequence
  ENSG00000182963_16 (sequence is synthesized)
attcttgttgaacagtttttgtatgtacagtattatggtacttttttttttttagtatgagaactttttttgtatttgtacattgaactgctgtagttatacttttatattaaaggggaa

SEQ ID NO: 650007 - DNA, 120 bp, Artificial Sequence
  ENSG00000182963_17 (sequence is synthesized)
aaagtccttataaataatgcctattaggctagtgctattactttgttcagcaaattctaccctggctttagagtttttaatagatgctacacctaataaaagtgcctctcatattgcagg

SEQ ID NO: 650008 - DNA, 120 bp, Artificial Sequence
  ENSG00000182963_18 (sequence is synthesized)
aacgatttcagatgtgtaaggagactgaagaggagataccagtttttagtcttggaaagcaagttcacagtagaaggaggttgagatctttcttttatgtgagaaatctttgaatctcat

SEQ ID NO: 650009 - DNA, 120 bp, Artificial Sequence
  ENSG00000182963_19 (sequence is synthesized)
tcatgcgatcagagttgtagccaatttttgaaaaccttattttcaaaggaaataaatgattcactgtaggattcctttaaatatcaagcatcaccagtatatgctttgatggtatatgta

SEQ ID NO: 650010 - DNA, 120 bp, Artificial Sequence
  ENSG00000182963_20 (sequence is synthesized)
tataacttaaagttctttcaaaagcctgatacagaaacgtgtccccagtttggtagcaatgtggaaaacctggctagagatgatatggagctgtccctcagaaagcaaagccatgcctgg

SEQ ID NO: 650011 - DNA, 120 bp, Artificial Sequence
  ENSG00000182963_21 (sequence is synthesized)
aatccctaataggctgcttagttgtgaacctgtttgatttgccttaagcctctatccagaaacctgcccgcttccgtctggttaagaagccagtggtggatattttctttgttaacatta

SEQ ID NO: 650012 - DNA, 120 bp, Artificial Sequence
  ENSG00000182963_22 (sequence is synthesized)
gaaatgcaaacattcccttgtcaaccaagaatactcaaagctacttgtattggaaatggcagaaggcctaaatccaaatttcttattttttataatttaccatagaagttttgtgattaa

SEQ ID NO: 650013 - DNA, 120 bp, Artificial Sequence
  ENSG00000182963_23 (sequence is synthesized)
attcttacttctgccagtggaggtttatgcctgaaaggtcatggggtcctgtctgtaaatagacctaaagagaagtgcagtatttattctttgtaggcataatgtgtttgtcactgacaa

SEQ ID NO: 650014 - DNA, 120 bp, Artificial Sequence
  ENSG00000182963_24 (sequence is synthesized)
gcattcatgttcatcccactagtcttttattgcagtcttttattgtcattttcagccttatgttggagagctttgctttctcatcatgttcacattgtcttaagttttgtgagcttctga

SEQ ID NO: 650015 - DNA, 120 bp, Artificial Sequence
  ENSG00000182963_25 (sequence is synthesized)
gaaagagcttggtaaaggtttaaaggggactttgttccaccagggagcattttatttgggcgtctcacccttttctaatgaaagctgttgtaagccacctctgacttggaaattctgaaa

SEQ ID NO: 650016 - DNA, 120 bp, Artificial Sequence
  ENSG00000182963_26 (sequence is synthesized)
gtatgaatattttttatatcttaattgtaaaatgccagttctccattatttagatgaatagtagaacactgcaccctttgtgcagtgtttttgtttctctactgcattcctacccccacc

SEQ ID NO: 650017 - DNA, 120 bp, Artificial Sequence
  ENSG00000182963_27 (sequence is synthesized)
actgctaagagccccgactctagctagatccacgcagggcccgccagatcctcgaggaattgtagagcagaacctgggaggagacattagcatcccgtgctacaatggaccaaggcctcg

SEQ ID NO: 650018 - DNA, 89 bp, Artificial Sequence
  ENSG00000182963_28 (sequence is synthesized)
tcccaggctcaagcaatcattccacctcagcctcttgattcggctaattctgttttaaaaattttttttgtagagatgaggtctcacta

SEQ ID NO: 650019 - DNA, 120 bp, Artificial Sequence
  ENSG00000182963_29 (sequence is synthesized)
gaggtctcactatgttacccaggctggtctcgaacttttgggttcaagtgatcctcccgcctcagcctctcaaagtgttagtattataggtgtgagccaccatgcccagcctagaaaatt

SEQ ID NO: 650020 - DNA, 120 bp, Artificial Sequence
  ENSG00000182963_30 (sequence is synthesized)
ccaccatgcccagcctagaaaatttaaccttatcttttagccattcatttacttttatttgcttttttaaaaaaaaatctttaaattttagcctagagaagcacctcaggaactctaaac

SEQ ID NO: 650021 - DNA, 120 bp, Artificial Sequence
  ENSG00000182963_31 (sequence is synthesized)
atcttaggcaaaaattaaactcaggtgagactgaaggagaaatttcagaaatacacatgtacctcatgggtaattaatagacatgcacagtttccttcaaatcaaatgtttaataaggaa

SEQ ID NO: 650022 - DNA, 120 bp, Artificial Sequence
  ENSG00000182963_32 (sequence is synthesized)
attcatataattccaagaaaacaggcaaaatttggaatacataagcctagctaagataaagaactaccagttaattcttaacatcactggagcttccagcaggttttttaattgaaggac

SEQ ID NO: 650023 - DNA, 120 bp, Artificial Sequence
  ENSG00000182963_33 (sequence is synthesized)
atttgagaatgatacagggggaaggagtcaagcagaaatgccaggaagaaccaggcaaagacatttggcgccagaagcatccacttaatttctgtgaagagtgcccctggtgtttcatct

SEQ ID NO: 650024 - DNA, 120 bp, Artificial Sequence
  ENSG00000182963_34 (sequence is synthesized)
tggcctgttttgatgagaatgttatcttttgtgtctggataacgcgtcagcttcttaaagtacatataaagatattctgtcacctccccacatgcacacacttttaaaatctatttttat

SEQ ID NO: 650025 - DNA, 120 bp, Artificial Sequence
  ENSG00000182963_35 (sequence is synthesized)
tctcttgctaaagttgtaattatgtcaagaattttccagctctaactgccttcttagtacatgtctttctgcctttgaagcatatgagtttgccaaagtcattctcccctaatgacatat

SEQ ID NO: 650026 - DNA, 63 bp, Artificial Sequence
  ENSG00000182963_36 (sequence is synthesized)
catatgagtttgccaaagtcattctcccctaatgacatattgtggacttacattaagaagggt

SEQ ID NO: 650027 - DNA, 76 bp, Artificial Sequence
  ENSG00000182963_37 (sequence is synthesized)
tgcaagacgtgagcctgttgatgtctagctaacccattggtggagtctgcattgaatctgtaagaatattgttctg

SEQ ID NO: 650028 - DNA, 120 bp, Artificial Sequence
  ENSG00000182963_38 (sequence is synthesized)
ttggtggagtctgcattgaatctgtaagaatattgttctggatcatgcaggtgggatttgtataaaaagcctgtccaacatttagttctcactcgcatcagaatcatactgttttgaatt

SEQ ID NO: 650029 - DNA, 120 bp, Artificial Sequence
  ENSG00000182963_39 (sequence is synthesized)
gccatataagacatgctccatcatgacacttgcttctcctccaaatacaagttgagtgcttagtccttcacctgctagaatcaggatacaatcaacatgattatgttccttaacacactt

SEQ ID NO: 650030 - DNA, 120 bp, Artificial Sequence
  ENSG00000182963_40 (sequence is synthesized)
caatcaacatgattatgttccttaacacacttggatttatgcagatgtggtgtgtcctttgctcttttttttcttaagacagagtcttgctcttgtcgctcaggctggagtgcagtggtg

SEQ ID NO: 650031 - DNA, 120 bp, Artificial Sequence
  ENSG00000182963_41 (sequence is synthesized)
agtagctgggattacaggcaccaccaccataccaggctgattttttttgtatttttaatatagacagggcttcatcatgttggccaggctggcaggctggtctcgaactcctcacctcgt

SEQ ID NO: 650032 - DNA, 71 bp, Artificial Sequence
  ENSG00000182963_42 (sequence is synthesized)
cacctcagccttaaaacccgttattcagaagatttgtaaaagaaataggctttttttttttttttggttaa

SEQ ID NO: 650033 - DNA, 120 bp, Artificial Sequence
  ENSG00000182963_43 (sequence is synthesized)
atttgtaaaagaaataggctttttttttttttttggttaattcaaacgaggggaaaattagatagcattttcccctaaagaaatgttaatgttcattttgtggctttgttttcaagtttc

SEQ ID NO: 650034 - DNA, 120 bp, Artificial Sequence
  ENSG00000182963_44 (sequence is synthesized)
aggagccatgtacatctcagaagtgttacgaagtgattagaaaaggcctctggtaaaagaccttcaaggaccaaccattattattggtcacttgtttgaacttggcgcttaaaaaaaaag

SEQ ID NO: 650035 - DNA, 120 bp, Artificial Sequence
  ENSG00000182963_45 (sequence is synthesized)
ttggactgtgatgctttggtgctctttatcacagacatcagtgatggtctgaaacactctctagcagtttatacgaagaatggacttacatgttatcagttacactcatgatttactcgt

SEQ ID NO: 650036 - DNA, 120 bp, Artificial Sequence
  ENSG00000182963_46 (sequence is synthesized)
tcagcttctacaagtccatactttatgctgtctcatttaagagacagtccacttctgaaaataaaatcgatagttgatgatacatttttggctagccagctttctgtaaaaggcaagtat

SEQ ID NO: 650037 - DNA, 120 bp, Artificial Sequence
  ENSG00000182963_47 (sequence is synthesized)
tttctgtaaaaggcaagtatgttagacatgcacagtttccttcaaatcaaatgtttaataaggtacttcaagaaacgcctttttaaaaatcaaaggttttggccaggcatggtggctcac

SEQ ID NO: 650038 - DNA, 64 bp, Artificial Sequence
  ENSG00000182963_48 (sequence is synthesized)
tcaacgagtgaaactctcaaaaaaaaattcatagtaataataaagtccctgcatgcagtttgga

SEQ ID NO: 650039 - DNA, 120 bp, Artificial Sequence
  ENSG00000182963_49 (sequence is synthesized)
aaattcatagtaataataaagtccctgcatgcagtttggaaataaaatttaaactcatttatgtgtaataaatatgtaataattcacagtcaccatcaaatgttggaatcattgaattgc

SEQ ID NO: 650040 - DNA, 120 bp, Artificial Sequence
  ENSG00000182963_50 (sequence is synthesized)
atacttgtactcattccggccacatcatgaagtgtttaaagatttgtatttgctgttgtccctatgtagttctattgatgtttggttttgttttttggggtttgttttgagcccaggcta

SEQ ID NO: 650041 - DNA, 78 bp, Artificial Sequence
  ENSG00000182963_51 (sequence is synthesized)
ccaggctagagtgcaatggcacaatctcaactcactacagcctggacctccttctgcaagtgctcaccaccacacctg

SEQ ID NO: 650042 - DNA, 120 bp, Artificial Sequence
  ENSG00000182963_52 (sequence is synthesized)
ttgtattttttgtagagacagagctctcactatgttgcctagactggtctcaaactcctgggcccaagcaatcctcccatcacagcctccgaaggtgctgggattacaggcataagccac

SEQ ID NO: 650043 - DNA, 120 bp, Artificial Sequence
  ENSG00000182963_53 (sequence is synthesized)
tgtgcccagcctgtttttaataatgatattaagtgggtttggttcatgtgttattaatcagtgttaataatcgtacttttttttttttttaaaagaaaccatggtattctaaaatcagga

SEQ ID NO: 650044 - DNA, 67 bp, Artificial Sequence
  ENSG00000182963_54 (sequence is synthesized)
ttttttttttaaaagaaaccatggtattctaaaatcaggagtccaaataaaagaaagttctcggctg

SEQ ID NO: 650045 - DNA, 63 bp, Artificial Sequence
  ENSG00000182963_55 (sequence is synthesized)
tgttgaggcatgagatttccttgaacctggaaggcagaggttgctgtgagccgagatcgcgcc

SEQ ID NO: 650046 - DNA, 120 bp, Artificial Sequence
  ENSG00000182963_56 (sequence is synthesized)
ccagcctgggtgacagagtaagactgtcgccaaaaaagaggaaaaaagttatccagtgcagtttctacagagataaaagaagtaatagttctggctgggtgtggtggcttatgcctgtaa

SEQ ID NO: 650047 - DNA, 120 bp, Artificial Sequence
  ENSG00000182963_57 (sequence is synthesized)
ggcaaaactgtctctactaaaaatataaaaattaggtatggtggcacgtgcctgtacttacagctacttgggaggctgaggcatgagatgacaatctcttgaacccaggaggcggaggtt

SEQ ID NO: 650048 - DNA, 120 bp, Artificial Sequence
  ENSG00000182963_58 (sequence is synthesized)
gcaccactgcactccagcttgggtgatggagtgagactcaaataaaaaaggtactagttctgcatttcagagttggcttgttgaaccaggctatatgcttccaagatttaaatgtttttc

SEQ ID NO: 650049 - DNA, 120 bp, Artificial Sequence
  ENSG00000182963_59 (sequence is synthesized)
tgtattatactctcaattgtgttttaaaaaaatctcttacagaaatctctacctcaggcactaagtgttatgacatgggtagcatattgatattgaaaacttagctaggacttccagcct

SEQ ID NO: 650050 - DNA, 120 bp, Artificial Sequence
  ENSG00000182963_60 (sequence is synthesized)
tttaagataatttaaatgtaaaattaaatggttaaccagcaatctaatgtcatgtggtgtgcagtttggatattgcatgaacagctaaggaatcacctgttctagtgccaaagatcactc

SEQ ID NO: 650051 - DNA, 120 bp, Artificial Sequence
  ENSG00000182963_61 (sequence is synthesized)
attgctaattttgttctgtacagcttatgtaatattttcatggtggagacggactctgtgtgctcagggccttgtctctaggaagattttgtcaattccaaatacagttttgaagattca

SEQ ID NO: 650052 - DNA, 120 bp, Artificial Sequence
  ENSG00000182963_62 (sequence is synthesized)
cggcggcgggagcgggaggcggcggcggcggcggcagcggcgggagcggcttctgcctcggctggagactgaggcgaaggcggcagcggcggaggaggtggaggagaggcgagggtgaag

SEQ ID NO: 650053 - DNA, 120 bp, Artificial Sequence
  ENSG00000182963_63 (sequence is synthesized)
agaggcgagggtgaaggcgatggcgacgcggggcacatgaggccgcgaccggcgggacgggccgaggcccggcggaggaggcggctccgggggaacccgccgccggagggaatctggaaa

SEQ ID NO: 650054 - DNA, 86 bp, Artificial Sequence
  ENSG00000182963_64 (sequence is synthesized)
tcaggagttcgagaccagactggccaacggggcgaaaccccatctctactaaaaattagttggacgtggtggtgtgcgcctgtagt

SEQ ID NO: 650055 - DNA, 120 bp, Artificial Sequence
  ENSG00000182963_65 (sequence is synthesized)
aaggcaggagaattgcttggacccaggagacggaggctacagtcagctgagattgcggtactgtgctccagcctgggtgacagagactcttgtctcaaagaaaaaaaagagaaagggagg

SEQ ID NO: 650056 - DNA, 120 bp, Artificial Sequence
  ENSG00000182963_66 (sequence is synthesized)
gacaactacccgggcggttaggggcgcagggcggagccgggccgcccctcgccgcccgggctcttcgcgggctgctctttgtctccccgacctcgatccctgcgtctccggcggcgtgcg

SEQ ID NO: 650057 - DNA, 120 bp, Artificial Sequence
  ENSG00000182968_0 (sequence is synthesized)
agcacatgcccagcgcacgcggcgcgccgccctgctagaagttgcagcctccgagttggaggccgctgaggaccgagcgcaggaggaaggagacagcgcgcagcggcggccggcgaggag

SEQ ID NO: 650058 - DNA, 120 bp, Artificial Sequence
  ENSG00000182968_1 (sequence is synthesized)
acagcacaccccgggccgggcccagcgcaccgctcccggccccaaaagcggagctgcaacttggccacgactgcacctgtttgcaccgctccgccgagggcgcctgggctgcggtggcgg

SEQ ID NO: 650059 - DNA, 120 bp, Artificial Sequence
  ENSG00000182968_2 (sequence is synthesized)
cgaagacggcgaccccgaccgtcggcctctttggcaagtggtttgtgcatcaggagaaactttccacctgcgagccgaaccggcgccgagtgcgtgtgtttctgcctttttttgttgtcg

SEQ ID NO: 650060 - DNA, 120 bp, Artificial Sequence
  ENSG00000182968_3 (sequence is synthesized)
ttgcctccacccctccccattcttctctccgctaggacccccccgcccccgtctcactccgtctgaattcctctccgtctccctcccaccccggccgtctatgctccaggccctctcctc

SEQ ID NO: 650061 - DNA, 120 bp, Artificial Sequence
  ENSG00000182968_4 (sequence is synthesized)
gcggtgccggtgaacccgccagccgccccgatgtacagcatgatgatggagaccgacctgcactcgcccggcggcgcccaggcccccacgaacctctcgggccccgccggggcgggcggc

SEQ ID NO: 650062 - DNA, 120 bp, Artificial Sequence
  ENSG00000182968_5 (sequence is synthesized)
cggaggcgggggcggcggcggcggcgggggcgccaaggccaaccaggaccgggtcaaacggcccatgaacgccttcatggtgtggtcccgcgggcagcggcgcaagatggcccaggagaa

SEQ ID NO: 650063 - DNA, 120 bp, Artificial Sequence
  ENSG00000182968_6 (sequence is synthesized)
caggagaaccccaagatgcacaactcggagatcagcaagcgcctgggggccgagtggaaggtcatgtccgaggccgagaagcggccgttcatcgacgaggccaagcggctgcgcgcgctg

SEQ ID NO: 650064 - DNA, 120 bp, Artificial Sequence
  ENSG00000182968_7 (sequence is synthesized)
cacatgaaggagcacccggattacaagtaccggccgcgccgcaagaccaagacgctgctcaagaaggacaagtactcgctggccggcgggctcctggcggccggcgcgggtggcggcggc

SEQ ID NO: 650065 - DNA, 80 bp, Artificial Sequence
  ENSG00000182968_8 (sequence is synthesized)
cggccgtgggccagcgcctggagagcccaggcggcgcggcgggcggcggctacgcgcacgtcaacggctgggccaacggc

SEQ ID NO: 650066 - DNA, 80 bp, Artificial Sequence
  ENSG00000182968_9 (sequence is synthesized)
gcctaccccggctcggtggcggcggcggcggcggccgcggccatgatgcaggaggcgcagctggcctacgggcagcaccc

SEQ ID NO: 650067 - DNA, 120 bp, Artificial Sequence
  ENSG00000182968_10 (sequence is synthesized)
ccgcacccgcaccacccgcacgcgcacccgcacaacccgcagcccatgcaccgctacgacatgggcgcgctgcagtacagccccatctccaactcgcagggctacatgagcgcgtcgccc

SEQ ID NO: 650068 - DNA, 80 bp, Artificial Sequence
  ENSG00000182968_11 (sequence is synthesized)
cagggctacatgagcgcgtcgccctcgggctacggcggcctcccctacggcgccgcggccgccgccgccgccgctgcggg

SEQ ID NO: 650069 - DNA, 120 bp, Artificial Sequence
  ENSG00000182968_12 (sequence is synthesized)
ctgggcgcgctgggctctctggtgaagtcggagcccagcggcagcccgcccgccccagcgcactcgcgggcgccgtgccccggggacctgcgcgagatgatcagcatgtacttgcccgcc

SEQ ID NO: 650070 - DNA, 120 bp, Artificial Sequence
  ENSG00000182968_13 (sequence is synthesized)
gacccggcggcggcagcagcggccgcggcgcagagccggctgcactcgctgccgcagcactaccagggcgcgggcgcgggcgtgaacggcacggtgcccctgacgcacatctagcgcctt

SEQ ID NO: 650071 - DNA, 120 bp, Artificial Sequence
  ENSG00000182968_14 (sequence is synthesized)
atctagcgccttcgggacgccggggactctgcggcggcgacccacgagctcgcggcccgcgcccggctcccgccccgccccggcgcggcgtggcttttgtacagacgttcccacattctt

SEQ ID NO: 650072 - DNA, 120 bp, Artificial Sequence
  ENSG00000182968_15 (sequence is synthesized)
gtcaaaaggaaaatactggagacgaacgccgggtgacgcgtgtcccccactcaccttccccggagaccctggcgaccgccgggcgctgacaccagacttgggttttagactgaacttcgg

SEQ ID NO: 650073 - DNA, 120 bp, Artificial Sequence
  ENSG00000182968_16 (sequence is synthesized)
tgttttcttgagactttttgtacagtatttatcacctacggaggaagcggaaagcgttttctttgctcgaggggacaaaaaagtcaaaacgaggcgagaggcgaagcccacttttgtata

SEQ ID NO: 650074 - DNA, 120 bp, Artificial Sequence
  ENSG00000182968_17 (sequence is synthesized)
ccggccggcgcgctcactttcctccgcgttgcttccggacggcgccgaccgccggagcccaagtgacgcggagctcgtcgcatttgttataaatgtagtaaggcaggtccaagcacttac

SEQ ID NO: 650075 - DNA, 120 bp, Artificial Sequence
  ENSG00000182968_18 (sequence is synthesized)
atgtatctgagcatttccatttttttttttgggttttgtattatttcttgtaaatgcattgtgaaaaattttattttcggcgttgcaatgcggggaggagaagtcagattatgtacatag

SEQ ID NO: 650076 - DNA, 120 bp, Artificial Sequence
  ENSG00000182968_19 (sequence is synthesized)
ttttctaaaaagcctttcttctaaaaacgaaaaaagaccccccacccaaaatgtttcgagtcaacaaatttaagagacagagcccattttctccataaatttgtaacatgctatttttat

SEQ ID NO: 650077 - DNA, 120 bp, Artificial Sequence
  ENSG00000182968_20 (sequence is synthesized)
gtgcatgttttatgagttcaaaatgcaatgaggaaatctgacagggaaattatctgtatgaactaaaagtaagggaaccccggggaatgggaggacaggatttttcaaggaacctttttc

SEQ ID NO: 650078 - DNA, 120 bp, Artificial Sequence
  ENSG00000182968_21 (sequence is synthesized)
aatgaaagagaaggaagttaaaacctataggttattttgtagagctgagtgttaatacgggccgagaaataaaagtatcttctgctccggctgtttcactgcggacggctggggctgctg

SEQ ID NO: 650079 - DNA, 120 bp, Artificial Sequence
  ENSG00000182968_22 (sequence is synthesized)
cgcgttaccttgctgcaagcggggcgccttccacctggctgggggtctgcgccacagtttggtccagaggagggaggaggaagggaagaccccagtggtgggaccctggaccaggccatg

SEQ ID NO: 650080 - DNA, 120 bp, Artificial Sequence
  ENSG00000182968_23 (sequence is synthesized)
gatgaaggacaaagaccagggcaggtcacgggtttcccaattccccagcaattaagatttcgagcagaatttatctaaatgtgtttcaaggaaacacaatcgctgaaccaaaacgtactg

SEQ ID NO: 650081 - DNA, 120 bp, Artificial Sequence
  ENSG00000182968_24 (sequence is synthesized)
cagccgagccccctccgtccatcctctgcccctccccctggcttctttctcttgggaaaacgggcaaaataattgtgctggattctcacacacacagaaatatcgaccatcaccctcccc

SEQ ID NO: 650082 - DNA, 120 bp, Artificial Sequence
  ENSG00000182968_25 (sequence is synthesized)
cgcgtgaactgggatgcaagttgctaaccgatgtgaacgcaaaatgccttgttcattattcctgacgagatcttgaggttgtttgatgctttaaattttttaattatattattttctagg

SEQ ID NO: 650083 - DNA, 120 bp, Artificial Sequence
  ENSG00000182968_26 (sequence is synthesized)
tgtttattggtacattgcagttttttttttgaaatttaaaaatttctgtaaaactttgtcttcaagtaatctgacagcattaaatattgcatttaaaaattatactgtagcaaatacatt

SEQ ID NO: 650084 - DNA, 120 bp, Artificial Sequence
  ENSG00000182968_27 (sequence is synthesized)
taaaaattaatcacaacgttaagatgaaattatatttttggaaaaaaaaaacacttgaagcccagatggaaatacgtttatttcagcagccttaggtttcccctcgctttctcaacaccc

SEQ ID NO: 650085 - DNA, 120 bp, Artificial Sequence
  ENSG00000182968_28 (sequence is synthesized)
ttccttgtcctggagtatggactgtccgtccaaaagtgagcctatgctataagtttaatgagaaccgaattcagcctgcattcgagaatagctttaagtataatgctgatctgacaattg

SEQ ID NO: 650086 - DNA, 120 bp, Artificial Sequence
  ENSG00000182968_29 (sequence is synthesized)
acgtgtaatttgggaagtcattttgataattttgcttaaaccactcattcgttaaagtgattacaaaaaagttcaagaatgatgtccactgctttctaacaagataataaaccccccccc

SEQ ID NO: 650087 - DNA, 120 bp, Artificial Sequence
  ENSG00000182968_30 (sequence is synthesized)
tcttttctttttctttatttttatttcttttagctatttgatcctttctgaagcagttgtttctggaagagtctgtgcgcccatggatggctgagcaccactacgacttagtccgggata

SEQ ID NO: 650088 - DNA, 120 bp, Artificial Sequence
  ENSG00000182968_31 (sequence is synthesized)
agggcctccccagtcctctccgggagatgatttgggaaattttataatgcttgttctgttaactcaccgggaccttgagggtccaatgggaccttgagggttttctctgaaatatacaaa

SEQ ID NO: 650089 - DNA, 120 bp, Artificial Sequence
  ENSG00000182968_32 (sequence is synthesized)
cttaaaggactctctctgaggttctttgactgacgtccactctcagtctggcccctgtgctcccctgtgtgtaccctggagtttctgtgtccaattgttggcatctaggtcttggctcaa

SEQ ID NO: 650090 - DNA, 120 bp, Artificial Sequence
  ENSG00000182968_33 (sequence is synthesized)
gattaggatgtgggccccactttagaggcacagactatgaaaagctgagttagtgcgcccgggacgccaggcaagcagcttttacagtttggcatcttattgcaggtgcttcgtgcacag

SEQ ID NO: 650091 - DNA, 120 bp, Artificial Sequence
  ENSG00000182968_34 (sequence is synthesized)
tcagctgaaatagccaatgccaggtgctccaaccaccttatttccttgttttgttgattagaacaacacagaaaaaagcaaatataaatttttaatgactccatttaaaaatatcacagg

SEQ ID NO: 650092 - DNA, 120 bp, Artificial Sequence
  ENSG00000182968_35 (sequence is synthesized)
gtgggggcaaggaaattagctgagattcatctcaggattgagattctatccccccttccccgcccccagcagtgtcgctccaattcaaattagtggagaaaagattacagtaggccctga

SEQ ID NO: 650093 - DNA, 120 bp, Artificial Sequence
  ENSG00000182968_36 (sequence is synthesized)
gccgactgtgaattcggtgcttggccaaggtaacactcatcgtattcacggagtgaaatactatatgatgatagttattatattatatgacgacttcattcacttcccaaatcacagggt

SEQ ID NO: 650094 - DNA, 120 bp, Artificial Sequence
  ENSG00000182973_0 (sequence is synthesized)
cacgccggcgctccaggcgcggcaggctgccgcccccggaagtagtgggtaccgggacgccgtgaggcggaagctgtgtatggcgggaggctgtggcggtcccttggtggggaagctgtt

SEQ ID NO: 650095 - DNA, 120 bp, Artificial Sequence
  ENSG00000182973_1 (sequence is synthesized)
gctgttgctagacgacgggaactagctctcgtcacttcctcagcccgccgtctgcccactcctctagccggaacctgggggcccggagccggggtaggcacagagttgtcctcggaggtc

SEQ ID NO: 650096 - DNA, 120 bp, Artificial Sequence
  ENSG00000182973_2 (sequence is synthesized)
caggacagcggccagcccggcggcgggagtcagggccacgccacctgcagggaagaacccgagtcgaagcgggaagatggctgcagacaagcctgcagatcagggagcagagaaacatga

SEQ ID NO: 650097 - DNA, 120 bp, Artificial Sequence
  ENSG00000182973_3 (sequence is synthesized)
aggcacaggtcagtcctctgggatcactgatcaagagaaggagttatccaccaatgctttccaagctttcacatctggaaattatgatgcctgtctacaacaccttgcctgtctacaaga

SEQ ID NO: 650098 - DNA, 120 bp, Artificial Sequence
  ENSG00000182973_4 (sequence is synthesized)
tataaacaaagatgattataaaataattttgaatacagcagtagctgagttttttaaaagtaaccaaacaacaacagataatttgagacaaacacttaaccagctgaagaatcaggtcca

SEQ ID NO: 650099 - DNA, 120 bp, Artificial Sequence
  ENSG00000182973_5 (sequence is synthesized)
ctcagctgttgaagaaatggatggattagatgatgttgaaaacagcatgttgtactataatcaagcagtcattctttatcatctgcggcagtatacagaagccatatcagttggtgaaaa

SEQ ID NO: 650100 - DNA, 120 bp, Artificial Sequence
  ENSG00000182973_6 (sequence is synthesized)
actttatcagttcatagagccttttgaagaaaaatttgcccaagcagtgtgttttttgcttgtagacctgtatatattaacctaccaagctgagaaagctttgcatcttcttgctgtcct

SEQ ID NO: 650101 - DNA, 120 bp, Artificial Sequence
  ENSG00000182973_7 (sequence is synthesized)
agaaaaaatgatttcacagggtaacaataacaaaaatggaaagaatgagactggtaataacaacaacaaagatggatctaatcataaagctgaaagtggagctctaatagaagctgcaaa

SEQ ID NO: 650102 - DNA, 120 bp, Artificial Sequence
  ENSG00000182973_8 (sequence is synthesized)
atcaaagatacatcagtacaaagtacgagcttatatccaaatgaagtctctgaaagcatgtaaaagggaaatcaagtcagtcatgaatacagctggaaattccgcaccctctctctttct

SEQ ID NO: 650103 - DNA, 120 bp, Artificial Sequence
  ENSG00000182973_9 (sequence is synthesized)
taaaagcaattttgagtacttaagaggtaattatcgaaaagccgtgaagctattaaatagttcaaacattgctgagcatccaggattcatgaaaacaggtgaatgcttgagatgcatgtt

SEQ ID NO: 650104 - DNA, 120 bp, Artificial Sequence
  ENSG00000182973_10 (sequence is synthesized)
ctggaataaccttggttgcatccattttgccatgagcaagcacaatttgggaatattctactttaaaaaggctctgcaagagaatgacaatgtctgtgcacagctcagtgcaggtagcac

SEQ ID NO: 650105 - DNA, 120 bp, Artificial Sequence
  ENSG00000182973_11 (sequence is synthesized)
agatatgagttgctgtataactgtggaattcagcttcttcacattggaaggcctcttgctgccttcgaatgtctgattgaagctgttcaggtttatcatgcaaatcctcgcctctggcta

SEQ ID NO: 650106 - DNA, 120 bp, Artificial Sequence
  ENSG00000182973_12 (sequence is synthesized)
cggctggctgaatgctgcattgctgccaataaggggacttctgaacaagaaactaaaggccttcccagcaaaaaaggaattgtacagtctattgttggtcaaggctatcatcgtaaaata

SEQ ID NO: 650107 - DNA, 120 bp, Artificial Sequence
  ENSG00000182973_13 (sequence is synthesized)
gttttggcatcacagtctatacagaatactgtttataatgatgggcagtcttcggccattcctgtagccagtatggagtttgcagccatatgtctcagaaatgccttgttgctgctacct

SEQ ID NO: 650108 - DNA, 120 bp, Artificial Sequence
  ENSG00000182973_14 (sequence is synthesized)
gaagaacagcaagatccaaagcaggaaaatggggctaaaaatagtaatcaattaggtgggaacacagagagcagcgaaagcagtgaaacttgcagcagtaaaagccatgatggagataaa

SEQ ID NO: 650109 - DNA, 120 bp, Artificial Sequence
  ENSG00000182973_15 (sequence is synthesized)
ttcattccagctccaccttcttctccattgagaaaacaggaattagaaaacttaaagtgctccatacttgcttgcagtgcctacgtggctctggctttgggtgataacctcatggctttg

SEQ ID NO: 650110 - DNA, 120 bp, Artificial Sequence
  ENSG00000182973_16 (sequence is synthesized)
aatcatgcagataaacttcttcagcagcccaagctgtcaggatctcttaagtttttgggacatttatatgctgcagaagccctcatctctctcgacagaatatctgatgccattactcac

SEQ ID NO: 650111 - DNA, 120 bp, Artificial Sequence
  ENSG00000182973_17 (sequence is synthesized)
ttgaacccggagaatgtcactgatgtctccttagggatctcttcaaatgagcaggaccaaggatcagacaaaggtgaaaatgaagcaatggaatcctctggtaagcgggcccctcagtgc

SEQ ID NO: 650112 - DNA, 120 bp, Artificial Sequence
  ENSG00000182973_18 (sequence is synthesized)
taccccagttccgtcaactctgccaggactgtgatgctgttcaaccttggcagcgcttactgcctgaggagcgaatatgacaaagcccgaaagtgtctccaccaggcggcttcaatgatc

SEQ ID NO: 650113 - DNA, 120 bp, Artificial Sequence
  ENSG00000182973_19 (sequence is synthesized)
catcctaaagaggtgccccctgaggccatcttgctggcagtctaccttgaactgcagaatggtaatactcagctggccttacagatcatcaaaaggaatcagctgctccctgcagtgaaa

SEQ ID NO: 650114 - DNA, 120 bp, Artificial Sequence
  ENSG00000182973_20 (sequence is synthesized)
acacactctgaagtgagaaagaagccagtgtttcagcctgtccacccgatccagcccatccaaatgccggctttcaccactgtgcagagaaagtgatacttcacttttggaaaactgtta

SEQ ID NO: 650115 - DNA, 120 bp, Artificial Sequence
  ENSG00000182973_21 (sequence is synthesized)
cctgagacccaggggagaatttactggccattttagttgtatcacagcagaatgaataaaagatggtgaaggctgttaattttgagtcaattctacccctgacatttggccaaaagctta

SEQ ID NO: 650116 - DNA, 120 bp, Artificial Sequence
  ENSG00000182973_22 (sequence is synthesized)
cttaaaattaaggatttactaagtcatcatcagctgtttttcttaatttcagccagactattaattttgagccattatgtaatatatgccataggcaattaaaacataattttatcagaa

SEQ ID NO: 650117 - DNA, 120 bp, Artificial Sequence
  ENSG00000182973_23 (sequence is synthesized)
agttaactgatgattttcagttttgaaaacgtggtgcatttcttttctgcttagttcaaacctaaaggcaattgtttatttagaaatgaagtctattggtgtaaagactgtcaaggtttg

SEQ ID NO: 650118 - DNA, 120 bp, Artificial Sequence
  ENSG00000182973_24 (sequence is synthesized)
tgggtcaaagagctctgtacgcatagaaggtcagccatgttcattaggccagagtagaaggaaagtcaagcttatgggtgaacggtcgtatactctttcaattggcaacggagactactt

SEQ ID NO: 650119 - DNA, 120 bp, Artificial Sequence
  ENSG00000182973_25 (sequence is synthesized)
ctctaccttctgagcccgaggagaaaagaaagaaaatatgctctgttgttctgcccctcagatttattttcgtgtttttgtaggatcagacaaaggtgaaaatgaagcaatggaatcctg

SEQ ID NO: 650120 - DNA, 120 bp, Artificial Sequence
  ENSG00000182973_26 (sequence is synthesized)
ctgcatcccaaaaatttagattctaaatcttctgtgttcgtttttctgcctgaggaatactgctgtgccaagtggctcctcaaggcgatagattgggttgcttccttgctgttggcacgg

SEQ ID NO: 650121 - DNA, 120 bp, Artificial Sequence
  ENSG00000182973_27 (sequence is synthesized)
ttaaaagatgtcaagaagctcagaatggcccagaatctgatgtgtggactcatcagtcaaaaatcaggtgctccatacttgcttgcagtgcctacgtggctctggctttgggtgataacc

SEQ ID NO: 650122 - DNA, 77 bp, Artificial Sequence
  ENSG00000182973_28 (sequence is synthesized)
atactcagctggccttacagatcatcaaaaggaatcagctgctccctgcagtgaaaacacactctgaagtgagaaag

SEQ ID NO: 650123 - DNA, 120 bp, Artificial Sequence
  ENSG00000182973_29 (sequence is synthesized)
tacgtaactgtgtttggattattgttagttatttgcatgcttgtttgttatcaggggaagtccctgtcttatctccatacccacctctgttcaataagtatttgtagaagtctattatct

SEQ ID NO: 650124 - DNA, 120 bp, Artificial Sequence
  ENSG00000182973_30 (sequence is synthesized)
gattagattaagagaagaggcagagctgtctggaagcaatgagcaactaaaactagatggggaagtacaagttgataataaggtgaggaatattttggctgtagctcaaagaggcccaga

SEQ ID NO: 650125 - DNA, 120 bp, Artificial Sequence
  ENSG00000182973_31 (sequence is synthesized)
cttccttcttcaggactggatcagagagaaactgctggccgatgctatggctcttactcagatctaagggcagcatgttgcctaaactagtaaattattttattggactaaattgaagtg

SEQ ID NO: 650126 - DNA, 120 bp, Artificial Sequence
  ENSG00000182973_32 (sequence is synthesized)
tgtttcagtccttaagaatggagacctcaaacatgctacgtggcggcttcaatgatccatcctaaagaggtgccccctgaggccatcttgctggcagtctaccttgaactgcagaatggt

SEQ ID NO: 650127 - DNA, 86 bp, Artificial Sequence
  ENSG00000182973_33 (sequence is synthesized)
ggctcaagcgatccgcccgcctctgccttttcccacaaattctacattttgaaaatgctctctagactggtaataacaacaacaaa

SEQ ID NO: 650128 - DNA, 120 bp, Artificial Sequence
  ENSG00000182973_34 (sequence is synthesized)
gtcacccatctcaaaacccagagtattacatgtctagcttaattgttaggttttaagacaaaaggaactgaggctcatcagagcagaacaacaggtagtccctaggaagtcacgtgggaa

SEQ ID NO: 650129 - DNA, 120 bp, Artificial Sequence
  ENSG00000182974_0 (sequence is synthesized)
ttttgaaagcagtgatataactctaggtaaatgctatgtctactaattatagtttcttaattttcatagctatattatgaaaagagtaaattgaagaaatggaaactgcaaattacacca

SEQ ID NO: 650130 - DNA, 120 bp, Artificial Sequence
  ENSG00000182974_1 (sequence is synthesized)
aggtgacagaatttgttctcactggcctatcccagactccagaggtccaactagtcctatttgttatatttctatccttctatttgttcatcctaccaggaaatatccttatcatttgca

SEQ ID NO: 650131 - DNA, 120 bp, Artificial Sequence
  ENSG00000182974_2 (sequence is synthesized)
ccatcagtctagaccctcatctgacctctcctatgtatttcctgttggctaatctggccttccttgatatttggtactcttccattacagcccctgaaatgctcatagacttctttgtgg

SEQ ID NO: 650132 - DNA, 120 bp, Artificial Sequence
  ENSG00000182974_3 (sequence is synthesized)
agaggaagataatttcttttgatgaatgcattgcacagctcttcttcttacactttgctggggcttcagagatgttcttgctcacagtgatggcctttgacctctacactgctatctgcc

SEQ ID NO: 650133 - DNA, 120 bp, Artificial Sequence
  ENSG00000182974_4 (sequence is synthesized)
cctccactatgctaccatcatgaatcaacgtctctgctgtatcctggtggctctctcctggagggggggcttcattcattctatcatacaggtggctctcattgttcgacttcctttctg

SEQ ID NO: 650134 - DNA, 120 bp, Artificial Sequence
  ENSG00000182974_5 (sequence is synthesized)
tgggcccaatgagttagacagttacttctgtgacatcacacaggttgtccggattgcctgtgccaacaccttcccagaggagttagtgatgatctgtagtagtggtctgatctctgtggt

SEQ ID NO: 650135 - DNA, 120 bp, Artificial Sequence
  ENSG00000182974_6 (sequence is synthesized)
gtgtttgattgctctgttaatgtcctatgccttccttctggccttgctcaagaaactttcaggctcaggtgagaataccaacagggccgtgtccacctgctattcccacattaccattgt

SEQ ID NO: 650136 - DNA, 120 bp, Artificial Sequence
  ENSG00000182974_7 (sequence is synthesized)
ggtgctaatgtttgggccatccatctacatttatgctcgcccatttgactcgttttccctagataaagtggtgtctgtgttcaatactttaatattccctttacataatcccattattta

SEQ ID NO: 650137 - DNA, 120 bp, Artificial Sequence
  ENSG00000182974_8 (sequence is synthesized)
cacattgagaaacaaggaagtaaaggcagccatgaggaagttggtcaccaaatatattttgtgtaaagagaagtgaaagataaattatacattttatagttcccctgaggatcattgtcc

SEQ ID NO: 650138 - DNA, 80 bp, Artificial Sequence
  ENSG00000182979_0 (sequence is synthesized)
gcggcggcggcggcggcagcagcgcggcccctttaaacgcctgcggcgccccccgcccccgccatcgcgcctccattttc

SEQ ID NO: 650139 - DNA, 120 bp, Artificial Sequence
  ENSG00000182979_1 (sequence is synthesized)
gccatcgcgcctccattttcccggccgcccgcgccgagcgccgcgcccgccccgggcccctccgccgccgccggcccggacatggccgccaacatgtacagggtcggagactacgtctac

SEQ ID NO: 650140 - DNA, 120 bp, Artificial Sequence
  ENSG00000182979_2 (sequence is synthesized)
acgtctactttgagaactcctccagcaacccatacctgatccggagaatcgaggagctcaacaagacggccaatgggaacgtggaggccaaagtggtgtgcttctaccggaggcgggaca

SEQ ID NO: 650141 - DNA, 120 bp, Artificial Sequence
  ENSG00000182979_3 (sequence is synthesized)
tctccagcaccctcatcgccctggccgacaagcacgcaaccctgtcagtctgctataaggccggaccgggggcggacaacggcgaggaaggggaaatagaagaggaaatggagaacccgg

SEQ ID NO: 650142 - DNA, 120 bp, Artificial Sequence
  ENSG00000182979_4 (sequence is synthesized)
aaatggtggacctgcccgagaaactaaagcaccagctgcggcatcgggagctgttcctctcccggcagctggagtctctgcccgccacgcacatcaggggcaagtgcagcgtcaccctgc

SEQ ID NO: 650143 - DNA, 120 bp, Artificial Sequence
  ENSG00000182979_5 (sequence is synthesized)
tcaacgagaccgagtcgctcaagtcctacctggagcgggaggatttcttcttctattctctagtctacgacccacagcagaagaccctgctggcagataaaggagagattcgagtaggaa

SEQ ID NO: 650144 - DNA, 120 bp, Artificial Sequence
  ENSG00000182979_6 (sequence is synthesized)
accggtaccaggcagacatcaccgacttgttaaaagaaggcgaggaggatggccgagaccagtccaggttggagacccaggtgtgggaggcgcacaacccactcacagacaagcagatcg

SEQ ID NO: 650145 - DNA, 120 bp, Artificial Sequence
  ENSG00000182979_7 (sequence is synthesized)
accagttcctggtggtggcccgctctgtgggcaccttcgcacgggccctggactgcagcagctccgtccgacagcccagcctgcacatgagcgccgcagctgcctcccgagacatcaccc

SEQ ID NO: 650146 - DNA, 120 bp, Artificial Sequence
  ENSG00000182979_8 (sequence is synthesized)
tgttccacgccatggatactctccacaagaacatctacgacatctccaaggccatctcggcgctggtgccgcagggcgggcccgtgctctgcagggacgagatggaggagtggtctgcat

SEQ ID NO: 650147 - DNA, 120 bp, Artificial Sequence
  ENSG00000182979_9 (sequence is synthesized)
cagaggccaaccttttcgaggaagccctggaaaaatatgggaaggatttcacggacattcagcaagattttctcccgtggaagtcgctgaccagcatcattgagtactactacatgtgga

SEQ ID NO: 650148 - DNA, 120 bp, Artificial Sequence
  ENSG00000182979_10 (sequence is synthesized)
agaccaccgacagatacgtgcagcagaaacgcttgaaagcagctgaagctgagagcaagttaaagcaagtttatattcccaactataacaagccaaatccgaaccaaatcagcgtcaaca

SEQ ID NO: 650149 - DNA, 120 bp, Artificial Sequence
  ENSG00000182979_11 (sequence is synthesized)
gtccccctaacatgcagtgtcgtctctgcgcatcttgttggacatattggaagaaatatggtggcttgaaaatgccaacccggttagatggagagaggccaggaccaaaccgcagtaaca

SEQ ID NO: 650150 - DNA, 120 bp, Artificial Sequence
  ENSG00000182979_12 (sequence is synthesized)
tgagtccccacggcctcccagcccggagcagcgggagccccaagtttgccatgaagaccaggcaggctttctatctgcacacgacgaagctgacgcggatcgcccggcgcctgtgccgtg

SEQ ID NO: 650151 - DNA, 120 bp, Artificial Sequence
  ENSG00000182979_13 (sequence is synthesized)
agatcctgcgcccgtggcacgctgcgcggcacccctacctgcccatcaacagcgcggccatcaaggccgagtgcacggcgcggctgcccgaagcctcccagagcccgctggtgctgaagc

SEQ ID NO: 650152 - DNA, 120 bp, Artificial Sequence
  ENSG00000182979_14 (sequence is synthesized)
aggcggtacgcaagccgctggaagccgtgcttcggtatcttgagacccacccccgcccccccaagcctgaccccgtgaaaagcgtgtccagcgtgctcagcagcctgacgcccgccaagg

SEQ ID NO: 650153 - DNA, 120 bp, Artificial Sequence
  ENSG00000182979_15 (sequence is synthesized)
tggcccccgtcatcaacaacggctcccccaccatcctgggcaagcgcagctacgagcagcacaacggggtggacggcaacatgaagaagcgcctcttgatgcccagtaggggtctggcaa

SEQ ID NO: 650154 - DNA, 120 bp, Artificial Sequence
  ENSG00000182979_16 (sequence is synthesized)
accacggacaggccaggcacatgggaccaagccggaacctcctgctcaacgggaagtcctaccccaccaaagtgcgcctgatccgggggggctccctgcccccagtcaagcggcggcgga

SEQ ID NO: 650155 - DNA, 120 bp, Artificial Sequence
  ENSG00000182979_17 (sequence is synthesized)
tgaactggatcgacgccccggatgacgtgttctacatggccacagaggagaccaggaagatccgcaagctgctctcatcctcggaaaccaagcgtgctgcccgccggccctacaagccca

SEQ ID NO: 650156 - DNA, 120 bp, Artificial Sequence
  ENSG00000182979_18 (sequence is synthesized)
caagcccatcgccctgcgccagagccaggccctgccgccgcggccaccgccacctgcgcccgtcaacgacgagcccatcgtcatcgaggactaggggccgcccccacctgcggccgcccc

SEQ ID NO: 650157 - DNA, 120 bp, Artificial Sequence
  ENSG00000182979_19 (sequence is synthesized)
cgcccgcccacacggccccttcccagccagcccgccgcccgcccctcagtttggtagtgccccacctcccgccctcacctgcagagaaacgcgctccttggcggacactgggggaggaga

SEQ ID NO: 650158 - DNA, 120 bp, Artificial Sequence
  ENSG00000182979_20 (sequence is synthesized)
ggaagaagcgcggctaacttattccgagaatgccgaggagttgtcgtttttagctttgtgtttactttttggctggagcggagatgaggggccaccccgtgcccctgtgctgcggggcct

SEQ ID NO: 650159 - DNA, 120 bp, Artificial Sequence
  ENSG00000182979_21 (sequence is synthesized)
tttgcccggaggccgggccctaaggttttgttgtgttctgttgaaggtgccattttaaattttatttttattactttttttgtagatgaacttgagctctgtaacttacacctggaatgt

SEQ ID NO: 650160 - DNA, 120 bp, Artificial Sequence
  ENSG00000182979_22 (sequence is synthesized)
taggatcgtgcggccgcggccggccgagctgcctggcggggttggcccttgtcttttcaagtaattttcatattaaacaaaaacaaagaaaaaaaatcttataaaaaggaaaaaaaccaa

SEQ ID NO: 650161 - DNA, 120 bp, Artificial Sequence
  ENSG00000182979_23 (sequence is synthesized)
ccgtgccaggctcaggcagacccactgggacccaggctgctccctgctcctggggtcgtgatggggcccagtgcggagtagcggccgccctgtcttctgcggggccagcctcctcaaggc

SEQ ID NO: 650162 - DNA, 120 bp, Artificial Sequence
  ENSG00000182979_24 (sequence is synthesized)
acacccgggggcttccctgccagtctcgctaccctgttccctgtgttctgatcgtccctggggcctgagggtctggggtttaggtggtgcacacccctgcctgtaataccattaaggcag

SEQ ID NO: 650163 - DNA, 120 bp, Artificial Sequence
  ENSG00000182979_25 (sequence is synthesized)
cgtcgtacctgctgcctgcagggagtatacttcctgagccacgcccactccacaggggcagcactcaggcctctgcacgccctcggcagggggaggagcagcctcaggcggcagggggtt

SEQ ID NO: 650164 - DNA, 120 bp, Artificial Sequence
  ENSG00000182979_26 (sequence is synthesized)
cctttgcctttgagcatctgaggacacccgagaacctcagccggctaccctggcccagctggaagcagcttggtggctgggccagacatttgtggtggcggtggggggcctcctccattt

SEQ ID NO: 650165 - DNA, 120 bp, Artificial Sequence
  ENSG00000182979_27 (sequence is synthesized)
gctgggctcgagtgggcttgtgcatctgccctcccgacacagggtgactgtcctgagaaggacattccagagtcatgagccaagtgtgctctgagattcaagtggctttggcattgctcc

SEQ ID NO: 650166 - DNA, 120 bp, Artificial Sequence
  ENSG00000182979_28 (sequence is synthesized)
ctgtttggggttgtggcccctgtcctgtgggaagaggtggctggtgtcagggctggtcctcagcagctgtgtccctggccaggctggctggatggttggttcgctgtctgacgagcagcc

SEQ ID NO: 650167 - DNA, 120 bp, Artificial Sequence
  ENSG00000182979_29 (sequence is synthesized)
agccctccaccagcagctccgggggcctggacgtgggggctgtttaataggcgtgctgtgctcacgggcctgtgtatggatcctgttgtcccggggctgaggggcctggcccccgccagg

SEQ ID NO: 650168 - DNA, 120 bp, Artificial Sequence
  ENSG00000182979_30 (sequence is synthesized)
tggtctccctgctctctggaagccctggggtgcgggactggcccgggcacacgccttgccgagggcttctgggcttctggttctgtggtgacctccccacttccagcccagtcaggatgg

SEQ ID NO: 650169 - DNA, 120 bp, Artificial Sequence
  ENSG00000182979_31 (sequence is synthesized)
ggcttagttcctgggggtatcccggaaccatgagggctggagcctgggcctgcctgcccctcccctgctgggcagaggcaactcgttctgcctgtgtcattcccggcagagacccacccc

SEQ ID NO: 650170 - DNA, 120 bp, Artificial Sequence
  ENSG00000182979_32 (sequence is synthesized)
catctggacagcctgttctgggaagccccagtggagtgggggcaggggtggcctctggacaggggccctccacagccaggcttgtctgggctcttcccaaagaggcttggcactgggtgg

SEQ ID NO: 650171 - DNA, 120 bp, Artificial Sequence
  ENSG00000182979_33 (sequence is synthesized)
atgggcagccagagtggggggacgtcgaggcccagatgatcttcaaccgggtggtcttcacgccccaccgggaggcctgcggcccccgttctgccctgccccctggcggcacagccctcg

SEQ ID NO: 650172 - DNA, 120 bp, Artificial Sequence
  ENSG00000182979_34 (sequence is synthesized)
gcaacctccgcctcccaggcgaggaggatggccgagaccagtccaggttggagacccaggtgtgggaggcgcacaacccactcacagacaagcagatcgaccagttcctggtggtggccc

SEQ ID NO: 650173 - DNA, 120 bp, Artificial Sequence
  ENSG00000182979_35 (sequence is synthesized)
gggcccagccagggcagtgggtggtgacctgtttctggccggggctggcggctctctcagagccttaggaaaaagcccggcctcctggtggggcagtgccggccacagcgtggctgccct

SEQ ID NO: 650174 - DNA, 120 bp, Artificial Sequence
  ENSG00000182979_36 (sequence is synthesized)
gcagaggggcttgtgccgctgctggactgacagccttgcgaggctttgcttgtctcggcacggcaggcaagtgggtggacagccccggcccctgtgcagggaggtgactgtcgggtccaa

SEQ ID NO: 650175 - DNA, 120 bp, Artificial Sequence
  ENSG00000182979_37 (sequence is synthesized)
ggctcctggcctcctgcctggagcccaagccaatgtgtctcttgctggccagagagctgtggggccaccaggcggcccaggacccggggatgcgaggccccacgtcccccaggcccatcc

SEQ ID NO: 650176 - DNA, 120 bp, Artificial Sequence
  ENSG00000182979_38 (sequence is synthesized)
ggtgtgggctgtggcttggttggcagatggccccggcccattgtcccaaggtggctgaggccgtggtgggcggtgggagtgcaggacgcgctctctcggggcctcatttctctcctccat

SEQ ID NO: 650177 - DNA, 120 bp, Artificial Sequence
  ENSG00000182979_39 (sequence is synthesized)
ccgccgccggcccggacatggccgccaacatgtacagggtcggagactacgtctactttgagaactcctccagcaacccatacctgatccggagaatcgaggagctcaacaagccctgtc

SEQ ID NO: 650178 - DNA, 120 bp, Artificial Sequence
  ENSG00000182979_40 (sequence is synthesized)
ggggcactggcgcacacgaggtggggtctctgtccagcctgggtaggcatgagctgagctcgagtgagggccctgcctgcccacagcacggggccccagcgctctaacccggccatttgc

SEQ ID NO: 650179 - DNA, 120 bp, Artificial Sequence
  ENSG00000182979_41 (sequence is synthesized)
ccgtgcagcctgttgcgctgtccccacctgcggggcctgcagatggctgcgtgtggctcactaacctaaagcatgtgtttcttccctctgctgtccaccgctctggtaggcacttacctg

SEQ ID NO: 650180 - DNA, 120 bp, Artificial Sequence
  ENSG00000182979_42 (sequence is synthesized)
gtctggcaaaccacggacaggccaggcacatggtaagaggaacaacccatgatggggtacggtgcgctcacccatgagctctctggggtgttgggaagaggcctggccagccctgccagg

SEQ ID NO: 650181 - DNA, 120 bp, Artificial Sequence
  ENSG00000182979_43 (sequence is synthesized)
tgccacgtggaagcttccaggaggcctggcaagaccagaggggctgcagcatgtgggggccatggcccctgtgccaggcccagcggtgtgcggccgaccagccctcagggctgccctggg

SEQ ID NO: 650182 - DNA, 120 bp, Artificial Sequence
  ENSG00000182979_44 (sequence is synthesized)
gtgagcccgcccgccactcagtgcccggggtgtgccgcctccccgtcctgcgccccatcctctcccagcaggtgggcgtgcactgctgcagcaggaggggaaggaagactcctgagtccc

SEQ ID NO: 650183 - DNA, 120 bp, Artificial Sequence
  ENSG00000182979_45 (sequence is synthesized)
tggcccggctgtcctctccgtggtgctctcctctccgtagcctccagcctgtctgcactgcagccccaacctgggcctagcctgctgacctctgaccttctcttttgttttaagaaacgc

SEQ ID NO: 650184 - DNA, 120 bp, Artificial Sequence
  ENSG00000182979_46 (sequence is synthesized)
taagtgtgccctcacagccgtcgtcctcgtggccccgggggccagggagggtgggcacagggtgctggggccaggcgggtcccaaggaaactcaagctcagaggctgggaaagttggggc

SEQ ID NO: 650185 - DNA, 120 bp, Artificial Sequence
  ENSG00000182979_47 (sequence is synthesized)
agcccccgggagggcggcccagggctggggggttctggctgcagacgcagtggccatgtctctgtcgtcctggcctcctggtcagtaagggggcattgggattccagcccacaccgccag

SEQ ID NO: 650186 - DNA, 120 bp, Artificial Sequence
  ENSG00000182979_48 (sequence is synthesized)
ggttcagtccctgagctgggctccatgctagggggagcacgggggcctggagaacggctcagacctcagcagtggctcccaggaactgaaaggggagaaaggaagatccctgccgaggcc

SEQ ID NO: 650187 - DNA, 120 bp, Artificial Sequence
  ENSG00000182979_49 (sequence is synthesized)
gaggggtgcgaggacgtggttctggacaaggggtggtcagccgcggtgcctgctgggcacatgggccctcgaggtttgtgctcctgcaactcctctcgtctctcctttccctctttaagt

SEQ ID NO: 650188 - DNA, 120 bp, Artificial Sequence
  ENSG00000182979_50 (sequence is synthesized)
gggcccatgcttggggcagtccacgtgagccaggccacagcccagttccccacattcctcccgacatcactggtcccttggtgaagaccccccgagcccaggcatctggccctcggcccc

SEQ ID NO: 650189 - DNA, 120 bp, Artificial Sequence
  ENSG00000182979_51 (sequence is synthesized)
ctggccccgcctcctgtcagtggactgtcctggcacgtgtggccctggcgcccctgcctgcgctgtctgccatcgcgctgtgactgcccgcatgctgccagcctcagctcgtggggccgc

SEQ ID NO: 650190 - DNA, 120 bp, Artificial Sequence
  ENSG00000182979_52 (sequence is synthesized)
ccgtgctgtgcctgcaatccttccgtgcgcctgccaggcgggacagtggggagggtggtcgggggtgtctgtgtgggccgtgggcaactgagcttgtacacatgggtgccttctgtcgga

SEQ ID NO: 650191 - DNA, 120 bp, Artificial Sequence
  ENSG00000182979_53 (sequence is synthesized)
ccggagaatcgaggagctcaacaagacggccaatgggaacgtggaggccaaagtggtgtgcttctaccggaggcgggacatctccagcaccctcatcgccctggccgacaagcacgcaat

SEQ ID NO: 650192 - DNA, 120 bp, Artificial Sequence
  ENSG00000182979_54 (sequence is synthesized)
gggcgggggtgtcctggctccgtttcctcgggggctgggtgaatgaagtcctcgcacgccccccggagtggtctgtctctcactggcatcctctgcaagcttgtcatggtgtggctgggt

SEQ ID NO: 650193 - DNA, 120 bp, Artificial Sequence
  ENSG00000182983_0 (sequence is synthesized)
cgggtgtggagcacggggagtcgggcgtggggcgggcagggagtggagtcggggtcttactccggtggctgcagggcgcagggtagccgtgtcaggcctgcccaggtgcagagcgctctt

SEQ ID NO: 650194 - DNA, 120 bp, Artificial Sequence
  ENSG00000182983_1 (sequence is synthesized)
ccgcgaccccaacagcctctggtccggtctggcgcgccctcgctttcccagagggcgacctgggctatggcggccgtggcgctggcgagcgggacacgcctcggccttgtcctcgagctg

SEQ ID NO: 650195 - DNA, 120 bp, Artificial Sequence
  ENSG00000182983_2 (sequence is synthesized)
ctcccgggacagcccgcgctgccccgggcgcgccgggagtcagtgaccttcgaggatgtggccgtctacttctctgagaacgaatggatcggcctgggccctgctcagagagccctgtac

SEQ ID NO: 650196 - DNA, 120 bp, Artificial Sequence
  ENSG00000182983_3 (sequence is synthesized)
agggatgtgatgctggagaattatggggctgtggcttccctggcatttccatttcccaaaccggctctgatttcccagctggagcgaggggaaacaccctggtgctcggttcctcgggga

SEQ ID NO: 650197 - DNA, 120 bp, Artificial Sequence
  ENSG00000182983_4 (sequence is synthesized)
gctctggatggagaggccccaaggggcatctcctcagagggtgtgttgaagaggaagaaagaagattttattctgaaggaggaaattattgaggaagcacaggacctcatggtcctatca

SEQ ID NO: 650198 - DNA, 120 bp, Artificial Sequence
  ENSG00000182983_5 (sequence is synthesized)
agtggaccccagtggtgtggatcccaggaattatggtttgggaaaacctgtgaagagaaaagcaggttagggagatggcctggttacctcaatgggggacgtatggaaagttctacaaat

SEQ ID NO: 650199 - DNA, 120 bp, Artificial Sequence
  ENSG00000182983_6 (sequence is synthesized)
gatattatagaagtgattgtcaaggatgagatgatctcagtagaagagagttcagggaatactgatgtcaataacctccttggtatacatcacaaaattctaaatgagcaaatattctat

SEQ ID NO: 650200 - DNA, 120 bp, Artificial Sequence
  ENSG00000182983_7 (sequence is synthesized)
atatgtgaggaatgcggcaagtgttttgatcaaaatgaggactttgatcaacaccagaaaactcataatggagagaaggtctatggatgtaaggaatgtgggaaggctttcagttttcga

SEQ ID NO: 650201 - DNA, 120 bp, Artificial Sequence
  ENSG00000182983_8 (sequence is synthesized)
tcacattgcattgcacatcagagaattcacagtggggtgaaaccctatgaatgtcaagaatgtgctaaggcctttgtttggaagtcaaacctgattcgtcaccagagaatacatactgga

SEQ ID NO: 650202 - DNA, 120 bp, Artificial Sequence
  ENSG00000182983_9 (sequence is synthesized)
gagaaaccctttgaatgtaaggaatgtgggaagggctttagtcagaacacaagccttacgcaacatcaacggatccacactggtgagaaaccatacacatgtaaggaatgtgggaaaagc

SEQ ID NO: 650203 - DNA, 120 bp, Artificial Sequence
  ENSG00000182983_10 (sequence is synthesized)
tttactcgaaacccagcccttcttcgacatcagagaatgcacactggggagaagccttacgaatgtaaggactgtgggaagggcttcatgtggaactcagatctttctcagcaccagagg

SEQ ID NO: 650204 - DNA, 120 bp, Artificial Sequence
  ENSG00000182983_11 (sequence is synthesized)
gtccacactggggacaagcctcatgaatgtactgactgtgggaaaagcttcttttgcaaggcacatcttattcgacatcaaagaatccatactggggaaagaccctataaatgtaatgac

SEQ ID NO: 650205 - DNA, 120 bp, Artificial Sequence
  ENSG00000182983_12 (sequence is synthesized)
tgtgggaaggccttcagtcagaattctgtcttaattaagcaccagaggcgccatgctagagacaaaccctataactgtcagatctctcaccttcttgaacattagagagtgcataatggt

SEQ ID NO: 650206 - DNA, 120 bp, Artificial Sequence
  ENSG00000182983_13 (sequence is synthesized)
tgctgtaacccttaacttaaatagccagtattatcttgcccttttgaacatttaccatgtactctagcaagactggtccctctgttctatgatgttttaacaaggcatcatttagttggg

SEQ ID NO: 650207 - DNA, 120 bp, Artificial Sequence
  ENSG00000182983_14 (sequence is synthesized)
cagctactctgtatcaggtgctaaccactttacatacattaatttgcataacaatcctattaaggtaggtgctcttctccccattttacaaatgagaaatctgagttgaaagaggttata

SEQ ID NO: 650208 - DNA, 120 bp, Artificial Sequence
  ENSG00000182983_15 (sequence is synthesized)
aaactcattcagggttgctcagttagtaagttatagagttgaaattggagccaggcctatctgactgcagagtttactgttctttacttaattgtacatatttatgtctctgcccatttt

SEQ ID NO: 650209 - DNA, 120 bp, Artificial Sequence
  ENSG00000182983_16 (sequence is synthesized)
tatttgcttattttcctgtgcttttagtttcccttcatcactcagatctagctccttcaactaagaagatctctcttcctcttctacttgtaatcagtaccacccaagttagtatttaat

SEQ ID NO: 650210 - DNA, 120 bp, Artificial Sequence
  ENSG00000182983_17 (sequence is synthesized)
tatgtgccatcttatatttttctaatagtctcatgtcttttaatcttaaccccagctaaatgactctgaggaccaacagtacatttcttttatgtttttcaaatcctgaaacattaatct

SEQ ID NO: 650211 - DNA, 120 bp, Artificial Sequence
  ENSG00000182983_18 (sequence is synthesized)
ttgactagatataacatgctcatgataaaaaagaattgaaatagttgaaaagggtgttcagtgaaaagtaaatttccttgtcattcctatctcttgagttctccccagaggcaatcactg

SEQ ID NO: 650212 - DNA, 120 bp, Artificial Sequence
  ENSG00000182983_19 (sequence is synthesized)
ctactggttgtgtatctctgtagatactctttgtatacaagtgtttattagtattgcttttcataattctgtctcactgaaaaccttatttgatggaagcaacattgcagttaaattgtg

SEQ ID NO: 650213 - DNA, 120 bp, Artificial Sequence
  ENSG00000182983_20 (sequence is synthesized)
aaattgtgaactctaagaccttttcttcagaagttgctttccttttgaggccaccaaagtaatttagggaaacagcagagggtaatccaggtctttttttttttttttttttttttagac

SEQ ID NO: 650214 - DNA, 120 bp, Artificial Sequence
  ENSG00000182983_21 (sequence is synthesized)
ttacaggcctcagctaccacgcctggccaatccaggtcttaagagacctcattgcctttgttttatgagatatcattctgggattgggaatatgtaaactcaactggagattttttttca

SEQ ID NO: 650215 - DNA, 120 bp, Artificial Sequence
  ENSG00000182983_22 (sequence is synthesized)
taaaaatttatatagttccagccctctcattgcttcctatcctaaatcctcttccagtctgtccatccctcactaccatgatagtctacattctgataagctgtgaggccactgccaagg

SEQ ID NO: 650216 - DNA, 120 bp, Artificial Sequence
  ENSG00000182983_23 (sequence is synthesized)
gagggagaaatggtcactttctggtggtggttaatgctttgttagatagcttcatccagtcaatagttgaaaagttttcacataatccagtattggcatcagagccagaaatgccctccc

SEQ ID NO: 650217 - DNA, 120 bp, Artificial Sequence
  ENSG00000182983_24 (sequence is synthesized)
atgctggagaattatggggctgtggcttccctggcagcatttccatttcccaaaccggctctgatttcccagctggagcgaggggaaacaccctggtgctcggttcctcggggagctctg

SEQ ID NO: 650218 - DNA, 120 bp, Artificial Sequence
  ENSG00000182983_25 (sequence is synthesized)
gatggagaggccccaaggggcatctcctcaggatatccatttctaaagcctgctgggatttcccatcctgagcaggtggaagagccattaaacctgaaactgcaaggagagggtccaagc

SEQ ID NO: 650219 - DNA, 120 bp, Artificial Sequence
  ENSG00000182983_26 (sequence is synthesized)
taaagaattatagaattaactaattctacttgaaatcaggagttttataaaacaacatttttagacgtggtcatcttttattggtttccatcatctcttccccttctctctgggaacagt

SEQ ID NO: 650220 - DNA, 120 bp, Artificial Sequence
  ENSG00000182983_27 (sequence is synthesized)
tacccgggtattctttgggaagctatcctttctcagctatgtggtttggcaccaccaccatcttcatgagtggaccctgtttggcttgtgtcaatcagtttatcccatccccttggccac

SEQ ID NO: 650221 - DNA, 120 bp, Artificial Sequence
  ENSG00000182983_28 (sequence is synthesized)
agagccattgtgatatgaggagatactggctcttctggaaaagagaggcttttcttcatcgagagctaccagaggagatattatctgtcctctgtgtggcacataggaaaatgtgagacc

SEQ ID NO: 650222 - DNA, 120 bp, Artificial Sequence
  ENSG00000182983_29 (sequence is synthesized)
tagaattatagcaactttttttttctgttaaaaggggagattctcaagcttccaggtgctaccatatggagcctaaggataaagccaataccaaagaaaacagtgactaaacagagagaa

SEQ ID NO: 650223 - DNA, 120 bp, Artificial Sequence
  ENSG00000182983_30 (sequence is synthesized)
actaggtccttggtgacatcttttgagccactagaccaagctttacctgaagcagagctacctcagaacttttcagctatgtgagccaataaacatctgtcaaacgagttagagttgagt

SEQ ID NO: 650224 - DNA, 120 bp, Artificial Sequence
  ENSG00000182983_31 (sequence is synthesized)
tttctgttatttgcaacttagccacactaatactgttttgtgtttgaaatcactgttttctcatacagctcctcagtgtcaccttttcctcttgctcagtagtctcataagcttctcagt

SEQ ID NO: 650225 - DNA, 120 bp, Artificial Sequence
  ENSG00000182983_32 (sequence is synthesized)
accttttcctcttgctcagtagtctcataagcttctcagttttatctcatctcagttgcttggaagttgagcatctaaataggtggcttttgctgggtgcagtggcttacgcctgtaatc

SEQ ID NO: 650226 - DNA, 60 bp, Artificial Sequence
  ENSG00000182983_33 (sequence is synthesized)
gaaaataataaataggtggctctcatgacctaaggttaatttcatgcatactactaagtg

SEQ ID NO: 650227 - DNA, 120 bp, Artificial Sequence
  ENSG00000182983_34 (sequence is synthesized)
tctcatgacctaaggttaatttcatgcatactactaagtgatgctttaagtcataccattagtgcaggaatttttgctccttagttcagctaaaatctgggttcttgtctcatgaccagg

SEQ ID NO: 650228 - DNA, 120 bp, Artificial Sequence
  ENSG00000182983_35 (sequence is synthesized)
aaaaattagtcacagggacacattgaaaagtgaggagggcagaatttattaagtgaaaaggaaaactctcaacaaaaagaggggtcctgcatgcaggttttccatctcactaaactgaat

SEQ ID NO: 650229 - DNA, 120 bp, Artificial Sequence
  ENSG00000182983_36 (sequence is synthesized)
accaggccaccacacatgagctgaagagcctagtcttctccccctgcatgaattcctggtggctacaccccgttctcccagtgtgcaggcaggcccttagtctgagccactccacattat

SEQ ID NO: 650230 - DNA, 120 bp, Artificial Sequence
  ENSG00000182983_37 (sequence is synthesized)
ttcccttactgtgtatgtgttaaggaacggaatttttcatcatgggcatgtttaggcaatccccctgtgcacaatgacctgggcagcatttggctgtctcctgattctatcattcccccc

SEQ ID NO: 650231 - DNA, 120 bp, Artificial Sequence
  ENSG00000182983_38 (sequence is synthesized)
tctaaagaagtacatctaacttagaataaggataaggataagggtagtgatcgatcttaactggttcctgctgatgggggcactgttttgggaaaatagcagtgagatctccctcagagg

SEQ ID NO: 650232 - DNA, 120 bp, Artificial Sequence
  ENSG00000182983_39 (sequence is synthesized)
cctatctaagggtccctggtaaaaggtggccatcatttgaggttccaattgcatgaacattcagagttcaatggcctgaaggtgagaagagacaaaccaggttattagaagacaatcaaa

SEQ ID NO: 650233 - DNA, 120 bp, Artificial Sequence
  ENSG00000182983_40 (sequence is synthesized)
atgaaacaaagcggggatggtaaggacagctaaaaaaaatcctaaggctgctgacacacccagataactggtagctatagttatgcctgctaagattggggtgtttggggcttggctttc

SEQ ID NO: 650234 - DNA, 120 bp, Artificial Sequence
  ENSG00000182983_41 (sequence is synthesized)
gttagctcccttggtcttattttcccaaaaaagaaacctccaggttatgggcaccttatttagtctaatcatctggcaggatttgcagggtaattgcccagaactagaatattgatccag

SEQ ID NO: 650235 - DNA, 89 bp, Artificial Sequence
  ENSG00000182983_42 (sequence is synthesized)
aagcagtgttagtttaaaatgtgggcaaaaacttaaaaacaacgaatgagtctaaaatctaatgacaaatatataagtcttgaaacata

SEQ ID NO: 650236 - DNA, 120 bp, Artificial Sequence
  ENSG00000182983_43 (sequence is synthesized)
taaaaacaacgaatgagtctaaaatctaatgacaaatatataagtcttgaaacataatttctctccagttctcatttttgttaaaaataaatcatgataggactgagttgtttgcaaaat

SEQ ID NO: 650237 - DNA, 120 bp, Artificial Sequence
  ENSG00000182983_44 (sequence is synthesized)
gatgctggagaattatggggctgtggcttccctgggtaagggtctctccctttgggccctgcctccacccttgagagtttgctggctccttttttctcaaaggctcaggagttgttgata

SEQ ID NO: 650238 - DNA, 120 bp, Artificial Sequence
  ENSG00000182983_45 (sequence is synthesized)
accctcagctcaatggcagcttcaggctcttggatttttaatgacctaacctcagcagccgttggaaagtaggaagtcctggtatcagtttgggccttatacaggacttccttgctccag

SEQ ID NO: 650239 - DNA, 120 bp, Artificial Sequence
  ENSG00000182983_46 (sequence is synthesized)
agtgagaggtgccaaacccctacccttgtgttgtgggtatagtgagaagagagcaaattcatggtgctccactgagccttcagttccctcccctctcggtttgcaagatccagcctaatt

SEQ ID NO: 650240 - DNA, 120 bp, Artificial Sequence
  ENSG00000182983_47 (sequence is synthesized)
ccaagcatcctcatgaggatgtctgaacttgagagctctaagagggagaggacaggtaagaattgaggactcaattcctcaatgagtgaaatcatccatttgctgactcaaacagttact

SEQ ID NO: 650241 - DNA, 120 bp, Artificial Sequence
  ENSG00000182983_48 (sequence is synthesized)
gagtcgtctgtcaacttcctgacctttgtaagtctcctggcccctctcttgtcctttcccctggaattccttttcttgttcttcctagttatttccgtttttttcccctcctacccctga

SEQ ID NO: 650242 - DNA, 120 bp, Artificial Sequence
  ENSG00000182983_49 (sequence is synthesized)
agacactggcctgggaggagccttgggattactgtgtgccatgccactcacctgcctgtcccatttctttccttttaagcagcatttccatttcccaaaccggctctgatttcccagctg

SEQ ID NO: 650243 - DNA, 120 bp, Artificial Sequence
  ENSG00000182983_50 (sequence is synthesized)
catttcccaaaccggctctgatttcccagctggagcgaggggaaacaccctggtgctcggttcctcggggagctctggatggagaggccccaaggggcatctcctcagggataggtgaag

SEQ ID NO: 650244 - DNA, 120 bp, Artificial Sequence
  ENSG00000182983_51 (sequence is synthesized)
cttcttgacgttttaaagatatccatttctaaagcctgctgggatttcccatcctgagcaggtggaagagccattaaacctgaaactgcaaggagagggtccaagcctgatttgtccggg

SEQ ID NO: 650245 - DNA, 120 bp, Artificial Sequence
  ENSG00000182985_0 (sequence is synthesized)
ggttgggctcgcggcgctgtgattggtctgcccggactccgcctccagcgcatgtcattagcatctcattagctgtccgctcgggctccggaggcagccaacgccgccagtctgaggcag

SEQ ID NO: 650246 - DNA, 120 bp, Artificial Sequence
  ENSG00000182985_1 (sequence is synthesized)
gtgcccgacatggcgagtgtagtgctgccgagcggatcccagtgtgcggcggcagcggcggcggcggcgcctcccgggctccggctccggcttctgctgttgctcttctccgccgcggca

SEQ ID NO: 650247 - DNA, 120 bp, Artificial Sequence
  ENSG00000182985_2 (sequence is synthesized)
ctgatccccacaggtgatgggcagaatctgtttacgaaagacgtgacagtgatcgagggagaggttgcgaccatcagttgccaagtcaataagagtgacgactctgtgattcagctactg

SEQ ID NO: 650248 - DNA, 120 bp, Artificial Sequence
  ENSG00000182985_3 (sequence is synthesized)
aatcccaacaggcagaccatttatttcagggacttcaggcctttgaaggacagcaggtttcagttgctgaatttttctagcagtgaactcaaagtatcattgacaaacgtctcaatttct

SEQ ID NO: 650249 - DNA, 120 bp, Artificial Sequence
  ENSG00000182985_4 (sequence is synthesized)
gatgaaggaagatacttttgccagctctataccgatcccccacaggaaagttacaccaccatcacagtcctggtcccaccacgtaatctgatgatcgatatccagaaagacactgcggtg

SEQ ID NO: 650250 - DNA, 120 bp, Artificial Sequence
  ENSG00000182985_5 (sequence is synthesized)
gaaggtgaggagattgaagtcaactgcactgctatggccagcaagccagccacgactatcaggtggttcaaagggaacacagagctaaaaggcaaatcggaggtggaagagtggtcagac

SEQ ID NO: 650251 - DNA, 120 bp, Artificial Sequence
  ENSG00000182985_6 (sequence is synthesized)
atgtacactgtgaccagtcagctgatgctgaaggtgcacaaggaggacgatggggtcccagtgatctgccaggtggagcaccctgcggtcactggaaacctgcagacccagcggtatcta

SEQ ID NO: 650252 - DNA, 120 bp, Artificial Sequence
  ENSG00000182985_7 (sequence is synthesized)
gaagtacagtataagcctcaagtgcacattcagatgacttatcctctacaaggcttaacccgggaaggggacgcgcttgagttaacatgtgaagccatcgggaagccccagcctgtgatg

SEQ ID NO: 650253 - DNA, 120 bp, Artificial Sequence
  ENSG00000182985_8 (sequence is synthesized)
gtaacttgggtgagagtcgatgatgaaatgcctcaacacgccgtactgtctgggcccaacctgttcatcaataacctaaacaaaacagataatggtacataccgctgtgaagcttcaaac

SEQ ID NO: 650254 - DNA, 120 bp, Artificial Sequence
  ENSG00000182985_9 (sequence is synthesized)
atagtggggaaagctcactcggattatatgctgtatgtatacgattcccgagcaggtgaagaaggctcgatcagggcagtggatcatgccgtgatcggtggcgtcgtggcggtggtggtg

SEQ ID NO: 650255 - DNA, 120 bp, Artificial Sequence
  ENSG00000182985_10 (sequence is synthesized)
ttcgccatgctgtgcttgctcatcattctggggcgctattttgccagacataaaggtacatacttcactcatgaagccaaaggagccgatgacgcagcagacgcagacacagctataatc

SEQ ID NO: 650256 - DNA, 120 bp, Artificial Sequence
  ENSG00000182985_11 (sequence is synthesized)
aatgcagaaggaggacagaacaactccgaagaaaagaaagagtacttcatctagatcagcctttttgtttcaatgaggtgtccaactggccctatttagatgataaagagacagtgatat

SEQ ID NO: 650257 - DNA, 120 bp, Artificial Sequence
  ENSG00000182985_12 (sequence is synthesized)
tggaacttgcgagaaattcgtgtgtttttttatgaatgggtggaaaggtgtgagactgggaaggcttgggatttgctgtgtaaaaaaaaaaaaaatgttctttggaaagtacactctgct

SEQ ID NO: 650258 - DNA, 120 bp, Artificial Sequence
  ENSG00000182985_13 (sequence is synthesized)
gtttgacacctcttttttcgtttgtttgtttgtttaatttttatttcttcctaccaagtcaaacttggatacttggatttagtttcagtagattgcagaaaattctgtgccttgtttttt

SEQ ID NO: 650259 - DNA, 120 bp, Artificial Sequence
  ENSG00000182985_14 (sequence is synthesized)
gtttgtttgttgcgttcctttcttttccccctttgtgcacatttatttcctccctctaccccaatttcggattttttccaaaatctcccattttggaatttgcctgctgggattccttag

SEQ ID NO: 650260 - DNA, 120 bp, Artificial Sequence
  ENSG00000182985_15 (sequence is synthesized)
actcttttccttcccttttctgttctagttttttacttttgtttatttttatggtaactgctttctgttccaaattcagtttcataaaaggagaaccagcacagcttagatttcatagtt

SEQ ID NO: 650261 - DNA, 120 bp, Artificial Sequence
  ENSG00000182985_16 (sequence is synthesized)
cagaatttagtgtatccataatgcattcttctctgttgtcgtaaagatttgggtgaacaaacaatgaaaactctttgctgctgcccatgtttcaaatacttagagcagtgaagactagaa

SEQ ID NO: 650262 - DNA, 120 bp, Artificial Sequence
  ENSG00000182985_17 (sequence is synthesized)
gttctgtttgctgtggaactacattactgtacagggttatctgcaagtgaggtgtgtcacaatgagattgaatttcactgtctttaattctgtatctgtagacggctcagtatagatacc

SEQ ID NO: 650263 - DNA, 120 bp, Artificial Sequence
  ENSG00000182985_18 (sequence is synthesized)
ctacgctgtccagaaaggtttggggcagaaaggactcctcctttttccatgccctaaacagacctgacaggtgaggtctgttccttttatataagtggacaaattttgagttgccacagg

SEQ ID NO: 650264 - DNA, 120 bp, Artificial Sequence
  ENSG00000182985_19 (sequence is synthesized)
aggggaagtagggaggggggaaatacagttctgctctggttgtttctgttccaaatgattccatccacctttcccaatcggccttacttctcactaatttgtaggaaaaagcaagttcgt

SEQ ID NO: 650265 - DNA, 120 bp, Artificial Sequence
  ENSG00000182985_20 (sequence is synthesized)
ctgttgtgcgaatgactgaatgggacagagttgatttttttttttttttcctttgtgcttagttaggaaggcagtaggatgtggcctgcatgtactgtatattacagatatttgtcatgc

SEQ ID NO: 650266 - DNA, 120 bp, Artificial Sequence
  ENSG00000182985_21 (sequence is synthesized)
tgggatttccaactcgaatctgtgtgaaactttcattccttcagatttggcttgacaaaggcaggaggtacaaaagaagggctggtattgttctcacactggtctgctgtcgctctcagt

SEQ ID NO: 650267 - DNA, 120 bp, Artificial Sequence
  ENSG00000182985_22 (sequence is synthesized)
tctcgataggtcagagcagaggtggaaaaacagcatgtacggattttcagttacttaatcaaaactcaaatgtgagtgtttttatctttttacctttcatacactagccttggcctcttt

SEQ ID NO: 650268 - DNA, 120 bp, Artificial Sequence
  ENSG00000182985_23 (sequence is synthesized)
cctcagccttaagaaccatctgccaaaaattactgatcctcgcatgatggcagccatagtgcatagctactaaaatcagtgaccttgaacatatcttagatggggagcctcgggaaaagg

SEQ ID NO: 650269 - DNA, 120 bp, Artificial Sequence
  ENSG00000182985_24 (sequence is synthesized)
tagaggagtcacgttaccatttacatgttttaaagaaagaagtgtggggattttcactgaaacgtctaggaaatctagaagtagtcctgaaggacagaaactaaactcttaccatatgtt

SEQ ID NO: 650270 - DNA, 120 bp, Artificial Sequence
  ENSG00000182985_25 (sequence is synthesized)
tggtaagactccagactccagctaacagtccctatggaaagatggcatcaaaaaagatagatctatatatatatataaatatatattctattacattttcagtgagtaattttggatttt

SEQ ID NO: 650271 - DNA, 120 bp, Artificial Sequence
  ENSG00000182985_26 (sequence is synthesized)
gcaaggtgcatttttactattgttacattatgtggaaaacttatgctgatttatttaagggggaaaaagtgtcaactctttgttatttgaaaacatgtttatttttcttgtctttatttt

SEQ ID NO: 650272 - DNA, 120 bp, Artificial Sequence
  ENSG00000182985_27 (sequence is synthesized)
aacctttgatagaaccattgcaatatgggggccttttgggaacggactggtatgtaaaagaaaatccattatcgagcagcattttatttacccctcccctatccctaggcacttaaccaa

SEQ ID NO: 650273 - DNA, 120 bp, Artificial Sequence
  ENSG00000182985_28 (sequence is synthesized)
gacaaaaagccacaatgaacatccctttttcaatgaattttataatctgcagctctattccgagcccttagcacccattccgaccatagtataatcatatcaaagggtgagaatcattta

SEQ ID NO: 650274 - DNA, 79 bp, Artificial Sequence
  ENSG00000182985_29 (sequence is synthesized)
caccattgctcacagaattggcatctcatttttgggacctcccatctttctgttttgaaaagtgtacagtagtgcagtg

SEQ ID NO: 650275 - DNA, 120 bp, Artificial Sequence
  ENSG00000182985_30 (sequence is synthesized)
tcccatctttctgttttgaaaagtgtacagtagtgcagtgttcctgatgtaactttatggcttacaatgttgacatgtctcaggttcatgtgttgcgattggtgttttccgtctcaggta

SEQ ID NO: 650276 - DNA, 120 bp, Artificial Sequence
  ENSG00000182985_31 (sequence is synthesized)
gattgcaaagtgtaggccccacacattggaaaaaataataataaaacaaagcaaaaacaggaaattatggattttagttgtatattggtttatgtattttttcttaagtatacagtgcac

SEQ ID NO: 650277 - DNA, 120 bp, Artificial Sequence
  ENSG00000182985_32 (sequence is synthesized)
tgtttgaaatgtattgttgagtattactttgtacaggttgatcactttttttagagtgaagaaagaacaaacttgttttttgtgttttttaaaggaatataaaataatgaaggatgtata

SEQ ID NO: 650278 - DNA, 120 bp, Artificial Sequence
  ENSG00000182985_33 (sequence is synthesized)
attgatgccaaataagcttgttctttagtcacaccgacgtcttatttttccctttaggccagttctgtttttaaggtgtacatggacaatgttacagtgtaagaaactccatatccatat

SEQ ID NO: 650279 - DNA, 120 bp, Artificial Sequence
  ENSG00000182985_34 (sequence is synthesized)
gttcccattcgcattttgtattggttcatgtataccatttttacaaaaaaaaaaagaaaaaaaagaagtactataaaatatctgtcttcttaataaaaaaaaattaatgttacaaagtga

SEQ ID NO: 650280 - DNA, 120 bp, Artificial Sequence
  ENSG00000182985_35 (sequence is synthesized)
caccaccaccaccaccaccaccaccaccatccttaccatcatcacagacacaacggcgacgacagaaccagcagttcacggccttactcagttgcccaattccgcagaagaactggacag

SEQ ID NO: 650281 - DNA, 120 bp, Artificial Sequence
  ENSG00000182985_36 (sequence is synthesized)
cctgtgggtgctctatccacttctacaaaatggccatttggtttgctgagcaatcagtgtggattttgagactaacaaaaaacaaatttgtatcaatactgtcttcctccccggtcaccc

SEQ ID NO: 650282 - DNA, 120 bp, Artificial Sequence
  ENSG00000182985_37 (sequence is synthesized)
actcacctgttttctctgtggtagcgatatttatatttcggaatggggacaatttaattaacgcaggagaggacaagttacctttgggattgtactaaagcccctctgttcagtggcttc

SEQ ID NO: 650283 - DNA, 120 bp, Artificial Sequence
  ENSG00000182985_38 (sequence is synthesized)
cggtacgtgagaagataaaatgctcttctactagagtcagtcacatggagctgctacttgtgatttactctcaaagcttttggtcaagttgaaaatcaaaaaccagttggtttccttcta

SEQ ID NO: 650284 - DNA, 120 bp, Artificial Sequence
  ENSG00000182985_39 (sequence is synthesized)
aattaggctctgcaactggatacagacagagtgaacgctaagactaggtcagggccggatagactatttcttccttccctgcctccctaagcttgttccacatgcattaaccctcctatg

SEQ ID NO: 650285 - DNA, 120 bp, Artificial Sequence
  ENSG00000182985_40 (sequence is synthesized)
ctgcttatcatgaaattgcctcgtggggagaacagatcgattcagcactggacaggtcagcctgttacctcagtgtaacttgatccatctcgattgttctctgtgactcctccattaaaa

SEQ ID NO: 650286 - DNA, 120 bp, Artificial Sequence
  ENSG00000182985_41 (sequence is synthesized)
aagaaggtgaccctctgaccctggagacagtgtcgccggggcttctggtgccttgtaataagctctacatccctattcctcttctgattttaacagattcccgagcaggtgaagaaggct

SEQ ID NO: 650287 - DNA, 120 bp, Artificial Sequence
  ENSG00000182985_42 (sequence is synthesized)
gccaggattaccaactaattagaagggtgttactgaaggcatcggatgggagagagtaagtgctggtactgtggttttgaggcagtgtgtgagtctgattttgcctgatgatatcatttg

SEQ ID NO: 650288 - DNA, 120 bp, Artificial Sequence
  ENSG00000182985_43 (sequence is synthesized)
ccttcccaggatttcatcgagatcccaaagagtcactcactcacacacgatgaactgcctatacattgggactgtcaacatcaactaacaagacgagattatttattgaaccctcctacc

SEQ ID NO: 650289 - DNA, 120 bp, Artificial Sequence
  ENSG00000182985_44 (sequence is synthesized)
tacttgatatacgtgttttgttaagaactctttgtatgtgtagtctctgagattgcacagaagaataaaaggaccagcttccaactttcaagaagactggattttcgtaaggatacaaca

SEQ ID NO: 650290 - DNA, 120 bp, Artificial Sequence
  ENSG00000182985_45 (sequence is synthesized)
gaaagaacttgggttttggagttgtattaggtttgaatttcactttttcattactgtgtgataactcagttggatatctttttcttcttctatttcctcatttactcaataggtgtaata

SEQ ID NO: 650291 - DNA, 120 bp, Artificial Sequence
  ENSG00000182985_46 (sequence is synthesized)
atagtgttgcaattaggaacatgaatcttttatcgtttggacaaggaagggaaaatgccattactgtcaactgaaatgtcctacttgggttttttgctcctacttccctgccaaagccca

SEQ ID NO: 650292 - DNA, 120 bp, Artificial Sequence
  ENSG00000182985_47 (sequence is synthesized)
ttgctgctgctgaaattgtataacattcacagctgttcttgatggcttgattcttaacacagccagaaatgtagcccgggagatgcttaagacagtttatggaaaataatagatttcctt

SEQ ID NO: 650293 - DNA, 120 bp, Artificial Sequence
  ENSG00000182985_48 (sequence is synthesized)
gcagagacaccaatgcatcgagaagggccttgagtcacgttagccccagccaagatcaccaattttctctctatctggcttcagttacaaaggctatgccttaaaaaaaaaaaaaaaaaa

SEQ ID NO: 650294 - DNA, 120 bp, Artificial Sequence
  ENSG00000182985_49 (sequence is synthesized)
aaagctcaagaggtttacgaatggctgcaggacctgaagattgtgtttcagccttgatatgcagtttggaaacaatgtgctactgtctaacggcgtgaaccaaatttctgctaatgggaa

SEQ ID NO: 650295 - DNA, 120 bp, Artificial Sequence
  ENSG00000182985_50 (sequence is synthesized)
gaagggaaaactctccacaaaagctgacaaagcaggaagaacaggatgactgagtttttagattaaaactcccgggggcgtctgaactcatggctggtggtggaagtaagagtttccata

SEQ ID NO: 650296 - DNA, 120 bp, Artificial Sequence
  ENSG00000182985_51 (sequence is synthesized)
gcttcctccttaggaccatgtacggggccaggaacgctggcagtagatgctaggacatgctgccggctgggttgctgggggccgcgctctctctccttctccgctcatccttcctgtcct

SEQ ID NO: 650297 - DNA, 120 bp, Artificial Sequence
  ENSG00000182985_52 (sequence is synthesized)
tgttctcttccccactctcagtggacaggtgagccaagtgctgtgccgtggctgagtctgggctcccacgtggactcagcgatttgtgcaggtgtgcgagctgtcgtggcgggcccgccg

SEQ ID NO: 650298 - DNA, 120 bp, Artificial Sequence
  ENSG00000182985_53 (sequence is synthesized)
gaacaggccgctcccgtagatgtgtcttccgcactcatcccctctctcaccgcccccccaccctcaccaacttccctgtgttggctgctccacctgtctcttactttgggagtttgtgtc

SEQ ID NO: 650299 - DNA, 120 bp, Artificial Sequence
  ENSG00000182985_54 (sequence is synthesized)
ttaacaattcattctgccttcttccttgaaagttctctctcctttcataaaaagaagacgtgagctgtggaggactggcttggctgcctgcagaagattgttctcacttgctgtttaggt

SEQ ID NO: 650300 - DNA, 120 bp, Artificial Sequence
  ENSG00000182985_55 (sequence is synthesized)
tgctgagacttccaggcctgggtagacagcaggatttgctctgttgtcatcgtccttgccttgcaggctgaagtgagcaatgactacacttcatggtggccgatcttataaatgtgcaga

SEQ ID NO: 650301 - DNA, 120 bp, Artificial Sequence
  ENSG00000182985_56 (sequence is synthesized)
taacgtctggccaggcccaaagtgcccttttcccaccatcccctcagctgtggttgatgagttccccttttctcccttggccacgtcatggggaaagttccataggaaaagcaaaggtaa

SEQ ID NO: 650302 - DNA, 120 bp, Artificial Sequence
  ENSG00000182985_57 (sequence is synthesized)
cataggaaaagcaaaggtaagctccagaaagactgaaggctgtgcatctccccttgagccacttccatcctggcctggtctcttacctgtctctgttaaaaaaaaaaaaaaaaaaaaaaa

SEQ ID NO: 650303 - DNA, 120 bp, Artificial Sequence
  ENSG00000182985_58 (sequence is synthesized)
agttattgagcacctgctgtatgtccagcatggtgagggatgcagagaagtataaggcggtctctggaggccaagtagagcatcagttacatcacctgaaaacttgaagtgaccctgagc

SEQ ID NO: 650304 - DNA, 120 bp, Artificial Sequence
  ENSG00000182985_59 (sequence is synthesized)
catgggtgccccactgaacacagagaagcccagagagtgctatgagaattttctggagaagggtaatcagtgaaggctggtgagtccctagacagcttcacaaagagctgggaccccagc

SEQ ID NO: 650305 - DNA, 120 bp, Artificial Sequence
  ENSG00000182985_60 (sequence is synthesized)
tggatcttaaaggatggtttcgtggagaaggaatgtgagtcaaaagtacagagggcaacaagcccagccagcctgctgatttgtatggggagaagaaagcaattccgtgtgcagggtggg

SEQ ID NO: 650306 - DNA, 120 bp, Artificial Sequence
  ENSG00000182985_61 (sequence is synthesized)
atgggtcttgtggctgtactgaaaagtccgggcagaggactcgatacttcagtgacctctcccagcctctgccagagggcaaggagcagtagggagtactcattcattgcatctctataa

SEQ ID NO: 650307 - DNA, 120 bp, Artificial Sequence
  ENSG00000182985_62 (sequence is synthesized)
aaagacccagagagatagaataaggatcaaaagcacacactagagagaggctgcctgcattcagatccctgtcccaccatgtagcagtgaaacctcgggtgagtagcccagcctacctgg

SEQ ID NO: 650308 - DNA, 120 bp, Artificial Sequence
  ENSG00000182985_63 (sequence is synthesized)
cttcagtctcttgctctgcaaggtggacatcaccatagcctcgaaggttgttaggaaagatcagtgagatatgcagtcagcgctcagccaaaaaggtgccagacacacactacttgttca

SEQ ID NO: 650309 - DNA, 120 bp, Artificial Sequence
  ENSG00000182985_64 (sequence is synthesized)
ttacatgtcagtcacaggatagaggcaaatggtgactaaaacgatagaaggttacccagggctacgaagaagcggtcactactcagagggagctctgagggctcctctgcatatagacac

SEQ ID NO: 650310 - DNA, 120 bp, Artificial Sequence
  ENSG00000182985_65 (sequence is synthesized)
atcatgcccttgcaaaccacgacttagaaggtttaatgacccttttctcttcaccattcattagcagacttattccaagccacgtggcatgcagtatgtttagtctccccacccctctcc

SEQ ID NO: 650311 - DNA, 120 bp, Artificial Sequence
  ENSG00000182985_66 (sequence is synthesized)
ctcttgtctgcagcatgaggctccagctttagctgtaccctacagaaaaaagtcccagaagttccttgagctgaggcagacaggaggtggtgactgctgtacatttgccttttgagctcc

SEQ ID NO: 650312 - DNA, 120 bp, Artificial Sequence
  ENSG00000182985_67 (sequence is synthesized)
acagggtatgcaaatgagaaggtgctagaagccgtccccgctcaaaggatcttgataagttgcccactccttcatttgagaagagtgcgtacgagagtgaaaatggccctcgtttccccc

SEQ ID NO: 650313 - DNA, 120 bp, Artificial Sequence
  ENSG00000182985_68 (sequence is synthesized)
agagagttttcacaaatgttttggcctggcattctccaaatacatcaactggaaccctgaggtgatatgcgggtgttaattggtgcaatctttcactgtcctctgtctacctgaaatgta

SEQ ID NO: 650314 - DNA, 120 bp, Artificial Sequence
  ENSG00000182985_69 (sequence is synthesized)
attcttttaccgctgtggacttgctccatggagaaatgctcctttgattctgtcatcaagaacctcaaagaaaccatgtggccactgtgttacaggtagaaagaccctgcttaagtgaag

SEQ ID NO: 650315 - DNA, 120 bp, Artificial Sequence
  ENSG00000182985_70 (sequence is synthesized)
gtatttttgttttattataaaatcatgcccaagattaatacacctttttgccaggatcccaaatacgcagccctttgtcatgaagaactggcagccacattccttcagggtgaaatttgt

SEQ ID NO: 650316 - DNA, 120 bp, Artificial Sequence
  ENSG00000182985_71 (sequence is synthesized)
attcacagccatacatgtatagtttttgaagcgctggccccccgtacaggagaagaaagaagggactcttggctcatccatgaccttgtaggtcaataccatattaaagttcctgtcagg

SEQ ID NO: 650317 - DNA, 120 bp, Artificial Sequence
  ENSG00000182985_72 (sequence is synthesized)
cacgcagtagtcacccagcaagtatcagctgattaaagggagaagagtcgagcacctggctgactgagccttacgttacacttaatctgaatgggccaccgatgctgtatttcaaacctt

SEQ ID NO: 650318 - DNA, 120 bp, Artificial Sequence
  ENSG00000182985_73 (sequence is synthesized)
gatgtttgcatgtccatccttactacaggtggctttcaggttggccgtgaagggacaagccagccagtcctgagtttagagcgattggccctatcattctcaaggacccactggaatagt

SEQ ID NO: 650319 - DNA, 120 bp, Artificial Sequence
  ENSG00000182985_74 (sequence is synthesized)
atcagggaatatcattttgggtaatggccaagcaaagccttagtattgctatcatatattgtgaggggccttcagaatgcaatatggcctcttttaaaaatgcaaactatagtccttgcc

SEQ ID NO: 650320 - DNA, 120 bp, Artificial Sequence
  ENSG00000182985_75 (sequence is synthesized)
ttatctgtgtttatctcaaaatgttgaaatgtgcctctaataggaactgcaggattcagtccccccccaccaccccccacccaacactcacatcattacacatgagcatccctgaactga

SEQ ID NO: 650321 - DNA, 120 bp, Artificial Sequence
  ENSG00000182985_76 (sequence is synthesized)
gacctgaaagcaagaatcttctctgttttcaggtgttccaaacctcagcttccagcctcttcagtacacaggaaactttgtttcatttttatgtttttatttatttttttcattcccaaa

SEQ ID NO: 650322 - DNA, 120 bp, Artificial Sequence
  ENSG00000182985_77 (sequence is synthesized)
aaacataaaatgtctactgcccctggtggtcagtgctgggaaatacaactcgagccttgcctattgaaatgcagaatgtattccaacaaggaacctgacattgtctactgctttttctct

SEQ ID NO: 650323 - DNA, 120 bp, Artificial Sequence
  ENSG00000182985_78 (sequence is synthesized)
cacacacatgcacacctacctgcgcctcccattttactccctcctaatccttcgaagtgttgatctggggaaggtgagaaccactactgaggggcaaatcaaccggttctctgggcccgg

SEQ ID NO: 650324 - DNA, 120 bp, Artificial Sequence
  ENSG00000182985_79 (sequence is synthesized)
gacttcagctgccctccagacgtgcacaggctcacagtcatatttcagacgtgaccgcctcaaatcttccttaagtgctatcttctcaggttaattaatcaccaggcttaaacttgctgt

SEQ ID NO: 650325 - DNA, 120 bp, Artificial Sequence
  ENSG00000182985_80 (sequence is synthesized)
taccagcaggaagtccatcctgaagtcagcaatgttacgattgcatcttctaatactgtttatcctgcattagtgtttacttagggggaaaattgatccgtaattgatatttcagtcttc

SEQ ID NO: 650326 - DNA, 120 bp, Artificial Sequence
  ENSG00000182985_81 (sequence is synthesized)
cagagctggtgttggaagagcctaatgcaggcctttaatagcaagcaaatatttaaatcccttaatggttgctgaatattgaaatgtgtgactttattactctttttggtttgttttctc

SEQ ID NO: 650327 - DNA, 120 bp, Artificial Sequence
  ENSG00000182985_82 (sequence is synthesized)
tgtagttgtgtatttcatcgtttaaacctgcaatggatgctggcaagtgcaagtctagctaatccacaaaagctgtttgcccagacacagcagacctgattaaaaagtattgctatggaa

SEQ ID NO: 650328 - DNA, 120 bp, Artificial Sequence
  ENSG00000182985_83 (sequence is synthesized)
gggaatcttctgcactaatcagtctctgttagctagtgacgaaattactatccatctctctctctttctctttctctccctctctctaggcctgttttctctaacctcctctcccagaat

SEQ ID NO: 650329 - DNA, 120 bp, Artificial Sequence
  ENSG00000182985_84 (sequence is synthesized)
agagatttggctcatgtttttaaagaaattcatcctcagttcttaagtgttttgtttatgtccctcgaggaatgaaaagaaaaacgatttgtttttacttgtaaggccttactcagttgc

SEQ ID NO: 650330 - DNA, 87 bp, Artificial Sequence
  ENSG00000182986_0 (sequence is synthesized)
tggccagactgttctctgaactcgagtcctgggattacaggctggagggcagttgtgcgatcttgattcacttcaacctctgctctc

SEQ ID NO: 650331 - DNA, 120 bp, Artificial Sequence
  ENSG00000182986_1 (sequence is synthesized)
ggcagttgtgcgatcttgattcacttcaacctctgctctccgggctcaagcaattctcccacctcagcctgagtctcactctgtccttcaggctgtgagtgcagtctcctgatcttggct

SEQ ID NO: 650332 - DNA, 120 bp, Artificial Sequence
  ENSG00000182986_2 (sequence is synthesized)
gggttcaagtgattcttgtgcctcagcctaccaagtagctgagatacaggattgacttctaaagactcttggtacctgaggaagaaacccagaagaggaagaggaaagcaaaggagtcgg

SEQ ID NO: 650333 - DNA, 90 bp, Artificial Sequence
  ENSG00000182986_3 (sequence is synthesized)
aaagactcttggtacctgaggaagaaacccagaagaggaagaggaaagcaaaggagtcggggatggctctttctcagggtctacctcagg

SEQ ID NO: 650334 - DNA, 120 bp, Artificial Sequence
  ENSG00000182986_4 (sequence is synthesized)
gagaattataggaacctggtctccctggatatctcttccaaatgcatgatgaatacattgtcatcaacagggcaaggcaatacagaagtgatccacacagggacattgcagagacaagca

SEQ ID NO: 650335 - DNA, 120 bp, Artificial Sequence
  ENSG00000182986_5 (sequence is synthesized)
attgcagagacaagcaagttatcacattggagcattttgctcccaggaaattgagaaagacattcatgactttgtgtttcagtggcaagaagatgaaacaaatgaccatgaagcacccat

SEQ ID NO: 650336 - DNA, 120 bp, Artificial Sequence
  ENSG00000182986_6 (sequence is synthesized)
gacagaaataaaaaagttgactagtagtacagaccgatatgatcaaaggcatgctggaaacaagcctattaaaggtcagcttgaatcaagatttcatttgcatttgcgaagacataggag

SEQ ID NO: 650337 - DNA, 78 bp, Artificial Sequence
  ENSG00000182986_7 (sequence is synthesized)
aaaccttacaaatgtgaagaatgtgagaaagttttcagttgcaaatcacatcttgaaatacatagcgacaaggctttt

SEQ ID NO: 650338 - DNA, 120 bp, Artificial Sequence
  ENSG00000182986_8 (sequence is synthesized)
ttgcgacaaggcttttaagcatgattcacacctggcaaaacatactagaattcacaggggagacaaacattacacatgtaatgaatgtggcaaggtttttgatcaaaaagcaacccttgc

SEQ ID NO: 650339 - DNA, 120 bp, Artificial Sequence
  ENSG00000182986_9 (sequence is synthesized)
atgtcatcatagaagtcatactggagagaaaccttataagtgtaatgagtgtggcaagacctttagtcagacatcacaccttgtgtaccatcatagactgcatactggagagaaacctta

SEQ ID NO: 650340 - DNA, 120 bp, Artificial Sequence
  ENSG00000182986_10 (sequence is synthesized)
caaatgtaatgagtgtggcaagaccttcgctcgaaattcagtcctcgtaattcataaggcagttcatactgcagagaaaccctataagtgtaatgaatgtggcaaggtttttaagcaacg

SEQ ID NO: 650341 - DNA, 120 bp, Artificial Sequence
  ENSG00000182986_11 (sequence is synthesized)
agcaactcttgcaggacatcgtagagttcacactggagagaaaccttacagatgtgaagaatgcgacaaagttttcagtcgcaaatcacatcttgaaagacataggaggattcatactgg

SEQ ID NO: 650342 - DNA, 120 bp, Artificial Sequence
  ENSG00000182986_12 (sequence is synthesized)
caaatgtaaggtttgtgacaaggctttccggagtgattcacgtcttgcagaacatcagagagttcatactggagagagaccttacacatgtaatgaatgtggcaaggtttttagtacaaa

SEQ ID NO: 650343 - DNA, 120 bp, Artificial Sequence
  ENSG00000182986_13 (sequence is synthesized)
ttttagtacaaaagcgtacctcgcatgtcatcaaaaacttcatactggagagaaactttacgaatgtgaagaatgtgacaaagtttacattcgcaaatcacaccttgaaagacataggag

SEQ ID NO: 650344 - DNA, 120 bp, Artificial Sequence
  ENSG00000182986_14 (sequence is synthesized)
gattcatacaggagagaaacctcacaagtgtggtgattgtggtaaagcctttaattcaccttcacaccttattaggcatcagagaatccatactggacagaaatcttacaaatgtcatca

SEQ ID NO: 650345 - DNA, 120 bp, Artificial Sequence
  ENSG00000182986_15 (sequence is synthesized)
gtgtggcaaggtctttagtctgaggtcactccttgcagaacatcagaaaattccttttggagacaattgtttcaagtgcaatgagtatagcaaaccatcaagcattaattgacatcagag

SEQ ID NO: 650346 - DNA, 120 bp, Artificial Sequence
  ENSG00000182986_16 (sequence is synthesized)
agagtcaaatcagcattgacctgagtttgagttgacttaacattgatttcaagcattaatcgacattaaactgtttatgttaagaggattgggccaggcgtggtgtctcacacctgtaat

SEQ ID NO: 650347 - DNA, 120 bp, Artificial Sequence
  ENSG00000182986_17 (sequence is synthesized)
gcactttgagaggccaagacaggtaggtcacttgaggtcatgaatttgagaccagcctggccaacagacgggagccacttttcccagcctgtatgttcttttatttatttatttattttt

SEQ ID NO: 650348 - DNA, 120 bp, Artificial Sequence
  ENSG00000182986_18 (sequence is synthesized)
tcttttatttatttatttatttttaagatggaatcttgctctgtcgcccacgttggagtgcagtgatgtgatctcggttcactgcaacattcacctcccaggttcatgcaattctcctgc

SEQ ID NO: 650349 - DNA, 120 bp, Artificial Sequence
  ENSG00000182986_19 (sequence is synthesized)
caggcgtgagccaccacacctggcctgttttttgtttctttaacaaaaagttatagaaatttctctgggtattgtgttgaatctacatcacattcagttataatcatttagcaatattat

SEQ ID NO: 650350 - DNA, 120 bp, Artificial Sequence
  ENSG00000182986_20 (sequence is synthesized)
catttagcaatattattccattcaatatggcttgtatctcttatttgcacatgtttttatcactttgatcaatgtttgtagatttgaaggtagaaacttctcaacttttttcatttattc

SEQ ID NO: 650351 - DNA, 120 bp, Artificial Sequence
  ENSG00000182986_21 (sequence is synthesized)
ctaagtatttcttactttaagttctttagcaaatgaaagtgtttttttaattttctttttaaattgtttattgttaatgtatggaaattcaactaatttttggtgctgttattctattct

SEQ ID NO: 650352 - DNA, 120 bp, Artificial Sequence
  ENSG00000182986_22 (sequence is synthesized)
tcaaatccactgcatatgttttttagttccagttgcattttggttgactctttgtgattttctacacagaagatcatgtcatctacaaagaaatagttttacttctttctttctgatttg

SEQ ID NO: 650353 - DNA, 120 bp, Artificial Sequence
  ENSG00000182986_23 (sequence is synthesized)
gatgagtttgatttcttttgctatttcattgctctagctaggacagccagtattgattgaatagaaggggtgagagcattcttgcatcatgtgagatcctacaggaaaagcattccattt

SEQ ID NO: 650354 - DNA, 120 bp, Artificial Sequence
  ENSG00000182986_24 (sequence is synthesized)
gatttccatgatgactggatgttgaattttgtgaaatgctttttctccatgtattgagatgatgtggttttcatctttcattatgttcaagtggtatatcacattgatttgcttgactat

SEQ ID NO: 650355 - DNA, 120 bp, Artificial Sequence
  ENSG00000182986_25 (sequence is synthesized)
gttgaaccattttgcatcccagaaataagtggcacttgcatatcaacaatcctttttataacctcttgaatacagttcgctagtacaaggggtcttcaggaagttcatggaaaaatacat

SEQ ID NO: 650356 - DNA, 120 bp, Artificial Sequence
  ENSG00000182986_26 (sequence is synthesized)
attatgagaaaattgtgcatgatatcacattttttgcaccaagataaactgatacaaatccgttataacatgtctgaacagggtttggtttgaggcactcagatgggtaagacatgagtt

SEQ ID NO: 650357 - DNA, 120 bp, Artificial Sequence
  ENSG00000182986_27 (sequence is synthesized)
tgaaaagagactcaatcaaggcaatgtaaattctgctaaaactgaaacaagaagaaacatcaaatttgcgatgagaccagatgctgtggctcaggcctgtaatcccataattttcagagg

SEQ ID NO: 650358 - DNA, 120 bp, Artificial Sequence
  ENSG00000182986_28 (sequence is synthesized)
ctgagacagttgggtcacgtgggccccggtactcaagaccagcctgggcagaatggtgaaaccaccttctctacaaaaaatacataaattagctgggcattgtggcacatgtctgctggt

SEQ ID NO: 650359 - DNA, 120 bp, Artificial Sequence
  ENSG00000182986_29 (sequence is synthesized)
tcagcttctgtggagtctgcagtgggaggatggcttgagcctaggagttcgaggctgcagggagccatgatcatgccattgtactccagcatgggtgacagagacagatagtgtatcgaa

SEQ ID NO: 650360 - DNA, 120 bp, Artificial Sequence
  ENSG00000182986_30 (sequence is synthesized)
aaatgaatctggtaaagtttgggtagagggacaatgaaatcattgatgctttatgaaaaggttatggggacgattcccaaaataaatcaccagtttgtaaatggaaaacttattttaagt

SEQ ID NO: 650361 - DNA, 73 bp, Artificial Sequence
  ENSG00000182986_31 (sequence is synthesized)
aataaatcaccagtttgtaaatggaaaacttattttaagttgggacaagatgatgttgaaagtgatgcacagg

SEQ ID NO: 650362 - DNA, 120 bp, Artificial Sequence
  ENSG00000182986_32 (sequence is synthesized)
ggcagaccatccacataagttttataggtacaactgtcaaagacgacactggagaagagccaagctggatctataaggaattgcatatgagatggcacacatattcatgctgtctgaaga

SEQ ID NO: 650363 - DNA, 120 bp, Artificial Sequence
  ENSG00000182986_33 (sequence is synthesized)
ttcagtcacgttaccatatcaagctgaaaatgtcaccactatctggagagttggacatgttttattgagaatgtattttttttctctggatctgttatgaacacctttgttggcttggtt

SEQ ID NO: 650364 - DNA, 120 bp, Artificial Sequence
  ENSG00000182986_34 (sequence is synthesized)
cagtaataaatatgtgagacttttcatttaaaaaaagtcaaatgacttaattctgtattttaaattctgttttgtttgttttgtttttttgagatggagtcttctgaaaattttctcatc

SEQ ID NO: 650365 - DNA, 120 bp, Artificial Sequence
  ENSG00000182986_35 (sequence is synthesized)
ttctctaacccggttcatgacagacccttggactttactgttgtggaaaaatctatataaaacagtatcagtgtgtcaaagcattatggctgtcacaagcttgtgaaaggaaaataaaaa

SEQ ID NO: 650366 - DNA, 120 bp, Artificial Sequence
  ENSG00000182986_36 (sequence is synthesized)
ttactaagccaaagagaaaagtcaatctgggaactgcgtcagacaaacctgccttccattttattcctaaacaagatagttacaaagattttttaaaaagctacatatgcccctcccaaa

SEQ ID NO: 650367 - DNA, 120 bp, Artificial Sequence
  ENSG00000182986_37 (sequence is synthesized)
ccgggaacctcaagatctccaccctaaaatagttctgttgaatttcaccctggcgatgtaaactgagagcttatcttcacagatgtgggaaagagcccatccctctgcacacctgagtca

SEQ ID NO: 650368 - DNA, 120 bp, Artificial Sequence
  ENSG00000182986_38 (sequence is synthesized)
aatgtctatctgattgcttcccttgccctatttatgtaaaaatacagggtccctgagccagcctaaggcataagtgacttatccctcctccctgctcacatataaattgtgtatttagtg

SEQ ID NO: 650369 - DNA, 120 bp, Artificial Sequence
  ENSG00000182986_39 (sequence is synthesized)
aaaggctgatcaaagattcaaagaatgttatttgttatctacctgtgacccagaaggtccccaattccagttattccacctttccagaccggaccaatgtatatatgtactgattgctgt

SEQ ID NO: 650370 - DNA, 120 bp, Artificial Sequence
  ENSG00000182986_40 (sequence is synthesized)
ctcgtgtgtctgtaaaatgtgtgaaaccaaactgcagcctcaacaccatggacacacgtcatcaggacctcctgaggttcgtgttaattggccttagactctccctgtccccagacccag

SEQ ID NO: 650371 - DNA, 120 bp, Artificial Sequence
  ENSG00000182986_41 (sequence is synthesized)
gacgcatgtgtttcctttttcttcatttctattaaagatgggtctcattctgttggccaggcatgagagcggtgacaggatcagccctcactgaagcttcaatctcctgggttcaaggga

SEQ ID NO: 650372 - DNA, 120 bp, Artificial Sequence
  ENSG00000182986_42 (sequence is synthesized)
tcctcccacctcagcctccaaagttgctaggaccatagccaggtgccaccgcaccgggcaaatttttgtgttcctagtagagatgggctttcaccatgttgcccgagctggtcttgaatt

SEQ ID NO: 650373 - DNA, 90 bp, Artificial Sequence
  ENSG00000182986_43 (sequence is synthesized)
agatgggctttcaccatgttgcccgagctggtcttgaattccagggctcaagcgatccagccgtattggcctcccaagaccaacgtgttt

SEQ ID NO: 650374 - DNA, 120 bp, Artificial Sequence
  ENSG00000182986_44 (sequence is synthesized)
gccaaggtgggcagatcacctgagatcaagtatttgagaacagcctggctaacatggcgaatcctcgttttgaccaaaatatagaaattagcctggtgtggtggcgagtgcctgtaatcc

SEQ ID NO: 650375 - DNA, 88 bp, Artificial Sequence
  ENSG00000182986_45 (sequence is synthesized)
tttgaccaaaatatagaaattagcctttcaggagggtgaggcagaagaatggcttgaattcgggaggcggaggttgcagtgagctgag

SEQ ID NO: 650376 - DNA, 120 bp, Artificial Sequence
  ENSG00000182986_46 (sequence is synthesized)
gcaagagcgagactccatctctaaaataaaattaaagtaatataaaaaactgcttctcatgaaagctttggtataatcttacgaggtaacatcattgttttgcaactacggtatgtgttc

SEQ ID NO: 650377 - DNA, 120 bp, Artificial Sequence
  ENSG00000182986_47 (sequence is synthesized)
aaaatgttcttctttgaccccacatttcattagatatatttttaagccattttaaaattgtttttctctgaaatttattgtgtttagtttacattgaggactgcatgctttctagtctgt

SEQ ID NO: 650378 - DNA, 120 bp, Artificial Sequence
  ENSG00000182986_48 (sequence is synthesized)
atcatacattggaaacattttctagtacctgataaatgattttaggttgtttcgatgtgtacttgataaagatatcaaggaactttttctttatgctaacattaaaatttagttgaagta

SEQ ID NO: 650379 - DNA, 120 bp, Artificial Sequence
  ENSG00000182986_49 (sequence is synthesized)
acagcgcgtgagtttcgctctgttttatgtgtgcttcccagtcctgtggtgctgctataccggggacgttgagtccccacagacctggaaattgcggcccctctttctcaacccagagca

SEQ ID NO: 650380 - DNA, 120 bp, Artificial Sequence
  ENSG00000182986_50 (sequence is synthesized)
acttatgttacttgaggaagacaccaagaaggcaaagaaaaggagccagggatggctcttcctcagggatacttgactttcagagatgtggctatagagttctctttgctggagtggaaa

SEQ ID NO: 650381 - DNA, 120 bp, Artificial Sequence
  ENSG00000182986_51 (sequence is synthesized)
cgcctggaccctgcacagaacgctttatacagggctgtgatgtgggagaactacaggaacctggagtctgtgggtgaggaaaatgttcctccagacatgaagaatctgtccttgtgtatc

SEQ ID NO: 650382 - DNA, 120 bp, Artificial Sequence
  ENSG00000182986_52 (sequence is synthesized)
ttggcttttcctggttttgtattctcttttgtgattttgccccatacgtgcttttgatgtacacagctgggattccaggcacgtgccaccatgcccagcatgttattttgtatctttagt

SEQ ID NO: 650383 - DNA, 120 bp, Artificial Sequence
  ENSG00000182986_53 (sequence is synthesized)
atcaaaatttggttcaagtagcctattctattttctttccttatgtcatctgataaaatggtgagctgtgagcttctaagtaaatgtctccctcaagttcctctggttcataatattcct

SEQ ID NO: 650384 - DNA, 120 bp, Artificial Sequence
  ENSG00000182986_54 (sequence is synthesized)
tgcagatgttgaacgatgggctggattgttttggaaccttgttccagcagagcccatgtgttcatgaagaaaacatttgcttacagcttatgactaccattgcctctctttcagtgtttt

SEQ ID NO: 650385 - DNA, 85 bp, Artificial Sequence
  ENSG00000182986_55 (sequence is synthesized)
aaattgagacgtccgggctggagtgttttgggttcaagctcttctcctgcctcagcccccaagtagctgggattacaggcgcctg

SEQ ID NO: 650386 - DNA, 73 bp, Artificial Sequence
  ENSG00000182986_56 (sequence is synthesized)
gatccgcccacctcagcctcaaggttgtttcaatgtgtactttataaagatatcaaggacctattttgtttgt

SEQ ID NO: 650387 - DNA, 82 bp, Artificial Sequence
  ENSG00000182986_57 (sequence is synthesized)
gtgtgagccaccgtgcctggccaattttaggttgtttcaatgtgtactttataaagatatcaaggacctattttgtttgttt

SEQ ID NO: 650388 - DNA, 78 bp, Artificial Sequence
  ENSG00000182986_58 (sequence is synthesized)
ttcaagtgattctcctgcctcaaccttcctgagtagctgggattacaaccatgagccaccatgcctattgctcaggct

SEQ ID NO: 650389 - DNA, 120 bp, Artificial Sequence
  ENSG00000182986_59 (sequence is synthesized)
cctcccaaagtgctgtgattacaggcctcagccaccctgcctggcctccctgttttcaagagtctcactctgtccttcaggctgtgagtgcagtctcctgatcttggctcactgcaacct

SEQ ID NO: 650390 - DNA, 120 bp, Artificial Sequence
  ENSG00000182986_60 (sequence is synthesized)
agacgtccgggctggagggcagttgtgcgatcttgattcacttcaacctctgctctccgggctcaagcaattctcccacctcagcctggctggagtgcactggtgccatctcagctcact

SEQ ID NO: 650391 - DNA, 120 bp, Artificial Sequence
  ENSG00000182986_61 (sequence is synthesized)
gtgccgagaagcccagctaattttgtacttgtagtagagagcgggtttcaccacgctggccaaaattgtctcaacctcttgatctcatgatccaccgcctcaccctcccaaagtgctggg

SEQ ID NO: 650392 - DNA, 120 bp, Artificial Sequence
  ENSG00000182993_0 (sequence is synthesized)
agaagaagatagctgctaactgagtggctgacggtcctgtctctcgagttggaggcatcttgacttagttgctgggagcctgtgttggaacttatttgttggagaaatgtcttcagagtc

SEQ ID NO: 650393 - DNA, 120 bp, Artificial Sequence
  ENSG00000182993_1 (sequence is synthesized)
agaaaaggataaagagagactgattcaagctgccaaaatgttcttctttcatgtacaagatcttgcttctgtcataaacacactgactgaattgtttagccgcagtatgaatactcaaat

SEQ ID NO: 650394 - DNA, 120 bp, Artificial Sequence
  ENSG00000182993_2 (sequence is synthesized)
ccttttgatggctgtgaaaaacaatagttacattaaggatttttttgagcaaatgctcaaaatttttaaggagatgcaatctgtagtggatgcaagacatgacaaaattcaaaaggagtc

SEQ ID NO: 650395 - DNA, 120 bp, Artificial Sequence
  ENSG00000182993_3 (sequence is synthesized)
tttatgttccaaggttgcaatggccatgtgctctgtggttcagaagagtaccaatgtagaggagttgcatcagtcagctaaagaagtattcaaaagtgcccatacgccagtcatcatctc

SEQ ID NO: 650396 - DNA, 120 bp, Artificial Sequence
  ENSG00000182993_4 (sequence is synthesized)
tgtgctaaacagcagtaacatccttgggagtctggaatcttctctttcacacttgatgaaattccccatcatgaatcttcaattaagtgacttctatacagaagacaccaaagagcaatc

SEQ ID NO: 650397 - DNA, 120 bp, Artificial Sequence
  ENSG00000182993_5 (sequence is synthesized)
agatgtcaccacatctgagagaaccagaagtcctccaggttcttccaaaaccactatgatagacaccttgaaaaaactgcaggatgtactaaaaactgaggattccaaaaatcccacaaa

SEQ ID NO: 650398 - DNA, 120 bp, Artificial Sequence
  ENSG00000182993_6 (sequence is synthesized)
ttgtcaaggctatgggaccaatcttagagatcctccaaaaagcgataaagactatggaaatgaatatttctgtgtttaagaaagccagtgacaagtagggatgcaacagaaatgttcatt

SEQ ID NO: 650399 - DNA, 120 bp, Artificial Sequence
  ENSG00000182993_7 (sequence is synthesized)
tctgtcagaaaactacttaaaatcttatggtttttcatagtagtttctaagatcttttggtgccaaacatgtgctatgttagaacataagtacacaaaagtcatctggcaaaacatttac

SEQ ID NO: 650400 - DNA, 120 bp, Artificial Sequence
  ENSG00000182993_8 (sequence is synthesized)
ctgtagttttgctttattaaaataaaaagaaataattaagaaagcctgtttgaaatgtcagtcactaagaagaatatattgttgaaaaaaacaaagtggtattacatttgaggatgtttc

SEQ ID NO: 650401 - DNA, 120 bp, Artificial Sequence
  ENSG00000182993_9 (sequence is synthesized)
taaatattgtgtttcatcttaaagcataattaaaacaaccctaaagtagttcccactcttaactattctatttccagtgagaaatccaggtaaactgtaaatattatcattagatagaaa

SEQ ID NO: 650402 - DNA, 120 bp, Artificial Sequence
  ENSG00000182993_10 (sequence is synthesized)
atctaggcctgggaaacaaaataaactccatttttgtcactcatataccaatttctatatacttcagtaccttgacgatcagaagccatcactaaatattttaaatatgattcataagta

SEQ ID NO: 650403 - DNA, 120 bp, Artificial Sequence
  ENSG00000182993_11 (sequence is synthesized)
agtgagaacagtgaatgagcaataatagacttttcttgcttatgtgagtaagaccagaacagatagttcattctcacttgtctcctgaggtcttatgattagaaaatactagaggtggaa

SEQ ID NO: 650404 - DNA, 120 bp, Artificial Sequence
  ENSG00000182993_12 (sequence is synthesized)
aaatggaagtactctagcctttcacaaagaaaagactttcacaaggaaaacacttgcagaagtaggatatctgagatgtgctttatttaaagaaatgagatagggcagtctctttgtcta

SEQ ID NO: 650405 - DNA, 120 bp, Artificial Sequence
  ENSG00000182993_13 (sequence is synthesized)
agaaaagtttctcaccataacacaaagttactaccgctaaggcggccaggatggcaagaaggatcaggctcttcatggtttcgtcctgcaggccacttgtgtccttcactaatcagaaac

SEQ ID NO: 650406 - DNA, 120 bp, Artificial Sequence
  ENSG00000182993_14 (sequence is synthesized)
ttttatattttaatggtacttcacaaaatcccctgagaagaaaagaaagaggcagacccaccaaaaaaaggaaaaccccaaaggtgaaaagacaaggactgaaaacaaactcgaccctgg

SEQ ID NO: 650407 - DNA, 120 bp, Artificial Sequence
  ENSG00000182993_15 (sequence is synthesized)
attgagttacagcatcaaataccctattgctgatatggaagcgctgggtagaggagggcgtggtccctccctagggctccactcccacagacctaggtgaggacaggcatttcctgccca

SEQ ID NO: 650408 - DNA, 120 bp, Artificial Sequence
  ENSG00000182993_16 (sequence is synthesized)
ggcctgccatgcccccatcttgtgcctataaaaactcccaagaccctagcaggcagactagaggcagctgagctggacgtcgagaggaacacactgacactggcacacctgcaggccacc

SEQ ID NO: 650409 - DNA, 120 bp, Artificial Sequence
  ENSG00000182993_17 (sequence is synthesized)
acacctgcaggccaccgaccggcagaagcagaacgacacaaatttggtagggacagttagaggagagtccaggctgctgatcagccagacttcaggggaaaaccatctcccttctggctc

SEQ ID NO: 650410 - DNA, 120 bp, Artificial Sequence
  ENSG00000182993_18 (sequence is synthesized)
ctactcccattcagtaaaaccttgcactcattctccaagcctcggtgtgatctgattcttctggtacatcaaggcaagaacccagggtacagaaagccctccgtctttgcagaagataaa

SEQ ID NO: 650411 - DNA, 120 bp, Artificial Sequence
  ENSG00000182993_19 (sequence is synthesized)
gatagctgctaactgagtggctgacggtcctgtctctcgagttggaggcatcttgacttagttgctgggagcctgacaaggtcttgctcagttttctaggctagagtacaatgatgtgat

SEQ ID NO: 650412 - DNA, 120 bp, Artificial Sequence
  ENSG00000182993_20 (sequence is synthesized)
catagcccactgcagctttgcactcctggcctcaggggatcctcccaccttagcctcctgagtatctgcgataacagggatcaaggattcaacatgaactctagtcttaatagtctcaaa

SEQ ID NO: 650413 - DNA, 73 bp, Artificial Sequence
  ENSG00000182993_21 (sequence is synthesized)
ctgtaacacaccatggggtcggagcccaacaacctgcccatctgcatgctcccctagaggtctgagcagcggg

SEQ ID NO: 650414 - DNA, 120 bp, Artificial Sequence
  ENSG00000182993_22 (sequence is synthesized)
ctgcccatctgcatgctcccctagaggtctgagcagcgggacaatgaagaagcgagccacatctgcatcgcacaccctgcgagggggacaagggaacttttcctgtttcgacgggacagg

SEQ ID NO: 650415 - DNA, 120 bp, Artificial Sequence
  ENSG00000182993_23 (sequence is synthesized)
aagtgttacaggccaccatctttaattagaaaggcagtgagtgccaaaaaacaaggaatgcaagattcagactaaaaatgtgtctcattcgctaggataattgtgccaactttcgttata

SEQ ID NO: 650416 - DNA, 120 bp, Artificial Sequence
  ENSG00000182993_24 (sequence is synthesized)
agaaagtggtcaggtgtagtacagagatctggggcaatcattgcatgttggagtcccggattccaagggcttttgggaacagatttgtgagaaaagagtgaaaaggaagcaagcaggagg

SEQ ID NO: 650417 - DNA, 120 bp, Artificial Sequence
  ENSG00000182993_25 (sequence is synthesized)
atgtttatttttaataaagggaccctgccctaacttcctgaactaaaaccagtctagacttgttttttccattttacacaatgtccgtaacaacagaatacatttattaaaaccaaacaa

SEQ ID NO: 650418 - DNA, 120 bp, Artificial Sequence
  ENSG00000182993_26 (sequence is synthesized)
actgggggttgagttttggcacagaaagtcatacagaaatagaatcggctgctcttgagttggggtgagtgattgatttacaaaccagcagtagattaaggctgcactggccttaactga

SEQ ID NO: 650419 - DNA, 120 bp, Artificial Sequence
  ENSG00000182993_27 (sequence is synthesized)
actgaagttattttcattatgaagagacaatagagaggcaaaatgtctggcctggtgcctgggacatgaactagttagtctatcaattctgacctccttttccttcagttttcaaaactc

SEQ ID NO: 650420 - DNA, 120 bp, Artificial Sequence
  ENSG00000182993_28 (sequence is synthesized)
aagagattagagctaggaaggacccttatggcattttcttcataactgtgtggagaaaactgagtctcagagaagttagatgtttttgcctctgcattcacagccatagattaaagcaat

SEQ ID NO: 650421 - DNA, 120 bp, Artificial Sequence
  ENSG00000182993_29 (sequence is synthesized)
gtatcactaaattaccagacagtacctacaaatggggagatttaattttggcttctgtcggttgggaacataaatgtggcaacaattcaatttgcacacagttgagcatagattcacagc

SEQ ID NO: 650422 - DNA, 70 bp, Artificial Sequence
  ENSG00000182993_30 (sequence is synthesized)
aacaattcaatttgcacacagttgagcatagattcacagccaactcttttttttttttttttttgaaaag

SEQ ID NO: 650423 - DNA, 120 bp, Artificial Sequence
  ENSG00000182993_31 (sequence is synthesized)
gggattacaggcatgagccatggtgcccggcccacagtaaactctttagtaattggtagactctgtgtttggagattatctggcttcttccctctccttctcagccattttagggtgcct

SEQ ID NO: 650424 - DNA, 120 bp, Artificial Sequence
  ENSG00000182993_32 (sequence is synthesized)
tccctctccttctcagccattttagggtgccttcagtagtgcttcagcatttagatgcaggtaggtgtgtacttaatcaacgtttaaggaatgtctgagtccaggccaaagtcaatgtgt

SEQ ID NO: 650425 - DNA, 120 bp, Artificial Sequence
  ENSG00000182993_33 (sequence is synthesized)
atttttacatttcagaatgctttccattcctcatctcgcttaatccctacagtatacttataaggagacagaaagttaatttgagctggatgtgatggcaagtgcctattgtcccagcta

SEQ ID NO: 650426 - DNA, 67 bp, Artificial Sequence
  ENSG00000182993_34 (sequence is synthesized)
ctatgatcataccactgcactccaccttgggtgacagagtgagaccctatctcacgaaaaaaactgt

SEQ ID NO: 650427 - DNA, 120 bp, Artificial Sequence
  ENSG00000182993_35 (sequence is synthesized)
tagaagaagatagctgctaactgagtggctgacggtcctgtctctcgagttggaggcatcttgacttagttgctgggagcctgatgatgaaacagacaccaagaggttaaaagatgtact

SEQ ID NO: 650428 - DNA, 120 bp, Artificial Sequence
  ENSG00000183010_0 (sequence is synthesized)
gtgcgggtgccgcgtggcggccgcagcgctgaggggtgggtacgacccgcgcacggtagctgggttggggtcgggctccgggaatggtgggcggcggtcgccgggtggggcgcgacggta

SEQ ID NO: 650429 - DNA, 120 bp, Artificial Sequence
  ENSG00000183010_1 (sequence is synthesized)
ggtagcccagttctgggcggggtgggaacccagacgggggacccctaggcgccgggccctccctctccccgtacttttcccccttcccagtcatttcttctgcggaacctccacccctcc

SEQ ID NO: 650430 - DNA, 120 bp, Artificial Sequence
  ENSG00000183010_2 (sequence is synthesized)
agtgggtgcgggaccctaggcagcaggccaggcaccgccgctctgactgggggccccgaagcagttaacgggccggacagcaaagtggaaagttagaccagctgggaccaggggaggtgg

SEQ ID NO: 650431 - DNA, 120 bp, Artificial Sequence
  ENSG00000183010_3 (sequence is synthesized)
gcacccggctgcgggaggagcggccaggctggcactgcccccctaacttgctctcgatcctgccggtctcgtcccgcagagccggtgccatctgtgggggctttgggccaggggtctccg

SEQ ID NO: 650432 - DNA, 120 bp, Artificial Sequence
  ENSG00000183010_4 (sequence is synthesized)
gacagcatgagcgtgggcttcatcggcgctggccagctggcttttgccctggccaagggcttcacagcagcaggcgtcttggctgcccacaagataatggctagctccccagacatggac

SEQ ID NO: 650433 - DNA, 120 bp, Artificial Sequence
  ENSG00000183010_5 (sequence is synthesized)
ctggccacagtttctgctctcaggaagatgggggtgaagttgacaccccacaacaaggagacggtgcagcacagtgatgtgctcttcctggctgtgaagccacacatcatccccttcatc

SEQ ID NO: 650434 - DNA, 120 bp, Artificial Sequence
  ENSG00000183010_6 (sequence is synthesized)
ctggatgaaataggcgccgacattgaggacagacacattgtggtgtcctgcgcggccggcgtcaccatcagctccattgagaagaagctgtcagcgtttcggccagcccccagggtcatc

SEQ ID NO: 650435 - DNA, 120 bp, Artificial Sequence
  ENSG00000183010_7 (sequence is synthesized)
cgctgcatgaccaacactccagtcgtggtgcgggagggggccaccgtgtatgccacaggcacgcacgcccaggtggaggacgggaggctcatggagcagctgctgagcagcgtgggcttc

SEQ ID NO: 650436 - DNA, 120 bp, Artificial Sequence
  ENSG00000183010_8 (sequence is synthesized)
tgcacggaggtggaagaggacctgattgatgccgtcacggggctcagtggcagcggccccgcctacgcattcacagccctggatgccctggctgatgggggtgtgaagatgggacttcca

SEQ ID NO: 650437 - DNA, 120 bp, Artificial Sequence
  ENSG00000183010_9 (sequence is synthesized)
gtggggccaccatccatgccttgcatgtgctggagagtgggggcttccgctccctgctcatcaacgctgtggaggcctcctgcatccgcacacgggagctgcagtccatggctgaccagg

SEQ ID NO: 650438 - DNA, 120 bp, Artificial Sequence
  ENSG00000183010_10 (sequence is synthesized)
agcaggtgtcaccagccgccatcaagaagaccatcctggacaaggtgaagctggactcccctgcagggaccgctctgtcaccttctggccacaccaagctgctcccccgcagcctggccc

SEQ ID NO: 650439 - DNA, 120 bp, Artificial Sequence
  ENSG00000183010_11 (sequence is synthesized)
cagcgggcaaggattgacacgtcctgcctgaccaccatcctgccaccaccttctcttctcttgtcactagggggactagggggtccccaaagtggcccactttctgtggctctgatcagc

SEQ ID NO: 650440 - DNA, 120 bp, Artificial Sequence
  ENSG00000183010_12 (sequence is synthesized)
gcaggggccagccagggacatagccagggaggggccacatcacttcccactggaaatctctgtggtctgcaagtgcttcccagcccagaacaggggtggattccccaacctcaacctcct

SEQ ID NO: 650441 - DNA, 120 bp, Artificial Sequence
  ENSG00000183010_13 (sequence is synthesized)
ttcttctctgctcccaaaccatgtcaggaccaccttcctctagagctcgggagcccggagggtcttcacccactcctactccagtatcagctggcacgggctccttcctgagagcaaagg

SEQ ID NO: 650442 - DNA, 120 bp, Artificial Sequence
  ENSG00000183010_14 (sequence is synthesized)
tcaaggaccccctctgtgaaggctcagcagaggtgggatcccacgccccctcccggcccctccctgccctccattcagggagaaacctctccttcccgtgtgagaagggccagagggtcc

SEQ ID NO: 650443 - DNA, 120 bp, Artificial Sequence
  ENSG00000183010_15 (sequence is synthesized)
aggcatcccaagtccagcgtgaagggccacagcccctcttggctgccaagcacgcagatcccatggacatttggggaaagggctccttgggctgctggtgaacttctgtggccaccacct

SEQ ID NO: 650444 - DNA, 120 bp, Artificial Sequence
  ENSG00000183010_16 (sequence is synthesized)
cctgctcctgacctccctgggagggtgctatcagttctgtcctggccctttcagttttataagttggtttccagcccccagtgtcctgacttctgtctgccacatgaggagggaggccct

SEQ ID NO: 650445 - DNA, 120 bp, Artificial Sequence
  ENSG00000183010_17 (sequence is synthesized)
gcctgtgtgggagggtggttactgtgggtggaatagtggaggccttcaactgattagacaaggcccgcccacatcttggagggcatctgccttactgattaaaatgtcaatgtaatctaa

SEQ ID NO: 650446 - DNA, 120 bp, Artificial Sequence
  ENSG00000183010_18 (sequence is synthesized)
ggccacggtctccatgctctgctcctctggccgcagcagaaccctgtgaaccccaggcaatgacagcaggatcctgaagcccatgcaggctctgaaccacgcggccatccagaaggggcg

SEQ ID NO: 650447 - DNA, 120 bp, Artificial Sequence
  ENSG00000183010_19 (sequence is synthesized)
ccggccgcgcgcccagggacgccagctggacgcgtccgtgtccgggtggcccaagacaaagccctgcgtggagggcccctcacaggccccaatcgggccgccccctccgcccgcgtcctc

SEQ ID NO: 650448 - DNA, 120 bp, Artificial Sequence
  ENSG00000183010_20 (sequence is synthesized)
gggcctgggctgcccctttgaccggctggtggtggtgtacaccttcctggctgtgctcctgtacctcagcgccgccgtgatctggccagtcttctgtttcgatcccaagtacggtgagcc

SEQ ID NO: 650449 - DNA, 120 bp, Artificial Sequence
  ENSG00000183010_21 (sequence is synthesized)
caaacggccccccaactgtgctcggggcagctgtccctgggacagccagctggtggtggccatcttcacctacgtcaacctgctcctgtacgtcgttgacctcgcctactcccagaggat

SEQ ID NO: 650450 - DNA, 120 bp, Artificial Sequence
  ENSG00000183011_0 (sequence is synthesized)
aattgagttgcgccgctttcaggagttgcggggtggggcagagaacgaatacgctccgttttaattcagtggcctgggctacatgggatatttaggacagactatctctctgagacagaa

SEQ ID NO: 650451 - DNA, 120 bp, Artificial Sequence
  ENSG00000183011_1 (sequence is synthesized)
aaacaagggaggaggcagtatgaaagaatgtattctcgctaaattccagtttctaaaggatgtgtaagaaaccagaggtaaaggtctcgcgatatcttaagacatccggcgtagtacgct

SEQ ID NO: 650452 - DNA, 120 bp, Artificial Sequence
  ENSG00000183011_2 (sequence is synthesized)
tcagtgagccacagcgctagagaagtaggagaagctcgcgagatctgtgccgttgccgaggagactaggagggggaggagaggggatctcgcgaaaggaaagaggtcgggagcgctcgcg

SEQ ID NO: 650453 - DNA, 120 bp, Artificial Sequence
  ENSG00000183011_3 (sequence is synthesized)
acccaacctgaaaggtgcttaggaagttgaaaggcccagaggaggcctccgggcaaatggccggagctggaccgaccatgctgctacgagaagagaatggctgttgcagtcggcgtcaga

SEQ ID NO: 650454 - DNA, 120 bp, Artificial Sequence
  ENSG00000183011_4 (sequence is synthesized)
gcagctccagtgctggggattcggacggagagcgcgaggactcggcggctgagcgcgcccgacagcagctagaggcgctgctcaacaagactatgcgcattcgcatgacagatggacgga

SEQ ID NO: 650455 - DNA, 120 bp, Artificial Sequence
  ENSG00000183011_5 (sequence is synthesized)
cactggtcggctgcttcctctgcactgaccgtgactgcaatgtcatcctgggctcggcgcaggagttcctcaagccgtcggattccttctctgccggggagccccgtgtgctgggcctgg

SEQ ID NO: 650456 - DNA, 120 bp, Artificial Sequence
  ENSG00000183011_6 (sequence is synthesized)
ccatggtacccggacaccacatcgtttccattgaggtgcagagggagagtctgaccgggcctccgtatctctgaccacgatggcgcttacctttcagacttcattaaacttatgaccgaa

SEQ ID NO: 650457 - DNA, 120 bp, Artificial Sequence
  ENSG00000183011_7 (sequence is synthesized)
ctcccggaccgccgcggggccacgggcccgagccccggattcgcgctccggattcgcctcggctcggccgcgcgtatatttgccttccctccatgatctccaacactatccgataaagta

SEQ ID NO: 650458 - DNA, 120 bp, Artificial Sequence
  ENSG00000183011_8 (sequence is synthesized)
gaagcaactgaggtaccgtgaaagagaaaggagctggaactgagaaaaagcagagttctcacctccagtgtgtgctcctgcgacgtgagcgtgttaatgatgcggatgctccgggtcttg

SEQ ID NO: 650459 - DNA, 120 bp, Artificial Sequence
  ENSG00000183011_9 (sequence is synthesized)
gcagacagccgccccacctcataatacgacccctgccaccagggcttcccaaaatcgttggcccagtccgaacagggcagctgaggcggaacgtgcacaaagcggccccgcggggtgcag

SEQ ID NO: 650460 - DNA, 120 bp, Artificial Sequence
  ENSG00000183011_10 (sequence is synthesized)
atatcctggcctgcaacttccacgatgggtttcagcagcaggttcccttgaaaagagcagcacagccactgtcaatgccagcccttcgagaaccaggcaaacgcgcgcgtgcacacacac

SEQ ID NO: 650461 - DNA, 120 bp, Artificial Sequence
  ENSG00000183011_11 (sequence is synthesized)
acactccggccccggcccaacgtgtggcccttacccttgtattcctgtgccaatgacgttaggtcgtacacgcgtcccagtttctaaaggatgtgtaagaaaccagaggtaaaggtctcg

SEQ ID NO: 650462 - DNA, 120 bp, Artificial Sequence
  ENSG00000183011_12 (sequence is synthesized)
gtactcactactactacgacctccgtcgcgtccgggagccgaggggagagcgtttatccgctgacatggaaaccattgtccttttccggccaccgtccactgagataaatatcaggggcg

SEQ ID NO: 650463 - DNA, 120 bp, Artificial Sequence
  ENSG00000183011_13 (sequence is synthesized)
gatggagggggtggggaactgcagctcccggcagcctctgggctttgtgtgagtgccccgcgggctgccgggagctgtggttccgcgggcgggcagcctgggctgcgcggtctgagcgct

SEQ ID NO: 650464 - DNA, 80 bp, Artificial Sequence
  ENSG00000183018_0 (sequence is synthesized)
gcagcgagctgagcggtggcagcgccgcagccggggccggagcgcaggagccgacggggcccgaccaggatggtgcagtg

SEQ ID NO: 650465 - DNA, 80 bp, Artificial Sequence
  ENSG00000183018_1 (sequence is synthesized)
ggccggcatgatgtgcctggaatgcgcctcggcggcggcgggcggcgcggaggaggaggaggcggacgcggagcggcggc

SEQ ID NO: 650466 - DNA, 80 bp, Artificial Sequence
  ENSG00000183018_2 (sequence is synthesized)
ttgctgcggggcgcggggcgcgggcggcgctggagtctcggccgcgggcgatgaggtgcagacgctgtcgggcagcgtaa

SEQ ID NO: 650467 - DNA, 120 bp, Artificial Sequence
  ENSG00000183018_3 (sequence is synthesized)
gacgctgtcgggcagcgtaaggcgggccccgaccggaccccccggcacccccggcacccccggctgcgcagctactgcaaagggccccggcgctcagcagcccaaaccggccagcttggg

SEQ ID NO: 650468 - DNA, 120 bp, Artificial Sequence
  ENSG00000183018_4 (sequence is synthesized)
ccgccatcctcagcttgggcaacgtgctcaactacctggacaggtacaccgtggcaggcgtccttctggacatccagcagcactttggggtcaaggaccgaggcgccggcctgctgcagt

SEQ ID NO: 650469 - DNA, 120 bp, Artificial Sequence
  ENSG00000183018_5 (sequence is synthesized)
cagtgttcatctgtagcttcatggtggctgcccccatcttcggctacctgggcgaccgcttcaacaggaaggtgattctcagctgcggcattttcttctggtcggccgtcaccttctcca

SEQ ID NO: 650470 - DNA, 120 bp, Artificial Sequence
  ENSG00000183018_6 (sequence is synthesized)
gctccttcattccccagcagtacttctggctgctggtcctgtcccgggggctggtgggcatcggggaggccagctactccaccatcgcccccactatcattggcgacctcttcaccaaga

SEQ ID NO: 650471 - DNA, 120 bp, Artificial Sequence
  ENSG00000183018_7 (sequence is synthesized)
acacgcgtacgctcatgctgtccgtcttctacttcgccatcccactgggcagtggcctgggctacattactggctccagcgtgaagcaggcagccggagactggcactgggcattgcggg

SEQ ID NO: 650472 - DNA, 120 bp, Artificial Sequence
  ENSG00000183018_8 (sequence is synthesized)
tgtcccctgtcctgggcatgatcacaggaacactcatcctcattctggtcccagccactaaaaggggtcatgccgaccagctcggggaccagctcaaggcccggacctcatggctccgag

SEQ ID NO: 650473 - DNA, 120 bp, Artificial Sequence
  ENSG00000183018_9 (sequence is synthesized)
atatgaaggccctgattcgaaaccgcagctacgtcttctcctccctggccacgtcggctgtctccttcgccacgggggccctgggcatgtggatcccgctctacctgcaccgcgcccaag

SEQ ID NO: 650474 - DNA, 120 bp, Artificial Sequence
  ENSG00000183018_10 (sequence is synthesized)
ttgtgcagaagacagcagagacgtgcaacagcccgccctgtggggccaaggacagcctcatctttggggccatcacctgctttacgggatttctgggcgtggtcacgggggcaggagcca

SEQ ID NO: 650475 - DNA, 120 bp, Artificial Sequence
  ENSG00000183018_11 (sequence is synthesized)
cgcgctggtgccgcctgaagacccagcgggccgacccactggtgtgtgccgtgggcatgctgggctctgccatcttcatctgcctgatcttcgtggctgccaagagcagcatcgtaggag

SEQ ID NO: 650476 - DNA, 120 bp, Artificial Sequence
  ENSG00000183018_12 (sequence is synthesized)
cctatatctgtatcttcgtcggggagacgctgctgttttctaactgggccatcactgcagacatcctcatgtacgtggtcatccccacgcggcgcgccactgccgtggccttgcagagct

SEQ ID NO: 650477 - DNA, 120 bp, Artificial Sequence
  ENSG00000183018_13 (sequence is synthesized)
tcacctcccacctgctgggggacgccgggagcccctacctcattggctttatctcagacctgatccgccagagcactaaggactccccgctctgggagttcctgagcctgggctacgcgc

SEQ ID NO: 650478 - DNA, 120 bp, Artificial Sequence
  ENSG00000183018_14 (sequence is synthesized)
ctcgccactgcgctcttcttcgtcagcgaccgcgccagggctgagcagcaggtgaaccagctggcgatgccgcccgcatctgtgaaagtctgaggtggtgccattgggacaatgaagaac

SEQ ID NO: 650479 - DNA, 120 bp, Artificial Sequence
  ENSG00000183018_15 (sequence is synthesized)
ccacactcccacctcgtctgggaggtgtcctacagcgtccgggaccggctgggctgccccaaagctttctgtgtgatccacggctaggcacccaccctctctggcccaggcctgctgagt

SEQ ID NO: 650480 - DNA, 120 bp, Artificial Sequence
  ENSG00000183018_16 (sequence is synthesized)
ggccctggcatcaagaagaggctgtgtcctcagttaccctggaaggatgtgtgtgttggagccacacggttggacaggttcccagccctaggtttgggccgcagggcccctggggccaag

SEQ ID NO: 650481 - DNA, 120 bp, Artificial Sequence
  ENSG00000183018_17 (sequence is synthesized)
gaagaagacagccccaagtgggtgtccggggagagcctggcctgccaccagcttatgtgatcttgggcaagtccctgccctccctggaacgaagggccagggggctggactttcccacac

SEQ ID NO: 650482 - DNA, 120 bp, Artificial Sequence
  ENSG00000183018_18 (sequence is synthesized)
aacttgctgggcaaagcacgatctgcagctttgaagactcaacagaccctggaccatacggagagcaggtggcccaggcctcagggcggcagtcccggctttgaggctcacgcgagggcc

SEQ ID NO: 650483 - DNA, 120 bp, Artificial Sequence
  ENSG00000183018_19 (sequence is synthesized)
tggtatgcagggaccactgctcagctgggcctcggaccttggggatattggacgcaacctggcaaatgaagctgggcgcccaagtctctgggtactccctggaggacactgtctcactgt

SEQ ID NO: 650484 - DNA, 120 bp, Artificial Sequence
  ENSG00000183018_20 (sequence is synthesized)
ctcgggttggctcccagcctggaggtcccagatggggactgttctgacaagctggcatcaccaggggtgaaggccctggctgcagctgtacaccacctgtgcccccaggctcaaggtctc

SEQ ID NO: 650485 - DNA, 120 bp, Artificial Sequence
  ENSG00000183018_21 (sequence is synthesized)
tggcaggtgcacaccagcccaactctgcagggcttctctccctgccaccaccccccaagccaggaccccactccttccccgaggctgagctgagccttttccaggggcagggcccaggag

SEQ ID NO: 650486 - DNA, 120 bp, Artificial Sequence
  ENSG00000183018_22 (sequence is synthesized)
accattcccagaatccatggggcagtagccagggctccggctgctggaggaagcagctatccacaaagcttcctgccccagagctgaggctgaggccccgggagaggcggcccctaccca

SEQ ID NO: 650487 - DNA, 120 bp, Artificial Sequence
  ENSG00000183018_23 (sequence is synthesized)
aacactggctgctggcattccaccaagtgaccccaggggggggccaggccttcgatcacccacctcccatccatgcacacaccaggatgcagctgccaacttcacaccagccccaacccg

SEQ ID NO: 650488 - DNA, 120 bp, Artificial Sequence
  ENSG00000183018_24 (sequence is synthesized)
ctttgggggagcttagccccctgcgtcacccactccctgcacttctgctgcaatcaaggtggttctggtgcgggggtggggtggggggtgaggccttgtggccaatgggggaccccccaa

SEQ ID NO: 650489 - DNA, 120 bp, Artificial Sequence
  ENSG00000183018_25 (sequence is synthesized)
gagccagcttggacaatgctcttcttgccccttagttactggctggctgtggcttcagtggtgtgtaagcaggtggaatactcacccaccaagctctggggtaccccgagggcctgacaa

SEQ ID NO: 650490 - DNA, 120 bp, Artificial Sequence
  ENSG00000183018_26 (sequence is synthesized)
gaggatggggtgggggtggcatcctccaaagaccagcctccacccccactccagcctcagcggggccccagcgatgttttcttgttgtacaagaaccaggtccgagtgttgcctcctctt

SEQ ID NO: 650491 - DNA, 120 bp, Artificial Sequence
  ENSG00000183018_27 (sequence is synthesized)
ccttccggaagccaaactgctcctttattttttagagctgctgattgtgaatctcagagtcttaagagagaagccaaatatattcctcttgtaaatgaagaaataaacctatttaaatca

SEQ ID NO: 650492 - DNA, 120 bp, Artificial Sequence
  ENSG00000183018_28 (sequence is synthesized)
ccatctccccctggggctgacgaggtccctgcccagcacctccggtcagctggcccccacgacacgatgtgccagagcagtgcccgggcccggcccccgctgatgcaccaccctgacccc

SEQ ID NO: 650493 - DNA, 120 bp, Artificial Sequence
  ENSG00000183018_29 (sequence is synthesized)
ttcttcctcgccactgcgctcttcttcgtcagcgaccgcgccagggctgagcagcagtgagtgggggggaggggaggccctgctgcaccgccgggaagcagggaccgtgatagccaccgt

SEQ ID NO: 650494 - DNA, 120 bp, Artificial Sequence
  ENSG00000183018_30 (sequence is synthesized)
gagccctgccctggggtggggcggggagggtacagacctcccatgcactcagtgcacccactggttgctggggtccagccctgaggcccagtgccagggtcagcctggagctgtgggagg

SEQ ID NO: 650495 - DNA, 120 bp, Artificial Sequence
  ENSG00000183018_31 (sequence is synthesized)
ccacgggggtgtctggtggatccagacttgggtttgtctctggacttagtggttttcaaagctggggcccctccccttcctcttactttctgacttctttctcctttcctctttactcct

SEQ ID NO: 650496 - DNA, 120 bp, Artificial Sequence
  ENSG00000183018_32 (sequence is synthesized)
gcccctacctcattggctttgtgagtagccccggggtggggctggccagggcaggctgggggactgcaggagggctctgccctgacatccacccccaaatcctcgcagatctcagacctg

SEQ ID NO: 650497 - DNA, 120 bp, Artificial Sequence
  ENSG00000183019_0 (sequence is synthesized)
ggggtggagctgaggggtggagctgaggctggagggaggaaggtgtggggggacccaggggtcctgtctccaagcctggttgctcttacgcgaaaagttgggacactgaggtgtcacagc

SEQ ID NO: 650498 - DNA, 120 bp, Artificial Sequence
  ENSG00000183019_1 (sequence is synthesized)
ttctcttttgaaatggagaggaggtaggagggtgaggtccatccaggtagacacagacacacacagagaccacagcttcctgtaacatttccgagtgtcgaattccatctcccggtctag

SEQ ID NO: 650499 - DNA, 120 bp, Artificial Sequence
  ENSG00000183019_2 (sequence is synthesized)
aggtttttcttcttggtccttcctgagacctcttggctcccaagagcctcttgatcggggcaggaatgagggtgccccagggtgcgagagtcgtggatccctgaaaagaggaggctgctc

SEQ ID NO: 650500 - DNA, 120 bp, Artificial Sequence
  ENSG00000183019_3 (sequence is synthesized)
cccctctttcttccccccacctccagatttcctcatctgcccacaccttccggtgggcggggacgtgtatggacaaatttgcgggctggggaccatggaagtggaggaaatctacaagca

SEQ ID NO: 650501 - DNA, 120 bp, Artificial Sequence
  ENSG00000183019_4 (sequence is synthesized)
ccaggaagtcaagatgcaagcaccagccttcagggacaagaaacagggggtctcagccaagaatcaaggtgcccatgacccagactatgagaatatcaccttggccttcaaaaatcagga

SEQ ID NO: 650502 - DNA, 120 bp, Artificial Sequence
  ENSG00000183019_5 (sequence is synthesized)
ccatgcaaagggtggtcattcacgacccacgagccaagtcccagcccagtgcaggccgccctcagactccacccaggtcccctgctggttgtacagagccatcctgagcctgtacatcct

SEQ ID NO: 650503 - DNA, 120 bp, Artificial Sequence
  ENSG00000183019_6 (sequence is synthesized)
cctggccctggcctttgtcctctgcatcatcctgtcagccttcatcatggtgaagaatgctgagatgtccaaggagctgctgggctttaaaagggagctttggaatgtctcaaactccgt

SEQ ID NO: 650504 - DNA, 120 bp, Artificial Sequence
  ENSG00000183019_7 (sequence is synthesized)
gcatcaccatggtcaggagcaagattgatagattagagacgacattagcaggcataaaaaacattgacacaaaggtacagaaaatcttggaggtgctgcagaaaatgccacagtcctcac

SEQ ID NO: 650505 - DNA, 120 bp, Artificial Sequence
  ENSG00000183019_8 (sequence is synthesized)
ctcaataaatgagaggacattgtggcagccaaagccacaacttggaagatggggctgcacctgccaacgaagacgggaaatgaccccccccccccagcctagtgtgaacctgcccctcgt

SEQ ID NO: 650506 - DNA, 120 bp, Artificial Sequence
  ENSG00000183019_9 (sequence is synthesized)
cccacgtatagaaaaacctcgagtcatggtgaatgagtgtctcggagttgctcgtgtgtgtgtacacctgcgtgcgtgtgtgtgcgtgtgtgcgcgtgtgttcgtgtatgtgcgtgtgtg

SEQ ID NO: 650507 - DNA, 120 bp, Artificial Sequence
  ENSG00000183019_10 (sequence is synthesized)
cgtgcgcgtgtgtgtgcattttgcaaagggtggacatttcagtgtatctcccagaaaggtgatgaatgaataggactgagagtcacagtgaatgtggcatgcatgcctgtgtcatgtgac

SEQ ID NO: 650508 - DNA, 120 bp, Artificial Sequence
  ENSG00000183019_11 (sequence is synthesized)
atatgtgagtctcggcatgtcacggtgggtggctgtgtctgagcacctccagcagatgtcactctgagtgtgggtgttggtgacatgcattgcacgggcctgtctccctgtttgtgtaaa

SEQ ID NO: 650509 - DNA, 120 bp, Artificial Sequence
  ENSG00000183019_12 (sequence is synthesized)
catactagagtatactgcggcgtgttttctgtctacccatgtcatggtgggggagatttatctccgtacatgtgggtgtcgccatgtgtgccctgtcactatctgtggctgggtgaacgg

SEQ ID NO: 650510 - DNA, 120 bp, Artificial Sequence
  ENSG00000183019_13 (sequence is synthesized)
ctgtgtcattatgagtgtgccgagttatgccaccctgtgtgctcagggcacatgcacacagacatttatctctgcactcacattttgtgacttatgaagataaataaagtcaagggaaaa

SEQ ID NO: 650511 - DNA, 120 bp, Artificial Sequence
  ENSG00000183019_14 (sequence is synthesized)
agatcgctgagggtggctggtggtggcagtgttgttgacgatgatgacaagctgcatgaccacagctgctgatggttttgagaggagcgaggtgtccatggtgttagagacagtgaggat

SEQ ID NO: 650512 - DNA, 120 bp, Artificial Sequence
  ENSG00000183020_0 (sequence is synthesized)
ggctcctccgcggcggtgacggcgaccgcactccccgcttcccgctccccgcgctcctccgcccgggtccgccagccgaggccgctcccgagcgtcggaagatgccggccgtgtccaagg

SEQ ID NO: 650513 - DNA, 120 bp, Artificial Sequence
  ENSG00000183020_1 (sequence is synthesized)
gccgctcccgagcgtcggaagatgccggccgtgtccaagggggacgggatgcggggcctggcggtcttcatctcggatatccgcaactgtaaaagtaaagaagcagaaataaaaaggata

SEQ ID NO: 650514 - DNA, 120 bp, Artificial Sequence
  ENSG00000183020_2 (sequence is synthesized)
aacaaggaactggcaaatatcagatcaaaatttaaaggtgacaaggctcttgatggctatagtaaaaaaaagtacgtctgcaagttgctcttcatctttctccttggtcatgacattgac

SEQ ID NO: 650515 - DNA, 120 bp, Artificial Sequence
  ENSG00000183020_3 (sequence is synthesized)
tttggacacatggaggctgtgaacctgctgagttcaaacagatacacggaaaagcagatcggctaccttttcatctctgtgttggtgaactcaaacagtgagctgatccgcctgatcaac

SEQ ID NO: 650516 - DNA, 120 bp, Artificial Sequence
  ENSG00000183020_4 (sequence is synthesized)
aacgccatcaagaatgacctggccagccgcaaccccaccttcatgggcctggccctgcactgcatcgccagcgtgggcagccgggagatggccgaggccttcgccggggagatccctaag

SEQ ID NO: 650517 - DNA, 120 bp, Artificial Sequence
  ENSG00000183020_5 (sequence is synthesized)
gtcctcgtagccggagacactatggacagcgtgaagcagagcgcggccctgtgcttgctgcgcctgtacaggacgtcccccgatcttgtccccatgggcgactggacatcccgagtggtg

SEQ ID NO: 650518 - DNA, 120 bp, Artificial Sequence
  ENSG00000183020_6 (sequence is synthesized)
cacctgctcaatgaccagcacttgggtgtggtaactgcagccacaagtctgatcaccactttagcacagaagaacccagaagagtttaaaacctccgtgtctctggctgtctctaggcta

SEQ ID NO: 650519 - DNA, 120 bp, Artificial Sequence
  ENSG00000183020_7 (sequence is synthesized)
agcagaatcgtgacgtctgcatccacagatctccaggattacacttactattttgtcccggctccctggctgtctgtcaaactgctgagactgctgcagtgctacccacccccagaccct

SEQ ID NO: 650520 - DNA, 120 bp, Artificial Sequence
  ENSG00000183020_8 (sequence is synthesized)
gcagtgcgaggccgcctgactgagtgcctggagaccatcctgaacaaagcccaagaaccgcccaagtcgaagaaggtccagcactccaacgcgaagaatgccgtgctcttcgaggccatc

SEQ ID NO: 650521 - DNA, 120 bp, Artificial Sequence
  ENSG00000183020_9 (sequence is synthesized)
agcttaatcattcaccatgacagtgagccgaacctgctcgtccgtgcctgcaaccagttgggccagtttctgcagcaccgcgagaccaacctgcgctacctggccctggagagcatgtgc

SEQ ID NO: 650522 - DNA, 120 bp, Artificial Sequence
  ENSG00000183020_10 (sequence is synthesized)
acgctggccagctctgagttctcccatgaggctgtcaagacgcacatcgagacggtcatcaacgccctgaagactgagcgggacgtgagcgtgcggcagcgggccgtggacctcctctac

SEQ ID NO: 650523 - DNA, 120 bp, Artificial Sequence
  ENSG00000183020_11 (sequence is synthesized)
gccatgtgcgaccgcagcaacgccccacagatcgtggccgagatgctgagctatctggagacagctgactactccatccgagaagagattgtgctgaaggtcgccatcctggctgagaag

SEQ ID NO: 650524 - DNA, 120 bp, Artificial Sequence
  ENSG00000183020_12 (sequence is synthesized)
tacgcggtggactacacctggtatgtggataccatcttgaacttgatccgaattgctggtgattacgtgagtgaagaggtgtggtaccgagtcattcagatcgtcatcaaccgggacgac

SEQ ID NO: 650525 - DNA, 120 bp, Artificial Sequence
  ENSG00000183020_13 (sequence is synthesized)
gtgcagggctacgcggccaagactgtgttcgaggctcttcaggctcccgcgtgccacgagaacctggtcaaagtgggcggctacatcctgggggagtttggaaacttgatagctggagac

SEQ ID NO: 650526 - DNA, 120 bp, Artificial Sequence
  ENSG00000183020_14 (sequence is synthesized)
ccgagatccagcccgctgatccagttccacctgctgcactccaagttccacctgtgcagcgtccccacccgcgcgctgctcctgtccacctacatcaagttcgtgaacctcttcccggag

SEQ ID NO: 650527 - DNA, 120 bp, Artificial Sequence
  ENSG00000183020_15 (sequence is synthesized)
gtgaagcccaccatccaggacgtgctgcgcagcgacagccagctcaggaacgcagacgtggagctgcagcagcgtgctgtggagtacctgcggctcagcaccgtggccagcaccgacatt

SEQ ID NO: 650528 - DNA, 120 bp, Artificial Sequence
  ENSG00000183020_16 (sequence is synthesized)
ctggcgaccgtgctggaggagatgcccccattcccggagcgggagtcctccatcttggcaaagctcaagaagaagaagggccccagcacggtgacagacctggaggacaccaagcgggac

SEQ ID NO: 650529 - DNA, 120 bp, Artificial Sequence
  ENSG00000183020_17 (sequence is synthesized)
aggagtgtggacgtgaacgggggtcctgagcctgccccagccagtaccagcgccgtgtctacgccttctccgtcggcagacctgctgggtctcggggctgccccccctgcccccgcgggc

SEQ ID NO: 650530 - DNA, 120 bp, Artificial Sequence
  ENSG00000183020_18 (sequence is synthesized)
cccccaccctcctccggcggcagcgggctgctcgtggacgtgttctcagactcggcctctgtggtcgcgcctctcgctcctggctccgaagacaactttgccaggtttgtttgtaaaaac

SEQ ID NO: 650531 - DNA, 120 bp, Artificial Sequence
  ENSG00000183020_19 (sequence is synthesized)
gaaaaccagctgcttcaaattggacttaagtctgaatttcggcagaatttaggtcggatgtttatcttttatggtaataagacctccacgcagttcctaaactttaccccaacactaatc

SEQ ID NO: 650532 - DNA, 120 bp, Artificial Sequence
  ENSG00000183020_20 (sequence is synthesized)
tgttcagacgaccttcagcctaacctgaacctgcagaccaagcccgtggacccgaccgtggaggggggcgcgcaggtgcagcaggtggtcaacatagagtgcgtgtccgacttcacggag

SEQ ID NO: 650533 - DNA, 120 bp, Artificial Sequence
  ENSG00000183020_21 (sequence is synthesized)
gcgccagtcctcaacattcagttcaggtatgggggcaccttccagaacgtgtctgtgcagctgcccatcactctcaacaaattcttccagccgacagaaatggcttctcaggatttcttt

SEQ ID NO: 650534 - DNA, 120 bp, Artificial Sequence
  ENSG00000183020_22 (sequence is synthesized)
caacgttggaagcagttgagcaatccacagcaggaagtgcagaacatcttcaaagcaaagcacccaatggacacagaagtcaccaaagccaagatcattggatttggttctgcacttctt

SEQ ID NO: 650535 - DNA, 120 bp, Artificial Sequence
  ENSG00000183020_23 (sequence is synthesized)
gaagaagttgatcctaatcctgcgaatttcgtgggagctggaatcatccacacgaaaaccacccagattggatgcctgctgcgcttggagccgaacctgcaagcccagatgtaccggctc

SEQ ID NO: 650536 - DNA, 120 bp, Artificial Sequence
  ENSG00000183020_24 (sequence is synthesized)
acgctgcgcacaagtaaggaagccgtttctcagagattatgtgaattgctctcagcgcagttttagtcctgaggatggaagaccaggctcgtgtgtcttgtgttgtcttcgtctgtgccg

SEQ ID NO: 650537 - DNA, 120 bp, Artificial Sequence
  ENSG00000183020_25 (sequence is synthesized)
tttgtcttcgtggccatcctgcagatgagcaccgtgtccagtgccacagcacaaggcgcctccccgccccgccgccccacacctctcccctttgggctggacgggaacacacgtgtgtgg

SEQ ID NO: 650538 - DNA, 120 bp, Artificial Sequence
  ENSG00000183020_26 (sequence is synthesized)
ctcaggaggaaaagctcagcctggactgtggcagccacggcagaaggtggatcttgggatcaatttttataaaaatcgagacagttctgtggttaaatctacaaattaaagggaaattag

SEQ ID NO: 650539 - DNA, 120 bp, Artificial Sequence
  ENSG00000183020_27 (sequence is synthesized)
aagttggcgtgaacgtggcgtttgtgggagtgtcactgagatggcccgtgctgccgcccaccccgcctcggagcctctgggagcagcagtgccactgtgcatggcgtgggctgagccttg

SEQ ID NO: 650540 - DNA, 120 bp, Artificial Sequence
  ENSG00000183020_28 (sequence is synthesized)
gtgtgtggccgtcctggtggctgcacacctggcgtcgtcctgggcccttgggaggagcacagctgaccctggttttgctgcagtcccagctggactgttttcccaggcaggattttaatc

SEQ ID NO: 650541 - DNA, 120 bp, Artificial Sequence
  ENSG00000183020_29 (sequence is synthesized)
tagaatttagaaacatttgtatttgtaatgacttctggcaaaagcacgtgtcctggccggatgtaactgttctcctttcccagctcctgtttgtgaagggcgtctgttatgctcctgcag

SEQ ID NO: 650542 - DNA, 120 bp, Artificial Sequence
  ENSG00000183020_30 (sequence is synthesized)
tcgccgaggccttggatgtgcagccaggggaggagcgtcctgccggccccgcagggcccccaggactccagggtaaagtgtgggccggtggcgcaagactcagaggtgtgctcgtctctt

SEQ ID NO: 650543 - DNA, 120 bp, Artificial Sequence
  ENSG00000183020_31 (sequence is synthesized)
tcctgtcagagtgggcgtccccaggccacggtgcaggcctgagtccttccaccggccccgtccagtcgtccctggaggggctgtggaggagggacgcctctgtgtggtcaggaagtgaag

SEQ ID NO: 650544 - DNA, 120 bp, Artificial Sequence
  ENSG00000183020_32 (sequence is synthesized)
gggccattggccgcatgccatgtgccacctgcggcttgtgtctcacctgtcatctggactcagcacccaggctgcacgtctgacacctgagaggcgagagagtggggccggcctaggagc

SEQ ID NO: 650545 - DNA, 120 bp, Artificial Sequence
  ENSG00000183020_33 (sequence is synthesized)
caaggctggggccttgcgctctgtccccaggatggtggccttgtttgtcctaaacacacccagcacaggttctggcttcctgacatgctgtggaggcagggagggtgggtggccacatgt

SEQ ID NO: 650546 - DNA, 120 bp, Artificial Sequence
  ENSG00000183020_34 (sequence is synthesized)
gcttgagggttttcaccctggccctcagttgcctgctgtgcgggtccctggggcagctgcaggggctcatggacccatcagggtctccacagctcccctgcagtgtgtgcaccccacaat

SEQ ID NO: 650547 - DNA, 120 bp, Artificial Sequence
  ENSG00000183020_35 (sequence is synthesized)
gtctgcggctcttcttccggcgtgtcgggctttgatcacagcatagccacgtcagtggcgtgcgcctctcgcacaggccattctgggtctggtggtgccaggtgccgtgacacgccgtgc

SEQ ID NO: 650548 - DNA, 120 bp, Artificial Sequence
  ENSG00000183020_36 (sequence is synthesized)
tgggcttgtgctgcagctgggtggtgtggccctcattctcatgttccagctgctgggcagtgctctgcctgtgtgctgcgcctgcaggctgcgtgtgctgccgtggatctcctgcatccc

SEQ ID NO: 650549 - DNA, 120 bp, Artificial Sequence
  ENSG00000183020_37 (sequence is synthesized)
ttgacccctcccgccatcagaggaaaggctgctccccgaggcaccgcttccctgtgcggcgctgcagaggggccctcagtgtggcactcctcgtcaaagaaaaataaaggctagaactgc

SEQ ID NO: 650550 - DNA, 61 bp, Artificial Sequence
  ENSG00000183020_38 (sequence is synthesized)
atacaaaaattagccaggcgtgttggcgaacgcctgtaatttagctactcaggaggctgag

SEQ ID NO: 650551 - DNA, 90 bp, Artificial Sequence
  ENSG00000183020_39 (sequence is synthesized)
gcctgggtggaaattaagatatttccaggtaaacaataaacagaggacatttgttgttttagccaacctcccttataatacatactgaaa

SEQ ID NO: 650552 - DNA, 120 bp, Artificial Sequence
  ENSG00000183020_40 (sequence is synthesized)
tcatccctagtgcagttcagtcagttgtgacagatgttgtgtgcctgtttaaccaccaccctgtcaatacatggttgcatcccagcctccccacagctggccaccgtggagcatcgtccc

SEQ ID NO: 650553 - DNA, 120 bp, Artificial Sequence
  ENSG00000183020_41 (sequence is synthesized)
accatggagcagcctggccctgggcggtggctctcccagctgttcctctctgtcaccgcgttgttccttctcaccacgtcccgttctggcgacggacacctgtctccgtttcacttgggt

SEQ ID NO: 650554 - DNA, 120 bp, Artificial Sequence
  ENSG00000183020_42 (sequence is synthesized)
aaggggtgtgtgggcgcctgagctgtgtgcctgggctccatgactgtgcctccgtgtccttcctgaggggacccggggcgtgcgggtgctcacggtgcatggatgcggcctgagctattg

SEQ ID NO: 650555 - DNA, 120 bp, Artificial Sequence
  ENSG00000183020_43 (sequence is synthesized)
gtggcatgtatttctcagtggaattttaaatagaatggtgactcggcatttattccttgtctgaagtaagcaagtaggaaggaccttgttccccattcaagggaatgaacggtgtggtaa

SEQ ID NO: 650556 - DNA, 120 bp, Artificial Sequence
  ENSG00000183020_44 (sequence is synthesized)
atctgcttgttttcatgtctggccggaggtctgaggtgccccctttcctggagttgacgcctctcccctgctgccctgtggggtgggagcgcaggtgccggtttctgtcccagatggagg

SEQ ID NO: 650557 - DNA, 120 bp, Artificial Sequence
  ENSG00000183020_45 (sequence is synthesized)
cccagaatatgtgggggtttctccccatcggcaaacaagctatcagttctgcagcaggcaccagcggggtgtcctccagcttgattctgacaccgtctacctggaggtaaaagtaaagaa

SEQ ID NO: 650558 - DNA, 120 bp, Artificial Sequence
  ENSG00000183020_46 (sequence is synthesized)
actttgtgcttggtggctggtggctgtccacccatgtgtaccagtgcctgccaacctgaagggctttggcaggggccttcgctgcagggtgaggtctgaggaggagcctgaatgctggtt

SEQ ID NO: 650559 - DNA, 120 bp, Artificial Sequence
  ENSG00000183020_47 (sequence is synthesized)
aatccatctctccctctcctttggacatcttgacataggtttctggaggcagaaacttgcttgtggagatttgtctgtgagctgccggagcaggggccttcccgtgggtgctgggccggc

SEQ ID NO: 650560 - DNA, 120 bp, Artificial Sequence
  ENSG00000183020_48 (sequence is synthesized)
gttaaaatagcgagataattccagatgctatatgaaaatcaggcagtcgtaatctgcctatggtgctgggcaggagaaggaaaacaggcagtcttccatattggagagccagcttttgat

SEQ ID NO: 650561 - DNA, 120 bp, Artificial Sequence
  ENSG00000183020_49 (sequence is synthesized)
catgcacctaaaaataccgtgtacatgcctcctccccttccatctggccagtgtgagtccctttccttttcacctgctcttactctcctgtgacgtgatctttaaacccctcctctccga

SEQ ID NO: 650562 - DNA, 120 bp, Artificial Sequence
  ENSG00000183020_50 (sequence is synthesized)
agcctcacagagctgctgcttgcagagtgtgggaggcgccagtggggactggagcgcggtgcgcaccccagccgagcttgtgtgtgcttctggcagagcttttagactgaagattttccc

SEQ ID NO: 650563 - DNA, 120 bp, Artificial Sequence
  ENSG00000183020_51 (sequence is synthesized)
ttcgtaatgccagaagcgttcctagaacttccccagctaaaacagggagacgctaacgtctctacctctaaggataggcccgccaaatagagttagcgtgaagaccccagcttgaccaga

SEQ ID NO: 650564 - DNA, 120 bp, Artificial Sequence
  ENSG00000183020_52 (sequence is synthesized)
gatggtgacacctggggatttatggtcagcgacctgagtgaagcaacatcctccttgccactggctggtctgttcattttaacatgaacatgttttaatgcagactgttcaagctgtttc

SEQ ID NO: 650565 - DNA, 120 bp, Artificial Sequence
  ENSG00000183020_53 (sequence is synthesized)
aaaacagtcattaaaaatacacatgcaggagcacctgtattaaagactttgtttggaatctggagtggaagctctgactcctactgcgcccttctttaggggtctctccctcggggtcca

SEQ ID NO: 650566 - DNA, 120 bp, Artificial Sequence
  ENSG00000183020_54 (sequence is synthesized)
cttggctcgaggcggcagcgagcccagcagctgagtggccggcggcacacgacccagagggaaggagaggcctgcaccccgctgcctcctggacccagctttgctgctgtcactgtttct

SEQ ID NO: 650567 - DNA, 120 bp, Artificial Sequence
  ENSG00000183020_55 (sequence is synthesized)
tcaggagaggctgtaggcaaacccttgttttccagcatgaaaacaaccctggtcccagcagggcaggctcttttctgtgtctcgctgtttcaggagcctgctattcctgggattcttaaa

SEQ ID NO: 650568 - DNA, 120 bp, Artificial Sequence
  ENSG00000183020_56 (sequence is synthesized)
gttttcctgccctactaagcaccagtttctgctaacggtgacaaaaattgtgtgtgtaagacccagagccgaggctcagagtgaaaacagacaagtagtatataatctaagtgacttttt

SEQ ID NO: 650569 - DNA, 120 bp, Artificial Sequence
  ENSG00000183020_57 (sequence is synthesized)
aaaatggaggagccattctggaagcgtgagaagcagacagtgttttgaggattgtctgggtggaagggcagggccgggtggtgtggctgccctcgacccgtagctggtggtcctagagtg

SEQ ID NO: 650570 - DNA, 120 bp, Artificial Sequence
  ENSG00000183020_58 (sequence is synthesized)
tggtgagtgtgctcgcctccacgggtcctgctggggctctagcccggcccgtttccgcttctgccactgggacttgctcagctggattccttaacgcacgcacacctgaacctgcagacc

SEQ ID NO: 650571 - DNA, 120 bp, Artificial Sequence
  ENSG00000183020_59 (sequence is synthesized)
caccatggggcccacctcatggggtggcagacagccagggcccccgcgccacctgcccggcttggtaccagacgacagctgtggggtgcaggcagctggtttccttcggccccctggcct

SEQ ID NO: 650572 - DNA, 120 bp, Artificial Sequence
  ENSG00000183020_60 (sequence is synthesized)
tcagtgactacaaatagcgtggatacagtcagcccgtcccctgctgggtgtctgcaaggttaggaatgttgagaaaagcacactttctaacattaaaaagacagagaacttaagattgta

SEQ ID NO: 650573 - DNA, 120 bp, Artificial Sequence
  ENSG00000183020_61 (sequence is synthesized)
tactgtagaattcggggacatagacatgcaagtttttgtttcattctttgtgcaaatgcctttgcctttttaaagaaaaaacatcacactatttgcacagacttggagttctgggaaaca

SEQ ID NO: 650574 - DNA, 120 bp, Artificial Sequence
  ENSG00000183020_62 (sequence is synthesized)
gatgaatggggagaagtgaggcacagggacgtcctgcctgagtatgcggccctggcctgtcctcctgtctgtgggtgacactggacactgagccacacacgatccgtggggactgaaggc

SEQ ID NO: 650575 - DNA, 120 bp, Artificial Sequence
  ENSG00000183020_63 (sequence is synthesized)
tcggccccccgacccgctctggtgggtggcagtagatcgggacgcttctcactccaggctctttcccggtccctggggctctcagaggagtagctgactgtctctttctgctgctgctgc

SEQ ID NO: 650576 - DNA, 120 bp, Artificial Sequence
  ENSG00000183020_64 (sequence is synthesized)
cttgagttgctttttattctggcacaatgtacgtggtgagatgtgtagctctttagtgcagttcagtcagttttgacagatgttgtttaaccaccaccctgtcaatacatggttgcctcc

SEQ ID NO: 650577 - DNA, 120 bp, Artificial Sequence
  ENSG00000183020_65 (sequence is synthesized)
ttgcactcccgccagctacgtacgagacgccaggcgctcccatgccagccctcagttttcatgctgacagtgtgtgtggtgctcaggcctctgccgagttgtgggtgcctccagagagtg

SEQ ID NO: 650578 - DNA, 120 bp, Artificial Sequence
  ENSG00000183020_66 (sequence is synthesized)
tgagtcctctcctgccacaggcgtgaatctcagcggcaggatttccttcgtgctctgcgattccgtccagcaggacttgattgagaacccatgagatgctgaatacaaggctcctctgcc

SEQ ID NO: 650579 - DNA, 86 bp, Artificial Sequence
  ENSG00000183020_67 (sequence is synthesized)
ctttattcggccgggagctttggcaagagtcaaatcttcaacagccgagctccccgaatgagcaattcctgtccctcttcagggct

SEQ ID NO: 650580 - DNA, 120 bp, Artificial Sequence
  ENSG00000183020_68 (sequence is synthesized)
tcggccgggagctttggcaagagtcaaatcttcaacagccgagctccccgaatgagcaattcctgtccctcttcagggctcacaactctaagagggtccacgtgagagggtcgtgatcga

SEQ ID NO: 650581 - DNA, 120 bp, Artificial Sequence
  ENSG00000183023_0 (sequence is synthesized)
atgtacaacatgcggcgattaagtctttcacccaccttttcaatgggatttcatctgttagttactgtgagtctcttattttcccatgtggaccatgtaattgctgagacagaaatggaa

SEQ ID NO: 650582 - DNA, 120 bp, Artificial Sequence
  ENSG00000183023_1 (sequence is synthesized)
ggagaaggaaatgaaactggtgaatgtactggatcatattactgtaagaaaggggtgattttgcccatttgggaaccccaagacccttcttttggggacaaaattgctagagctactgtg

SEQ ID NO: 650583 - DNA, 120 bp, Artificial Sequence
  ENSG00000183023_2 (sequence is synthesized)
tattttgtggccatggtctacatgtttcttggagtctctatcatagctgatcggttcatgtcctctatagaagtcatcacatctcaagaaaaagaaataaccataaagaaacccaatgga

SEQ ID NO: 650584 - DNA, 120 bp, Artificial Sequence
  ENSG00000183023_3 (sequence is synthesized)
gagaccaccaagacaactgtgaggatctggaatgaaacagtttctaacctgaccttgatggccctgggatcttctgctcctgagattctcctttcagtaattgaagtgtgtggccataac

SEQ ID NO: 650585 - DNA, 120 bp, Artificial Sequence
  ENSG00000183023_4 (sequence is synthesized)
ttcactgcaggagacctcggtcctagcaccatcgtgggaagtgctgcattcaatatgttcatcattattgcactctgtgtttatgtggtgcctgacggagagacaaggaagattaagcat

SEQ ID NO: 650586 - DNA, 120 bp, Artificial Sequence
  ENSG00000183023_5 (sequence is synthesized)
ttgcgtgtcttctttgtgacagcagcctggagcatctttgcctacacctggctttacattattttgtctgtcatatctcctggtgttgtggaggtctgggaaggtttgcttactttcttc

SEQ ID NO: 650587 - DNA, 120 bp, Artificial Sequence
  ENSG00000183023_6 (sequence is synthesized)
ttctttcccatctgtgttgtgttcgcttgggtagcggataggagacttctgttttacaagtatgtctacaagaggtatcgagctggcaagcagagggggatgattattgaacatgaagga

SEQ ID NO: 650588 - DNA, 120 bp, Artificial Sequence
  ENSG00000183023_7 (sequence is synthesized)
gacaggccatcttctaagactgaaattgaaatggacgggaaagtggtcaattctcatgttgaaaatttcttagatggtgctctggttctggaggtggatgagagggaccaagatgatgaa

SEQ ID NO: 650589 - DNA, 120 bp, Artificial Sequence
  ENSG00000183023_8 (sequence is synthesized)
gaagctaggcgagaaatggctaggattctgaaggaacttaagcagaagcatccagataaagaaatagagcaattaatagaattagctaactaccaagtcctaagtcagcagcaaaaaagt

SEQ ID NO: 650590 - DNA, 120 bp, Artificial Sequence
  ENSG00000183023_9 (sequence is synthesized)
agagcattttatcgcattcaagctactcgcctcatgactggagctggcaacattttaaagaggcatgcagctgaccaagcaaggaaggctgtcagcatgcacgaggtcaacactgaagtg

SEQ ID NO: 650591 - DNA, 120 bp, Artificial Sequence
  ENSG00000183023_10 (sequence is synthesized)
actgaaaatgaccctgttagtaagatcttctttgaacaagggacatatcagtgtctggagaactgtggtactgtggcccttaccattatccgcagaggtggtgatttgactaacactgtg

SEQ ID NO: 650592 - DNA, 120 bp, Artificial Sequence
  ENSG00000183023_11 (sequence is synthesized)
tttgttgacttcagaacagaggatggcacagcaaatgctgggtctgattatgaatttactgaaggaactgtggtgtttaagcctggtgatacccagaaggaaatcagagtgggtatcata

SEQ ID NO: 650593 - DNA, 120 bp, Artificial Sequence
  ENSG00000183023_12 (sequence is synthesized)
ctcagcaatgtcaaagtatcttctgaagcttcagaagatggcatactggaagccaatcatgtttctacacttgcttgcctcggatctccctccactgccactgtaactatttttgatgat

SEQ ID NO: 650594 - DNA, 120 bp, Artificial Sequence
  ENSG00000183023_13 (sequence is synthesized)
gaccacgcaggcatttttacttttgaggaacctgtgactcatgtgagtgagagcattggcatcatggaggtgaaagtattgagaacatctggagctcgaggaaatgttatcgttccatat

SEQ ID NO: 650595 - DNA, 120 bp, Artificial Sequence
  ENSG00000183023_14 (sequence is synthesized)
aaaaccatcgaagggactgccagaggtggaggggaggattttgaggacacttgtggagagctcgaattccagaatgatgaaattgtcaaaacaatatcagtcaaggtaattgatgatgag

SEQ ID NO: 650596 - DNA, 120 bp, Artificial Sequence
  ENSG00000183023_15 (sequence is synthesized)
gagtatgagaaaaacaagaccttcttccttgagattggagagccccgcctggtggagatgagtgagaagaaagccctgttattgaatgagcttggtggcttcacaataacaggaaaatac

SEQ ID NO: 650597 - DNA, 120 bp, Artificial Sequence
  ENSG00000183023_16 (sequence is synthesized)
ctgtttggccaacctgtcttcaggaaggttcatgctagagaacatccgattctctctactgtaatcaccattgcagacgaatatgatgacaagcagccactgaccagcaaagaggaagag

SEQ ID NO: 650598 - DNA, 120 bp, Artificial Sequence
  ENSG00000183023_17 (sequence is synthesized)
gagaggcgcattgcagaaatggggcgccccatcctgggagagcacaccaagttggaagtgatcattgaagaatcctatgaattcaagagtactgtggacaaactcattaagaagacaaac

SEQ ID NO: 650599 - DNA, 120 bp, Artificial Sequence
  ENSG00000183023_18 (sequence is synthesized)
ctggcccttgtggttgggactaacagctggagagaacagttcattgaagctatcactgtcagtgctggggaagatgatgacgacgatgaatgtggggaagagaagctgccctcctgtttc

SEQ ID NO: 650600 - DNA, 120 bp, Artificial Sequence
  ENSG00000183023_19 (sequence is synthesized)
gattacgtgatgcactttctgactgtgttctggaaggtcctgtttgccttcgtcccccctactgaatactggaatggctgggcgtgtttcattgtctccatcctcatgattggcctactg

SEQ ID NO: 650601 - DNA, 120 bp, Artificial Sequence
  ENSG00000183023_20 (sequence is synthesized)
acagctttcattggagacctggcttcccactttggctgcaccattggcctgaaagattctgtgactgcagtcgtgttcgtcgcacttggaacatcagtgccagacacatttgccagcaaa

SEQ ID NO: 650602 - DNA, 120 bp, Artificial Sequence
  ENSG00000183023_21 (sequence is synthesized)
gtggcagccacccaggaccagtatgcagacgcctccataggtaacgtcacgggcagcaacgcggtgaatgtcttcctgggaatcggtgtggcctggtccatcgctgccatctaccacgca

SEQ ID NO: 650603 - DNA, 120 bp, Artificial Sequence
  ENSG00000183023_22 (sequence is synthesized)
gccaatggggaacagttcaaagtgtcccctggcacactagctttctctgtcactctcttcaccatttttgctttcatcaatgtgggggtgctgctgtatcggcggaggccagaaatcgga

SEQ ID NO: 650604 - DNA, 120 bp, Artificial Sequence
  ENSG00000183023_23 (sequence is synthesized)
ggtgagctgggtgggccccggactgccaagctcctcacatcctgcctctttgtgctcctatggctcttgtacattttcttctcctccctggaggcctactgccacataaaaggcttctaa

SEQ ID NO: 650605 - DNA, 120 bp, Artificial Sequence
  ENSG00000183023_24 (sequence is synthesized)
ctgatggaatccagcttcaagagcatactctgtactagggccgaagtaaaaaaccatcacctcccattcccaggggcatcatcatgttcaacaaggcatggaggcagggccatctttgca

SEQ ID NO: 650606 - DNA, 120 bp, Artificial Sequence
  ENSG00000183023_25 (sequence is synthesized)
accattagaatatttgaccgtgaggaatatgagaaagagtgcagtttctcccttgtgcttgaggaaccaaaatggataagaagaggaatgaaaggtggcttcacaataacaggaaaatac

SEQ ID NO: 650607 - DNA, 120 bp, Artificial Sequence
  ENSG00000183023_26 (sequence is synthesized)
atcagtcgtggtgactgccctggttgcactgtaagtatggggggacgtctccacgaaaaaaaactaactttctgccttgtgctctgcaggtccctccttctcccaccttccccaagtagc

SEQ ID NO: 650608 - DNA, 120 bp, Artificial Sequence
  ENSG00000183023_27 (sequence is synthesized)
tgctcctgacccccccacacaccttggcaaacgacaccagtggccgatagcaactggtgttttaaaaatactaatttggagccccatttgagacctacaacgggagagtctgcatcagat

SEQ ID NO: 650609 - DNA, 120 bp, Artificial Sequence
  ENSG00000183023_28 (sequence is synthesized)
tctccaggttgataaatccttaaggctttgatttgttttgtttttggttttgttttcagtggagctggggaggtagttaatgtttggctttatttttgttattttgttttgttttgtttt

SEQ ID NO: 650610 - DNA, 120 bp, Artificial Sequence
  ENSG00000183023_29 (sequence is synthesized)
aagtgaaaccatccaaatgtaaatgggttttggtaaaaatttaaatcattagtattccccctcacctcccccaatcactttaaaacttattttggattaagaaaaaatctgggcatggaa

SEQ ID NO: 650611 - DNA, 120 bp, Artificial Sequence
  ENSG00000183023_30 (sequence is synthesized)
tcttggttgctctcaccatgtgatacaccagctccacctttgccttctgctgtgactgtaagtttcctgaggcctctccagaagcagattctagcaccatgctgctcgcacagccttcaa

SEQ ID NO: 650612 - DNA, 120 bp, Artificial Sequence
  ENSG00000183023_31 (sequence is synthesized)
agcgacctcttcctgatcgggagctgtttaaaaggagggagtgcgccgtattttctactagcgtggaggaacggaggaagaatccattcacactccccaaaccagggatgtcatggtcta

SEQ ID NO: 650613 - DNA, 120 bp, Artificial Sequence
  ENSG00000183023_32 (sequence is synthesized)
gaacacctatgctgaagtacaaggctgagcaagaaagatcactccactgcaactgagcaaagtgctgaaggagttgaaaggaagaagagaacattggacgtggtttcacggaggaggaag

SEQ ID NO: 650614 - DNA, 120 bp, Artificial Sequence
  ENSG00000183023_33 (sequence is synthesized)
ggcgctgcacggtagtcagcccgccgccgccgcctgctttgtgcttcccacagaagatgggagcgacctcttcctgatcgggagctgtttaaaaggagggagtgcgccgtattttctact

SEQ ID NO: 650615 - DNA, 120 bp, Artificial Sequence
  ENSG00000183023_34 (sequence is synthesized)
cctccaagaagaagcataaaagtggaatggagccaggaaatccgatggttctagaaatagtctgatatttaaacatgtgatacctggcagtctcgtttaacaggtacaaggaaaacgtgc

SEQ ID NO: 650616 - DNA, 120 bp, Artificial Sequence
  ENSG00000183023_35 (sequence is synthesized)
ctagattcccaggaacgtgcaaaatcctttctttcttatctctttagctctggactgtgattggcaaggtccttcttccagcattcagcccagctaagcccccaggtgccccatcccaac

SEQ ID NO: 650617 - DNA, 120 bp, Artificial Sequence
  ENSG00000183023_36 (sequence is synthesized)
cctgttcctcctgtccacctgccatcccctatgcaaacagtaagaataaccccattcaaaaagcacatcatcgttttccatttgcattaacatgtgtctcagtcccatgttgccgttgct

SEQ ID NO: 650618 - DNA, 120 bp, Artificial Sequence
  ENSG00000183023_37 (sequence is synthesized)
tgggattgtctgtcagttttattttcaaaggcatccatggcttgcacaatcctgttccagtcatgactgaacatttgctccttcttcatgtgccgttcggaaatgttgttgtgatacctg

SEQ ID NO: 650619 - DNA, 120 bp, Artificial Sequence
  ENSG00000183023_38 (sequence is synthesized)
ttacacagtgcatggtgaaaaacaaataaaacaaaacaaagagtatctgtatatagtagagtatagtacatactgttctcccatttggcaatgttgattggacattgaagacataagtga

SEQ ID NO: 650620 - DNA, 120 bp, Artificial Sequence
  ENSG00000183023_39 (sequence is synthesized)
gttttcttttcacctgagttgttacttttgtgctgttattgagtttgattaattactagggataaaaggagaaaatggattattgttcacggttctgcacattcatttctaagaagcaat

SEQ ID NO: 650621 - DNA, 120 bp, Artificial Sequence
  ENSG00000183023_40 (sequence is synthesized)
aactgtcatgtggggagaagttaaagctattgagaggatagcaggcaaactacaaagatcttcatggaaaattagccatgtggaacacatcagaggcctctaaaaatcacccattaattc

SEQ ID NO: 650622 - DNA, 120 bp, Artificial Sequence
  ENSG00000183023_41 (sequence is synthesized)
aggaaggccaaggagaaaggccttatagagacgttgatatgttggatgtgcctaggctttcagagccaccctttccacaacacccctccctgcaaagtatttatttcacatctgcactgt

SEQ ID NO: 650623 - DNA, 120 bp, Artificial Sequence
  ENSG00000183023_42 (sequence is synthesized)
ctggcacagatggtagatagtgctggtttgttcattttatttttttacttaaaaggctattttgagccctgtttctttcactgtccagtctagtcctctttgattatatcagtagttgct

SEQ ID NO: 650624 - DNA, 120 bp, Artificial Sequence
  ENSG00000183023_43 (sequence is synthesized)
gagtaagaaagaagccagggtgaccaacgggcctttaaaagtgttgtctcctctacttatgctgaaagagaaggcaattaaataagactagtacctcccaggaggattggactgggatat

SEQ ID NO: 650625 - DNA, 120 bp, Artificial Sequence
  ENSG00000183023_44 (sequence is synthesized)
ttttaaccctttaaaaagaatagctgtttctatgttaaaataccaaagaacatggataaacccaacattccaaagtagtgagtccactaatgagaaaaataatagaatgactttggtcac

SEQ ID NO: 650626 - DNA, 120 bp, Artificial Sequence
  ENSG00000183023_45 (sequence is synthesized)
ctctcggagacttctgtgtctataaggaatcccaggctggagacattcctagccctctgtattgattcaaaaatacttaataaattaaagctgttgagacttattttttcttctgtcact

SEQ ID NO: 650627 - DNA, 120 bp, Artificial Sequence
  ENSG00000183023_46 (sequence is synthesized)
cagtaaccatgatccttcctcatttaataaacatttggtgactgaatgagtaattaaatgctggttacccacttaatgtgccaggtagtatgatactttctggggactaagccatgaaca

SEQ ID NO: 650628 - DNA, 120 bp, Artificial Sequence
  ENSG00000183023_47 (sequence is synthesized)
aaacagtctagatccctgccctcagaagggttacagtttatgtgattactattttcatgagtaaaagtgaagaaagccatatggaaagatttttatcttgcaagaaaaaacaattatgaa

SEQ ID NO: 650629 - DNA, 120 bp, Artificial Sequence
  ENSG00000183023_48 (sequence is synthesized)
actcttttaacataaacacactgaaactgtatcaaagcaattgtccaaattgtatttatacccaagaatttctttaactaagagagcataaggcatatgtttggaaaaccaccctcttta

SEQ ID NO: 650630 - DNA, 120 bp, Artificial Sequence
  ENSG00000183023_49 (sequence is synthesized)
tctttgaccgacttgcagataaatatatctctccattttaaaccaagaagggcaatcatgttggtgatccagatcactgagaaagcccagtgtatcccatcttttatctttgttggcaat

SEQ ID NO: 650631 - DNA, 120 bp, Artificial Sequence
  ENSG00000183023_50 (sequence is synthesized)
ggaacttttctatggcccacactttacaattctttgtcattctaacccatccttcccatccttattttttttttttttgagaattgctaaatggaaagctagcctagaagcaccaagtaa

SEQ ID NO: 650632 - DNA, 120 bp, Artificial Sequence
  ENSG00000183023_51 (sequence is synthesized)
atatattcaaggaatataagttgtttaaacattagaaaaatttttgcactcattttttagctgtattaggaatgtcaataatcctgtagcaaattttcacagagaactttaagaaattct

SEQ ID NO: 650633 - DNA, 120 bp, Artificial Sequence
  ENSG00000183023_52 (sequence is synthesized)
tgcattggtcgatttcaatttgaaagctttttggtttgtttgctttttaaattttcatgttctaggaaactatgattctggttgttcaggattgttattattatagttgtgtaaaattat

SEQ ID NO: 650634 - DNA, 120 bp, Artificial Sequence
  ENSG00000183023_53 (sequence is synthesized)
tttattttgtgtgtattgtgcacagcttggggggggggcgggaaatgcactaattgtgctcttccttataaatggtacatattactgacacagacaaataaagtttctaattgtttctga

SEQ ID NO: 650635 - DNA, 120 bp, Artificial Sequence
  ENSG00000183023_54 (sequence is synthesized)
tttaatcactagtgatacagcatattctgtatgaaatgttttctcctttctcattgtcatctacttcattttttgttttcatgttttgaagaaataaaaaccaaaatggtattattgtgc

SEQ ID NO: 650636 - DNA, 120 bp, Artificial Sequence
  ENSG00000183023_55 (sequence is synthesized)
aactggtatcatcatccaaagaaaaaaacagacaccaagtattcaaactcttgcaaacgtcaacccttcggtcatgcaatgttctctttttaatgtcccaggagaacacagtgtcagaat

SEQ ID NO: 650637 - DNA, 120 bp, Artificial Sequence
  ENSG00000183023_56 (sequence is synthesized)
atttgtctgtcctacagtgctgagatatatgttggacattcctccatttcactgattttttttacgttgcttagtatgactctatctacatcctttcctgcatccaggatcataagccca

SEQ ID NO: 650638 - DNA, 120 bp, Artificial Sequence
  ENSG00000183023_57 (sequence is synthesized)
taaacagttacatgtcagacaactttttagcatgcagagtattacatcaaatcagtcgatcccaaaaaattccaatcccaaaattgatggtagtacagtttcttcccaaggggatgttta

SEQ ID NO: 650639 - DNA, 120 bp, Artificial Sequence
  ENSG00000183023_58 (sequence is synthesized)
agtaaatttctcttttagtttcatatgttatattcctcttgtagaacttctgcctcgcattaacgatttctgtctatatcttattaacttcatatatcatatagtcaaaacagtatagaa

SEQ ID NO: 650640 - DNA, 120 bp, Artificial Sequence
  ENSG00000183023_59 (sequence is synthesized)
ggaagtgatgtcagaaatggaataagcatttgtggggaaaaaatgtgacctctaaggtttgtgtacttatttgaagttgacatattagtggacttagttcttactataatagaatctgtc

SEQ ID NO: 650641 - DNA, 120 bp, Artificial Sequence
  ENSG00000183023_60 (sequence is synthesized)
cacatgtacaagtaaatgctactttattgatccgatcatctttaaaattttctttagtattcctcattatattctttatatggtcatatgtggtatactttcatgtatgaatgaaggaat

SEQ ID NO: 650642 - DNA, 120 bp, Artificial Sequence
  ENSG00000183023_61 (sequence is synthesized)
tatttaaatattttatagtatcaaactgtcaatatgtctcttgagtaccagcctttggtttaacacaaaatgagcagccaacctctatttctttatatagcaaaaagattaattcaatga

SEQ ID NO: 650643 - DNA, 120 bp, Artificial Sequence
  ENSG00000183023_62 (sequence is synthesized)
ccagagctccttgaccgtctaacaacctttcagaaaaattctgtgacctgataattatcagtttcttacaagcaaattttaatgggttcaaatttcctgattccatccttcaaccagtga

SEQ ID NO: 650644 - DNA, 120 bp, Artificial Sequence
  ENSG00000183023_63 (sequence is synthesized)
gtgttttataaaattttgctttttgtagttcatagcctaatagcactaattttttgttgcttttcaaacataaaatttttacaaaatattgttttagaaaccctgcaaaaattctgatgc

SEQ ID NO: 650645 - DNA, 120 bp, Artificial Sequence
  ENSG00000183023_64 (sequence is synthesized)
atgcctttcccctgtggcctcactattaatgaaagctcaccactcacattgcattttccacaggggtcttgattcattggtgattccacagcaaaaggtccctgatcctaaactgtcaaa

SEQ ID NO: 650646 - DNA, 120 bp, Artificial Sequence
  ENSG00000183023_65 (sequence is synthesized)
ataaagtagcgagactgatatacatctgataactttgtggaagcaattagaaaattttctctggtagatgatgatgccctccatcctctaatagtggcagaactttgccttctcaagaga

SEQ ID NO: 650647 - DNA, 120 bp, Artificial Sequence
  ENSG00000183023_66 (sequence is synthesized)
ataaatcagcccctttaagacttcttttaatatttttgggctggggatatggagtctctctgttgattctgactttctgactatgattttgggcagttgcatgcagagcaagttctgagt

SEQ ID NO: 650648 - DNA, 120 bp, Artificial Sequence
  ENSG00000183023_67 (sequence is synthesized)
gtagtttcataatctcaagaacgtttggccattttatgattgacagcatgtaatattggatctcacctgacctacaactggcattcagcttttatcattgtaatcacttcacttggccaa

SEQ ID NO: 650649 - DNA, 120 bp, Artificial Sequence
  ENSG00000183023_68 (sequence is synthesized)
ggcagttggtaaaactgagcaaagttaaatataaattccaatcattaaattggtgagtgcattatgcagaagatacagaatcctatttcagaaaaagaaacatgctattataagtggatt

SEQ ID NO: 650650 - DNA, 120 bp, Artificial Sequence
  ENSG00000183023_69 (sequence is synthesized)
ccttagattttgttcagctctacctacggagttttgctaatagaatgtagttctgctattcttttttaccattatgtactcaccacttctaaccatcttgttgtcttcccatcacgcagt

SEQ ID NO: 650651 - DNA, 120 bp, Artificial Sequence
  ENSG00000183023_70 (sequence is synthesized)
acatttcaaaatgctgggcggtcccgatggtattacacccacaaggacagcataggaagggtaaacaattgaaatagatatttcatgttgggagcttaattaggccatgattaatcgtct

SEQ ID NO: 650652 - DNA, 120 bp, Artificial Sequence
  ENSG00000183023_71 (sequence is synthesized)
ctcaaagcagagactgtcttatctataaaaggagcaaccactgagaggtggaactcccaaaggaaagcactgcaggtttccagcccacaagaaatggtacgtatttcactttctttgact

SEQ ID NO: 650653 - DNA, 120 bp, Artificial Sequence
  ENSG00000183023_72 (sequence is synthesized)
ttttccctgcctgtcaagatgtccaaatgtactcagaggctgtccacattttcagttttgtcaaaggttctctgattcaattttgtaagaaacatttaaatcagtggttatgtaaattat

SEQ ID NO: 650654 - DNA, 120 bp, Artificial Sequence
  ENSG00000183023_73 (sequence is synthesized)
tgtttattttgttttacttttaggaaagagcattactgtataacttcaaaaagcaatatgacttagtagttaaaattatgacccatattttttcaggaagacttgcttgcccaaaattgt

SEQ ID NO: 650655 - DNA, 120 bp, Artificial Sequence
  ENSG00000183023_74 (sequence is synthesized)
cttgtctatctgttatcaatgtagtcattcatagctgcctcagtggttcacattttttagaattatgcttccctagcattttttcaaagagttggagagttttccccatgggaataaaca

SEQ ID NO: 650656 - DNA, 120 bp, Artificial Sequence
  ENSG00000183023_75 (sequence is synthesized)
gtcttaatatttcctttccctaatttcagcctttgcagttcttcggtgactactcccattatatccaactacccttagtgatgctcactattacctcccggcaatagggaaagagcttat

SEQ ID NO: 650657 - DNA, 120 bp, Artificial Sequence
  ENSG00000183023_76 (sequence is synthesized)
gctataaagtgattgctcaagacatgtttttctgaaagtgaacttatcataggagaaatcaaatataatgacattccacctagataagagtcactaggacatagtatggaatctttgtaa

SEQ ID NO: 650658 - DNA, 120 bp, Artificial Sequence
  ENSG00000183023_77 (sequence is synthesized)
atgagcgggacagatcatacctacagttacacatataatagtgttgtttattttatacctcttgaatcatatttattatgcttcagtgctgcccatcgacctagccttttattctatcaa

SEQ ID NO: 650659 - DNA, 120 bp, Artificial Sequence
  ENSG00000183023_78 (sequence is synthesized)
tatgtaggtgtggattgggaatgagaaccgacattcacatccctgatgctcatgagggtttctacaaaggtggagtatgtaaacatagaaaaacgtaacagatagcttccatgcctctaa

SEQ ID NO: 650660 - DNA, 120 bp, Artificial Sequence
  ENSG00000183023_79 (sequence is synthesized)
gaaatatgagtgggtcaaatgcttctctgtgggtactatttttctgctatgcaaatggtagaaaagttcacattaatagccaaacagaccaagagagaaattagctaacttcactgttaa

SEQ ID NO: 650661 - DNA, 120 bp, Artificial Sequence
  ENSG00000183023_80 (sequence is synthesized)
tctgtctactttgacagttaagatatagcccagccctcctaatttgttgactgcaaagacagatacgcctagttaaatccaagaatgcactgggggacggggggataaagttactagaat

SEQ ID NO: 650662 - DNA, 120 bp, Artificial Sequence
  ENSG00000183023_81 (sequence is synthesized)
aattatacaaccctccgtactaagattgcttattcgccaagaagaatcctgcccagagattttcagagacatttccttacattcccaaccttcttttaatttacacaactttttaattag

SEQ ID NO: 650663 - DNA, 120 bp, Artificial Sequence
  ENSG00000183023_82 (sequence is synthesized)
accccttgaagccacatagtaaaacaagagatgaattatctaaggagaacttttggccctccctctaatgtgaagatcacatacttgactgtatttcccattctttccaaatggaaagaa

SEQ ID NO: 650664 - DNA, 120 bp, Artificial Sequence
  ENSG00000183023_83 (sequence is synthesized)
cagtccaattaagtaaccaactatgtaaccactttttgacgtaattccacctaaaaaacaaagagtgaactaaattgtacaaacattaaacctaacagtgatatgaccagatggctagtt

SEQ ID NO: 650665 - DNA, 120 bp, Artificial Sequence
  ENSG00000183023_84 (sequence is synthesized)
ttgagaaaaataatattttctgtagataccttgctctcccttcctgtactcatcctaatgctcaagtttgagaaatactccaaggaagaaatcttgaaagattgtacattcaaataatgc

SEQ ID NO: 650666 - DNA, 120 bp, Artificial Sequence
  ENSG00000183023_85 (sequence is synthesized)
tcatgtaattgagtaatatggcatttgggatgagaataagagcgtatttaaaaataagagaattggcacaaaaatgtgttaactaggattttattacaaattgccctaagatatttgcaa

SEQ ID NO: 650667 - DNA, 120 bp, Artificial Sequence
  ENSG00000183023_86 (sequence is synthesized)
gttattatatttaagtgaaataaatcccagtttccagaaacaacagtacaatttatattcgcaggttttatatgaaaatcaaagttgggcatacatactttttggctttggcaaccaaag

SEQ ID NO: 650668 - DNA, 120 bp, Artificial Sequence
  ENSG00000183023_87 (sequence is synthesized)
aaaagcatgtttttggcacacgtttccaaattattgagttatttgtagaatacattggacctgtacaggtatctcattaaaattaccttcaataatttccctttcttcctttaagccatc

SEQ ID NO: 650669 - DNA, 120 bp, Artificial Sequence
  ENSG00000183023_88 (sequence is synthesized)
aagtttctaaattttacaacttcacagtttagcaatttcatttatgaaaggctgattccattttgatgttgatttttacatttcagaatttttcatatataaatatttgatgcattagat

SEQ ID NO: 650670 - DNA, 120 bp, Artificial Sequence
  ENSG00000183023_89 (sequence is synthesized)
gggatactgagcttgagtctggcccaaatgaaccacaaggcccagactgatctatcagtagttagaaggcttctaatacactggctttctaatgtacagtaaatactagcgttgttttca

SEQ ID NO: 650671 - DNA, 120 bp, Artificial Sequence
  ENSG00000183023_90 (sequence is synthesized)
atattctttcttttgactaaaagtttccattccaactggtgaaaaatttttaaaaaatatttataatgatagttagagaactgtttatatgaggatcagacattgtttcagcactggatc

SEQ ID NO: 650672 - DNA, 120 bp, Artificial Sequence
  ENSG00000183023_91 (sequence is synthesized)
gtatcagatatcctttgagaaagagttggagaggcatggaaggaagcatattcctgacctcccccctttttagctaaagatacaaattcagagctgtttgaaaagggcttagaataatat

SEQ ID NO: 650673 - DNA, 120 bp, Artificial Sequence
  ENSG00000183023_92 (sequence is synthesized)
taattaaacatattctataatacaaagagaagtacttttttaaaatacatttatttttctttcttttttagcaggcatttctgacagaaaatctttagggccaattagagtttctttctg

SEQ ID NO: 650674 - DNA, 120 bp, Artificial Sequence
  ENSG00000183023_93 (sequence is synthesized)
acttttaattgccctctgccttttgggaaagtgttgaaaaaagctctggaaaaaaatatgctggtcaaggtcgaaccctggggaattaaaaacatgagatttttatattttccctccaaa

SEQ ID NO: 650675 - DNA, 83 bp, Artificial Sequence
  ENSG00000183023_94 (sequence is synthesized)
gggaattaaaaacatgagatttttatattttccctccaaacatagcactgagcaggcaggttcccatgcctgttgttaatcgg

SEQ ID NO: 650676 - DNA, 120 bp, Artificial Sequence
  ENSG00000183023_95 (sequence is synthesized)
tgcaagctccacctcccgggttcacgaatcggcattttctaaacacgtgttttggtgtgctgggagcagaggagtaggaggcccacccagtcccaccacacataccgggacatctttgac

SEQ ID NO: 650677 - DNA, 120 bp, Artificial Sequence
  ENSG00000183023_96 (sequence is synthesized)
tctttgaccacatgggtcctctgccgttcgtattttagcttagatgttcttaactgaactaacttccaattttcatatacactgatcatcttgtccctagcattttccctccaagatcct

SEQ ID NO: 650678 - DNA, 120 bp, Artificial Sequence
  ENSG00000183023_97 (sequence is synthesized)
gctaacaggcaaactagccctttcaaacagttggtacctgagatttctcagagctctcttatcaagagtaaggagtgagattgcagaaggggcagtaatgtcaataccaagttattggaa

SEQ ID NO: 650679 - DNA, 120 bp, Artificial Sequence
  ENSG00000183023_98 (sequence is synthesized)
actacttaaccagccactgcattacatactggagcccgtctaggacacttgcccttggaaatggtggaaagactttgttttatttctatttcatcaacagaacttttgtagcattgaatc

SEQ ID NO: 650680 - DNA, 120 bp, Artificial Sequence
  ENSG00000183023_99 (sequence is synthesized)
taagcaaaggataacatcatattataatggaaagttatttttaactacaactgttattgttaaatttagaagaaaatattgtctttgaagtttcagtccaaaactctaaggagaacaagg

SEQ ID NO: 650681 - DNA, 120 bp, Artificial Sequence
  ENSG00000183023_100 (sequence is synthesized)
tttttactgccatcggtaatcctgtgagaaatttgacactccagatcttatttgagacagataagtctatgataaatatatgtatgagacttaaaatattcttgatattctcaggttgtt

SEQ ID NO: 650682 - DNA, 120 bp, Artificial Sequence
  ENSG00000183023_101 (sequence is synthesized)
ctcacaaattctgcatagatttagttgtttttttttttatgagaacctttcttatcaaaaaggattgaaaatttttccaacaactggttgttaaatgagtctagcacccaaagaagctgt

SEQ ID NO: 650683 - DNA, 79 bp, Artificial Sequence
  ENSG00000183023_102 (sequence is synthesized)
caactggttgttaaatgagtctagcacccaaagaagctgtgagcagttggttctaccagtgactcttctaggagctctt

SEQ ID NO: 650684 - DNA, 120 bp, Artificial Sequence
  ENSG00000183023_103 (sequence is synthesized)
actttgcccagcctgatagttctgactcaatccctagacacattcttcagaaacaactgtacatggtgagagaaaagtgaaaaggaaaaaagttttccttccttcaaaatacactaaatt

SEQ ID NO: 650685 - DNA, 120 bp, Artificial Sequence
  ENSG00000183023_104 (sequence is synthesized)
tgcttatcacctttaaaatttggactgaatgtttaaactttaaacacaaagcaaagggagatgctcttaaatgtgaaatctgaagcaaagattgcatttttgcaaagctatccagaagat

SEQ ID NO: 650686 - DNA, 120 bp, Artificial Sequence
  ENSG00000183023_105 (sequence is synthesized)
gtgttaattattgagacatgggattcattaacacatcagcgcccaaccactgcctctcctgcccccattcacacattatccacaatcaaataagcagctaagcaggggaaacctatcact

SEQ ID NO: 650687 - DNA, 120 bp, Artificial Sequence
  ENSG00000183023_106 (sequence is synthesized)
gttaatgtcataatcacatcaccactgaattaccagatgtggtcaggaactaggcaaagtaggtgggaccaatcctaggactggggccataccacaacctcagctcagccccttgtcgga

SEQ ID NO: 650688 - DNA, 120 bp, Artificial Sequence
  ENSG00000183023_107 (sequence is synthesized)
tacggtttctgaatttagtacaatgccagaagtattttttttctttcagctgtgaaccagcctgttttgtttgacaagcctttccagattcatgcagctcaatcacgtgcttgttgccag

SEQ ID NO: 650689 - DNA, 120 bp, Artificial Sequence
  ENSG00000183023_108 (sequence is synthesized)
tttgagagtgaacctattatttcaaacttgttgccgtgaccaatttttacaaaactgaaagtagcactgtgaggtggattggacctagtgatgaggtgtctacacttgcatccttttctt

SEQ ID NO: 650690 - DNA, 120 bp, Artificial Sequence
  ENSG00000183023_109 (sequence is synthesized)
ccaagagaatattctgacactccaactctagaagtcatgtcattagtaaaatgaaaataataattgcttaatcactgtttagaattagttcatacttcttcagagcttgaagcctccacg

SEQ ID NO: 650691 - DNA, 120 bp, Artificial Sequence
  ENSG00000183023_110 (sequence is synthesized)
actcaacatcagatccatggatagtattactatacctttacccaaagactggatttattttgtaaaaatatcagaatgggtctgggtccctttaaagcaactgacaaggtatttaacaac

SEQ ID NO: 650692 - DNA, 120 bp, Artificial Sequence
  ENSG00000183023_111 (sequence is synthesized)
attttaaaacaatgaagaaaggatgattctgcagaggctgctgggttacagaggagggcagagcttttgtcagactctcttgatgttttgctcttcctggtaagtttttatctatcatgg

SEQ ID NO: 650693 - DNA, 120 bp, Artificial Sequence
  ENSG00000183023_112 (sequence is synthesized)
ttcccagtggaatattctccatacacattctgtgggaggatattgacatggctctagactctgccttttattttctaattctccttggagaattagaacaggcattccagaacttgtaat

SEQ ID NO: 650694 - DNA, 120 bp, Artificial Sequence
  ENSG00000183023_113 (sequence is synthesized)
atagaggggaagaaagaaaaaatggcagatgcctcattgatggatccacaagttttgtacaaaagcacacaccattctgattgtctctatattaacattgtactcaccaaacagctttct

SEQ ID NO: 650695 - DNA, 120 bp, Artificial Sequence
  ENSG00000183023_114 (sequence is synthesized)
aaaggtgactggaacaagataaatatcaactggataattacctaaggaaaaagaataaaaaagaaatcaaaccaaaaaaaaagcaaaaaattggtcagtttagcaagcgtgttttccagg

SEQ ID NO: 650696 - DNA, 120 bp, Artificial Sequence
  ENSG00000183023_115 (sequence is synthesized)
atcataggctcataaactatacagtcaagagagtgaaacaattttaaaatcaaaagttagagccttttatatttcttcagatgtacaatttcataaatcaagcatttattttgtgcaaag

SEQ ID NO: 650697 - DNA, 120 bp, Artificial Sequence
  ENSG00000183023_116 (sequence is synthesized)
tattatattaggtaccctaaatggtatataaagaattcaaaacagagtaatttaagaaaattaacactagtctttgatttagtcaggaagagtccacttatggcattctaattaaattaa

SEQ ID NO: 650698 - DNA, 120 bp, Artificial Sequence
  ENSG00000183023_117 (sequence is synthesized)
ccttccattttggtctacattttatcaatttgagattgcttaatggggccattttgaaacctatcaagaaactttcctctaacagaaatagaaatattaattttcttaatttcacattct

SEQ ID NO: 650699 - DNA, 120 bp, Artificial Sequence
  ENSG00000183023_118 (sequence is synthesized)
gtcttccactaataagataaatggattcagacccaacacacacatccagagattaccatgagccaagacctgtgtaagtttgatatagggtcttttattcaacatttcaagttgggaaaa

SEQ ID NO: 650700 - DNA, 120 bp, Artificial Sequence
  ENSG00000183023_119 (sequence is synthesized)
tcttattacaaagatcatttgcctcaccattgctgaattcttttactaggtgttgatgctaattcatcactggattttcttaactctgcctgttgctcttttggactttgaggcatgtgg

SEQ ID NO: 650701 - DNA, 120 bp, Artificial Sequence
  ENSG00000183023_120 (sequence is synthesized)
ttctatttcagtgagttacaactccagctctcatcttttaacagcaaactagagaacatctcactcttcatctctgaggacacagtgttctcttcattttaacatcaaaaagtcaccaga

SEQ ID NO: 650702 - DNA, 120 bp, Artificial Sequence
  ENSG00000183023_121 (sequence is synthesized)
gagaagacccaaaggcttttctctttggaaaaggaatctttaattgtttcagagggtgaggaatcttcagctctctctggacttgattgtcctcatcattaaatgggaagactttacctt

SEQ ID NO: 650703 - DNA, 120 bp, Artificial Sequence
  ENSG00000183023_122 (sequence is synthesized)
tagcttgattttccagaacacatcaagccccgtatggtcagtgtttccctgttatcatccacttatgtgtatgggttgaaggtactttaagttgtgagccagctgctgcccatattgggt

SEQ ID NO: 650704 - DNA, 120 bp, Artificial Sequence
  ENSG00000183023_123 (sequence is synthesized)
caccaatgcacttgtcaagcccatgtaaccacatgaagtttgatagaaatataaacatttattttgaaataattccatgtgcacggttggaaaaacagtctcccttccctgagaggaatg

SEQ ID NO: 650705 - DNA, 120 bp, Artificial Sequence
  ENSG00000183023_124 (sequence is synthesized)
agtaatttctcccttttcaagaagtgtacagtagaaaatgtaatgagattggaatggattccaaatcagtgacctttttaaggctgaaaccactattttaaatgaaaactttaagttcat

SEQ ID NO: 650706 - DNA, 120 bp, Artificial Sequence
  ENSG00000183023_125 (sequence is synthesized)
acagtttcttatagtaattctacttttattttttagtcagtgtgcttaatcttttaggaaaaaaaactaaccagttattttttactaaagtatgtgaattacaaacaggatgtgcaatga

SEQ ID NO: 650707 - DNA, 120 bp, Artificial Sequence
  ENSG00000183023_126 (sequence is synthesized)
ccaggcagaaagatatttaaaggtgtaattattctaaaggaagatgagaaaaaattcatctgctacagattcaactgtcttttaaatgcctcccttgtcatggagtaaatgactactcaa

SEQ ID NO: 650708 - DNA, 120 bp, Artificial Sequence
  ENSG00000183023_127 (sequence is synthesized)
aaggatttcacaaaagacttaaatctcacccttagcaatcaaccggtcggccacagctcagatgcctcattagcaaaatgaaattgcacaacagacgaaacatagcaaaagaatgtagac

SEQ ID NO: 650709 - DNA, 120 bp, Artificial Sequence
  ENSG00000183023_128 (sequence is synthesized)
atttccatggggtggaagaaaagaagaaagaaaaagcaaccatagtgaactctgcttgcataaacaaagaatgttttagtggaataaatgtaagctttctcttgaaggaatcccagttag

SEQ ID NO: 650710 - DNA, 120 bp, Artificial Sequence
  ENSG00000183023_129 (sequence is synthesized)
aatgtcattggaaacggcaaaactatttcagcttcatagcagtaatatattccaactttattaccactgaggcacaaagctaaatttgtcagggggaaaggtaagcaaaaattactgaca

SEQ ID NO: 650711 - DNA, 120 bp, Artificial Sequence
  ENSG00000183023_130 (sequence is synthesized)
ttgcaaccgataaaatgatcttgtgagactcaatattgagaaagaaaattaaaatagctaatatttctgttataattccagtgattactaagacttctgccaagggataaaattactttt

SEQ ID NO: 650712 - DNA, 120 bp, Artificial Sequence
  ENSG00000183023_131 (sequence is synthesized)
ccttctctcattataaatttctatatagagctattttaatgcagtaaggactgtattttcatattttaataaatccctcacgttgaatttgccccccatttcagatttgattaggaaata

SEQ ID NO: 650713 - DNA, 120 bp, Artificial Sequence
  ENSG00000183023_132 (sequence is synthesized)
ctaaattgagaaggcaggtttttccatctttttaaaaacaagtatgcaccataagcattttcagcggatgtctgccttaagcaatcttggtagagctgtcaatcagtggcaggtgcttgt

SEQ ID NO: 650714 - DNA, 120 bp, Artificial Sequence
  ENSG00000183023_133 (sequence is synthesized)
ttaaggaagagaacctgtgaatagatttagcctttcttcctcacagacagctgctcattcacacacgctcatctcgtcttcctcaacttcttgcaccaatcccgcctcttggattgaccc

SEQ ID NO: 650715 - DNA, 120 bp, Artificial Sequence
  ENSG00000183023_134 (sequence is synthesized)
acatccacctagcagttgaacaaactgcagattctaattacatgtcccgacagttgctcaacttaatttttcaccaactgaatttcatgcattgccccttgatgttccttccctctgttc

SEQ ID NO: 650716 - DNA, 120 bp, Artificial Sequence
  ENSG00000183023_135 (sequence is synthesized)
actcttttctataagtccttgcatttgatatactttaaaatggatttgactaggaaaaaaaaaaaaaccaagtcagcaaacccttgtgttcattcaagaaattgtgaacaaatttagctg

SEQ ID NO: 650717 - DNA, 120 bp, Artificial Sequence
  ENSG00000183023_136 (sequence is synthesized)
ttatggtaataatcctgaggtgagagagaaaatatcacctaggtgacaagagatcattttaacgctattactaaaatagtattctatgaatagaggccatagaattttctacaaatagac

SEQ ID NO: 650718 - DNA, 120 bp, Artificial Sequence
  ENSG00000183023_137 (sequence is synthesized)
ttgtagggactcacattttgaatcatattttacttataggtttgctgtatatactgattaaacttctgaacctaaagattctctataattaaactagcacaaatataatctgtcccttac

SEQ ID NO: 650719 - DNA, 120 bp, Artificial Sequence
  ENSG00000183023_138 (sequence is synthesized)
ccacattgtaagaatgtctggtgggggaaatccaatattgaccttcacattccacatggaaaatctttgtccccagagtgcaattagggtgattaaaaataagccgcttttgtgagtctc

SEQ ID NO: 650720 - DNA, 120 bp, Artificial Sequence
  ENSG00000183023_139 (sequence is synthesized)
aagtttgttccccaaacaagcagcatcagcaactggaaatttgttagacatgcaaattatccagtcccacctgagacttcagcccagatctatgaatcaaaaattttggagtgaccctgg

SEQ ID NO: 650721 - DNA, 120 bp, Artificial Sequence
  ENSG00000183023_140 (sequence is synthesized)
caatatggactttaataagcccctaggatggttctgatgcatgctcaaatttgagaatcattgatctatgacacagcattctgagtggccaagaatgaacaatgtcacccactgcttaat

SEQ ID NO: 650722 - DNA, 120 bp, Artificial Sequence
  ENSG00000183023_141 (sequence is synthesized)
tatgctttcccttaagaaaaggtttaaatgcttaaaaggtaggttctttataaagataatgcattcagatatatgggagatatgtccaccattcagacttaaaatataattttaagggac

SEQ ID NO: 650723 - DNA, 120 bp, Artificial Sequence
  ENSG00000183023_142 (sequence is synthesized)
attaatccttatgtctttttctggcataactgagtctgaggcagcctctccagtcagagatttctaatcagcttatctagttcttttaaaaccccacagctgatctactttgcctgactt

SEQ ID NO: 650724 - DNA, 120 bp, Artificial Sequence
  ENSG00000183023_143 (sequence is synthesized)
ccccggggcctagaaaatgaccctggacacctttctctaactgattagctctggctgatttgtcttaatgctaaaccactgtgtaacagtactaaattatacttaatgacacagtctact

SEQ ID NO: 650725 - DNA, 120 bp, Artificial Sequence
  ENSG00000183023_144 (sequence is synthesized)
gttttgaagagtgctgtgtatgactgactgagctaaaaggattgctggctatgagtgagttttagttttagaattcattttcaaagactcacaaggctcaagaagcttgaaaaccacaga

SEQ ID NO: 650726 - DNA, 120 bp, Artificial Sequence
  ENSG00000183023_145 (sequence is synthesized)
tgatgtatacagtagctggagttccctggaggctcctttctagggtctctcatttgaattggtgcagaactgaaagcagagagtcagaaagtaactctgcttgtaaaaatggcttaggaa

SEQ ID NO: 650727 - DNA, 120 bp, Artificial Sequence
  ENSG00000183023_146 (sequence is synthesized)
aaggaacttaagattgtgggttatatgtgtgtatgtgtgcacacacatgtatgtttcctgaattctaacctgaaaatatcacatttgtggatacttaaaatactcatatgcattttgata

SEQ ID NO: 650728 - DNA, 120 bp, Artificial Sequence
  ENSG00000183023_147 (sequence is synthesized)
cacaaaagcaattcaaagtatgtaaaaggaggctggaaatgtaagcttaacagtgatattctggagaaaaatgttgtaactgtcactccaggcctcccttaggagaaaccaaacttgtca

SEQ ID NO: 650729 - DNA, 120 bp, Artificial Sequence
  ENSG00000183023_148 (sequence is synthesized)
gatattttggaatggtagctctttttcaggaattagaataactgaagtatgatactgtgttccgtgtgctttaaaatctgtgaccctcccctgttgctggtcatagcttcagcatttgag

SEQ ID NO: 650730 - DNA, 120 bp, Artificial Sequence
  ENSG00000183023_149 (sequence is synthesized)
tgtccattgtctgtcgctgaggacattttctcatcggctcttttccccattgtcccattcctctcactcacacctgattaccaaatagctctaacgaaatcacagtcactccttcctgtg

SEQ ID NO: 650731 - DNA, 120 bp, Artificial Sequence
  ENSG00000183023_150 (sequence is synthesized)
tttccaccattgtgtacatcttcatttgcacaccctattttttaatcaaagttaaagcctcaccaacaaggtacttagaacaatcacccacttctggccacttcgtgacgggaaatacat

SEQ ID NO: 650732 - DNA, 120 bp, Artificial Sequence
  ENSG00000183023_151 (sequence is synthesized)
ctttgcaggggaaggagctggatcagactgacagggtttcactcagactatttcaaacaatgaggagccttgacctcattcccaacttttgccgtccatagtggttgatttcttgttttc

SEQ ID NO: 650733 - DNA, 120 bp, Artificial Sequence
  ENSG00000183023_152 (sequence is synthesized)
tctttctctctttttttaacagaaactcttaagctcaaggctaaattacagtggggacttgcctttgtctacagtccatggtttctgtattggctcaagccttgaaatcttgaaacaagc

SEQ ID NO: 650734 - DNA, 120 bp, Artificial Sequence
  ENSG00000183023_153 (sequence is synthesized)
ctaaattaaaattttctcttagcttaagaaaaaaagttacatattgtcaagacccttatgtgtgtggtccattaaaaaggtcttgatattagaagataacagcaaattgtttcttatccc

SEQ ID NO: 650735 - DNA, 120 bp, Artificial Sequence
  ENSG00000183023_154 (sequence is synthesized)
acaacagctttgcctttcagtgtcctttgtggtggttttcgtaggtcagtggtacaattcaacactcttccaataagccataataataattgttggcacaactgttattacaacaggact

SEQ ID NO: 650736 - DNA, 120 bp, Artificial Sequence
  ENSG00000183023_155 (sequence is synthesized)
tgcctgggttccatctattaatttttacagacagtaggaagctcacaccgaggagacattggtaacttcctggacaagggcaaagaaaggaactagcatattgtacatactgtgtacgtg

SEQ ID NO: 650737 - DNA, 120 bp, Artificial Sequence
  ENSG00000183023_156 (sequence is synthesized)
cacagaacactggtctgtgcctttggagtgttctcagaggggcaggccagaagggaggattcaggtaggaaatgaatctaggacttctcttgcctttgatggttactgatggcaattgtg

SEQ ID NO: 650738 - DNA, 120 bp, Artificial Sequence
  ENSG00000183023_157 (sequence is synthesized)
tttcccactgaataacttggtggacaattttgatagtaaactgaactcataccgagcaagcacaatagtcaatccataaagaaaagggtggcatatcataatgccagaaaccttgtctcc

SEQ ID NO: 650739 - DNA, 120 bp, Artificial Sequence
  ENSG00000183023_158 (sequence is synthesized)
ctaagaggtgatcatgaatttcctatacagggcaaaaaagggaagaatagcctattcatattctgtattcacagtttgaaggacccatcacaaatgaccttcaaagactgacagggggca

SEQ ID NO: 650740 - DNA, 120 bp, Artificial Sequence
  ENSG00000183023_159 (sequence is synthesized)
ggtagaagggaggcaaaaatgcagagaaaaagatgttaccttgaaaaatgaagtaagaaatcctaatattcccgtagttgatcctaaagtttgttcccatgtctacggttatttctaaat

SEQ ID NO: 650741 - DNA, 120 bp, Artificial Sequence
  ENSG00000183023_160 (sequence is synthesized)
aacttcactacactttgaaattccttagtggtggtttatcagtaatacttaactgaatttttccgtttctattctttgctgccaatgaatgtaatctccacgacttgccgttcgagtgca

SEQ ID NO: 650742 - DNA, 120 bp, Artificial Sequence
  ENSG00000183023_161 (sequence is synthesized)
cgcacagacacacacacataatggtatatgcatcatatattactcattttgtgggaaacacaatgtattataatgaaaaagattccagcacattctttcagtgtgtttcagtgataaaat

SEQ ID NO: 650743 - DNA, 120 bp, Artificial Sequence
  ENSG00000183023_162 (sequence is synthesized)
tttgtgggggaatagaggtatacatactctctttgctgaccatattgttgaaattatgatcttaagcaacactgttagaaatgcttgcataaagtatcttctctagtattaatgagttga

SEQ ID NO: 650744 - DNA, 120 bp, Artificial Sequence
  ENSG00000183023_163 (sequence is synthesized)
ttcactctgaattgaaggttcaaaaaaatgcactaaacaaatatttttatatctgtggtattttcctattaactactcttagtgaacacgtgaccatatacctgatatcattaaaaagga

SEQ ID NO: 650745 - DNA, 120 bp, Artificial Sequence
  ENSG00000183023_164 (sequence is synthesized)
aaatggcctaaacgaaacgttaaaagtggaggtatttataaagtcttctgccaaagaccattgtttaatgatctgtaaaatgtagattatcttcttttattatgaatgtgattgtaagaa

SEQ ID NO: 650746 - DNA, 120 bp, Artificial Sequence
  ENSG00000183023_165 (sequence is synthesized)
acaccctaacattctctaacttttgaaaatgaatattttgtatttctaaggaccaaggaaaatattttttaagccaatgtagtacacagaagccttgtaaatgagaggtacaatgacttg

SEQ ID NO: 650747 - DNA, 120 bp, Artificial Sequence
  ENSG00000183023_166 (sequence is synthesized)
gatcaactgcataatgctagattagaattccagcatttgatgataaatttatcaatctttcctataattcttatactgcactaaattacattttggaaattttagctaatcttttcaaat

SEQ ID NO: 650748 - DNA, 120 bp, Artificial Sequence
  ENSG00000183023_167 (sequence is synthesized)
taaaggcaccaacattaatgacagatcttctctaatatgaaaagcatcaaaacattccctttcaagcactttgaatggatgaaaattgccatataattttcccacctacctaaccattcc

SEQ ID NO: 650749 - DNA, 120 bp, Artificial Sequence
  ENSG00000183023_168 (sequence is synthesized)
atgtaagttaactgagcagtctaacaatgttgtacagaaggttgacagactatgtgcaccaagaatatttaagttgtgcagttagcaagaactagccatttcaaatatactcaaatgttt

SEQ ID NO: 650750 - DNA, 120 bp, Artificial Sequence
  ENSG00000183023_169 (sequence is synthesized)
aataaaaattttgactcctataattttgttcaaactgatgtcttttaaaataattagattttatttgaattttaaaagtaatctgttgtaaattagatgttactttgttgactctgtgat

SEQ ID NO: 650751 - DNA, 120 bp, Artificial Sequence
  ENSG00000183023_170 (sequence is synthesized)
tgattcaatgtacactcagccatattcctgtggggaaatatcaatcttactgactttcatggcatgagccagagattcatagtttcctttaggactataagtatgaagacaaaacacacc

SEQ ID NO: 650752 - DNA, 120 bp, Artificial Sequence
  ENSG00000183023_171 (sequence is synthesized)
aaaataaaatgctagtgaagaaattagaaacctattgtataaaatgtatttttaaaatcttaagatatatgtgatttacactgcctgttaatctagtctctttgtgattaaaaaaaaaca

SEQ ID NO: 650753 - DNA, 120 bp, Artificial Sequence
  ENSG00000183023_172 (sequence is synthesized)
taatatttgttaagactcagacaccaaatatttgtgatgtttgtatagcaccatcgttatatgtgatttcaaagggtaagcatctctgtcgtaatcatgtaagcccacagaagaataaat

SEQ ID NO: 650754 - DNA, 120 bp, Artificial Sequence
  ENSG00000183023_173 (sequence is synthesized)
tcctgaggttatgtacaaccaactctcagaattcagacttcctgcagctgccatatcaccaataaatgagaattgtgaaaaacaatttttaaagaattgagtttatgatcactgtgcatt

SEQ ID NO: 650755 - DNA, 120 bp, Artificial Sequence
  ENSG00000183023_174 (sequence is synthesized)
ttgttaatgaatgatttcagagttttatttttaccagaaatgctctcagccagtaaacacaactgctgatttcaaccatactatcatttcaatggtttctatattcttgatctaactacc

SEQ ID NO: 650756 - DNA, 120 bp, Artificial Sequence
  ENSG00000183023_175 (sequence is synthesized)
aaaaactggaagcttgttgcaaggtgtgtcctaacaaacatacaataaatgactcttcctgcatgctgcctgagatatgttgtaatttgaaatgtcttatcaaaaaattatacatgttat

SEQ ID NO: 650757 - DNA, 120 bp, Artificial Sequence
  ENSG00000183023_176 (sequence is synthesized)
aacccaaagttgaactggcaatatttttcatgtgtaaaattgatggtatgttaatatcaaaagcagaagcattgtttgtcatacatgtatgttatatgtgatgtttaatcgtgttaaact

SEQ ID NO: 650758 - DNA, 120 bp, Artificial Sequence
  ENSG00000183023_177 (sequence is synthesized)
gtaatctgtgaagttttcattgcctgaactagtcaattctgtataaatcattgtcttaattgttttcctaatcttaccatatttcctaacactgaaatataaatgtttgtcaattagcca

SEQ ID NO: 650759 - DNA, 120 bp, Artificial Sequence
  ENSG00000183024_0 (sequence is synthesized)
caattaacccaactttcttcctacagacaaatggaggggaaaaatctgaccagcatctcagaatgtttcctcctggggttctctgagcagctggaggagcagaagcccctctttgggtcc

SEQ ID NO: 650760 - DNA, 120 bp, Artificial Sequence
  ENSG00000183024_1 (sequence is synthesized)
ttcctgttcatgtacttggtcacggtggcaggcaacctcctcatcattctagtcatcattactgacactcaactccatacccccatgtacttctttctagccaacctctcccttgcagat

SEQ ID NO: 650761 - DNA, 120 bp, Artificial Sequence
  ENSG00000183024_2 (sequence is synthesized)
gcctgctttgtgtccaccacagtccctaagatgctggcaaacatacagatccagagtcaggccatctcctactcagggtgtctactacagttgtattttttcatgttatttgtgatgctg

SEQ ID NO: 650762 - DNA, 120 bp, Artificial Sequence
  ENSG00000183024_3 (sequence is synthesized)
gaggcattcctcttggcggtcatggcctatgactgctacgtggccatatgccacccacttcattacattctgatcatgagccctgggctctgcatcttcctcgtgtctgcatcctggatc

SEQ ID NO: 650763 - DNA, 120 bp, Artificial Sequence
  ENSG00000183024_4 (sequence is synthesized)
gaacagcctgtccttctgcgcaaaccatgagatcccacacttcttctgtgacatcaatcccctcctgagtctgtcctgcacagaccccttcaccaatgagctggtgatcttcatcactgg

SEQ ID NO: 650764 - DNA, 120 bp, Artificial Sequence
  ENSG00000183024_5 (sequence is synthesized)
gggtctcacaggactcatttgtgtgctttgcctgattatctcttacacgaacgttttctcgaccatcctgaagatcccatcagctcaggggaagcggaaagccttttccacctgcagctc

SEQ ID NO: 650765 - DNA, 120 bp, Artificial Sequence
  ENSG00000183024_6 (sequence is synthesized)
tcatctctccgtggtctctctcttctttgggacttctttttgtgttgatttcagttctccctcaacccactcggcccagaaggacacagttgcatcagtgatgtacacagtggtaactcc

SEQ ID NO: 650766 - DNA, 120 bp, Artificial Sequence
  ENSG00000183024_7 (sequence is synthesized)
aatgttgaatccctttatctacagtttgaggaaccaagaaataaagtcttccctgagaaagttaatctgggttcggaaaattcattccccttagtggtagtgacttgacatccaatatgg

SEQ ID NO: 650767 - DNA, 120 bp, Artificial Sequence
  ENSG00000183032_0 (sequence is synthesized)
cttctttccagagacattttcggagccgagggcgcctctgcgagagcgctgcgaacaggttccgacgcgccggagatcgcgcgacgaatctgcgcctcgaaccctcgctttccagcagtc

SEQ ID NO: 650768 - DNA, 120 bp, Artificial Sequence
  ENSG00000183032_1 (sequence is synthesized)
gccggattgctgctccacagggagccaacgcgcttgaggaccagcccagccggggctctctggatcagtaggctgtgcaggctgcgagctcgttgacgcatctcagcccactcccttgtc

SEQ ID NO: 650769 - DNA, 120 bp, Artificial Sequence
  ENSG00000183032_2 (sequence is synthesized)
ctcccgcctggcgaagatgtccgccaagcctgaagtcagcttagtgcgcgaggcttctcggcagatcgtggccggtggttctgcaggtcttgtagaaatttgcctgatgcaccccctaga

SEQ ID NO: 650770 - DNA, 120 bp, Artificial Sequence
  ENSG00000183032_3 (sequence is synthesized)
tgtggtgaaaaccaggtttcagattcagagatgtgcaaccgatccaaacagttataaaagcttggtagacagctttcgaatgattttccaaatggaagggttatttggtttttacaaggg

SEQ ID NO: 650771 - DNA, 120 bp, Artificial Sequence
  ENSG00000183032_4 (sequence is synthesized)
aattctgccacctatcttggctgaaaccccaaaaagagcagtgaagtttttcacctttgagcagtacaagaaattgctgggatatgtgtcactgtcaccagcattgacattcgccattgc

SEQ ID NO: 650772 - DNA, 120 bp, Artificial Sequence
  ENSG00000183032_5 (sequence is synthesized)
tggattgggatctggactaacagaagccattgtagttaacccttttgaggtagtaaaagttggcttgcaagcaaatcggaacacatttgcagagcaaccatccactgtgggttatgcaag

SEQ ID NO: 650773 - DNA, 120 bp, Artificial Sequence
  ENSG00000183032_6 (sequence is synthesized)
acaaatcattaagaaggaaggctggggactccagggcctcaacaaaggattaactgcaactttgggacgacatggagttttcaacatggtttattttggcttctactacaatgtcaaaaa

SEQ ID NO: 650774 - DNA, 120 bp, Artificial Sequence
  ENSG00000183032_7 (sequence is synthesized)
catgattcctgtcaataaggatccaatcttggagttttggagaaaatttgggattggtcttctctcggggacaatagcctcagtcattaacatcccttttgatgttgccaaaagtaggat

SEQ ID NO: 650775 - DNA, 120 bp, Artificial Sequence
  ENSG00000183032_8 (sequence is synthesized)
tcaagggcctcaaccagttcctggagagatcaagtacagaacctgttttaaaacaatggcaacagtctatcaggaagaagggattttagctttgtacaaaggcctgcttcccaagattat

SEQ ID NO: 650776 - DNA, 120 bp, Artificial Sequence
  ENSG00000183032_9 (sequence is synthesized)
gagacttggaccaggtggtgcagtgatgctgctggtttatgaatacacctattcatggcttcaagagaactggtgattgcctatgaagtgtttttcccccttgagataatggatatttgc

SEQ ID NO: 650777 - DNA, 120 bp, Artificial Sequence
  ENSG00000183032_10 (sequence is synthesized)
tatgcagcaccatgaagaagagagactatcgatcggccaggtgtataattatgaaggagaaaactgttcaagaacaaaatctattttaatactttaaaaaatgtctataggcaacttgag

SEQ ID NO: 650778 - DNA, 120 bp, Artificial Sequence
  ENSG00000183032_11 (sequence is synthesized)
aacttgagattatagttttggctgtataaataaaactgtgagaagaaaaaaataatatgaaacaatgaggtatttaaagtgaatatagaaaaatagcatagaaatcatatatttatttca

SEQ ID NO: 650779 - DNA, 120 bp, Artificial Sequence
  ENSG00000183032_12 (sequence is synthesized)
atagaaactttgtctcctgtgttcctcttcaatgcttcacaatgaaaattcattgtattgatcagcatttttcctaagaggtctagaaatgcttaaactattgaaaataaatcaaattat

SEQ ID NO: 650780 - DNA, 120 bp, Artificial Sequence
  ENSG00000183032_13 (sequence is synthesized)
tcaaagactggattaaaaaaaagttaagccaaaatttaagcagtttttataatgaattaaattattccataaataatatttaaagagcacaagaaaaattttttaaagtgcactaaaatg

SEQ ID NO: 650781 - DNA, 120 bp, Artificial Sequence
  ENSG00000183032_14 (sequence is synthesized)
accttttaagaatgtttaattttatgaatactatgttaaaatgtaaatctgttggttttttttagtaactatgcacatatcagctctattttcctacatctactttatatctcatattgc

SEQ ID NO: 650782 - DNA, 120 bp, Artificial Sequence
  ENSG00000183032_15 (sequence is synthesized)
tgtaagataataaataggtattttaaaacattgtttaaaacagaatgttaaaacactgttgtttaagcatgtttaaatcaaggtattccaaatctcttctaacacaagtaggaaacatga

SEQ ID NO: 650783 - DNA, 120 bp, Artificial Sequence
  ENSG00000183032_16 (sequence is synthesized)
gagatattgtcatgttaaatcacaaattggaaacacctttggacccatttgtcagccatcagtatttgcatccaaatacctttattcagcatgcctacctgtgccatttttaggaagaat

SEQ ID NO: 650784 - DNA, 120 bp, Artificial Sequence
  ENSG00000183032_17 (sequence is synthesized)
gtatagaacagaactgcattttcaggttattagttttaaacgacaacttcaggtgggaagtcagctgtctgcagtattaaaatatgtatgatgaaggggaaatgttctgaaaaagaaata

SEQ ID NO: 650785 - DNA, 120 bp, Artificial Sequence
  ENSG00000183032_18 (sequence is synthesized)
cacttagcatttctaaggattactatactaacatgtatcaacaaaaatatctccttggtcttgatgtaaccaaacttgattttatatctgcatccagagatgatgctgattcagtaaagt

SEQ ID NO: 650786 - DNA, 120 bp, Artificial Sequence
  ENSG00000183032_19 (sequence is synthesized)
caacaagaataactgaaagtccatatgacacctgtcctaagttactaccgtgggctatttctactacggggctatttcactaaagcattttgaaaataaaaagtaaaagataacatggta

SEQ ID NO: 650787 - DNA, 120 bp, Artificial Sequence
  ENSG00000183032_20 (sequence is synthesized)
attattactttttattaatttagagcatttgaagtataaaaataaaaggcttttgacatactgtatatacatacatagccttctgttgtacatcctttccaacgtgttttttaaaattta

SEQ ID NO: 650788 - DNA, 120 bp, Artificial Sequence
  ENSG00000183032_21 (sequence is synthesized)
tatttcagtccaatattcaataaaagggtcattaaaaacaaaacaaaattgtgaaaaaaaagaaataagaatgtgtctctgttgcacaactgcattctatccttgcaggtaatattctta

SEQ ID NO: 650789 - DNA, 120 bp, Artificial Sequence
  ENSG00000183032_22 (sequence is synthesized)
catccaatgagagcgctgcctgcatagaggtcatgaaattgaacctttaacctctccatgtggatcagatagaaaaggatttctgaagagtgcatttgccagtttaaaagcaacactttt

SEQ ID NO: 650790 - DNA, 120 bp, Artificial Sequence
  ENSG00000183032_23 (sequence is synthesized)
accatctatgagatagaggaaatatgtcaacattaaccaataataatctttaaaagttaaccctttaatccatcctattttccttctcgtattttaaaaagtggctttaaatcataattt

SEQ ID NO: 650791 - DNA, 120 bp, Artificial Sequence
  ENSG00000183032_24 (sequence is synthesized)
tctttgaatagcaaattgtatctgatatcttttaaaaattactccatgtgaattcactgttaagacctagagggagaaaaggaaacttcaataccattaatattagattttttaaaatac

SEQ ID NO: 650792 - DNA, 120 bp, Artificial Sequence
  ENSG00000183032_25 (sequence is synthesized)
aagaaccagaaaaaaattataaatagcacaataacaagagatttcttaatttagataaagaaaataacattatttgcatttccacacaagcaagtaatattttttaaagccccctaacag

SEQ ID NO: 650793 - DNA, 120 bp, Artificial Sequence
  ENSG00000183032_26 (sequence is synthesized)
ccacctaaaaacatttgataaagaatagttctgtaccttacatcagtttttcagatgacaggagagtccctgtatggtatggttttaaagaagtctccaccaaaatattggattggatct

SEQ ID NO: 650794 - DNA, 120 bp, Artificial Sequence
  ENSG00000183032_27 (sequence is synthesized)
ttgttccattcagtttatagtctattttctcaccagactgggaactccagatgtcaatggaagttttacaagatcaaaggaagactatggccctgagagttcatctgctccttctgctta

SEQ ID NO: 650795 - DNA, 120 bp, Artificial Sequence
  ENSG00000183032_28 (sequence is synthesized)
ttcttctcctgaagttataatcctctatttgtagcactgaatttcggttgctttagaaataaatgcagttcaaagctctctataagatatctgctgtctgaaaaaagcagtcactctaac

SEQ ID NO: 650796 - DNA, 120 bp, Artificial Sequence
  ENSG00000183032_29 (sequence is synthesized)
ataatttgtgtgtcagaaatctgcttactgtttacatcctagtgatttgaaaacctaactaatctagccatctgagttttaaacgaagccacgaaaccgatgtggtggaaccgcattgcc

SEQ ID NO: 650797 - DNA, 120 bp, Artificial Sequence
  ENSG00000183032_30 (sequence is synthesized)
atgtagactgtgcacagcacagaccggaagaaattaaaatcacctagggaatccatcttcaacatccatatccagtgaggtgctcttttagttattgcacagaattagtaccaaaaaacc

SEQ ID NO: 650798 - DNA, 120 bp, Artificial Sequence
  ENSG00000183032_31 (sequence is synthesized)
ctcaatatattaattttccaacagctgaattgtaccaatgtcctaaaaacatatttttaagcctatattgccaaacaggaagaacttcctaaacagaagggattaaaaactgtagaattt

SEQ ID NO: 650799 - DNA, 120 bp, Artificial Sequence
  ENSG00000183032_32 (sequence is synthesized)
ccgccaagcctgaagtcagcttagtgcgcgaggcttctcggcagatcgtggccggtggttctgcaggtcttgtagaaatttgcctgatgcaccccctagatgtggtgaaaaccaggaact

SEQ ID NO: 650800 - DNA, 120 bp, Artificial Sequence
  ENSG00000183032_33 (sequence is synthesized)
agccacttgaccacacctaaacaaccagaaggagaagaaatatgatactcctgctggcctgaaggaagggacatggtgtcagtgtgccataggtatgtcttttccaagccttataagcat

SEQ ID NO: 650801 - DNA, 120 bp, Artificial Sequence
  ENSG00000183032_34 (sequence is synthesized)
tatacatatactggttgtattgagttgaacagtgtccctgccccaattcacatccttcccagaacctcagaaggtgactttatttggaagcagggtcttcgcagatgtgattattcaact

SEQ ID NO: 650802 - DNA, 120 bp, Artificial Sequence
  ENSG00000183032_35 (sequence is synthesized)
taagaggtggtcatgtggaatagagtgtgccctaagtccactatgactggtattctaagaacaaggaaagagactcacagaaagagacatgctgtaaagatggccggatgccatcttctc

SEQ ID NO: 650803 - DNA, 120 bp, Artificial Sequence
  ENSG00000183034_0 (sequence is synthesized)
agaggagacgctcgccgtcccctgacccccagctcagcgccggctccaagcccagccagtgatccctctagccttctccagtcgcctccgccatgtccgaggagctggcccagggcccca

SEQ ID NO: 650804 - DNA, 120 bp, Artificial Sequence
  ENSG00000183034_1 (sequence is synthesized)
aggagagccccccggcgccgcgtgcgggccccagggaggtgtggaagaagggtggccgcctgctgtcggtgctgctggcggtgaacgtgctgctcctcgcctgcacgctcatcagcggcg

SEQ ID NO: 650805 - DNA, 120 bp, Artificial Sequence
  ENSG00000183034_2 (sequence is synthesized)
gagccttcaacaaggtggccgtgtacgacaccgacgtgttcgcgctgctcactgcgatgatgctgctggcaacgctctggatcctcttctacctcctccgaaccgtgcgctgcccctgcg

SEQ ID NO: 650806 - DNA, 120 bp, Artificial Sequence
  ENSG00000183034_3 (sequence is synthesized)
cggtaccctaccgggacgcgcacgctggccccatctggctccgaggtgggctggtgctgtttggaatctgcaccctcatcatggatgtcttcaagaccggctactactccagtttctttg

SEQ ID NO: 650807 - DNA, 120 bp, Artificial Sequence
  ENSG00000183034_4 (sequence is synthesized)
agtgccagtcagccatcaagatcctgcaccccctcatccaggctgtgtttgtcatcatccagacctactttctctgggtctctgctaaagactgcgttcacgtccacctggatctgacct

SEQ ID NO: 650808 - DNA, 120 bp, Artificial Sequence
  ENSG00000183034_5 (sequence is synthesized)
ggtgtggtctcatgttcacactcaccaccaacctggccatctggatggcggccgtggtggatgaatctgtgcaccaatcccactcctacagcagttctcacagcaacgccagccacgccc

SEQ ID NO: 650809 - DNA, 120 bp, Artificial Sequence
  ENSG00000183034_6 (sequence is synthesized)
gtctcatctctgaccagcatgcagacaacccggtcggaggagactcctgcctctgcagcacggccgtctgccagatcttccagcaggggtacttctacctatatcccttcaacatcgagt

SEQ ID NO: 650810 - DNA, 120 bp, Artificial Sequence
  ENSG00000183034_7 (sequence is synthesized)
acagcctcttcgcctccaccatgctgtatgtcatgtggaagaatgtgggtagattcctggcctccacccctggccacagccacaccccaacccctgtcagcctcttccgggagacctttt

SEQ ID NO: 650811 - DNA, 120 bp, Artificial Sequence
  ENSG00000183034_8 (sequence is synthesized)
gtcatctactacagcttcaacattgtctgcttgggactcaccaccttggtcagcctgagcggctccatcatctaccgttttgaccgccgggccatggaccaccataagaaccccacgcgc

SEQ ID NO: 650812 - DNA, 120 bp, Artificial Sequence
  ENSG00000183034_9 (sequence is synthesized)
actctggacgtggccctgctgatgggtgccgccctgggtcagtacgccatctcttactactccatcgtggctgtggtggcgggcacaccccaggacctgctggcagggctcaacctcacc

SEQ ID NO: 650813 - DNA, 120 bp, Artificial Sequence
  ENSG00000183034_10 (sequence is synthesized)
catgcactgctcatgatcgcccagcacaccttccagaacatgtttatcatcgagagccttcaccgaggaccgcccggggctgagcctcacagtacccaccccaaggagccctgccaagac

SEQ ID NO: 650814 - DNA, 120 bp, Artificial Sequence
  ENSG00000183034_11 (sequence is synthesized)
ctcaccttcaccaacctggatgccctccacacgttgtccgcctgcccacccaaccccgggctggttagccccagcccttcagaccagcgggaagcagtggccatcgtctcaacccccaga

SEQ ID NO: 650815 - DNA, 120 bp, Artificial Sequence
  ENSG00000183034_12 (sequence is synthesized)
agccagtggagacgccagtgcctaaaagacatttctctgtttctcctactctgcaatgtcattctgtggatcatgcctgccttcggggcccgccctcatttcagcaacacagtggaggtg

SEQ ID NO: 650816 - DNA, 120 bp, Artificial Sequence
  ENSG00000183034_13 (sequence is synthesized)
gatttctacggctactccctctgggcggtcatcgtcaacatctgcctccctttcggcatcttctaccgcatgcacgctgtgtccagcctgctggaggtctacgtgctgtcctgaggcctc

SEQ ID NO: 650817 - DNA, 120 bp, Artificial Sequence
  ENSG00000183034_14 (sequence is synthesized)
caacagaggcatggggggcaggaagagggggctcagctcatgtgcccactcagacaccctctgggaatgaatcccagctggtgccatatgacagcccatttccttctggtcccagagtgg

SEQ ID NO: 650818 - DNA, 120 bp, Artificial Sequence
  ENSG00000183034_15 (sequence is synthesized)
aattttcacaaaagttatttttccaggttcaatttttaaatcacagtcaggacaggcccatccaccccagtatgaccgtggggcatgaggtgactggggaagggagacctctcctggcag

SEQ ID NO: 650819 - DNA, 120 bp, Artificial Sequence
  ENSG00000183034_16 (sequence is synthesized)
catttctaggacccaacaagatctggaggtgccggctctggttccatctctaatcccctgctgtggcctggccagtgtactgcccggagctggaaaccaataaacctgtgatttgccccc

SEQ ID NO: 650820 - DNA, 120 bp, Artificial Sequence
  ENSG00000183034_17 (sequence is synthesized)
accttgcaggagagattcaggctttccaccctggggcagggcctctctttatgtcccctgggtggggttgcagccaagccctccttgctttgtcaggctgacttccactaccttgtgggg

SEQ ID NO: 650821 - DNA, 120 bp, Artificial Sequence
  ENSG00000183034_18 (sequence is synthesized)
ccctttctcccaggggagggagtggtggtggcccccgggaaaacctcctagccctctctttggtggcataccagccaggctgtgttcctaccaaaatcagcttccctgttcacacagggc

SEQ ID NO: 650822 - DNA, 120 bp, Artificial Sequence
  ENSG00000183034_19 (sequence is synthesized)
tcctcttaatgctggccctgtggctaccaggccttgggccgggtgctttgtgaatttataacgtcagtctcctgtgccctcatgagggcatagaggcaaaggacagagccagggtcctcc

SEQ ID NO: 650823 - DNA, 120 bp, Artificial Sequence
  ENSG00000183034_20 (sequence is synthesized)
tcctgttgcaggatctacctctgcagtataggtgtaggtgaccccagaagggaagtatcaggggtacccttttatccttgaggctgcagcccaggcccccctgtccagtctccatcccac

SEQ ID NO: 650824 - DNA, 120 bp, Artificial Sequence
  ENSG00000183035_0 (sequence is synthesized)
actatgctcaagtccaggcaacgtacaggcaggggaaatgtctcttccaaggttgctaaaagtaaacatcagaacatatgataattccattccaatcagtgaatcaagcagaaaatcatg

SEQ ID NO: 650825 - DNA, 120 bp, Artificial Sequence
  ENSG00000183035_1 (sequence is synthesized)
gaatcaaaaacactttgctttgacatttcccaaaccactccagagaggtacaaatgataaatcaagacctttgaaatcacaaataacagttactagacatgacaaaagaaaactagaaga

SEQ ID NO: 650826 - DNA, 120 bp, Artificial Sequence
  ENSG00000183035_2 (sequence is synthesized)
aggccagaaaccagctcataaatggataaggcattctttcagaaaaattttgcaatggccacccatttacacagctgccagggaacagactccattcagacatctttatacttccaaaac

SEQ ID NO: 650827 - DNA, 120 bp, Artificial Sequence
  ENSG00000183035_3 (sequence is synthesized)
ccatcttaaaaaagcagaatataaaaagtccaaagatgaaaaaggaggaacacctttgaagaaagattccaagaaaaaaggaggttcatatgcaacaaatccagaatccaagcaaatagt

SEQ ID NO: 650828 - DNA, 120 bp, Artificial Sequence
  ENSG00000183035_4 (sequence is synthesized)
agaagagaaaactaaaagacaaaatgaggcagataaaactcccttaaaatcatcacatgaaaatgaacaatccaagaagtcaaaatccagttcagaaactaatccagaatcccaaaattc

SEQ ID NO: 650829 - DNA, 120 bp, Artificial Sequence
  ENSG00000183035_5 (sequence is synthesized)
taagacagtctcaaaaaattgttcacaaaaagataagaaagattcaaagaattccaagaagacaaacactgaattcctacatacaaagaacaatccaaagaaagatttgaagaggtcaaa

SEQ ID NO: 650830 - DNA, 120 bp, Artificial Sequence
  ENSG00000183035_6 (sequence is synthesized)
gactagtaatgatcccatatcagagatttgctcagaaaatagtttaaatgttgatttcctcatgttagtgggacagtctgatgatgaatccataaattttgatgcatggttaaggaatta

SEQ ID NO: 650831 - DNA, 120 bp, Artificial Sequence
  ENSG00000183035_7 (sequence is synthesized)
ctcacagaataattcaaagaattattctttgaagtatacaaagtatacaaagaaggacacaaaaaagaatgcaaagaaaagctctgatgctgaatctgaagactcaaaggatgctaagaa

SEQ ID NO: 650832 - DNA, 120 bp, Artificial Sequence
  ENSG00000183035_8 (sequence is synthesized)
gagtctactgatgctgaatctggagactcaaaggatgaaaggaaagatacaaagaaggataagaaaaaattaaagaaagatgacaagaaaaaggacacaaagaagtacccagagtctact

SEQ ID NO: 650833 - DNA, 120 bp, Artificial Sequence
  ENSG00000183035_9 (sequence is synthesized)
gatactgaatcaggagatgcaaaggatgcaagaaatgattcaagaaatttgaagaaagcttcaaagaatgatgacaagaaaaaggatgcaaagaaaattacattctctactgattctgaa

SEQ ID NO: 650834 - DNA, 120 bp, Artificial Sequence
  ENSG00000183035_10 (sequence is synthesized)
tctgaactggagtcaaaggagagtcagaaagatgaaaaaaaggataaaaaagattcaaagacagataataaaaagtctgtcaagaatgatgaagagtctactgatgctgactctgaaccg

SEQ ID NO: 650835 - DNA, 120 bp, Artificial Sequence
  ENSG00000183035_11 (sequence is synthesized)
aagggagattcaaaaaagggtaaaaaggatgaaaagaaggggaagaaagattcaaagaaagatgacaaaaagaaggatgcaaagaaaaatgcagaatctactgaaatggaatctgatttg

SEQ ID NO: 650836 - DNA, 120 bp, Artificial Sequence
  ENSG00000183035_12 (sequence is synthesized)
gagttaaagaaggacaagaaacactcaaaggaaaagaaaggttcaaagaaagatatcaagaaggatgcaagaaaggacacagagtctactgatgctgaatttgatgaatcttccaagaca

SEQ ID NO: 650837 - DNA, 120 bp, Artificial Sequence
  ENSG00000183035_13 (sequence is synthesized)
ggctttaaaacatctacaaaaatcaaaggttcagatactgaatctgaagagtcactatataaacctggggctaagaagaaaattgatgaatcagatggcacatctgcaaattcaaagatg

SEQ ID NO: 650838 - DNA, 120 bp, Artificial Sequence
  ENSG00000183035_14 (sequence is synthesized)
gaaggactggaatcaaagagaggattcagaatgtcatccaaaaagactacattcaatgaaaaaggggaaaaagcaagtacaggtagagttcctccatcaagagaaaaaccaccactccct

SEQ ID NO: 650839 - DNA, 120 bp, Artificial Sequence
  ENSG00000183035_15 (sequence is synthesized)
gcttgtgagccttctctaccatcaccaaaggtcagacgtctttgttggtgcaagatgcctcctccacctccaaaaccaagatatgctcctttgcctgaagcaccgtggattcataagctg

SEQ ID NO: 650840 - DNA, 120 bp, Artificial Sequence
  ENSG00000183035_16 (sequence is synthesized)
ctttaaagaacaactgagcacttggtttcacagaatggccttaccacagtaagcaccacctactctcaaatgagcatttctacctctgtggaactgaaataaaaacaagtcttccatgag

SEQ ID NO: 650841 - DNA, 120 bp, Artificial Sequence
  ENSG00000183035_17 (sequence is synthesized)
aacattaccagtttcaacttactatgctcaagtccaggcaacgtacaggcaggggaaatgtctcttccaaggctaaaagtaaacatcagaacatatgataattccattccaatcagtgaa

SEQ ID NO: 650842 - DNA, 120 bp, Artificial Sequence
  ENSG00000183036_0 (sequence is synthesized)
agcgacccctgagcagtgttctctgtgctgagcggcgggactgagctgttgagttagagccaacatgagtgagcgacaaggtgctggggcaaccaatggaaaagacaagacatctggtga

SEQ ID NO: 650843 - DNA, 120 bp, Artificial Sequence
  ENSG00000183036_1 (sequence is synthesized)
aaatgatggacagaagaaagttcaagaagaatttgacattgacatggatgcaccagagacagaacgtgcagcggtggccattcagtctcagttcagaaaattccagaagaagaaggctgg

SEQ ID NO: 650844 - DNA, 120 bp, Artificial Sequence
  ENSG00000183036_2 (sequence is synthesized)
aaccatcatctgtcaagaaattaaaagaacaacaccctagagagaagtcatccacacacaatccacacacgcatagcaaacctccaatgcatgtacagaaacctgtgatatttataccct

SEQ ID NO: 650845 - DNA, 120 bp, Artificial Sequence
  ENSG00000183036_3 (sequence is synthesized)
tgtaggaaggtatagacaatggaattgtgagtagcttaatctctatgtttctctccattttcattcctcctgcaactattttccttgatgttgtaataaaatgaagttacgatgagtgaa

SEQ ID NO: 650846 - DNA, 120 bp, Artificial Sequence
  ENSG00000183036_4 (sequence is synthesized)
cgacaaggtgctggggcaaccaatggaaaagacaagacatctggtgaaaatgtcagagtgtgaagaagggcaaactgtggcttttctgtggtttgctgttggggcagctagctgctgatt

SEQ ID NO: 650847 - DNA, 120 bp, Artificial Sequence
  ENSG00000183036_5 (sequence is synthesized)
cagtgttctctgtgctgagcggcgggactgagctgttgagttagagccaacatgagtgagaaaaaaatatgagctgtgatttgtacaaaacacacaaaatgcatccgttggaatcagaga

SEQ ID NO: 650848 - DNA, 120 bp, Artificial Sequence
  ENSG00000183036_6 (sequence is synthesized)
tccaggaaacttcagctgaaattaacaacttcgtaacacaggtagagcctacgtccttcatgagaaaaatgacacaaatctcagtattctttgtttggagtctcttgacatccatgtgag

SEQ ID NO: 650849 - DNA, 120 bp, Artificial Sequence
  ENSG00000183036_7 (sequence is synthesized)
aatgtcgggtgccccattctcttccttacacactcctgactggctcagcggaaggagctcctgccactcctctaacagcatctgaccttccccgccgccccgggaactggactctctgaa

SEQ ID NO: 650850 - DNA, 120 bp, Artificial Sequence
  ENSG00000183044_0 (sequence is synthesized)
gagcagacacccagcgctgccggaactcggggcgcgcatcccgcaagtcggaacccggcggatcggatcccgcagatcggagacggggcctggagggtggcagcacgcaaagggtgtccc

SEQ ID NO: 650851 - DNA, 120 bp, Artificial Sequence
  ENSG00000183044_1 (sequence is synthesized)
tgtccctcaaggggtcatggcctccatgttgctcgcccagcgcctggcctgcagcttccagcacagctaccgcctgctggtgcctggatccagacacattagtcaagctgcagccaaagt

SEQ ID NO: 650852 - DNA, 120 bp, Artificial Sequence
  ENSG00000183044_2 (sequence is synthesized)
cgacgttgaatttgattatgatgggcctctgatgaagacggaagtcccagggcctagatctcaggagttaatgaaacagctgaatataattcagaatgcagaggctgtgcattttttctg

SEQ ID NO: 650853 - DNA, 120 bp, Artificial Sequence
  ENSG00000183044_3 (sequence is synthesized)
caattacgaagagagccgaggcaattacctggttgatgtggacggcaaccgaatgctggatctttattcccagatctcctctgtccccataggttacagccaccccgccctgctgaaact

SEQ ID NO: 650854 - DNA, 120 bp, Artificial Sequence
  ENSG00000183044_4 (sequence is synthesized)
catccaacagcctcaaaatgcgagcatgtttgtcaacagacccgccctcggaatcctgcctccggagaactttgtggagaagctccggcagtccttgctctcggtggctcccaaagggat

SEQ ID NO: 650855 - DNA, 120 bp, Artificial Sequence
  ENSG00000183044_5 (sequence is synthesized)
gtcccagctcatcaccatggcctgcggctcctgctccaatgaaaacgccttaaagaccatcttcatgtggtaccggagcaaggaaagagggcagaggggcttctcccaggaggagctgga

SEQ ID NO: 650856 - DNA, 120 bp, Artificial Sequence
  ENSG00000183044_6 (sequence is synthesized)
gacgtgcatgattaaccaggcccctggctgccccgactacagcatcctctccttcatgggcgcgttccatgggaggaccatgggttgcttagcgaccacgcactctaaagccattcacaa

SEQ ID NO: 650857 - DNA, 120 bp, Artificial Sequence
  ENSG00000183044_7 (sequence is synthesized)
gatcgacatcccttcctttgactggcccatcgcaccgttcccacggctgaaataccctctggaagagtttgtgaaagagaaccaacaggaggaggcccgctgtctggaagaggtggagga

SEQ ID NO: 650858 - DNA, 120 bp, Artificial Sequence
  ENSG00000183044_8 (sequence is synthesized)
tctgattgtgaaatatcggaaaaagaagaagacggtggccgggatcatcgtggagcccatccagtccgagggtggagacaaccacgcatccgatgacttctttcggaagctgagagacat

SEQ ID NO: 650859 - DNA, 120 bp, Artificial Sequence
  ENSG00000183044_9 (sequence is synthesized)
cgccaggaagcatggctgcgccttcttggtggacgaggtccagaccggaggaggctgcacgggcaagttctgggcccatgagcactggggcctggatgacccagcagacgtgatgacctt

SEQ ID NO: 650860 - DNA, 120 bp, Artificial Sequence
  ENSG00000183044_10 (sequence is synthesized)
cagcaagaagatgatgactgggggcttcttccacaaggaggagttcaggcctaatgctccctaccggatcttcaacacctggctgggggacccgtccaagaacctgttgctggctgaggt

SEQ ID NO: 650861 - DNA, 120 bp, Artificial Sequence
  ENSG00000183044_11 (sequence is synthesized)
catcaacatcatcaagcgggaggacctgctaaataatgcagcccatgccgggaaggccctgctcacaggactgctggacctccaggcccggtacccccagttcatcagcagggtgagagg

SEQ ID NO: 650862 - DNA, 120 bp, Artificial Sequence
  ENSG00000183044_12 (sequence is synthesized)
acgaggcaccttttgctccttcgatactcccgatgattccatacggaataagctcattttaattgccagaaacaaaggtgtggtgttgggtggctgtggtgacaaatccattcgtttccg

SEQ ID NO: 650863 - DNA, 120 bp, Artificial Sequence
  ENSG00000183044_13 (sequence is synthesized)
tcccacgctggtcttcagggatcaccacgctcacctgttcctcaatattttcagtgacatcttagcagacttcaagtaaagaagccatttccactacagtgagaaagcccggatcccaac

SEQ ID NO: 650864 - DNA, 120 bp, Artificial Sequence
  ENSG00000183044_14 (sequence is synthesized)
agttgtcaaattgattagtttgcctaattcatgttttcacttaaaagtatcagaggtgaatgcacagtgaagggtgatttgtggggagggagcatttttggtggtcttgggggaggggag

SEQ ID NO: 650865 - DNA, 120 bp, Artificial Sequence
  ENSG00000183044_15 (sequence is synthesized)
gggagggaagggctggtgttgattttcctccctgcagagccaatggtgcacattggtttaagcccagagatcctgcttgagccctggactcatcttgggaagggccatgggaggtcctgg

SEQ ID NO: 650866 - DNA, 120 bp, Artificial Sequence
  ENSG00000183044_16 (sequence is synthesized)
ctagagttctgcccaaccttgaccaaccccagcaatttttccaaaagccagtcaagggcattacatttgttcctgggactggcagctgggcctcctgggtgccagtccatctcaagtgcc

SEQ ID NO: 650867 - DNA, 120 bp, Artificial Sequence
  ENSG00000183044_17 (sequence is synthesized)
atattctgtgatcacggatgttggctccccctcgccctatgcaagcaaacacactctcacctcctctcccagcctcccggagctctgagcacgccccacgcatggtgcaggagggactgg

SEQ ID NO: 650868 - DNA, 120 bp, Artificial Sequence
  ENSG00000183044_18 (sequence is synthesized)
acagatctgaggaaggccgtaaaatggggacaggaggattcagctcaggagtaagggaagaggtcctctggccccctgaagatgagaatcacccctctcagtgcacctggggatccccct

SEQ ID NO: 650869 - DNA, 120 bp, Artificial Sequence
  ENSG00000183044_19 (sequence is synthesized)
ctcctccctgttaaatgtcaacctagacctggacctgggtgggaggaaactgtagcctgagtgtccacagggacacacgtgagccacagggctagaagcacaggcccgtcaccccaggag

SEQ ID NO: 650870 - DNA, 120 bp, Artificial Sequence
  ENSG00000183044_20 (sequence is synthesized)
gaaaagcccagggtctggggcagcagagccatcgcatcatgtttcccagggcaacttgaggtctgacttttggctccctcgccctaagaggctcttcctctcttttgctcatccaccttc

SEQ ID NO: 650871 - DNA, 120 bp, Artificial Sequence
  ENSG00000183044_21 (sequence is synthesized)
acaccacttgtgagctgacccccaggaacagcttggctgttccaccagagcagagggaatcattgctggactggatttcttctggagggaagcaccatgaattaaaggtgccagagctcc

SEQ ID NO: 650872 - DNA, 120 bp, Artificial Sequence
  ENSG00000183044_22 (sequence is synthesized)
atgcatggaaaagtggcctgttggttcaacgtggtttccttgtacttgatcctcctgaaatgagagattttcctgagatgactgagtatggagattaccaggcagatgataccgaaatgc

SEQ ID NO: 650873 - DNA, 120 bp, Artificial Sequence
  ENSG00000183044_23 (sequence is synthesized)
ttaaaggggctgtggctgaggctgtagcatctctgctggaggtgagacactctgggaactgatttgacctcgaatgctcctaaaagagaacttgatagcctgacagcagagaagtattat

SEQ ID NO: 650874 - DNA, 120 bp, Artificial Sequence
  ENSG00000183044_24 (sequence is synthesized)
ttggtggggagtctgagaaagcctggcttgtattatctgtccaaaaggaagcctcttcatctcccggtgccttggttgactattttggaaataggcatatcaaggttcctgattcagcac

SEQ ID NO: 650875 - DNA, 120 bp, Artificial Sequence
  ENSG00000183044_25 (sequence is synthesized)
tttgctcttttaataacaaatcgtccaaagatctcaaagtaagggtttttttttttagcttccactcttccgcagacttggtcatcgacctatttttgttgaagaatgaaaggcaatgac

SEQ ID NO: 650876 - DNA, 120 bp, Artificial Sequence
  ENSG00000183044_26 (sequence is synthesized)
aagtttaacatatacaaattcgtgaattcttgttcattttgcattcctgcagtcagtgctaatccgtcgttcttaatcaggagttctgccaggtttaaggtcacctgcactcccagccaa

SEQ ID NO: 650877 - DNA, 120 bp, Artificial Sequence
  ENSG00000183044_27 (sequence is synthesized)
gtggtgatgtatgcctcccactctctgcaaggttttcctcatttttatattcatttattcatcattcattcattcacctaactttcattaaatagctgcaccatcccaggccctgtgcgg

SEQ ID NO: 650878 - DNA, 120 bp, Artificial Sequence
  ENSG00000183044_28 (sequence is synthesized)
agcatcgggaatacaaagatgagataaaacattgtccctgcccccgggggctcacatgccactggaaacaacagactcttaaactaacaattcaagcaggcgccaagtgctatgacagag

SEQ ID NO: 650879 - DNA, 120 bp, Artificial Sequence
  ENSG00000183044_29 (sequence is synthesized)
gtgtgaataaaagcatcaggaaatcggatggagaaccaccattcacccaagggtcagaggaggtttcaaagaaaaggtgtcattggagcagtgttttgcagaatgagccagagttcacca

SEQ ID NO: 650880 - DNA, 120 bp, Artificial Sequence
  ENSG00000183044_30 (sequence is synthesized)
agcaggcaaggcaaggaagggtgttgcagagagggaacagcatatgcaaaggcgtatcagttcatggcatcacatctttcactggggaagccagtttccacaggcagcatcccaaggttc

SEQ ID NO: 650881 - DNA, 120 bp, Artificial Sequence
  ENSG00000183044_31 (sequence is synthesized)
aataaggccttatttaacaagcaagcaaaatgcaaaccaaaccattattcatttattggcttaagtatgctttctcctgaaaactttagcattgggtgcaaatattcagtatggttctcg

SEQ ID NO: 650882 - DNA, 120 bp, Artificial Sequence
  ENSG00000183044_32 (sequence is synthesized)
gagtccaaagggttttaagccagggcacaaccagaaaagtggctctctttggtagggagaggggctccaatatttcgttctctccccatggggcactgacagagaaatgaaatagtttta

SEQ ID NO: 650883 - DNA, 120 bp, Artificial Sequence
  ENSG00000183044_33 (sequence is synthesized)
tctggaaaattccagagctattatttactccttaccaagggaagttacttcttgtaaaaacttttaagccatttatcaacaagttcttgttgactcagggcataatgagttcctgagaca

SEQ ID NO: 650884 - DNA, 120 bp, Artificial Sequence
  ENSG00000183044_34 (sequence is synthesized)
tgctcttttgggggctggggctttagctagaagaatttcaaggaaaagaattctcagcagagctcaagattgtagaaactcagcagaagctggtaaaaacatggggagcccggaggacag

SEQ ID NO: 650885 - DNA, 120 bp, Artificial Sequence
  ENSG00000183044_35 (sequence is synthesized)
gctgctgtccagggcagaggccatgaagaagtgcttccgtggccgacagtctggaaatgaatccatcatacattagtgccatagagtttagtaaccgtccagcaagtgtcatcactttta

SEQ ID NO: 650886 - DNA, 120 bp, Artificial Sequence
  ENSG00000183044_36 (sequence is synthesized)
cagaaaacaaggtccagtaatagcaagtcttagtacatcctcacttttattataaatgggtgttttttcataatttttactgacgctcagtaaccatgcaaaattgtgtatagcattaat

SEQ ID NO: 650887 - DNA, 120 bp, Artificial Sequence
  ENSG00000183044_37 (sequence is synthesized)
gtatctacatacctacacctatctatatataagctcatggtagaaaaccatagctaagtagcatcgcagacttaagcgtacaaagtgatcttgttcacaagtaatctgttgacagtgcca

SEQ ID NO: 650888 - DNA, 120 bp, Artificial Sequence
  ENSG00000183044_38 (sequence is synthesized)
ataaatgataaaaaaaaaattaacatgtcacaatgtaacggatgaccatatgcacaattccatgaattaaatctgtttcctgtgttagtcagtattcttaaataaaatttataattgaaa

SEQ ID NO: 650889 - DNA, 120 bp, Artificial Sequence
  ENSG00000183044_39 (sequence is synthesized)
tcttgtgatcaccctcattacctcttctgggccccctgtggacctgcgttgacccagcatgggctacaatgggggagttgggtaatcgctcccggtaggttcctccccaacccccgaggc

SEQ ID NO: 650890 - DNA, 120 bp, Artificial Sequence
  ENSG00000183044_40 (sequence is synthesized)
ggggtcaggtggagcgtgggcgccagagcagcccctctgccttgggtgtcttggagatgacttggcgccccccggagccccgtcatggctgtggctgcgtccacaacactgcatcagcag

SEQ ID NO: 650891 - DNA, 120 bp, Artificial Sequence
  ENSG00000183044_41 (sequence is synthesized)
agtcctggggaagccatttaggaatctgaagcccgggatttctgctttgtcccttcaggggttcctgagcctgttaaaaaaaaaaaaaaatctaggaagaggccctggaaggaaaaaggg

SEQ ID NO: 650892 - DNA, 120 bp, Artificial Sequence
  ENSG00000183044_42 (sequence is synthesized)
gagggagatagcctattttacaaggtctgaaatgatgtgtcttatccttctggcttaaaccaagctgggcttaaaacatcttttaaaaaaaatctgtattctatttttttctctctgttt

SEQ ID NO: 650893 - DNA, 120 bp, Artificial Sequence
  ENSG00000183044_43 (sequence is synthesized)
atcgctctccttctgcctctgttaatctttgtttctgtgtagttgcatcctgtttctgtctgaaaacccttgtctttctgaatccatctttcagtctctcacattctgtctttcccctcc

SEQ ID NO: 650894 - DNA, 120 bp, Artificial Sequence
  ENSG00000183044_44 (sequence is synthesized)
tccttcaccttccctccgtccctctcccttgcgcacttgccgggtaccagctgagtgcatccttttcccaaacctgctctgcttccaaggggcccttttctgtctcctccacctgtcccc

SEQ ID NO: 650895 - DNA, 120 bp, Artificial Sequence
  ENSG00000183044_45 (sequence is synthesized)
atgttttggggactgcctggaaatccgggacaccctcctgaggagggagctggtgcccaacggcacctcttaggatgaacccagccagctgcgttcctggcctctgcagaatggcataca

SEQ ID NO: 650896 - DNA, 120 bp, Artificial Sequence
  ENSG00000183044_46 (sequence is synthesized)
tttgtgtccctttgagtctgcagagaagccagcagctggggctgcagacgggaaaggaatgtcctcagcgtctgccagcacttttgtcttggtcccaacggctgataggaaaatgagagg

SEQ ID NO: 650897 - DNA, 120 bp, Artificial Sequence
  ENSG00000183044_47 (sequence is synthesized)
cagggtcttttctagagagatctggggggtccatttctagccgatgatgcatgcaaagagttcgtgttcacaggacctgggaagcagcggagtagaaagggtggcagcacgcaaagggtg

SEQ ID NO: 650898 - DNA, 120 bp, Artificial Sequence
  ENSG00000183044_48 (sequence is synthesized)
ggcgagtcgctgggggaagtcgagcagacacccagcgctgccggaactcggggcgcgcatcccgcaagtcggaacccggcggatcggatcccgcagatcggagacggggcctggagatgc

SEQ ID NO: 650899 - DNA, 85 bp, Artificial Sequence
  ENSG00000183044_49 (sequence is synthesized)
tgttgcccagcatcttagccacccaaagtactaggattacagatttgagcccgcacatctggcctccattcttcctggcaaaaca

SEQ ID NO: 650900 - DNA, 120 bp, Artificial Sequence
  ENSG00000183044_50 (sequence is synthesized)
tgagcccgcacatctggcctccattcttcctggcaaaacatgcaacgctctcagcagatcttaatccaacagatcttaatcgttgctgatggtgcttaatgcattatgtgtgttagtttc

SEQ ID NO: 650901 - DNA, 120 bp, Artificial Sequence
  ENSG00000183044_51 (sequence is synthesized)
ttgtctggactgaatatcggtttggttggaaagatgaagccccgactaccccagagcatctctgagattttgttctgttctattgtttcagagcaaggaaagagggcagaggggcttctc

SEQ ID NO: 650902 - DNA, 120 bp, Artificial Sequence
  ENSG00000183044_52 (sequence is synthesized)
gcaggactccgactaccaggcaccggcaagatgtgggaatcctgaaaggttggcgctgaagatcctgcagttggtgtgtgcaagctggcagccaggccgctgccggaggaagggggtcct

SEQ ID NO: 650903 - DNA, 120 bp, Artificial Sequence
  ENSG00000183044_53 (sequence is synthesized)
ctgtgctttgcatgtccctgggtatttgggaaacttggcagccggttgctctaagtgaaccctgactctggagtaggcactgggcaccctggcggagaggacagagccggagacaaggac

SEQ ID NO: 650904 - DNA, 120 bp, Artificial Sequence
  ENSG00000183044_54 (sequence is synthesized)
cttcccctaccctggcctctgtctgccacgactgcccttgtctacctgccaagctctaattatcgttaaacatcccgtcactgcttcccggaaatctttaacttccacccaagaacagct

SEQ ID NO: 650905 - DNA, 120 bp, Artificial Sequence
  ENSG00000183044_55 (sequence is synthesized)
aacactatacgccctcctctacctgcagaaatcacttggaccctctgacatcacatgtccaaccgacctctttctccacatttgcccgtgagctgcacttcattttgcaaggacataaag

SEQ ID NO: 650906 - DNA, 120 bp, Artificial Sequence
  ENSG00000183044_56 (sequence is synthesized)
aagactattcacgcaactacatgcaaaatgactggctgggattcctaaaacgccaatgtcttttaaaaggcaaaagggctgagaaatggttccaggttaaaagagattaaagagccatga

SEQ ID NO: 650907 - DNA, 120 bp, Artificial Sequence
  ENSG00000183044_57 (sequence is synthesized)
gcccaaatgcaatgtttgatcctaggatgaagcctggatcaggggaacagaaaacacttgtgggctgggctcagtggctcatacctgtaatcccagtgctttgggagtccgagggaggag

SEQ ID NO: 650908 - DNA, 120 bp, Artificial Sequence
  ENSG00000183044_58 (sequence is synthesized)
gatcacttgaagtcaagagttagagactagcctcaggaatatagggagaccccatctctacaaaaaataaatataaaaataaactaaccagacatagtggtgtgtgcctgtgatcccagc

SEQ ID NO: 650909 - DNA, 81 bp, Artificial Sequence
  ENSG00000183044_59 (sequence is synthesized)
tactcaggaggctgaggcaagaggatcacctgagcccaagagttcgaggctgcagtgagcctagagcgagaccctgtctct

SEQ ID NO: 650910 - DNA, 120 bp, Artificial Sequence
  ENSG00000183044_60 (sequence is synthesized)
tctccaaatcgatcgcaccaactccactcccacagccgggggagggttccagtcttgccacatcctcgccaacacggggtatcactggaagatttttctttgactcagagagtaacatac

SEQ ID NO: 650911 - DNA, 120 bp, Artificial Sequence
  ENSG00000183044_61 (sequence is synthesized)
ttatccacacatgacaaggaacttgatcccagaaagaaatctaagaaaggcagaaggaacaaagacccaatcctggtcagaaaaggggtccctagccctaaaacgtacttcactttaaat

SEQ ID NO: 650912 - DNA, 120 bp, Artificial Sequence
  ENSG00000183044_62 (sequence is synthesized)
ctcaatgcaacctccgcctcttgtgttcaagagattcttctgcctcagccccccgagtacctgggattacaggttacagccaccccgccctgctgaaactcatccaacagcctcaaaatg

SEQ ID NO: 650913 - DNA, 120 bp, Artificial Sequence
  ENSG00000183044_63 (sequence is synthesized)
aatggaagataccatccagactagggattcctgggctggaagagcccttggggataaagggaccagccagtgagtgtttctgggactgtcccactgtattagtctgttctcatgctgcta

SEQ ID NO: 650914 - DNA, 87 bp, Artificial Sequence
  ENSG00000183044_64 (sequence is synthesized)
agtacacctgagactgggtattttatgaagaaaaagaggtttaatggtctcacagtttcatatggctggggaggcctcacaatcatg

SEQ ID NO: 650915 - DNA, 120 bp, Artificial Sequence
  ENSG00000183044_65 (sequence is synthesized)
aaaggcacgtcttacatggctacaggcaagagagcatgtgcaggggaactcccgtttgtaaaaacatcagatcgtgtgagacttactcaattgactatcatgagaacagcatgggaaaga

SEQ ID NO: 650916 - DNA, 120 bp, Artificial Sequence
  ENSG00000183044_66 (sequence is synthesized)
acctcccactgggtccctcccatgacgtgggaattatgggagctatgatttaagatgagatttgaatgaggacacagccaaaccacatcacccactatccataaaactgtcaccatcgcc

SEQ ID NO: 650917 - DNA, 120 bp, Artificial Sequence
  ENSG00000183044_67 (sequence is synthesized)
gtcaccatcgccacctcctttctctctcccatctctgtcatatgatcctgtcccaagtgcctcggtctgatgggattggatccaccctggagccactctgcctgcaggtaggcggtggcc

SEQ ID NO: 650918 - DNA, 120 bp, Artificial Sequence
  ENSG00000183044_68 (sequence is synthesized)
taaggaacaaagaaagccataagcgactctgaaattgacctagagcccagctgtgcttcagggtcactggatcactggatgggaggcaccatcttaggaatgtctcacccccactctgcc

SEQ ID NO: 650919 - DNA, 120 bp, Artificial Sequence
  ENSG00000183044_69 (sequence is synthesized)
ccacacccatggccacttgcactggctccttcttccttctgtttgacgtctttgagacctccctcccaatagtcccatgagggagggaggctcaagtgaatcctattttacaggtgagag

SEQ ID NO: 650920 - DNA, 120 bp, Artificial Sequence
  ENSG00000183044_70 (sequence is synthesized)
aactcaggcttagagaagcaaagccatttgcccaaggtcacacagccacttgcaagcaactctgtccggctccaatgctaactactcctccgtgtgcctccatgtggctctggagacaga

SEQ ID NO: 650921 - DNA, 120 bp, Artificial Sequence
  ENSG00000183044_71 (sequence is synthesized)
gccgccagcaggagcctcccttcacatgccccgagagtggcctcctgcagagatataaagtgcctggctcggggctggccatgaaataggttcagaaagaccagtgagcctccagcctgt

SEQ ID NO: 650922 - DNA, 120 bp, Artificial Sequence
  ENSG00000183044_72 (sequence is synthesized)
ccccagctctctcacagcccctgtgcttgtcatcatggtgtcccttgttggcaggccttactgccttctgaagacaaactgctagccgtgtccttggtctgcatgttgaatgctggtgtg

SEQ ID NO: 650923 - DNA, 120 bp, Artificial Sequence
  ENSG00000183044_73 (sequence is synthesized)
ctggtgtgtatgtcctgggtggcataaacagtaggagcgttcgcccctccccaaggagtatgagtaggctttattttaaaataaacatcttggccgggcgcagtggctcacaactgtaat

SEQ ID NO: 650924 - DNA, 75 bp, Artificial Sequence
  ENSG00000183044_74 (sequence is synthesized)
aggtatggtggtggatgcctgtaatcccaaagaggtggcagtgagctggatcgtgccactgtactccagcctggg

SEQ ID NO: 650925 - DNA, 120 bp, Artificial Sequence
  ENSG00000183044_75 (sequence is synthesized)
ataccccctccccatcttgtgatcaccctcattacctcttctgggccccctgtggacctgcgttgacccagcatgggctacaatgggggagttgggtaatcgctcccgctgagtgcatcc

SEQ ID NO: 650926 - DNA, 120 bp, Artificial Sequence
  ENSG00000183044_76 (sequence is synthesized)
atcttgtgatcaccctcattacctcttctgggccccctgtggacctgcgttgacccagcatgggctacaatgggggagttgggtaatcgctcccgttgcatcctgtttctgtctgaaaac

SEQ ID NO: 650927 - DNA, 80 bp, Artificial Sequence
  ENSG00000183048_0 (sequence is synthesized)
gcggggcgcggggcgctgcggccggtacacgccggggtagggccggggtcgggttgtggtcgggccgggattgggctctc

SEQ ID NO: 650928 - DNA, 120 bp, Artificial Sequence
  ENSG00000183048_1 (sequence is synthesized)
ccgggattgggctctcctgggccatggcagccgaggcgcgcgtgtcgcgctggtacttcggggggctggcctcctgcggggccgcctgctgcacgcacccgctggacctgctcaaggtgc

SEQ ID NO: 650929 - DNA, 120 bp, Artificial Sequence
  ENSG00000183048_2 (sequence is synthesized)
atctgcagacgcagcaggaggtgaagctgcgcatgacgggcatggcgctgcgggtggtgcgtaccgacggcatcctggcactctacagcggcctgagcgcctcgctgtgcagacagatga

SEQ ID NO: 650930 - DNA, 120 bp, Artificial Sequence
  ENSG00000183048_3 (sequence is synthesized)
cctactccctgactcggttcgccatctacgagactgtgcgggaccgtgtggccaagggcagccaggggcctctccccttccacgagaaggtgttgctgggctccgtcagcggtttagctg

SEQ ID NO: 650931 - DNA, 120 bp, Artificial Sequence
  ENSG00000183048_4 (sequence is synthesized)
gaggcttcgtggggacgcccgcagacttggtcaacgtcaggatgcagaacgacgtgaagctgccccagggtcagcggcgcaactacgcccatgcgctggatggcctgtaccgcgtagctc

SEQ ID NO: 650932 - DNA, 120 bp, Artificial Sequence
  ENSG00000183048_5 (sequence is synthesized)
gtgaagagggtctcaggagactgttctcgggtgcaaccatggcatccagccgaggggccttagtcactgtgggccagctgtcctgctacgaccaggccaagcagctggtccttagcaccg

SEQ ID NO: 650933 - DNA, 120 bp, Artificial Sequence
  ENSG00000183048_6 (sequence is synthesized)
ggtacctctctgacaacatcttcactcactttgtcgccagctttattgcaggtggatgtgccacgttcctgtgccagcccctggatgtgctgaagactcgcctgatgaactccaaggggg

SEQ ID NO: 650934 - DNA, 120 bp, Artificial Sequence
  ENSG00000183048_7 (sequence is synthesized)
agtatcagggcgttttccactgcgccgtggagacagcgaagctcgggcctctggccttttacaagggcctcgtcccagctggcatccgcctcatcccccacaccgtgctcacttttgtgt

SEQ ID NO: 650935 - DNA, 120 bp, Artificial Sequence
  ENSG00000183048_8 (sequence is synthesized)
ctttggcatcaaagtgccatcctgaccagccgtgggaatggctgggctgccaggccagacacgctaggttcttccaaagagtcccaagcccagcacctgctcctggggccacgacctccc

SEQ ID NO: 650936 - DNA, 120 bp, Artificial Sequence
  ENSG00000183048_9 (sequence is synthesized)
tggccgtggccacccgtcctccgcagcaggcccctgctgtccccccacctgctggctgagctcctcctggcctcgtcccctctcagctgtagctgcaccacccccgctctggctaccagg

SEQ ID NO: 650937 - DNA, 120 bp, Artificial Sequence
  ENSG00000183048_10 (sequence is synthesized)
ctctcccggctgggcactgcgtggccttgcccctctcccgctggcagctcctcaggggaacaggggctaccagaggctgatttctcccctctcctgggccaggggaggggtattatccct

SEQ ID NO: 650938 - DNA, 120 bp, Artificial Sequence
  ENSG00000183048_11 (sequence is synthesized)
gcctcctgcccccgatgcccaaagcagcatcttccagcactttccatcgaggacttgggtggcagagtgtgggtgcagcctggctgttgctcacccaagtgctagctctgcacttcgtgt

SEQ ID NO: 650939 - DNA, 120 bp, Artificial Sequence
  ENSG00000183048_12 (sequence is synthesized)
ctgctgagagcaaccagaccttccatgtcctcgggcagctgcaactccccgcgagaccccgcagctgggtgggatgaacaagcaacgcagaccacaagcgagtgcctgggagggagtggc

SEQ ID NO: 650940 - DNA, 120 bp, Artificial Sequence
  ENSG00000183048_13 (sequence is synthesized)
ccagggtggttctggagccattgtgggtgagggtcgagggccaccgaggtcccgcgcaccgctgcctgccctgcagtggctttaacagttagttttgccaaagcctctccactcaccagc

SEQ ID NO: 650941 - DNA, 120 bp, Artificial Sequence
  ENSG00000183048_14 (sequence is synthesized)
aggcggtctctgtcttcagggattgtgcctgcgtccctcgggcacctgggcccccccgcttggctccctgggggaatggcccaggcgggccgcggttcctccttagggccttctccccga

SEQ ID NO: 650942 - DNA, 120 bp, Artificial Sequence
  ENSG00000183048_15 (sequence is synthesized)
caaggagtccgacggggcggatgctgcatcctctgcctccctggtcgctgggcttcaccccacctgggaagggcagtgtgctctgtgggggctgcaatcaataaatgccgggagctgcca

SEQ ID NO: 650943 - DNA, 120 bp, Artificial Sequence
  ENSG00000183048_16 (sequence is synthesized)
cgctgaccagcgtgagctcccctgtgctgccagggctgcccatgcccctcggcccgcccgcccctcccgccacctgcttctgtttcaggatgcagaacgacgtgaagctgccccagggtc

SEQ ID NO: 650944 - DNA, 120 bp, Artificial Sequence
  ENSG00000183048_17 (sequence is synthesized)
tggcacgtgggtgggattcggcgatggtgcctggcgtacctgacaggccgctggtgacgagccccctcctcagggtggatgtgccacgttcctgtgccagcccctggatgtgctgaagac

SEQ ID NO: 650945 - DNA, 120 bp, Artificial Sequence
  ENSG00000183048_18 (sequence is synthesized)
agcgctggaggcttcgtggggacgcccgcagacttggtcaacgtcaggttggtgttcccccaccccacctgcaaggccaggggctttcttgtccccagacatgccagggcctgccagggc

SEQ ID NO: 650946 - DNA, 120 bp, Artificial Sequence
  ENSG00000183048_19 (sequence is synthesized)
acctggctgtggtcactgggcagccgcctgtctaggggacctttattttagcagcctgtccaggggacttgtattccagcagcctttgaggggactggctttactaatgagcaacaatgc

SEQ ID NO: 650947 - DNA, 120 bp, Artificial Sequence
  ENSG00000183048_20 (sequence is synthesized)
gcctgcctcggggcctgggaggaccctctgtgggagccggtggtcagggggagtctcatgtggtcattctgtgtccccggcagctacgcccatgcgctggatggcctgtaccgcgtagct

SEQ ID NO: 650948 - DNA, 120 bp, Artificial Sequence
  ENSG00000183049_0 (sequence is synthesized)
ggaggaggcgcgaggtgggggggagcgcggcgggcggcagggagggagcgggagggaggcaagaaagtagcagaaagtgaggctggcaggcggcggcaaaggagccggcgcgcggcggcg

SEQ ID NO: 650949 - DNA, 120 bp, Artificial Sequence
  ENSG00000183049_1 (sequence is synthesized)
gcaggaagtctgtgcccgagaacagcagaaataagagccagggagggaccgcggccgcggcggcggcggcgagagcgaaagaggaaactgcagaggaggaagctgcgccgcagcccgagc

SEQ ID NO: 650950 - DNA, 120 bp, Artificial Sequence
  ENSG00000183049_2 (sequence is synthesized)
ccgcgcccccggcgccccctccccagcgcgcccccggccgctcctccgcgccgcgctcgtcggccatggcccgggagaacggcgagagcagctcctcctggaaaaagcaagctgaagaca

SEQ ID NO: 650951 - DNA, 120 bp, Artificial Sequence
  ENSG00000183049_3 (sequence is synthesized)
cagctcctcctggaaaaagcaagctgaagacatcaagaagatcttcgagttcaaagagaccctcggaaccggggccttttccgaagtggttttagctgaagagaaggcaactggcaagct

SEQ ID NO: 650952 - DNA, 120 bp, Artificial Sequence
  ENSG00000183049_4 (sequence is synthesized)
ctttgctgtgaagtgtatccctaagaaggcgctgaagggcaaggaaagcagcatagagaatgagatagccgtcctgagaaagattaagcatgaaaatattgttgccctggaagacattta

SEQ ID NO: 650953 - DNA, 120 bp, Artificial Sequence
  ENSG00000183049_5 (sequence is synthesized)
tgaaagcccaaatcacctgtacttggtcatgcagctggtgtccggtggagagctgtttgaccggatagtggagaaggggttttatacagagaaggatgccagcactctgatccgccaagt

SEQ ID NO: 650954 - DNA, 120 bp, Artificial Sequence
  ENSG00000183049_6 (sequence is synthesized)
cttggacgccgtgtactatctccacagaatgggcatcgtccacagagacctcaagcccgaaaatctcttgtactacagtcaagatgaggagtccaaaataatgatcagtgactttggatt

SEQ ID NO: 650955 - DNA, 120 bp, Artificial Sequence
  ENSG00000183049_7 (sequence is synthesized)
gtcaaaaatggagggcaaaggagatgtgatgtccactgcctgtggaactccaggctatgtcgctcctgaagtcctcgcccagaaaccttacagcaaagccgttgactgctggtccatcgg

SEQ ID NO: 650956 - DNA, 120 bp, Artificial Sequence
  ENSG00000183049_8 (sequence is synthesized)
agtgattgcctacatcttgctctgcggctaccctcctttttatgatgaaaatgactccaagctctttgagcagatcctcaaggcggaatatgagtttgactctccctactgggatgacat

SEQ ID NO: 650957 - DNA, 120 bp, Artificial Sequence
  ENSG00000183049_9 (sequence is synthesized)
ctccgactctgcaaaagacttcattcggaacctgatggagaaggacccgaataaaagatacacgtgtgagcaggcagctcggcacccatggatcgctggtgacacagccctcaacaaaaa

SEQ ID NO: 650958 - DNA, 120 bp, Artificial Sequence
  ENSG00000183049_10 (sequence is synthesized)
catccacgagtccgtcagcgcccagatccggaaaaactttgccaagagcaaatggagacaagcatttaatgccacggccgtcgtcagacatatgagaaaactacacctcggcagcagcct

SEQ ID NO: 650959 - DNA, 120 bp, Artificial Sequence
  ENSG00000183049_11 (sequence is synthesized)
ggacagttcaaatgcaagtgtttcgagcagcctcagtttggccagccaaaaagactgtctggcaccttccacgctctgtagtttcatttcttcttcgtcgggggtctcaggagttggagc

SEQ ID NO: 650960 - DNA, 120 bp, Artificial Sequence
  ENSG00000183049_12 (sequence is synthesized)
cgagcggagacccaggcccaccactgtgacggcagtgcactctggaagcaagtgactggccctggaggtggggcccggggtcggggctggggaaggggagccccagggtcgccagagccg

SEQ ID NO: 650961 - DNA, 120 bp, Artificial Sequence
  ENSG00000183049_13 (sequence is synthesized)
cgagccactccagcgagaccccaccttgcatggtgccccttcctgcataggactggaagaccgaagtttttttatggccatattttctactgcaattctgaagtgttcatttctcacaaa

SEQ ID NO: 650962 - DNA, 120 bp, Artificial Sequence
  ENSG00000183049_14 (sequence is synthesized)
ctgtactgactcgaggggcgctgatttcataggatctggtgctgtatatacgaatcttgcaaagctctaactgaacggaccttcttattcctctcccctaacaccatcgtttccactctt

SEQ ID NO: 650963 - DNA, 120 bp, Artificial Sequence
  ENSG00000183049_15 (sequence is synthesized)
ctcagtgtaggtaaccgtctatggtgtgttttttcattaatgacaaaaaaaaaaaggtttcaactggattatttaaatattggtaaatattgtgcattagggtttgtttttccttttaag

SEQ ID NO: 650964 - DNA, 120 bp, Artificial Sequence
  ENSG00000183049_16 (sequence is synthesized)
aagtatgtcctttgtatctctaagttacatgacctatatcttttcctctttaatagtagttttatgttaacctttaagagatttgtttttcctcaaaggagaatttaaaggtatttttta

SEQ ID NO: 650965 - DNA, 84 bp, Artificial Sequence
  ENSG00000183049_17 (sequence is synthesized)
atttgtttttcctcaaaggagaatttaaaggtattttttaaaattctaataagaggatcagccgggtgcaatgatcgggcggat

SEQ ID NO: 650966 - DNA, 81 bp, Artificial Sequence
  ENSG00000183049_18 (sequence is synthesized)
ctaacaagaggatcatgaatctgtctccaaggctaagagtgcccttcacctctactccttctgtttctctccccttcccca

SEQ ID NO: 650967 - DNA, 120 bp, Artificial Sequence
  ENSG00000183049_19 (sequence is synthesized)
cccttcacctctactccttctgtttctctccccttccccaggaggaggggcccctcagttctgcgaggctctcttctctgcgggggactttggtagagaatctgcacagagcctttgctg

SEQ ID NO: 650968 - DNA, 120 bp, Artificial Sequence
  ENSG00000183049_20 (sequence is synthesized)
gcaacccatccagcagaacccacacccaccagagaccctagaggcctcttgccatcagcaaccagaaataagcctgctcccccgagacgcagggctcagcttcacaggccagacttgctg

SEQ ID NO: 650969 - DNA, 120 bp, Artificial Sequence
  ENSG00000183049_21 (sequence is synthesized)
tgagtgagatgcccacactgcagagatgcaggaccctcccttgcaaaaggaaccagctgccatgttgctgaaagtgggcccacacacaaccctcatttctcacgagagctaacagatgaa

SEQ ID NO: 650970 - DNA, 120 bp, Artificial Sequence
  ENSG00000183049_22 (sequence is synthesized)
agctcagctatgcagtgttaaaattcatctctttctctgtggtttttaaaaaaatgcatttctaatcttacacttcacgtggcctccaacacaaagttctttctccacatttttaccctc

SEQ ID NO: 650971 - DNA, 120 bp, Artificial Sequence
  ENSG00000183049_23 (sequence is synthesized)
ttctcacatgaatgttttccaagggaaggaagggagggaagcagccttgggaaaggatccatttctggtggtaaggagagggggccctgccaggctaatgggacttcagccaccacagag

SEQ ID NO: 650972 - DNA, 120 bp, Artificial Sequence
  ENSG00000183049_24 (sequence is synthesized)
atgaccaaagaccacctccgccaggcccagccagtgcttgcagccctcccattggtcaggggagtctaaaatcaaagatacatggtggtagggtcaccaaacgtcccatttgcccgagac

SEQ ID NO: 650973 - DNA, 120 bp, Artificial Sequence
  ENSG00000183049_25 (sequence is synthesized)
tgaaggatttctcaggctgtggacatttaatgccaaaaccaggaatatccggggcaaagcaggctgtgttgttcgcctttgtggagccaggcagtgtgtggcccagggaaagctgcgttt

SEQ ID NO: 650974 - DNA, 120 bp, Artificial Sequence
  ENSG00000183049_26 (sequence is synthesized)
catggaggcttccaggaggctgccctgtaaagccaggcaggtggcttcaagtgccattcctgcaagtgcccctgcttcagctctcaggcccatccaatgcctcgagcccacgggggtgtc

SEQ ID NO: 650975 - DNA, 120 bp, Artificial Sequence
  ENSG00000183049_27 (sequence is synthesized)
ccggcaggtctgcgtcatcacgacccagtaacgctgctggctgtgtcctcatgccctcttcctctggctggccagtcatgggaagtcctgttggttgagtcatctttgtcacttctacac

SEQ ID NO: 650976 - DNA, 87 bp, Artificial Sequence
  ENSG00000183049_28 (sequence is synthesized)
ggaagtcctgttggttgagtcatctttgtcacttctacacctttgagtatgtacaggctgaatgttgagtgatgcccccccaccctc

SEQ ID NO: 650977 - DNA, 120 bp, Artificial Sequence
  ENSG00000183049_29 (sequence is synthesized)
tgctccctgagaatggcagtgcaggcacagagaagagcagttgggaagacaggcagctggtctaccctgtccccgcacacttcacaggcactccactgcttggcaggaattctgcatggc

SEQ ID NO: 650978 - DNA, 120 bp, Artificial Sequence
  ENSG00000183049_30 (sequence is synthesized)
atctgccacgcatgctcacagggtgaaaaatcaagctgtcactctgcaaaatctaaaaaccctggaaaggtctataagatgacattagacccagttaagaagcaagtgtcacctgagttg

SEQ ID NO: 650979 - DNA, 120 bp, Artificial Sequence
  ENSG00000183049_31 (sequence is synthesized)
gccatgcaatgaatgaatattataagcagtattggagaactaggcggttgcttactaagaagtgtcttggaaacattcgagttcatacagtgcatgacaaagtaatagaaggctgcaagc

SEQ ID NO: 650980 - DNA, 120 bp, Artificial Sequence
  ENSG00000183049_32 (sequence is synthesized)
ctgagttccattactggtgattgaagtattttcaggagcagatacatgtggtgcatgttatatgcacttagtttgaaagtatccctcacccaaaaagtgcagaacctctgaaaggtgagc

SEQ ID NO: 650981 - DNA, 120 bp, Artificial Sequence
  ENSG00000183049_33 (sequence is synthesized)
cgtggtgcaggtgcccccctcgctgttcgggtcagttcttggccatgcttggcctgtcacacgccgggtctcaacaacatcgtgcgaggagacagtgactggtttcagcccaagagtcaa

SEQ ID NO: 650982 - DNA, 120 bp, Artificial Sequence
  ENSG00000183049_34 (sequence is synthesized)
ctgttgagcatgacatcaggaagcctgtactgtcctgatcccaccaggcttgggttaatttcctattgcttcagagaaagagaggcgctcttgtgcttttgagagagctctcatgttaaa

SEQ ID NO: 650983 - DNA, 120 bp, Artificial Sequence
  ENSG00000183049_35 (sequence is synthesized)
aagaggttgtctttgcactgcgcttggtatgatttgttttcttataaaacaggaagagaacctagaatgtgcctttcgtgaaggtctgacaaatggggtctcagagtcctaggacccgca

SEQ ID NO: 650984 - DNA, 120 bp, Artificial Sequence
  ENSG00000183049_36 (sequence is synthesized)
ccaaggtcagagtccacctgtagaggctgagcatttctacatgcacccagggtgctgggctgaggctaagggtggacgcgtagaccccatcacaggcttccttcctgagcccaagtcccc

SEQ ID NO: 650985 - DNA, 120 bp, Artificial Sequence
  ENSG00000183049_37 (sequence is synthesized)
catttggtcactatcccttctcagagcaagtggattctcttttcctcacttggagtattcaatgttgaagtagtggcctggagtggcctttccctcagctgcctgtctgggctccctggc

SEQ ID NO: 650986 - DNA, 120 bp, Artificial Sequence
  ENSG00000183049_38 (sequence is synthesized)
ttcccggatcttcatctcatacgtgaggcaataggaggagtttctattcattgagacaaacagtgagcgggcaccaacaggccagcagcttggcccttttcacagaggtggccttggagt

SEQ ID NO: 650987 - DNA, 120 bp, Artificial Sequence
  ENSG00000183049_39 (sequence is synthesized)
ctggagtctgggcagctgtctgcctctctacggctctgcttcccagcgggcacacgggtccggagcctcagaatgaagtggtgcagaggcgcagggcacacctaggagaagctcaatgac

SEQ ID NO: 650988 - DNA, 120 bp, Artificial Sequence
  ENSG00000183049_40 (sequence is synthesized)
caccaaagcccttgaggagagacggggtttgctgtgttagagaaatggcaacccccaggaccatgcacggctctggcagtgcacagtggctgattttcaccagttcctcctacccctgcc

SEQ ID NO: 650989 - DNA, 120 bp, Artificial Sequence
  ENSG00000183049_41 (sequence is synthesized)
tctgtcggagactagaaaacattctaccccttcaggtcttcttttaaaagaaaagagctatggcaaagcgtgccatacaaagttaaaaaaaggaagagtggctttgcgttcttgaccatg

SEQ ID NO: 650990 - DNA, 120 bp, Artificial Sequence
  ENSG00000183049_42 (sequence is synthesized)
gccacaattctggtcacttctagcatctgaccttgagaacggtgtagagtctctgagccaccgctggcctttgagagagtctcactctccagctagctctttgtgtagtgtccagggccc

SEQ ID NO: 650991 - DNA, 82 bp, Artificial Sequence
  ENSG00000183049_43 (sequence is synthesized)
ctcactctccagctagctctttgtgtagtgtccagggccccggcagtcaggatagagcgagcaaaagaagatggacagtgga

SEQ ID NO: 650992 - DNA, 72 bp, Artificial Sequence
  ENSG00000183049_44 (sequence is synthesized)
tggccatgctggccaaggctgggctcataggaaatatctgtagtaggatgaaaggaatctggcctagggagc

SEQ ID NO: 650993 - DNA, 120 bp, Artificial Sequence
  ENSG00000183049_45 (sequence is synthesized)
aatatctgtagtaggatgaaaggaatctggcctagggagccccggactcggtttacctaccccgtactcatcccactcatctgtctaccctagtgtccatcatgccctggatgaatcgta

SEQ ID NO: 650994 - DNA, 120 bp, Artificial Sequence
  ENSG00000183049_46 (sequence is synthesized)
ggtgggagggacagaagccgagaacaccaggcacacggggtggggggaatggggggagcccaggtgatcccctttggaaagtggattgatcctctcccctgtggaatgacagcttaacct

SEQ ID NO: 650995 - DNA, 120 bp, Artificial Sequence
  ENSG00000183049_47 (sequence is synthesized)
gattaacccactggggcttgctattttatgagcatttttaaacagaaaggaaagatgatatcccagtgcaggtagactttatttttgaaagcatcgtggcccctcacctctccctctccc

SEQ ID NO: 650996 - DNA, 120 bp, Artificial Sequence
  ENSG00000183049_48 (sequence is synthesized)
ccagaaccttggccagaattgagtcttcgcgttggggaggccacgctggaaccattgctctagggctgaaggtggaagtagggccactgccgcagcttcagccagagccctcgctgcttc

SEQ ID NO: 650997 - DNA, 120 bp, Artificial Sequence
  ENSG00000183049_49 (sequence is synthesized)
gcagaatttaacaagcacacgactgggattcctttggatatgagaaaggaaggcaagtgcgggcaaagggaagctcctcccgtttttcataaacagaagtaagatgtcctctttcccagg

SEQ ID NO: 650998 - DNA, 120 bp, Artificial Sequence
  ENSG00000183049_50 (sequence is synthesized)
tttgcacaatcacttctggcaaattaattgaaggtccttgaattcagccagtgcacgaaacctttgcatgttcttctgaaactgtacttcttccctattctgtctacccacactctgcga

SEQ ID NO: 650999 - DNA, 120 bp, Artificial Sequence
  ENSG00000183049_51 (sequence is synthesized)
actgtacttcttccctattctgtctacccacactctgcgaactttgccttttccttaaacacattccagaccaaacactgttcagtttgttaaaaaaaaaaaaaaaaaaaaaagatgtat

SEQ ID NO: 651000 - DNA, 120 bp, Artificial Sequence
  ENSG00000183049_52 (sequence is synthesized)
gtcctcggttggggctgcaggtgtgcctgacatttgcaaaagatattccagtctttcgatgttcagaattgaaaatgtggagatagaaaagctcaaacagactcctaaaaggagggtttc

SEQ ID NO: 651001 - DNA, 120 bp, Artificial Sequence
  ENSG00000183049_53 (sequence is synthesized)
tttcctgaagactccaagaaaatgagtgtgcagatgagttagcttgacaacctcaactctggggagcaggcaggcggtctgaggaagataagggcccacgccccactcacctggcacctg

SEQ ID NO: 651002 - DNA, 120 bp, Artificial Sequence
  ENSG00000183049_54 (sequence is synthesized)
ttcggtggtcccggggcatcatggtctgcagctctgggcccccagccccactgtgaagtcagtcctgcatgctggccgaggcccggccacctcccgatgcctccagagtcagtgggaagg

SEQ ID NO: 651003 - DNA, 120 bp, Artificial Sequence
  ENSG00000183049_55 (sequence is synthesized)
agtcagcccttcccagacttccccgccacctccagcaggagcagctcagtttgtggctctgggagctccgcttttgcaaacccaaaaaggctgtgcatttggaagccaaacgctcagcat

SEQ ID NO: 651004 - DNA, 120 bp, Artificial Sequence
  ENSG00000183049_56 (sequence is synthesized)
gcggctgccgagtctggttttgtggacaaagcaaactgtggaatggcttctcggtgtctgtataaagggacaaacggttgcattcaccctttgtactataacaccgcttctgcattcgcc

SEQ ID NO: 651005 - DNA, 120 bp, Artificial Sequence
  ENSG00000183049_57 (sequence is synthesized)
atatccgttttttaacctttttgtctccggggaacttctcattcgattattatgtcttctgatgatttgccatgttattttaaaggtgattttattttcttatggacaggaaaaaagaaa

SEQ ID NO: 651006 - DNA, 120 bp, Artificial Sequence
  ENSG00000183049_58 (sequence is synthesized)
atgaggaggagttggttttactcttagagataagacttcagcaggggctcagaaaccccaaactctagttaaattgcttctcggaggaaaatcttaatctagacagattcagattcccag

SEQ ID NO: 651007 - DNA, 120 bp, Artificial Sequence
  ENSG00000183049_59 (sequence is synthesized)
gctctcctggaagccctgcacttcagggcacaggggccctgggacgtggttggcagccaggctgcgagagagctaaaaaggaacaagaacatcagctcggatgtttgtctctcagccctg

SEQ ID NO: 651008 - DNA, 120 bp, Artificial Sequence
  ENSG00000183049_60 (sequence is synthesized)
acacctgccactctccttcccggggcacttggccctatcagagggacatgaaatgctgtccgaatggtggcagaaatgcagcgacattgcatgcagcagagtctttgcttcgaaagatgg

SEQ ID NO: 651009 - DNA, 120 bp, Artificial Sequence
  ENSG00000183049_61 (sequence is synthesized)
ggcgccatgtttcagagaacatttatcttagtcccacgttcaggtgagaagacctcaaaggtaccctctgtccagaataaacattggaacaatctctcaattggcttttgtcactacaca

SEQ ID NO: 651010 - DNA, 120 bp, Artificial Sequence
  ENSG00000183049_62 (sequence is synthesized)
taatgtaatctcccttctttcagctcccccaacagtgagcatgcttcccaaaaaattacaacatcaaaaccaggaatgtccccgcatctactattaccaggcttgcaattggttcaattt

SEQ ID NO: 651011 - DNA, 120 bp, Artificial Sequence
  ENSG00000183049_63 (sequence is synthesized)
tcccataaaaacatgtttgtccaaaagaagggaaactgtgaatttattccatgcatgtaataaactctgcaagaagtttaacccacataggtttgcggcactgcaaaattgttcatgggt

SEQ ID NO: 651012 - DNA, 120 bp, Artificial Sequence
  ENSG00000183049_64 (sequence is synthesized)
ctatgtagcaaatgattctctgccttgacaatcatgtatacatatcaagatttctatcataatgataatgagattgatgacttcctgttttcctccaataaagacaattaatcaccttca

SEQ ID NO: 651013 - DNA, 120 bp, Artificial Sequence
  ENSG00000183049_65 (sequence is synthesized)
gcctcagtttggccagccaaaaagactgtgcgtatgtagcaaaaccagaatccctcagctgacactgaagacgagcctggggtggagaggagggagccggcatctgccgagcacctcctg

SEQ ID NO: 651014 - DNA, 120 bp, Artificial Sequence
  ENSG00000183049_66 (sequence is synthesized)
ccggcatctgccgagcacctcctgtttgccaggcgctttctatacttaatcccatgtcatgcgaccctaggactttttttaacatgtaatcactgggctgggtgcagtggctcacgcctg

SEQ ID NO: 651015 - DNA, 120 bp, Artificial Sequence
  ENSG00000183049_67 (sequence is synthesized)
ttcgagttcaaagagaccctcggaacgattaagcatgaaaatattgttgccctggaagacatttatgaaagcccaaatcacctgtacttggtcatgcagctgtaagtaccttgtttgatt

SEQ ID NO: 651016 - DNA, 120 bp, Artificial Sequence
  ENSG00000183049_68 (sequence is synthesized)
gatgagttttgaaccaacttgcaaactccaatgtctaaagggatcaggtgggaaaagaagtgattgaagtgggccaggtaaggcagtagggagcagggaggcctgtgggatactagagag

SEQ ID NO: 651017 - DNA, 120 bp, Artificial Sequence
  ENSG00000183054_0 (sequence is synthesized)
ctttcctcttggaagtggcgactgctgcggggctgagcggtgctcgcacgcgtctcgggagccaggttggcggcgcgatgaggcgcagcaaggccgatgtggagcggtacgtcgcctcgg

SEQ ID NO: 651018 - DNA, 120 bp, Artificial Sequence
  ENSG00000183054_1 (sequence is synthesized)
tgctgggtctcaccccgtcgcctcgacagaagtcaatgaaaggattctattttgcaaagctgtattatgaagctaaagaatatgatcttgctaaaaaatacatatgtacttacattaatg

SEQ ID NO: 651019 - DNA, 120 bp, Artificial Sequence
  ENSG00000183054_2 (sequence is synthesized)
tgcaagagagggatcccaaagctcacagatttctgggtcttctttatgaattggaagaaaacacagagaaagccgttgaatgttacaggcgttcagtggaattaaacccaacacaaaaag

SEQ ID NO: 651020 - DNA, 120 bp, Artificial Sequence
  ENSG00000183054_3 (sequence is synthesized)
atcttgtgttgaagattgcagaattgctttgtaaaaatgatgttactgatggaagagcaaaatactgggtcgaaagagcagcaaaacttttcccaggaagtcctgcaatttataaactaa

SEQ ID NO: 651021 - DNA, 120 bp, Artificial Sequence
  ENSG00000183054_4 (sequence is synthesized)
tagattgtgaaggtgaagatggatggaataaactttttgacttgattcagtcagaactttatgtaagacctgatgacgtccatgtgaacatccggctagtggagttgtatcgctcaacta

SEQ ID NO: 651022 - DNA, 120 bp, Artificial Sequence
  ENSG00000183054_5 (sequence is synthesized)
atcgctcaactaaaagattgaaggatgctgtggcccactgccatgaggcagagaggaacatagctttgcgttcaagtttagagtggaattcgtgtgttgtacagacccttaaggaatatc

SEQ ID NO: 651023 - DNA, 120 bp, Artificial Sequence
  ENSG00000183054_6 (sequence is synthesized)
tggagtctttacagtgtttggagtctgataaaagtgactggcaagcaaccaatacagacttactgctggcctatgctaatcttatgcttcttacgctttccactagagatgtgcaggaaa

SEQ ID NO: 651024 - DNA, 120 bp, Artificial Sequence
  ENSG00000183054_7 (sequence is synthesized)
tgctcttcagtctgcgaaatcttctttgggtggaaatgatgaactgtcagctactttcttagaaatgaaaggacatttctatatgtatgctggttctctgctcttgaagatgggtcagca

SEQ ID NO: 651025 - DNA, 120 bp, Artificial Sequence
  ENSG00000183054_8 (sequence is synthesized)
tcttagaaatgaaaggacatttctatatgtatgctggttctctgctcttgaagatgggtcagcatggtaataatgttcaatggcgagctctttctgagctggctgcattgtgctatctca

SEQ ID NO: 651026 - DNA, 120 bp, Artificial Sequence
  ENSG00000183054_9 (sequence is synthesized)
gagaaggtaaagctggacaaaatctgctggaaatgatggcctgtgaccgactgagccaatcagggcacatgttgctaagcttaagtcgtggcaagcaagatttcttaaaagaggttgttg

SEQ ID NO: 651027 - DNA, 120 bp, Artificial Sequence
  ENSG00000183054_10 (sequence is synthesized)
aaacttttgccaacaaaattgggcagtctgcgttatatgatgctctgttttctagtcagtcacctaaggatacatcttttcttggtagcgatgatattggaaaaattgatgtacaagaac

SEQ ID NO: 651028 - DNA, 120 bp, Artificial Sequence
  ENSG00000183054_11 (sequence is synthesized)
gaagatttggctagatacgatgttggtgctattcgagcacataatggtagtcttcagcatcttacttggcttggcttacagtggaattcattgcctgctttacctggaatccgaaaatgg

SEQ ID NO: 651029 - DNA, 120 bp, Artificial Sequence
  ENSG00000183054_12 (sequence is synthesized)
gaaaatggctaaaacagcttttccatcgtttgccccatgaaacctcaaggcttgaaacaaatgcgcctgaatcaatatgtattttagatcttgaagtatttctccttggagtagtatata

SEQ ID NO: 651030 - DNA, 120 bp, Artificial Sequence
  ENSG00000183054_13 (sequence is synthesized)
ccagccacttacaattaaaggagaaatgtaattctcaccatagctcctatcagccgttatgcctgccctttcctgtgtgtaaacagctttgtacagaaagacaaaaatcttggtgggatg

SEQ ID NO: 651031 - DNA, 120 bp, Artificial Sequence
  ENSG00000183054_14 (sequence is synthesized)
cggtttgtactctgattcacagaaaagcagtacctggaaacttggcaaaattgagacttctagttcagcatgaaataaacactctaagagcccaggaaaaacatggccttcaacctgctc

SEQ ID NO: 651032 - DNA, 120 bp, Artificial Sequence
  ENSG00000183054_15 (sequence is synthesized)
tgcttgtacattgggcaaaataccttcagaaaacgggcagcggtcttaattctttttatggtcaactagaatacatagggagaagtgttcattattggaagaaagttttgccattgttga

SEQ ID NO: 651033 - DNA, 120 bp, Artificial Sequence
  ENSG00000183054_16 (sequence is synthesized)
agataataaagaagaacagtattcctgaacctattgatcctctgtttaaacattttcatagtgtagacattcaggcatcagaaattgttgaatatgaagaagacgcacacataacttttg

SEQ ID NO: 651034 - DNA, 120 bp, Artificial Sequence
  ENSG00000183054_17 (sequence is synthesized)
ctatgttggatgcagtaaatggaaatatagaagatgctgtgactgcttttgaatctataaaaagtgttgtttcttattggaatcttgcactgatttttcacaggaaggcagaagacattg

SEQ ID NO: 651035 - DNA, 120 bp, Artificial Sequence
  ENSG00000183054_18 (sequence is synthesized)
aaaatgatgccctttctcctgaagaacaagaagaatgcagaaattatctgacaaagaccagggactacctaataaagattatagatgacggtgattcaaatctttcagtggtcaagaaat

SEQ ID NO: 651036 - DNA, 120 bp, Artificial Sequence
  ENSG00000183054_19 (sequence is synthesized)
tgcctgtgcccctggagtctgtaaaacagatgcttaattcagtcatgcaggaactcgaagactatagtgaaggaggtcctctctataaaaatggttctttgcgaaatgcagattcagaaa

SEQ ID NO: 651037 - DNA, 120 bp, Artificial Sequence
  ENSG00000183054_20 (sequence is synthesized)
taaaacattctacaccgtctcctaccaaatattcactatcaccaagtaaaagttacaagtattctcccgaaacaccacctcgatggacagaagatcggaattctttactgaatatgattt

SEQ ID NO: 651038 - DNA, 120 bp, Artificial Sequence
  ENSG00000183054_21 (sequence is synthesized)
gccaacaagtagaggccattaagaaagaaatgcaggagttgaaactaaatagcagtaagtcagcatcccgtcatcgttggcccacagagaattatggaccagactcggtgcctgatggat

SEQ ID NO: 651039 - DNA, 84 bp, Artificial Sequence
  ENSG00000183054_22 (sequence is synthesized)
accagcatataattcccagtatcttctcagaccagcagctaatgttactcccacaaagggttcttctaatacagaatttaagtc

SEQ ID NO: 651040 - DNA, 120 bp, Artificial Sequence
  ENSG00000183054_23 (sequence is synthesized)
ttactcccacaaagggttcttctaatacagaatttaagtcaaccaaagaaggattttccatccctgtgtctgctgatggatttaaatttggcatttcggaaccaggaaatcaagaaaaga

SEQ ID NO: 651041 - DNA, 120 bp, Artificial Sequence
  ENSG00000183054_24 (sequence is synthesized)
aaagggaaaagcctcttgaaaatgatactggcttccaggctcaggatattagtggccggaagaagggccgtggtgtgatttttggccaaacaagtagcacttttacatttgcagatgttg

SEQ ID NO: 651042 - DNA, 120 bp, Artificial Sequence
  ENSG00000183054_25 (sequence is synthesized)
caaaatcaacttcaggagaaggatttcagtttggcaaaaaagacctcaatttcaagggattttcaggtgctggagaaaaattattctcatcacgatacggtaaaatggccaataaagcaa

SEQ ID NO: 651043 - DNA, 120 bp, Artificial Sequence
  ENSG00000183054_26 (sequence is synthesized)
acacttccggtgactttgagaaagatgatgatgcctataagactgaggacagcgatgacatccattttgaaccagtagttcaaatgcctgaaaaagtagaacttgtaacaggagaagaag

SEQ ID NO: 651044 - DNA, 120 bp, Artificial Sequence
  ENSG00000183054_27 (sequence is synthesized)
gtgaaaaagttctgtattcacagggggtaaaactatttagatttgatgctgaggtaaggcagtggaaagaaaggggcttggggaacttaaaaattctcaaaaacgaggtcaatggcaaac

SEQ ID NO: 651045 - DNA, 120 bp, Artificial Sequence
  ENSG00000183054_28 (sequence is synthesized)
taagaatgctgatgcgaagagaacaagtactaaaagtgtgtgctaatcattggataacgactacaatgaacctgaagcccctctctggatcagatagagcatggatgtggtcagccagtg

SEQ ID NO: 651046 - DNA, 120 bp, Artificial Sequence
  ENSG00000183054_29 (sequence is synthesized)
tgaggaatgccagcggcttctgttagacataccacttcaaactccccataaacttgtagatactggcagagctgccaagttaatacagagagctgaagaaatgaagagtggactgaaaga

SEQ ID NO: 651047 - DNA, 120 bp, Artificial Sequence
  ENSG00000183054_30 (sequence is synthesized)
tttcaaaacatttttgacaaatgatcaaacaaaagtcactgaggaagaaaataagggttcaggtacaggtgcggccggtgcctcagacacaacaataaaacccaatgctgaaaacactgg

SEQ ID NO: 651048 - DNA, 120 bp, Artificial Sequence
  ENSG00000183054_31 (sequence is synthesized)
gcccacattagaatgggataactatgacttaagggaagatgctttggatgatagtgtcagtagtagctcagtacatgcttctccattggcaagtagccctgtgagaaaaaatcttttccg

SEQ ID NO: 651049 - DNA, 120 bp, Artificial Sequence
  ENSG00000183054_32 (sequence is synthesized)
ctttgatgagtcaacaacaggatctaacttcagttttaaatctgctttgagtctatctaagtctcctgccaagttgaatcagagtgggacttcagttggcactgatgaagaatctgttgt

SEQ ID NO: 651050 - DNA, 120 bp, Artificial Sequence
  ENSG00000183054_33 (sequence is synthesized)
tactcaagaagaagagagagatggacagtactttgaacctgttgttcctttacctgatctagttgaagtatccagtggtgaggaaaatgaacaagttgtttttagtcacagggcagaaat

SEQ ID NO: 651051 - DNA, 120 bp, Artificial Sequence
  ENSG00000183054_34 (sequence is synthesized)
ctacagatatgataaagatgttggtcaatggaaagaaaggggcattggtgatataaagattttacagaattatgataataagcaagttcgtatagtgatgagaagggaccaagtattaaa

SEQ ID NO: 651052 - DNA, 120 bp, Artificial Sequence
  ENSG00000183054_35 (sequence is synthesized)
actttgtgccaatcacagaataactccagacatgagtttgcaaaatatgaaagggacagaaagagtatgggtgtggactgcatgtgattttgcagatggagaaagaaaagtagagcattt

SEQ ID NO: 651053 - DNA, 120 bp, Artificial Sequence
  ENSG00000183054_36 (sequence is synthesized)
agctgttcgttttaaactacaggatgttgcagactcgtttaagaaaatttttgatgaagcaaaaacagcccaggaaaaagattctttgataacacctcatgtttctcggtcaagcactcc

SEQ ID NO: 651054 - DNA, 120 bp, Artificial Sequence
  ENSG00000183054_37 (sequence is synthesized)
cagagagtcaccatgtggcaaaattgctgtagctatattagaagaaaccacaagagagaggacagatgttattcagggtgatgatgtagcagatgcagcttcagaagttgaagtgtctag

SEQ ID NO: 651055 - DNA, 120 bp, Artificial Sequence
  ENSG00000183054_38 (sequence is synthesized)
cacatctgaaacaacaacaaaagcagtggtttctcctccaaagtttgtatttgtttcagagtctgttaaaagaatttttagtagtgaaaaatcaaaaccatttgtatttggcaacagttc

SEQ ID NO: 651056 - DNA, 120 bp, Artificial Sequence
  ENSG00000183054_39 (sequence is synthesized)
tgccactgggtctttgtttggatttagttttaatgcacctttgaaaagtaacaatagtgaaactagttcagtagcccagagtggatctgaaagcaaagtggaacctaaaaaatgtgaact

SEQ ID NO: 651057 - DNA, 120 bp, Artificial Sequence
  ENSG00000183054_40 (sequence is synthesized)
gtcaaagaactctgatatcgaacagtcttcagatagcaaagtcaaaaatctctctgcttcctttccaacggaagaatcttcaatcaactacacatttaaaacaccagaaaaggagcctcc

SEQ ID NO: 651058 - DNA, 120 bp, Artificial Sequence
  ENSG00000183054_41 (sequence is synthesized)
attatggcatgctgaatttaccaaagaagaattggttcagaagctccgttccaccacaaaaagtgcagatcacttaaacggcctgcttcgggaaatagaggcaaccaatgcagtccttat

SEQ ID NO: 651059 - DNA, 120 bp, Artificial Sequence
  ENSG00000183054_42 (sequence is synthesized)
tgaaataagaagattggaaaggaatcaagagcgagagaagtctgcagctaacctggaatacttgaagaacgtcttgctgcagttcattttcttgaagccaggtagtgaaagagagagact

SEQ ID NO: 651060 - DNA, 120 bp, Artificial Sequence
  ENSG00000183054_43 (sequence is synthesized)
gccaggtagtgaaagagagagacttcttcctgttataaatacgatgttgcagctcagccctgaagaaaagggaaaacttgctgcggttgctcaagatgaggaagaaaatgcttcccgttc

SEQ ID NO: 651061 - DNA, 120 bp, Artificial Sequence
  ENSG00000183054_44 (sequence is synthesized)
ttctggatgagcatcctatcttcgtagttggtttggacttcgataggttgatggaaggaatacttctattaaccaaatagaatctgtttacaaaaatggttcgtgtgtgttaccattatt

SEQ ID NO: 651062 - DNA, 120 bp, Artificial Sequence
  ENSG00000183054_45 (sequence is synthesized)
cttttgtcaaaaagtgtgtatatatgtttgcatttacatatatttgtacatctgtatgacagatgtattttaaaagtttcaacttgaagtaaaagtacaacagcttgaagtgttgatacc

SEQ ID NO: 651063 - DNA, 120 bp, Artificial Sequence
  ENSG00000183054_46 (sequence is synthesized)
aggccacagccctctaactcatgtgatctcccatgcatgctgccagaataaaaccaccaggaatgaattcactccccacttctctggaacctcaggacccgcccatttctcggcagtact

SEQ ID NO: 651064 - DNA, 120 bp, Artificial Sequence
  ENSG00000183054_47 (sequence is synthesized)
gtgaattttgaagttaaactaaattttggtaccataccaactggaatttaggctttaaaaataatgtttcaaggccaggtgtggtgattcatgcctgaaatcccactactttgggaggct

SEQ ID NO: 651065 - DNA, 120 bp, Artificial Sequence
  ENSG00000183054_48 (sequence is synthesized)
agctgtgattgtaccactgcactccagctcggggaacagagcgagaccttgtctctaaaaataataatagtaataaaaataacgttttatgactatttattgcaaggtcagatttacaga

SEQ ID NO: 651066 - DNA, 120 bp, Artificial Sequence
  ENSG00000183054_49 (sequence is synthesized)
ctatttattgcaaggtcagatttacagattgttataaattgttgagaaatttttgtgattagaatatgaaggaaaaagctttgttggtaaaagtgacatgttaaggggctatgaagtaaa

SEQ ID NO: 651067 - DNA, 120 bp, Artificial Sequence
  ENSG00000183054_50 (sequence is synthesized)
tatgctgcagttaattgtgctaagttaaaatacagtttagttatttgctttaaaataaactcttctttttttctttaaagtatactacctcaaaactcattatgttgtcagagccctaga

SEQ ID NO: 651068 - DNA, 120 bp, Artificial Sequence
  ENSG00000183054_51 (sequence is synthesized)
gctggctagtgtaacactgactatgagtaggtgggcccaccacttgagttgaggtgatttcatggtgtctttccaggctcttgatagggtgtcactgcatgcaagccatgaatctgtttt

SEQ ID NO: 651069 - DNA, 120 bp, Artificial Sequence
  ENSG00000183054_52 (sequence is synthesized)
gagaatcctctccattttcccaaataaaaacctatcccaacagtgactatatcactcagcattggatctaaatataaaagtggtgctttcagtgtttttggcagatagtgttccataacc

SEQ ID NO: 651070 - DNA, 120 bp, Artificial Sequence
  ENSG00000183054_53 (sequence is synthesized)
tttccatcagaagggattttagacaccttagaggtccgtgctacatcttcacagttcctccgaataaccttaggtggtagtgttacttgcctttgacacctgtgcatatgttttaatgac

SEQ ID NO: 651071 - DNA, 120 bp, Artificial Sequence
  ENSG00000183054_54 (sequence is synthesized)
tagatccaaactgtgttgttcttaaatcaaaaattggataatttttaatatttatgtattaatcacacagtgtgctctctgaagttctcttaagccttcagtttatactcttaattttct

SEQ ID NO: 651072 - DNA, 120 bp, Artificial Sequence
  ENSG00000183054_55 (sequence is synthesized)
ttctgagctggggaactgactttgcactttggttacacagaacattggtttccaatttagtttaactgaaatttgctgctgatatgttgagtttgttctttaaaaaatatctcatatatc

SEQ ID NO: 651073 - DNA, 120 bp, Artificial Sequence
  ENSG00000183054_56 (sequence is synthesized)
tcgtctttcctccttagaagaacagacctaactagcgaatgtatgaatgaaaatgcatctatttcagagccgacatgaagagtttagtttttttactttataaactgtgaatatgagtat

SEQ ID NO: 651074 - DNA, 120 bp, Artificial Sequence
  ENSG00000183054_57 (sequence is synthesized)
gccagctgcattagatgtaactaatcatatttaaatatatttcactttgactttagaccttttgaagtctgtataaacttgttttgaaatacagtctccacttacgaatgtcataacaaa

SEQ ID NO: 651075 - DNA, 120 bp, Artificial Sequence
  ENSG00000183054_58 (sequence is synthesized)
atacttttttgcatgataaaaaattactttgattacaaaaggcatattctttcatggtttctgcaatgagaggaagtgtaatgattattttaatatttctattaaaactgtatattttta

SEQ ID NO: 651076 - DNA, 120 bp, Artificial Sequence; identical to SEQ ID NO: 17361
  ENSG00000183054_59 (sequence is synthesized)

SEQ ID NO: 651077 - DNA, 120 bp, Artificial Sequence; identical to SEQ ID NO: 17362
  ENSG00000183054_60 (sequence is synthesized)

SEQ ID NO: 651078 - DNA, 120 bp, Artificial Sequence; identical to SEQ ID NO: 17363
  ENSG00000183054_61 (sequence is synthesized)

SEQ ID NO: 651079 - DNA, 120 bp, Artificial Sequence; identical to SEQ ID NO: 17319
  ENSG00000183054_62 (sequence is synthesized)

SEQ ID NO: 651080 - DNA, 120 bp, Artificial Sequence; identical to SEQ ID NO: 17320
  ENSG00000183054_63 (sequence is synthesized)

SEQ ID NO: 651081 - DNA, 120 bp, Artificial Sequence; identical to SEQ ID NO: 17321
  ENSG00000183054_64 (sequence is synthesized)

SEQ ID NO: 651082 - DNA, 120 bp, Artificial Sequence; identical to SEQ ID NO: 17322
  ENSG00000183054_65 (sequence is synthesized)

SEQ ID NO: 651083 - DNA, 120 bp, Artificial Sequence; identical to SEQ ID NO: 17323
  ENSG00000183054_66 (sequence is synthesized)

SEQ ID NO: 651084 - DNA, 120 bp, Artificial Sequence; identical to SEQ ID NO: 17324
  ENSG00000183054_67 (sequence is synthesized)

SEQ ID NO: 651085 - DNA, 120 bp, Artificial Sequence; identical to SEQ ID NO: 17325
  ENSG00000183054_68 (sequence is synthesized)

SEQ ID NO: 651086 - DNA, 120 bp, Artificial Sequence; identical to SEQ ID NO: 17326
  ENSG00000183054_69 (sequence is synthesized)

SEQ ID NO: 651087 - DNA, 120 bp, Artificial Sequence; identical to SEQ ID NO: 17327
  ENSG00000183054_70 (sequence is synthesized)

SEQ ID NO: 651088 - DNA, 87 bp, Artificial Sequence; identical to SEQ ID NO: 17328
  ENSG00000183054_71 (sequence is synthesized)

SEQ ID NO: 651089 - DNA, 120 bp, Artificial Sequence; identical to SEQ ID NO: 17329
  ENSG00000183054_72 (sequence is synthesized)

SEQ ID NO: 651090 - DNA, 120 bp, Artificial Sequence; identical to SEQ ID NO: 17330
  ENSG00000183054_73 (sequence is synthesized)

SEQ ID NO: 651091 - DNA, 120 bp, Artificial Sequence; identical to SEQ ID NO: 17331
  ENSG00000183054_74 (sequence is synthesized)

SEQ ID NO: 651092 - DNA, 120 bp, Artificial Sequence; identical to SEQ ID NO: 17332
  ENSG00000183054_75 (sequence is synthesized)

SEQ ID NO: 651093 - DNA, 120 bp, Artificial Sequence; identical to SEQ ID NO: 17333
  ENSG00000183054_76 (sequence is synthesized)

SEQ ID NO: 651094 - DNA, 120 bp, Artificial Sequence; identical to SEQ ID NO: 17334
  ENSG00000183054_77 (sequence is synthesized)

SEQ ID NO: 651095 - DNA, 120 bp, Artificial Sequence; identical to SEQ ID NO: 17335
  ENSG00000183054_78 (sequence is synthesized)

SEQ ID NO: 651096 - DNA, 86 bp, Artificial Sequence; identical to SEQ ID NO: 17336
  ENSG00000183054_79 (sequence is synthesized)

SEQ ID NO: 651097 - DNA, 120 bp, Artificial Sequence; identical to SEQ ID NO: 17337
  ENSG00000183054_80 (sequence is synthesized)

SEQ ID NO: 651098 - DNA, 120 bp, Artificial Sequence; identical to SEQ ID NO: 17338
  ENSG00000183054_81 (sequence is synthesized)

SEQ ID NO: 651099 - DNA, 120 bp, Artificial Sequence; identical to SEQ ID NO: 17339
  ENSG00000183054_82 (sequence is synthesized)

SEQ ID NO: 651100 - DNA, 120 bp, Artificial Sequence; identical to SEQ ID NO: 17340
  ENSG00000183054_83 (sequence is synthesized)

SEQ ID NO: 651101 - DNA, 120 bp, Artificial Sequence; identical to SEQ ID NO: 17341
  ENSG00000183054_84 (sequence is synthesized)

SEQ ID NO: 651102 - DNA, 120 bp, Artificial Sequence; identical to SEQ ID NO: 17342
  ENSG00000183054_85 (sequence is synthesized)

SEQ ID NO: 651103 - DNA, 120 bp, Artificial Sequence; identical to SEQ ID NO: 17343
  ENSG00000183054_86 (sequence is synthesized)

SEQ ID NO: 651104 - DNA, 120 bp, Artificial Sequence; identical to SEQ ID NO: 17344
  ENSG00000183054_87 (sequence is synthesized)

SEQ ID NO: 651105 - DNA, 120 bp, Artificial Sequence; identical to SEQ ID NO: 17345
  ENSG00000183054_88 (sequence is synthesized)

SEQ ID NO: 651106 - DNA, 120 bp, Artificial Sequence; identical to SEQ ID NO: 17346
  ENSG00000183054_89 (sequence is synthesized)

SEQ ID NO: 651107 - DNA, 78 bp, Artificial Sequence; identical to SEQ ID NO: 17347
  ENSG00000183054_90 (sequence is synthesized)

SEQ ID NO: 651108 - DNA, 120 bp, Artificial Sequence; identical to SEQ ID NO: 17348
  ENSG00000183054_91 (sequence is synthesized)

SEQ ID NO: 651109 - DNA, 120 bp, Artificial Sequence; identical to SEQ ID NO: 17349
  ENSG00000183054_92 (sequence is synthesized)

SEQ ID NO: 651110 - DNA, 120 bp, Artificial Sequence; identical to SEQ ID NO: 17350
  ENSG00000183054_93 (sequence is synthesized)

SEQ ID NO: 651111 - DNA, 120 bp, Artificial Sequence; identical to SEQ ID NO: 17351
  ENSG00000183054_94 (sequence is synthesized)

SEQ ID NO: 651112 - DNA, 120 bp, Artificial Sequence; identical to SEQ ID NO: 17352
  ENSG00000183054_95 (sequence is synthesized)

SEQ ID NO: 651113 - DNA, 120 bp, Artificial Sequence; identical to SEQ ID NO: 17353
  ENSG00000183054_96 (sequence is synthesized)

SEQ ID NO: 651114 - DNA, 120 bp, Artificial Sequence; identical to SEQ ID NO: 17354
  ENSG00000183054_97 (sequence is synthesized)

SEQ ID NO: 651115 - DNA, 120 bp, Artificial Sequence; identical to SEQ ID NO: 17355
  ENSG00000183054_98 (sequence is synthesized)

SEQ ID NO: 651116 - DNA, 120 bp, Artificial Sequence
  ENSG00000183054_99 (sequence is synthesized)
atttcaggtaagtcttccacttgtaggagcaattgacatttcacggagtcttgatgtgttttaaatgaaggtgtgctctggtatgtaatgacaatatgtgaacaaacctgtggaattaaa

SEQ ID NO: 651117 - DNA, 120 bp, Artificial Sequence; identical to SEQ ID NO: 17316
  ENSG00000183054_100 (sequence is synthesized)

SEQ ID NO: 651118 - DNA, 120 bp, Artificial Sequence; identical to SEQ ID NO: 17317
  ENSG00000183054_101 (sequence is synthesized)

SEQ ID NO: 651119 - DNA, 120 bp, Artificial Sequence; identical to SEQ ID NO: 17360
  ENSG00000183054_102 (sequence is synthesized)

SEQ ID NO: 651120 - DNA, 120 bp, Artificial Sequence
  ENSG00000183060_0 (sequence is synthesized)
cgcggtggcagctgcgggtcgcgggtcgcgggtcgcgagtcgccggtcgccggtcgcggcggagcctgggcgctgagaagggacttggagggaagcgggcctggagctgctgccgccgcc

SEQ ID NO: 651121 - DNA, 120 bp, Artificial Sequence
  ENSG00000183060_1 (sequence is synthesized)
cctgagctcggacgcgaaggctggccccgtccccgggctgccgccgtggtcctgcagtgaagaaaatgaggcacgaggaattgttaaccaagaccttccaaggcccagctgttgtgtgtg

SEQ ID NO: 651122 - DNA, 120 bp, Artificial Sequence
  ENSG00000183060_2 (sequence is synthesized)
ggactccgaccagccacgtatacatgtttaagaatggcagtggggactcgggggactcttctgaagaagagtctcaccgtgtggttttgcggccccggggcaaggagcgccacaagagcg

SEQ ID NO: 651123 - DNA, 120 bp, Artificial Sequence
  ENSG00000183060_3 (sequence is synthesized)
gtgtccaccagcctccccaggcgggagcaggtgacgtggtgctgctgcagcgggagctggcccaggaggacagcctcaacaagctggcgctgcagtatggctgcaaacacattttatttt

SEQ ID NO: 651124 - DNA, 120 bp, Artificial Sequence
  ENSG00000183060_4 (sequence is synthesized)
agacctaatggggctggagataccaggcagaatttaattccggatttctatgcattcagagtgattaacaatggcaaagttgcagatatcaagaaagtcaacaacttcatcagagaacaa

SEQ ID NO: 651125 - DNA, 120 bp, Artificial Sequence
  ENSG00000183060_5 (sequence is synthesized)
gacttatatgctttgaaatctgttaagattccagtgagaaaccatgggatcctgatggagacccacaaagaactgaaaccccttctgagcccgtcttccgagaccacagtgaccgtggaa

SEQ ID NO: 651126 - DNA, 120 bp, Artificial Sequence
  ENSG00000183060_6 (sequence is synthesized)
ctgccagaggcagacagagcaggcgcgggcaccggtgcccaggccggccaactgatgggcttctttaaggggattgaccaggatattgagcgtgcagtgcagtcagaaatctttctacat

SEQ ID NO: 651127 - DNA, 120 bp, Artificial Sequence
  ENSG00000183060_7 (sequence is synthesized)
gaaagttactgcatggacacctcccatcagccactgctcccggcacctccgaagacgcctatggatggtgcagattgtggcattcagtggtggaatgctgttttcatcatgctgctgatt

SEQ ID NO: 651128 - DNA, 120 bp, Artificial Sequence
  ENSG00000183060_8 (sequence is synthesized)
ggtattgtcttgcctgtcttttatttggtctactttaaaatacaagctagtggtgagacccctaatagcttgaacacaactgtcatccccaatggctcgatggcaatgggtacagttcca

SEQ ID NO: 651129 - DNA, 120 bp, Artificial Sequence
  ENSG00000183060_9 (sequence is synthesized)
gggcaagcccccagactagcagttgcagtgccagccgtcacttctgcagacagccagttcagtcagaccacccaagcggggagctaagctttgtttttaaagactaggcccagctttagc

SEQ ID NO: 651130 - DNA, 120 bp, Artificial Sequence
  ENSG00000183060_10 (sequence is synthesized)
aattggctgttgatgtgcctcagctgtcactggcgatgtcctaggggtgctgcattttgcttccggggaaggatggacacttttcagaagtcactgcagtattcccaattgcactggccc

SEQ ID NO: 651131 - DNA, 120 bp, Artificial Sequence
  ENSG00000183060_11 (sequence is synthesized)
tgggcatggccttacccagtctaagctggcaggatctaaaacagcagcgacctcggcccctatccagagaggtgcagcaagagagccatttccctgtgacatttagtggactggccagtt

SEQ ID NO: 651132 - DNA, 120 bp, Artificial Sequence
  ENSG00000183060_12 (sequence is synthesized)
cagcactgtgaggacccccaagttggacgtgctcggagggaaagatttatggcctctgtcgagggacctgcagcgtgagagccagtggcatctgcgcggcttgcctggctcttgctgtat

SEQ ID NO: 651133 - DNA, 120 bp, Artificial Sequence
  ENSG00000183060_13 (sequence is synthesized)
cctcacttcctgtggagcggggattggctctgagaaggagtgttctctgtctgcctggcaaaggtgctgtggaataggcttggcatgccaccctgttttagagagtgacagttacagttg

SEQ ID NO: 651134 - DNA, 120 bp, Artificial Sequence
  ENSG00000183060_14 (sequence is synthesized)
taacaagcctacttcatattggccccctcagttagcctttttgaggcaatgccatttctagagttgaaaaagccctggacccaaactgcggcactgttgaataaagggcagtcctactcc

SEQ ID NO: 651135 - DNA, 120 bp, Artificial Sequence
  ENSG00000183060_15 (sequence is synthesized)
tgtccttttagagtggcttagtgtgacacacaggcatctcccaggccaagcacacacaggctgcgcccagttccgcaggagccgtcccacagcgtggctctctggattctcccacttgtc

SEQ ID NO: 651136 - DNA, 120 bp, Artificial Sequence
  ENSG00000183060_16 (sequence is synthesized)
ctccttggaaggagctcttgctggccagtgtttggaggggaggatgagtgcctgtcactgaggcctcactatggttggcgtctgaagctgggcggtcgtcaggcctgtgctgagagccgc

SEQ ID NO: 651137 - DNA, 120 bp, Artificial Sequence
  ENSG00000183060_17 (sequence is synthesized)
agcccctgtgcacacctaacacagggcgctccccctgctgcttccctggctcagttcttcggagctccagagtgagaaggccgcttcgtcctttttctctgggtgatgcccttagaataa

SEQ ID NO: 651138 - DNA, 120 bp, Artificial Sequence
  ENSG00000183060_18 (sequence is synthesized)
cactatatgcaatgtaactcacaatgttccaggaccaaagacttgatggaggggctagaggcgacccttgttgtaaaaggcgatcagaacacctgagggaggaaggggcttgcagttttc

SEQ ID NO: 651139 - DNA, 120 bp, Artificial Sequence
  ENSG00000183060_19 (sequence is synthesized)
ccagcccttctcgctgccaaggcagcagtggtgctgtggatgggctggggactgcgggacagagcctgctactacttgggagttggtgctgccctgtggcatggaggggtgggaggggct

SEQ ID NO: 651140 - DNA, 120 bp, Artificial Sequence
  ENSG00000183060_20 (sequence is synthesized)
gagatggctgctggcccggcctccaagagttctggacaggaggcagacactgcccagatgctcggtggagggacagtgatggcctttgactcatgaggcctggagaaaagtatcaaaggt

SEQ ID NO: 651141 - DNA, 120 bp, Artificial Sequence
  ENSG00000183060_21 (sequence is synthesized)
ctcaccatgtaagagtgatttccgatttctctcctttcagttgtgtgaaaaaacagctggcctgggttccattagcaaattaaatcatcttcaatcttaaattagaaaccagaatgatct

SEQ ID NO: 651142 - DNA, 120 bp, Artificial Sequence
  ENSG00000183060_22 (sequence is synthesized)
tcaggataaaaagaacttctgaatctctgcaataggaaatgtttcgatcatgcaagtgctttcccagccaaatgtctgtgctctctgtgtcactgagggccacaggttcctctaacatct

SEQ ID NO: 651143 - DNA, 120 bp, Artificial Sequence
  ENSG00000183060_23 (sequence is synthesized)
gtcactgtcacttcaccaggcaggccttggagttccatgacaaaatcacttttgtcagacaaagaatgtatcctttacttttctcaaatggaataaaattatttcttctgtggaggaaaa

SEQ ID NO: 651144 - DNA, 120 bp, Artificial Sequence
  ENSG00000183060_24 (sequence is synthesized)
gatgttcgtagccaatccgcaggcgcggtggcagctgcgggtcgcgggtcgcgggtcgcgagtcgccggtcgccggtcgcggcggagcctgggcgctgaggttgcagatatcaagaaagt

SEQ ID NO: 651145 - DNA, 120 bp, Artificial Sequence
  ENSG00000183060_25 (sequence is synthesized)
agctgcgtttgctttggttagctagaaagcaggcccatcatgcatctgtaagaaagtgactggagtgtaggccctggcgtctaagccgagtaagatgccctgtcaatctgggtcctctgg

SEQ ID NO: 651146 - DNA, 120 bp, Artificial Sequence
  ENSG00000183060_26 (sequence is synthesized)
gaagcaagactgatgaaatgaggagcaccaaagctttacaccccagctatgtgcatttggggctggggctgcctgggaagagctcgtcctcagcccaaagcctgcaacagctgggatcag

SEQ ID NO: 651147 - DNA, 120 bp, Artificial Sequence
  ENSG00000183060_27 (sequence is synthesized)
ggcttacctctcacagacggggctcagcaactttctgcgggatgaggacacaagcccacttgacctggaacgtctgaaacctcctggccccgtggaagatgggaagaaacactcctcttc

SEQ ID NO: 651148 - DNA, 120 bp, Artificial Sequence
  ENSG00000183060_28 (sequence is synthesized)
ctctcagttttacaaccgagtggtcctcgggctgcttgtgagcaccggacgaccgaccgagcaggctgcagccaatcagctggcacagggctccgactgaaaatcatcttggctggtgcc

SEQ ID NO: 651149 - DNA, 120 bp, Artificial Sequence
  ENSG00000183060_29 (sequence is synthesized)
acagaatcggcctgaaaacaggatactgcctagagcaaggcacccaggggagccaagcaggaaaatgtaatgaattgactttaagtagctgcagctgtgattagagtatttttagccaca

SEQ ID NO: 651150 - DNA, 120 bp, Artificial Sequence
  ENSG00000183060_30 (sequence is synthesized)
ggactcaaccagctttcaaaacctgctaataagagccccaccgtagccagcgcaaaaatttagttttcagtttaacaccaggaatctgcttagctaggagctggcttagaaggcacatca

SEQ ID NO: 651151 - DNA, 120 bp, Artificial Sequence
  ENSG00000183060_31 (sequence is synthesized)
ggagagaacatcttctactgaaagttgaagatttttcattttctagctgaattatgacaaagggagatgaccattaagtgcctgccagcatactgggacgtacacctaacactctgaaaa

SEQ ID NO: 651152 - DNA, 120 bp, Artificial Sequence
  ENSG00000183060_32 (sequence is synthesized)
ctcaattcatgccagcacatctgtcttctgctgcatctagctcagcatcatgtatgtattttgggcaaaactaatcatttcacaccctagactttaaagagacccagaatctaatgatag

SEQ ID NO: 651153 - DNA, 120 bp, Artificial Sequence
  ENSG00000183060_33 (sequence is synthesized)
ccacagcactgtgcatgcaacagccagattaggccccggtgggactgcgtggcccactgcttcctatgggctccagggctgcccagcagggatgacccgggagccgacaagggggaggcc

SEQ ID NO: 651154 - DNA, 120 bp, Artificial Sequence
  ENSG00000183060_34 (sequence is synthesized)
agtgggggcgttgggacggtttccttgaccctgtctcaacccagagaaagaagcctgcaggtgaaaaaggtcttcgtgaaaggaatgaaaaaggagagggctttaggggaaggggctgcc

SEQ ID NO: 651155 - DNA, 120 bp, Artificial Sequence
  ENSG00000183060_35 (sequence is synthesized)
tggtggcaaagccagcgccttgtgtccccaggcaaacatgacagagtctcgacgcacaggaagagccagtccgtctttactggagtgagtgcgggagacaaacagtttacaacaaccttt

SEQ ID NO: 651156 - DNA, 120 bp, Artificial Sequence
  ENSG00000183060_36 (sequence is synthesized)
agcattgtcttcaccatttgataaaaagttcactattatatttattgtataatgaagaaaaacaacacattcagggaaaaattgagattaacttatttttcttaaaaggttcatctcaag

SEQ ID NO: 651157 - DNA, 120 bp, Artificial Sequence
  ENSG00000183060_37 (sequence is synthesized)
gatggcaacaaagtccagcttgtgccgccaaacggttttacatgatcaaaccgtgtacagcttcttgtgtgaactgttgactacaaacatttaccaaatacataaatctcttttaaaaaa

SEQ ID NO: 651158 - DNA, 120 bp, Artificial Sequence
  ENSG00000183060_38 (sequence is synthesized)
gccattttaaatatagcaaagcagtgtcttcttgcacagcaaagtgaagaaagtttctacagagaaatagaagttttacatttgtaaaatctttttcacattctaatcatctagcttaag

SEQ ID NO: 651159 - DNA, 120 bp, Artificial Sequence
  ENSG00000183060_39 (sequence is synthesized)
atccaatgccaggagttttcagcttccttatttactatgtatttcttgtgcgcatgatggttaatacagaaattatgttgatgcattactagttatccttctagttaaaggaaagggtaa

SEQ ID NO: 651160 - DNA, 120 bp, Artificial Sequence
  ENSG00000183060_40 (sequence is synthesized)
aacatgtattgttcttgtagaacaaacccctgatttagtctataacaaaatggacataattgggctcaaaagatggagttttgattgggaccacctgtgtacacacaacagtgacttcca

SEQ ID NO: 651161 - DNA, 120 bp, Artificial Sequence
  ENSG00000183060_41 (sequence is synthesized)
ctcgcggtggagtggccattagagtactgaggaaggacagctgttggaaactgtactttaaccagtgcaatttaagctttttttgcttttgttctttagtaataaaatacttctggaggg

SEQ ID NO: 651162 - DNA, 120 bp, Artificial Sequence
  ENSG00000183060_42 (sequence is synthesized)
gccccgggccctgtggtcccgggatgagctctccgcgcagccaggctcgctccagtgcccgcccagcgctgacttcattggctgcctccccagtcccgcccccaggggggccctgctgat

SEQ ID NO: 651163 - DNA, 120 bp, Artificial Sequence
  ENSG00000183060_43 (sequence is synthesized)
gtgcccttgccgcccttcttaaccctgccaggccgtcaggagaggcctgctgtagcagccaaggactcccctatttagccagaattggaatgcaggtgggagtacctttagttcccaacc

SEQ ID NO: 651164 - DNA, 120 bp, Artificial Sequence
  ENSG00000183060_44 (sequence is synthesized)
ctggcccccaaagagggagggttagcgcatttctttctctgcagggaacttctccttttcctgttttctccacactgaaattctgaaaccttttttcttctttcgagcacattttatttt

SEQ ID NO: 651165 - DNA, 120 bp, Artificial Sequence
  ENSG00000183060_45 (sequence is synthesized)
gtagccaatccgcaggcgcggtggcagctgcgggtcgcgggtcgcgggtcgcgagtcgccggtcgccggtcgcggcggagcctgggcgctgagtgaagaaaatgaggcacgaggaattgt

SEQ ID NO: 651166 - DNA, 120 bp, Artificial Sequence
  ENSG00000183060_46 (sequence is synthesized)
ggagcctgggcgctgaggtaccggggcctggacgagggggccgcggtctggctagggagccgcgcgggctcatggcgtgaagaaaatgaggcacgaggaattgttaaccaagaccttcca

SEQ ID NO: 651167 - DNA, 120 bp, Artificial Sequence
  ENSG00000183060_47 (sequence is synthesized)
ggtcgcgagtcgccggtcgccggtcgcggcggagcctgggcgctgaggaaagatctaggagagagggagaaattgatgctgccagaaagaggggacagttacagaagcgaagaccttgag

SEQ ID NO: 651168 - DNA, 120 bp, Artificial Sequence
  ENSG00000183066_0 (sequence is synthesized)
atctacggggcggcaggaggcccgaagcaagatggcggtgaatcagagccacaccgagaaccgccgcggagccctcatccctaacggtgaaagtctcttgaagcggtctccgaatgtgga

SEQ ID NO: 651169 - DNA, 120 bp, Artificial Sequence
  ENSG00000183066_1 (sequence is synthesized)
gctctccttcccacagcgatcagaaggctcaaatgtctttagtggtagaaagacaggaacattgtttctcacttcataccgggtgattttcataacttcatgctccatcagtgatcccat

SEQ ID NO: 651170 - DNA, 120 bp, Artificial Sequence
  ENSG00000183066_2 (sequence is synthesized)
gttgtcttttatgatgccatttgatctgatgacgaacctcactgttgaacaaccagtatttgctgcaaacttcattaagggaactattcaggcagctccatatggtggctgggaaggaca

SEQ ID NO: 651171 - DNA, 120 bp, Artificial Sequence
  ENSG00000183066_3 (sequence is synthesized)
agctacttttaaattagtcttcagaaatggagatgccattgaatttgcccagttgatggtgaaagctgcctctgctgctgcccgaggatttccacttagaaccttaaatgactggttcag

SEQ ID NO: 651172 - DNA, 120 bp, Artificial Sequence
  ENSG00000183066_4 (sequence is synthesized)
ctctatgggaatttatgtaattactggggaagggaatatgtgcactccacagatgccttgttcagttattgtctatggagccccacctgcaggatatggagccccacctcccggatacgg

SEQ ID NO: 651173 - DNA, 120 bp, Artificial Sequence
  ENSG00000183066_5 (sequence is synthesized)
agccccacctgcaggatatggagcccaacccgtaggaaatgaaggcccgcctgtgggatacagagcctcacctgtgcgatatggagccccacctcttggatacggagccccacctgcagg

SEQ ID NO: 651174 - DNA, 120 bp, Artificial Sequence
  ENSG00000183066_6 (sequence is synthesized)
atatggagccccacctctaggatatggagccccacctcttggatatggaaccccacctctcggatatggagccccacctctcggatatggagccccacctgcaggaaatgaaggcccgcc

SEQ ID NO: 651175 - DNA, 120 bp, Artificial Sequence
  ENSG00000183066_7 (sequence is synthesized)
tgcgggatacagagcctcacctgctggatcaggagccaggcctcaggaatctacagcagcccaggctcctgaaaacgaggcttctcttccctctgcctcctcttctcaggtccattctta

SEQ ID NO: 651176 - DNA, 120 bp, Artificial Sequence
  ENSG00000183066_8 (sequence is synthesized)
accttctaagatgtaaaccttgaagactcaccaagcaaagaggtaccctaaaattgaagtcaggataaggaggacgactcaggtatgtgatcacaggcttctcgcaggtagttgttccac

SEQ ID NO: 651177 - DNA, 120 bp, Artificial Sequence
  ENSG00000183066_9 (sequence is synthesized)
agaataccattgtggggctaattccccagtaatttggttgacattgggttgcatttttaaacataactttttccacactcgcattcaaggttcctgtcttcccatcctcattcaagaaac

SEQ ID NO: 651178 - DNA, 120 bp, Artificial Sequence
  ENSG00000183066_10 (sequence is synthesized)
atttattatgctccgtttgctaggcactaagatgcgtgctaaaaacgtcatgttgaacacttagttgtttgagaaagctaaattttcaatagtaagagtgttataaattacggtggatcc

SEQ ID NO: 651179 - DNA, 120 bp, Artificial Sequence
  ENSG00000183066_11 (sequence is synthesized)
acaaaatggagtattatacacctgttgaaaactatgtctagaggtagagaaagccttctttgaggagaccaaaaccaacaaataaaagcatgataaattgactatatcaaaatttaaaac

SEQ ID NO: 651180 - DNA, 120 bp, Artificial Sequence
  ENSG00000183066_12 (sequence is synthesized)
ttctctatgacagaagttaaaagataggcaacagaataggaaaaagtgattttcaacatatatattaatttatagtcagaatacgtgaataactacaaatcaattctccccaaaatgaca

SEQ ID NO: 651181 - DNA, 120 bp, Artificial Sequence
  ENSG00000183066_13 (sequence is synthesized)
gaaatatgaattgccgaataaccaaggcaatagcatggccagaaaacgtttgaaaagatgttcagcttgactagtgttagggaaatgcaacctgagatgagaaaacatttttatctccaa

SEQ ID NO: 651182 - DNA, 120 bp, Artificial Sequence
  ENSG00000183066_14 (sequence is synthesized)
agatttacaaatattaaaactcttgatatggcactttcacattttaaaatatgcctgcgagaaaacttgcatgtgtgcacaaagatgcatgtgggaagatttcattatattcattgtttc

SEQ ID NO: 651183 - DNA, 120 bp, Artificial Sequence
  ENSG00000183066_15 (sequence is synthesized)
taacagcacaaaattagaaataacctatatgtccattaataggaaatatatgaataggctatggtatgcccatactacgtatgcagaaatttctaagacttgttgataaggagaaaagca

SEQ ID NO: 651184 - DNA, 120 bp, Artificial Sequence
  ENSG00000183066_16 (sequence is synthesized)
agttgtagggagcatatactatagtgattttcagcctcatcagactgaatgccccattttataacaaatatttatattttataacaaacgtttatatttgtatatttataacaaatattt

SEQ ID NO: 651185 - DNA, 120 bp, Artificial Sequence
  ENSG00000183066_17 (sequence is synthesized)
tgtaatgtctccttcacttcaatgaagtttgtagataattgcatatgattccacaccatttcaaccaaaattaataggccataaatgtgatagaggaaataaaaggagtttgtagtaaaa

SEQ ID NO: 651186 - DNA, 120 bp, Artificial Sequence
  ENSG00000183066_18 (sequence is synthesized)
gtgggcaacagtgatgagaggaagagaggagagactcaaccaactagagcagggataaggtttcccttgttcagcttttcagtgtctgctggaatgtgatgattacctcattgtcaggta

SEQ ID NO: 651187 - DNA, 120 bp, Artificial Sequence
  ENSG00000183066_19 (sequence is synthesized)
ggaagtgaaacgtatgatattcttcctggcctttgccttgagagtcttctggagcctgaagagggtggggcagacaaccatggactgctagagaataaactttctttgaagcttcctaaa

SEQ ID NO: 651188 - DNA, 120 bp, Artificial Sequence
  ENSG00000183066_20 (sequence is synthesized)
gaagtgaaaagggaaagtgtggctgtaaacctctctaaagtttccaaacagggaatccaggcaatattggatcttaaacatgggtcataggatctggcgcttttatccctaaaatttttg

SEQ ID NO: 651189 - DNA, 120 bp, Artificial Sequence
  ENSG00000183066_21 (sequence is synthesized)
acagatgtgaccagcagtttgattagtttagatgtatgatttagtagccaatataagaaacttgtaatttttagtaattagaatttattataaataataaaacagggtattaattattaa

SEQ ID NO: 651190 - DNA, 120 bp, Artificial Sequence
  ENSG00000183066_22 (sequence is synthesized)
gtgatgattctgccctctcagctgtgctgttggtctgcatcacctctatctcttaagcatctatcctaatccaaatctcaggatttgggtttacccaaaagattacctcattgtcaggta

SEQ ID NO: 651191 - DNA, 120 bp, Artificial Sequence
  ENSG00000183066_23 (sequence is synthesized)
ggtgaggccttttttatatcagaaagttttccgagtaactgatctctggcaaatatttggggattagaattctaaaagaatacaaactagacttctcttctgctcttcatgttagttata

SEQ ID NO: 651192 - DNA, 120 bp, Artificial Sequence
  ENSG00000183066_24 (sequence is synthesized)
cttgtaccaggtagatttgaggtggggtccagttacctgaaaagcgtagcaggttcgagtttcttaaaggtggaattccaccatgttctcctgtgcaaagggtacctgtttacctggtcc

SEQ ID NO: 651193 - DNA, 120 bp, Artificial Sequence
  ENSG00000183066_25 (sequence is synthesized)
accaaactgccccagtacaaccaaaggctgtgactgtgtaaggatagaaccaagtggagccacagtttggacccacgtggtgctgcgtggcacacctactgttagttagctcccactgtc

SEQ ID NO: 651194 - DNA, 120 bp, Artificial Sequence
  ENSG00000183066_26 (sequence is synthesized)
taagaagagctttgtgtcctgtatattcaaaggaccctggtttttgctttgctgaggacaaatccagtcagaattcagctgagccttctgcatgctgagagcactcatgtgctgagttcc

SEQ ID NO: 651195 - DNA, 120 bp, Artificial Sequence
  ENSG00000183066_27 (sequence is synthesized)
tcagctcctcactgacgttttgagtactttctttctgactcactcactgtgctggtggattccgctcttcctgtctcttccccagctgcaatacagaaactatactctgttgtctactct

SEQ ID NO: 651196 - DNA, 120 bp, Artificial Sequence
  ENSG00000183066_28 (sequence is synthesized)
ttcatttcctattagaaatataaagggatagaaataagaagaccttttagtcctggactatctggtattggcccctaaaatgagcctccaaatactccttttcatgggtaagtggatgct

SEQ ID NO: 651197 - DNA, 120 bp, Artificial Sequence
  ENSG00000183066_29 (sequence is synthesized)
ccccagcctgctggagcagaaccttcctggctcagctaccctgagatatcaggacaaaaacatatagttggtgtgattttcctctttttgtttttttttttttcaagatagaatctggct

SEQ ID NO: 651198 - DNA, 86 bp, Artificial Sequence
  ENSG00000183066_30 (sequence is synthesized)
ctcggctcactgcaacctttgccccacaggttttggatgacaggtgcctgccaccatgctcggctaatttttgtgtttttagtgga

SEQ ID NO: 651199 - DNA, 120 bp, Artificial Sequence
  ENSG00000183066_31 (sequence is synthesized)
acaggcatcggcctgtgcctggccgatttttcaatccatagattaatatgttcaagaaatattgcatgtctttgttttctgtaaatttatttctgttaccaagatccccaccaccatctg

SEQ ID NO: 651200 - DNA, 120 bp, Artificial Sequence
  ENSG00000183066_32 (sequence is synthesized)
ctttgttggtgggcttctcacaaatcctaagattatgcaaaggtatccagattttatttggcaccaagatgctgagaagtttcttctggtcatcagactgcttctgaaacagccactatc

SEQ ID NO: 651201 - DNA, 120 bp, Artificial Sequence
  ENSG00000183066_33 (sequence is synthesized)
cagtcctggcagtcccgtcaagtctaaaagcttgttgccttgggaccccagaatcttaggtagggcttagaaccagggtgtcagagatccaactctgtgtaccatattgctccttagaac

SEQ ID NO: 651202 - DNA, 120 bp, Artificial Sequence
  ENSG00000183066_34 (sequence is synthesized)
tggggagtaggaccccaaaggcctccttatccttgagagtctgacaattccttaaacttccagattctgccctctcagctgtgctgttggtctgcatcacctctatctcttaagcatcta

SEQ ID NO: 651203 - DNA, 120 bp, Artificial Sequence
  ENSG00000183066_35 (sequence is synthesized)
tcctaatccaaatctcaggatttgggtttacccaaaaggtaatagaaagcctttgccttcatgttgacttggctttccttgcctagcacttggttgcttgcttgaaaatcatgtatgtat

SEQ ID NO: 651204 - DNA, 120 bp, Artificial Sequence
  ENSG00000183066_36 (sequence is synthesized)
cggggcggcaggaggcccgaagcaagatggcggtgaatcagagccacaccgagaaccgccgcggagccctcatccctaacggtgaaagacaagcacaaaagcaccacccatgcctctgag

SEQ ID NO: 651205 - DNA, 120 bp, Artificial Sequence
  ENSG00000183066_37 (sequence is synthesized)
aacactggaccatgcacccttgaaaacagctttgcttccttcatcatgagtaatcttcctccagcagtcaaatgtgcctgtgtacatgatgtcagttcctttgcatcctgactgcatcat

SEQ ID NO: 651206 - DNA, 120 bp, Artificial Sequence
  ENSG00000183066_38 (sequence is synthesized)
catgtagcagcaaatggtgttaaatgaataggaagtcaacccagcaacggcagtgacagtctgtgcatcatccaactgatgacaatctccagctttgcccacatcagctgctacacgagt

SEQ ID NO: 651207 - DNA, 120 bp, Artificial Sequence
  ENSG00000183066_39 (sequence is synthesized)
atgggcaaaatcaagagggtacacaaaacacaaggatgtggccccagtggcaccgcctgatgccagattccctgcaaagtagcgccaaaactgggatctcttgtccacaccatccaggaa

SEQ ID NO: 651208 - DNA, 120 bp, Artificial Sequence
  ENSG00000183066_40 (sequence is synthesized)
gatctgcttgtatttatctttgaaggtgggaaaacaaaaagaagtcatttgcttaaagcgcatgtgggagagcttggatttggatttgaacttaggtactgtgcataaactcctgtactc

SEQ ID NO: 651209 - DNA, 80 bp, Artificial Sequence
  ENSG00000183066_41 (sequence is synthesized)
gctgagcaaaatagtgggacctcatctcacagaataaaatttaagaaaagaaaaaaaagaaactatagccaggcatggtg

SEQ ID NO: 651210 - DNA, 64 bp, Artificial Sequence
  ENSG00000183066_42 (sequence is synthesized)
gctgagcaaaatagtgggacctcatctcacagaataaaatttaagaaaagaaaaaaaagaaact

SEQ ID NO: 651211 - DNA, 88 bp, Artificial Sequence
  ENSG00000183066_43 (sequence is synthesized)
gccagcttatgaggtaattacattggttctctccagaggggtaacctgccaagaagagatgctatagatgttactcttatactgtaaa

SEQ ID NO: 651212 - DNA, 120 bp, Artificial Sequence
  ENSG00000183066_44 (sequence is synthesized)
ccaagaagagatgctatagatgttactcttatactgtaaaacattgtgaaatcagattgcttaaaaatgatgtattacaaagttatggaaaaaagcagttgtgactatggaagcccaagg

SEQ ID NO: 651213 - DNA, 120 bp, Artificial Sequence
  ENSG00000183066_45 (sequence is synthesized)
cttatatcctagctctgtcttacactaaatgtgggtacagtgtttccactttttgtaaaatgggagctaatatcctccaacctgtgtgcctgacatggtgattaaaaggattaatcgaaa

SEQ ID NO: 651214 - DNA, 120 bp, Artificial Sequence
  ENSG00000183066_46 (sequence is synthesized)
aataatggtacacgttgatggttactggagctggatgctgggtacatggaggttcactctaccattttatttttgtatttgaaagttttcatgataaaaagtttttaaaaagagaaaggg

SEQ ID NO: 651215 - DNA, 89 bp, Artificial Sequence
  ENSG00000183067_0 (sequence is synthesized)
tcagaggtaaggagaattttggggctatactttcaagaaagtcgtgttcgagcacagcagatactctgccggatctggaggaatggaag

SEQ ID NO: 651216 - DNA, 120 bp, Artificial Sequence
  ENSG00000183067_1 (sequence is synthesized)
gagcacagcagatactctgccggatctggaggaatggaagtcagcggcgggtctgcgatggtggcaaacagcagtggtggacggttctgggtctggtaatgaagtcatagaaggccccca

SEQ ID NO: 651217 - DNA, 120 bp, Artificial Sequence
  ENSG00000183067_2 (sequence is synthesized)
aaatgcaagagtcctgaagggctcccaggctcgcttcaactgcaccgtctcccagggctggaagctcatcatgtgggctctcagtgacatggtggtgctaagcgtcaggcccatggagcc

SEQ ID NO: 651218 - DNA, 120 bp, Artificial Sequence
  ENSG00000183067_3 (sequence is synthesized)
catcatcaccaatgaccgcttcacctctcagaggtacgaccagggcgggaacttcacctcggagatgatcatccacaatgtggagcccagtgattcggggaacatcagatgcagcctcca

SEQ ID NO: 651219 - DNA, 120 bp, Artificial Sequence
  ENSG00000183067_4 (sequence is synthesized)
gaacagtcgcctgcatggatctgcttaccttaccgtccaagttatgggagagctgttcattcccagtgttaatcttgtagtcgctgagaatgaaccttgtgaagttacttgtctaccctc

SEQ ID NO: 651220 - DNA, 120 bp, Artificial Sequence
  ENSG00000183067_5 (sequence is synthesized)
acactggacccggctcccggatatttcctgggagctcggtctcctggtcagccattcaagctattattttgttccggagcccagcgaccttcaaagtgcagtgagcatcctggctctgac

SEQ ID NO: 651221 - DNA, 120 bp, Artificial Sequence
  ENSG00000183067_6 (sequence is synthesized)
cccacagagcaatgggactttgacttgcgtggctacctggaagagcctgaaggcccgcaagtctgcaactgtaaatctcactgtgattcggtgtccccaagacactggaggtggtattaa

SEQ ID NO: 651222 - DNA, 120 bp, Artificial Sequence
  ENSG00000183067_7 (sequence is synthesized)
tattccaggtgtattatcaagtttaccgagtttaggtttttcattgcctacttggggcaaagttggacttggactagcaggcaccatgcttctgacgccgacgtgtactcttacaatacg

SEQ ID NO: 651223 - DNA, 120 bp, Artificial Sequence
  ENSG00000183067_8 (sequence is synthesized)
gtggctgcaactgctgctgccgttgttgtttctgctgtagaagaaaaagaggatttcgtattcaatttcaaaagaaatctgaaaaagagaagacaaacaaagaaactgagacagaaagtg

SEQ ID NO: 651224 - DNA, 120 bp, Artificial Sequence
  ENSG00000183067_9 (sequence is synthesized)
gaaatgaaaactccggctacaattcagatgaacaaaagaccacagacaccgcttctctccctcccaaatcctgtgaatccagtgatcctgaacaaagaaacagtagctgtggccctcctc

SEQ ID NO: 651225 - DNA, 120 bp, Artificial Sequence
  ENSG00000183067_10 (sequence is synthesized)
accagcgggctgatcaacgtccacccaggccagcaagtcatccacaggcttcttttaatctggccagtcctgagaaggtcagtaatacaactgtagtatagcaaagccttccccaagctc

SEQ ID NO: 651226 - DNA, 120 bp, Artificial Sequence
  ENSG00000183067_11 (sequence is synthesized)
cactgagcacttggctgacaattcaaaacacggcgatggcatccttcctttccatcctaagactggcctgcagctttgccaacattacctgaagaggagatgtcggagtcatcagaactg

SEQ ID NO: 651227 - DNA, 120 bp, Artificial Sequence
  ENSG00000183067_12 (sequence is synthesized)
atacttgacagtgagagaaggaatcgattttcccagagttcaaagtagaatgtgacttttaagaggtttcatggtttttgtgaattccatgaagttactaagtaaaagctgcaaattcat

SEQ ID NO: 651228 - DNA, 120 bp, Artificial Sequence
  ENSG00000183067_13 (sequence is synthesized)
cataatttttctcaacattcaacactcctacttgttaatccaacaaatggtagataaaagtctgtattctaccatgcctttcaaaagtttttattatctgaaagcatatgaagatgatat

SEQ ID NO: 651229 - DNA, 120 bp, Artificial Sequence
  ENSG00000183067_14 (sequence is synthesized)
ttatgtatatttaatatgtaggggtattattacatattatcagtgaaatacgagtataaaaattagggtcaaccagaaatctgcaattgactgtcaaaactgagctcagttaaagtaaga

SEQ ID NO: 651230 - DNA, 120 bp, Artificial Sequence
  ENSG00000183067_15 (sequence is synthesized)
ttcaattctaacatggatgtgcacgttcctaaatatcttatgattgaatatttacatgaaggcattcatttttatctgcccctttatcagacctatttgcatctcctcaaatgaattaga

SEQ ID NO: 651231 - DNA, 120 bp, Artificial Sequence
  ENSG00000183067_16 (sequence is synthesized)
tgtggcctatgctttgcagaggatggacctcacctactccgcacaccgtgaaaaaactggaaatgggcattgtagtctttaattaataaaaacaccaaaaatgtgtattgcctttcttaa

SEQ ID NO: 651232 - DNA, 120 bp, Artificial Sequence
  ENSG00000183067_17 (sequence is synthesized)
ggaactttggttctggtgaggcagcatcaggactctctagaggccagacaagagtgtgtttctacatttgtatggagagaggacaagagccacgaagaggcctttaggaaatgaagcacc

SEQ ID NO: 651233 - DNA, 120 bp, Artificial Sequence
  ENSG00000183067_18 (sequence is synthesized)
cttgctgaagccctccaaagggtttacctgtcatctggggtaagacaactccagtttgtggctcccctgtgacaggtgtttgtcaagttctgggtctggtaatgaagtcatagaaggccc

SEQ ID NO: 651234 - DNA, 120 bp, Artificial Sequence
  ENSG00000183067_19 (sequence is synthesized)
gtgagctgatagatgtaaccgtgttccaatgaaactttatttacaaaaacaaggagtgggtcagatttggcctgtgggtcatagcttgctgactcttgttttatttggtgaatggtttct

SEQ ID NO: 651235 - DNA, 120 bp, Artificial Sequence
  ENSG00000183067_20 (sequence is synthesized)
gagagttgagtaacaactggggagtagagtccatggaccaggataaactttcatctctccccataatgggaatgtgtgagtaggcaggcgtgcatacctgcaacgcagcggcaaagctat

SEQ ID NO: 651236 - DNA, 120 bp, Artificial Sequence
  ENSG00000183067_21 (sequence is synthesized)
ggacttcctgtgttaagttcaatgtgtaagcatactcttgagagtaaccacgtgaactacgtaggtatccattgccaattaacatttggcaatgttaatgccaacaattaacatgaacat

SEQ ID NO: 651237 - DNA, 120 bp, Artificial Sequence
  ENSG00000183072_0 (sequence is synthesized)
acatccagagctggccgacgggtgcgcgggcgggcggcggcaccatgcagggaagctgccaggggccgtgggcagcgccgctttctgccgcccacctggcgctgtgagactggcgctgcc

SEQ ID NO: 651238 - DNA, 120 bp, Artificial Sequence
  ENSG00000183072_1 (sequence is synthesized)
accatgttccccagccctgctctcacgcccacgcccttctcagtcaaagacatcctaaacctggaacagcagcagcgcagcctggctgccgccggagagctctctgcccgcctggaggcg

SEQ ID NO: 651239 - DNA, 120 bp, Artificial Sequence
  ENSG00000183072_2 (sequence is synthesized)
accctggcgccctcctcctgcatgctggccgccttcaagccagaggcctacgctgggcccgaggcggctgcgccgggcctcccagagctgcgcgcagagctgggccgcgcgccttcaccg

SEQ ID NO: 651240 - DNA, 120 bp, Artificial Sequence
  ENSG00000183072_3 (sequence is synthesized)
gccaagtgtgcgtctgcctttcccgccgcccccgccttctatccacgtgcctacagcgaccccgacccagccaaggaccctagagccgaaaagaaagagctgtgcgcgctgcagaaggcg

SEQ ID NO: 651241 - DNA, 120 bp, Artificial Sequence
  ENSG00000183072_4 (sequence is synthesized)
gtggagctggagaagacagaggcggacaacgcggagcggccccgggcgcgacggcggaggaagccgcgcgtgctcttctcgcaggcgcaggtctatgagctggagcggcgcttcaagcag

SEQ ID NO: 651242 - DNA, 120 bp, Artificial Sequence
  ENSG00000183072_5 (sequence is synthesized)
cagcggtacctgtcggcccccgaacgcgaccagctggccagcgtgctgaaactcacgtccacgcaggtcaagatctggttccagaaccggcgctacaagtgcaagcggcagcggcaggac

SEQ ID NO: 651243 - DNA, 120 bp, Artificial Sequence
  ENSG00000183072_6 (sequence is synthesized)
ctgcctacggcgtgggcctcaatccctacggttataacgcctaccccgcctatccgggttacggcggcgcggcctgcagccctggctacagctgcactgccgcttaccccgccgggcctt

SEQ ID NO: 651244 - DNA, 120 bp, Artificial Sequence
  ENSG00000183072_7 (sequence is synthesized)
ccccagcgcagccggccactgccgccgccaacaacaacttcgtgaacttcggcgtcggggacttgaatgcggttcagagccccgggattccgcagagcaactcgggagtgtccacgctgc

SEQ ID NO: 651245 - DNA, 120 bp, Artificial Sequence
  ENSG00000183072_8 (sequence is synthesized)
atggtatccgagcctggtagggaagggacccgcgtggcgcgaccctgaccgatcccacctcaacagctccctgactctcggggggagaaggggctcccaacatgaccctgagtcccctgg

SEQ ID NO: 651246 - DNA, 120 bp, Artificial Sequence
  ENSG00000183072_9 (sequence is synthesized)
attttgcattcactcctgcggagacctaggaactttttctgtcccacgcgcgtttgttcttgcgcacgggagagtttgtggcggcgattatgcagcgtgcaatgagtgatcctgcagcct

SEQ ID NO: 651247 - DNA, 120 bp, Artificial Sequence
  ENSG00000183072_10 (sequence is synthesized)
ggtgtcttagctgtccccccaggagtgccctccgagagtccatgggcacccccggttggaactgggactgagctcgggcacgcagggcctgagatctggccgcccattccgcgagccagg

SEQ ID NO: 651248 - DNA, 120 bp, Artificial Sequence
  ENSG00000183072_11 (sequence is synthesized)
gccgggcgcccgggcctttgctatctcgccgtcgcccgcccacgcacccacccgtatttatgtttttacctattgctgtaagaaatgacgatccccttcccattaaagagagtgcgttga

SEQ ID NO: 651249 - DNA, 120 bp, Artificial Sequence
  ENSG00000183072_12 (sequence is synthesized)
ttaagtcaccgtctgtctccctcaccagggtgtgaactgccccgagggcagagacctcccgttttgttctccagcgccttgagccagcctgactttctacaaatgctgagtgagacgtgt

SEQ ID NO: 651250 - DNA, 120 bp, Artificial Sequence
  ENSG00000183072_13 (sequence is synthesized)
cggtggctcccagtgcacttggcagagtgagccgcagccagctgggcgctccaggcaggacacagtggcctccacgaggatcccttaccattactgtgcggccgcgctccgtaggtcaag

SEQ ID NO: 651251 - DNA, 120 bp, Artificial Sequence
  ENSG00000183077_0 (sequence is synthesized)
cggggctctggccatataaacagagggacgcacgcccatgcggctgtagacgccatgatggatgtgtctggtgtgggtttcccaagcaaggttccttggaagaagatgtctgcagaggag

SEQ ID NO: 651252 - DNA, 120 bp, Artificial Sequence
  ENSG00000183077_1 (sequence is synthesized)
ctggagaatcagtactgtcccagccgatgggttgtccgactgggagcagaggaagccttgaggacctactcacagataggaattgaagccaccacaagggcccgggccaccaggaagagc

SEQ ID NO: 651253 - DNA, 120 bp, Artificial Sequence
  ENSG00000183077_2 (sequence is synthesized)
ctgctgcatgtcccctatggagacggcgaaggggagaaagtggacatttacttccccgacgagtcgtctgaagccttgcctttcttcctgttctttcacggaggatactggcagagcgga

SEQ ID NO: 651254 - DNA, 120 bp, Artificial Sequence
  ENSG00000183077_3 (sequence is synthesized)
agtaaggatgagtctgccttcatggtccacccgctgacggcacagggagtggccgtggtaatagtggcttacggcatcgcccccaaaggcaccctggaccacatggtagaccaggtgacc

SEQ ID NO: 651255 - DNA, 120 bp, Artificial Sequence
  ENSG00000183077_4 (sequence is synthesized)
cgcagcgttgcgtttgtccagaagcggtatccaagcaacaagggaatttacctgtgtggacactcagccggggcccacctggctgccatgatgctcctggccgactggaccaagcatggg

SEQ ID NO: 651256 - DNA, 120 bp, Artificial Sequence
  ENSG00000183077_5 (sequence is synthesized)
gtcacgcccaacctcagaggctttttcctggtgagtggggtctttgacctggagcccatcgtgtatacttcacagaacgttgctctccagctgaccctggaggacgctcagaggaatagc

SEQ ID NO: 651257 - DNA, 120 bp, Artificial Sequence
  ENSG00000183077_6 (sequence is synthesized)
ccccagctgaaggtggcccaggcacagccggtggaccccacctgccgtgtgctggtggtcgtgggccagttcgactcccccgaattccaccgacagtcctgggagttttaccagaccctg

SEQ ID NO: 651258 - DNA, 120 bp, Artificial Sequence
  ENSG00000183077_7 (sequence is synthesized)
ctttgaaattgttgagaatctgacccagaaggacaacgtgctcacccagattatcttgaaaacaatcttccagtagttctgacgatacttggagcctggtccacgtgcatcccaccttgg

SEQ ID NO: 651259 - DNA, 120 bp, Artificial Sequence
  ENSG00000183077_8 (sequence is synthesized)
gaagcctctccaaagagctttcggagctgacactgacagcttcagtttcccccagcacccaggagagccttgctgtgtctgtctgcccggcaagagtccattctcactgctgggacactc

SEQ ID NO: 651260 - DNA, 120 bp, Artificial Sequence
  ENSG00000183077_9 (sequence is synthesized)
atgaaaatctccacgtcctccctcttcccagcctggatggagctccagggctggggaacgtccgcaagtcaatgctcagagatgcccggagctgcctcttagactcgtctggcccatcta

SEQ ID NO: 651261 - DNA, 83 bp, Artificial Sequence
  ENSG00000183077_10 (sequence is synthesized)
gatgcccggagctgcctcttagactcgtctggcccatctacctgctgacagagcatgacaaagatgacgctcaaaagtaatgc

SEQ ID NO: 651262 - DNA, 120 bp, Artificial Sequence
  ENSG00000183077_11 (sequence is synthesized)
agaatggcattatatttaaatagttcataaagaagcacaaaagaatattatttcataacatgtaaaaattatataaaacgtaaatttccatgttgataaataaagttgtattggaacacg

SEQ ID NO: 651263 - DNA, 120 bp, Artificial Sequence
  ENSG00000183077_12 (sequence is synthesized)
cagtacctaggatacagccaagctgcccctctggcctgtggagcagaaagcaaattgggactcttcgaagggggcctgatgttgtggggaaactgcgtgcaaatccagctctctgctctg

SEQ ID NO: 651264 - DNA, 120 bp, Artificial Sequence
  ENSG00000183077_13 (sequence is synthesized)
gctgtgggagtggtgcccatgatggcattaactgaattcgtttgggggacctcatctccccttaaggctgccagctggctaaaggcacagcggtcgctggtatacctctagaccatggat

SEQ ID NO: 651265 - DNA, 120 bp, Artificial Sequence
  ENSG00000183077_14 (sequence is synthesized)
ctgagggcatcttggagaccctgggatactggggcgagggcttctaaggcagagaggagcagccgggcatgggcgagggggaggggcacactctgttgagaaggaaagtcttacggagcc

SEQ ID NO: 651266 - DNA, 120 bp, Artificial Sequence
  ENSG00000183077_15 (sequence is synthesized)
gaagtccatttataggcttgagaactcctgtgtgaattaaatcacgaccttctgatgaagccactccgatgagcctgtgaggcacattgtcttcacactgtgctggggcagggttgttgg

SEQ ID NO: 651267 - DNA, 120 bp, Artificial Sequence
  ENSG00000183077_16 (sequence is synthesized)
ctacccctgagagtgcgtcctacagatgcttgcaagtggtatggtaatggatgtacaaagctattcacagcaggggtgtttgtggtagcatggcctgggagacagcccagatggctttca

SEQ ID NO: 651268 - DNA, 120 bp, Artificial Sequence
  ENSG00000183077_17 (sequence is synthesized)
gcaaaggattggtggcaggtctgcagccctggggcttatcagacaccaaccctgctggcaccttgatcttggacttccagtttgcagaactgtgagaaaataaaatttccattaagtttc

SEQ ID NO: 651269 - DNA, 120 bp, Artificial Sequence
  ENSG00000183077_18 (sequence is synthesized)
ctttccctgggggactcctcctccagggctgccgcaaccaaactgccacaagctgggcactccttgcagggctgtgtctcacagcgctggagaacggaagtctcaagtcaaatgtgggca

SEQ ID NO: 651270 - DNA, 120 bp, Artificial Sequence
  ENSG00000183077_19 (sequence is synthesized)
gggttcctagggagggtccttcctgccttctccagcttctggtggccttagacagcccttagcttgtgtctgcatagctccagcctctgcctccattcacatgtgatcctggtgttcctg

SEQ ID NO: 651271 - DNA, 83 bp, Artificial Sequence
  ENSG00000183077_20 (sequence is synthesized)
acccagactggaacgcagtggtgcgacctcagctcactgcaacttctgcctcccgggctcaagcaattcttctgcctcagcct

SEQ ID NO: 651272 - DNA, 120 bp, Artificial Sequence
  ENSG00000183077_21 (sequence is synthesized)
attacaggcgtgagccaccacaccagcctccttttttttttttttttttttataaggtcatagtcacaggttctggggttaggatttggacatatcttttggggggacacagttcaaccc

SEQ ID NO: 651273 - DNA, 120 bp, Artificial Sequence
  ENSG00000183077_22 (sequence is synthesized)
acagttcaacccactacacccagtgagaagcatgttcagcctcctcttgaatcaagggaaaagccagagtgaccaaccactgtcccagtttgcttgggactgaggaggggtttcccagga

SEQ ID NO: 651274 - DNA, 120 bp, Artificial Sequence
  ENSG00000183077_23 (sequence is synthesized)
catggggttttcagtactttaggaaaaaaaaatgagagtcccaggtaaaatgggacagttggtcactgtaagctaagcagtgggtatttgggaatttgggatcttggcagacactgctgt

SEQ ID NO: 651275 - DNA, 120 bp, Artificial Sequence
  ENSG00000183077_24 (sequence is synthesized)
tgggaatttgggatcttggcagacactgctgttccctagggtcttcctacagagttgccttcaagcatgttcatgttaatagcttacatttaatggccaggtacggtggctcacgcctgt

SEQ ID NO: 651276 - DNA, 80 bp, Artificial Sequence
  ENSG00000183087_0 (sequence is synthesized)
agaccgagcgcttgaggtgccgcagccgccgccgccgccgccgccgcgatgtgaccttcagggccgccaggacgggatga

SEQ ID NO: 651277 - DNA, 80 bp, Artificial Sequence
  ENSG00000183087_1 (sequence is synthesized)
atggccccttcgctctcgcccgggcccgccgccctgcgccgcgcgccgcagctgctgctgctgctgctggccgcggagtg

SEQ ID NO: 651278 - DNA, 120 bp, Artificial Sequence
  ENSG00000183087_2 (sequence is synthesized)
cttgccgcgctgttgccggcgcgcgaggccacgcagttcctgcggcccaggcagcgccgcgcctttcaggtcttcgaggaggccaagcagggccacctggagagggagtgcgtggaggag

SEQ ID NO: 651279 - DNA, 120 bp, Artificial Sequence
  ENSG00000183087_3 (sequence is synthesized)
ctgtgcagccgcgaggaggcgcgggaggtgttcgagaacgaccccgagacggattatttttacccaagatacttagactgcatcaacaagtatgggtctccgtacaccaaaaactcaggc

SEQ ID NO: 651280 - DNA, 120 bp, Artificial Sequence
  ENSG00000183087_4 (sequence is synthesized)
ttcgccacctgcgtgcaaaacctgcctgaccagtgcacgcccaacccctgcgataggaaggggacccaagcctgccaggacctcatgggcaacttcttctgcctgtgtaaagctggctgg

SEQ ID NO: 651281 - DNA, 120 bp, Artificial Sequence
  ENSG00000183087_5 (sequence is synthesized)
gggggccggctctgcgacaaagatgtcaacgaatgcagccaggagaacgggggctgcctccagatctgccacaacaagccgggtagcttccactgttcctgccacagcggcttcgagctc

SEQ ID NO: 651282 - DNA, 120 bp, Artificial Sequence
  ENSG00000183087_6 (sequence is synthesized)
tcctctgatggcaggacctgccaagacatagacgagtgcgcagactcggaggcctgcggggaggcgcgctgcaagaacctgcccggctcctactcctgcctctgtgacgagggctttgcg

SEQ ID NO: 651283 - DNA, 120 bp, Artificial Sequence
  ENSG00000183087_7 (sequence is synthesized)
tacagctcccaggagaaggcttgccgagatgtggacgagtgtctgcagggccgctgtgagcaggtctgcgtgaactccccagggagctacacctgccactgtgacgggcgtgggggcctc

SEQ ID NO: 651284 - DNA, 120 bp, Artificial Sequence
  ENSG00000183087_8 (sequence is synthesized)
aagctgtcccaggacatggacacctgtgaggacatcttgccgtgcgtgcccttcagcgtggccaagagtgtgaagtccttgtacctgggccggatgttcagtgggacccccgtgatccga

SEQ ID NO: 651285 - DNA, 120 bp, Artificial Sequence
  ENSG00000183087_9 (sequence is synthesized)
ctgcgcttcaagaggctgcagcccaccaggctggtagctgagtttgacttccggacctttgaccccgagggcatcctcctctttgccggaggccaccaggacagcacctggatcgtgctg

SEQ ID NO: 651286 - DNA, 120 bp, Artificial Sequence
  ENSG00000183087_10 (sequence is synthesized)
gaggagctggcgcggaatctggtcatcaaggtcaacagggatgctgtcatgaaaatcgcggtggccggggacttgttccaaccggagcgaggactgtatcatctgaacctgaccgtggga

SEQ ID NO: 651287 - DNA, 120 bp, Artificial Sequence
  ENSG00000183087_11 (sequence is synthesized)
ggtattcccttccatgagaaggacctcgtgcagcctataaaccctcgtctggatggctgcatgaggagctggaactggctgaacggagaagacaccaccatccaggaaacggtgaaagtg

SEQ ID NO: 651288 - DNA, 120 bp, Artificial Sequence
  ENSG00000183087_12 (sequence is synthesized)
aacacgaggatgcagtgcttctcggtgacggagagaggctctttctaccccgggagcggcttcgccttctacagcctggactacatgcggacccctctggacgtcgggactgaatcaacc

SEQ ID NO: 651289 - DNA, 120 bp, Artificial Sequence
  ENSG00000183087_13 (sequence is synthesized)
tgggaagtagaagtcgtggctcacatccgcccagccgcagacacaggcgtgctgtttgcgctctgggcccccgacctccgtgccgtgcctctctctgtggcactggtagactatcactcc

SEQ ID NO: 651290 - DNA, 120 bp, Artificial Sequence
  ENSG00000183087_14 (sequence is synthesized)
acgaagaaactcaagaagcagctggtggtcctggccgtggagcatacggccttggccctaatggagatcaaggtctgcgacggccaagagcacgtggtcaccgtctcgctgagggacggt

SEQ ID NO: 651291 - DNA, 120 bp, Artificial Sequence
  ENSG00000183087_15 (sequence is synthesized)
gaggccaccctggaggtggacggcaccaggggccagagcgaggtgagcgccgcgcagctgcaggagaggctggccgtgctcgagaggcacctgcggagccccgtgctcacctttgctggc

SEQ ID NO: 651292 - DNA, 120 bp, Artificial Sequence
  ENSG00000183087_16 (sequence is synthesized)
ggcctgccagatgtgccggtgacttcagcgccagtcaccgcgttctaccgcggctgcatgacactggaggtcaaccggaggctgctggacctggacgaggcggcgtacaagcacagcgac

SEQ ID NO: 651293 - DNA, 120 bp, Artificial Sequence
  ENSG00000183087_17 (sequence is synthesized)
atcacggcccactcctgcccccccgtggagcccgccgcagcctaggcccccacgggacgcggcaggcttctcagtctctgtccgagacagccgggaggagcctgggggctcctcaccacg

SEQ ID NO: 651294 - DNA, 120 bp, Artificial Sequence
  ENSG00000183087_18 (sequence is synthesized)
tggggccatgctgagagctgggctttcctctgtgaccatcccggcctgtaacatatctgtaaatagtgagatggacttggggcctctgacgccgcgcactcagccgtgggcccgggcgcg

SEQ ID NO: 651295 - DNA, 120 bp, Artificial Sequence
  ENSG00000183087_19 (sequence is synthesized)
gggaggccggcgcagcgcagagcgggctcgaagaaaataattctctattatttttattaccaagcgcttctttctgactctaaaatatggaaaataaaatatttacagaaagctttgtaa

SEQ ID NO: 651296 - DNA, 120 bp, Artificial Sequence
  ENSG00000183087_20 (sequence is synthesized)
ttgattgaaaccagtaaatgcttctctttggggttggggttttagtttcaaatgcccccggggggttactttttacggccccgtgtcctgtagcaccgtcatttaaatggaacagcacag

SEQ ID NO: 651297 - DNA, 120 bp, Artificial Sequence
  ENSG00000183087_21 (sequence is synthesized)
cgtgcaccgccgccccccacccctccaccaagcagggcccttcccagctctccacctgctgggctgaagtcagccttcccagccgggccttgatcagaagcgtgcaccaacaccccggga

SEQ ID NO: 651298 - DNA, 120 bp, Artificial Sequence
  ENSG00000183087_22 (sequence is synthesized)
gctgcccggtcaggggaggagggcagggaaatggggccagggcgcgctggccccacagagtctggatgcgacctctgggtggtgccctggccagtccctgcagccgcctgccccagcccc

SEQ ID NO: 651299 - DNA, 120 bp, Artificial Sequence
  ENSG00000183087_23 (sequence is synthesized)
cacaccgacctgtcacaccggtgcctgtcacaccactgcctgtcacactgacttgtcaccggtgtctgtcacaccgacctgtcacactggtgcctgtcacactggtgcctgtcacaccga

SEQ ID NO: 651300 - DNA, 120 bp, Artificial Sequence
  ENSG00000183087_24 (sequence is synthesized)
cctgtcacaccggtgcctgtcacaccgacctgtcacactgacctgtcacaccggtaggaatgcagtacccacatgtggacgtttctgggcagggcggctcttgtctttcctcttcagcct

SEQ ID NO: 651301 - DNA, 120 bp, Artificial Sequence
  ENSG00000183087_25 (sequence is synthesized)
gggcctgtgcctgggggttgatgagagtgagcatttatttaaaaagcaaaaccacaggtggaaagagtcaccaggacagcttctcggagtcgcagacctgggatgcagccgtggggctct

SEQ ID NO: 651302 - DNA, 120 bp, Artificial Sequence
  ENSG00000183087_26 (sequence is synthesized)
tgggtctgggctgcgacgttcagggcttccagccagccctcgccttgaggttctttgcctcgctgcctcatgtactcatgcagagggtgtcggacccctgcgagatgtccagctcaccct

SEQ ID NO: 651303 - DNA, 120 bp, Artificial Sequence
  ENSG00000183087_27 (sequence is synthesized)
ggctgcccacggtgggcagggcaggcctggctcagccccagcccctccatcttccaggggtgtcagctcacaccggctttggttctgtcccccttcgggcagcgtggagaaaccacagcc

SEQ ID NO: 651304 - DNA, 120 bp, Artificial Sequence
  ENSG00000183087_28 (sequence is synthesized)
cagaacagggaactttccaggacagccatcttcaaggcatccatatctatttcataatagtgtatactttttaatgattctctgtaatttttgtatgcttgaaatatttcataatttaaa

SEQ ID NO: 651305 - DNA, 120 bp, Artificial Sequence
  ENSG00000183087_29 (sequence is synthesized)
aataaagggtcaagggaaatgagcagggaaggagatgacggggacccccgagaagccctgtgggaagcggctgctgcaagcccgcccttcacctgggagtcccagtggggcaggtgtgac

SEQ ID NO: 651306 - DNA, 120 bp, Artificial Sequence
  ENSG00000183087_30 (sequence is synthesized)
agcctctggggtctcagcagctagaggcggggtggccactcccgaggcacaggagggacagtggacccgctgcgcggccggggcgtggggctcaggggagcaggagtgaaggccacatcc

SEQ ID NO: 651307 - DNA, 120 bp, Artificial Sequence
  ENSG00000183087_31 (sequence is synthesized)
tggacaccaggtcaccgccacacagctgagggggccggcgcctgcgagccacactcggctcacagtgtgggagcttttcccctgttcggttgggcagatggtggctcacagcaatctgaa

SEQ ID NO: 651308 - DNA, 120 bp, Artificial Sequence
  ENSG00000183087_32 (sequence is synthesized)
ttagtctctggtgtttaagtcagatgatttcagcaacaaactcagttttccaatttccctggaaaagtcggatctgtgaccttggccggtcccccaacagcgtctttccgtgggggacac

SEQ ID NO: 651309 - DNA, 120 bp, Artificial Sequence
  ENSG00000183087_33 (sequence is synthesized)
cgggtggagctgagtgcagctgccccttggacaaggtccccccacccccggtcctcacaataagtcagctgtcctgggctgggggactcatgctgttttccccacagaacaatcaagagg

SEQ ID NO: 651310 - DNA, 120 bp, Artificial Sequence
  ENSG00000183087_34 (sequence is synthesized)
tgacagaaacagcttttattctctcgctcgtgtgctaaggagggagacatgggtcaaaccagagaggctcacgttctccaagtctgcccaccccggggccacagagccctcccgcttgct

SEQ ID NO: 651311 - DNA, 120 bp, Artificial Sequence
  ENSG00000183087_35 (sequence is synthesized)
gggatacgacagacaggcttggttcatgcaaatgctcgttaccagggccagacccaatctcagcatctggaataaacagctgctgttatgtagcaacagccgacccctgggctgctgggc

SEQ ID NO: 651312 - DNA, 120 bp, Artificial Sequence
  ENSG00000183087_36 (sequence is synthesized)
tgtggtgccagcgtgagtgcccaccgggctgggaggccgccaccgcagggctgggtcctgggtccccatcagggccaccccagttcctggtcaagtgcagcctcggtcttgtgtgtgcct

SEQ ID NO: 651313 - DNA, 120 bp, Artificial Sequence
  ENSG00000183087_37 (sequence is synthesized)
ggtgcctggggctggggttgaccctctcacacccaacctgggggccacacttgttcccccacagcctcccaggctggcccctggctttacgtgcagagaagctgagccccaggtggggtg

SEQ ID NO: 651314 - DNA, 120 bp, Artificial Sequence
  ENSG00000183087_38 (sequence is synthesized)
ggggtgtcatccacagtcagcgagcatccagacccagggctgcagggaaccctggacggagacaggcgtgcggcgtaggggtggccagcagctgtgaggaccagcttggacctaacagct

SEQ ID NO: 651315 - DNA, 120 bp, Artificial Sequence
  ENSG00000183087_39 (sequence is synthesized)
tttctggtagtgaatgcggaagaggacttgtgttttaagaggaaggagaagtccaggtgggtcgttagtggctattatggtgtctcggtgctggtcaggtcattggctgagactgagaaa

SEQ ID NO: 651316 - DNA, 120 bp, Artificial Sequence
  ENSG00000183087_40 (sequence is synthesized)
cacgtacgggggccggcattggcctgagtcaggccccacgaacctgcatcttcagggagcattcgtccacacccatcagaccagccccgggggagagggctgggcagacctcgggccagg

SEQ ID NO: 651317 - DNA, 120 bp, Artificial Sequence
  ENSG00000183087_41 (sequence is synthesized)
ctgcagttgggacccgcggctgtcaccgcagctgttagcagcgaacagagtgaccgccagcccctcccatgtccagcagggcgtcctgccgtgtcccatgggctacacagcacagaggct

SEQ ID NO: 651318 - DNA, 120 bp, Artificial Sequence
  ENSG00000183087_42 (sequence is synthesized)
gggaccggggatgtccttgccatgagctgggagggtcagcggaaaggcacgtgggagccggcaagtcctcggctgcccgcaggttttcacttgcggcaaacggcaggatttctctcttgg

SEQ ID NO: 651319 - DNA, 120 bp, Artificial Sequence
  ENSG00000183087_43 (sequence is synthesized)
ctgccagacacagactccacttagttttaataaacagagctttgaagaggatgagagcgagccaggaggcctgcagcctgaatgactcactgggcacagaagaagatcacgtttaaccga

SEQ ID NO: 651320 - DNA, 120 bp, Artificial Sequence
  ENSG00000183087_44 (sequence is synthesized)
tgggactgtctgtgctcccagcggggaagggagggctggcgtctgcagagcccaggctggcagatgcctcctgcttgtctgccgggtctgcggccaaacgaacggggaccgagaagttag

SEQ ID NO: 651321 - DNA, 120 bp, Artificial Sequence
  ENSG00000183087_45 (sequence is synthesized)
agaagaaagggaaaccctgccctttcggagggaacccggggctggccacaagcgctgccgggggtgggggggccaggcggggccggccacgtggtgagctaagatatgttgttctctccc

SEQ ID NO: 651322 - DNA, 120 bp, Artificial Sequence
  ENSG00000183087_46 (sequence is synthesized)
tgcaaaccccttctctgagttgatgccaggctcagctccttgtcaggacgtgtaattgattttgtcctccggttttctgacctcagcactaatcacttctgaagtcattgaggaccccaa

SEQ ID NO: 651323 - DNA, 120 bp, Artificial Sequence
  ENSG00000183090_0 (sequence is synthesized)
atggcgggggcttctcggcacccgactgggacgccccggcagctccttgtggcgctcgcctgcctgctcttgagtcgccccgcgctgcagggacgggcatcctcacttgggaccgagccc

SEQ ID NO: 651324 - DNA, 120 bp, Artificial Sequence
  ENSG00000183090_1 (sequence is synthesized)
gacccggcgctttacctgcccgcccggggtgcgcttgacggcactcgccccgacggccccagcgtgctgattgccaaccctggactccgggtgcccctgggtcgttccctttggctcgac

SEQ ID NO: 651325 - DNA, 120 bp, Artificial Sequence
  ENSG00000183090_2 (sequence is synthesized)
ccgctccgggatctggtgattggagtgcagccgggggaccggtgcgaagtcacggtactggacgccctgccgcggctcaagggcgcgctctccccgcgccgcttcccctgcaccttcggg

SEQ ID NO: 651326 - DNA, 120 bp, Artificial Sequence
  ENSG00000183090_3 (sequence is synthesized)
ccccgccaagtccagtacactcacttcggctcccacagccccggacgcgcccgggtgctgctgcagctgcgctacgacgccccgactcacactctggtgctgcccttcacgctggcggtg

SEQ ID NO: 651327 - DNA, 120 bp, Artificial Sequence
  ENSG00000183090_4 (sequence is synthesized)
gacttggtcttctcccagctggagctggtgacgcgtaacaggcctttggtagtggagaagctgcgaagctggagccgcgccatagacaggagagtgctggacttcgcctccctgaagtct

SEQ ID NO: 651328 - DNA, 120 bp, Artificial Sequence
  ENSG00000183090_5 (sequence is synthesized)
ggagccacggccacccgcaggtgccggcttaccccacttcctcacgaggacggccccctgcccaagtacgggcgcttggtggacgcggtgggggcccctctccccaggggcaagggcgta

SEQ ID NO: 651329 - DNA, 120 bp, Artificial Sequence
  ENSG00000183090_6 (sequence is synthesized)
gactgtgaggctttcctccgtgctggggtgcgctatcagcacacagccacctcctcgcccaaccgtgactacgtgcccatgatggtggagctgctggggcctgagggccaagacgctggg

SEQ ID NO: 651330 - DNA, 120 bp, Artificial Sequence
  ENSG00000183090_7 (sequence is synthesized)
tccgcgggtgtgctggtccgcgagcacttccagctgctcgtgaggatccgcggcggagccgagaacacaccgcccaggcccagcttcatggccacgatgatgatggaggtggatccactg

SEQ ID NO: 651331 - DNA, 120 bp, Artificial Sequence
  ENSG00000183090_8 (sequence is synthesized)
gtgctgacagccctgacgcctgacgcactggccgcggaggacgtcgagtcagaccctggtgacctggtgttcaacattctgaacgcccccactcacccaccagggcacccggggcaacag

SEQ ID NO: 651332 - DNA, 120 bp, Artificial Sequence
  ENSG00000183090_9 (sequence is synthesized)
ggctacgtggtcagcaccgacgaccctctagggcttccagtctccttcttcacccagcaggagctgagggagctgaagattgcctatcagccccctgcagagaactcccatggggagcgc

SEQ ID NO: 651333 - DNA, 120 bp, Artificial Sequence
  ENSG00000183090_10 (sequence is synthesized)
ctctttcagctggagctggaggtggtggacggagacggcgccgcctcagacccctttgccttcatggtgacagtgaaatccatgaatactctggtcccagtggctagccataacagggga

SEQ ID NO: 651334 - DNA, 120 bp, Artificial Sequence
  ENSG00000183090_11 (sequence is synthesized)
cttgtgctttttgaaggtcagtcaaggcccttgtccagcacccacagcattcctatcagtgataaagataacctggaagaggtgaaaatggctgcagtcaggggcttgagacatgggcag

SEQ ID NO: 651335 - DNA, 120 bp, Artificial Sequence
  ENSG00000183090_12 (sequence is synthesized)
ctggtggtgtttggggcacctgctgggtgcaagtatttcacaccagcggacctggcagcagggcgagtggtgtatcagcatgatggcagcaacacctacagtgacaatatcatcttccgg

SEQ ID NO: 651336 - DNA, 120 bp, Artificial Sequence
  ENSG00000183090_13 (sequence is synthesized)
atggaggacgggcaccaccaagtggacttcctctttcccctcaccatcctacctgtggatgatgaaccaccaatggtcaatactaacacaggactctcactcactgaagggcaggtggtc

SEQ ID NO: 651337 - DNA, 120 bp, Artificial Sequence
  ENSG00000183090_14 (sequence is synthesized)
cagatctctccctttgtactgagtgctactgatattgactctgaggactcaaccatccactttgtgctggagaaccagcccctaaaaggaaatgaggaagagcctcagtgggagttggcc

SEQ ID NO: 651338 - DNA, 120 bp, Artificial Sequence
  ENSG00000183090_15 (sequence is synthesized)
cctggttcctcccactcaggccactacctgggggacctgttgctgcagcaggctgaactacctctctcaactgaagatgaagactggcactacatggaaaaggaagggctttatgagaaa

SEQ ID NO: 651339 - DNA, 120 bp, Artificial Sequence
  ENSG00000183090_16 (sequence is synthesized)
gtggtgactgagtggctacagagagacataatggaagggagactcttctaccgccatcttggaccacacagccctcaatctgtaatggtccagctggctttccatgtgcaggatgaccat

SEQ ID NO: 651340 - DNA, 120 bp, Artificial Sequence
  ENSG00000183090_17 (sequence is synthesized)
gacccacccaatctctccaaacagcacattttcaccatcaaggtccaaccagtggatatactgagtccacagctgtatccaggaactacactagaaatgactgtacaagaataccaactc

SEQ ID NO: 651341 - DNA, 120 bp, Artificial Sequence
  ENSG00000183090_18 (sequence is synthesized)
actcacttccagaagaatttcctccgatacattgaccaggactctgatgaccagaacctatggtacaccctactgacactcccgactgacacagatggcaaccaccaagtccgggctgga

SEQ ID NO: 651342 - DNA, 120 bp, Artificial Sequence
  ENSG00000183090_19 (sequence is synthesized)
gaaattgtgctcactgattcaccagacacactcatcatgcactttacccaagcccaggtaaatcagcataaagttgcctaccagcctccacagaaattgggtattgcaccacgggttgtg

SEQ ID NO: 651343 - DNA, 120 bp, Artificial Sequence
  ENSG00000183090_20 (sequence is synthesized)
cagtttacttaccaggtggaagatgctgcaggcaatagcgtgccaggcacattcacattattcctgcaacctgtggacaaccagcccccagaagtcaccaacagaggctttgctatctta

SEQ ID NO: 651344 - DNA, 120 bp, Artificial Sequence
  ENSG00000183090_21 (sequence is synthesized)
gagggaggcagctttaacctcagcagtaatgagctgcatgttacagacccagacacagacattgaccaaattgtcttcatattagtccggggtccccaacatggacacttgcagtacttt

SEQ ID NO: 651345 - DNA, 120 bp, Artificial Sequence
  ENSG00000183090_22 (sequence is synthesized)
aaaagatgtatggtcccaggggaatctttcatgcaagctgatgttattaacgggagtgtctcttaccagcatggcagagaccagacgactaccagtgacactttccatctggaagtaagt

SEQ ID NO: 651346 - DNA, 120 bp, Artificial Sequence
  ENSG00000183090_23 (sequence is synthesized)
gatggggtgcaccatatacccatcaccatcccaatttctgtgcatcccaatgtggctaacagaagtcctaggatctctctcagaagtagttcattattggatgtttctatagacgtacta

SEQ ID NO: 651347 - DNA, 120 bp, Artificial Sequence
  ENSG00000183090_24 (sequence is synthesized)
gagaataaagccactgaaattaccatgggtgtcatccatggcaaaaggaaggatgtaggtgacttgatgctgtctttcattgtaaaggacagccccaaactgggcactattctggtaaat

SEQ ID NO: 651348 - DNA, 120 bp, Artificial Sequence
  ENSG00000183090_25 (sequence is synthesized)
ggtttgcccacagaacgattcacccaagaggatctcatcaatgggagagtagcctatgcccacactgcaggtgaagttggttttcaaaagcagcacgatgccttcagcctcatcctctcc

SEQ ID NO: 651349 - DNA, 120 bp, Artificial Sequence
  ENSG00000183090_26 (sequence is synthesized)
aaagattcttaccaatgggtagtggggaatagcataatagagaaagtacaggtacaagtaactgtgctgcctgtggacaatgtgggacccaaggtcttcgtcggggagtccttcattgtc

SEQ ID NO: 651350 - DNA, 120 bp, Artificial Sequence
  ENSG00000183090_27 (sequence is synthesized)
tatgaaggtgagaagaactccttgaccttacaacatctccatgttgaagatgtggacactcatcaagatgaactcctctgcacagtgactagtcagccagcctctggctacctggaaaag

SEQ ID NO: 651351 - DNA, 120 bp, Artificial Sequence
  ENSG00000183090_28 (sequence is synthesized)
gctcctggttcaaaaatgtcccagtctggtagccctatcagtgctttctccctcagagatatccaagtgaggcatatcaattatgtacagagtattcacaagggagtagagccacaagag

SEQ ID NO: 651352 - DNA, 120 bp, Artificial Sequence
  ENSG00000183090_29 (sequence is synthesized)
gaccaattcaccttttattgctctgatggcatcaacttctccccaaatgtcttcttccctataatcatcctacccaccaatgatgagcagcctaaactttttgcccatgagtttaaggta

SEQ ID NO: 651353 - DNA, 120 bp, Artificial Sequence
  ENSG00000183090_30 (sequence is synthesized)
ctagaggggatgagcctggtcatagacacccagctgcttaatggagcagatgctgacctgccaccaaatgagctccactttcaactcacagccctccctcggcatggacgaatcatacag

SEQ ID NO: 651354 - DNA, 120 bp, Artificial Sequence
  ENSG00000183090_31 (sequence is synthesized)
cagctggctacaggcagccagcccatccacagcttcaccctcaaggagatccaggaggcctccaccattgtgtatgagcatgatgactcagagacaaaagaggacagttttgaggtctgg

SEQ ID NO: 651355 - DNA, 120 bp, Artificial Sequence
  ENSG00000183090_32 (sequence is synthesized)
ctgagtgacggcaagcacacaacccacaggaaggtacccattgtagtgaccctagtggatgatgaaactcctcacctgactgtcaacaatgggctgaaggtagagaaaggacactctgag

SEQ ID NO: 651356 - DNA, 120 bp, Artificial Sequence
  ENSG00000183090_33 (sequence is synthesized)
atcatcacaaatcggatcctcaaggccacagatcttgactcagatgataaaagcctcagttttgtcctccattctgggcctcaacaagggcttctacagaggctgagaaaacccagagga

SEQ ID NO: 651357 - DNA, 120 bp, Artificial Sequence
  ENSG00000183090_34 (sequence is synthesized)
gaagtgaggaacaatcttactctgggaatgaactttacccaggatgagattaacagaggcctcatctgctatatccacacaggccaagaagggattgttgacattatcaagtttgatgtt

SEQ ID NO: 651358 - DNA, 120 bp, Artificial Sequence
  ENSG00000183090_35 (sequence is synthesized)
actgatggggttaacactttgacagaccactacttctatgtcaccattggcaacttagacagcgtcttccctgaggtaatcagcaaaaggatcaccttgatagaaggtgccagagtgacc

SEQ ID NO: 651359 - DNA, 120 bp, Artificial Sequence
  ENSG00000183090_36 (sequence is synthesized)
cttaccaacaatctgcttaccaacagtgacatcaacagctctgatgaacatcactttagcattacacgggctccaagcctgggtcacttagaaagttctgactatgctggggaacccatt

SEQ ID NO: 651360 - DNA, 120 bp, Artificial Sequence
  ENSG00000183090_37 (sequence is synthesized)
gcctctttcactcaacttcaattggctagcaacaaaatatcctatgtccatacttcaaatgatgagaaaaagatggacagcttcgaatttcaagtgatcggcgaactctaccctgtgttc

SEQ ID NO: 651361 - DNA, 120 bp, Artificial Sequence
  ENSG00000183090_38 (sequence is synthesized)
agaaccttcaggatcttcatcactgatgtggataataagaaacctatcttgaccatccatagactaacactacagaaagaggatagccaactgatcactctccttgagttgacagtggaa

SEQ ID NO: 651362 - DNA, 120 bp, Artificial Sequence
  ENSG00000183090_39 (sequence is synthesized)
gacagtgataccccagatgaccttattctctttaccatcacccaggtccccatgcatggcaagattttgtacaatggtagccgtcccgtgaccactttcaccaagcaagacctgaacaag

SEQ ID NO: 651363 - DNA, 120 bp, Artificial Sequence
  ENSG00000183090_40 (sequence is synthesized)
aacctgattagctacaagcatgacggcagtgagaccactgaagatagtttctccttgactgtgacagacggcactcacactgatttctatgtcctaccagacactgccctggcgacacac

SEQ ID NO: 651364 - DNA, 120 bp, Artificial Sequence
  ENSG00000183090_41 (sequence is synthesized)
aaacctcaagtaatgagggtccagataagatcattagacaataggcttccccagattactaccaacaggggtgccccagccttgaagcgccttcacactggacacatgggcttcctgatt

SEQ ID NO: 651365 - DNA, 120 bp, Artificial Sequence
  ENSG00000183090_42 (sequence is synthesized)
accagcaagtctctgaaggcagaagatcaggacagtccccacaggcttctgaagtataaagtgaccagaggaccagagcatggcttcattatcaaaactggccttggaaaccagagcact

SEQ ID NO: 651366 - DNA, 120 bp, Artificial Sequence
  ENSG00000183090_43 (sequence is synthesized)
cgagtgtttacacaagctgacattgatgagatgaagatatcctatgtcttgaatgagggcagcaacgcatcaaaggacatcttctatttctctgttgaagacaatggaggaaataaacta

SEQ ID NO: 651367 - DNA, 120 bp, Artificial Sequence
  ENSG00000183090_44 (sequence is synthesized)
acaaatcagcctttccatctaaactgggcttggatttgtttggagaaagagtactacattgtggatgaagattccacattcttagaagtgacccttacacgcagaggataccttggagaa

SEQ ID NO: 651368 - DNA, 120 bp, Artificial Sequence
  ENSG00000183090_45 (sequence is synthesized)
acatcatttatcagcattggtaccaaagatgaaactgcaaaaaaagacaaagatttcaaatggaagaccaataaacagatccagttcaatcctggacagactacagccacatggagggtg

SEQ ID NO: 651369 - DNA, 120 bp, Artificial Sequence
  ENSG00000183090_46 (sequence is synthesized)
agaattatacctgacaatgaatatgagacttcagagaccttccagatcattctgtctgaacctctcatggctgtactggagtttccagaaatggcaacggttgaaattgtagaccctgga

SEQ ID NO: 651370 - DNA, 120 bp, Artificial Sequence
  ENSG00000183090_47 (sequence is synthesized)
gatgaatcaacagtttatattccagaggcggaatacaaaatagaagaggacattggggaacttttgattccagtaagacgatctggagatgcaagccaggaactaatcgtcatttgctcc

SEQ ID NO: 651371 - DNA, 120 bp, Artificial Sequence
  ENSG00000183090_48 (sequence is synthesized)
acacgtcaaggttctgccacaggcacgatttcttccacagtgttattctctgattacatctcacgtccagaagaccacaccagcatcctccactttgacaagaatgagacacagaagacc

SEQ ID NO: 651372 - DNA, 120 bp, Artificial Sequence
  ENSG00000183090_49 (sequence is synthesized)
tgccaggtcctgatcattgatgactccctttatgaagaggaggaatccttcagcgtttcacttaggctgccagtgggaggacagctgggagccagattccccaccactaaggtgactatt

SEQ ID NO: 651373 - DNA, 120 bp, Artificial Sequence
  ENSG00000183090_50 (sequence is synthesized)
ctggctgatcgttatgatgaacctgtcctgcactttggggatgctgaatatcacgtcaatgaaagtgctcgctacgtggaggtttgtgtttggagaagaggcactgatctttcccaacca

SEQ ID NO: 651374 - DNA, 120 bp, Artificial Sequence
  ENSG00000183090_51 (sequence is synthesized)
tcatccatcgccgtgcgctccagaaagtcagagcaggagtcagcagaagctggaacagattatgttggtatcagccgaaacctggactttgctccaggcgtgcgcatgcagacattccaa

SEQ ID NO: 651375 - DNA, 120 bp, Artificial Sequence
  ENSG00000183090_52 (sequence is synthesized)
gtgaccatccttgatgacctgggacagcctaccttggaaggcccagagaagtttgaattacttcttcagatgcctatgggtgcagtgcttggagaaccaaataaaactaccattttcatc

SEQ ID NO: 651376 - DNA, 120 bp, Artificial Sequence
  ENSG00000183090_53 (sequence is synthesized)
gaggacaccatcacggactgtaagcagagtgcttgtagttcctttgattgaaagactttaagagggaaaaaaacagccaagatatgtctcctaacaacagaatgaaactctactgtttat

SEQ ID NO: 651377 - DNA, 120 bp, Artificial Sequence
  ENSG00000183090_54 (sequence is synthesized)
agatcttagcaattctgggatatcagtgatattgtactgtcattggtgttatattctggtgatatgtggaaatgtaatttatatgactgcatggagatagaaatatatatacctagaaaa

SEQ ID NO: 651378 - DNA, 120 bp, Artificial Sequence
  ENSG00000183090_55 (sequence is synthesized)
cattgagcccacaaataattagactgtgttcatgttctttttctattttgttttactttgtttctgaggcaagtaagaaatccactgtgatcaattaaatcaaaagttaagatcaaagaa

SEQ ID NO: 651379 - DNA, 120 bp, Artificial Sequence
  ENSG00000183090_56 (sequence is synthesized)
tctattttgctggactccaggaaatgtttgcttccttaagcagagattgaatatccccctgtcaaatggatcacctgaagaaatacttttataaggacaactatcatggagtaagacaaa

SEQ ID NO: 651380 - DNA, 120 bp, Artificial Sequence
  ENSG00000183091_0 (sequence is synthesized)
aggcatcacgctggcttttgcctggggttctcaggaggggagagttgggagaggctttgctgctgaggaaatttatttggtagattgaaggtttgaacgagagctacagaaacgaaagaa

SEQ ID NO: 651381 - DNA, 120 bp, Artificial Sequence
  ENSG00000183091_1 (sequence is synthesized)
aaagtctgtataagccaatggtgttcgggaagaaaataaccccattgccttgagtttgtaggtgccactactactctggaaaaatggcagatgacgaagactatgaggaggtggtggagt

SEQ ID NO: 651382 - DNA, 120 bp, Artificial Sequence
  ENSG00000183091_2 (sequence is synthesized)
actacacagaagaagtggtttacgaagaggtgccgggagagacaataacaaaaatttatgagactacgacaacaaggacatctgactatgagcaatcagaaacttccaaaccagctctgg

SEQ ID NO: 651383 - DNA, 120 bp, Artificial Sequence
  ENSG00000183091_3 (sequence is synthesized)
cacagccagcactggcacagccagcatcagcaaagccggtggagaggaggaaggtcatccggaagaaagtggatccttcaaagttcatgaccccctacattgcacacagtcagaaaatgc

SEQ ID NO: 651384 - DNA, 120 bp, Artificial Sequence
  ENSG00000183091_4 (sequence is synthesized)
aggatctttttagcccaaataaatacaaggagaagtttgagaaaacaaaaggacagccatacgccagcacaacagatactccagaacttcgcagaatcaaaaaagtacaagatcaactca

SEQ ID NO: 651385 - DNA, 120 bp, Artificial Sequence
  ENSG00000183091_5 (sequence is synthesized)
gtgaggttaagtatcgaatggatggtgatgttgctaagactatatgtcacgtagatgaaaaagcaaaggatattgaacatgcaaagaaagtgtcgcagcaagtcagtaaggttttataca

SEQ ID NO: 651386 - DNA, 120 bp, Artificial Sequence
  ENSG00000183091_6 (sequence is synthesized)
agcagaactgggaagacaccaaggataagtacctgcttcctcctgatgcccctgaacttgtccaggccgttaagaacaccgccatgttcagcaagaaactgtacactgaagactgggaag

SEQ ID NO: 651387 - DNA, 120 bp, Artificial Sequence
  ENSG00000183091_7 (sequence is synthesized)
cagacaaaagtttgttttacccctataatgatagcccggaactgaggagagttgcccaggcccagaaagctctcagtgatgttgcctacaaaaaaggtctcgctgaacagcaagctcaat

SEQ ID NO: 651388 - DNA, 120 bp, Artificial Sequence
  ENSG00000183091_8 (sequence is synthesized)
tcacgcctctggctgatcctccagatatagaatttgccaagaaagtaaccaatcaagtgagcaagcaaaaatacaaagaagactatgaaaataaaatcaaaggcaaatggagtgagacac

SEQ ID NO: 651389 - DNA, 120 bp, Artificial Sequence
  ENSG00000183091_9 (sequence is synthesized)
cttgctttgaagttgcaaatgccagaatgaatgctgataacattagcacaaggaaataccaggaagattttgaaaacatgaaagaccagatctacttcatgcagaccgaaacaccagagt

SEQ ID NO: 651390 - DNA, 120 bp, Artificial Sequence
  ENSG00000183091_10 (sequence is synthesized)
ataaaatgaataaaaaagctggtgtggcagctagcaaggtaaaatacaaagaagactatgaaaagaataaaggaaaagcagattataatgtgcttcctgcttcagagaacccacagctta

SEQ ID NO: 651391 - DNA, 120 bp, Artificial Sequence
  ENSG00000183091_11 (sequence is synthesized)
ggcagctgaaggcagcaggagatgccctaagtgacaaactatacaaggaaaactatgaaaagacaaaagcaaagagcataaattactgcgagacccccaaattcaagctcgatactgttc

SEQ ID NO: 651392 - DNA, 120 bp, Artificial Sequence
  ENSG00000183091_12 (sequence is synthesized)
tgcagaacttcagtagtgataaaaaatataaagattcctacttaaaagatattttgggacattatgtaggcagcttcgaggatccataccattcacactgcatgaaagtcacagctcaaa

SEQ ID NO: 651393 - DNA, 120 bp, Artificial Sequence
  ENSG00000183091_13 (sequence is synthesized)
acagtgataaaaactacaaagcagaatacgaagaagacagaggcaaaggcttcttccctcagaccataactcaagaatatgaagcaattaagaaactagatcagtgtaaagaccacacct

SEQ ID NO: 651394 - DNA, 120 bp, Artificial Sequence
  ENSG00000183091_14 (sequence is synthesized)
acaaagtccatccagataagacaaaattcacccaagttacagactctcctgttctgctacaagcccaagtcaattccaaacaactgagtgacttaaattacaaagcaaaacatgaaagtg

SEQ ID NO: 651395 - DNA, 120 bp, Artificial Sequence
  ENSG00000183091_15 (sequence is synthesized)
aaaagttcaagtgccatatcccccctgatactcctgcttttatccagcacaaagtcaatgcctataacttgagtgataatctttataagcaagactgggagaagagcaaagccaaaaagt

SEQ ID NO: 651396 - DNA, 120 bp, Artificial Sequence
  ENSG00000183091_16 (sequence is synthesized)
ttgacattaaagtggatgccattcccctgctggcagccaaagccaacaccaagaacaccagcgatgtgatgtacaagaaagactatgaaaaaaacaaagggaaaatgattggagtcctca

SEQ ID NO: 651397 - DNA, 120 bp, Artificial Sequence
  ENSG00000183091_17 (sequence is synthesized)
gcattaatgacgatcccaagatgctgcactccttgaaggtggccaaaaaccagagtgatagattatacaaggaaaactatgagaagacaaaggcaaagagtatgaattactgtgagaccc

SEQ ID NO: 651398 - DNA, 120 bp, Artificial Sequence
  ENSG00000183091_18 (sequence is synthesized)
caaaatatcaacttgatactcagctgaagaacttcagtgaggctagatataaagacttatatgtaaaggatgttttgggacattatgtaggcagcatggaggacccatatcacacacact

SEQ ID NO: 651399 - DNA, 120 bp, Artificial Sequence
  ENSG00000183091_19 (sequence is synthesized)
gcatgaaagttgcagctcaaaacagtgataaaagttacaaagcagaatatgaagaagataaaggaaaatgctatttccctcagacaataacacaagaatatgaagcaatcaagaagctgg

SEQ ID NO: 651400 - DNA, 120 bp, Artificial Sequence
  ENSG00000183091_20 (sequence is synthesized)
accagtgtaaagatcatacctacaaagttcatccagataagaccaaattcacggcagtcactgattctcctgtactgttgcaagcccagctcaacacgaaacagcttagtgatctgaatt

SEQ ID NO: 651401 - DNA, 120 bp, Artificial Sequence
  ENSG00000183091_21 (sequence is synthesized)
acaaagcaaaacatgaaggtgagaagttcaagtgccatataccagcagatgctccacagtttatccaacacagagtcaatgcctataatctgagtgataatgtttataagcaagactggg

SEQ ID NO: 651402 - DNA, 120 bp, Artificial Sequence
  ENSG00000183091_22 (sequence is synthesized)
agaagagcaaagccaagaagtttgacattaaagtggacgccattcccctgttggcagccaaagccaacaccaagaacaccagcgatgtgatgtacaagaaagactatgaaaagagcaaag

SEQ ID NO: 651403 - DNA, 120 bp, Artificial Sequence
  ENSG00000183091_23 (sequence is synthesized)
ggaaaatgattggagccctcagcattaatgacgatccaaagatgctgcactccttgaagacagccaaaaaccagagtgatcgcgaatatcgaaaagattatgaaaagtcaaaaactatct

SEQ ID NO: 651404 - DNA, 120 bp, Artificial Sequence
  ENSG00000183091_24 (sequence is synthesized)
acacggcacctcttgatatgctccaagtcactcaagctaagaaatctcaggcaattgccagcgacgttgattataagcacatcttacacagttacagctacccccctgatagcatcaatg

SEQ ID NO: 651405 - DNA, 120 bp, Artificial Sequence
  ENSG00000183091_25 (sequence is synthesized)
tggaccttgccaagaaggcatatgcgctgcagagcgatgttgaatacaaagctgactacaatagctggatgaaaggttgtggctgggtgccttttgggtccttagaaatggaaaaggcaa

SEQ ID NO: 651406 - DNA, 120 bp, Artificial Sequence
  ENSG00000183091_26 (sequence is synthesized)
agcgagcttcagacatcctcaatgagaaaaaatatcgccaacatccagacaccctcaagtttacctcgattgaagatgctccaattacagtacagtctaaaattaaccaggcccagagga

SEQ ID NO: 651407 - DNA, 120 bp, Artificial Sequence
  ENSG00000183091_27 (sequence is synthesized)
gtgatatcgcttacaaagccaaaggagaggaaattattcacaaatacaacctgccaccagacctgccccagttcatccaggctaaagttaatgcctacaatatcagtgagaatatgtaca

SEQ ID NO: 651408 - DNA, 120 bp, Artificial Sequence
  ENSG00000183091_28 (sequence is synthesized)
aagcagacttgaaagacttgagcaagaagggatatgacctgagaactgatgcgattcccatcagagctgccaaagctgccaggcaggcggcgagtgacgttcagtacaaaaaagactatg

SEQ ID NO: 651409 - DNA, 120 bp, Artificial Sequence
  ENSG00000183091_29 (sequence is synthesized)
aaaaggctaaagggaaaatggttggcttccaaagtcttcaagatgaccctaaactggttcattatatgaacgtggccaagatacaatcagatcgggagtataaaaaagactatgagaaga

SEQ ID NO: 651410 - DNA, 120 bp, Artificial Sequence
  ENSG00000183091_30 (sequence is synthesized)
caaagtccaaatacaacacgccccatgatatgttcaatgtcgtggcggctaagaaagcccaggatgtggtcagcaatgtcaactataagcattctctccatcattacacctacttgcctg

SEQ ID NO: 651411 - DNA, 120 bp, Artificial Sequence
  ENSG00000183091_31 (sequence is synthesized)
acgccatggacctggagctgtctaagaacatgatgcagatacagagtgataacgtctacaaggaagactacaacaactggatgaaaggcattggctggattcctattggcagtctcgacg

SEQ ID NO: 651412 - DNA, 120 bp, Artificial Sequence
  ENSG00000183091_32 (sequence is synthesized)
tcgaaaaagttaaaaaggccggtgatgctctgaatgaaaagaagtacaggcaacatccagacaccctcaaatttaccagcattgtggactccccagttatggtccaggcaaaacagaaca

SEQ ID NO: 651413 - DNA, 120 bp, Artificial Sequence
  ENSG00000183091_33 (sequence is synthesized)
cgaagcaagtcagtgatatcttatacaaggctaaaggagaagatgtgaaacataaatacaccatgagtcctgatcttcctcagtttctccaggccaagtgcaatgcttacaatataagtg

SEQ ID NO: 651414 - DNA, 120 bp, Artificial Sequence
  ENSG00000183091_34 (sequence is synthesized)
acgtctgttataaacgggattggtatgacttaatagccaagggcaacaatgtgctgggcgatgctattcccatcactgcagccaaggcatcgagaaacattgccagtgattataaataca

SEQ ID NO: 651415 - DNA, 120 bp, Artificial Sequence
  ENSG00000183091_35 (sequence is synthesized)
aggaagcttatgagaagtcaaagggaaagcatgtgggtttcagaagcctccaggatgatcccaagctggtccactatatgaatgtggcaaagctgcagtctgatcgtgaatacaagaaga

SEQ ID NO: 651416 - DNA, 120 bp, Artificial Sequence
  ENSG00000183091_36 (sequence is synthesized)
actatgagaacaccaaaaccagctaccatacccctggggacatggttagcatcacagctgcaaagatggcccaggatgtcgctaccaatgtcaactacaaacagccattgcatcattaca

SEQ ID NO: 651417 - DNA, 120 bp, Artificial Sequence
  ENSG00000183091_37 (sequence is synthesized)
catacctacctgacgccatgagtcttgagcatacgaggaatgtcaatcaaattcagagtgataatgtgtataaagacgagtataacagcttcttgaagggcatcggatggatccctattg

SEQ ID NO: 651418 - DNA, 120 bp, Artificial Sequence
  ENSG00000183091_38 (sequence is synthesized)
gttccctggaggtggagaaggtcaagaaagcaggcgatgcattaaatgagaggaagtatcgacagcacccagataccgtcaagttcacaagtgtgcctgattccatgggcatggtgttgg

SEQ ID NO: 651419 - DNA, 120 bp, Artificial Sequence
  ENSG00000183091_39 (sequence is synthesized)
ctcagcataacacaaagcagctaagtgatttgaactacaaggtagagggagagaaactgaagcacaagtatactattgaccctgaattgcctcagtttattcaagccaaagtcaacgccc

SEQ ID NO: 651420 - DNA, 120 bp, Artificial Sequence
  ENSG00000183091_40 (sequence is synthesized)
tcaacatgagtgatgctcattataaagcagattggaagaaaaccattgccaagggctatgatttgagaccagatgccatcccaattgttgctgcaaaaagttcaaggaatattgctagtg

SEQ ID NO: 651421 - DNA, 120 bp, Artificial Sequence
  ENSG00000183091_41 (sequence is synthesized)
attgcaaatataaggaggcctacgagaaagccaaaggcaagcaagttggatttctcagtcttcaggatgatcctaaactggttcactacatgaatgtggccaaaatccagtctgatcgtg

SEQ ID NO: 651422 - DNA, 120 bp, Artificial Sequence
  ENSG00000183091_42 (sequence is synthesized)
agtacaaaaagggctatgaagccagcaagaccaagtaccacacacctctggatatggtcagtgtgacagctgcaaagaaatctcaggaggttgccaccaacgccaactacagacagtcat

SEQ ID NO: 651423 - DNA, 120 bp, Artificial Sequence
  ENSG00000183091_43 (sequence is synthesized)
accaccactacactctcctgcccgatgccttgaatgtggagcactccaggaatgccatgcagattcagagtgataatctgtacaaatctgacttcaccaattggatgaaagggatcggct

SEQ ID NO: 651424 - DNA, 120 bp, Artificial Sequence
  ENSG00000183091_44 (sequence is synthesized)
gggtgcccatagagtccctggaggtggagaaggcaaagaaagcaggagagattcttagtgagaagaagtatcgccagcaccccgagaagctgaagttcacttacgccatggacacaatgg

SEQ ID NO: 651425 - DNA, 120 bp, Artificial Sequence
  ENSG00000183091_45 (sequence is synthesized)
aacaggcacttaacaagagtaacaaactgaacatggacaagaggctctacactgaaaaatggaacaaggacaagaccaccattcatgtcatgcctgacacaccggatattttactctcca

SEQ ID NO: 651426 - DNA, 120 bp, Artificial Sequence
  ENSG00000183091_46 (sequence is synthesized)
gagtaaaccaaatcaccatgagtgataaactgtacaaagctggctgggaagaggaaaagaagaaaggatatgacctgaggcctgatgccattgcaataaaggctgcaagagcctctagag

SEQ ID NO: 651427 - DNA, 120 bp, Artificial Sequence
  ENSG00000183091_47 (sequence is synthesized)
acattgccagtgattacaaatacaagaaagcctatgaacaagccaaagggaaacacattggcttccggagcctggaagatgaccccaagctggtgcacttcatgcaagtggccaagatgc

SEQ ID NO: 651428 - DNA, 120 bp, Artificial Sequence
  ENSG00000183091_48 (sequence is synthesized)
agtcagaccgggaatacaagaagggatatgagaaatccaagacctccttccacaccccggtggacatgctcagtgtggtggcagccaagaagtctcaggaagtggccaccaatgccaact

SEQ ID NO: 651429 - DNA, 120 bp, Artificial Sequence
  ENSG00000183091_49 (sequence is synthesized)
acaggaacgtgatccatacctacaacatgcttcctgatgccatgagctttgaattggccaaaaatatgatgcagattcaaagtgataatcagtacaaggctgactatgctgacttcatga

SEQ ID NO: 651430 - DNA, 120 bp, Artificial Sequence
  ENSG00000183091_50 (sequence is synthesized)
agggcattggatggctccctctgggctccctggaagcagagaaaaacaagaaagccatggagattattagtgaaaagaagtaccgccagcacccagacactttgaagtattccacactca

SEQ ID NO: 651431 - DNA, 120 bp, Artificial Sequence
  ENSG00000183091_51 (sequence is synthesized)
tggactcgatgaacatggttttggcccagaataatgcaaaaattatgaacgaacatctctacaaacaagcatgggaggctgacaaaaccaaagtccacatcatgcctgatatcccccaga

SEQ ID NO: 651432 - DNA, 120 bp, Artificial Sequence
  ENSG00000183091_52 (sequence is synthesized)
ttattttggcaaaggcaaatgcaattaatatgagtgataaactctacaaactttccttggaagagtctaaaaagaaaggctatgatctcagacctgatgcaattcctatcaaagctgcca

SEQ ID NO: 651433 - DNA, 120 bp, Artificial Sequence
  ENSG00000183091_53 (sequence is synthesized)
aggcttccagagatattgcaagtgattataaatacaagtacaattatgaaaaagggaaggggaaaatggttggtttccgcagtctcgaggatgatcccaaattagtccattccatgcaag

SEQ ID NO: 651434 - DNA, 120 bp, Artificial Sequence
  ENSG00000183091_54 (sequence is synthesized)
tggctaagatgcaatctgatcgggagtacaagaaaaactatgagaacacaaagaccagctaccacacccctgccgacatgctcagtgtcacggctgcaaaggatgcccaagccaacatca

SEQ ID NO: 651435 - DNA, 120 bp, Artificial Sequence
  ENSG00000183091_55 (sequence is synthesized)
ccaacactaactacaagcacctgattcacaagtacatcctccttccagatgcaatgaacattgagctgaccaggaatatgaatcgcatacagagtgataatgaatataagcaagattaca

SEQ ID NO: 651436 - DNA, 120 bp, Artificial Sequence
  ENSG00000183091_56 (sequence is synthesized)
atgaatggtacaaagggcttggctggagtccagcaggttctctggaagtggagaaggccaagaaagcaactgaatatgccagtgatcagaaataccgccagcacccgagcaacttccagt

SEQ ID NO: 651437 - DNA, 120 bp, Artificial Sequence
  ENSG00000183091_57 (sequence is synthesized)
ttaagaagctgactgattccatggacatggtgcttgccaagcagaatgcacataccatgaacaagcatttatacaccattgattggaataaagataagaccaagattcatgtgatgcctg

SEQ ID NO: 651438 - DNA, 120 bp, Artificial Sequence
  ENSG00000183091_58 (sequence is synthesized)
atacaccagatattttacaagccaagcagaatcaaacactgtatagtcagaaactctataaacttggatgggaagaagctttgaagaaaggctatgatctcccagttgatgcaatttctg

SEQ ID NO: 651439 - DNA, 120 bp, Artificial Sequence
  ENSG00000183091_59 (sequence is synthesized)
tacagctagctaaagcttcaagagacattgctagtgattataaatacaaacaaggctaccgaaagcaacttggccaccatgttggattccggagtctgcaagatgacccaaaacttgtgt

SEQ ID NO: 651440 - DNA, 120 bp, Artificial Sequence
  ENSG00000183091_60 (sequence is synthesized)
tgtccatgaatgtagccaaaatgcagagtgaaagagaatacaagaaggactttgagaagtggaaaactaagttctccagcccagtggacatgttgggagtggtactggccaagaagtgtc

SEQ ID NO: 651441 - DNA, 120 bp, Artificial Sequence
  ENSG00000183091_61 (sequence is synthesized)
aggagttggttagtgacgtggactacaagaactacctgcatcagtggacatgtctgcctgatcagaacgatgttgtgcaagctaagaaagtttatgaactgcaaagtgagaatctatata

SEQ ID NO: 651442 - DNA, 120 bp, Artificial Sequence
  ENSG00000183091_62 (sequence is synthesized)
aatctgaccttgagtggctgagaggcataggatggagtcccttgggttctttagaggcagaaaagaacaagcgggcttcggaaatcatcagtgagaagaaatatcgtcagcctccagaca

SEQ ID NO: 651443 - DNA, 120 bp, Artificial Sequence
  ENSG00000183091_63 (sequence is synthesized)
gaaacaagttcaccagcattcctgatgccatggatatagttctggcaaagacaaatgccaaaaataggagtgatagactttatagagaagcttgggacaaagacaagactcagatccaca

SEQ ID NO: 651444 - DNA, 120 bp, Artificial Sequence
  ENSG00000183091_64 (sequence is synthesized)
tcatgcctgatacacctgacattgttctggctaaagcaaacttaatcaacacaagtgataaactctaccgaatgggttatgaggagctgaagagaaaaggttacgatcttcctgttgatg

SEQ ID NO: 651445 - DNA, 120 bp, Artificial Sequence
  ENSG00000183091_65 (sequence is synthesized)
ccataccaatcaaagcagcaaaagcctcccgggaaattgccagtgaatacaagtacaaggaaggctttcgcaagcagctcggccaccacattggtgcccggaacattgaagatgacccca

SEQ ID NO: 651446 - DNA, 120 bp, Artificial Sequence
  ENSG00000183091_66 (sequence is synthesized)
agatgatgtggtccatgcatgtggccaagatccagagtgacagggagtacaagaaggactttgagaagtggaagaccaagttcagcagcccagtggacatgctgggggtggtgttggcca

SEQ ID NO: 651447 - DNA, 120 bp, Artificial Sequence
  ENSG00000183091_67 (sequence is synthesized)
agaagtgccagaccttagtcagcgacgtggactacaagaactacctgcaccagtggacatgcctgcccgaccagagcgatgtcatccatgctcggcaggcctatgacctccagagcgata

SEQ ID NO: 651448 - DNA, 120 bp, Artificial Sequence
  ENSG00000183091_68 (sequence is synthesized)
atttgtacaagtcagaccttcagtggctaaaaggcattggctggatgactagtggttctctcgaggatgagaaaaataaacgagccacccagattttgagtgaccatgtttaccgtcagc

SEQ ID NO: 651449 - DNA, 120 bp, Artificial Sequence
  ENSG00000183091_69 (sequence is synthesized)
acccagatcaatttaagttttccagccttatggattccataccaatggttttggcaaaaaacaatgctattaccatgaatcatcgcctctatacagaagcttgggataaagataaaacca

SEQ ID NO: 651450 - DNA, 120 bp, Artificial Sequence
  ENSG00000183091_70 (sequence is synthesized)
ctgtccacattatgccagatacccctgaagttttattagctaaacaaaacaaagtaaattacagtgagaaattgtataagcttggcctagaagaagccaagaggaaaggttatgacatgc

SEQ ID NO: 651451 - DNA, 120 bp, Artificial Sequence
  ENSG00000183091_71 (sequence is synthesized)
gggtagatgccattcctatcaaggcagccaaggcctccagagatattgcaagtgaattcaagtacaaagaaggctatcgtaagcagctcggccaccacattggtgcccgagctatacgtg

SEQ ID NO: 651452 - DNA, 120 bp, Artificial Sequence
  ENSG00000183091_72 (sequence is synthesized)
atgaccccaagatgatgtggtccatgcacgtggccaagatccagagtgacagggagtacaagaaggactttgagaagtggaagaccaagttcagcagcccagtggacatgctgggggtgg

SEQ ID NO: 651453 - DNA, 120 bp, Artificial Sequence
  ENSG00000183091_73 (sequence is synthesized)
tgctggccaagaagtgccagaccttagtcagcgatgtggactacaagaactacctgcaccagtggacatgcctgcccgaccagagcgacgtcatccatgctcggcaggcctatgacctcc

SEQ ID NO: 651454 - DNA, 120 bp, Artificial Sequence
  ENSG00000183091_74 (sequence is synthesized)
agagcgataatatgtacaagtctgatctccagtggatgagaggcattggctgggtgtccattggctctttggatgtggaaaaatgcaaaagggcaactgaaattttgagtgataaaatct

SEQ ID NO: 651455 - DNA, 120 bp, Artificial Sequence
  ENSG00000183091_75 (sequence is synthesized)
atcgccagcctccagacagattcaaatttaccagtgtgactgactctctggaacaagtgttggccaaaaataatgccatcactatgaacaagcgtttatacacagaagcctgggacaaag

SEQ ID NO: 651456 - DNA, 120 bp, Artificial Sequence
  ENSG00000183091_76 (sequence is synthesized)
acaagactcagatccacataatgccagacacaccagaaattatgttggcaagaatgaacaaaatcaactacagtgagagtctgtacaaacttgctaatgaagaagcaaagaagaaaggct

SEQ ID NO: 651457 - DNA, 120 bp, Artificial Sequence
  ENSG00000183091_77 (sequence is synthesized)
atgacttgcgaagcgacgccatccccatcgtggcggccaaggcctccagggacatcatcagtgactacaaatataaagatggttactgcaagcaacttggccaccatattggagcccgga

SEQ ID NO: 651458 - DNA, 120 bp, Artificial Sequence
  ENSG00000183091_78 (sequence is synthesized)
acattgaagatgaccccaagatgatgtggtccatgcacgtagccaagatccagagtgacagggagtacaaaaaggactttgagaagtggaagaccaagttcagcagcccagtggacatgc

SEQ ID NO: 651459 - DNA, 120 bp, Artificial Sequence
  ENSG00000183091_79 (sequence is synthesized)
tgggggtggtgctggccaagaagtgccagaccttagtcagtgacgtggactataagaactacctgcacgagtggacatgcctgcctgaccagagcgatgtcatccatgctcggcaggcct

SEQ ID NO: 651460 - DNA, 120 bp, Artificial Sequence
  ENSG00000183091_80 (sequence is synthesized)
atgacctccagagtgacaatatttacaagtcagatctccagtggctgagaggcattggctgggtccccattgggtctatggatgtggtcaagtgcaagagagctaccgaaatactgagtg

SEQ ID NO: 651461 - DNA, 120 bp, Artificial Sequence
  ENSG00000183091_81 (sequence is synthesized)
ataacatctaccgccagcctccggacaagctgaaatttaccagtgtgactgattctctagagcaggtgctggccaagaacaatgctctcaacatgaataagcgtttatacacagaggcct

SEQ ID NO: 651462 - DNA, 120 bp, Artificial Sequence
  ENSG00000183091_82 (sequence is synthesized)
gggacaaagacaagactcaaattcacataatgcctgatacaccagagattatgttggcaaggcagaacaaaatcaactacagtgagactctatacaaacttgccaatgaagaagcaaaaa

SEQ ID NO: 651463 - DNA, 120 bp, Artificial Sequence
  ENSG00000183091_83 (sequence is synthesized)
agaaaggctacgacttgcgaagtgacgccatccccatcgtggctgccaaggcctccagggacgttatcagtgattacaaatacaaagatggttaccgcaagcagctcggccaccacattg

SEQ ID NO: 651464 - DNA, 120 bp, Artificial Sequence
  ENSG00000183091_84 (sequence is synthesized)
gagcccggaacattgaagatgaccccaagatgatgtggtccatgcatgtggccaagatccagagtgacagggagtataagaaggactttgagaagtggaagaccaagttcagcagcccag

SEQ ID NO: 651465 - DNA, 120 bp, Artificial Sequence
  ENSG00000183091_85 (sequence is synthesized)
tggacatgctgggagtggtgttagccaagaagtgccagaccttagtcagcgatgtggactacaagaactacctgcacgagtggacgtgcctgcccgaccagaatgatgtcatccatgctc

SEQ ID NO: 651466 - DNA, 120 bp, Artificial Sequence
  ENSG00000183091_86 (sequence is synthesized)
ggcaggcctatgacctccagagcgataacatttacaaatctgatctccagtggctgagaggcattggctgggtccccattgggtctatggatgtggtcaagtgcaagagagctgctgaaa

SEQ ID NO: 651467 - DNA, 120 bp, Artificial Sequence
  ENSG00000183091_87 (sequence is synthesized)
tactgagtgataacatctaccgccagcctccggacaagctgaaatttaccagtgtgactgactctctagagcaggtgctggccaagaacaatgctctcaatatgaacaagcgcttataca

SEQ ID NO: 651468 - DNA, 120 bp, Artificial Sequence
  ENSG00000183091_88 (sequence is synthesized)
cagaagcctgggacaaagacaagacccaagtccatattatgcctgatacacctgaaatcatgttggcaagacaaaataaaataaattatagtgagagcctctatcgtcaggccatggaag

SEQ ID NO: 651469 - DNA, 120 bp, Artificial Sequence
  ENSG00000183091_89 (sequence is synthesized)
aagccaagaaagaaggctatgacttgagaagtgatgccattcccattgtggctgccaaggcctctcgggatattgccagtgattacaaatacaaagaagcatatcgtaaacagttgggtc

SEQ ID NO: 651470 - DNA, 120 bp, Artificial Sequence
  ENSG00000183091_90 (sequence is synthesized)
accacattggcgcccgagcagtacacgatgaccccaagataatgtggtccctccacattgccaaagtgcagagtgaccgtgagtacaagaaagattttgagaaatacaagacaaggtaca

SEQ ID NO: 651471 - DNA, 120 bp, Artificial Sequence
  ENSG00000183091_91 (sequence is synthesized)
gcagcccagtggacatgcttggtatcgttttggccaagaagtgtcagaccttggtcagcgatgtggactataaacatcctctgcatgaatggatctgcctgcccgaccagaatgacatca

SEQ ID NO: 651472 - DNA, 120 bp, Artificial Sequence
  ENSG00000183091_92 (sequence is synthesized)
ttcatgcacggaaagcctatgacctccagagtgacaatttgtataagtcagaccttgaatggatgaaaggcattggctgggttccgattgattccttggaagttgttagggccaagagag

SEQ ID NO: 651473 - DNA, 120 bp, Artificial Sequence
  ENSG00000183091_93 (sequence is synthesized)
ctggagaattacttagtgatactatctaccgtcagcgtccagaaacgctgaaatttaccagtataacggacactccggagcaggtgctggcaaaaaacaatgctttaaacatgaataagc

SEQ ID NO: 651474 - DNA, 120 bp, Artificial Sequence
  ENSG00000183091_94 (sequence is synthesized)
gcttatatactgaagcctgggacaatgacaagaaaactattcatgtcatgcctgatacaccagaaatcatgttagccaaactcaaccgaataaactacagtgataaactctataaacttg

SEQ ID NO: 651475 - DNA, 120 bp, Artificial Sequence
  ENSG00000183091_95 (sequence is synthesized)
ctttggaagagtccaagaaggaaggctatgacttgcgtctggatgccattccaatccaagcagccaaggcttcaagagatattgctagtgattacaagtacaaggaaggctaccgcaaac

SEQ ID NO: 651476 - DNA, 120 bp, Artificial Sequence
  ENSG00000183091_96 (sequence is synthesized)
agcttggccaccatattggggcccggaacattaaggatgacccgaagatgatgtggtccatccatgtggccaagatccagagtgacagggagtacaagaaggagtttgagaagtggaaga

SEQ ID NO: 651477 - DNA, 120 bp, Artificial Sequence
  ENSG00000183091_97 (sequence is synthesized)
ccaagttcagcagcccagtggacatgctgggggtggtgctggccaagaagtgtcagatccttgtaagcgacatagactacaagcatcccctgcatgaatggacctgcctgcctgatcaga

SEQ ID NO: 651478 - DNA, 120 bp, Artificial Sequence
  ENSG00000183091_98 (sequence is synthesized)
atgacgtcattcaggctcggaaggcctatgacctgcagagtgatgctatttacaaatctgatcttgagtggctgagaggcataggatgggttcccattggctctgtagaggtcgagaaag

SEQ ID NO: 651479 - DNA, 120 bp, Artificial Sequence
  ENSG00000183091_99 (sequence is synthesized)
tgaagagagctggagaaatcctgagtgacaggaagtatcgccagcctgcagaccagctcaaattcacatgcattaccgacactccggaaattgtcctagcaaagaataatgccctgacaa

SEQ ID NO: 651480 - DNA, 120 bp, Artificial Sequence
  ENSG00000183091_100 (sequence is synthesized)
tgagcaagcatttatacacagaagcttgggatgctgacaaaacctccatccacgtgatgccagacaccccagatatcctgctggccaagagtaattctgccaatatcagccaaaaacttt

SEQ ID NO: 651481 - DNA, 120 bp, Artificial Sequence
  ENSG00000183091_101 (sequence is synthesized)
acaccaagggatgggatgaatcaaagatgaaggactatgatctgagagcagatgctatttccatcaaaagtgccaaggcctccagggacatcgccagtgactacaaatacaaggaagcct

SEQ ID NO: 651482 - DNA, 120 bp, Artificial Sequence
  ENSG00000183091_102 (sequence is synthesized)
atgagaaacagaaaggccaccacattggagcccagagcattgaagatgatcccaagattatgtgtgccatacatgcaggaaaaattcaaagtgaaagggagtacaagaaggaattccaaa

SEQ ID NO: 651483 - DNA, 120 bp, Artificial Sequence
  ENSG00000183091_103 (sequence is synthesized)
agtggaaaaccaagttctctagcccagtggacatgttaagcatcttgctggccaagaaatgtcagactttggtcactgacattgattatcgcaattacctgcatgaatggacatgcatgc

SEQ ID NO: 651484 - DNA, 120 bp, Artificial Sequence
  ENSG00000183091_104 (sequence is synthesized)
cggatcaaaacgacattatccaagcaaaaaaggcctatgacctgcagagtgatagtgtgtataaggcagacctggagtggctgcgtggcatcggctggatgccagaaggctcagtggaaa

SEQ ID NO: 651485 - DNA, 120 bp, Artificial Sequence
  ENSG00000183091_105 (sequence is synthesized)
tgaacagagtgaaggttgctcaagacctcgtgaatgaaagactctataggacacgtccagaagctttgtcattcaccagcattgtcgacactccagaagttgtcttggcaaaagccaatt

SEQ ID NO: 651486 - DNA, 120 bp, Artificial Sequence
  ENSG00000183091_106 (sequence is synthesized)
ctctgcaaataagtgagaaactgtatcaggaagcctggaataaagataaaagcaacatcaccattccttctgatactccggagatgctgcaggcccacatcaatgccttgcaaatcagca

SEQ ID NO: 651487 - DNA, 120 bp, Artificial Sequence
  ENSG00000183091_107 (sequence is synthesized)
ataaactctaccaaaaagactggaatgacgccaagcagaaaggctatgacataagggcagatgccattgaaatcaagcacgccaaggcctccagagaaattgccagtgagtacaaataca

SEQ ID NO: 651488 - DNA, 120 bp, Artificial Sequence
  ENSG00000183091_108 (sequence is synthesized)
aagaaggttaccgtaagcaactgggccaccacatgggtttccgcaccctacaagatgaccccaagtcagtatgggctatacatgctgccaagatccagagtgacagagaatataagaaag

SEQ ID NO: 651489 - DNA, 120 bp, Artificial Sequence
  ENSG00000183091_109 (sequence is synthesized)
tgatgtcaattgttcaagccaagaaatgccaggtcctggttagcgacattgattatcgcaattatctgcaccagtggacgtgtctgccagatcagaacgatgtgatccaggccaagaaag

SEQ ID NO: 651490 - DNA, 120 bp, Artificial Sequence
  ENSG00000183091_110 (sequence is synthesized)
cctacgacctgcagagcgataacttgtacaagtcagacctggaatggctgaagggtattggatggctgccagagggttctgtggaagtgatgagagtgaagaatgcccagaatctcttga

SEQ ID NO: 651491 - DNA, 120 bp, Artificial Sequence
  ENSG00000183091_111 (sequence is synthesized)
atgaaaggctgtatcgtataaagcctgaggccctcaaattcaccagcattgttgacaccccggaagtaatccaggcaaagatcaatgctgtacagatcagtgagccattgtatcgcgatg

SEQ ID NO: 651492 - DNA, 120 bp, Artificial Sequence
  ENSG00000183091_112 (sequence is synthesized)
cctgggagaaagagaaggctaatgtgaacgtgccagctgacactcccctgatgctgcaatccaaaatcaatgccctgcagatcagcaataaacgctatcagcaagcttgggaagatgtca

SEQ ID NO: 651493 - DNA, 120 bp, Artificial Sequence
  ENSG00000183091_113 (sequence is synthesized)
agatgactggttatgacctgcgagcagatgccattgggatccagcatgccaaggcttccagggatattgccagtgactatctgtacaaaactgcttatgagaaacagaaaggccattaca

SEQ ID NO: 651494 - DNA, 120 bp, Artificial Sequence
  ENSG00000183091_114 (sequence is synthesized)
ttggctgtcgcagcgccaaggaagaccctaaactggtttgggcagcaaatgtgttgaagatgcagaatgacaggctgtacaaaaaggcctacaacgaccacaaagccaagatctccatcc

SEQ ID NO: 651495 - DNA, 120 bp, Artificial Sequence
  ENSG00000183091_115 (sequence is synthesized)
ctgtggacatggtgtccatcagcgctgccaaagaaggtcaggcactggcaagtgatgtggactatcgccattacctgcaccactggtcttgctttcccgaccagaatgatgtgatccaag

SEQ ID NO: 651496 - DNA, 120 bp, Artificial Sequence
  ENSG00000183091_116 (sequence is synthesized)
ccaggaaagcctacgacctacagagcgacagtgtgtataaggcagacctggagtggctgcgtggcatcggctggatgccagaaggctcagtggaaatgaacagagtgaaggttgctcaag

SEQ ID NO: 651497 - DNA, 120 bp, Artificial Sequence
  ENSG00000183091_117 (sequence is synthesized)
acctcgtgaatgaaagactctataggacacgtccagaagctttgtcattcaccagcattgtcgacactccagaagttgtcttggcaaaagccaattctctgcaaataagtgagaaactgt

SEQ ID NO: 651498 - DNA, 120 bp, Artificial Sequence
  ENSG00000183091_118 (sequence is synthesized)
atcaggaagcctggaataaagataaaagcaacatcaccattccttctgatactccggagatgctgcaggcccacatcaatgccttgcaaatcagcaataaactctaccaaaaagactgga

SEQ ID NO: 651499 - DNA, 120 bp, Artificial Sequence
  ENSG00000183091_119 (sequence is synthesized)
atgacaccaagcagaaaggctatgacataagggcagatgccattgaaatcaagcacgccaaggcctccagagaaattgccagtgagtacaaatacaaagaaggttaccgtaagcaactgg

SEQ ID NO: 651500 - DNA, 120 bp, Artificial Sequence
  ENSG00000183091_120 (sequence is synthesized)
gccaccacatgggtttccgcaccctacaagatgaccccaagtcagtatgggctatacatgctgccaagatccagagtgacagagaatataagaaagcttatgagaagtctaaaggaattc

SEQ ID NO: 651501 - DNA, 120 bp, Artificial Sequence
  ENSG00000183091_121 (sequence is synthesized)
acaacacaccgttggacatgatgtcaattgttcaagccaagaaatgccaggtcctggttagcgacattgattatcgcaattatctgcaccagtggacgtgtctgccagatcagaacgatg

SEQ ID NO: 651502 - DNA, 120 bp, Artificial Sequence
  ENSG00000183091_122 (sequence is synthesized)
tgatccaggccaagaaagcctacgacctgcagagcgataacttgtacaagtcagacctggaatggctgaagggtattggatggttgccagagggttctgtggaagtgatgagagtgaaga

SEQ ID NO: 651503 - DNA, 120 bp, Artificial Sequence
  ENSG00000183091_123 (sequence is synthesized)
atgcccagaatctcttgaatgaaaggctgtatcgtataaagcctgaggccctcaaattcaccagcattgttgacaccccggaagtaatccaggcaaagatcaatgctgtacagatcagtg

SEQ ID NO: 651504 - DNA, 120 bp, Artificial Sequence
  ENSG00000183091_124 (sequence is synthesized)
agccattgtatcgcaatgcctgggagaaagagaaggctaatgtgaacgtgccagctgacactcccctgatgctgcaatccaaaatcaatgctctgcagatcagcaataaacgctatcagc

SEQ ID NO: 651505 - DNA, 120 bp, Artificial Sequence
  ENSG00000183091_125 (sequence is synthesized)
aagcttgggaagatgtcaagatgactggttatgacctgcgagcagatgccattgggatccagcatgccaaggcttccagggatattgccagtgattatctgtacaaaactgcttatgaga

SEQ ID NO: 651506 - DNA, 120 bp, Artificial Sequence
  ENSG00000183091_126 (sequence is synthesized)
aacagaaaggccattacattggctgtcgcagcgccaaggaagaccctaaactggtttgggcagcaaatgtgttgaagatgcagaatgacaggctgtacaaaaaggcctacaacgaccaca

SEQ ID NO: 651507 - DNA, 120 bp, Artificial Sequence
  ENSG00000183091_127 (sequence is synthesized)
aagccaagatctccatccctgtggacatggtgtccatcagcgctgccaaagaaggtcaggcactggcaagtgatgtggactatcgccattacctgcaccactggtcttgctttcccgacc

SEQ ID NO: 651508 - DNA, 120 bp, Artificial Sequence
  ENSG00000183091_128 (sequence is synthesized)
agaatgatgtgatccaagccaggaaagcctacgacctacagagcgacagtgtgtataaggcagacctggagtggctgcgtggcatcggctggatgccagaaggctcagtggaaatgaaca

SEQ ID NO: 651509 - DNA, 120 bp, Artificial Sequence
  ENSG00000183091_129 (sequence is synthesized)
gagtgaaggttgctcaagacctcgtgaatgaaagactctataggacacgtccagaagctttgtcattcaccagcattgtcgacactccagaagttgtcttggcaaaagccaattctctgc

SEQ ID NO: 651510 - DNA, 120 bp, Artificial Sequence
  ENSG00000183091_130 (sequence is synthesized)
aaataagtgagaaactgtatcaggaagcctggaataaagataaaagcaacatcaccattccttctgatactccggagatgctgcaggcccacatcaatgccttgcaaatcagcaataaac

SEQ ID NO: 651511 - DNA, 120 bp, Artificial Sequence
  ENSG00000183091_131 (sequence is synthesized)
tctaccaaaaagactggaatgacaccaagcagaaaggctatgacataagggcagatgccattgaaatcaagcacgccaaggcctccagagaaattgccagtgagtacaaatacaaagaag

SEQ ID NO: 651512 - DNA, 120 bp, Artificial Sequence
  ENSG00000183091_132 (sequence is synthesized)
gttaccgtaagcaactgggccaccacatgggtttccgcaccctacaagatgaccccaagtcagtatgggctatacatgctgccaagatccagagtgacagagaatataagaaagcttatg

SEQ ID NO: 651513 - DNA, 120 bp, Artificial Sequence
  ENSG00000183091_133 (sequence is synthesized)
agaagtctaaaggaattcacaacacaccgttggacatgatgtcaattgttcaagccaagaaatgccaggtcctggttagcgacattgattatcgcaattatctgcaccagtggacgtgtc

SEQ ID NO: 651514 - DNA, 120 bp, Artificial Sequence
  ENSG00000183091_134 (sequence is synthesized)
tgccagatcagaacgatgtgatccaggccaagaaagcctacgacctgcagagcgataacttgtacaagtcagacctggaatggctgaagggtattggatggttgccagagggttctgtgg

SEQ ID NO: 651515 - DNA, 120 bp, Artificial Sequence
  ENSG00000183091_135 (sequence is synthesized)
aagtgatgagagtgaagaatgcccagaatctcttgaatgaaaggctgtatcgtataaagcctgaggccctcaaattcaccagcattgttgacaccccggaagtaatccaggcaaagatca

SEQ ID NO: 651516 - DNA, 120 bp, Artificial Sequence
  ENSG00000183091_136 (sequence is synthesized)
atgctgtacagatcagtgagccattgtatcgcgatgcctgggagaaagagaaggctaatgtgaacgtgccagctgacactcccctgatgctgcaatccaaaatcaatgccctgcagatca

SEQ ID NO: 651517 - DNA, 120 bp, Artificial Sequence
  ENSG00000183091_137 (sequence is synthesized)
gcaataaacgctatcagcaagcttgggaagatgtcaagatgactggttatgacctgcgagcagatgccattgggatccagcatgccaaggcttccagggatattgccagtgactatctgt

SEQ ID NO: 651518 - DNA, 120 bp, Artificial Sequence
  ENSG00000183091_138 (sequence is synthesized)
acaaaactgcttatgagaaacagaaaggccattacattggctgtcgcagcgccaaggaagaccctaaactggtttgggcagcaaatgtgttgaagatgcagaatgacaggctgtacaaaa

SEQ ID NO: 651519 - DNA, 120 bp, Artificial Sequence
  ENSG00000183091_139 (sequence is synthesized)
aggcctacaacgaccacaaagccaagatctccatccctgtggacatggtgtccatcagcgctgccaaagaaggtcaggcactggcaagtgatgtggactatcgccattacctgcaccgct

SEQ ID NO: 651520 - DNA, 120 bp, Artificial Sequence
  ENSG00000183091_140 (sequence is synthesized)
ggtcttgctttcccgaccagaatgatgtgatccaagccaggaaagcctacgacctacagagcgacgccctctacaaggctgacttggagtggttgcgtggcattggctggatgccccaag

SEQ ID NO: 651521 - DNA, 120 bp, Artificial Sequence
  ENSG00000183091_141 (sequence is synthesized)
ggtctcctgaagtgttgagagtcaaaaacgcccagaatatcttttgtgacagtgtctatcggacgcctgtggtgaaccttaagtacacaagcattgttgacacacctgaagtggtccttg

SEQ ID NO: 651522 - DNA, 120 bp, Artificial Sequence
  ENSG00000183091_142 (sequence is synthesized)
ctaaatcaaatgctgaaaatattagtattccaaagtacagagaggtttgggacaaggataaaacttcaatacacataatgccagatactccagaaattaatctcgctagagcaaatgctc

SEQ ID NO: 651523 - DNA, 120 bp, Artificial Sequence
  ENSG00000183091_143 (sequence is synthesized)
ttaatgtgagcaataaactttaccgtgagggctgggatgaaatgaaggcgggctgtgatgtccggctggatgccatccccatccaggctgccaaggcctccagggagattgccagtgact

SEQ ID NO: 651524 - DNA, 120 bp, Artificial Sequence
  ENSG00000183091_144 (sequence is synthesized)
ataaatataagcttgaccatgagaagcagaagggacactacgtgggcaccctcacagccagggatgacaacaagatccgctgggccctcatagctgacaagctccagaatgaacgagagt

SEQ ID NO: 651525 - DNA, 120 bp, Artificial Sequence
  ENSG00000183091_145 (sequence is synthesized)
accggctggactgggccaaatggaaggccaagatccagagccctgtggacatgctttccatcctgcactctaaaaattcccaggctctggtcagtgacatggattaccgcaattacctgc

SEQ ID NO: 651526 - DNA, 120 bp, Artificial Sequence
  ENSG00000183091_146 (sequence is synthesized)
accagtggacctgcatgcccgaccagaacgatgtgattcaggccaagaaggcctacgaactgcagagcgataatgtttacaaggctgacttggaatggttgcgtggaattgggtggatgc

SEQ ID NO: 651527 - DNA, 120 bp, Artificial Sequence
  ENSG00000183091_147 (sequence is synthesized)
caaatgactccgtgtccgtcaatcatgccaaacatgccgcggacatcttcagtgagaaaaaatatcgcacaaaaatagaaactctcaactttacgcctgtggatgacagagttgattatg

SEQ ID NO: 651528 - DNA, 120 bp, Artificial Sequence
  ENSG00000183091_148 (sequence is synthesized)
tgacagcgaaacaaagtggcgagatcctcgatgatattaaataccggaaagactggaatgccaccaaatcaaagtacaccctcacagaaacccccctgctgcacactgcccaggaggctg

SEQ ID NO: 651529 - DNA, 120 bp, Artificial Sequence
  ENSG00000183091_149 (sequence is synthesized)
ctaggatactggaccagtatctctacaaggaaggctgggagagacaaaaagccacaggttacattttgcctccagatgctgtgccatttgttcatgcccatcactgcaatgacgttcaga

SEQ ID NO: 651530 - DNA, 120 bp, Artificial Sequence
  ENSG00000183091_150 (sequence is synthesized)
gtgagctgaaatacaaagctgaacatgtgaagcaaaaaggtcattatgttggtgtcccgacgatgagagatgatcctaagctggtttggtttgagcatgcaggccagattcagaatgaga

SEQ ID NO: 651531 - DNA, 120 bp, Artificial Sequence
  ENSG00000183091_151 (sequence is synthesized)
gactatacaaagaggactatcacaaaacaaaggccaaaatcaatatacctgctgatatggtgtcagtcttggccgccaagcaggggcagacccttgtcagtgatattgattatcgtaatt

SEQ ID NO: 651532 - DNA, 120 bp, Artificial Sequence
  ENSG00000183091_152 (sequence is synthesized)
acttgcaccaatggatgtgtcatcctgaccagaacgatgttattcaggcaagaaaggcctatgacctacagagtgataatgtctacagagctgacctggagtggctccgaggcattggct

SEQ ID NO: 651533 - DNA, 120 bp, Artificial Sequence
  ENSG00000183091_153 (sequence is synthesized)
ggatcccactggattctgtggaccatgtaagggttactaagaaccaggaaatgatgagtcagatcaaatataagaaaaatgcccttgaaaactatcctaactttagaagtgtggtggatc

SEQ ID NO: 651534 - DNA, 120 bp, Artificial Sequence
  ENSG00000183091_154 (sequence is synthesized)
ctccagagattgttttagccaagattaattctgtcaatcaaagtgatgtaaaatataaagaaacatttaataaagcaaagggcaaatatacgttttcaccagatacaccacatatctccc

SEQ ID NO: 651535 - DNA, 120 bp, Artificial Sequence
  ENSG00000183091_155 (sequence is synthesized)
actccaaagacatgggaaaactctacagtactatactgtataaaggggcgtgggagggcaccaaggcctatggctacaccctggatgagcgctacattcccattgttggagccaagcatg

SEQ ID NO: 651536 - DNA, 120 bp, Artificial Sequence
  ENSG00000183091_156 (sequence is synthesized)
ctgatctggtgaacagtgagcttaaatacaaagagacatatgagaagcagaaaggtcactacctggctggaaaagtgatcggtgaattccctggtgtggttcactgtctggatttccaaa

SEQ ID NO: 651537 - DNA, 120 bp, Artificial Sequence
  ENSG00000183091_157 (sequence is synthesized)
agatgaggagtgcgttgaactacagaaaacattatgaggataccaaagcaaatgttcatatccccaatgacatgatgaatcacgtgctggctaaaaggtgccagtacatcctcagtgacc

SEQ ID NO: 651538 - DNA, 120 bp, Artificial Sequence
  ENSG00000183091_158 (sequence is synthesized)
tggagtatcgacactatttccaccagtggacgtctcttctggaagaacccaatgttatacgcgtccgaaacgcccaggagatcttgagtgataatgtgtataaagatgacctgaattggt

SEQ ID NO: 651539 - DNA, 120 bp, Artificial Sequence
  ENSG00000183091_159 (sequence is synthesized)
tgaaaggcattggttgctacgtttgggatacaccccaaatcctccatgccaagaaatcatacgaccttcagagtcagctacaatatacagcagcaggtaaagaaaatctacaaaactata

SEQ ID NO: 651540 - DNA, 120 bp, Artificial Sequence
  ENSG00000183091_160 (sequence is synthesized)
atctggtcacagacacgcccctctatgtgactgctgttcagagtggcattaatgccagtgaggtaaaatataaagaaaattatcatcagattaaggacaaatacacaacagttctagaaa

SEQ ID NO: 651541 - DNA, 120 bp, Artificial Sequence
  ENSG00000183091_161 (sequence is synthesized)
cagtggattatgacagaaccagaaacctgaagaatctttacagcagtaacctgtacaaggaggcctgggatagagtgaaagccaccagctacatcctgccttccagcaccttgtccctga

SEQ ID NO: 651542 - DNA, 120 bp, Artificial Sequence
  ENSG00000183091_162 (sequence is synthesized)
cacacgccaagaaccagaagcatctggccagccatatcaaatatcgggaagaatatgaaaagttcaaagctctttatacgttaccaagaagtgttgacgatgatccgaacacagcacggt

SEQ ID NO: 651543 - DNA, 120 bp, Artificial Sequence
  ENSG00000183091_163 (sequence is synthesized)
gcctccgagttggcaagcttaacatcgatcgcctgtacagatcagtttatgaaaagaacaagatgaaaatccacatcgtgcccgacatggtagagatggttactgccaaggattcccaga

SEQ ID NO: 651544 - DNA, 120 bp, Artificial Sequence
  ENSG00000183091_164 (sequence is synthesized)
agaaagtcagtgagattgattaccgcctgcgcctccacgaatggatttgccaccccgacttgcaagtcaatgatcacgtcaggaaagtcacagatcagatcagcgatattgtatacaagg

SEQ ID NO: 651545 - DNA, 120 bp, Artificial Sequence
  ENSG00000183091_165 (sequence is synthesized)
atgacctcaactggctgaaaggcattggttgctacgtctgggacactcctgaaatcctccatgccaagcatgcttatgatctacgtgatgatatcaagtataaagctcacatgttgaaaa

SEQ ID NO: 651546 - DNA, 120 bp, Artificial Sequence
  ENSG00000183091_166 (sequence is synthesized)
caaggaatgactacaagcttgtcacagatacaccagtctacgtgcaggctgtcaaaagtgggaaacagctaagtgacgctgtctaccactatgactatgtgcacagtgtcagaggcaaag

SEQ ID NO: 651547 - DNA, 120 bp, Artificial Sequence
  ENSG00000183091_167 (sequence is synthesized)
tggctccaactaccaaaaccgtggatctggaccgggcccttcatgcatacaagctccagagttcgaatctatacaaaaccagcctgcgcaccctgcccactggatatagacttccaggtg

SEQ ID NO: 651548 - DNA, 120 bp, Artificial Sequence
  ENSG00000183091_168 (sequence is synthesized)
acactcctcacttcaaacacatcaaggacacccgttacatgagcagttatttcaagtacaaagaagcctatgaacacaccaaggcatatgggtatacacttggccccaaagatgttccat

SEQ ID NO: 651549 - DNA, 120 bp, Artificial Sequence
  ENSG00000183091_169 (sequence is synthesized)
ttgtccacgtccggagagtcaacaatgttaccagcgagagactgtatcgggaattgtaccacaaactgaaagacaagatccatacaactcccgatacccctgagatccgccaagtcaaga

SEQ ID NO: 651550 - DNA, 120 bp, Artificial Sequence
  ENSG00000183091_170 (sequence is synthesized)
agacacaagaggctgtcagtgagttgatctacaaatcagacttcttcaagatgcagggccacatgatctctctgccatacacaccccaagtgatccattgccgctatgtgggagacatca

SEQ ID NO: 651551 - DNA, 120 bp, Artificial Sequence
  ENSG00000183091_171 (sequence is synthesized)
ccagtgatattaaatacaaagaggacttgcaggtcctgaagggatttggctgcttcctgtatgacactcctgacatggtccgctcccggcacctgcggaagctctggtctaattacctat

SEQ ID NO: 651552 - DNA, 120 bp, Artificial Sequence
  ENSG00000183091_172 (sequence is synthesized)
acactgataaggcaaggaagatgcgagacaaatacaaagtggtgcttgacactccagaatacagaaaagtgcaagaactgaagacacatctgagtgagctggtctacagagctgcaggca

SEQ ID NO: 651553 - DNA, 120 bp, Artificial Sequence
  ENSG00000183091_173 (sequence is synthesized)
agaagcagaagtcaatctttacttcagttcctgatactcctgatcttttaagagccaagcgagggcagaagcttcagagtcagtatctgtatgttgaacttgccaccaaagagagacccc

SEQ ID NO: 651554 - DNA, 120 bp, Artificial Sequence
  ENSG00000183091_174 (sequence is synthesized)
atcatcacgctggaaaccagaccacagccttgaagcatgctaaagacgtgaaggacatggtcagtgagaaaaagtacaagattcaatatgaaaagatgaaagacaagtacactccggttc

SEQ ID NO: 651555 - DNA, 120 bp, Artificial Sequence
  ENSG00000183091_175 (sequence is synthesized)
cagatacgccaatcctcatcagagccaagagggcttactggaatgccagtgatctacgctacaaagaaacatttcaaaagaccaaagggaaataccacacggtgaaagatgccctagaca

SEQ ID NO: 651556 - DNA, 120 bp, Artificial Sequence
  ENSG00000183091_176 (sequence is synthesized)
ttgtctatcatcgcaaagtcacagatgacatcagtaaaataaaatacaaggagaactacatgagccagttgggtatctggaggtccattcctgatcgtccagagcatttccaccaccgag

SEQ ID NO: 651557 - DNA, 120 bp, Artificial Sequence
  ENSG00000183091_177 (sequence is synthesized)
cagtcactgacacagtcagtgatgtaaaatataaagaagacttgacttggcttaaaggcattggttgctatgcctatgatacccctgatttcactctggctgaaaagaacaagactctct

SEQ ID NO: 651558 - DNA, 120 bp, Artificial Sequence
  ENSG00000183091_178 (sequence is synthesized)
acagcaagtataagtataaagaagtatttgaaaggacaaagtcagatttcaagtatgttgccgactctccgatcaataggcatttcaagtatgcaactcaattgatgaatgagagaaaat

SEQ ID NO: 651559 - DNA, 120 bp, Artificial Sequence
  ENSG00000183091_179 (sequence is synthesized)
ataaatctagtgccaagatgtttctgcaacatggatgtaatgaaattctgcgtccagatatgttgactgctctctacaattcgcatatgtggagccagatcaaatacaggaaaaactatg

SEQ ID NO: 651560 - DNA, 120 bp, Artificial Sequence
  ENSG00000183091_180 (sequence is synthesized)
aaaaatcaaaggacaaatttacctcaattgtggatactccagaacacctgcgtactacaaaagtcaacaaacaaatcagcgatatcctttataaattggaatacaacaaggccaaaccca

SEQ ID NO: 651561 - DNA, 120 bp, Artificial Sequence
  ENSG00000183091_181 (sequence is synthesized)
gaggctacaccacaatccacgacacacccatgttgctgcatgtccgcaaggttaaagatgaagtcagtgatctgaaatacaaagaagtataccaaagaaataaatccaactgcaccattg

SEQ ID NO: 651562 - DNA, 120 bp, Artificial Sequence
  ENSG00000183091_182 (sequence is synthesized)
agccagatgctgttcatatcaaagcagccaaggacgcctacaaagtcaacaccaatctggactataagaaacagtacgaagccaacaaagcccactggaagtggactcctgaccgaccgg

SEQ ID NO: 651563 - DNA, 120 bp, Artificial Sequence
  ENSG00000183091_183 (sequence is synthesized)
acttcctccaggctgccaagtcatccctgcagcaaagcgattttgaatataagctggaccgggagttcctcaagggttgcaagctttctgtcactgatgacaaaaacacggtgctcgccc

SEQ ID NO: 651564 - DNA, 120 bp, Artificial Sequence
  ENSG00000183091_184 (sequence is synthesized)
tcaggaatactttaatagaaagtgatctgaaatacaaagagaaacatgtcaaggaaagaggaacctgccatgccgtacctgacacgcctcagatcctgctggcgaagactgtcagcaacc

SEQ ID NO: 651565 - DNA, 120 bp, Artificial Sequence
  ENSG00000183091_185 (sequence is synthesized)
tggtgtctgagaacaagtacaaggaccatgtcaagaagcacttggcacagggctcatacacaacactaccagagacccgggacactgttcacgtcaaggaagtgaccaagcatgtcagtg

SEQ ID NO: 651566 - DNA, 120 bp, Artificial Sequence
  ENSG00000183091_186 (sequence is synthesized)
atacaaattacaaaaagaagtttgtcaaggagaaaggaaaatccaactactccatcatgctggagccaccagaggtgaaacatgctatggaagtggccaagaagcaaagtgatgtcgctt

SEQ ID NO: 651567 - DNA, 120 bp, Artificial Sequence
  ENSG00000183091_187 (sequence is synthesized)
acagaaaagatgccaaagagaacctgcattacaccacagtggctgatcgaccagacatcaagaaggccacacaggcagccaaacaggccagtgaggtggagtacagagccaagcaccgca

SEQ ID NO: 651568 - DNA, 120 bp, Artificial Sequence
  ENSG00000183091_188 (sequence is synthesized)
aggaaggcagccatggcttaagcatgctcggtcgcccagacatagaaatggccaagaaggcagccaagctgagcagccaggttaaataccgagaaaatttcgataaagaaaagggcaaga

SEQ ID NO: 651569 - DNA, 120 bp, Artificial Sequence
  ENSG00000183091_189 (sequence is synthesized)
caccaaaatacaatccaaaagacagccagctctacaaagtcatgaaagatgctaataatcttgcaagtgaggttaaatacaaggctgacctgaagaaacttcacaaacccgtgactgaca

SEQ ID NO: 651570 - DNA, 120 bp, Artificial Sequence
  ENSG00000183091_190 (sequence is synthesized)
tgaaggagtctctgatcatgaatcatgtcctgaatacaagccaacttgccagttcttaccagtacaagaagaagtatgagaagagtaaaggccactaccacaccatacccgataatctgg

SEQ ID NO: 651571 - DNA, 120 bp, Artificial Sequence
  ENSG00000183091_191 (sequence is synthesized)
agcagcttcacctaaaagaggccacagaattacagagtatagtgaaatacaaagaaaagtatgaaaaggaacgaggaaaacccatgctggactttgaaacaccaacgtacatcactgcca

SEQ ID NO: 651572 - DNA, 120 bp, Artificial Sequence
  ENSG00000183091_192 (sequence is synthesized)
aagagtctcagcagatgcagagtgggaaagaatataggaaagattatgaagagtccattaaaggcagaaacctgactggcctggaggtcacgccagctttgttacatgtcaaatatgcaa

SEQ ID NO: 651573 - DNA, 120 bp, Artificial Sequence
  ENSG00000183091_193 (sequence is synthesized)
ctaaaatagcaagcgagaaagagtacaggaaagatctagaggaaagcatccgtgggaagggcctcactgaaatggaagatacacctgacatgctaagagcaaagaatgccactcaaatcc

SEQ ID NO: 651574 - DNA, 120 bp, Artificial Sequence
  ENSG00000183091_194 (sequence is synthesized)
tcaatgagaaagaatataagcgagacctggaactggaagtcaaaggaagaggcctgaatgccatggccaatgaaactccggattttatgagggccaggaatgctactgatattgccagtc

SEQ ID NO: 651575 - DNA, 120 bp, Artificial Sequence
  ENSG00000183091_195 (sequence is synthesized)
agattaagtataagcaatcagcagaaatggagaaagccaatttcacttctgtggttgatactccagagatcattcatgcccaacaagtcaagaatctttcaagccagaaaaagtacaagg

SEQ ID NO: 651576 - DNA, 120 bp, Artificial Sequence
  ENSG00000183091_196 (sequence is synthesized)
aagatgctgagaagtccatgtcgtattatgagactgttttggacaccccagagatacagagagtccgggagaaccaaaagaacttcagccttctccaataccagtgtgaccttaaaaaca

SEQ ID NO: 651577 - DNA, 120 bp, Artificial Sequence
  ENSG00000183091_197 (sequence is synthesized)
gtaaaggaaaaattacagttgttcaagacacgccagaaatactgcgtgtaaaagaaaatcagaagaatttcagctcggttttatataaagaggatgtctcaccaggaacggctatcggaa

SEQ ID NO: 651578 - DNA, 120 bp, Artificial Sequence
  ENSG00000183091_198 (sequence is synthesized)
agacacctgagatgatgagagtgaaacaaacacaggaccacattagctcggtgaagtataaggaagcaataggacaaggaactccaatccctgacctgcctgaagtgaaacgtgtgaagg

SEQ ID NO: 651579 - DNA, 120 bp, Artificial Sequence
  ENSG00000183091_199 (sequence is synthesized)
agacgcagaagcacattagctcggttatgtacaaagaaaacttgggaacaggcattccaaccactgtgactccagagattgagagagtcaaacgcaatcaagagaactttagctcggttt

SEQ ID NO: 651580 - DNA, 120 bp, Artificial Sequence
  ENSG00000183091_200 (sequence is synthesized)
tgtacaaagaaaatttggggaaaggaatcccaacacctatcactccagagatggagagagtcaaacgcaatcaagagaactttagctcgatattgtacaaagagaacttgagcaagggga

SEQ ID NO: 651581 - DNA, 120 bp, Artificial Sequence
  ENSG00000183091_201 (sequence is synthesized)
ctcccctacctgtcactcctgagatggagcgagtcaaactcaatcaagaaaactttagctcggtgttgtataaagaaaacgttggaaaagggattccaatccccatcactccagagatgg

SEQ ID NO: 651582 - DNA, 120 bp, Artificial Sequence
  ENSG00000183091_202 (sequence is synthesized)
agagagtcaaacacaatcaagaaaactttagttcggtgctatacaaagaaaacctggggacaggaattccaatccccatcactcctgagatgcagagagtcaaacacaatcaagaaaacc

SEQ ID NO: 651583 - DNA, 120 bp, Artificial Sequence
  ENSG00000183091_203 (sequence is synthesized)
ttagctcggtgttatacaaagaaaacatgggcaagggaacccctttacctgtcactcccgagatggaaagagtcaaacacaatcaagaaaatattagctcggtgttatacaaagaaaaca

SEQ ID NO: 651584 - DNA, 120 bp, Artificial Sequence
  ENSG00000183091_204 (sequence is synthesized)
tgggcaagggaacccctctacctgtcactcctgagatggagagagtcaaacacaatcaagaaaatattagctcggtgttatacaaagaaaacatgggcaagggaactcctttagctgtca

SEQ ID NO: 651585 - DNA, 120 bp, Artificial Sequence
  ENSG00000183091_205 (sequence is synthesized)
ctcccgagatggagcgagtcaaacacaatcaagaaaatattagctcggttttgtacaaagaaaatgtggggaaagccaccgcaacccctgtcactcctgagatgcagagagtcaaacgca

SEQ ID NO: 651586 - DNA, 120 bp, Artificial Sequence
  ENSG00000183091_206 (sequence is synthesized)
atcaagaaaacattagctcggtgttatacaaagagaacctggggaaagcaacccccacaccctttactcctgagatggaaagagtgaaacgcaatcaagaaaactttagctcggtattgt

SEQ ID NO: 651587 - DNA, 120 bp, Artificial Sequence
  ENSG00000183091_207 (sequence is synthesized)
acaaagagaacatgagaaaagcaactccgacacctgttactccagagatggagagagctaagcgcaaccaagaaaacattagctcggttctttattctgatagtttccggaaacaaatac

SEQ ID NO: 651588 - DNA, 120 bp, Artificial Sequence
  ENSG00000183091_208 (sequence is synthesized)
aaggcaaagctgcctatgtattggatacccccgagatgagacgggtgagggagacccaacggcacatctcaacggtgaaatatcatgaagactttgagaaacacaagggttgcttcacac

SEQ ID NO: 651589 - DNA, 120 bp, Artificial Sequence
  ENSG00000183091_209 (sequence is synthesized)
cagtggtgacagatcctatcactgaacgagtaaagaagaacatgcaggacttcagtgacattaactaccgaggtattcagaggaaagtggtagaaatggaacaaaaacggaatgaccaag

SEQ ID NO: 651590 - DNA, 120 bp, Artificial Sequence
  ENSG00000183091_210 (sequence is synthesized)
atcaggagactattacaggtttacgtgtctggcgtactaatcctggttcggtttttgactatgatccagcagaagacaacatccagtcccgaagcttacacatgattaatgtccaagctc

SEQ ID NO: 651591 - DNA, 120 bp, Artificial Sequence
  ENSG00000183091_211 (sequence is synthesized)
agcgccggagccgggagcagtcacgatctgccagtgcactaagcatcagtgggggtgaggagaagtctgagcattcagaagcaccagaccaccacctttcgacttacagcgacgggggtg

SEQ ID NO: 651592 - DNA, 120 bp, Artificial Sequence
  ENSG00000183091_212 (sequence is synthesized)
tctttgcagtctcaacagcttacaaacatgcaaaaaccacagagctcccacaacaacgatcatcttcagttgctacccaacagacaacggtatcttccatcccatctcatccatctactg

SEQ ID NO: 651593 - DNA, 120 bp, Artificial Sequence
  ENSG00000183091_213 (sequence is synthesized)
ctggaaaaatcttccgtgccatgtatgactatatggctgctgatgcagatgaggtgtccttcaaggatggagatgccatcataaatgttcaagcaattgatgaaggctggatgtatggca

SEQ ID NO: 651594 - DNA, 120 bp, Artificial Sequence
  ENSG00000183091_214 (sequence is synthesized)
ctgtgcagaggactggcaggaccggaatgctcccagccaactacgttgaagctatttaggcatttcaaagcatcacacttgtctgcaggacttacagatcctgcagtcaatgtttcggtt

SEQ ID NO: 651595 - DNA, 120 bp, Artificial Sequence
  ENSG00000183091_215 (sequence is synthesized)
tagactctccactgttacctaagttctcaagctgcctatggtttttctgtgtcaatgtgatttatggtagtaccatcctttctcctttgggttttaaaataagttgcagaacagacactt

SEQ ID NO: 651596 - DNA, 120 bp, Artificial Sequence
  ENSG00000183091_216 (sequence is synthesized)
taaaagcttctgcaatattatttctgtgcctagagtctttctccattataaacatgttttaacattatttcttttctaaaacagggattttgaatatgccaaacacattaaaggaaaaat

SEQ ID NO: 651597 - DNA, 120 bp, Artificial Sequence
  ENSG00000183091_217 (sequence is synthesized)
agcagagatgttcaccttttccttgctgattgctaatgcttattatttctaattcagttctgaagttataaacttataatcaatacaaaccagcaactaataaaacctctaattctgcaa

SEQ ID NO: 651598 - DNA, 120 bp, Artificial Sequence
  ENSG00000183091_218 (sequence is synthesized)
acagagctgattatgagcagcggaaagataaataccacctggtagtcgatgagcctagacatctgctggctaagaccgcaggcgaccagatcagtcagatcaaatacaggaaaaactatg

SEQ ID NO: 651599 - DNA, 120 bp, Artificial Sequence
  ENSG00000183091_219 (sequence is synthesized)
tttaataactcactgatttttagtaggactatcttacttattcattaggatctgtcacatgcacactaaaacttcatgccaacttaaataaacagtgacaacaaaagcatctatttgtgt

SEQ ID NO: 651600 - DNA, 120 bp, Artificial Sequence
  ENSG00000183091_220 (sequence is synthesized)
aggacaaggcaaatatttccgattcttgaatttgctaacaaagattttgcaaaaagaaagggcacagtaacaagacagacatcaaacagtgataagaaaactaatatagaatggtgctac

SEQ ID NO: 651601 - DNA, 120 bp, Artificial Sequence
  ENSG00000183091_221 (sequence is synthesized)
agaattaaagtgggatgacatcaagaactggatgggcactttagattgagtggtcaaagaaagtctaagacaggcgtggtccagtcatgccaagatcgggggaaaacagcagtgcttctc

SEQ ID NO: 651602 - DNA, 120 bp, Artificial Sequence
  ENSG00000183091_222 (sequence is synthesized)
agacctccacattcatgcaatcgcctgctgaccctgttgaagtgcagattctaattcagtagatctaggggactccatattctgactttctaataagctcctaggtgatgctgatgctgt

SEQ ID NO: 651603 - DNA, 120 bp, Artificial Sequence
  ENSG00000183091_223 (sequence is synthesized)
gattggtaggctactctttgaacagcaaggtgctaacatagctaagtcctagagagtagtacatccttctcaagataggtaagtgaaagatacagtttgtcctactataaaatatatttt

SEQ ID NO: 651604 - DNA, 120 bp, Artificial Sequence
  ENSG00000183091_224 (sequence is synthesized)
aatgacacaaattagctcatacccaattagtaaagaggagaatggcatcagtataactcagaagtcatttcagctcgtgtgccacttttctgagcatcttaatattttgtgtcccaataa

SEQ ID NO: 651605 - DNA, 120 bp, Artificial Sequence
  ENSG00000183091_225 (sequence is synthesized)
agaacagctaaacactaacatcactgatctagctgaactcagcaagctgcagagaaatacagtgctgtatgtggtcacagtcactatcaatcactcttcttattggcttaggtaggcaat

SEQ ID NO: 651606 - DNA, 120 bp, Artificial Sequence
  ENSG00000183091_226 (sequence is synthesized)
ggactctgccttggaattacttcttgcatagttctcaatcttgtgcatttttgcctttggctccaaaattaaacagcctcatccgttctttacactcccttccttacacctaacgtcacc

SEQ ID NO: 651607 - DNA, 120 bp, Artificial Sequence
  ENSG00000183091_227 (sequence is synthesized)
gttctttacactcccttccttacacctaacgtcaccttttaaaaaatttaaataaagttctgtgtttaataatttaaataagaattcacaggcaggtgcagtggctcatgcctgtgatcc

SEQ ID NO: 651608 - DNA, 86 bp, Artificial Sequence
  ENSG00000183091_228 (sequence is synthesized)
cctaggagtttgaaactagcctgggcaacatggtaaaccccatctctacaaaaaaataaaaaaattagctgggtatggtggcacat

SEQ ID NO: 651609 - DNA, 120 bp, Artificial Sequence
  ENSG00000183091_229 (sequence is synthesized)
accacactccagataagctctgtgacagacagtcagacatgagcatgctgaagagttgctattcatttcccttggatagaattgcagatcccagaaacatcccttgaatattctccaggg

SEQ ID NO: 651610 - DNA, 120 bp, Artificial Sequence
  ENSG00000183091_230 (sequence is synthesized)
atcataaaaacacgcctttctcattcaactgaaaaacacactaaaattttaaaagagaaaaatgcaacatcttggaaagtaacgttttaacaccataaaaatttgcacttattcaactga

SEQ ID NO: 651611 - DNA, 120 bp, Artificial Sequence
  ENSG00000183091_231 (sequence is synthesized)
aaatttacactaaaatagacattaactgtgcttttacattccaaaccatcatactaaacataacaagttaattgccaatgttttccttcccctatactttgaggtagttctacgtaacca

SEQ ID NO: 651612 - DNA, 120 bp, Artificial Sequence
  ENSG00000183091_232 (sequence is synthesized)
actataacaaatttacttcctaacatcctcaatcttctgctctcctttagttttaagatactttatgacatgggtaatactctgaaatggatgccttctttggatatattttggggtttt

SEQ ID NO: 651613 - DNA, 120 bp, Artificial Sequence
  ENSG00000183091_233 (sequence is synthesized)
agtgtctggaggactttgatttctatattagcatattggtttatgaagtctggacacaacctaaggaaaataatcacttgttttaaaggacagttctttcaaattccctacaatgtcaga

SEQ ID NO: 651614 - DNA, 120 bp, Artificial Sequence
  ENSG00000183091_234 (sequence is synthesized)
tttagagccaaataccatcgaatatgttgatgctgtaattcctagcaaatttcaagaggtcactctcttttcaaaattataccgtgccccttctttgaaaatgagtttcattttcgaagt

SEQ ID NO: 651615 - DNA, 120 bp, Artificial Sequence
  ENSG00000183091_235 (sequence is synthesized)
caaaacaagtcctttctcttccactggcgggcccttctggtccccagattagcctgttccaaaattggtcatgtgtctcactgggccccttcagttgacccaagcgtccctcaccagctc

SEQ ID NO: 651616 - DNA, 120 bp, Artificial Sequence
  ENSG00000183091_236 (sequence is synthesized)
agaacaaaagtagcattacctacatcaagtcaaaacataaaggacttcaatctgtttttctagaggtgcaagaaagctcctattatctcatagtttacaaagctgatttctaccttatct

SEQ ID NO: 651617 - DNA, 120 bp, Artificial Sequence
  ENSG00000183091_237 (sequence is synthesized)
ttgttctcctctgaggaaaagacatgacccagaacctaagctggaataagtgtgattcaatcctttggtggttgttaaaattcatgccttggttttcaagttattggaaaactccaagaa

SEQ ID NO: 651618 - DNA, 120 bp, Artificial Sequence
  ENSG00000183091_238 (sequence is synthesized)
cacttgttctgatcactggtttccctttcaggtttacgtgtctggcgtactaatcctggttcggtttttgactatgatccagcagaagacaacatccagtcccgaagcttacacatgatt

SEQ ID NO: 651619 - DNA, 120 bp, Artificial Sequence
  ENSG00000183091_239 (sequence is synthesized)
aatggtgtgttagctgaaaaaggcttacaacataaacatcaccatttagtatgctagagtcaatgactttcatttgggctctgaagttccttccctccagagttttccattttctgagct

SEQ ID NO: 651620 - DNA, 120 bp, Artificial Sequence
  ENSG00000183091_240 (sequence is synthesized)
gcccatttggcataaaaataccttgttaactagtgagcaaaacttactttctagataagttcaagttagaaaaaattttgtttcactgcctcagtgcatgtctcccattattatcatttc

SEQ ID NO: 651621 - DNA, 120 bp, Artificial Sequence
  ENSG00000183091_241 (sequence is synthesized)
taatttttcttccaaagaaaaaacagtagtaattctattggagaaataatgaaaatacataaaatacataggcaaagggaagagaaaggatttgacctgtaggaacttcctgagctctat

SEQ ID NO: 651622 - DNA, 120 bp, Artificial Sequence
  ENSG00000183091_242 (sequence is synthesized)
tgcatcaaggaagtttattcattacacaaagcaggctgcacaacttcattccttcttttcatgttaaaaagcagaatactagcctggaaaagagaatgagaccccttttctacaaacagt

SEQ ID NO: 651623 - DNA, 120 bp, Artificial Sequence
  ENSG00000183091_243 (sequence is synthesized)
gagcaaggccagtgatcatatatttgaatgcctgttgtcttgtcattcttaattattaatagtgtcttctttactctaaatgtcccagtttggataatagattatatgatcactctatgt

SEQ ID NO: 651624 - DNA, 120 bp, Artificial Sequence
  ENSG00000183091_244 (sequence is synthesized)
acaatgcatattctttggcatttgtgtttctactattccccaattcccaaattgattgatgtccaggaataatttggatgtttgcatttgctgttaggttaaataccgagaaaatttcga

SEQ ID NO: 651625 - DNA, 120 bp, Artificial Sequence
  ENSG00000183091_245 (sequence is synthesized)
agtggatgttttggaaaagccatttcttattcaaagatgttgacaaatagaagcttttagagtttttcttgctagaaatttagttacccctataagtctcaattccctttagtgattttc

SEQ ID NO: 651626 - DNA, 120 bp, Artificial Sequence
  ENSG00000183091_246 (sequence is synthesized)
gcctgggtgacagagtaagactccgtctcggagggaaacaaaaaaaggaaattattagtagtagtatcatctgctcactccatttcacttttgctatcagacacaaatttatagtaaaca

SEQ ID NO: 651627 - DNA, 120 bp, Artificial Sequence
  ENSG00000183091_247 (sequence is synthesized)
acacaaatttatagtaaacatttccagttaggaattaaagagaaagctagataccatctcccactctggtgtttcaagaggacaattagataccttaaagcccactctacaacttcttag

SEQ ID NO: 651628 - DNA, 120 bp, Artificial Sequence
  ENSG00000183091_248 (sequence is synthesized)
cagtgatgtaagtactagaatggtttagcagtccctctcatcttggcctccttctaatgagatgtaacaaaccctggtccagttatctattcctgtgtaacaaccaccctaaaacttagt

SEQ ID NO: 651629 - DNA, 120 bp, Artificial Sequence
  ENSG00000183091_249 (sequence is synthesized)
ggcttaaaataatagtcatctcttttgctcatgattcggtaagttgactggacacagctgaacagtcctgctccccatgttgctggcagacacctggggctcagtcaagccaggacatcc

SEQ ID NO: 651630 - DNA, 120 bp, Artificial Sequence
  ENSG00000183091_250 (sequence is synthesized)
aggtggctcactcccatggctagccattggtgatggctgcgggctgggagctgggctattgtgtagacgagacaggaaccccttcatgtggcctctccacatgcctgggacttctcccca

SEQ ID NO: 651631 - DNA, 120 bp, Artificial Sequence
  ENSG00000183092_0 (sequence is synthesized)
ctgctttgtctgctgtcccctctctgctggagaacttagcccagagctagtgaacgagcctctgccgcagacatggagaaactcagcgcgctgcaggagcagaagggcgagctgcgcaag

SEQ ID NO: 651632 - DNA, 120 bp, Artificial Sequence
  ENSG00000183092_1 (sequence is synthesized)
cggctgtcctacaccacacacaagctcgagaagctcgagaccgagttcgactccacgcgccactacctggagatcgagctgcggcgcgcgcaggaggaactggagaaggtcacggagaag

SEQ ID NO: 651633 - DNA, 120 bp, Artificial Sequence
  ENSG00000183092_2 (sequence is synthesized)
ctgcgcaggattcagagcaactacatggcactgcagaggatcaaccaggagctggaggacaagctgtaccgcatgggccagcactatgaggaggagaagcgtgcgctgagccacgagatt

SEQ ID NO: 651634 - DNA, 120 bp, Artificial Sequence
  ENSG00000183092_3 (sequence is synthesized)
gttgccctcaacagccatctgctagaagccaaggtgaccatcgacaagctgtcagaggacaacgagctctataggaaggactgcaatctagcggcccagctgctgcagtgcagccagacc

SEQ ID NO: 651635 - DNA, 120 bp, Artificial Sequence
  ENSG00000183092_4 (sequence is synthesized)
tacggcagggtccacaaggtgtctgagctgccctcggatttccaggagcgcgtgagcctgcacatggagaagcacggctgcagcctgccatccccgctctgccacccggcctacgccgac

SEQ ID NO: 651636 - DNA, 120 bp, Artificial Sequence
  ENSG00000183092_5 (sequence is synthesized)
agcgtccccacctgcgtcattgccaaggtgctggagaagccggaccccgccagcctgtcctcccgcctgtccgatgcctccgcccgcgacctggccttctgcgacggggtggagaaacca

SEQ ID NO: 651637 - DNA, 120 bp, Artificial Sequence
  ENSG00000183092_6 (sequence is synthesized)
ggcccgcggcccccctacaagggagacatctactgcagtgacacagccctctactgcccggaggagcggcggcgagaccggcggcctagcgtggacgcgcccgtgaccgacgtgggcttc

SEQ ID NO: 651638 - DNA, 120 bp, Artificial Sequence
  ENSG00000183092_7 (sequence is synthesized)
ctgcgggcccagaactccactgacagcgcggccgaggaggaggaggaggccgaggcggcggccttcccggcgggcttccagcatgaggccttccccagctacgcaggctcactgcccacg

SEQ ID NO: 651639 - DNA, 120 bp, Artificial Sequence
  ENSG00000183092_8 (sequence is synthesized)
tccagctcctactccagcttcagcgccacgtcggaggagaaggagcacgcgcaggccagcacgctgaccgcgtcgcagcaggccatctacctgaacagccgcgacgagctcttcgaccgc

SEQ ID NO: 651640 - DNA, 120 bp, Artificial Sequence
  ENSG00000183092_9 (sequence is synthesized)
aagccacccgccaccacctacgagggcagccctcgctttgccaaggccacggccgcggtggcggccccgctggaggccgaagtggccccaggcttcgggcggaccatgtcaccgtacccg

SEQ ID NO: 651641 - DNA, 120 bp, Artificial Sequence
  ENSG00000183092_10 (sequence is synthesized)
gccgagaccttccgcttcccggcctctccgggtccccagcaggccctgatgcccccaaacctgtggagcctgcgggccaagccggggaccgcccggctccccggggaggacatgaggggc

SEQ ID NO: 651642 - DNA, 120 bp, Artificial Sequence
  ENSG00000183092_11 (sequence is synthesized)
cctactcctaccccgtgagcgctgccggccgcgcctcaccctgcagcttctctgaacgctactacggcggggccgggggcagcccgggcaagaaggccgacggccgcgccagcccgctct

SEQ ID NO: 651643 - DNA, 120 bp, Artificial Sequence
  ENSG00000183092_12 (sequence is synthesized)
acgccagctacaaggccgacagcttctccgagggggacgacctctcccagggccacctggcagagccctgcttcctgcgggcgggcggcgacctgagcctcagtcccggccgctcggctg

SEQ ID NO: 651644 - DNA, 120 bp, Artificial Sequence
  ENSG00000183092_13 (sequence is synthesized)
acccactgcccggctatgcacccagcgaggggggggacggggacaggctcggggtgcagctgtgtgggaccgccagcagccctgagcccgagcagggttccagggactccttggagccga

SEQ ID NO: 651645 - DNA, 120 bp, Artificial Sequence
  ENSG00000183092_14 (sequence is synthesized)
gctccatggaggcctccccggaaatgcatcctgccgcccgcctcagcccccagcaggcctttccgcggactggtggctcggggctgagccgcaaggacagcctcaccaaggcccagctct

SEQ ID NO: 651646 - DNA, 120 bp, Artificial Sequence
  ENSG00000183092_15 (sequence is synthesized)
acggaaccttgctcaactgagcgcctgcgtgcaggcctggccgtggttcgctccccgccagcccacgtgccccagaagggccggcctcacctctccccagcccccgctgttcccctgccc

SEQ ID NO: 651647 - DNA, 120 bp, Artificial Sequence
  ENSG00000183092_16 (sequence is synthesized)
cggccaacaacgaggagtctgttcctccccgcacctcctctcctccccagccctgtaggcctgaggggagggtcccccacaccacggtgtccacccggccccggcccgtggaactccact

SEQ ID NO: 651648 - DNA, 120 bp, Artificial Sequence
  ENSG00000183092_17 (sequence is synthesized)
tagagcgtttttcacgcgtccttcccccatgtgagaggagcatccccccttttataaagcgaaactatttttatagagaaaaagggtctttcttaacgcacttggcctccagctccctgg

SEQ ID NO: 651649 - DNA, 120 bp, Artificial Sequence
  ENSG00000183092_18 (sequence is synthesized)
acggctgccttggcgttttcaacacaaagctcctttattttttgggcgagggtgcgtggggcctgccccttggaagggaagggaaggacggtgtcctgtggagaccagactctgcaagtg

SEQ ID NO: 651650 - DNA, 120 bp, Artificial Sequence
  ENSG00000183092_19 (sequence is synthesized)
gggagaccacccccgcaagccagtgacaagggagccctgaagttgtgtccacgaagagggagctgaaacaaattcggggctatgaagtgttttaaaaatccattcttcgcagtgtggcca

SEQ ID NO: 651651 - DNA, 120 bp, Artificial Sequence
  ENSG00000183092_20 (sequence is synthesized)
ccacaccgccctgagccctcccacggcccatcgtcccgggtgggccgggatgatgccccagtgcggccggtgctcatctccgcccccgggtccgccccctgacaccgtcttactctacct

SEQ ID NO: 651652 - DNA, 120 bp, Artificial Sequence
  ENSG00000183092_21 (sequence is synthesized)
cagacatgaggaggccctccattcctggtttctgtagcttgcattcttgttgtctctgatgcatgccctgccagttagtactgtattttgcattcattaataaaagacaccggtggaaag

SEQ ID NO: 651653 - DNA, 120 bp, Artificial Sequence
  ENSG00000183092_22 (sequence is synthesized)
gggcttcccacggacggggccccgcggggttgcccggccgtgcccgctgtgcccggctctgcccggcgcggccgcggagcgcacgcctcctgcctgctgaccctctcgtttggtttctcg

SEQ ID NO: 651654 - DNA, 120 bp, Artificial Sequence
  ENSG00000183092_23 (sequence is synthesized)
atgctctcaggggccagctcccaggcacggggctctaaccctacctgtcccaggcaggacggctacagctccctcctggagcccgggacagaagcccccatcaaggaagctcacagacag

SEQ ID NO: 651655 - DNA, 120 bp, Artificial Sequence
  ENSG00000183092_24 (sequence is synthesized)
gaccttcgaagccacatgccaagccccagccaaggtcggaaccccaagggcaaagcatcttgccaccgctgggcagctcggtccagccaggagatggcccgggtgtcgccagcccagcct

SEQ ID NO: 651656 - DNA, 120 bp, Artificial Sequence
  ENSG00000183092_25 (sequence is synthesized)
tcctccccagagtccctgaacacaggcagccgggctgtcactggctccctcgcacgcctgggccgctggcgggaggccagactgcccttctccaggttcctggatgaggtcactgtgcgg

SEQ ID NO: 651657 - DNA, 120 bp, Artificial Sequence
  ENSG00000183092_26 (sequence is synthesized)
gttctggaccctgggaccctggaggccttcagggtgcccagaggccgcagcccagagccctctgcagtggatcgaggccaaggtctagcccaggaggcccttacaagagctgcagcccca

SEQ ID NO: 651658 - DNA, 120 bp, Artificial Sequence
  ENSG00000183092_27 (sequence is synthesized)
ggggagaaggacccagccctgagctcccagctttcttcggaggcggccactgaggctgcaagcagagtggggccaggccaggccgtgggaactagtgggccttgcttgggcagtggcaag

SEQ ID NO: 651659 - DNA, 120 bp, Artificial Sequence
  ENSG00000183092_28 (sequence is synthesized)
gctgtttccagacgctggggactccctgacccatctcggcccttgccaggacaccttttcacccagggcaggggacagaggcctctgagccacaggcctccagcagtttcccccagattc

SEQ ID NO: 651660 - DNA, 120 bp, Artificial Sequence
  ENSG00000183092_29 (sequence is synthesized)
ccagtggcctggtggccccaccccacacagtgccacctcttgacattgtccactgtgtggagggtgctactatgtagaatgtggaccagcaacagccctgcccccgtgtctgggtgcacc

SEQ ID NO: 651661 - DNA, 120 bp, Artificial Sequence
  ENSG00000183092_30 (sequence is synthesized)
atccagttctgcagatgtggagacaggctgccgtggcagggctcgggttattgcccggtgtggggaacactggacagggaaggaggtactacccgggtgaccgcagaccctaggtacaca

SEQ ID NO: 651662 - DNA, 120 bp, Artificial Sequence
  ENSG00000183092_31 (sequence is synthesized)
gcctggactgggcagaggggacacgttcagaggtgtgagaagctgaacccccaggacttagtgacagggctgtgaggggtaaagaggggtcaccatgcccaccccccgggtggggaacgt

SEQ ID NO: 651663 - DNA, 120 bp, Artificial Sequence
  ENSG00000183092_32 (sequence is synthesized)
ggagggcagtgaaggtgtggtggatgtggctgcattggacgggttgggtgtggagatgcctgagggccataggtgggtggctggacgtggtgagggtatggagcctgacagacaccccgc

SEQ ID NO: 651664 - DNA, 120 bp, Artificial Sequence
  ENSG00000183092_33 (sequence is synthesized)
tggagtcagatggaaacctgggaggggtccctgtgcagctggcttggaggggatttggtctgagcatgcagggcaggggtgcaggtgcaaaccggggccccagggaacagcccgggcgag

SEQ ID NO: 651665 - DNA, 120 bp, Artificial Sequence
  ENSG00000183092_34 (sequence is synthesized)
gtcgggaggggcctgtggtgtgatcgccggaccagcagaggtggggaaagacgtggcaggaaccctggggcggccaagtgcggggcatcagctatgcctggggacggggtgcgtgtccat

SEQ ID NO: 651666 - DNA, 120 bp, Artificial Sequence
  ENSG00000183092_35 (sequence is synthesized)
ggcccgatgcctgcagcaagcggacactgaggcagagaggggtgtgagagtcaggggctgggggcactgctagcccaaagattggttgggtgtagcaggtggttgggtgtgaaggacttg

SEQ ID NO: 651667 - DNA, 120 bp, Artificial Sequence
  ENSG00000183092_36 (sequence is synthesized)
gggagggggagcagtatttaagggctggtggaacagggagttgactgctgtatctggaaggccatccaaaggccaggggtaaactgaggctctgtgaagctgcctgacttgtgagatgtc

SEQ ID NO: 651668 - DNA, 120 bp, Artificial Sequence
  ENSG00000183092_37 (sequence is synthesized)
tgccccgagcccaccccatagccccttcgtcctcccctcccacacctgccccgtggagaatccctgcctagctcattgtctgcctcccctctggaccgcaggctcccggggcaggggcag

SEQ ID NO: 651669 - DNA, 120 bp, Artificial Sequence
  ENSG00000183092_38 (sequence is synthesized)
ggtttgtcttactcctggctgtgaggtctcagacaggttgcttgctctgagaggtgagggtagggacctcagggtgcccagaaggggcagggctgggtgagggggcacagtgagctaggg

SEQ ID NO: 651670 - DNA, 120 bp, Artificial Sequence
  ENSG00000183092_39 (sequence is synthesized)
gtgcaggtctcagaatagcaaggacctaaggctgctcagtgaggcctggggtgtggctggagaaggggtgaggactcggggctgaggtggccacgtgggtggatggatgacgccctcacc

SEQ ID NO: 651671 - DNA, 120 bp, Artificial Sequence
  ENSG00000183092_40 (sequence is synthesized)
tcttcccgagggctgtgggtacaccaggagcccctgcagggaacagtcgacttcaggggctgctgtgcagcccattgtgcctgccctaggagcccaggatggcataggagtccccaggaa

SEQ ID NO: 651672 - DNA, 120 bp, Artificial Sequence
  ENSG00000183092_41 (sequence is synthesized)
gttcaccacctccctggggaggacaggtctgtgtgggaagcagcctgggacctgtagctatagagtgctagaagtggggcagccacggaaggctgcctggaggaggtggaaggaggcctg

SEQ ID NO: 651673 - DNA, 120 bp, Artificial Sequence
  ENSG00000183092_42 (sequence is synthesized)
agcactgtcccagagagcgctcccggaggcagacccacgtgggcagctgtggcactttgcctcagggcttccctctttgcttgttactctacttcctcttgtggtgactgactcttggga

SEQ ID NO: 651674 - DNA, 120 bp, Artificial Sequence
  ENSG00000183092_43 (sequence is synthesized)
agacccgccctgcccttctctgaggttctcaaaaacgtaagcgacgctttatttttatttgtttttaaaaatatagccctgggcaggaatccaagagtgcttcctggaggcttgctgggt

SEQ ID NO: 651675 - DNA, 120 bp, Artificial Sequence
  ENSG00000183092_44 (sequence is synthesized)
gtgtgcccgcagtgccacatgcggtttactcacggggcccagacagaagatgcctctgctcggggctgggggacagtggtggccccagggggactgggagcctcctgcctgccctctact

SEQ ID NO: 651676 - DNA, 120 bp, Artificial Sequence
  ENSG00000183092_45 (sequence is synthesized)
cccctcgcttgggtttgggtcgggaatatcacaagaacgcgggcttttgcccaaggtcccacagcacatctgggcagagtcagggttccaggccctctcccacacctcaagtttccttca

SEQ ID NO: 651677 - DNA, 120 bp, Artificial Sequence
  ENSG00000183092_46 (sequence is synthesized)
tgacacccgggacttctgcctgtcccgtccccatctcacagcaacacaatccaaaagatgttggtcccagatagcccctgggctgtgcacccattgcaaggaaagaactgctggctgctg

SEQ ID NO: 651678 - DNA, 120 bp, Artificial Sequence
  ENSG00000183092_47 (sequence is synthesized)
accccactctgacccagacaaccggaagtgcagcccctgccttggggagctccgagccatccctgttggaggcccccacactaccctcctgcctttgcacagctttagttcaggtgaatt

SEQ ID NO: 651679 - DNA, 120 bp, Artificial Sequence
  ENSG00000183092_48 (sequence is synthesized)
gttggcaggtggctcggaagagtgggtcatagtgggtctctgtttcctgagcatgtggggctctgcatcctggggtcctaccctccaggagaccccattctgggggaagaaaatagagcc

SEQ ID NO: 651680 - DNA, 120 bp, Artificial Sequence
  ENSG00000183092_49 (sequence is synthesized)
tcaagaattgtctgggtttctggaaggcttcctggaggaaggggaacttgagcaggccaggaccttgccaggtttcccgtgctgcatgcagcctcattggccatggtggcagacactgcc

SEQ ID NO: 651681 - DNA, 120 bp, Artificial Sequence
  ENSG00000183092_50 (sequence is synthesized)
cgggcatgggacattgccaccaaacatctctctggcccagagaagtgacccagggtcccagggccacacagccattttggggaaagcaggtctggtcttgggcatggcactgctgactct

SEQ ID NO: 651682 - DNA, 120 bp, Artificial Sequence
  ENSG00000183092_51 (sequence is synthesized)
gggcctcagccatcccaacctagcactgtggaggagcaggagtgagggccccagtcacctgtgccacccagggccagctctgtgatagcctgggtgctgatgggtgctctttgtacctgg

SEQ ID NO: 651683 - DNA, 120 bp, Artificial Sequence
  ENSG00000183092_52 (sequence is synthesized)
ctccagccaccacctgggatttacctgtgtgagggacactggtggagtctgaggaaccgcccaggccagactggctcagggtcagagtccctgactctggggcgccatggtcttcagtga

SEQ ID NO: 651684 - DNA, 85 bp, Artificial Sequence
  ENSG00000183092_53 (sequence is synthesized)
cggtactcgcgtgttagtgcggcacgccccggctggcctgcgggccttagtttcccccgctcagcgccgcggcccggcccgccgc

SEQ ID NO: 651685 - DNA, 120 bp, Artificial Sequence
  ENSG00000183092_54 (sequence is synthesized)
ccaggaggggaaagggccaggaaagacaggctccagtgccgtaggatccaggcatgcactgtccgtgtttattgagcgcctgctgtatgctgggacctagcatgagaagcgctgtcatgg

SEQ ID NO: 651686 - DNA, 120 bp, Artificial Sequence
  ENSG00000183092_55 (sequence is synthesized)
ccttcccatcttcagggggtcccggggtggagggggaaatacagtcctgggccctggcctaggaaaggcttctacaaaagtttgctttaatgggatgttctctgctgtgtgcagaggggc

SEQ ID NO: 651687 - DNA, 120 bp, Artificial Sequence
  ENSG00000183092_56 (sequence is synthesized)
ggcagtgacccccttgcctcctgcaccaggattcagagcaactacatggcactgcagaggatcaaccaggagctggaggacaagctgtaccgcatgggccagcactatgaggaggagaag

SEQ ID NO: 651688 - DNA, 80 bp, Artificial Sequence
  ENSG00000183092_57 (sequence is synthesized)
cctcggaggggagggggcggcggtagcggcggcggcggtgagcggcgcggctgccctggggccatgtggactggcggtcg

SEQ ID NO: 651689 - DNA, 120 bp, Artificial Sequence
  ENSG00000183092_58 (sequence is synthesized)
gctcccggcggacgcggcggcggcgcccggcgcgaggggccgggatgggcagtcatcagtcttcccaggcctctgccgcagacatggagaaactcagcgcgctgcaggagcagaagggcg

SEQ ID NO: 651690 - DNA, 120 bp, Artificial Sequence
  ENSG00000183092_59 (sequence is synthesized)
agtccagaggttctggtaggggaagctcttcctccaaagtcacactatggagcagctgagccaggatttgaacccagcagatctccagacccagactggtccacccggggcccagccatg

SEQ ID NO: 651691 - DNA, 120 bp, Artificial Sequence
  ENSG00000183092_60 (sequence is synthesized)
gttccctgggtcctgatgggaaaagctgtgtctagcccggagatgaaccagtttagggacccttcccttgagcgcgtacgggctaatgaagtgtcgatccagttgtgctggactccctca

SEQ ID NO: 651692 - DNA, 120 bp, Artificial Sequence
  ENSG00000183098_0 (sequence is synthesized)
cctttctccttccctcttgcctccagtgactgtctccaggatttctctcttcctatttcaggaggactctcacaggctcccacagcctgtgttaagctgaggtttcccctagatctcgta

SEQ ID NO: 651693 - DNA, 120 bp, Artificial Sequence
  ENSG00000183098_1 (sequence is synthesized)
tatccccaacacatacctccacgcacacacatccccaagaacctcgagctcacaccaacagacacacgcgcgcatacacactcgctctcgcttgtccatctccctcccgggggagccggc

SEQ ID NO: 651694 - DNA, 120 bp, Artificial Sequence
  ENSG00000183098_2 (sequence is synthesized)
gcgcgctcccacctttgccgcacactccggcgagccgagcccgcagcgctccaggattctgcggctcggaactcggattgcagctctgaacccccatggtggttttttaaacacttcttt

SEQ ID NO: 651695 - DNA, 120 bp, Artificial Sequence
  ENSG00000183098_3 (sequence is synthesized)
tccttctcttcctcgttttgattgcaccgtttccatctgggggctagaggagcaaggcagcagccttcccagccagcccttgttggcttgccatcgtccatctggcttataaaagtttgc

SEQ ID NO: 651696 - DNA, 120 bp, Artificial Sequence
  ENSG00000183098_4 (sequence is synthesized)
tgagcgcagtccagagggctgcgctgctcgtcccctcggctggcagaagggggtgacgctgggcagcggcgaggagcgcgccgctgcctctggcgggctttcggcttgaggggcaaggtg

SEQ ID NO: 651697 - DNA, 120 bp, Artificial Sequence
  ENSG00000183098_5 (sequence is synthesized)
aagagcgcaccggccgtggggtttaccgagctggatttgtatgttgcaccatgccttcttggatcggggctgtgattcttcccctcttggggctgctgctctccctccccgccggggcgg

SEQ ID NO: 651698 - DNA, 120 bp, Artificial Sequence
  ENSG00000183098_6 (sequence is synthesized)
atgtgaaggctcggagctgcggagaggtccgccaggcgtacggtgccaagggattcagcctggcggacatcccctaccaggagatcgcaggggaacacttaagaatctgtcctcaggaat

SEQ ID NO: 651699 - DNA, 120 bp, Artificial Sequence
  ENSG00000183098_7 (sequence is synthesized)
atacatgctgcaccacagaaatggaagacaagttaagccaacaaagcaaactcgaatttgaaaaccttgtggaagagacaagccattttgtgcgcaccacttttgtgtccaggcataaga

SEQ ID NO: 651700 - DNA, 120 bp, Artificial Sequence
  ENSG00000183098_8 (sequence is synthesized)
aatttgacgaatttttccgagagctcctggagaatgcagaaaagtcactaaatgatatgtttgtacggacctatggcatgctgtacatgcagaattcagaagtcttccaggacctcttca

SEQ ID NO: 651701 - DNA, 120 bp, Artificial Sequence
  ENSG00000183098_9 (sequence is synthesized)
cagagctgaaaaggtactacactgggggtaatgtgaatctggaggaaatgctcaatgacttttgggctcggctcctggaacggatgtttcagctgataaaccctcagtatcacttcagtg

SEQ ID NO: 651702 - DNA, 120 bp, Artificial Sequence
  ENSG00000183098_10 (sequence is synthesized)
aagactacctggaatgtgtgagcaaatacactgaccagctcaagccatttggagacgtgccccggaaactgaagattcaggttacccgcgccttcattgctgccaggacctttgtccagg

SEQ ID NO: 651703 - DNA, 120 bp, Artificial Sequence
  ENSG00000183098_11 (sequence is synthesized)
ggctgactgtgggcagagaagttgcaaaccgagtttccaaggtcagcccaaccccagggtgtatccgtgccctcatgaagatgctgtactgcccatactgtcgggggcttcccactgtga

SEQ ID NO: 651704 - DNA, 120 bp, Artificial Sequence
  ENSG00000183098_12 (sequence is synthesized)
ggccctgcaacaactactgtctcaacgtcatgaagggctgcttggcaaatcaggctgacctcgacacagagtggaatctgtttatagatgcaatgctcttggtggcagagcgactggagg

SEQ ID NO: 651705 - DNA, 120 bp, Artificial Sequence
  ENSG00000183098_13 (sequence is synthesized)
ggccattcaacattgagtcggtcatggacccgatagatgtcaagatttctgaagccattatgaacatgcaagaaaacagcatgcaggtgtctgcaaaggtctttcagggatgtggtcagc

SEQ ID NO: 651706 - DNA, 120 bp, Artificial Sequence
  ENSG00000183098_14 (sequence is synthesized)
ccaaacctgctccagccctcagatctgcccgctcagctcctgaaaattttaatacacgtttcaggccctacaatcctgaggaaagaccaacaactgctgcaggcacaagcttggaccggc

SEQ ID NO: 651707 - DNA, 120 bp, Artificial Sequence
  ENSG00000183098_15 (sequence is synthesized)
tggtcacagacataaaagagaaattgaagctctctaaaaaggtctggtcagcattaccctacactatctgcaaggacgagagcgtgacagcgggcacgtccaacgaggaggaatgctgga

SEQ ID NO: 651708 - DNA, 120 bp, Artificial Sequence
  ENSG00000183098_16 (sequence is synthesized)
acgggcacagcaaagccagatacttgcctgagatcatgaatgatgggctcaccaaccagatcaacaatcccgaggtggatgtggacatcactcggcctgacactttcatcagacagcaga

SEQ ID NO: 651709 - DNA, 120 bp, Artificial Sequence
  ENSG00000183098_17 (sequence is synthesized)
ttatggctctccgtgtgatgaccaacaaactaaaaaacgcctacaatggcaatgatgtcaatttccaggacacaagtgatgaatccagtggctcagggagtggcagtgggtgcatggatg

SEQ ID NO: 651710 - DNA, 120 bp, Artificial Sequence
  ENSG00000183098_18 (sequence is synthesized)
acgtgtgtcccacggagtttgagtttgtcaccacagaggcccccgcagtggatcccgaccggagagaggtggactcttctgcagcccagcgtggccactccctgctctcctggtctctca

SEQ ID NO: 651711 - DNA, 120 bp, Artificial Sequence
  ENSG00000183098_19 (sequence is synthesized)
cctgcattgtcctggcactgcagagactgtgcagataatcttgggtttttggtcagatgaaactgcattttagctatctgaatggccaactcacttcttttcttacactcttggacaatg

SEQ ID NO: 651712 - DNA, 120 bp, Artificial Sequence
  ENSG00000183098_20 (sequence is synthesized)
gaccatgccacaaaaacttaccgttttctatgagaagagagcagtaatgcaatctgcctccctttttgttttcccaaagagtaccgggtgccagactgaactgcttcctctttccttcag

SEQ ID NO: 651713 - DNA, 120 bp, Artificial Sequence
  ENSG00000183098_21 (sequence is synthesized)
ctatctgtggggaccttgtttattctagagagaattcttactcaaatttttcgtaccaggagattttcttaccttcatttgcttttatgctgcagaagtaaaggaatctcacgttgtgag

SEQ ID NO: 651714 - DNA, 120 bp, Artificial Sequence
  ENSG00000183098_22 (sequence is synthesized)
ggttttttttttctcatttaaaataaaaaaggaagaaagaaaataattttccttgtaaaatcgggccaaaccccaagacagctacattttcaacaaaaaagcaaacagagaaaaataaat

SEQ ID NO: 651715 - DNA, 120 bp, Artificial Sequence
  ENSG00000183098_23 (sequence is synthesized)
gaactttaacactgtaagttcagcattgacagccaacttccagtgtaagcttttttgtgacaaatccgggtttaaaaatgcttatggggagaaagcttaaagtttgttctaaatgtagtg

SEQ ID NO: 651716 - DNA, 120 bp, Artificial Sequence
  ENSG00000183098_24 (sequence is synthesized)
aaaatgcactgttgtcttggaggtatcatcttgcactctaaccaaacaacaccaaattaatctggaggtactgatactaaatttggaatcccgtctttaatatgagaacacaaattacta

SEQ ID NO: 651717 - DNA, 120 bp, Artificial Sequence
  ENSG00000183098_25 (sequence is synthesized)
caactcagtacctctgtcttactctgcccaatttcaatttagtaatggcaccattattcttaattcccttaatgtctgtccgctgtatccaattggcacagattttccccttcatcttca

SEQ ID NO: 651718 - DNA, 120 bp, Artificial Sequence
  ENSG00000183098_26 (sequence is synthesized)
attactagtagctacccccatcaattcaccttcctcaagagtctcaattgaaaataatctttgatgatacaatctctgcttttgccacaggtttgacattaactagacgtttctgcccct

SEQ ID NO: 651719 - DNA, 120 bp, Artificial Sequence
  ENSG00000183098_27 (sequence is synthesized)
gtgctcattaccctcccaaaacaatagtttttttaatgaattgaaacacaattagatccattcctgagttttcatttttaactatttactttgtgtcagttggtttctgcatcacaaggg

SEQ ID NO: 651720 - DNA, 120 bp, Artificial Sequence
  ENSG00000183098_28 (sequence is synthesized)
cattctcttacaaaacaactcacaacagaaaaaaaaagtcaagacaaaaaatatatatatatagtattgacatggagatttctttcacttttttagtcttagtatgatcatctattttta

SEQ ID NO: 651721 - DNA, 120 bp, Artificial Sequence
  ENSG00000183098_29 (sequence is synthesized)
ccaagctcagggttgacacacctttgtaagaaaatgttttgtcaaccagctcttcttgttttgtgctgctcaaagaagggattcctcagtgatcggtgagcaccaagaatcaagaaagag

SEQ ID NO: 651722 - DNA, 120 bp, Artificial Sequence
  ENSG00000183098_30 (sequence is synthesized)
aactttttatgtatctaactgtccatttattaaaaatttgccagggcacacccttctgcatgagtgtgcttcagcctgggtgctccagactacaccaaactcatgggatgagccattggt

SEQ ID NO: 651723 - DNA, 120 bp, Artificial Sequence
  ENSG00000183098_31 (sequence is synthesized)
gtgcagggctttaccggtgatggaaactgtatgtgtaaagaatgttattcatgaaaaaccattgctttcatgtaaaacaccttcggcctaggattcctgcctggcacttggatacattac

SEQ ID NO: 651724 - DNA, 120 bp, Artificial Sequence
  ENSG00000183098_32 (sequence is synthesized)
ctaactcaataggccagtttagagccacagcctaacctgttcaccaagtaggccaaagccaggcctttcgctccccctgacagagagaagcaaaataaacccaactgggggctttatgaa

SEQ ID NO: 651725 - DNA, 120 bp, Artificial Sequence
  ENSG00000183098_33 (sequence is synthesized)
tacagttggctatccatatgtttcttagtttttatgatgcatctggagtagggaaaagtaatgtttcaagacaccatagtaggccagttacattttaattaactcatcgacagtattgac

SEQ ID NO: 651726 - DNA, 120 bp, Artificial Sequence
  ENSG00000183098_34 (sequence is synthesized)
acgtaaatggtatttttcaatctgttctcatcaaaattaaaattagttattgatttagtcatcacatttaagtagaacacatgtggcacaatagtattaagtatatttgagcacttttgc

SEQ ID NO: 651727 - DNA, 120 bp, Artificial Sequence
  ENSG00000183098_35 (sequence is synthesized)
aagacagaaagtatttacaagcatctattgctactttatgcctaatgaaatataaaatgtaggatgatgagagactttgtggcattctttcatttaaacctttatgaaattaaccatcta

SEQ ID NO: 651728 - DNA, 120 bp, Artificial Sequence
  ENSG00000183098_36 (sequence is synthesized)
gttcatcattacatactcctagaaaaccatccatttcactgcccacattttggcttcctaccacaaattccacataagacttctctatgaaggaccagtcatttacattgctcatttcat

SEQ ID NO: 651729 - DNA, 120 bp, Artificial Sequence
  ENSG00000183098_37 (sequence is synthesized)
tctgtgttcagaagtcagtattgtctttctccaataattaaggtgcaatacaaattaaatcaaccttgattttccagactatttgaataataacttgcttttatggctttaaactccagg

SEQ ID NO: 651730 - DNA, 120 bp, Artificial Sequence
  ENSG00000183098_38 (sequence is synthesized)
tctttcctttttaaaatatttctgcattctcttttatgaactagatcaggatgccttgtttttcctgtgctttcacccccaaaaggttttgtgcatgtgtatgaatacacataatattag

SEQ ID NO: 651731 - DNA, 120 bp, Artificial Sequence
  ENSG00000183098_39 (sequence is synthesized)
tgaatgtgaacccatgttctatacgcactaaacacacagttaatatataaacgcctgcttcatttgtttcaacaccttcattatcaatatgattcatattgatgagatatagtgatgcat

SEQ ID NO: 651732 - DNA, 120 bp, Artificial Sequence
  ENSG00000183098_40 (sequence is synthesized)
aatgagccaggcagagagctgaaatgatatcagttaatgatgtcacagtgttagcaccctgcatggatgtggtcaaaatatcattcaagttgtacttcctagtttttatcatcatactac

SEQ ID NO: 651733 - DNA, 120 bp, Artificial Sequence
  ENSG00000183098_41 (sequence is synthesized)
tatgtcatatgattttcagactaatttaacatgagaaatgttttggccctaaaggatttcacttaacctagttaccctatttcagtaagtattttggaattcaaccctcgaattattttt

SEQ ID NO: 651734 - DNA, 120 bp, Artificial Sequence
  ENSG00000183098_42 (sequence is synthesized)
tctcatttcagcatagtgataggggatgcaatgaggcttcattattttttatgacctgcccctcatttgctctgatgttccctaaattctgtaatcatatcataacttttgttatgaata

SEQ ID NO: 651735 - DNA, 120 bp, Artificial Sequence
  ENSG00000183098_43 (sequence is synthesized)
gagaggaatgggctcactgaaacctgacactagaaattggtgggtgatgctcataactgcaaacacttagcttattgaagtgcctctatttacatgttctttagttataatatgtatttt

SEQ ID NO: 651736 - DNA, 120 bp, Artificial Sequence
  ENSG00000183098_44 (sequence is synthesized)
tctaacagaaatacacgtctgtaattggtatatattatactttgtatgtgtcacaacaaaagctaaacagaggctaaagtctttagcagagaagaatgaattacaaatttaccaataaga

SEQ ID NO: 651737 - DNA, 120 bp, Artificial Sequence
  ENSG00000183098_45 (sequence is synthesized)
gctctgtttatggttctgtattgaaggacaaccatgacaaccttctgtcattttcacgaaggccaagttggtactttgattatagccatcgtagaacattagcactagaaatctgtctcc

SEQ ID NO: 651738 - DNA, 120 bp, Artificial Sequence
  ENSG00000183098_46 (sequence is synthesized)
cttacaatgacttacctagctagcatcaagtaacttgtatcacctgctttaaatgtaagggatagaaaatactattttgtctacactgaaaaacattattattcattgataagtagtaat

SEQ ID NO: 651739 - DNA, 120 bp, Artificial Sequence
  ENSG00000183098_47 (sequence is synthesized)
aattataaaagtaacattctttaaagcaaacacattgaaaatattattacaggcagaaccctgatttttaatttatattccctgctgcagacattagccttctttaattcttttgccatt

SEQ ID NO: 651740 - DNA, 120 bp, Artificial Sequence
  ENSG00000183098_48 (sequence is synthesized)
acatacatgtttcggctacagactgaacacgaactaaagtccctaaggaggaaaaaaccttaacatattcctgagatgtgattcttttattacttctttttgcaaagctaattatcaaat

SEQ ID NO: 651741 - DNA, 120 bp, Artificial Sequence
  ENSG00000183098_49 (sequence is synthesized)
gatttgattaaacctagacgcattaggaaatgcaagttttacctaaaacttgcagaaatttaaacacatttccatttacttactaacgaacagacctgatttttatttaaaaacacaatt

SEQ ID NO: 651742 - DNA, 120 bp, Artificial Sequence
  ENSG00000183098_50 (sequence is synthesized)
tagctttgccaacagaagagtaaaggaaaccataacttataaatttgtaatgtgttcctccttgttggagacattagccagtgtttagttttagaccaacttatacaaagagagtattga

SEQ ID NO: 651743 - DNA, 120 bp, Artificial Sequence
  ENSG00000183098_51 (sequence is synthesized)
tttgtacacattctggagacttgctatatcatggtttgctatggcacagactcagcttagcatggggacattttgaacttcattcaaagttgagtagttactggaacctttgacattgcc

SEQ ID NO: 651744 - DNA, 120 bp, Artificial Sequence
  ENSG00000183098_52 (sequence is synthesized)
ttgtaatgaggtacttccaaaaaaagacccctaacaatggcataatagtgaggtctctctgtgcatatacataatatatatgcaggataaatgtgtgcaccaatcaaatctaaaatttta

SEQ ID NO: 651745 - DNA, 120 bp, Artificial Sequence
  ENSG00000183098_53 (sequence is synthesized)
tgtgactgtcaaatgaatattatttgggttaagatttttcatttctgatttggatagaaaattgctattaatcttgtattaaaatagtttttaaaaatctaccagtgccctttctgcatt

SEQ ID NO: 651746 - DNA, 120 bp, Artificial Sequence
  ENSG00000183098_54 (sequence is synthesized)
ttcttaattattgtcatagtctaaatttcagagccatggaattttttgtgtttgagacatttttagaagcttcaatattaaaaaacaacaacaaacctcgtatattaaaacagtgccact

SEQ ID NO: 651747 - DNA, 120 bp, Artificial Sequence
  ENSG00000183098_55 (sequence is synthesized)
ctcctaagtacactcagcatctgaaatcaggaactatttgaactttagaacatttagagcttcccaaatgtgtatggaaaatactgtagcgctgttcttttgtactgatttcttctcaga

SEQ ID NO: 651748 - DNA, 120 bp, Artificial Sequence
  ENSG00000183098_56 (sequence is synthesized)
ggataaatttagtgacttgaaaactgatgtcaatactttataaatgaggtcagaaaataagatcaaatgtgaaaagactaataatttcccaatttagccaattgcattgatttttatact

SEQ ID NO: 651749 - DNA, 120 bp, Artificial Sequence
  ENSG00000183098_57 (sequence is synthesized)
tctgaaatgtttccatcctctcaggcatgctaaatattgtataacctgctaaagatttatttcacaaatgcttattgaactcttattctctataaaccctgctctaggggatttatcact

SEQ ID NO: 651750 - DNA, 120 bp, Artificial Sequence
  ENSG00000183098_58 (sequence is synthesized)
ggctgtgaaaaaccaccagttgaaaattattcattccttaatgcagctaatcataattattacagataaataatgtatttcaagaatgatcttataaataaaggaacccatacaaacaaa

SEQ ID NO: 651751 - DNA, 120 bp, Artificial Sequence
  ENSG00000183111_0 (sequence is synthesized)
ggagctgggcgacgcgcccctcctgccccggctgcgctgttgcccgggcggccgacctccgtgcgtgagcgccggcaggcaccttgcgcgcgcggaacctgctgacatggccaagcatgg

SEQ ID NO: 651752 - DNA, 120 bp, Artificial Sequence
  ENSG00000183111_1 (sequence is synthesized)
cgcgcggaacctgctgacatggccaagcatggagccgacgagccatcctccaggtcagggagtccggacagggaaggtagggcctctgaggacagatcgctgcttcatcagaggctggct

SEQ ID NO: 651753 - DNA, 120 bp, Artificial Sequence
  ENSG00000183111_2 (sequence is synthesized)
gtccgggagctcatcgacactgaggtctcctacttgcacatgctccagctctgtgcctctgacatcaggagccgcctccagcagttgccgcagggagatctggatgtcctgttctcaaac

SEQ ID NO: 651754 - DNA, 120 bp, Artificial Sequence
  ENSG00000183111_3 (sequence is synthesized)
attgatgatatcatcaaagtgaacagcagattcctccatgatctgcaggagacagcctccaaggaagaggaacaagtgcagctagttggtaacatatttctggaattccaagaggagttg

SEQ ID NO: 651755 - DNA, 120 bp, Artificial Sequence
  ENSG00000183111_4 (sequence is synthesized)
gagcaagtctataaggtctactgtgccagctacgaccaggccttgctactggtggacacgtaccggaaggagccggagctgcagcggcacatccagggcatcgttgaggcggtggtgccg

SEQ ID NO: 651756 - DNA, 120 bp, Artificial Sequence
  ENSG00000183111_5 (sequence is synthesized)
caagctggatcttcaggcctcagtttcttgctggtaattcctctgcagaggatcaccaggtacccactgctgctgcagaaaatcctggagaacacagtccctgatgccagtgcctatcct

SEQ ID NO: 651757 - DNA, 120 bp, Artificial Sequence
  ENSG00000183111_6 (sequence is synthesized)
gtccttcagagggctgtctctgccctccaggacgtgaacaccaatatcaatgagtacaagatgcgcaaggaagtggcctccaagtacaccaaggtagagcagctgaccctccgggagcgg

SEQ ID NO: 651758 - DNA, 120 bp, Artificial Sequence
  ENSG00000183111_7 (sequence is synthesized)
ctggcccgcatcaacacacacaccctctccaagaagaccacccggctgagccagctgctgaagcaggaggcggggctgatccccaggacagaagacaaggaatttgatgatttagaagag

SEQ ID NO: 651759 - DNA, 120 bp, Artificial Sequence
  ENSG00000183111_8 (sequence is synthesized)
aggttccagtgggtgtctctgtgtgtgactgagctgaagaacaacgtggctgcttacctggacaatctgcaggctttcctctacttcaggccgcacgaatacaatctggacatccccgag

SEQ ID NO: 651760 - DNA, 120 bp, Artificial Sequence
  ENSG00000183111_9 (sequence is synthesized)
gggcctgcagtgcagtattgcaatttggcaagagaccttcaccttgaggccttcctgaaatttaagcaacggctagaaggcctggtgtggcagccactgtgcagcctggccaaagccctg

SEQ ID NO: 651761 - DNA, 120 bp, Artificial Sequence
  ENSG00000183111_10 (sequence is synthesized)
cttggccctcagaacctgatcaagaagcgtctggacaagctactggactttgagcgggtggaagagaagctgctggaggtgggcagtgtgacctaccaggaggaggccgcccggcacaca

SEQ ID NO: 651762 - DNA, 120 bp, Artificial Sequence
  ENSG00000183111_11 (sequence is synthesized)
taccaggcactcaactcgctgctagtggctgagctcccacagtttaaccagctggtcatgcagtggctgggccagatcatgtgcacattcgtgaccctccagagggaccttgcaaagcaa

SEQ ID NO: 651763 - DNA, 120 bp, Artificial Sequence
  ENSG00000183111_12 (sequence is synthesized)
gtgctgcagagggcagagggaagcatggcccagctgccccaccaccacgtcccagagcctgccttcaggaagctggtggaggacgcactgggccggacgagtaaccagcttcgctccttt

SEQ ID NO: 651764 - DNA, 120 bp, Artificial Sequence
  ENSG00000183111_13 (sequence is synthesized)
caagagacctttgagaaagtgcagccacctcccaccacacaaccgctccttccagggtctgaacgccaggtgcaggctctcctgagcaggtatggccctgggaagctgtaccaggtgaca

SEQ ID NO: 651765 - DNA, 120 bp, Artificial Sequence
  ENSG00000183111_14 (sequence is synthesized)
agcaacatcagtgggactgggactctggacctgactctgcctcggggccaaatcgtggccatccttcaaaacaaggacaccaaaggcaacagcggccgctggctggtggacaccggggga

SEQ ID NO: 651766 - DNA, 120 bp, Artificial Sequence
  ENSG00000183111_15 (sequence is synthesized)
catcgtgggtatgtgccggctgggaaactacagctgtaccatgtggtccccagtgcagaggagctcagaaggcaggcggggctgaacaaagacccccgatgtctaacaccggagcccagc

SEQ ID NO: 651767 - DNA, 120 bp, Artificial Sequence
  ENSG00000183111_16 (sequence is synthesized)
ccagctctagtgccctctattcccaccatgaaccaggtcatagccgcgtacccttttgtggccagaagcagccatgaagtgagcctgcaggcaggccagcctgtgaccatcctggaggcc

SEQ ID NO: 651768 - DNA, 120 bp, Artificial Sequence
  ENSG00000183111_17 (sequence is synthesized)
caggacaagaaggggaaccctgagtggagcctggtggaagtgaatggacagaggggttatgtgccttctggcttcttggccagggctcggagcccagttctgtggggctggagtctgccc

SEQ ID NO: 651769 - DNA, 120 bp, Artificial Sequence
  ENSG00000183111_18 (sequence is synthesized)
tcttagggtaccctctttggagcctacattgccaaatgatgggggaggcttagaggctctgaccctggggggaaaagaagcaaaggaaaggtggaggtggaagggaagaccaggccaggg

SEQ ID NO: 651770 - DNA, 120 bp, Artificial Sequence
  ENSG00000183111_19 (sequence is synthesized)
tgggtgaagcacactcaggaggcagccagaagacatgggcgggcctcgcagagtgcttggtgtggtgggggcacaggaggctccagccaggactgctcattatgtctgcataaagaactc

SEQ ID NO: 651771 - DNA, 120 bp, Artificial Sequence
  ENSG00000183111_20 (sequence is synthesized)
acttggacagcaggtcacagctgattggccaggactctccataggttatggccagtcttagctgtgcctgcatccgggcctgcctgtgggcgtgggtcacacgggataatgttacctgcg

SEQ ID NO: 651772 - DNA, 120 bp, Artificial Sequence
  ENSG00000183111_21 (sequence is synthesized)
tgctgtgtggttgcaggaagcgggttctggaggagtccagaactgcctggtcagacagttcacttcctacacatggtatcaggagacatcataaccaatgagtcagcttttatttctcta

SEQ ID NO: 651773 - DNA, 120 bp, Artificial Sequence
  ENSG00000183111_22 (sequence is synthesized)
tgctggaagctgagtttatcttgggcagtgacccactgggagccctctcaagtggggaagccatggatttatcggtgtagcagagaggttcccaagactcttgactggtcctgggagtgg

SEQ ID NO: 651774 - DNA, 120 bp, Artificial Sequence
  ENSG00000183111_23 (sequence is synthesized)
gtgtgaccaagtcatagttctggaatgtgtgtaggcaaattcagaggctgttccagggaagaggggattttgatactgtgttaggtggggtgtgtgaggctgttggcagcaggtgaacag

SEQ ID NO: 651775 - DNA, 120 bp, Artificial Sequence
  ENSG00000183111_24 (sequence is synthesized)
ctactgctgtgttctcaggactagggaacaaaggggtatgcaaatcatagaggaaactctgggaaggcggtgataaggcctggtgggtggggaggttagggaatggcttgctttcctgtt

SEQ ID NO: 651776 - DNA, 120 bp, Artificial Sequence
  ENSG00000183111_25 (sequence is synthesized)
tctggttagaaggggagccagggggaacccccagtggtttcaggtggcccctgaggtcctggaggcagccgtggatgtgatgcaattggctgtgggaccttagatgtaggacacaacttc

SEQ ID NO: 651777 - DNA, 120 bp, Artificial Sequence
  ENSG00000183111_26 (sequence is synthesized)
agtgttcccatccagaaagacctcactcacagggttgtgctgagaatgacgtggggctaagcatgcagagctccctgtaaactgtgaagtgtgatacaaatgtaaatgacagcagtgatc

SEQ ID NO: 651778 - DNA, 120 bp, Artificial Sequence
  ENSG00000183111_27 (sequence is synthesized)
tcggggtggcccccggcatgctgccctcccccacgcccatgcctgtggcagcaaaccttgttcatcagtatagctttctttcctgtaacccaggatctaccttggggggcttctcaatac

SEQ ID NO: 651779 - DNA, 120 bp, Artificial Sequence
  ENSG00000183111_28 (sequence is synthesized)
tgcattctatgtagccagcctctttaacttggtaagtgagccaccccattctagaacctggaaattggagcccctcaaaaacagttcctgttcaaggaggactgacctgctggggcaatg

SEQ ID NO: 651780 - DNA, 120 bp, Artificial Sequence
  ENSG00000183111_29 (sequence is synthesized)
ttgggtgcagtgcagtccctgcttggggtggtcatgtctaggctgttgctctgggcaaagataagttgcaagattcacagaaatgggaaaatgtgaccaagtgtgatcttaacaactgac

SEQ ID NO: 651781 - DNA, 120 bp, Artificial Sequence
  ENSG00000183111_30 (sequence is synthesized)
aaagtttgtaaccaacccaagttagaatgtgtgtcaaacaggaggtagtttagatatgcttccaagaacatgtctgtgttataaccatagtgcctaagcagtgagctctggtttttgaag

SEQ ID NO: 651782 - DNA, 120 bp, Artificial Sequence
  ENSG00000183111_31 (sequence is synthesized)
ggcttttaagaaatatatacatgtctgtgtcagtctataacttgcctcctctgggcctgttaaagcatgaagactgcatgacacaagagaaatgcaagccctacggttcctttctcagca

SEQ ID NO: 651783 - DNA, 120 bp, Artificial Sequence
  ENSG00000183111_32 (sequence is synthesized)
gcgaattcacttgagaggatgctcttgactcattctctctgctctttcctgctcagatttctgataaaaatagagagcataggggaacagataatgaaataggaaacccactcgtgggtt

SEQ ID NO: 651784 - DNA, 120 bp, Artificial Sequence
  ENSG00000183111_33 (sequence is synthesized)
ccacagatacctaccgaaggcctactgtgtgctagaattgtagctcaggagttctcagtgtagctgctcactgaagttaccatggcaggtttcaactggcagaatccaggctccgtccca

SEQ ID NO: 651785 - DNA, 120 bp, Artificial Sequence
  ENSG00000183111_34 (sequence is synthesized)
cccagagattctgatgaaattggtttagggtgtggctcgggcctcaggaattcagaaagcttcccaggtgcttccaatgtgcagccagggttagggacctctaccctagacacaaagtat

SEQ ID NO: 651786 - DNA, 120 bp, Artificial Sequence
  ENSG00000183111_35 (sequence is synthesized)
tggacagatagacctggtgccagagatggccatgagctgtaagctaggacgtgccccacctgagctctgcactagctagttcaaacaggcgctttaaaggcagtgtgaaaggggacagcc

SEQ ID NO: 651787 - DNA, 120 bp, Artificial Sequence
  ENSG00000183111_36 (sequence is synthesized)
tgttctgccaggtctcagaatgtatatttattaagtgccattaaaagggacctgaacaaaattggatgtcttgtaggcataagggaggaaaataaaatatacttggaaccaagtctatgt

SEQ ID NO: 651788 - DNA, 120 bp, Artificial Sequence
  ENSG00000183111_37 (sequence is synthesized)
catgaagggaaaataaaaatgtattcagtagcacgtgggttatggtttctcatagaccaggggataagattaaaagtcactgaagagtgggaaaatgcatgttgagaagatgagaatggc

SEQ ID NO: 651789 - DNA, 120 bp, Artificial Sequence
  ENSG00000183111_38 (sequence is synthesized)
ctgtattttctccaggggaatctgtgtaatgtgccttttccctctccaaatgcctagaaccatggcactgtgtcttatttatttaaccgttgggctgtctcatactaaacttgcaaagat

SEQ ID NO: 651790 - DNA, 120 bp, Artificial Sequence
  ENSG00000183111_39 (sequence is synthesized)
atttgcctatgaactgaacaagacttccaggagttgaagtctggttcacaagggtaccccttgcctcctgtgatggagtgagaactcttaaacccctcaggccccaactcagttgtggag

SEQ ID NO: 651791 - DNA, 120 bp, Artificial Sequence
  ENSG00000183111_40 (sequence is synthesized)
atgaggacaagattacaatatcaaaagaaagatgaatgaattcttggttaatatgacgaaccccagctcaatgagtaactgatgtgaactgctgggaataaaggacttcaaagatggaaa

SEQ ID NO: 651792 - DNA, 120 bp, Artificial Sequence
  ENSG00000183111_41 (sequence is synthesized)
gttgtagcagagcctagctaattacccttcataattagaattgtcctatctactacggagtgttatagaccctctttccacaggaggggaagaaagaaagaagccggaatccccctgcca

SEQ ID NO: 651793 - DNA, 120 bp, Artificial Sequence
  ENSG00000183111_42 (sequence is synthesized)
tgctaagagccagccatctgctagtgagggccctgttgccctgatcagggtgggcccttcagtggcagagttaggatcaggcccagtactcctggctgtcaaaatgtgagcaaatgttgg

SEQ ID NO: 651794 - DNA, 120 bp, Artificial Sequence
  ENSG00000183114_0 (sequence is synthesized)
ggtctgccccactaagcagccgccagcggctccggcgacccaaattgcggcggcagggaccgcggaaatcccaccgtttgggcttggtggacgtccagcccacctcacccccagccccgg

SEQ ID NO: 651795 - DNA, 120 bp, Artificial Sequence
  ENSG00000183114_1 (sequence is synthesized)
cccctcctcgcttcccagacggctggagacactcccgggaaaagcggtcctcagccactcggccgccgtccgcacctcggctgctggcccggctgggcaccgggcatctgcgaagctagc

SEQ ID NO: 651796 - DNA, 120 bp, Artificial Sequence
  ENSG00000183114_2 (sequence is synthesized)
cctgcctggcactgggcatctccaggcaacgactgtccccggccctgcccagcttctcgcgactccagggcggtggacttctgcgcgccttccctcccccggtctcccgacaggacgccg

SEQ ID NO: 651797 - DNA, 120 bp, Artificial Sequence
  ENSG00000183114_3 (sequence is synthesized)
gtgagctccctgcgcccccagcccctttcgccgccgccgcgatgctgccctggagacgtaacaaattcgtgctggtggaggacgaggccaagtgcaaggcgaagagcctgagtccggggc

SEQ ID NO: 651798 - DNA, 120 bp, Artificial Sequence
  ENSG00000183114_4 (sequence is synthesized)
tcgcctacacgtcgctgctctccagcttcctgcgctcctgcccggacctgctgcccgactggccgctggagcgcttgggccgtgtgttccgcagccggcgccagaaagtggagctcaaca

SEQ ID NO: 651799 - DNA, 120 bp, Artificial Sequence
  ENSG00000183114_5 (sequence is synthesized)
aggaggacccgacctacaccgtgtggtacctgggcaacgccgtcaccctgcacgccaagggcgacggctgcaccgacgacgccgtgggcaagatctgggctcgctgcgggcctggcgggg

SEQ ID NO: 651800 - DNA, 120 bp, Artificial Sequence
  ENSG00000183114_6 (sequence is synthesized)
gcactaagatgaagctgacgctggggccgcacggcatccgcatgcagccgtgcgagcgcagcgccgccgggggttcggggggccgcaggccggcgcacgcctacctgctgccgcgcatca

SEQ ID NO: 651801 - DNA, 120 bp, Artificial Sequence
  ENSG00000183114_7 (sequence is synthesized)
cctactgcacggcggacgggcgccacccgcgcgtcttcgcctgggtctaccgccaccaggcgcgccacaaggccgtggtgctgcgctgccacgctgtgctgctggcgcgggcgcacaagg

SEQ ID NO: 651802 - DNA, 120 bp, Artificial Sequence
  ENSG00000183114_8 (sequence is synthesized)
cgcgcgccctggcccgcctgctccgccagaccgcgctggcggccttcagcgacttcaagcgcctgcagcgccagagcgacgcgcgccacgtgcgccagcagcatctccgcgctgggggcg

SEQ ID NO: 651803 - DNA, 120 bp, Artificial Sequence
  ENSG00000183114_9 (sequence is synthesized)
tcggtgccccgcgccccactgcgccgcctgctcaatgccaagtgcgcctaccggccgccgccgagcgagcgcagccgcggggcgccgcgcctcagcagcatccaggaggaggacgaggag

SEQ ID NO: 651804 - DNA, 120 bp, Artificial Sequence
  ENSG00000183114_10 (sequence is synthesized)
gaggaggaggacgacgcggaggagcaagagggaggagtcccccagcgcgagcggccggaggtgctcagcctggcccgggagctgaggacgtgcagcctgcggggcgccccggcgcccccg

SEQ ID NO: 651805 - DNA, 120 bp, Artificial Sequence
  ENSG00000183114_11 (sequence is synthesized)
ccccagggagcgggcgggccaggcgcgctgagagccgaaggacaggactcgcagccccaggcccgacccgccagactcacagcctccaaccccggccctgcccgcttcggctgccccggc

SEQ ID NO: 651806 - DNA, 120 bp, Artificial Sequence
  ENSG00000183114_12 (sequence is synthesized)
cgtgtctcccccgtggtctccgtgttgtccgccccgccgcctcattttggctcagggtgatgcctgatacgcccttggttattggggggtgttcctctctccccacacccggagtttccc

SEQ ID NO: 651807 - DNA, 120 bp, Artificial Sequence
  ENSG00000183114_13 (sequence is synthesized)
gggcctgccattgtggacccgccccctatgctttacacctagtctctttgcccacagacctcctcattccctcccaaaacatcctctcaagagaagggaggagaagtttcaagaaatcag

SEQ ID NO: 651808 - DNA, 120 bp, Artificial Sequence
  ENSG00000183114_14 (sequence is synthesized)
gaggggtgggtttggaccctgggcagggtggaggcagtgaccttgcccttggtccctctagccttcttccctgtgcaaaaaaaaatgaccctggagaggcattcttgtaggagaagaatc

SEQ ID NO: 651809 - DNA, 120 bp, Artificial Sequence
  ENSG00000183114_15 (sequence is synthesized)
tagcggccggggagaattggggccgggccggcggtgggcagagtccgctgctatacacacagggaggaattctcacgcccaagccccgcctctctacgccttggaggactcctgtgactt

SEQ ID NO: 651810 - DNA, 120 bp, Artificial Sequence
  ENSG00000183114_16 (sequence is synthesized)
cactgctctgcctctggagaacactgggagagtcctaccgacgttcaaacaacaggttaggccaggtaacagccctgcaccaggccgctgcccacgcctctgccctggcacccccagggg

SEQ ID NO: 651811 - DNA, 120 bp, Artificial Sequence
  ENSG00000183114_17 (sequence is synthesized)
attccttgcccatcccatctctctgcagacggatgtgtgtggccccctcctaggtgccccacaaccaggaccaagatggggctcccaaaggaggtaaggagaacctttggcaggtgctta

SEQ ID NO: 651812 - DNA, 120 bp, Artificial Sequence
  ENSG00000183114_18 (sequence is synthesized)
ggacactgactacctagaaagtagacgcagcagagttgctcccaagtcgaggctcctcagagcaggtgggtcctgacagcagtggattctcccagcaggatgaggaaggagggtgtgtta

SEQ ID NO: 651813 - DNA, 120 bp, Artificial Sequence
  ENSG00000183114_19 (sequence is synthesized)
accaaccaagggagtgggccccccacccaggtgtctccgcaagaccacaaaaagcccaaagatctatgtgtcactgatcattgtaaataaagtggacctgcttttacagccctgtcacta

SEQ ID NO: 651814 - DNA, 120 bp, Artificial Sequence
  ENSG00000183117_0 (sequence is synthesized)
ctccacggcagcggctccttgtgccactagcagcccttcttctgcgctctccgccttttctctctagactggatctctcctcccccccgcgcccccctccccgcatctcccactcgctgg

SEQ ID NO: 651815 - DNA, 120 bp, Artificial Sequence
  ENSG00000183117_1 (sequence is synthesized)
ctctctctccagctgcctcctctccaggtctctcctggctgcgcgcgctcctctccccgcttctccccctcccgcagcctcgccgccttggtgccttcctgcccggctcggccggcgctc

SEQ ID NO: 651816 - DNA, 120 bp, Artificial Sequence
  ENSG00000183117_2 (sequence is synthesized)
gtccccggccccggccccgccagcccgggtctccgcgctcggagcagctcagccctgcagtggctcgggacccgatgctatgagagggaagcgagccgggcgcccagaccttcaggaggc

SEQ ID NO: 651817 - DNA, 120 bp, Artificial Sequence
  ENSG00000183117_3 (sequence is synthesized)
gtcggatgcgcggcgggtcttgggaccgggctctctctccggctcgccttgccctcgggtgattatttggctccgctcatagccctgccttcctcggaggagccatcggtgtcgcgtgcg

SEQ ID NO: 651818 - DNA, 120 bp, Artificial Sequence
  ENSG00000183117_4 (sequence is synthesized)
tgtggagtatctgcagacatgactgcgtggaggagattccagtcgctgctcctgcttctcgggctgctggtgctgtgcgcgaggctcctcactgcagcgaagggtcagaactgtggaggc

SEQ ID NO: 651819 - DNA, 120 bp, Artificial Sequence
  ENSG00000183117_5 (sequence is synthesized)
ttagtccagggtcccaatggcactattgagagcccagggtttcctcacgggtatccgaactatgccaactgcacctggatcatcatcacgggcgagcgcaataggatacagttgtccttc

SEQ ID NO: 651820 - DNA, 120 bp, Artificial Sequence
  ENSG00000183117_6 (sequence is synthesized)
catacctttgctcttgaagaagattttgatattttatcagtttacgatggacagcctcaacaagggaatttaaaagtgagattatcgggatttcagctgccctcctctatagtgagtaca

SEQ ID NO: 651821 - DNA, 120 bp, Artificial Sequence
  ENSG00000183117_7 (sequence is synthesized)
ggatctatcctcactctgtggttcacgacagacttcgctgtgagtgcccaaggtttcaaagcattatatgaagttttacctagccacacttgtggaaatcctggagaaatcctgaaagga

SEQ ID NO: 651822 - DNA, 120 bp, Artificial Sequence
  ENSG00000183117_8 (sequence is synthesized)
gttctgcatggaacgagattcaacataggagacaaaatccggtacagctgcctccctggctacatcttggaaggccacgccatcctgacctgcatcgtcagcccaggaaatggtgcatcg

SEQ ID NO: 651823 - DNA, 120 bp, Artificial Sequence
  ENSG00000183117_9 (sequence is synthesized)
tgggacttcccagctcccttttgcagagctgagggagcctgcggaggaaccttacgcgggaccagcagctccatctccagcccgcacttcccttcagagtacgagaacaacgcggactgc

SEQ ID NO: 651824 - DNA, 120 bp, Artificial Sequence
  ENSG00000183117_10 (sequence is synthesized)
acctggaccattctggctgagcccggggacaccattgcgctggtcttcactgactttcagctagaagaaggatatgatttcttagagatcagtggcacggaagctccatccatatggcta

SEQ ID NO: 651825 - DNA, 120 bp, Artificial Sequence
  ENSG00000183117_11 (sequence is synthesized)
actggcatgaacctcccctctccagttatcagtagcaagaattggctacgactccatttcacctctgacagcaaccaccgacgcaaaggatttaacgctcagttccaagtgaaaaaggcg

SEQ ID NO: 651826 - DNA, 120 bp, Artificial Sequence
  ENSG00000183117_12 (sequence is synthesized)
attgagttgaagtcaagaggagtcaagatgctgcccagcaaggatggaagccataaaaactctgtcttgagccaaggaggtgttgcattggtctctgacatgtgtccagatcctgggatt

SEQ ID NO: 651827 - DNA, 120 bp, Artificial Sequence
  ENSG00000183117_13 (sequence is synthesized)
ccagaaaatggtagaagagcaggttccgacttcagggttggtgcaaatgtacagttttcatgtgaggacaattacgtgctccagggatctaaaagcatcacctgtcagagagttacagag

SEQ ID NO: 651828 - DNA, 120 bp, Artificial Sequence
  ENSG00000183117_14 (sequence is synthesized)
acgctcgctgcttggagtgaccacaggcccatctgccgagcgagaacatgtggatccaatctgcgtgggcccagcggcgtcattacctcccctaattatccggttcagtatgaagataat

SEQ ID NO: 651829 - DNA, 120 bp, Artificial Sequence
  ENSG00000183117_15 (sequence is synthesized)
gcacactgtgtgtgggtcatcaccaccaccgacccggacaaggtcatcaagcttgcctttgaagagtttgagctggagcgaggctatgacaccctgacggttggtgatgctgggaaggtg

SEQ ID NO: 651830 - DNA, 120 bp, Artificial Sequence
  ENSG00000183117_16 (sequence is synthesized)
ggagacaccagatcggtcttgtacgtgctcacgggatccagtgttcctgacctcattgtgagcatgagcaaccagatgtggctacatctgcagtcggatgatagcattggctcacctggg

SEQ ID NO: 651831 - DNA, 120 bp, Artificial Sequence
  ENSG00000183117_17 (sequence is synthesized)
tttaaagctgtttaccaagaaattgaaaagggagggtgtggggatcctggaatccccgcctatgggaagcggacgggcagcagtttcctccatggagatacactcacctttgaatgcccg

SEQ ID NO: 651832 - DNA, 120 bp, Artificial Sequence
  ENSG00000183117_18 (sequence is synthesized)
gcggcctttgagctggtgggggagagagttatcacctgtcagcagaacaatcagtggtctggcaacaagcccagctgtgtattttcatgtttcttcaactttacggcatcatctgggatt

SEQ ID NO: 651833 - DNA, 120 bp, Artificial Sequence
  ENSG00000183117_19 (sequence is synthesized)
attctgtcaccaaattatccagaggaatatgggaacaacatgaactgtgtctggttgattatctcggagccaggaagtcgaattcacctaatctttaatgattttgatgttgagcctcag

SEQ ID NO: 651834 - DNA, 120 bp, Artificial Sequence
  ENSG00000183117_20 (sequence is synthesized)
tttgactttctcgcggtcaaggatgatggcatttctgacataactgtcctgggtactttttctggcaatgaagtgccttcccagctggccagcagtgggcatatagttcgcttggaattt

SEQ ID NO: 651835 - DNA, 120 bp, Artificial Sequence
  ENSG00000183117_21 (sequence is synthesized)
cagtctgaccattccactactggcagagggttcaacatcacttacaccacatttggtcagaatgagtgccatgatcctggcattcctataaacggacgacgttttggtgacaggtttcta

SEQ ID NO: 651836 - DNA, 120 bp, Artificial Sequence
  ENSG00000183117_22 (sequence is synthesized)
ctcgggagctcggtttctttccactgtgatgatggctttgtcaagacccagggatccgagtccattacctgcatactgcaagacgggaacgtggtctggagctccaccgtgccccgctgt

SEQ ID NO: 651837 - DNA, 120 bp, Artificial Sequence
  ENSG00000183117_23 (sequence is synthesized)
gaagctccatgtggtggacatctgacagcgtccagcggagtcattttgcctcctggatggccaggatattataaggattctttacattgtgaatggataattgaagcaaaaccaggccac

SEQ ID NO: 651838 - DNA, 120 bp, Artificial Sequence
  ENSG00000183117_24 (sequence is synthesized)
tctatcaaaataacttttgacagatttcagacagaggtcaattatgacaccttggaggtcagagatgggccagccagttcgtccccactgatcggcgagtaccacggcacccaggcaccc

SEQ ID NO: 651839 - DNA, 120 bp, Artificial Sequence
  ENSG00000183117_25 (sequence is synthesized)
cagttcctcatcagcaccgggaacttcatgtacctgctgttcaccactgacaacagccgctccagcatcggcttcctcatccactatgagagtgtgacgcttgagtcggattcctgcctg

SEQ ID NO: 651840 - DNA, 120 bp, Artificial Sequence
  ENSG00000183117_26 (sequence is synthesized)
gacccgggcatccctgtgaacggccatcgccacggtggagactttggcatcaggtccacagtgactttcagctgtgacccggggtacacactaagtgacgacgagcccctcgtctgtgag

SEQ ID NO: 651841 - DNA, 120 bp, Artificial Sequence
  ENSG00000183117_27 (sequence is synthesized)
aggaaccaccagtggaaccacgccttgcccagctgcgacgctctatgtggaggctacatccaagggaagagtggaacagtcctttctcctgggtttccagatttttatccaaactctcta

SEQ ID NO: 651842 - DNA, 120 bp, Artificial Sequence
  ENSG00000183117_28 (sequence is synthesized)
aactgcacgtggaccattgaagtgtctcatgggaaaggagttcaaatgatctttcacacctttcatcttgagagttcccacgactatttactgatcacagaggatggaagtttttccgag

SEQ ID NO: 651843 - DNA, 120 bp, Artificial Sequence
  ENSG00000183117_29 (sequence is synthesized)
cccgttgccaggctcaccgggtcggtgttgcctcatacgatcaaggcaggcctgtttggaaacttcactgcccagcttcggtttatatcagacttctcaatttcgtacgagggcttcaat

SEQ ID NO: 651844 - DNA, 120 bp, Artificial Sequence
  ENSG00000183117_30 (sequence is synthesized)
atcacattttcagaatatgacctggagccatgtgatgatcctggagtccctgccttcagccgaagaattggttttcactttggtgtgggagactctctgacgttttcctgcttcctggga

SEQ ID NO: 651845 - DNA, 120 bp, Artificial Sequence
  ENSG00000183117_31 (sequence is synthesized)
tatcgtttagaaggtgccaccaagcttacctgcctgggtgggggccgccgtgtgtggagtgcacctctgccaaggtgtgtggccgaatgtggagcaagtgtcaaaggaaatgaaggaaca

SEQ ID NO: 651846 - DNA, 120 bp, Artificial Sequence
  ENSG00000183117_32 (sequence is synthesized)
ttactgtctccaaattttccatccaattatgataataaccatgagtgtatctataaaatagaaacagaagccggcaagggcatccaccttagaacacgaagcttccagctgtttgaagga

SEQ ID NO: 651847 - DNA, 120 bp, Artificial Sequence
  ENSG00000183117_33 (sequence is synthesized)
gatactctaaaggtatatgatggaaaagacagttcctcacgtccactgggcacgttcactaaaaatgaacttctggggctgatcctaaacagcacatccaatcacctgtggctagagttc

SEQ ID NO: 651848 - DNA, 120 bp, Artificial Sequence
  ENSG00000183117_34 (sequence is synthesized)
aacaccaatggatctgacaccgaccaaggttttcaactcacctataccagttttgatctggtaaaatgtgaggatccgggcatccctaactacggctataggatccgtgatgaaggccac

SEQ ID NO: 651849 - DNA, 120 bp, Artificial Sequence
  ENSG00000183117_35 (sequence is synthesized)
tttaccgacactgtagttctgtacagttgcaacccggggtacgccatgcatggcagcaacaccctgacctgtttgagtggagacaggagagtgtgggacaaaccactaccttcgtgcata

SEQ ID NO: 651850 - DNA, 120 bp, Artificial Sequence
  ENSG00000183117_36 (sequence is synthesized)
gcggaatgtggtggtcagatccatgcagccacatcaggacgaatattgtcccctggctatccagctccgtatgacaacaacctccactgcacctggattatagaggcagacccaggaaag

SEQ ID NO: 651851 - DNA, 120 bp, Artificial Sequence
  ENSG00000183117_37 (sequence is synthesized)
accattagcctccatttcattgttttcgacacggagatggctcacgacatcctcaaggtctgggacgggccggtggacagtgacatcctgctgaaggagtggagtggctccgcccttccg

SEQ ID NO: 651852 - DNA, 120 bp, Artificial Sequence
  ENSG00000183117_38 (sequence is synthesized)
gaggacatccacagcaccttcaactcactcaccctgcagttcgacagcgacttcttcatcagcaagtctggcttctccatccagttctccacctcaattgcagccacctgtaacgatcca

SEQ ID NO: 651853 - DNA, 120 bp, Artificial Sequence
  ENSG00000183117_39 (sequence is synthesized)
ggtatgccccaaaatggcacccgctatggagacagcagagaggctggagacaccgtcacattccagtgtgaccctggctatcagctccaaggacaagccaaaatcacctgtgtgcagctg

SEQ ID NO: 651854 - DNA, 120 bp, Artificial Sequence
  ENSG00000183117_40 (sequence is synthesized)
aataaccggttcttttggcaaccagaccctcctacatgcatagctgcttgtggagggaatctgacgggcccagcaggtgttattttgtcacccaactacccacagccgtatcctcctggg

SEQ ID NO: 651855 - DNA, 120 bp, Artificial Sequence
  ENSG00000183117_41 (sequence is synthesized)
aaggaatgtgactggagagtaaaagtgaacccggactttgtcatcgccttgatattcaaaagtttcaacatggagcccagctatgacttcctacacatctatgaaggggaagattccaac

SEQ ID NO: 651856 - DNA, 120 bp, Artificial Sequence
  ENSG00000183117_42 (sequence is synthesized)
agccccctcattgggagttaccagggctctcaggccccagaaagaatagagagtagcggaaacagcctgtttctggcatttcggagtgatgcctccgtgggcctttcagggttcgccatt

SEQ ID NO: 651857 - DNA, 120 bp, Artificial Sequence
  ENSG00000183117_43 (sequence is synthesized)
gaatttaaagagaaaccacgggaagcttgttttgacccaggaaatataatgaatgggacaagagttggaacagacttcaagcttggctccaccatcacctaccagtgtgactctggctat

SEQ ID NO: 651858 - DNA, 120 bp, Artificial Sequence
  ENSG00000183117_44 (sequence is synthesized)
aagattcttgacccctcatccatcacctgtgtgattggggctgatgggaaaccctcctgggaccaagtgctgccctcctgcaatgctccctgtggaggccagtacacgggatcagaaggg

SEQ ID NO: 651859 - DNA, 120 bp, Artificial Sequence
  ENSG00000183117_45 (sequence is synthesized)
gtagttttatcaccaaactacccccataattacacagctggtcaaatatgcctctattccatcacggtaccaaaggaattcgtggtctttggacagtttgcctatttccagacagccctg

SEQ ID NO: 651860 - DNA, 120 bp, Artificial Sequence
  ENSG00000183117_46 (sequence is synthesized)
aatgatttggcagaattatttgatggaacccatgcacaggccagacttctcagctcactctcggggtctcactcaggggaaacattgcccttggctacgtcaaatcaaattctgctccga

SEQ ID NO: 651861 - DNA, 120 bp, Artificial Sequence
  ENSG00000183117_47 (sequence is synthesized)
ttcagtgcaaagagcggtgcctctgcccgcggcttccacttcgtgtatcaagctgttcctcgtaccagtgacacccaatgcagctctgtccccgagcccagatacggaaggagaattggt

SEQ ID NO: 651862 - DNA, 120 bp, Artificial Sequence
  ENSG00000183117_48 (sequence is synthesized)
tctgagttttctgccggctccatcgtccgattcgagtgcaacccgggatacctgcttcagggttccacggcgctccactgccagtccgtgcccaacgccttggcacagtggaacgacacg

SEQ ID NO: 651863 - DNA, 120 bp, Artificial Sequence
  ENSG00000183117_49 (sequence is synthesized)
atccccagctgtgtggtaccctgcagtggcaatttcactcaacgaagaggtacaatcctgtcccccggctaccctgagccatacggaaacaacttgaactgtatatggaagatcatagtt

SEQ ID NO: 651864 - DNA, 120 bp, Artificial Sequence
  ENSG00000183117_50 (sequence is synthesized)
acggagggctcgggaattcagatccaagtgatcagttttgccacggagcagaactgggactcccttgagatccacgatggtggggatgtgaccgcacccagactgggaagcttctcaggc

SEQ ID NO: 651865 - DNA, 120 bp, Artificial Sequence
  ENSG00000183117_51 (sequence is synthesized)
accacagtaccggcactgctgaacagtacttccaaccaactctacctgcatttccagtctgacattagtgtggcagctgctggtttccacctggaatacaaaactgtaggtcttgctgca

SEQ ID NO: 651866 - DNA, 120 bp, Artificial Sequence
  ENSG00000183117_52 (sequence is synthesized)
tgccaagaaccagccctccccagcaacagcatcaaaatcggagatcggtacatggtgaacgacgtgctctccttccagtgcgagcccgggtacaccctgcagggccgttcccacatttcc

SEQ ID NO: 651867 - DNA, 120 bp, Artificial Sequence
  ENSG00000183117_53 (sequence is synthesized)
tgtatgccagggaccgttcgccgttggaactatccgtctcccctgtgcattgcaacctgtggagggacgctgagcaccttgggtggtgtgatcctgagccccggcttcccaggttcttac

SEQ ID NO: 651868 - DNA, 120 bp, Artificial Sequence
  ENSG00000183117_54 (sequence is synthesized)
cccaacaacttagactgcacctggaggatctcattacccatcggctatggtgcacatattcagtttctgaatttttctaccgaagctaatcatgacttccttgaaattcaaaatggacct

SEQ ID NO: 651869 - DNA, 120 bp, Artificial Sequence
  ENSG00000183117_55 (sequence is synthesized)
taccacaccagccccatgattggacaatttagcggcacggatctccccgcggccctgctgagcacaacgcatgaaaccctcatccacttttatagtgaccattcgcaaaaccggcaagga

SEQ ID NO: 651870 - DNA, 120 bp, Artificial Sequence
  ENSG00000183117_56 (sequence is synthesized)
tttaaacttgcttaccaagcctatgaattacagaactgtccagatccacccccatttcagaatgggtacatgatcaactcggattacagcgtggggcaatcagtatctttcgagtgttat

SEQ ID NO: 651871 - DNA, 120 bp, Artificial Sequence
  ENSG00000183117_57 (sequence is synthesized)
cctgggtacattctaataggccatcctgtcctcacttgtcagcatgggatcaacagaaactggaactacccttttccaagatgtgatgccccttgtgggtacaacgtaacttctcagaac

SEQ ID NO: 651872 - DNA, 120 bp, Artificial Sequence
  ENSG00000183117_58 (sequence is synthesized)
ggcaccatctactcccctggctttcctgatgagtatccgatcctgaaggactgcatttggctcatcacggtgcctccagggcacggagtttacatcaacttcaccctgttacagacggaa

SEQ ID NO: 651873 - DNA, 120 bp, Artificial Sequence
  ENSG00000183117_59 (sequence is synthesized)
gctgtcaacgattacattgctgtttgggacggtcccgatcagaactcaccccagctgggagttttcagtggcaacacagccctcgaaacggcgtatagctccaccaaccaagtcctgctc

SEQ ID NO: 651874 - DNA, 120 bp, Artificial Sequence
  ENSG00000183117_60 (sequence is synthesized)
ttcaaatggaggcttctttgtcctcaatttccacgcatttcagctcaagaaatgtcaacctcccccagcggttccacaggcagaaatgcttactgaggatgatgatttcgaaataggaga

SEQ ID NO: 651875 - DNA, 120 bp, Artificial Sequence
  ENSG00000183117_61 (sequence is synthesized)
ttttgtgaagtaccagtgccaccccgggtacaccttggtggggaccgacattctgacttgcaagctcagttcccagttgcagtttgagggttctctcccaacatgtgaagcacaatgccc

SEQ ID NO: 651876 - DNA, 120 bp, Artificial Sequence
  ENSG00000183117_62 (sequence is synthesized)
agcaaatgaagtccggactggatcatcgggagtcattctcagtccagggtatccgggtaattattttaactcccagacttgctcttggagtattaaagtggaaccaaactacaacattac

SEQ ID NO: 651877 - DNA, 120 bp, Artificial Sequence
  ENSG00000183117_63 (sequence is synthesized)
catctttgtggacacatttcaaagtgaaaagcagtttgatgcactggaagtgtttgatggttcttctgggcaaagtcctctgctagtagtcttaagtgggaatcatactgaacaatcaaa

SEQ ID NO: 651878 - DNA, 120 bp, Artificial Sequence
  ENSG00000183117_64 (sequence is synthesized)
ttttacaagcaggagtaatcagttatatctccgctggtccactgaccatgccaccagtaagaaaggattcaagattcgctatgcagcaccttactgcagtttgacccaccccctgaagaa

SEQ ID NO: 651879 - DNA, 120 bp, Artificial Sequence
  ENSG00000183117_65 (sequence is synthesized)
tgggggtattctaaacaggactgcaggagcggttggaagcaaagtgcattatttttgcaagcctggataccgaatggtcggccacagcaatgcaacctgtagacgaaacccacttggcat

SEQ ID NO: 651880 - DNA, 120 bp, Artificial Sequence
  ENSG00000183117_66 (sequence is synthesized)
gtaccagtgggactccctcacgccactctgccaggctgtgtcctgtggaatcccagaatccccaggaaacggttcatttaccgggaacgagttcactttggacagtaaagtggtctatga

SEQ ID NO: 651881 - DNA, 120 bp, Artificial Sequence
  ENSG00000183117_67 (sequence is synthesized)
atgtcatgagggcttcaagcttgaatccagccagcaagcaacagccgtgtgtcaagaagatgggttgtggagtaacaaggggaagccgcccacgtgtaagccggtcgcttgccccagcat

SEQ ID NO: 651882 - DNA, 120 bp, Artificial Sequence
  ENSG00000183117_68 (sequence is synthesized)
tgaagctcagctctcagaacatgtcatctggaggctggtttcaggatccttgaatgagtacggtgctcaagtattgctgagctgcagtcctggttactacttagaaggctggaggctcct

SEQ ID NO: 651883 - DNA, 120 bp, Artificial Sequence
  ENSG00000183117_69 (sequence is synthesized)
gcggtgccaggccaatgggacgtggaacataggagatgagaggccaagctgtcgagttatctcgtgtggaagcctttcctttcccccaaatggcaacaagattggaacgttgacagttta

SEQ ID NO: 651884 - DNA, 120 bp, Artificial Sequence
  ENSG00000183117_70 (sequence is synthesized)
tggggccacagctatatttacgtgcaacaccggctacacgcttgtggggtctcatgtcagagagtgcttggcaaatgggctctggagcggcagcgaaactcgatgtctggctggccactg

SEQ ID NO: 651885 - DNA, 120 bp, Artificial Sequence
  ENSG00000183117_71 (sequence is synthesized)
cggttccccagacccgattgtgaacggtcacattagtggagatggcttcagttacagagacacggtggtttaccagtgcaatcctggtttccggcttgtgggaacttccgtgaggatatg

SEQ ID NO: 651886 - DNA, 120 bp, Artificial Sequence
  ENSG00000183117_72 (sequence is synthesized)
cctgcaagaccacaagtggtctggacaaacgcctgtctgtgtccccatcacatgtggtcaccctggaaaccctgcccacggattcactaatggcagtgagttcaacctgaatgatgtcgt

SEQ ID NO: 651887 - DNA, 120 bp, Artificial Sequence
  ENSG00000183117_73 (sequence is synthesized)
gaatttcacctgcaacacgggctatttgctgcagggcgtgtctcgagcccagtgtcggagcaacggccagtggagtagccctctgcccacgtgtcgagtggtgaactgttctgatccagg

SEQ ID NO: 651888 - DNA, 120 bp, Artificial Sequence
  ENSG00000183117_74 (sequence is synthesized)
ctttgtggaaaatgccattcgtcacgggcaacagaacttccctgagagttttgagtatggaatgagtatcctgtaccattgcaagaagggattttacttgctgggatcttcagccttgac

SEQ ID NO: 651889 - DNA, 120 bp, Artificial Sequence
  ENSG00000183117_75 (sequence is synthesized)
ctgtatggcaaatggcttatgggaccgatccctgcccaagtgtttggctatatcgtgtggacacccaggggtccctgccaacgccgtcctcactggagagctgtttacctatggcgccgt

SEQ ID NO: 651890 - DNA, 120 bp, Artificial Sequence
  ENSG00000183117_76 (sequence is synthesized)
cgtgcactactcctgcagagggagcgagagcctcataggcaacgacacgagagtgtgccaggaagacagtcactggagcggggcactgccccactgcacaggaaataatcctggattctg

SEQ ID NO: 651891 - DNA, 120 bp, Artificial Sequence
  ENSG00000183117_77 (sequence is synthesized)
tggtgatccggggaccccagcacatgggtctcggcttggtgatgactttaagacaaagagtcttctccgcttctcctgtgaaatggggcaccagctgaggggctcccctgaacgcacgtg

SEQ ID NO: 651892 - DNA, 120 bp, Artificial Sequence
  ENSG00000183117_78 (sequence is synthesized)
tttgctcaatgggtcatggtcaggactgcagccggtgtgtgaggccgtgtcctgtggcaaccctggcacacccaccaacggaatgattgtcagtagtgatggcattctgttctccagctc

SEQ ID NO: 651893 - DNA, 120 bp, Artificial Sequence
  ENSG00000183117_79 (sequence is synthesized)
ggtcatctatgcctgctgggaaggctacaagacctcagggctcatgacacggcattgcacagccaatgggacctggacaggcactgctcccgactgcacaattataagttgtggggatcc

SEQ ID NO: 651894 - DNA, 120 bp, Artificial Sequence
  ENSG00000183117_80 (sequence is synthesized)
aggcacactagcaaatggcatccagtttgggaccgacttcaccttcaacaagactgtgagctatcagtgtaacccaggctatgtcatggaagcagtcacatccgccactattcgctgtac

SEQ ID NO: 651895 - DNA, 120 bp, Artificial Sequence
  ENSG00000183117_81 (sequence is synthesized)
caaagacggcaggtggaatccgagcaaacctgtctgcaaagccgtgctgtgtcctcagccgccgccggtgcagaatggaacagtggagggaagtgatttccgctggggctccagcataag

SEQ ID NO: 651896 - DNA, 120 bp, Artificial Sequence
  ENSG00000183117_82 (sequence is synthesized)
ttacagctgcatggacggttaccagctctctcactccgccatcctctcctgtgaaggtcgcggggtgtggaaaggagagatcccccagtgtctccctgtgttctgcggagaccctggcat

SEQ ID NO: 651897 - DNA, 120 bp, Artificial Sequence
  ENSG00000183117_83 (sequence is synthesized)
ccccgcagaagggcgacttagtgggaaaagtttcacctataagtccgaagtcttcttccagtgcaaatctccatttatactcgtgggatcctccagaagagtctgccaagctgacggcac

SEQ ID NO: 651898 - DNA, 120 bp, Artificial Sequence
  ENSG00000183117_84 (sequence is synthesized)
gtggagcggcatacaacccacctgcattgatcctgctcataacacctgcccagaccctggtacgccacactttggaatacagaatagctccagaggctatgaggttggaagcacggtttt

SEQ ID NO: 651899 - DNA, 120 bp, Artificial Sequence
  ENSG00000183117_85 (sequence is synthesized)
tttcaggtgcagaaaaggctaccatattcaaggttccacgactcgcacctgccttgccaatttaacatggagtgggatacagaccgaatgtatacctcatgcctgcagacagccagaaac

SEQ ID NO: 651900 - DNA, 120 bp, Artificial Sequence
  ENSG00000183117_86 (sequence is synthesized)
cccggcacacgcggatgtgagagccatcgatcttcctactttcggctacaccttagtgtacacctgccatccaggctttttcctcgcagggggatctgagcacagaacatgtaaagcaga

SEQ ID NO: 651901 - DNA, 120 bp, Artificial Sequence
  ENSG00000183117_87 (sequence is synthesized)
catgaaatggacaggaaagtcgcctgtgtgtaaaagtaaaggagtgagagaagttaatgaaacagttactaaaactccagttccttcagatgtctttttcgtcaattcactgtggaaggg

SEQ ID NO: 651902 - DNA, 120 bp, Artificial Sequence
  ENSG00000183117_88 (sequence is synthesized)
gtattatgaatatttagggaaaagacaacccgccactctaactgttgactggttcaatgcaacaagcagtaaggtgaatgccaccttcagcgaagcctcgccagtggagctgaagttgac

SEQ ID NO: 651903 - DNA, 120 bp, Artificial Sequence
  ENSG00000183117_89 (sequence is synthesized)
aggcatttacaagaaggaggaggcccacttactcctgaaagcttttcaaattaaaggccaggcagatatttttgtaagcaagttcgaaaatgacaactggggactagatggttatgtgtc

SEQ ID NO: 651904 - DNA, 120 bp, Artificial Sequence
  ENSG00000183117_90 (sequence is synthesized)
atctggacttgaaagaggaggatttacttttcaaggtgacattcatggaaaagactttggaaaatttaagctagaaaggcaagatcctttaaacccagatcaagactcttccagtcatta

SEQ ID NO: 651905 - DNA, 120 bp, Artificial Sequence
  ENSG00000183117_91 (sequence is synthesized)
ccacggcaccagcagtggctctgtggcggctgccattctggttcctttctttgctctaattttatcagggtttgcattttacctctacaaacacagaacgagaccaaaagttcaatacaa

SEQ ID NO: 651906 - DNA, 120 bp, Artificial Sequence
  ENSG00000183117_92 (sequence is synthesized)
tggctatgctgggcatgaaaacagcaatggacaagcatcgtttgaaaaccccatgtatgatacaaacttaaaacccacagaagccaaggctgtgaggtttgacacaactctgaacacagt

SEQ ID NO: 651907 - DNA, 120 bp, Artificial Sequence
  ENSG00000183117_93 (sequence is synthesized)
ctgtacagtggtatagccctcagtgccccaacaggactgattcatagccatacctctgatggacaagcagtgattcctttggtgccatataccactctcccttccactctggctttactg

SEQ ID NO: 651908 - DNA, 120 bp, Artificial Sequence
  ENSG00000183117_94 (sequence is synthesized)
cagcgatcttcaaccttgtctactggcataagtgcagcggggatctctactcaaatgtgtcagggtcttctacggatcaaactacacatgcgttttcattccaaaagtgggttctaaatg

SEQ ID NO: 651909 - DNA, 120 bp, Artificial Sequence
  ENSG00000183117_95 (sequence is synthesized)
cctggctgcatctgtatgaaatcaaggcacactccaggaagactgccacgtcgcgccaacacgtcatactcaatgcctcagactttcatatttctgtgttgctgagatgcctttcaatgc

SEQ ID NO: 651910 - DNA, 120 bp, Artificial Sequence
  ENSG00000183117_96 (sequence is synthesized)
aatcgtctgggctcgtggatatgtccctcaggtgcggtgacagaatggtggcaccacgatatgtgttctcttgtgttgtttttcctttttaaacccccatgaacacgaatactctgaaaa

SEQ ID NO: 651911 - DNA, 120 bp, Artificial Sequence
  ENSG00000183117_97 (sequence is synthesized)
aaataaaaagctttctggaagaagacacctttctgatagaggctcacacctacaaatgcttcactctgtccttccgagacctgacaagctttgaggacctcacagctcccctgtgtgttc

SEQ ID NO: 651912 - DNA, 120 bp, Artificial Sequence
  ENSG00000183117_98 (sequence is synthesized)
atctctagggatgtttgcaatttcccagtcagctgttctgtcgcagaatgtttaatgcacaattttttgcactagtgtgttatgaatgactaagattctgataaaaaaaataaattattt

SEQ ID NO: 651913 - DNA, 120 bp, Artificial Sequence
  ENSG00000183117_99 (sequence is synthesized)
acacagggtttatacacactatccattgtatataagcattatttcatattatcaagctaaacattcccccatcagcttagttggagtgttagggaaaagtattcctagatatggcacaga

SEQ ID NO: 651914 - DNA, 120 bp, Artificial Sequence
  ENSG00000183117_100 (sequence is synthesized)
ttttaaaaggaaatacagtattgaagagatttattttattattgcttcaattagctccatttacgtgttgaattcattgaagaggtccaatgagaaaaaaacagaagcctccttatttca

SEQ ID NO: 651915 - DNA, 120 bp, Artificial Sequence
  ENSG00000183117_101 (sequence is synthesized)
cacgttttcctcctttagtaccatcctcatccaattactgtctctctgatactacttaatagcagggggtttgcagaaatttctgtttgccatgtaaaactgtgaatagtaatttatttt

SEQ ID NO: 651916 - DNA, 120 bp, Artificial Sequence
  ENSG00000183117_102 (sequence is synthesized)
ttctgtttgccatgtaaaactgtgaatagtaatttattttagatagtcgatgaacttgtgggttttagctcacaatgcagccttcccttttgcagtgttttttttttgtttttttttttt

SEQ ID NO: 651917 - DNA, 120 bp, Artificial Sequence
  ENSG00000183117_103 (sequence is synthesized)
aaagacaatataccacagtagcaccttgaactcagtgaaaattgttcaggatcaaaataccaagtgttcttttagagggaaggaaaaagtacacacactctcctctcacaatgatatatt

SEQ ID NO: 651918 - DNA, 120 bp, Artificial Sequence
  ENSG00000183117_104 (sequence is synthesized)
ttatacattcatttgttatttgtttcatgctttatgattccagatggaaaggtaatttcagtgacttttcaagtttaaattccattataggtaaatgataagttatgatgcaaataaaat

SEQ ID NO: 651919 - DNA, 120 bp, Artificial Sequence
  ENSG00000183117_105 (sequence is synthesized)
ctataagatccccagggcaaataaaaatcaaaacatgaagtagaagatgtggccgtgaggtagtttatgtaacaaattcaaagtgaaaatcatgtttacttttacttatacttatttgat

SEQ ID NO: 651920 - DNA, 120 bp, Artificial Sequence
  ENSG00000183117_106 (sequence is synthesized)
aaaaatatttttgaaacgatagtacttattttattatttgatatttcagttcctattcaattgtggcagattttctctgtttcacattttagattggcgttggtaatagaaatgtcagaa

SEQ ID NO: 651921 - DNA, 120 bp, Artificial Sequence
  ENSG00000183117_107 (sequence is synthesized)
tgttcaaattggccttcacgttgtcggagtgaacacattgacacctagctttaagactgatttatctgttggtgtactgaaggtttccatgtaggacttcaaatgtggaaaaggaaaagc

SEQ ID NO: 651922 - DNA, 120 bp, Artificial Sequence
  ENSG00000183117_108 (sequence is synthesized)
agtcaggaaaatggggcattctttggagagtcacgcgttttgattcggacatttccgtagagctcggctcccagtgttgtgttcctcggtcgaaagggtctctgctgtttggggactcac

SEQ ID NO: 651923 - DNA, 120 bp, Artificial Sequence
  ENSG00000183117_109 (sequence is synthesized)
tggcctctcctagggactcctttgtcttgtgaaccccacgctgttggattctgtatcattatgctgaattctctgcacagttttccctggccaacctgcccacatccttggagatttgct

SEQ ID NO: 651924 - DNA, 120 bp, Artificial Sequence
  ENSG00000183117_110 (sequence is synthesized)
ttgccagtgggaatccttacattgctgtttcacagtagacgggacgaggtcagcgggagtcgtgctcctaacacacacattgaacgaaacagaagatgattgaaagtgtgaggaggctcg

SEQ ID NO: 651925 - DNA, 120 bp, Artificial Sequence
  ENSG00000183117_111 (sequence is synthesized)
tgtgcaagggagaacagggttactatacatattagtgtatatatatacatacatatatatatatatatattgtacatatctaagtttgagtcattcaaactaggtgcaaaatgctgactt

SEQ ID NO: 651926 - DNA, 120 bp, Artificial Sequence
  ENSG00000183117_112 (sequence is synthesized)
cagagtctgaattaacatctctgttcccatatccctgacctgctccctggtcaacgatgctatgaaatcctgaaatgacaggacatacatacatacaagaaaccacatatcaaattagat

SEQ ID NO: 651927 - DNA, 120 bp, Artificial Sequence
  ENSG00000183117_113 (sequence is synthesized)
atgattttcctttgtgtgcaaagtcaaactgtcctagggttgccagtttgaagcatgttatttaaatgaaaaaaaaaatcagtgaaattctcgtgtgagaattctgcctagtttcttcct

SEQ ID NO: 651928 - DNA, 120 bp, Artificial Sequence
  ENSG00000183117_114 (sequence is synthesized)
aaggttgtgtgcagtgttgaacggcgtctccgcaaggtgttggaggatctcattttagggcagtcaggagctgtgcttgctgagttaggtctagaagactcttccctgaaggcaacggga

SEQ ID NO: 651929 - DNA, 120 bp, Artificial Sequence
  ENSG00000183117_115 (sequence is synthesized)
acacgcgtgagggacgcgaccacacactaacagaggacacgtgcttcagagctgtttaaaactgctgcttgttttacacacacatcttgccttttttcaggctagctgcaataatttttt

SEQ ID NO: 651930 - DNA, 120 bp, Artificial Sequence
  ENSG00000183117_116 (sequence is synthesized)
tcttctgtaaaatattttgtaaacaacaacaaaaagctattataaaaagggggtaaaaaaaagaacgctggcattatgatcaggaaaacccattgtcatcgccgaccctccctcccgtcc

SEQ ID NO: 651931 - DNA, 120 bp, Artificial Sequence
  ENSG00000183117_117 (sequence is synthesized)
caccacacgctgctgtcacgacgtaggtgcgaaagacctttttgtacagagatatattttttatgaagaatttgtaaaattattaaatatgctgtaattttttgattaatgtaggtacat

SEQ ID NO: 651932 - DNA, 120 bp, Artificial Sequence
  ENSG00000183117_118 (sequence is synthesized)
tgttaaaaaataaatgtttttacaatacagaactgtaattttcccaataatgtaaaatgtaccatctctagctgattttcagttccaatcctattacacatgtattaatattaaagtggc

SEQ ID NO: 651933 - DNA, 120 bp, Artificial Sequence
  ENSG00000183117_119 (sequence is synthesized)
ctgttaaaatgaacagtatcttttttttgtcaaaaaaattataaagagggtgtaatatagcctgtgcaatgccaccaatctttaaagcaaatcagagttctaattaaatatttaatttta

SEQ ID NO: 651934 - DNA, 120 bp, Artificial Sequence
  ENSG00000183117_120 (sequence is synthesized)
aaattatacagagatctggaagtctcaaaagcaatccttttatcctaaaatggatagctcagcatctagctcacctatctctctgcgtccatgacagactgaggtcctgtgtgctttatc

SEQ ID NO: 651935 - DNA, 120 bp, Artificial Sequence
  ENSG00000183117_121 (sequence is synthesized)
ggactttcaattaaaaaaaaaacaaaaactcgaaacaacatgttttttattgtacgccattaatttcctatcactgagatataaaaataaataatacaaataaatgagaacatgaatttg

SEQ ID NO: 651936 - DNA, 120 bp, Artificial Sequence
  ENSG00000183117_122 (sequence is synthesized)
agctattttattttcttgtagggtatcatatctgacagaggtgacacttaattagatagtttgtcagtgtttgccattttataaaattgataaattgataagatgacacttaactctgat

SEQ ID NO: 651937 - DNA, 120 bp, Artificial Sequence
  ENSG00000183117_123 (sequence is synthesized)
atgtaagtcaaataaacattcctaggttctacttgagatttagaagctaagcttataattaataactcctaagaagatgcataaatcatacagagaattcttgtcattttcaatgatgtc

SEQ ID NO: 651938 - DNA, 120 bp, Artificial Sequence
  ENSG00000183117_124 (sequence is synthesized)
tgtgctgtacaccttattcttaaagtttgtcatttatttatgaccatgtaaaggtcagagatgttactatagacgtagctgtcttgaagttaaatgacttattaagaactttggtaaaat

SEQ ID NO: 651939 - DNA, 120 bp, Artificial Sequence
  ENSG00000183117_125 (sequence is synthesized)
caagccatgcactctatttctaagtcaagaattgaaaaattgataatagcatgaagatatttatcaactaactagatattagcgggaaaatagacattagggggattactgcatggtctc

SEQ ID NO: 651940 - DNA, 120 bp, Artificial Sequence
  ENSG00000183117_126 (sequence is synthesized)
gttgcacttatgatttaaaaacttgatgtgaataatagttatttttttcagatctaaacaaaggattcctttataaaagataaaattctctgtgttattttacttttgttggtattgcct

SEQ ID NO: 651941 - DNA, 120 bp, Artificial Sequence
  ENSG00000183117_127 (sequence is synthesized)
tgggcttattgatacttagattttcataatactcataaaaattttgccatgttaaagattttagtgacttccttttcttttaggttttgcaatttggagaagttaagtccctccctccct

SEQ ID NO: 651942 - DNA, 82 bp, Artificial Sequence
  ENSG00000183117_128 (sequence is synthesized)
taggttttgcaatttggagaagttaagtccctccctccctcccttctttccttccctccctccctctttccttccttccttc

SEQ ID NO: 651943 - DNA, 120 bp, Artificial Sequence
  ENSG00000183117_129 (sequence is synthesized)
cctcctttccttcctttgttctttagtatcttcctctctttcttttctgtgttataaagcatattgctgcattctaatgcataaacttttttgggaaagaaaacttattcaatgccaaaa

SEQ ID NO: 651944 - DNA, 120 bp, Artificial Sequence
  ENSG00000183117_130 (sequence is synthesized)
tctcaaagataattttaatgctttaggcatagcaagtaaaaatgtcttttattttcaaagttccactgtttttcttcttccttttgctatgtgtgccaaacaccatttttaaagataatc

SEQ ID NO: 651945 - DNA, 120 bp, Artificial Sequence
  ENSG00000183117_131 (sequence is synthesized)
gaatgtgttaaatctgtttattcttcatcacaatcataaaactgctgaattttatgtgaaatgattttcttagaaaataggctatagtttgttataccaatttttcccctttagaagaac

SEQ ID NO: 651946 - DNA, 120 bp, Artificial Sequence
  ENSG00000183117_132 (sequence is synthesized)
aagcaattaagccacctccaggcacaatgaacatctgaacaattcattctgaattatgtgagcatgcaaactgttgcttgtatacaaaccataatttgtacataaagttgatatgcttct

SEQ ID NO: 651947 - DNA, 120 bp, Artificial Sequence
  ENSG00000183117_133 (sequence is synthesized)
ccccaaagccagtcattcagctactctccacaaaatgtagcttgccacttctgggaaccagtgagaatcgggcaccagtctccatctccctgagaacctgataaacatttgactcctaca

SEQ ID NO: 651948 - DNA, 120 bp, Artificial Sequence
  ENSG00000183117_134 (sequence is synthesized)
cctggaataaatcatgtcctggttttctagttttagaaaagaaggttcctataacccctcagtcgtaattaagaaactgacccagttaccctgcttcactgcaggaagaaactgggctgt

SEQ ID NO: 651949 - DNA, 120 bp, Artificial Sequence
  ENSG00000183117_135 (sequence is synthesized)
atccagccatgaaactaaatcaagctggtgtctttccaaaccaaaggtgggaaactcttcacaaagtgcaaaacagcctgtccatcacacccaagaagccatcactactcttttgtaggt

SEQ ID NO: 651950 - DNA, 120 bp, Artificial Sequence
  ENSG00000183117_136 (sequence is synthesized)
gggaggatgggtgggaagatggaaatctctcatttttttgtctttatgaacctgggaccaaaaaaaaaacgaggaactttacctataaattagattgtgttgtgattcataaaccatgct

SEQ ID NO: 651951 - DNA, 120 bp, Artificial Sequence
  ENSG00000183117_137 (sequence is synthesized)
aattttataatttaaaacattggaattagttatgattttaaaaatttttaaatagaactcaaaaagaaatgttttcctcatatgattgatgttttaagtgtggccattgtttccaagcaa

SEQ ID NO: 651952 - DNA, 120 bp, Artificial Sequence
  ENSG00000183117_138 (sequence is synthesized)
aaatgacatttattcaattgtattaaatgagatttcttagtaggctatttttacttgattctatgtcagtaacatgtgaaataagcattagaggtgtgattaaattattggagagaaaat

SEQ ID NO: 651953 - DNA, 120 bp, Artificial Sequence
  ENSG00000183117_139 (sequence is synthesized)
taacattgctcacgggatccagtgttcctgacctcattgtgagcatgagcaaccagatgtggctacatctgcagtcggatgatagcattggctcacctgggtttaaagctgtttaccaag

SEQ ID NO: 651954 - DNA, 120 bp, Artificial Sequence
  ENSG00000183117_140 (sequence is synthesized)
ttattgcaacccaggatttttcagccccagttataaaactctgccctgtgtttcagaccactggtcaaactacgtgacccaatttctgctgtcctcaccctggcttagttaattggaaca

SEQ ID NO: 651955 - DNA, 120 bp, Artificial Sequence
  ENSG00000183117_141 (sequence is synthesized)
ttgtgctaagtaccaaggtcagagatgagtctctgtggatgctgtaaagccatttgattttacagtcttgcttaaaccatagcttctactttactttttttttcttttcgtcagcaatca

SEQ ID NO: 651956 - DNA, 120 bp, Artificial Sequence
  ENSG00000183117_142 (sequence is synthesized)
ctggggaagggaaaccaacacggatgcctcagtcaaggaagaaaagctgccacatcatttcagtactaatatcggctaagcttaatagagcatttttataaattaagaacttaaaacggt

SEQ ID NO: 651957 - DNA, 120 bp, Artificial Sequence
  ENSG00000183117_143 (sequence is synthesized)
attcatgagcacggaaatgcctgcgcgtctctttactccatggctcctgagagtggagggagtgtagcctctctatccctttcagttgctgatgccatggtcagctgtctgtcttcctgg

SEQ ID NO: 651958 - DNA, 120 bp, Artificial Sequence
  ENSG00000183117_144 (sequence is synthesized)
tccggcttggaccagtgtctcccaggcagacaggtgaggagctgggaggtacctgctgtgctccacgcagagcttcctctttgatctcagtccagactccactttgaaccccgccttcag

SEQ ID NO: 651959 - DNA, 120 bp, Artificial Sequence
  ENSG00000183117_145 (sequence is synthesized)
tcctgcagtggcagatcacaggcccccgtctctgcggagctcagtgagacgccaccacttggggaaatgcaaacgtgcctttgatgccactgcagcgaggataaagacggtctggaaccc

SEQ ID NO: 651960 - DNA, 120 bp, Artificial Sequence
  ENSG00000183117_146 (sequence is synthesized)
tccagtgaaaaaggcgattgagttgaagtcaagaggagtcaagatgctgcccagcaaggatggaagccataaaaactctgtctggcatcagcaagagttcagcaagtgcaggaagaaaaa

SEQ ID NO: 651961 - DNA, 120 bp, Artificial Sequence
  ENSG00000183117_147 (sequence is synthesized)
ctgatgggacatgctgtgtacggaggagcatttgcagttacaacactttgtagccatgcaggatggggcaattaatccagaaccattatttaataaaaagatgattttttaaatgtggaa

SEQ ID NO: 651962 - DNA, 120 bp, Artificial Sequence
  ENSG00000183117_148 (sequence is synthesized)
ttcatttttttcatttccatcttggaaagaattaagcagaataaaatgccttattctgttggcataactgtatctgtaattgaaagtggcgtacagatttaaataaagctttggcagagt

SEQ ID NO: 651963 - DNA, 89 bp, Artificial Sequence
  ENSG00000183117_149 (sequence is synthesized)
attaggcgttagagacctactcgatgtttcagggatagatagattaggcgtttagttcgacacacttcatgtttaaaaagcctcttagc

SEQ ID NO: 651964 - DNA, 120 bp, Artificial Sequence
  ENSG00000183117_150 (sequence is synthesized)
cacagtggtgatctgtagctgtgtgagtgcacggaacagcatgccagcatcagctcagatatcattatttacaccacatactccagaaaaagcaggtcatcaagcttgcctttgaagagt

SEQ ID NO: 651965 - DNA, 120 bp, Artificial Sequence
  ENSG00000183128_0 (sequence is synthesized)
gcctgtccctgccttaagtgcctactggatcccgggagcctgggctggggcctgggcactgcttcctccttggcccctcaggcccttggaagcagagagagaacctcttgcagatcccag

SEQ ID NO: 651966 - DNA, 120 bp, Artificial Sequence
  ENSG00000183128_1 (sequence is synthesized)
gctcgtccccagcacagcagacaccaggaaggtggccagagcctcactgagccgaaccgacggccgcccacccacccaggctggagccatggataaattccgcatgctcttccagcactt

SEQ ID NO: 651967 - DNA, 120 bp, Artificial Sequence
  ENSG00000183128_2 (sequence is synthesized)
ccagtcaagctcggagtcggtgatgaatggcatctgcctgctgctggctgcggtcaccgtcaagctgtactcctcctttgacttcaactgtccctgcctggtgcactacaatgcactcta

SEQ ID NO: 651968 - DNA, 120 bp, Artificial Sequence
  ENSG00000183128_3 (sequence is synthesized)
cggcctgggcctgctgctgacgcccccgctcgccctgtttctctgcggcctcctcgccaaccggcagtctgtggtgatggtcgaggagtggcgccggcccgcagggcaccggaggaagga

SEQ ID NO: 651969 - DNA, 120 bp, Artificial Sequence
  ENSG00000183128_4 (sequence is synthesized)
cccaggcatcatcaggtacatgtgctcctctgtgctgcagagggcgctggccgcccccctggtctggatcctgctggccctccttgacgggaagtgcttcgtgtgtgccttcagcagctc

SEQ ID NO: 651970 - DNA, 120 bp, Artificial Sequence
  ENSG00000183128_5 (sequence is synthesized)
tgtggaccctgagaagtttctggactttgccaacatgacccccagccaggtacagctcttcctggccaaggttccctgcaaggaggatgagctggtcagggatagccctgctcggaaggc

SEQ ID NO: 651971 - DNA, 120 bp, Artificial Sequence
  ENSG00000183128_6 (sequence is synthesized)
ggccctgcttcgaccagacagtcttcctgcagcgcagatactggagcaactacgtggacctggagcagaagctcttcgacgagacctgctgtgagcatgcgcgggacttcgcgcaccgct

SEQ ID NO: 651972 - DNA, 120 bp, Artificial Sequence
  ENSG00000183128_7 (sequence is synthesized)
gcgtgctgcacttctttgccagcatgcggagtgagctgcaggcgcgggggctgcgccggggcaatgcaggcaggagactcgagctccccgcagtgcctgagcccccagaaggcctggata

SEQ ID NO: 651973 - DNA, 120 bp, Artificial Sequence
  ENSG00000183128_8 (sequence is synthesized)
gtggaagtgggaaggcccacctgcgcgcaatctccagccgggagcaggtggaccgcctcctaagcacgtggtactccagcaagccgccgctggacctggctgcatcccccgggctctgcg

SEQ ID NO: 651974 - DNA, 120 bp, Artificial Sequence
  ENSG00000183128_9 (sequence is synthesized)
ggggtggccttagccaccgcgcccctaccttggcactgggcacgaggctgtcacaacacaccgacgtgtagggtcctggccaggcttgaagcggcagtgttcgcaggtgaaatgccgcgc

SEQ ID NO: 651975 - DNA, 120 bp, Artificial Sequence
  ENSG00000183128_10 (sequence is synthesized)
tgacaaagttctggagtctttccaggccgtggggaccccacggcaggcaccctaagtcttgttagcctcctttttaaagtagcccaatctctgcctagtttctgggtgtggcctccagcg

SEQ ID NO: 651976 - DNA, 120 bp, Artificial Sequence
  ENSG00000183128_11 (sequence is synthesized)
cgcttcacaaactttaatgtggactcggttcaccgagggccttgttaaatacaggttcagacagtgtagccaggaccgagtctgagattctgcattttaaacaagctcctggaggctgat

SEQ ID NO: 651977 - DNA, 120 bp, Artificial Sequence
  ENSG00000183128_12 (sequence is synthesized)
gtgcttttggtcagtgaaccaaactttgagtagcaagaatctaagtaaatctgccatgggttctgggttctagatgtcaattctaaataataataatgaccttagtctgctgcctcgata

SEQ ID NO: 651978 - DNA, 120 bp, Artificial Sequence
  ENSG00000183134_0 (sequence is synthesized)
gtctgcccgctgcctcttgtctagctgctgtcaggagctgactgcctccagggctggaatcctgtgctccctctgtgcccagagccccacgatgtcggccaacgccacactgaagccact

SEQ ID NO: 651979 - DNA, 120 bp, Artificial Sequence
  ENSG00000183134_1 (sequence is synthesized)
ctgccccatcctggagcagatgagccgtctccagagccacagcaacaccagcatccgctacatcgaccacgcggccgtgctgctgcacgggctggcctcgctgctgggcctggtggagaa

SEQ ID NO: 651980 - DNA, 120 bp, Artificial Sequence
  ENSG00000183134_2 (sequence is synthesized)
tggagtcatcctcttcgtggtgggctgccgcatgcgccagaccgtggtcaccacctgggtgctgcacctggcgctgtccgacctgttggcctctgcttccctgcccttcttcacctactt

SEQ ID NO: 651981 - DNA, 120 bp, Artificial Sequence
  ENSG00000183134_3 (sequence is synthesized)
cttggccgtgggccactcgtgggagctgggcaccaccttctgcaaactgcactcctccatcttctttctcaacatgttcgccagcggcttcctgctcagcgccatcagcctggaccgctg

SEQ ID NO: 651982 - DNA, 120 bp, Artificial Sequence
  ENSG00000183134_4 (sequence is synthesized)
cctgcaggtggtgcggccggtgtgggcgcagaaccaccgcaccgtggccgcggcgcacaaagtctgcctggtgctttgggcactagcggtgctcaacacggtgccctatttcgtgttccg

SEQ ID NO: 651983 - DNA, 120 bp, Artificial Sequence
  ENSG00000183134_5 (sequence is synthesized)
ggacaccatctcgcggctggacgggcgcattatgtgctactacaatgtgctgctcctgaacccggggcctgaccgcgatgccacgtgcaactcgcggcaggtggccctggccgtcagcaa

SEQ ID NO: 651984 - DNA, 120 bp, Artificial Sequence
  ENSG00000183134_6 (sequence is synthesized)
gttcctgctggccttcctggtgccgctggcgatcatcgcctcgagccacgcggccgtgagcctgcggttgcagcaccgcggccgccggcggccaggccgcttcgtgcgcctggtggcggc

SEQ ID NO: 651985 - DNA, 120 bp, Artificial Sequence
  ENSG00000183134_7 (sequence is synthesized)
cgtcgtggccgccttcgcgctctgctgggggccctaccacgtgttcagcctgctggaggcgcgggcgcacgcaaacccggggctgcggccgctcgtgtggcgcgggctgcccttcgtcac

SEQ ID NO: 651986 - DNA, 120 bp, Artificial Sequence
  ENSG00000183134_8 (sequence is synthesized)
cagcctggccttcttcaacagcgtggccaacccggtgctctacgtgctcacctgccccgacatgctgcgcaagctgcggcgctcgctgcgcacggtgctggagagcgtgctggtggacga

SEQ ID NO: 651987 - DNA, 120 bp, Artificial Sequence
  ENSG00000183134_9 (sequence is synthesized)
cagcgagctgggtggcgcgggaagcagccgccgccgccgcacctcctccaccgcccgctcggcctcccctttagctctctgcagccgcccggaggaaccgcggggccccgcgcgtctcct

SEQ ID NO: 651988 - DNA, 120 bp, Artificial Sequence
  ENSG00000183134_10 (sequence is synthesized)
cggctggctgctgggcagctgcgcagcgtccccgcagacgggccccctgaaccgggcgctgagcagcacctcgagttagaacccggcccacgtagggcggcactcacacgcgaaagtatc

SEQ ID NO: 651989 - DNA, 120 bp, Artificial Sequence
  ENSG00000183134_11 (sequence is synthesized)
accagggtgccgcggttcaattcgatatccggactcctgccgcagtgatcaaagtccgaggggcgggacccaggcacctgcattttaaagcgccccgggagactctgaatctttttcaga

SEQ ID NO: 651990 - DNA, 120 bp, Artificial Sequence
  ENSG00000183134_12 (sequence is synthesized)
acagtgagttaaagcagtgcttctcaaaccttgatgtgcctgtgaatcacctaggggtcttgttaagtgcagtctgatccaggaggccggggccgggtactgagagtctgcacttaacaa

SEQ ID NO: 651991 - DNA, 120 bp, Artificial Sequence
  ENSG00000183134_13 (sequence is synthesized)
gctcccaggccgagaagccagtgcggcaggttcacaggcgaggcctggagtaacacaaagtgaaactcataatagacttcccactctagggcagtggagtcggaagggcacacggggtgc

SEQ ID NO: 651992 - DNA, 120 bp, Artificial Sequence
  ENSG00000183134_14 (sequence is synthesized)
gtctccccggagttcagttttaccagatgatgggggaggggggaaggagttttatgttaaaccatccatgtatttttggagaagagagaggaaaggtttgagaagcactgttccagcctg

SEQ ID NO: 651993 - DNA, 120 bp, Artificial Sequence
  ENSG00000183134_15 (sequence is synthesized)
ccctcttcatttagccaatgcttactgcgctagacgcttcatcccacaatcttaaggggcagcttctattagccagtctttacagctgagcacattctggctcagggaggttaagtgact

SEQ ID NO: 651994 - DNA, 120 bp, Artificial Sequence
  ENSG00000183134_16 (sequence is synthesized)
tgcccagtttcagggctaacgaccacagggtctgcactctaaccctaggcatcacatgctcaatgactctctggtgagcgaggacattctctgacctactcgagggacttaagatgctac

SEQ ID NO: 651995 - DNA, 120 bp, Artificial Sequence
  ENSG00000183134_17 (sequence is synthesized)
cttgtgacccagcactgcccaaagtgcttccaaggcagaagcagcaggggatggcgtggtcaagcactcgggaaacctggggctaatcaaatccaatgggggaaatgactaaaagtcttc

SEQ ID NO: 651996 - DNA, 120 bp, Artificial Sequence
  ENSG00000183134_18 (sequence is synthesized)
ggtcgttagaagttgaatgggcacagcaactctaagactacagcacacgtcatttcttagctaagcggaccagcctccctgtcggcctggtgttctgtgggatccctctgggcactggta

SEQ ID NO: 651997 - DNA, 120 bp, Artificial Sequence
  ENSG00000183134_19 (sequence is synthesized)
atcccaagatctgtgcagccccgcctccaggccacatggggctgggcagctaccatttcccttttgcggatgggaggggtaacttgcacctctgacctatcacttccactgcaccccgtc

SEQ ID NO: 651998 - DNA, 120 bp, Artificial Sequence
  ENSG00000183134_20 (sequence is synthesized)
tcattcctccacctgccgtggacttggggtcagagactgctgtgtttgagctctgcagcccagggaccgaaaagttggtgtcaatgaattttgcttggtggatgaaatgtcagtggaaga

SEQ ID NO: 651999 - DNA, 120 bp, Artificial Sequence
  ENSG00000183134_21 (sequence is synthesized)
agcagatgagaaactcttgagatcttggtcctgtgttttttctgccaccaaaggccagggtcactgaaggcctggcccacagcaggtgctgagcaaagggaacagtgaggtgcccagcta

SEQ ID NO: 652000 - DNA, 120 bp, Artificial Sequence
  ENSG00000183134_22 (sequence is synthesized)
gctgcagagccaccctgtgttgacacctcgcccctgctccctcccatcccttccccctttactcatagcacttcccccattggacacgtggtgcattttgcttgtttattatgttttctc

SEQ ID NO: 652001 - DNA, 120 bp, Artificial Sequence
  ENSG00000183134_23 (sequence is synthesized)
tccatcagaatgaaagctcctcgagggcagggactttggtctattgtctgtatttgccggtgcctaggattgtgcctgtatgcaacaggcactcaataaatatttttgctgtagactgga

SEQ ID NO: 652002 - DNA, 120 bp, Artificial Sequence
  ENSG00000183137_0 (sequence is synthesized)
aaaatggatcctcacttcttcacttggatataataatatagactgccgacattctgggaactgatcagtcttccagcttccagtgtggtgccctccctcaattgtgctgagtgtccccca

SEQ ID NO: 652003 - DNA, 120 bp, Artificial Sequence
  ENSG00000183137_1 (sequence is synthesized)
atccagagatattctgtaatttcttcctcagaaagaaacaaaacaaaattctgatcttcccagatgaagataatggattctgaattaatgcatagtatagtaggaagctatcataaacct

SEQ ID NO: 652004 - DNA, 120 bp, Artificial Sequence
  ENSG00000183137_2 (sequence is synthesized)
ccagaaagagtatttgttccctcattcacccagaatgaaccatctcagaattgccatcctgcaaacttagaagttacctctcctaagatacttcatagcccaaatagccaagctcttatt

SEQ ID NO: 652005 - DNA, 120 bp, Artificial Sequence
  ENSG00000183137_3 (sequence is synthesized)
ttagccttaaaaactcttcaggaaaaaattcatcgtttagagctggagagaacacaagctgaagataacctgaacattctttccagagaagcagcacagtataagaaggccttagagaat

SEQ ID NO: 652006 - DNA, 120 bp, Artificial Sequence
  ENSG00000183137_4 (sequence is synthesized)
gaaacaaatgagagaaatctggcacaccaggagctgataaagcagaaaaaagatataagtatacagttaagctcagcccagtctcgttgtactcttctagagaagcaactagaatataca

SEQ ID NO: 652007 - DNA, 120 bp, Artificial Sequence
  ENSG00000183137_5 (sequence is synthesized)
aagagaatggttctcaacgtagagcgagaaaagaacatgatcctagaacaacaggcccagcttcagagggaaaaagaacaagatcagatgaagctgtatgcaaaacttgaaaagcttgat

SEQ ID NO: 652008 - DNA, 120 bp, Artificial Sequence
  ENSG00000183137_6 (sequence is synthesized)
gtcttagaaaaagagtgtttcagacttacaacaactcagaaaactgctgaggacaagattaaacatttagaagaaaaacttaaggaagaagaacatcagcgtaagctatttcaagacaaa

SEQ ID NO: 652009 - DNA, 120 bp, Artificial Sequence
  ENSG00000183137_7 (sequence is synthesized)
gcttctgagcttcaaactggacttgaaatcagtaaaattataatgtcttcagtttcaaatctaaagcactccaaggaaaagaagaaatcttcaaagaaaactaaatgtataaagagacga

SEQ ID NO: 652010 - DNA, 120 bp, Artificial Sequence
  ENSG00000183137_8 (sequence is synthesized)
ccaccttggcaaatttgttcaaagtttggagcactgccttttgtggctgaaaagatgaggcaacatcgtgacccacatatccttcagaaaccttttaacgtgactgagactagatgtctc

SEQ ID NO: 652011 - DNA, 120 bp, Artificial Sequence
  ENSG00000183137_9 (sequence is synthesized)
cccaagccttctagaacaacttcctggtgtaaagctattcctcctgactcagaaaagtccatttccatttgtgacaatttatctgaacttttgatggcaatgcaagatgagctggaccaa

SEQ ID NO: 652012 - DNA, 120 bp, Artificial Sequence
  ENSG00000183137_10 (sequence is synthesized)
gagaacaaatctccaaactgaagaagcatcaagacagtgtctgtaaactgcagcaaaaagttcaaaactcaaagatgagtgaagcttcaggtattcagcaagaagacagctaccctaaag

SEQ ID NO: 652013 - DNA, 120 bp, Artificial Sequence
  ENSG00000183137_11 (sequence is synthesized)
gatcaaagaacataaaaaatagccccagaaaatgtttgactgacactaacctttttcagaaaaacagcagctttcatccaatacgagttcataatcttcaaatgaaattgagaagagatg

SEQ ID NO: 652014 - DNA, 120 bp, Artificial Sequence
  ENSG00000183137_12 (sequence is synthesized)
atatcatgtgggaacagtaacaaaacagcaaaactgtcaccttaatgaactttgtcagtgagaccttgaattgtctaaagtggttttaatttaatataactttgtgacattttgaatcat

SEQ ID NO: 652015 - DNA, 120 bp, Artificial Sequence
  ENSG00000183137_13 (sequence is synthesized)
gtttctagtttctataaaacatgaagttgcagtatttaaaaattaatgcctaatgacctggtgggttccaaataataaattaattgcttttttatttttcttattgattgaagcccgtaa

SEQ ID NO: 652016 - DNA, 120 bp, Artificial Sequence
  ENSG00000183137_14 (sequence is synthesized)
cctcatcttgtcttagaaacattgttggctttgcagatatcttaagctaaatttaagaaattgtactagattgacaatattcaaaattgagttaaatccaagctacaagtaccattcatt

SEQ ID NO: 652017 - DNA, 120 bp, Artificial Sequence
  ENSG00000183137_15 (sequence is synthesized)
ccacttttcatttagtaggtttggaaccttaaaaaccaatgttcaatgaacagagttcagaaagatcatttagctttcctggtgccttctttctattttgttttagagctgtgaaatgtt

SEQ ID NO: 652018 - DNA, 120 bp, Artificial Sequence
  ENSG00000183137_16 (sequence is synthesized)
tttctcttttggaaaaggaaaaacttaatagttacacagttttgtgaagaagcctttaatccaagttttatgagacagtaggaacctatagctacttaatttttaggagacagtaattca

SEQ ID NO: 652019 - DNA, 120 bp, Artificial Sequence
  ENSG00000183137_17 (sequence is synthesized)
gttgcagaagctttcctctgctattcccattctcttttacaaaactagttttttttaaaaaatcaatgatcaattttatcttactactttataacttttgctgacttttattctttgcat

SEQ ID NO: 652020 - DNA, 120 bp, Artificial Sequence
  ENSG00000183137_18 (sequence is synthesized)
tgtatgtaatgtccatcagtataaattgagactgtgaatttctaggacccacaaaagtggtattttttttttgtacaagaaagtatagaggaagaggaagctgggcattaaattacctca

SEQ ID NO: 652021 - DNA, 120 bp, Artificial Sequence
  ENSG00000183137_19 (sequence is synthesized)
tccagcagaaattcacggtagtatggtatatttttattttttatattttaaaatcaataatgtcaaatgtcattgtgtatgcatgctttataataaatttacacttgatcatttttctgg

SEQ ID NO: 652022 - DNA, 120 bp, Artificial Sequence
  ENSG00000183137_20 (sequence is synthesized)
gaactgggccaagcgcccccggaggcgctaagcttgcgccctgaggcggtttccgttcccggacgtttggactctgtcctggagaaggggaaggaaaaagtaagacgtagaagtacactg

SEQ ID NO: 652023 - DNA, 120 bp, Artificial Sequence
  ENSG00000183137_21 (sequence is synthesized)
agacttcgtcacacataaaacaagcacgacaaagaaagagggcgcgaagggactcctggaagaaattgagtctacatttaagatcaccctaaaagtagtgacggcctcttcattactcca

SEQ ID NO: 652024 - DNA, 120 bp, Artificial Sequence
  ENSG00000183137_22 (sequence is synthesized)
aaccccagatttaagtcggtaggacgtcttcgcgttgacttgtggggaatgtagtttcgatgctgccggcgcgttttgtttgcgacagaaactacaacccccaggggccaccgcgacgtt

SEQ ID NO: 652025 - DNA, 120 bp, Artificial Sequence
  ENSG00000183137_23 (sequence is synthesized)
agtttggagcactgccttttgtggctgaaaagtctaccagtgcaagctgttctgtgaatgcaagtatgcaaaactttttgcagatgaggcaacatcgtgacccacatatccttcagaaac

SEQ ID NO: 652026 - DNA, 66 bp, Artificial Sequence
  ENSG00000183137_24 (sequence is synthesized)
cgcgaaccaacggttagcggtggcaggggctgactgagagcgtctgcttcctgcaacgtccgcctc

SEQ ID NO: 652027 - DNA, 120 bp, Artificial Sequence
  ENSG00000183137_25 (sequence is synthesized)
gttgcctgtgggtgcccgcgaaccaacggttagcggtggcaggggctgactgagagcgtctgcttggttgggaaaccaattagaaaggagtgttctgctagaaacagataatggattctg

SEQ ID NO: 652028 - DNA, 120 bp, Artificial Sequence
  ENSG00000183137_26 (sequence is synthesized)
ttggagcactgccttttgtggctgaaaaggtgagaggggataaaatgaagatagtcgttcaaaaaaactcctgttttgttatgaggcaacatcgtgacccacatatccttcagaaacctt

SEQ ID NO: 652029 - DNA, 120 bp, Artificial Sequence
  ENSG00000183137_27 (sequence is synthesized)
cttaataaatgtgtgacgcaagaataaaggaatgaatgaatggaagaatgatataatgccacagaactttcaaagatgggactgtctagttgcaaaaacaagctcagggatcccactgat

SEQ ID NO: 652030 - DNA, 120 bp, Artificial Sequence
  ENSG00000183137_28 (sequence is synthesized)
gaaaagaagaaatcttcaaaggtgtgcatataaaattttttcccaaacaaaaatactgctaatacttatttatataacctcttaatccttatacctacccctttccaaaaaggatttgaa

SEQ ID NO: 652031 - DNA, 120 bp, Artificial Sequence
  ENSG00000183137_29 (sequence is synthesized)
gatataaaataaaagacatgcaataatgcgtgtcaagtaatggatgatggtttggggtataaggacagaaaatttcataagattcaggttaaaaaaagtagcagcagtcatgtacaaaat

SEQ ID NO: 652032 - DNA, 120 bp, Artificial Sequence
  ENSG00000183137_30 (sequence is synthesized)
ttagctctgagtttgcttgacaaccaaagcaaaaaggaacatataatggacagtatagctatctttgtgaaataacaggaagcactccagtttttctagaaagattaacatttttctagt

SEQ ID NO: 652033 - DNA, 120 bp, Artificial Sequence
  ENSG00000183137_31 (sequence is synthesized)
tttaaacttctggagaaacatattttgtgatagtttataaaagaggcagtaaacaacacagtagatactgacaacataataaatcctgaaagcagttttatgtaatatatagacaataaa

SEQ ID NO: 652034 - DNA, 120 bp, Artificial Sequence
  ENSG00000183137_32 (sequence is synthesized)
aaataaggtttttcttatagacctgttaagtctgtaaagtcatttatatagggaatttattgttatatgtaatttctatgcttatttcttgtgaatttgcccaaaagtaaggattggaga

SEQ ID NO: 652035 - DNA, 120 bp, Artificial Sequence
  ENSG00000183137_33 (sequence is synthesized)
cttttaatcttatgattgtggaattatggttttgatggccattattactatttattcagatatgaatggagtgagtgttctctgtgccatttgttgtgggggacaggagatgctatttgg

SEQ ID NO: 652036 - DNA, 120 bp, Artificial Sequence
  ENSG00000183137_34 (sequence is synthesized)
gaattctggccactgccatatgcttagcttgtggataaaataatggagagaacagtaaacttaactttggctactcttttattacgtaaataaaaattaatgttcaatacttgggctgta

SEQ ID NO: 652037 - DNA, 120 bp, Artificial Sequence
  ENSG00000183137_35 (sequence is synthesized)
tttttcataattttttcattttaaagaattttcaaactacaataacgaacaatatttccccaatatgacttattttggctctttcctttcctaaatatttgttttgtgtcttatttgtgc

SEQ ID NO: 652038 - DNA, 120 bp, Artificial Sequence
  ENSG00000183137_36 (sequence is synthesized)
aatgagattcacagctacaaagccaaatagaaaaatcactataagtaatttgccagtggaacacatactgcccagtatgtatgttttatggcatcctttctctgatgggttaatggaact

SEQ ID NO: 652039 - DNA, 120 bp, Artificial Sequence
  ENSG00000183137_37 (sequence is synthesized)
tttttcagtttacctatttattataaaaatagtgaaggtacagggagaagataaaagaaatgaaggaaagaaaaggtaactactggaagagaagagagtaattaacagcagaatcatttt

SEQ ID NO: 652040 - DNA, 120 bp, Artificial Sequence
  ENSG00000183137_38 (sequence is synthesized)
atggaagtacttagttcaaatcccaagttcacggggtatgcaaataatgatgtctctttttaaagatggagggagtgctaaagttgctgaaagtaggatcagatttcaagaagcctctat

SEQ ID NO: 652041 - DNA, 120 bp, Artificial Sequence
  ENSG00000183137_39 (sequence is synthesized)
gagagatctgcttcccatcacactgtttctccatgtcctggacatagttcattcaactcttacatcttgatgtacatagactggtatctctaggtgataaaaagataagacaggaatttg

SEQ ID NO: 652042 - DNA, 120 bp, Artificial Sequence
  ENSG00000183137_40 (sequence is synthesized)
tgagaaacagataaatatataagtataaaacagtataatagaagattaatagaggtttaaacaaagtgttgtggtgctgtgtagacaaaggaatatgtgaaaggtaattcaagagcaata

SEQ ID NO: 652043 - DNA, 120 bp, Artificial Sequence
  ENSG00000183137_41 (sequence is synthesized)
ttaaaggaagccttgaagaattaaatattgacagactgagatgaggaaaaatgtgttatagtctgagggaattgttggtttttccagggacctataagtaatagtccagtagtgggggtg

SEQ ID NO: 652044 - DNA, 120 bp, Artificial Sequence
  ENSG00000183137_42 (sequence is synthesized)
agatgggatcataatgaaagttaaaatggaaaatatagcttggggtgagctaatggctgaccttgaatgccatgttaagagtttgaacttttattctataaacaggaactattgaaggct

SEQ ID NO: 652045 - DNA, 120 bp, Artificial Sequence
  ENSG00000183137_43 (sequence is synthesized)
tctgagaagagtagggacatgattagagttgtaattttagatggtaactgacagcagtaggagagttttacaagagagaaatcagatgtgtagatttttgagagaatcatatgtgtagat

SEQ ID NO: 652046 - DNA, 120 bp, Artificial Sequence
  ENSG00000183137_44 (sequence is synthesized)
tcatgtcaccatcacaataatcaagatacagaactcttccaccactaaaaaactccttcatgcaatccctctatagctacacatccccttccctgaacattggcaacctctaatctgttc

SEQ ID NO: 652047 - DNA, 120 bp, Artificial Sequence
  ENSG00000183137_45 (sequence is synthesized)
accatctgtgtattttattatttcaagaatgttatataaatggaattatgcagtatgtaactttttgtggttggcttttttcccttgaggtccgtccaagttgtcgtatgtatcagtaca

SEQ ID NO: 652048 - DNA, 120 bp, Artificial Sequence
  ENSG00000183137_46 (sequence is synthesized)
cgtatgtatcagtacatcctttttatttctgtgtggtattccgcattatggatgtaccacaatttaaccattcatctgttaaaggatatctggagccgggcgcggtggctcacacctgta

SEQ ID NO: 652049 - DNA, 120 bp, Artificial Sequence
  ENSG00000183137_47 (sequence is synthesized)
atcccagctactcgggagacaaaagcaggagaatcgcttgagcctgggagacggaggttgcggtgagccaagatcataccactgcaccccagtctgggtgacagaatgagaccctatctc

SEQ ID NO: 652050 - DNA, 120 bp, Artificial Sequence
  ENSG00000183137_48 (sequence is synthesized)
gcgacgttgcctgtgggtgcccgcgaaccaacggttagcggtggcaggggctgactgagagcgtctgcttgattcaggttatgctttctggccagaatactgcataggtgatgttgcgtc

SEQ ID NO: 652051 - DNA, 120 bp, Artificial Sequence
  ENSG00000183137_49 (sequence is synthesized)
agaatgatataatgccacagaactttcaaagataatggattctgaattaatgcatagtatagtaggaagctatcataaacctccagaaagagtatttgttccctcattcacccagaatga

SEQ ID NO: 652052 - DNA, 89 bp, Artificial Sequence
  ENSG00000183137_50 (sequence is synthesized)
aagcgcccccggaggcgctaagcttgcgccctgaggcggtttccgttcccggacgtttggactctgtcctggagaaggggaaggaaaaa

SEQ ID NO: 652053 - DNA, 78 bp, Artificial Sequence
  ENSG00000183137_51 (sequence is synthesized)
cctcaaagtgctaggattagagataatggattctgaattaatgcatagtatagtaggaagctatcataaacctccaga

SEQ ID NO: 652054 - DNA, 120 bp, Artificial Sequence
  ENSG00000183137_52 (sequence is synthesized)
tagagtgtttactcaagaaaatggaaattaaaggagaacaaatctccaaactgaagaagcatcaagacagtgtaagaaggctttagtaagagattttaataaaaacacaaaatatctgga

SEQ ID NO: 652055 - DNA, 120 bp, Artificial Sequence
  ENSG00000183137_53 (sequence is synthesized)
ggataaatgcgtaagagaacaattgttgggtcatgtgataagtacatttttagttttataagaaactgccaaactgtcttccaaaatggctgtaccattttgtattcccaccaacaatat

SEQ ID NO: 652056 - DNA, 80 bp, Artificial Sequence
  ENSG00000183145_0 (sequence is synthesized)
gttagcccgagtggatctaggcgcgctcgtaggccggcgccgcagcaaggggcgcgggctccgccggcaccatggagccc

SEQ ID NO: 652057 - DNA, 120 bp, Artificial Sequence
  ENSG00000183145_1 (sequence is synthesized)
gtcactgccccggggacgctccctggaggcctccgccaccgcgcgggccggagagccccgcgccgtggcgaccttggatccagacacctggagatgctgagctgaccagaactggaaggc

SEQ ID NO: 652058 - DNA, 120 bp, Artificial Sequence
  ENSG00000183145_2 (sequence is synthesized)
cgcttgaacctagggctgaccaacacacttttggatcaaagggagcctttgggtttcagcatcctgtaagagtctatttacccatgtcaaagcgtcaagaatacctgcggagttccgggg

SEQ ID NO: 652059 - DNA, 120 bp, Artificial Sequence
  ENSG00000183145_3 (sequence is synthesized)
agcaagtactggccagtttcccagtgcaagccacgattgacttctacgacgatgagtctactgagtctgcttccgaagctgaagagccagaggaaggacccccacccctccatcttctgc

SEQ ID NO: 652060 - DNA, 120 bp, Artificial Sequence
  ENSG00000183145_4 (sequence is synthesized)
cccaggaggtgggaggtcggcaggaaaatggcccagggggaaagggcagagaccagggcatcaaccaagggcagcgatcctcaggagggggtgaccactggggggagggtccgctccctc

SEQ ID NO: 652061 - DNA, 120 bp, Artificial Sequence
  ENSG00000183145_5 (sequence is synthesized)
aaggtgtctcctcaaggggtggcaagtgctcctcatccaaatgaatcagtctctgtctcctgggccctgctctgggacctgcccctcacgttctcttggggacacccgagccaggacact

SEQ ID NO: 652062 - DNA, 120 bp, Artificial Sequence
  ENSG00000183145_6 (sequence is synthesized)
acgcatccctgctgagtgtgcagaggctagaggcttctcgggcagcccctggcctgcacactactcatgacagaaagtcagcttttacttttctttcccctggcaattcgtttttggtgc

SEQ ID NO: 652063 - DNA, 120 bp, Artificial Sequence
  ENSG00000183145_7 (sequence is synthesized)
actcatgcatgcctttgagaaaggattctaggagaaagagaaggtctatgtcaacagagttgttatctcatagagccagttttcaaagctccttctgcattgtcactcactgatcaggtg

SEQ ID NO: 652064 - DNA, 120 bp, Artificial Sequence
  ENSG00000183145_8 (sequence is synthesized)
tagctatttctgcttttgtaaaaataattcagatattaaactccaattttaatctatcatccaagggtagatgtagttgcttagtagcattttggaaaaaaaagaaaaaaaggtttggtt

SEQ ID NO: 652065 - DNA, 120 bp, Artificial Sequence
  ENSG00000183145_9 (sequence is synthesized)
tacaggcgtgagccactgagcccggccaaaaaaaaatgtatttattaaaaaaaaatttttttaacccgccgaataattcccataagagtaacaaaaaggaccagcctgaccaacgtggag

SEQ ID NO: 652066 - DNA, 68 bp, Artificial Sequence
  ENSG00000183145_10 (sequence is synthesized)
ttttttaacccgccgaataattcccataagagtaacaaaaaggaccagcctgaccaactcatgcctgt

SEQ ID NO: 652067 - DNA, 120 bp, Artificial Sequence
  ENSG00000183145_11 (sequence is synthesized)
gaaagatagggatttttaggagacaattagataaaaatgtatgtgatgactgtataaggaggcctgtgtgtatgaatttatagggagtagaaccgtctctcttcttagttggtgactgtt

SEQ ID NO: 652068 - DNA, 120 bp, Artificial Sequence
  ENSG00000183145_12 (sequence is synthesized)
tggggcctggtattttaatagatgaacactacttttttaattttttatttttttaaccctacccttaacccatgaacactatttttaattaaagtatctgatgtaaaattattttgagtt

SEQ ID NO: 652069 - DNA, 120 bp, Artificial Sequence
  ENSG00000183145_13 (sequence is synthesized)
tttaatattttgataaacgtgtattcctgaaactttttgacttacttatcttacatgtggtgtcttcctgtatatagtacattatatcaatttctacttgaaataaatattttgaaagaa

SEQ ID NO: 652070 - DNA, 120 bp, Artificial Sequence
  ENSG00000183145_14 (sequence is synthesized)
acatcccacatccggcaggggaagcccagcagccccgcgccgtggcgaccttggatccagacacctggagatgctgagctgaccagaactggaaggccgagtctatttacccatgtcaaa

SEQ ID NO: 652071 - DNA, 120 bp, Artificial Sequence
  ENSG00000183145_15 (sequence is synthesized)
caaagcccgaggccgcggggaccacagagggacggagaagccgggactcctcacatcccacatccggcaggggaagcccagcagccccgcgccgtggcgaccttggatccagacacctgg

SEQ ID NO: 652072 - DNA, 120 bp, Artificial Sequence
  ENSG00000183148_0 (sequence is synthesized)
ggggatttggggctgggtcggccggggtcggggagggggttggtgaaaaggtgacagggagctgccctcgctcaagagccggtggttgggggtctgagaagaagtcaccaatatgaagtt

SEQ ID NO: 652073 - DNA, 120 bp, Artificial Sequence
  ENSG00000183148_1 (sequence is synthesized)
caatatgaagttattcggcttcgggagccgcaggggccagacggcccagggctccatagaccacgtctacacgggttccggataccgaatccgggactccgaactgcagaagatccacag

SEQ ID NO: 652074 - DNA, 120 bp, Artificial Sequence
  ENSG00000183148_2 (sequence is synthesized)
aggcgacgccgcggaggtggagcgctgcttggcgcgcaggagcggagacctggacgccctggacaagcagcacagaactgctctacacttggcctgtgccagtggccatgtgcaagtggt

SEQ ID NO: 652075 - DNA, 120 bp, Artificial Sequence
  ENSG00000183148_3 (sequence is synthesized)
cctgtgccagtggccatgtgcaagtggtcactctcctggttaacagaaaatgccagattgatgtctgtgacaaagaaaacagaacgcctttgatacaggctgtccattgccaggaagagg

SEQ ID NO: 652076 - DNA, 120 bp, Artificial Sequence
  ENSG00000183148_4 (sequence is synthesized)
cgccaatccaaaccttaaggatatctacggcaacactgctctccattatgccgtgtatagtgagagcacctcactggcagaaaaactgctttcccatggtgcacatattgaagcactgga

SEQ ID NO: 652077 - DNA, 86 bp, Artificial Sequence
  ENSG00000183148_5 (sequence is synthesized)
ggaaagcaagttcacatgccgttgataggctgagacggtcagctctcatgcttgctgtatactatgactcaccaggtattgtcaat

SEQ ID NO: 652078 - DNA, 120 bp, Artificial Sequence
  ENSG00000183148_6 (sequence is synthesized)
catgcttgctgtatactatgactcaccaggtattgtcaatatccttcttaagcaaaatattgatgtcttcgctcaagacatgtgtggacgagatgcagaagattatgctatttctcatca

SEQ ID NO: 652079 - DNA, 120 bp, Artificial Sequence
  ENSG00000183148_7 (sequence is synthesized)
cgagatgcagaagattatgctatttctcatcatttgacaaaaattcaacaacaaattttggaacataaaaagaagatacttaaaaaggagaaatcagatgttggaagttctgatgaatct

SEQ ID NO: 652080 - DNA, 83 bp, Artificial Sequence
  ENSG00000183148_8 (sequence is synthesized)
atgaatctgcagtcagcattttccatgaactgcgtgtggattcattgcctgcatcggatgacaaagacttgaatgttgctact

SEQ ID NO: 652081 - DNA, 120 bp, Artificial Sequence
  ENSG00000183148_9 (sequence is synthesized)
ctggatcttcgcatgaaaaaggaaacagaatagtcaatggacaaggagaagggcctcctgcaaaacatccttccttgaagcctagcactgaagtagaagatcctgctgtgaaaggagcag

SEQ ID NO: 652082 - DNA, 120 bp, Artificial Sequence
  ENSG00000183148_10 (sequence is synthesized)
aagaatgtacagacattgagagcagaacaagccttaccagtggcttcagaggaagagcaagaaaggcatgaaagaagtgaaaagaagcaaccacaggtcaaagaaggaaataatacaaac

SEQ ID NO: 652083 - DNA, 83 bp, Artificial Sequence
  ENSG00000183148_11 (sequence is synthesized)
atacaaacaaaagtgaaaaaatacaactttcagaaaatatatgtgatagtacatcttctgctgctgctggcagattaacccaa

SEQ ID NO: 652084 - DNA, 120 bp, Artificial Sequence
  ENSG00000183148_12 (sequence is synthesized)
tcagtcactagagatgaaatcaaagactgcaagaaatactccaaatcgggattttcataatcatgaagaaatgaaaggtctgatggatgaaaattgcattttgaaggcagatattgctat

SEQ ID NO: 652085 - DNA, 120 bp, Artificial Sequence
  ENSG00000183148_13 (sequence is synthesized)
gacaacttggaaaaagaaaataaatatcttaaggacattaaaattgttaaagaaacaaatgctgcccttgaaaagtatataaaactcaatgaggaaatgataacagaaacagcattccgg

SEQ ID NO: 652086 - DNA, 120 bp, Artificial Sequence
  ENSG00000183148_14 (sequence is synthesized)
tatcaacaagagcttaatgatctcaaggctgagaatacaaggctcaatgccgaactgttgaaggaaaaagaaagcaagaaaagactggaagctgacattgaatcttatcagtctagactg

SEQ ID NO: 652087 - DNA, 120 bp, Artificial Sequence
  ENSG00000183148_15 (sequence is synthesized)
gaaaacagaaagaaacctaaaacttgctttagagagaacacgagatgtttctgtacaagtagaaatgagttctgctatttccaaagtaaaagatgagaatgagtttcttactgaacaact

SEQ ID NO: 652088 - DNA, 120 bp, Artificial Sequence
  ENSG00000183148_16 (sequence is synthesized)
aaagatgagaatgagtttcttactgaacaactttctgaaacacaaattaaattcaatgccttaaaagataagttccgtaagacaagagatagtctcagaaaaaagtcattggctttagaa

SEQ ID NO: 652089 - DNA, 120 bp, Artificial Sequence
  ENSG00000183148_17 (sequence is synthesized)
atagtctcagaaaaaagtcattggctttagaaactgtacaaaacgacctaagccaaacacagcagcaaacacaggaaatgaaagagatgtatcaaaatgcagaagctaaagtgaataatt

SEQ ID NO: 652090 - DNA, 90 bp, Artificial Sequence
  ENSG00000183148_18 (sequence is synthesized)
gaataattccactggaaagtggaactgtgtagaagagaggatatgtcacctccaacgtgaaaatgcgtggcttgtacagcaactagatga

SEQ ID NO: 652091 - DNA, 70 bp, Artificial Sequence
  ENSG00000183148_19 (sequence is synthesized)
acctcgtgctagaagagaaaatatgagagagagaaaacagaaggagtagtaagtatcaaggaagataaat

SEQ ID NO: 652092 - DNA, 120 bp, Artificial Sequence
  ENSG00000183148_20 (sequence is synthesized)
catgaagcatccagaaaagataaatgtatagggacaaaaagtagattcatgtttgcaaggggctggggctggaagctggtagtgactgctaatgggcatgaggaatcttacagtgatgga

SEQ ID NO: 652093 - DNA, 77 bp, Artificial Sequence
  ENSG00000183148_21 (sequence is synthesized)
agtgactgctaatgggcatgaggaatcttacagtgatggaaatgctactaaaaatcttttaacttaaaacagataca

SEQ ID NO: 652094 - DNA, 86 bp, Artificial Sequence
  ENSG00000183148_22 (sequence is synthesized)
gaaaaatgtgtttactatatcggcttagaaacatgcctcatttctaggaaataaaagatagaggtgagagatgatttactttgaga

SEQ ID NO: 652095 - DNA, 120 bp, Artificial Sequence
  ENSG00000183148_23 (sequence is synthesized)
gtcatattttaaggtagatagttctgtattgctgaaatagtaattttaatgtctttatgttgccacatgttaagaccataatgtagttataaatggaaatgtttacacctgaagtgagta

SEQ ID NO: 652096 - DNA, 120 bp, Artificial Sequence
  ENSG00000183148_24 (sequence is synthesized)
acacctgaagtgagtattttcaaattaaaatttaattaagtgattttcttcgacacttaattctagattccccagatgaattgaagtgtattgctgtgtcttgtaataccttgctttaac

SEQ ID NO: 652097 - DNA, 120 bp, Artificial Sequence
  ENSG00000183148_25 (sequence is synthesized)
tagctttttatgtattttagttggtatagctttgttattattcatattaacaaatctgaaaatatgtcaaattacgtgtttttatgaccatgtaatgttttaaaggcacctacttgttat

SEQ ID NO: 652098 - DNA, 120 bp, Artificial Sequence
  ENSG00000183148_26 (sequence is synthesized)
tgaccatgtaatgttttaaaggcacctacttgttataaaatcataatttaggataaatgtggtaaaacttagcaaaactatatttggtttagttttcccactggtatttatagtttactt

SEQ ID NO: 652099 - DNA, 120 bp, Artificial Sequence
  ENSG00000183148_27 (sequence is synthesized)
ggactatttaataataaggaaaataaatgcatttgaagccaatctctcttaattcaaagctcatttccatggtgacccatttggagcaggagtgcctgacattggcatctgggatcctga

SEQ ID NO: 652100 - DNA, 78 bp, Artificial Sequence
  ENSG00000183148_28 (sequence is synthesized)
ggaagagcaagaaaggcatgaaagaagtgaaaagaagcaaccacagctaattttaaaacatgcactctgacagaaaag

SEQ ID NO: 652101 - DNA, 120 bp, Artificial Sequence
  ENSG00000183150_0 (sequence is synthesized)
ctttccgcctagtgagaggcggtccgatttggcccttggggagtgtccgtcgcgttgatctgatggattcacgtacacaacaccacattctatgagattttgcaggcaaaagtccacaag

SEQ ID NO: 652102 - DNA, 120 bp, Artificial Sequence
  ENSG00000183150_1 (sequence is synthesized)
ctcgatatatgggacacctgcaccggcattggatttggccccgcaacatcttaaaggaagcaggctgtgagccaaggggaaggcagaggacagaaatgaatgtgtttccaggctttcctg

SEQ ID NO: 652103 - DNA, 120 bp, Artificial Sequence
  ENSG00000183150_2 (sequence is synthesized)
gtggtttatggcattctccaaactcctatgcaagggctattcctgaccaagaagatctaaagagaacgtctctgaaatcaagtccggatgaagaattaagagaaaaaaagtgaatatggt

SEQ ID NO: 652104 - DNA, 120 bp, Artificial Sequence
  ENSG00000183150_3 (sequence is synthesized)
ttttgctcacagaatggataacagcaagccacatttgattattcctacacttctggtgcccctccaaaaccgcagctgcactgaaacagccacacctctgccaagccaatacctgatgga

SEQ ID NO: 652105 - DNA, 120 bp, Artificial Sequence
  ENSG00000183150_4 (sequence is synthesized)
attaagtgaggagcacagttggatgagcaaccaaacagaccttcactatgtgctgaaacccggggaagtggccacagccagcatcttctttgggattctgtggttgttttctatcttcgg

SEQ ID NO: 652106 - DNA, 120 bp, Artificial Sequence
  ENSG00000183150_5 (sequence is synthesized)
caattccctggtttgtttggtcatccataggagtaggaggactcagtctaccaccaactactttgtggtctccatggcatgtgctgaccttctcatcagcgttgccagcacgcctttcgt

SEQ ID NO: 652107 - DNA, 120 bp, Artificial Sequence
  ENSG00000183150_6 (sequence is synthesized)
cctgctccagttcaccactggaaggtggacgctgggtagtgcaacgtgcaaggttgtgcgatattttcaatatctcactccaggtgtccagatctacgttctcctctccatctgcataga

SEQ ID NO: 652108 - DNA, 120 bp, Artificial Sequence
  ENSG00000183150_7 (sequence is synthesized)
gattgcggcatcgtgggtctttgatgcaggctttgtgacccctgtgctctttttctatggctccaactgggacagtcattgtaactatttcctcccctcctcttgggaaggcactgccta

SEQ ID NO: 652109 - DNA, 120 bp, Artificial Sequence
  ENSG00000183150_8 (sequence is synthesized)
cactgtcatccacttcttggtgggctttgtgattccatctgtcctcataattttattttaccaaaaggtcataaaatatatttggagaataggcacagatggccgaacggtgaggaggac

SEQ ID NO: 652110 - DNA, 120 bp, Artificial Sequence
  ENSG00000183150_9 (sequence is synthesized)
aatgaacattgtccctcggacaaaagtgaaaactatcaagatgttcctcattttaaatctgttgtttttgctctcctggctgccttttcatgtagctcagctatggcacccccatgaaca

SEQ ID NO: 652111 - DNA, 120 bp, Artificial Sequence
  ENSG00000183150_10 (sequence is synthesized)
agactataagaaaagttcccttgttttcacagctatcacatggatatcctttagttcttcagcctctaaacctactctgtattcaatttataatgccaattttcggagagggatgaaaga

SEQ ID NO: 652112 - DNA, 120 bp, Artificial Sequence
  ENSG00000183150_11 (sequence is synthesized)
gactttttgcatgtcctctatgaaatgttaccgaagcaatgcctatactatcacaacaagttcaaggatggccaaaaaaaactacgttggcatttcagaaatcccttccatggccaaaac

SEQ ID NO: 652113 - DNA, 120 bp, Artificial Sequence
  ENSG00000183150_12 (sequence is synthesized)
tattaccaaagactcgatctatgactcatttgacagagaagccaaggaaaaaaagcttgcttggcccattaactcaaatccaccaaatacttttgtctaagttctcattctttcaattgt

SEQ ID NO: 652114 - DNA, 120 bp, Artificial Sequence
  ENSG00000183150_13 (sequence is synthesized)
tatgcaccagagattaaaaagctttaactataaaaacagaagctatttacatatttgttttcactcaactttccaagggaaatgttttattttgtaaaatgcattcatttgtttactgta

SEQ ID NO: 652115 - DNA, 120 bp, Artificial Sequence
  ENSG00000183150_14 (sequence is synthesized)
cactttgaactttagccaacagtccttttactattaatatattagttacatgcataaaaaagaaaatgctttcttactatttactgttggttcaaaaacataaacctaagccatacacac

SEQ ID NO: 652116 - DNA, 120 bp, Artificial Sequence
  ENSG00000183150_15 (sequence is synthesized)
ctcgatatatgggacacctgcaccggcattggatttggccccgcaacatcttaaaggaacaacctaatacataccccttgtctgcctgatccctggggaacatgctgtcctgtgatgctg

SEQ ID NO: 652117 - DNA, 120 bp, Artificial Sequence
  ENSG00000183150_16 (sequence is synthesized)
gcccctgctgtggggttaccttgtcttggttgtggcaggcctactggctgttagttcagcatcatccttcaagagaacagaaaggcttagaataattgattgtcatatctgtgtctgacc

SEQ ID NO: 652118 - DNA, 120 bp, Artificial Sequence
  ENSG00000183150_17 (sequence is synthesized)
atgctattgtggacttggcctgaacagccatagaaatgcaaggaatgaggtttgagggacttgggcagttgtctcaaaaagggagtcaaggcagaaatcccttaccctgagcactgctct

SEQ ID NO: 652119 - DNA, 120 bp, Artificial Sequence
  ENSG00000183150_18 (sequence is synthesized)
caacatggaggaagcaggctgtgagccaaggggaaggcagaggacagaaatgaatgtgtttccaggctttcctggtggtttatggcattctccaaactcctatgcaagggctattcctga

SEQ ID NO: 652120 - DNA, 120 bp, Artificial Sequence
  ENSG00000183150_19 (sequence is synthesized)
ccttggtattgcgactgaaatttggctcagaggacataatgccttctttttttccaggcaatttggagattttgtcctgccttagatgctggttagaggctttaggtttgttaccagtcc

SEQ ID NO: 652121 - DNA, 120 bp, Artificial Sequence
  ENSG00000183150_20 (sequence is synthesized)
agaaaagatgcctaggtagttctgtaaaatgaaaattcatcagagtatgtgtcagttgaaaaattggatggaaattgtgtatagtgataattaatgaaacaaagcactcattgatgaaaa

SEQ ID NO: 652122 - DNA, 120 bp, Artificial Sequence
  ENSG00000183153_0 (sequence is synthesized)
agccatcctgtcctgtcctccatcctggccaaatccgaaagggaaaatgaaagagggagcaggaggcgccggtcccagccacctcccaaggtccctggctcagctctgacaccccagtcc

SEQ ID NO: 652123 - DNA, 120 bp, Artificial Sequence
  ENSG00000183153_1 (sequence is synthesized)
cggccccagggtgagtggggttgggtggcggtttaggggcaccaggggcgtgtggggacctgtgtaagtgtggggtggggaggatctcaggagatgtggaggctggaggcacaggaggcc

SEQ ID NO: 652124 - DNA, 120 bp, Artificial Sequence
  ENSG00000183153_2 (sequence is synthesized)
agggaggagggagaagcctggcgtcgcactcccaccacgctggggtaggagggcagggacacctccgacaaaggaccctgtgagagttatgaaagcggagttgcctctgtaccagccccc

SEQ ID NO: 652125 - DNA, 120 bp, Artificial Sequence
  ENSG00000183153_3 (sequence is synthesized)
caccctgagaggagttcactgcagtaaaaatggtgagagaaatggtgggccaagaaaggagtggtctcgctgcctctgccactcccactcctcccatgggcaccaaattgggtctagcgt

SEQ ID NO: 652126 - DNA, 120 bp, Artificial Sequence
  ENSG00000183153_4 (sequence is synthesized)
ctcgggttcgaggctccactcttcccacagcatccttgacagctaagggcaccgctgggtttccgcttccgaaaccaggcaagtcaggggctggtccagctgatctccaaggtccttcct

SEQ ID NO: 652127 - DNA, 120 bp, Artificial Sequence
  ENSG00000183153_5 (sequence is synthesized)
aagaatctgggatctggaggatcccagggtcgaacggagacggctcagggggtgcggctaaaatgcaaatgggggatcctccccagcacccatcggtcccaaagagaaggtaacccatag

SEQ ID NO: 652128 - DNA, 120 bp, Artificial Sequence
  ENSG00000183153_6 (sequence is synthesized)
ctgagcgtcgcctgctcccctcgggccctcccgtggccctccgtttcatactggtctcatcgctaaacccgggcctctcctacctcacgactcaccctgaagtcagagaaggtccaacgg

SEQ ID NO: 652129 - DNA, 120 bp, Artificial Sequence
  ENSG00000183153_7 (sequence is synthesized)
accccaccccgataggcttggaaggggcaggggtccctgacttgccccatcccctgactccccgccccgcgtccccagcgccatgggggagtgggcgttcctgggctcgctgctggacgc

SEQ ID NO: 652130 - DNA, 120 bp, Artificial Sequence
  ENSG00000183153_8 (sequence is synthesized)
cgtgcagctgcagtcgccgctcgtgggccgcctctggctggtggtcatgctgatcttccgcatcctggtgctggccacggtgggcggcgccgtgttcgaggacgagcaagaggagttcgt

SEQ ID NO: 652131 - DNA, 120 bp, Artificial Sequence
  ENSG00000183153_9 (sequence is synthesized)
gtgcaacacgctgcagccgggctgtcgccagacctgctacgaccgcgccttcccggtctcccactaccgcttctggctcttccacatcctgctgctctcggcgcccccggtgctgttcgt

SEQ ID NO: 652132 - DNA, 120 bp, Artificial Sequence
  ENSG00000183153_10 (sequence is synthesized)
ggtgctgttcgtcgtctactccatgcaccgggcaggcaaggaggcgggcggcgctgaggcggcggcgcagtgcgcccccggactgcccgaggcccagtgcgcgccgtgcgccctgcgcgc

SEQ ID NO: 652133 - DNA, 120 bp, Artificial Sequence
  ENSG00000183153_11 (sequence is synthesized)
ccgctgctacctgctgagcgtggcgctgcgcctgctggccgagctgaccttcctgggcggccaggcgctgctctacggcttccgcgtggccccgcacttcgcgtgcgccggtccgccctg

SEQ ID NO: 652134 - DNA, 120 bp, Artificial Sequence
  ENSG00000183153_12 (sequence is synthesized)
cccgcacacggtcgactgcttcgtgagccggcccaccgagaagaccgtcttcgtgctcttctatttcgcggtggggctgctgtcggcgctgctcagcgtagccgagctgggccacctgct

SEQ ID NO: 652135 - DNA, 120 bp, Artificial Sequence
  ENSG00000183153_13 (sequence is synthesized)
ctggaagggccgcccgcgcgccggggagcgtgacaaccgctgcaaccgtgcacacgaagaggcgcagaagctgctcccgccgccgccgccgccacctccgccaccggccctgccctcccg

SEQ ID NO: 652136 - DNA, 80 bp, Artificial Sequence
  ENSG00000183153_14 (sequence is synthesized)
cacccggcgccggccagcctccgcgagtgcggcagcggccgcggcaaggcgtcaccggccaccggccgccgagatctggc

SEQ ID NO: 652137 - DNA, 120 bp, Artificial Sequence
  ENSG00000183153_15 (sequence is synthesized)
catctaggggcgggcaccgcctcgcgcggactggacggcgagggccggaccccgccacctccgcccgcaccgcagaagccggaagctgcttccaccagagctgtcgcgggacctgccccg

SEQ ID NO: 652138 - DNA, 120 bp, Artificial Sequence
  ENSG00000183153_16 (sequence is synthesized)
gcaggagacgcgttgtggggacggcccgcgggcggcatcgcacttgcctcgtactgcctcccagtggctgccggcggcacctggggcaggccgggctgggggcggagaatgaactcaggc

SEQ ID NO: 652139 - DNA, 120 bp, Artificial Sequence
  ENSG00000183153_17 (sequence is synthesized)
tggatgccaccacccaggtggaaaggaaggagaccaggaccctgagagagagtggacccgagggggagaacagagcggaaggtggagagtggttgttttactggggacaaaaacaactgt

SEQ ID NO: 652140 - DNA, 120 bp, Artificial Sequence
  ENSG00000183153_18 (sequence is synthesized)
gatgccagcattctcaggcactctctgtgttcagagagagagtggtccccctgtgggctctctgcgagtgtgcatacacggacacataagcactgtgagctgtgtgcacgcgcacctgta

SEQ ID NO: 652141 - DNA, 120 bp, Artificial Sequence
  ENSG00000183153_19 (sequence is synthesized)
caccctgtgtgagcgctgtgcatgtgcgcgcatgtgtacaccctgcgtgaggcccacttgtgcacacagacacacgtaaccctcccgggtgagctgtgtgcacatgcacacagaaacata

SEQ ID NO: 652142 - DNA, 120 bp, Artificial Sequence
  ENSG00000183153_20 (sequence is synthesized)
tgccccttgagagctgtgtactcacatccctgtgagctttgtgtgagtgcattgtgcacacacgcacatgtccattctgtgtgggctgcgtgtgcacacctgtacacagaaacatccttg

SEQ ID NO: 652143 - DNA, 120 bp, Artificial Sequence
  ENSG00000183153_21 (sequence is synthesized)
tgcgctatgtgtgcatgtgtacatccggcgtgacctctgtgtgtgcacgcgtgtgtgtgtgatctctgatatgcactgcgggggtggccaggatccgatgccagctgcagccacaatggc

SEQ ID NO: 652144 - DNA, 120 bp, Artificial Sequence
  ENSG00000183153_22 (sequence is synthesized)
tccctccctaccaccctaacccagcccacctgccagggcatcacaggaggtctgtccccccctcccaagagaccccgcccagggagggaagaggaggagaggctccctttccccgggcag

SEQ ID NO: 652145 - DNA, 120 bp, Artificial Sequence
  ENSG00000183153_23 (sequence is synthesized)
gcctcaatcctcgggagcctatgagcaacatcctcacagtaccccttgtggcgaggcgggggctgggcgctttcatggaggtggggtgggggtgggcggcgggccagagggcaacccaga

SEQ ID NO: 652146 - DNA, 120 bp, Artificial Sequence
  ENSG00000183153_24 (sequence is synthesized)
cgtgtgttatgcctccctcctccatcttcatcctccccgccgctactgctcccccaggctataaacgggaaagtcccttctgtcctcaggagaaagctcccaaaacacacgcgctcccgg

SEQ ID NO: 652147 - DNA, 120 bp, Artificial Sequence
  ENSG00000183153_25 (sequence is synthesized)
ccctgccttcccttccaaccacccccttcttcctacttgcgggcattcgaagagctgctgcctatgcagcgcatccccctcctgtgtctcccctcccgtctgccctcccccttcaccagc

SEQ ID NO: 652148 - DNA, 120 bp, Artificial Sequence
  ENSG00000183153_26 (sequence is synthesized)
cagtgggctgctctccataagatcacccaggacctaagcgagaaatccaggggccgtcatcggactgcaccttgcgggcctcaccgcatcctgcctaccaggctgtgcgttccccgccat

SEQ ID NO: 652149 - DNA, 120 bp, Artificial Sequence
  ENSG00000183153_27 (sequence is synthesized)
caccccaccctgtccttctgagttcctggcgtctttctcagctctcctgtgccccacacagcagtgggaggtgtttctgaatagcgccccccacttaaacccgggactgagggcagcacc

SEQ ID NO: 652150 - DNA, 120 bp, Artificial Sequence
  ENSG00000183153_28 (sequence is synthesized)
cctgccctcagggtgagtcaagcgccttcacaaagcttccttctgaagccctgcccctgtcaggccttcgactccacagcaccggcttccaggtgtgctcagaaccatagggaattttct

SEQ ID NO: 652151 - DNA, 120 bp, Artificial Sequence
  ENSG00000183153_29 (sequence is synthesized)
cttctaacaagcaccagacctgcttgctgccaagcgtttgaacgtgctgttcctttgcccagagtagccgctgcttcctgcagccttctcctcccctagctaatgcccacccacctattg

SEQ ID NO: 652152 - DNA, 120 bp, Artificial Sequence
  ENSG00000183153_30 (sequence is synthesized)
ttgtcacttgggaagaaaacagacaccttcaaggagagggctcccctggtagcccccaccccaagacagagctggatgcccctcgcttccgtagggaaagcacttctcctgcaggatggc

SEQ ID NO: 652153 - DNA, 120 bp, Artificial Sequence
  ENSG00000183153_31 (sequence is synthesized)
attgctctctccccttccatggcacgtagtatgtgctcagtaaatatgtgttggatgagaaactgaaggtgtccccaggcctacaccactgccatgcccgaacactatccatgctatggt

SEQ ID NO: 652154 - DNA, 120 bp, Artificial Sequence
  ENSG00000183153_32 (sequence is synthesized)
gggcaccatctctctgatgacagttctgtgtccacaacccagacccctccacacaaacccagatggggctgtgccgctgttttccagatgtattcattcaacaaatatttgtagggtacc

SEQ ID NO: 652155 - DNA, 120 bp, Artificial Sequence
  ENSG00000183153_33 (sequence is synthesized)
tactgtgtgtcagaagatgttcaagatcagcatcatccgatggaaatagcatatgagccatgtatgtagtttcaagtttttcattagccacattaaaaaagtaaaaggaaacaaatgaaa

SEQ ID NO: 652156 - DNA, 120 bp, Artificial Sequence
  ENSG00000183155_0 (sequence is synthesized)
agagacagcgtctgcgcagccgtggctgaggagcctgtggcggcagcggcgatggaaccagcggagcagccgagcgagttagtgtcagccgagggccgaaaccggaaggcggtgctgtgc

SEQ ID NO: 652157 - DNA, 120 bp, Artificial Sequence
  ENSG00000183155_1 (sequence is synthesized)
cagcgttgcggctcccgggtgctgcagccagggaccgctctcttctctcgccgacagcttttccttccctccatgagaaagaagccagctctgtctgacggcagcaatcctgacggcgat

SEQ ID NO: 652158 - DNA, 120 bp, Artificial Sequence
  ENSG00000183155_2 (sequence is synthesized)
ctcctccaggaacactggctggttgaggacatgttcatttttgagaatgtgggcttcaccaaggacgtgggcaacatcaagtttctggtctgcgcagactgtgaaattggaccaattggc

SEQ ID NO: 652159 - DNA, 120 bp, Artificial Sequence
  ENSG00000183155_3 (sequence is synthesized)
tggcattgcctagatgacaagaacagtttctatgtggccttggaacgagtttcccatgagtaactgaggggaggggtactcagctccatctccaaagataaacctactccccacaagaac

SEQ ID NO: 652160 - DNA, 120 bp, Artificial Sequence
  ENSG00000183155_4 (sequence is synthesized)
tggcctttaatgtggtataactgttccgctgccttcttgtctgtgctaatataaatactgagtaccagcatgtccatttgaacatgcagagggttaatcctgcttcctaaagcctcaagt

SEQ ID NO: 652161 - DNA, 120 bp, Artificial Sequence
  ENSG00000183155_5 (sequence is synthesized)
acatgcctcctgcttagttcactttgtatcacatttcctaagctcccttttcccccagttttgggacactgtgcttacctccaaaaatctcatctcttccctggcattctccctaggctc

SEQ ID NO: 652162 - DNA, 120 bp, Artificial Sequence
  ENSG00000183155_6 (sequence is synthesized)
tgttttgcccaggggctcccgctttttcttgctctagaagagcagtattcaaccttttagctatgatgacacataacaaaagatgcttatgtactaatagttgaaatctgcctttttctc

SEQ ID NO: 652163 - DNA, 120 bp, Artificial Sequence
  ENSG00000183155_7 (sequence is synthesized)
attcaagaaggcatacaaatatctgagagtgactttgttgtatggctacccttgtgatctacagtaatttattctttctaaaggtaaagcattttcaaaactcagtatttaaaccactaa

SEQ ID NO: 652164 - DNA, 120 bp, Artificial Sequence
  ENSG00000183155_8 (sequence is synthesized)
ccagaaacattactttggatgcatctctaataccatgtttgagcacctctgctctaggttgagaatgacattttattgtgaagatgggtgtggtccctcttcccttgaaatcttgtagtt

SEQ ID NO: 652165 - DNA, 120 bp, Artificial Sequence
  ENSG00000183155_9 (sequence is synthesized)
tctttttatattagctcctcactgctacagcctagaaggtgagaagcagattttaaccccatctggcagccattcaaggaaaacccagccctggctgtttactcaggctctcttagaatg

SEQ ID NO: 652166 - DNA, 120 bp, Artificial Sequence
  ENSG00000183155_10 (sequence is synthesized)
agagtggagggtgtaggatatgagggttaggcctttgccacattatacaaaagtttataatttgccacatctggacaagtaactttcttcttttgttcataggcaagacttctttaatgg

SEQ ID NO: 652167 - DNA, 120 bp, Artificial Sequence
  ENSG00000183155_11 (sequence is synthesized)
atagtatcatttactgaacctactgggcatggtcctcatggagttttggttcaactggaatctctgtgccaacccaggatacaaacttccatccagatgcatggatacaaatttccatag

SEQ ID NO: 652168 - DNA, 120 bp, Artificial Sequence
  ENSG00000183155_12 (sequence is synthesized)
tataaccaaggtttcaggtatcctcctgtcaccacctctactattcaggaggcctaaaattgaaataagtactaaacagaaaccttaccatctgaagtcccttccattgttttctagttg

SEQ ID NO: 652169 - DNA, 120 bp, Artificial Sequence
  ENSG00000183155_13 (sequence is synthesized)
cttcctcattcctttacccccaaactttctaagggctccccgactgcagtgcaaggtggccttgggcacagttttgcaaccaacctactcccctggaaagatggcttccttctccaatta

SEQ ID NO: 652170 - DNA, 120 bp, Artificial Sequence
  ENSG00000183155_14 (sequence is synthesized)
gcctgaatgagctttagtaagcaattgagagaactgtgtttttccgacaaacggtcacatgtccatcgttatggcatgtgcagaaaaacagagttatccacacaagtcaggagcaaaacc

SEQ ID NO: 652171 - DNA, 120 bp, Artificial Sequence
  ENSG00000183155_15 (sequence is synthesized)
cacaagtcaggagcaaaacccaagtagatgcctctaggggcacatggcccctcacatcacaagccagaacctaagctaagcattttttaaattgagtttgagactagcctgggcaacata

SEQ ID NO: 652172 - DNA, 120 bp, Artificial Sequence
  ENSG00000183155_16 (sequence is synthesized)
aaaaaatgaacaaaattacctgggcatagtggtgtatacctgtagtccctgctacttgggaggctcaggtgggaggatcacttgagccccaaagatggtggctgcagtaagccaagatca

SEQ ID NO: 652173 - DNA, 120 bp, Artificial Sequence
  ENSG00000183155_17 (sequence is synthesized)
gagtgagaccctgtctcaaacaaacaacaacagtaacaacaaaaaaatatatagcgacttgaataggaaaccatagtatttcattgttttaatttgcatttattttatttctagtgaaac

SEQ ID NO: 652174 - DNA, 120 bp, Artificial Sequence
  ENSG00000183155_18 (sequence is synthesized)
tttgcatttattttatttctagtgaaacttttatatacgtatcggtcatttctatttccttttttgagaactgccaaatgttgccctagtagccaaaaatatcaggttgctattctgcct

SEQ ID NO: 652175 - DNA, 120 bp, Artificial Sequence
  ENSG00000183155_19 (sequence is synthesized)
tttcagtttgatctgaaagaaataaaggcatttaagcaatggaaattagatttctgcatgtccttgggaagaatatataaattgaaaaaacaaaggagagctgaaacctgaaccttgggg

SEQ ID NO: 652176 - DNA, 120 bp, Artificial Sequence
  ENSG00000183155_20 (sequence is synthesized)
tttagcttaaggtcaaccaactgattatctagtcagctataaaatgcaaacgtcatttcttcatttccctcacacctaataggctctcagtacatacttgtgaatcagctgctatttgct

SEQ ID NO: 652177 - DNA, 120 bp, Artificial Sequence
  ENSG00000183155_21 (sequence is synthesized)
gtgggtagatagaggcaacctgtgctttctgctccgagtatagaaacttccgttttctattggggagagcagttgattttgtgaaagcctgattgtttccacataattgtctgttgtttt

SEQ ID NO: 652178 - DNA, 120 bp, Artificial Sequence
  ENSG00000183155_22 (sequence is synthesized)
acaaaaacatggaatcaaagatgggcagtggtgtactgacatttcacaaattgtcaccatgttgtatatgaggctacacatgtaactgagtaactatgaggacttctgcttctgataatg

SEQ ID NO: 652179 - DNA, 120 bp, Artificial Sequence
  ENSG00000183155_23 (sequence is synthesized)
gtggataggtcctttggactacccagctcactggttaactagaaaggctggacaaaatactttagaaatctgtgtgaacacaccaagagagccgacttgactttgaagaattgctaaacc

SEQ ID NO: 652180 - DNA, 120 bp, Artificial Sequence
  ENSG00000183155_24 (sequence is synthesized)
aggacagcagaggagatgggaaccctgggaggtgggcttggtgtgagggccaccgttctcctgggagcatttgccaaacttggaggtgattcagaggcttagcagtgattttagcagcct

SEQ ID NO: 652181 - DNA, 120 bp, Artificial Sequence
  ENSG00000183160_0 (sequence is synthesized)
aggcgccagcccagagcagccccgggcaccagcacggactctctcttccagcccaggtgccccccactctcgctccattcggcgggagcacccagtcctgtacgccaaggaactggtcct

SEQ ID NO: 652182 - DNA, 120 bp, Artificial Sequence
  ENSG00000183160_1 (sequence is synthesized)
gggggcaccatggtttcggcggcagcccccagcctcctcatccttctgttgctgctcctggggtctgtgcctgctaccgacgcccgctctgtgcccctgaaggccacgttcctggaggat

SEQ ID NO: 652183 - DNA, 120 bp, Artificial Sequence
  ENSG00000183160_2 (sequence is synthesized)
gtggcgggtagtggggaggccgagggctcgtcggcctcctccccgagcctcccgccaccctggaccccggccctcagccccacatcgatggggccccagcccataaccctggggggccca

SEQ ID NO: 652184 - DNA, 120 bp, Artificial Sequence
  ENSG00000183160_3 (sequence is synthesized)
tcaccccccaccaacttcctggatgggatagtggacttcttccgccagtacgtgatgctgattgctgtggtgggctccctggcctttctgctgatgttcatcgtctgtgccgcggtcatc

SEQ ID NO: 652185 - DNA, 120 bp, Artificial Sequence
  ENSG00000183160_4 (sequence is synthesized)
acccggcagaagcagaaggcctcggcctattacccatcgtccttccccaagaagaagtacgtggaccagagtgaccgggccgggggcccccgggccttcagtgaggtccccgacagagcc

SEQ ID NO: 652186 - DNA, 120 bp, Artificial Sequence
  ENSG00000183160_5 (sequence is synthesized)
cccgacagcaggcccgaggaagccctggattcctcccggcagctccaggccgacatcttggccgccacccagaacctcaagtcccccaccagggctgcactgggcggtggggacggagcc

SEQ ID NO: 652187 - DNA, 120 bp, Artificial Sequence
  ENSG00000183160_6 (sequence is synthesized)
aggatggtggagggcaggggcgcagaggaagaggagaagggcagccaggagggggaccaggaagtccagggacatggggtcccagtggagacaccagaggcgcaggaggagccgtgctca

SEQ ID NO: 652188 - DNA, 120 bp, Artificial Sequence
  ENSG00000183160_7 (sequence is synthesized)
ggggtccttgagggggctgtggtggccggtgagggccaaggggagctggaagggtctctcttgttagcccaggaagcccagggaccagtgggtccccccgaaagcccctgtgcttgcagc

SEQ ID NO: 652189 - DNA, 120 bp, Artificial Sequence
  ENSG00000183160_8 (sequence is synthesized)
agtgtccaccccagtgtctaacagtcctcccgggctgccagccctgactgtcgggcccccaagtggtcacctccccgtgtatgaaaaggccttcagccctgactgcttcctgacactccc

SEQ ID NO: 652190 - DNA, 120 bp, Artificial Sequence
  ENSG00000183160_9 (sequence is synthesized)
tccttggcctccctgtggtgccaatcccagcatgtgctgattctacagcaggcagaaatgctggtccccggtgccccggaggaatcttaccaagtgccatcatccttcacctcagcagcc

SEQ ID NO: 652191 - DNA, 120 bp, Artificial Sequence
  ENSG00000183160_10 (sequence is synthesized)
ccaaagggctacatcctacagcacagctcccctgacaaagtgagggagggcacgtgtccctgtgacagccaggataaaacatccctcaaggctgggtgtggaggctcacacctgtaatct

SEQ ID NO: 652192 - DNA, 120 bp, Artificial Sequence
  ENSG00000183160_11 (sequence is synthesized)
cggacatcacttgagaccaggagttccaaaccagccctggcaacattgtgagacccatctctataaaaacaaaaaacagtccactaaatcagccacattaattgggaatcatatgtcaca

SEQ ID NO: 652193 - DNA, 120 bp, Artificial Sequence
  ENSG00000183160_12 (sequence is synthesized)
ggtcatttgtggggcaaacatcactgcttttccatcaagggagcaaagaataagtgggagttttggaagagtttggatgagagacgccaaggtgcccagcgttcgtaaggcaacatgcag

SEQ ID NO: 652194 - DNA, 120 bp, Artificial Sequence
  ENSG00000183160_13 (sequence is synthesized)
cctggcgtgaagcagtattttgaaactgcaaatggttcccttcttgtgtcctttcaatgctgaatattttagtgtcattctgcctgtgctcagagctccagcagcagaagtgtgtgtggt

SEQ ID NO: 652195 - DNA, 120 bp, Artificial Sequence
  ENSG00000183160_14 (sequence is synthesized)
taattaggacacttctgtgagaggacccctgcacacattacgacaggtccctaaatgagcatttcccaaactaggttccccgaggcactctacggaaacaagatttttttttttgagacg

SEQ ID NO: 652196 - DNA, 120 bp, Artificial Sequence
  ENSG00000183160_15 (sequence is synthesized)
caggcgtgagccaccgtgcccggcccaaactactttttaaaacagctacagggtaaaatcctgcagcacccactctggaaaatactgctcttaattttcctgaaggtggccccctgtttc

SEQ ID NO: 652197 - DNA, 120 bp, Artificial Sequence
  ENSG00000183160_16 (sequence is synthesized)
gccccctgtttctagttggtccaggattagggatgtggggtatagggcatttaaatcctctcaagcgctctccaagcacccccggcctgggggtgagtttctcatcccgctactgctgct

SEQ ID NO: 652198 - DNA, 120 bp, Artificial Sequence
  ENSG00000183160_17 (sequence is synthesized)
gggatcaggttgaatgaatggaactcttcctgtctggcctccaaagcagcctagaagctgaggggctgtgtttgaggggacctccaccctggggaagtccgaggggctggggaagggttt

SEQ ID NO: 652199 - DNA, 120 bp, Artificial Sequence
  ENSG00000183160_18 (sequence is synthesized)
ctgacgcccagcctggagcaggggggccctggccaccccctgttgctcacacattgtctggcagcctgtgtccacaatattcgtcagtcctcgacagggagcctgggctccgtcctgctt

SEQ ID NO: 652200 - DNA, 120 bp, Artificial Sequence
  ENSG00000183160_19 (sequence is synthesized)
tagggaggctctggcaggaggtcctctcccccatccctccatctggggctcccccaacctctgcacagctctccaggtgctgagatataatgcaccagcacaataaacctttattccggc

SEQ ID NO: 652201 - DNA, 120 bp, Artificial Sequence
  ENSG00000183160_20 (sequence is synthesized)
ctgtctgtctcagcctgccctggggacccgaggtcagggaggaagtgccgcatctggtcttccccagagcgagagtcccaggtgccccccactctcgctccattcggcgggagcacccag

SEQ ID NO: 652202 - DNA, 84 bp, Artificial Sequence
  ENSG00000183160_21 (sequence is synthesized)
actccgctcactgcagcctcaacttcccgggctcaggcgattctcccacctcggtctcctcggtacctgggaccacaagtgtgc

SEQ ID NO: 652203 - DNA, 120 bp, Artificial Sequence
  ENSG00000183160_22 (sequence is synthesized)
cccacctcggtctcctcggtacctgggaccacaagtgtgcgccactaggcctggctaatttttggtgtttttagtagagacagaattttgccgtgttgaccaggctggtcttgaactcct

SEQ ID NO: 652204 - DNA, 120 bp, Artificial Sequence
  ENSG00000183160_23 (sequence is synthesized)
ggcccagccggggagggaggaaggaggagggacgggaggagggacgggaggagggagggcgggcaggcgccagcccagagcagccccgggcaccagcacggactctctcttccagcccag

SEQ ID NO: 652205 - DNA, 120 bp, Artificial Sequence
  ENSG00000183161_0 (sequence is synthesized)
tgaaagcggaagtagggccttcgcgcacctcatggaatcccttctgcagcacctggatcgcttttccgagcttctggcggtctcaagcactacctacgtcagcacctgggaccccgccac

SEQ ID NO: 652206 - DNA, 120 bp, Artificial Sequence
  ENSG00000183161_1 (sequence is synthesized)
cgtgcgccgggccttgcagtgggcgcgctacctgcgccacatccatcggcgctttggtcggcatggccccattcgcacggctctggagcggcggctgcacaaccagtggaggcaagaggg

SEQ ID NO: 652207 - DNA, 120 bp, Artificial Sequence
  ENSG00000183161_2 (sequence is synthesized)
cggctttgggcggggtccagttccgggattagcgaacttccaggccctcggtcactgtgacgtcctgctctctctgcgcctgctggagaaccgggccctcggggatgcagctcgttacca

SEQ ID NO: 652208 - DNA, 120 bp, Artificial Sequence
  ENSG00000183161_3 (sequence is synthesized)
cctggtgcagcaactctttcccggcccgggcgtccgggacgccgatgaggagacactccaagagagcctggcccgccttgcccgccggcggtctgcggtgcacatgctgcgcttcaatgg

SEQ ID NO: 652209 - DNA, 120 bp, Artificial Sequence
  ENSG00000183161_4 (sequence is synthesized)
ctatagagagaacccaaatctccaggaggactctctgatgaagacccaggcggagctgctgctggagcgtctgcaggaggtggggaaggccgaagcggagcgtcccgccaggtttctcag

SEQ ID NO: 652210 - DNA, 120 bp, Artificial Sequence
  ENSG00000183161_5 (sequence is synthesized)
cagcctgtgggagcgcttgcctcagaacaacttcctgaaggtgatagcggtggcgctgttgcagccgcctttgtctcgtcggccccaagaagagttggaacccggcatccacaaatcacc

SEQ ID NO: 652211 - DNA, 120 bp, Artificial Sequence
  ENSG00000183161_6 (sequence is synthesized)
tggagaggggagccaagtgctagtccactggcttctggggaattcggaagtctttgctgccttttgtcgcgccctcccagccgggcttttgactttagtgactagccgccacccagcgct

SEQ ID NO: 652212 - DNA, 120 bp, Artificial Sequence
  ENSG00000183161_7 (sequence is synthesized)
gtctcctgtctatctgggtctgctaacagactggggtcaacgtttgcactatgaccttcagaaaggcatttgggttggaactgagtcccaagatgtgccctgggaggagttgcacaatag

SEQ ID NO: 652213 - DNA, 120 bp, Artificial Sequence
  ENSG00000183161_8 (sequence is synthesized)
gtttcaaagcctctgtcaggcccctccacctctgaaagataaagttctaactgccctggagacctgtaaagcgcaggatggagattttgaagtacctggtcttagcatctggacagacct

SEQ ID NO: 652214 - DNA, 120 bp, Artificial Sequence
  ENSG00000183161_9 (sequence is synthesized)
cttattagctcttcgtagtggtgcatttaggaaaagacaagttttgggtctcagcgcaggcctcagttctgtataggcaatgctgtgttattacttgaatatagaatatatagtttacaa

SEQ ID NO: 652215 - DNA, 120 bp, Artificial Sequence
  ENSG00000183161_10 (sequence is synthesized)
aatgaaaattacaatgttctcaccaaatatatgccttcgtgtgtccaaagtataattattttagatgctaattttgaatagtttattaaacagttataaatatgcaaagtagctggcatg

SEQ ID NO: 652216 - DNA, 120 bp, Artificial Sequence
  ENSG00000183161_11 (sequence is synthesized)
tagtgtcacggattttctggatagaggaagtgattggaagtactccacttaaagccatggaattagcaatagtttgctttttaatagaaggcccatttgtaagaatgttgaaaatatgtg

SEQ ID NO: 652217 - DNA, 120 bp, Artificial Sequence
  ENSG00000183161_12 (sequence is synthesized)
ctaggttttctgtccctccctcagtagtgaagagttttctttattcctggcagtgtcaggaatattggtttgaaaagctgttggcctatctggagtttggccttgttaacctagtattct

SEQ ID NO: 652218 - DNA, 120 bp, Artificial Sequence
  ENSG00000183161_13 (sequence is synthesized)
aaccagttaaccagccttagtatgcattaaaattgtattgttcagaaagtttgtttctcattttctgcaaattcttactttgaaaatgaatcaccacatagtatgtccctttaaagcatt

SEQ ID NO: 652219 - DNA, 120 bp, Artificial Sequence
  ENSG00000183161_14 (sequence is synthesized)
aaagcattgacgcacagacaaatgtttaaagcacagtaaatacgaatatatgcctttggatattaaattaatgcttgatgataaaagaatcaaacttttttttttttgagatggagtctc

SEQ ID NO: 652220 - DNA, 82 bp, Artificial Sequence
  ENSG00000183161_15 (sequence is synthesized)
agactggagtgcagtggtgtgatcactgctcagtgcaacctctgcctcccaggatcaagcaattggccaccatgcccggcta

SEQ ID NO: 652221 - DNA, 120 bp, Artificial Sequence
  ENSG00000183161_16 (sequence is synthesized)
agccaccgcgcctggccaaaacaacattttaagtagaagatccaggttttagtgcagcttctgccgttaactaggttaataaatcacaaccttggggccacagttgccttatatgtaaat

SEQ ID NO: 652222 - DNA, 120 bp, Artificial Sequence
  ENSG00000183161_17 (sequence is synthesized)
gaagtgtttagaataaaatagttaaatttccttatttttcccttggtggctgccctgtggaaacagtttagaatatttgttttgtgtgtaggaacctagttgtgttagtttacctgggtg

SEQ ID NO: 652223 - DNA, 120 bp, Artificial Sequence
  ENSG00000183161_18 (sequence is synthesized)
ttccacagctgatagtgattgccttgaataaattcaagggcaatttattcatttttactagggagatagacctttacagcaatcaagatatttttgtccatatccaggttagctggtaag

SEQ ID NO: 652224 - DNA, 120 bp, Artificial Sequence
  ENSG00000183161_19 (sequence is synthesized)
aggatttttttggagaaaaaaatgatatttagaaagttaatttctaattccggaatggaataaaaacaatatgagtagtgtaatcttgtagaaaaagagttgtataatcttgtagaattt

SEQ ID NO: 652225 - DNA, 120 bp, Artificial Sequence
  ENSG00000183161_20 (sequence is synthesized)
ctcattctgtggtacaacccaggggtaaactattattccagtagtcagtacacttttctagataaatcttgagtgaaaaccagcaatttctttttccttgtggtctgattcctttttcta

SEQ ID NO: 652226 - DNA, 120 bp, Artificial Sequence
  ENSG00000183161_21 (sequence is synthesized)
atccatgaaggccatcttgtagattacatttatcattaatgcaagaataaagacaattcctcctgtcagttgcgtgaattttttttaagaaacaacccagtgaagagttctaccatagca

SEQ ID NO: 652227 - DNA, 120 bp, Artificial Sequence
  ENSG00000183161_22 (sequence is synthesized)
aggcctaatgttagctttagctttagaaaataacagtttgtgaacttacttccctatatttgcagctgtatctcacactatgatttacaataaaattgtaaagattgacaatagacttaa

SEQ ID NO: 652228 - DNA, 80 bp, Artificial Sequence
  ENSG00000183166_0 (sequence is synthesized)
gacaaggacagggaggcacgcgcccagatcgcgctccgagtcgacgagggggctcgtgcaggtcccggcgcgcgcgtggg

SEQ ID NO: 652229 - DNA, 120 bp, Artificial Sequence
  ENSG00000183166_1 (sequence is synthesized)
atgccggcacggggacgcggctgcctgctgggggtgtgagcgagaggctgagcgctgcccgctcggcgcatccattccgcaccgccccctccctgcgggcctcggaggaagccccccgcg

SEQ ID NO: 652230 - DNA, 120 bp, Artificial Sequence
  ENSG00000183166_2 (sequence is synthesized)
ctgtgcggaggcgcctcggctgccgggctgcggagccccggcccagcaagagggaaaagatgccgttccaccatgtgaccgccggcttgttgtacaaggggaattacctcaaccgatcgc

SEQ ID NO: 652231 - DNA, 120 bp, Artificial Sequence
  ENSG00000183166_3 (sequence is synthesized)
tctctgctggcagtgacagcgaacagctggctaatatctccgtggaggagctcgatgaaatccgagaggcctttcgggttctggaccgggatgggaacggcttcatctccaagcaggagc

SEQ ID NO: 652232 - DNA, 120 bp, Artificial Sequence
  ENSG00000183166_4 (sequence is synthesized)
tgggcatggccatgcgctctttggggtacatgccaagcgaggtggagctggccatcatcatgcagcgcttggacatggacggggatggccaggtggattttgatgaattcatgaccattc

SEQ ID NO: 652233 - DNA, 120 bp, Artificial Sequence
  ENSG00000183166_5 (sequence is synthesized)
ttggccccaaactggtgtcttcagaaggtcgcgatggttttcttgggaacacgatagacagcatattctggcagtttgacatgcaaaggataactctggaagagttgaagcacattctct

SEQ ID NO: 652234 - DNA, 120 bp, Artificial Sequence
  ENSG00000183166_6 (sequence is synthesized)
atcatgccttccgagaccacctaacgatgaaggacattgagaacatcattatcaatgaggaagagagcctgaatgagacctcggggaactgccaaacagagtttgaaggagtgcattccc

SEQ ID NO: 652235 - DNA, 120 bp, Artificial Sequence
  ENSG00000183166_7 (sequence is synthesized)
agaagcagaacagacagacctgcgtccggaagagcctcatatgcgcctttgctatggccttcatcatcagtgtcatgctgattgcagccaaccagatactccggagcggcatggagtagc

SEQ ID NO: 652236 - DNA, 120 bp, Artificial Sequence
  ENSG00000183166_8 (sequence is synthesized)
agcctcccgccagccacactgtgttgcagctcaccgcgcatgtgcatgccgtgcgggcagactcttcctccacacagcagacacggacctatggactatggatggatgcggacgatggaa

SEQ ID NO: 652237 - DNA, 120 bp, Artificial Sequence
  ENSG00000183166_9 (sequence is synthesized)
ccgttcagtaaagaacccaaggttgagtgcaactggggttgcacttcagcttcatctccttggcagggacactaaagggctgtcttcagtgctttaatggttttgttttctaatgcaata

SEQ ID NO: 652238 - DNA, 120 bp, Artificial Sequence
  ENSG00000183166_10 (sequence is synthesized)
aatcgccaggatttccaaattattgcttcaaccatcagtcataactctagagaaaaacttcatcttcatctcggaattccagcagccatccaggtataatggtgagagagcaagagagag

SEQ ID NO: 652239 - DNA, 120 bp, Artificial Sequence
  ENSG00000183166_11 (sequence is synthesized)
gcatgaacacacagtcacctccactccccattctttcaacccaagggtcaacaggagactctctgctgaggtcaaccctcagttccaagaggctgacttcagggttgccacagaagaggg

SEQ ID NO: 652240 - DNA, 120 bp, Artificial Sequence
  ENSG00000183166_12 (sequence is synthesized)
ggctttccatcccaccctggcttccttcctccacccagtggagacccccccaaggcatgaggggaaagccattaagtggggtgcagccctggcggtcttcagctgcacccctcaccgctt

SEQ ID NO: 652241 - DNA, 120 bp, Artificial Sequence
  ENSG00000183166_13 (sequence is synthesized)
ccgttcttactgccttttctagaggactgccattggtagagctggggtgctctcagtttccgtcggcacttggctttctgttcctagagcccatcccgcaccagcattttggaacctgca

SEQ ID NO: 652242 - DNA, 120 bp, Artificial Sequence
  ENSG00000183166_14 (sequence is synthesized)
gagagcctttctcccagctttgccgcctgtgctgccattagagaaaaaaagaagcataatcgtgggcatctctataacatagacagatatatatatttggcttcttcgtgtgtgatgtca

SEQ ID NO: 652243 - DNA, 120 bp, Artificial Sequence
  ENSG00000183166_15 (sequence is synthesized)
ttcttccctaatcgcttacacctaatataagcttgtcctccctcccacactcatccctgcttctttggggcaggggtgaggcaggttgaggggggaggggactgggactggcggtgaggt

SEQ ID NO: 652244 - DNA, 120 bp, Artificial Sequence
  ENSG00000183166_16 (sequence is synthesized)
tttgatacccacacccagccatctggagtcatggagacccaccacgtctctatgccggatgacctttgtaagttaaggtccttgtgcatcttacctttcccttaccttggagtttgcttt

SEQ ID NO: 652245 - DNA, 120 bp, Artificial Sequence
  ENSG00000183166_17 (sequence is synthesized)
gttagtcttccccagctaaaaagagaaatgcaatccaaaatggaaagatggagagatcaaacgactgtattttcacataagatcttctggccttcagattctgcaactgactcattttca

SEQ ID NO: 652246 - DNA, 120 bp, Artificial Sequence
  ENSG00000183166_18 (sequence is synthesized)
ggaggttgggggaaaagatgtttatgagtttagccaacagaacaggtaatttactcctgcctgcagaatacttttcgttggggaagagaactgaatccaaggatctgttttcaacaccat

SEQ ID NO: 652247 - DNA, 120 bp, Artificial Sequence
  ENSG00000183166_19 (sequence is synthesized)
tccaagtctgtaatttcctgacttttcctagatgtcagccactactatgaattcaagcttgtgtagtcagattagccagtaatctctagatgtaatagttccctttgtacttttccaagc

SEQ ID NO: 652248 - DNA, 120 bp, Artificial Sequence
  ENSG00000183166_20 (sequence is synthesized)
tcaggtctttattttgtaatggaattaccttgctcctacttcttttgattacatcctaaaactacatgcttccccccttccagtagcgagccaccagaagctttcttgtctctatgcagt

SEQ ID NO: 652249 - DNA, 120 bp, Artificial Sequence
  ENSG00000183166_21 (sequence is synthesized)
gggtaggattttttggtgcgttgtgtgttcctgatctccctccctgtcttcctgctcagctttctccctactgccttttcagacttggagcacccaaggtctccaatgaaagttttctca

SEQ ID NO: 652250 - DNA, 120 bp, Artificial Sequence
  ENSG00000183166_22 (sequence is synthesized)
ttcacctctgcaagtgctactggcaacagcctgagggcagctgtagaaactttccctctgtgggagactatgaatattcctgatgagcacaagtaaaactaaggcttcagccataatatg

SEQ ID NO: 652251 - DNA, 120 bp, Artificial Sequence
  ENSG00000183166_23 (sequence is synthesized)
gaggagggagcagatgtaagctcccaagagcctgggggatcacaggtccctctgcaaaacttcctggagttcagcccagcaaggccagaccaaggaggcagcaacctgcctttccccctt

SEQ ID NO: 652252 - DNA, 120 bp, Artificial Sequence
  ENSG00000183166_24 (sequence is synthesized)
acctgccctgctgcctgcacactgcatgcctgccccttctgctgctcctgttggctgactcaccactgtccccttaggattggaattctcaactagaaccggtccaaatgcagaatatta

SEQ ID NO: 652253 - DNA, 120 bp, Artificial Sequence
  ENSG00000183166_25 (sequence is synthesized)
atacatcgaacaacttcatccttaatctctgccctgggcagtttgccctctcccatctggacttagatgggagggcatagcagatcttgaagggatatactttcctgtttttccctgacc

SEQ ID NO: 652254 - DNA, 120 bp, Artificial Sequence
  ENSG00000183166_26 (sequence is synthesized)
cccgaaccacccaaccacatccataggggtgcaggaccctaagtagactgggtagaaaccccagggatgattcttcaaagccccctcctccatgagaggggactgaaatgctgcagctga

SEQ ID NO: 652255 - DNA, 120 bp, Artificial Sequence
  ENSG00000183166_27 (sequence is synthesized)
ggctggtcttcagggcagaaaatgagtacttctttgaaggtggcttttctgcgagttcttctgcctcctgctggagaacagagacccttcaagaggtgagggttagatttcattggcaga

SEQ ID NO: 652256 - DNA, 120 bp, Artificial Sequence
  ENSG00000183166_28 (sequence is synthesized)
gagattagccactgtgcaggagtagggaggaaaaggagttctggagaggcgccgccatcctgttttctggaaaggctgcaggattcctttcctaacggtgaccttcttcttgctcccagt

SEQ ID NO: 652257 - DNA, 120 bp, Artificial Sequence
  ENSG00000183166_29 (sequence is synthesized)
gacctggaagcaagcccaccctccccaggggaaaatctaggagaatgcattcctctgcagactgctagagagagatggcaagaaggaagacacagaattctttctgacagcctaggagtt

SEQ ID NO: 652258 - DNA, 120 bp, Artificial Sequence
  ENSG00000183166_30 (sequence is synthesized)
atcttcccactgtggtaaccccccatgtggcacccagggactgaaggacacagtgcgtggagacggccctgagctagcggcattccttagacttcaggagctcagagtttgtcccggtga

SEQ ID NO: 652259 - DNA, 120 bp, Artificial Sequence
  ENSG00000183166_31 (sequence is synthesized)
cttgcaccctggctgctttgcttggacagtttgtcttgggtatagggaagccttccttgtcaggcagccaactcccagccctgttcacacaaattttatgctagggccccatgccagtca

SEQ ID NO: 652260 - DNA, 120 bp, Artificial Sequence
  ENSG00000183166_32 (sequence is synthesized)
gtgtccccatcatggtggctatgaagctcacggctgaagattccagaaggtcctggtctcccatgcccaagggatgccatgtagccccagctggaagtgacttccgcaggaattgagagg

SEQ ID NO: 652261 - DNA, 120 bp, Artificial Sequence
  ENSG00000183166_33 (sequence is synthesized)
gaatagctcacccctcattctgtcctccggacttaggaaccagtgaccttggctgcccaactgtgtggaggctgagtgattgacaaacacaggttggctcattcttgctgcaagagcagg

SEQ ID NO: 652262 - DNA, 120 bp, Artificial Sequence
  ENSG00000183166_34 (sequence is synthesized)
taccccccgccgcccccctggaaagcacaagtgatgagcaagaaggcattttccttgggagagaaggggaaatggaccctgacccccttgatccccaaagaagctgcgccccacctttcc

SEQ ID NO: 652263 - DNA, 120 bp, Artificial Sequence
  ENSG00000183166_35 (sequence is synthesized)
agatacccacaaagcccccagacagaatctagcatcgggactattagcaatggcttccagaatgtgcttgggtcccacgtgactgatctgacaaaaaaaaaagagggatattaccatggc

SEQ ID NO: 652264 - DNA, 120 bp, Artificial Sequence
  ENSG00000183166_36 (sequence is synthesized)
aacccttgcattccaccctgagtttgccaaggcacacaaaaatagggaacattttcttaaagaacactccaattcagcctgagtgcaacctgactctctgcatctgtatcctgctgggag

SEQ ID NO: 652265 - DNA, 120 bp, Artificial Sequence
  ENSG00000183166_37 (sequence is synthesized)
aggcaattacccttaaagaatctgggtggtatctctgcctttttgtctggcatttgaacttgtccttctatttactcaggagagcaggagctacctgtaagccctggtatctccccatcc

SEQ ID NO: 652266 - DNA, 120 bp, Artificial Sequence
  ENSG00000183166_38 (sequence is synthesized)
ctcccagccccttctcccagggtccagagccaggaccccttaatctaggtaaattgacagaaatatcatcttggaaggcaaacaagatattaagcctccaatctttaaaagtatcggttt

SEQ ID NO: 652267 - DNA, 120 bp, Artificial Sequence
  ENSG00000183166_39 (sequence is synthesized)
gcctgttgagcacactcctgcaagccaaacacgtgaactttggtgaactgaggtttaggtgtggtcttaggcaaacccagtggtttcagaaatgtctgggtgttttatttgcagagaaca

SEQ ID NO: 652268 - DNA, 120 bp, Artificial Sequence
  ENSG00000183166_40 (sequence is synthesized)
agatgtgtcttatgagtcttctttctcaatacctgccctgtctcaaatctcacttgacaaatggtctacgatcttgcagttatccaaaagagcctatgaaaaatggacagctgcttttga

SEQ ID NO: 652269 - DNA, 120 bp, Artificial Sequence
  ENSG00000183166_41 (sequence is synthesized)
caataatgcccctcccaacttcccattcatagaatcataaagcgatatgtttcagaactgagagagaaaagtttaccttttattccaaatgcctcgtactcggtttaagtccagactcag

SEQ ID NO: 652270 - DNA, 120 bp, Artificial Sequence
  ENSG00000183166_42 (sequence is synthesized)
gtcataaatcaaagacagttttgcacgttgctcttcacctaaatctagcagtttccctgaggccctatgagggcatggacagaaaatgaaggatgcaaccacccaggacagctccctggt

SEQ ID NO: 652271 - DNA, 120 bp, Artificial Sequence
  ENSG00000183166_43 (sequence is synthesized)
ttgggctggcctggccacgtgtggtcacatgtcctgggatctgtgtttactgtgtccttgctctccttccttgcagaagctgctaagctctgctcctcctaactgcaggtctcaaaccct

SEQ ID NO: 652272 - DNA, 120 bp, Artificial Sequence
  ENSG00000183166_44 (sequence is synthesized)
attgggtcattttgccacactatttctccaaaggcccatagtcattacattttttaccatttcaccaagataacagggggggtctggaattcccctgctaggaagggccccttttcctat

SEQ ID NO: 652273 - DNA, 120 bp, Artificial Sequence
  ENSG00000183166_45 (sequence is synthesized)
atcaccgtgatggtacagatgaactgagatgaaacttttagacttcagcacgtcacacatcctggttgtataaccaggaggtctgcagagctgcaacccctgaagaacatctgtcttaaa

SEQ ID NO: 652274 - DNA, 120 bp, Artificial Sequence
  ENSG00000183166_46 (sequence is synthesized)
agacctcaaatcagaacattctcattggcctcttcagtgatccccatggagctaagagtccgtaacctaaaggccttaccatagccatcttccctccacacctgattgctcaactgcccc

SEQ ID NO: 652275 - DNA, 82 bp, Artificial Sequence
  ENSG00000183166_47 (sequence is synthesized)
atagccatcttccctccacacctgattgctcaactgccccagaaggggagaatctatctgaaatagaaaagaagcattaagg

SEQ ID NO: 652276 - DNA, 120 bp, Artificial Sequence
  ENSG00000183166_48 (sequence is synthesized)
caccagctaagacttttcaatttaaattatttaaagtgacagcaacatagaggagaatttgggctgcctcttaccgacccagtctccatgataatttgagtgtcacaactgttcagcttc

SEQ ID NO: 652277 - DNA, 120 bp, Artificial Sequence
  ENSG00000183166_49 (sequence is synthesized)
acttcatacttgctttgactaagtcactcgggattgtcctcaattttttggccctgccataaataggtgtatgttagtccgttttgcattgctataaaggaataccttaacactgggtaa

SEQ ID NO: 652278 - DNA, 120 bp, Artificial Sequence
  ENSG00000183166_50 (sequence is synthesized)
tttataaagaaaagaggtttatttggctcgcagttctgcaggctgtttgagcaaggtatcaacatctgcttggcttctggtgagacctcagaaagctttgacccatggtggaaggtgaag

SEQ ID NO: 652279 - DNA, 120 bp, Artificial Sequence
  ENSG00000183166_51 (sequence is synthesized)
ggggagcaggcacgtcacacagcaagaacaggagcaagagagaggagaagaggtgccagtctccttttcttaacaacccgcaattgcatgaactaataaagtaagaattcactcattact

SEQ ID NO: 652280 - DNA, 120 bp, Artificial Sequence
  ENSG00000183166_52 (sequence is synthesized)
acagggagggcaccgagtcattcatgaggaatctgtccctatgacccaaatatctcccagcaggccccacctccagcactggagatcaacatgaaatttggggggaacaaatatccagcc

SEQ ID NO: 652281 - DNA, 120 bp, Artificial Sequence
  ENSG00000183166_53 (sequence is synthesized)
tctatgattggtttggagcaatgagatcaattacaccaacaagccaagcatttctcttagtatcctatggtcattgctaatgcatatggtcattttgacagctgtggtttctccttcata

SEQ ID NO: 652282 - DNA, 120 bp, Artificial Sequence
  ENSG00000183166_54 (sequence is synthesized)
ttcatttgggactcttcatagggtctcgagagacatgacaatactgttcaaaacgtctccaaggcaaaattaattttattccgttgactggaaatatatcacaaagaatgaggtttttcc

SEQ ID NO: 652283 - DNA, 120 bp, Artificial Sequence
  ENSG00000183166_55 (sequence is synthesized)
agtcccacccacaagacagtcctctgaaagtggaaaagcttgcccggccacctgcccctaccctgaccttggggtagttcatcagttgagcacaacccccatgccgggcatagactcacc

SEQ ID NO: 652284 - DNA, 120 bp, Artificial Sequence
  ENSG00000183166_56 (sequence is synthesized)
catctcttttcctcaggtgtgatgggttggctttcaaactagtgtttctcgcactgttagaagttattgtccaagtggaaaggatgcagaggctggaattttccagtgggatagaagagc

SEQ ID NO: 652285 - DNA, 120 bp, Artificial Sequence
  ENSG00000183166_57 (sequence is synthesized)
aggctaattaggaaggaatattccagggaatgcaaggtgcaactgcgatattgctccatccctggacctgagggagacaaagaaagttcttaaagggctgcagatgctgtcctctgaagg

SEQ ID NO: 652286 - DNA, 120 bp, Artificial Sequence
  ENSG00000183166_58 (sequence is synthesized)
tcttctctggatcgctggcctactttggaaacatgcaggccattgagtgccatggggctgcccatcagtctgatccacacgaaaggctctgtgcatttcaagagcaggctggtagctcgc

SEQ ID NO: 652287 - DNA, 120 bp, Artificial Sequence
  ENSG00000183166_59 (sequence is synthesized)
cattcctgggaggatgctgacatctgtcaagcccagaatgcctctctcagggctctcagacctgttaaactgaggccaggagagcagaagaaagaactcaaagtgtggacggtactacca

SEQ ID NO: 652288 - DNA, 120 bp, Artificial Sequence
  ENSG00000183166_60 (sequence is synthesized)
gctggagaaagcccaggagccaggactcttccacccactatctaggttatgttgagtgacattcctccctggcttcaggtttctctaaagccagaggaaaagtaaaccagacaagccctc

SEQ ID NO: 652289 - DNA, 120 bp, Artificial Sequence
  ENSG00000183166_61 (sequence is synthesized)
ccatctattttgtctgaaacaagatggagtgaatgctccctactgagagggtctggatttcacccatgaattgcactaggaactgggagctcctttttgaacacaagtcccaagaggcag

SEQ ID NO: 652290 - DNA, 120 bp, Artificial Sequence
  ENSG00000183166_62 (sequence is synthesized)
ttgtgataaagtctctcttttggtgtccgctgtctgtaaatgaaacaatgcaaattggtgtatgttaaatgtgtcacagcttgcaggcaagaggttttgtttattctctaaggacttgct

SEQ ID NO: 652291 - DNA, 120 bp, Artificial Sequence
  ENSG00000183166_63 (sequence is synthesized)
gactcgagggagcatcaaagatgagctttctgtctgtcttggcaagtgtgaaaataaagggagtcagtcacctccccaaaggtcatgtgaatcagaattcaggagaaagttggaggaaac

SEQ ID NO: 652292 - DNA, 120 bp, Artificial Sequence
  ENSG00000183166_64 (sequence is synthesized)
aatggcagattccaagaagagatgcttgtttctccatttgagaaagccttactgaaagctactgaataaagagcacaatttccagttatttctttctttgcttttttttttttctggcca

SEQ ID NO: 652293 - DNA, 120 bp, Artificial Sequence
  ENSG00000183166_65 (sequence is synthesized)
ctataacagcacttccagtatatgttgatagtagcttgtaattattcctaataccccagaaagaagagagtcgtgatctttggtgattgtgaggaattagattaacagtcgcgggggacc

SEQ ID NO: 652294 - DNA, 120 bp, Artificial Sequence
  ENSG00000183166_66 (sequence is synthesized)
ggctacctgcgacagccctttaaatggctaatgagggatgctgagtgctgagcggtgcctgcttttgatgtggcccacccatgaccagggagagagggcaggaagagagcagctgcagga

SEQ ID NO: 652295 - DNA, 120 bp, Artificial Sequence
  ENSG00000183166_67 (sequence is synthesized)
tccacaagtctctaacccttctgccccaggcaacataaaaccctagattcttgttctttttccctcttcctaaagtagactgacgtcccagtaattgtttttctaacaagccctgttgtt

SEQ ID NO: 652296 - DNA, 120 bp, Artificial Sequence
  ENSG00000183166_68 (sequence is synthesized)
ctccctgggaaagacctagattggccaagaaaggatcctgtcagctcctggtggagagttgcacaagccagtggctctcaactctctccaaggaaaattaaagcatattttctctttctt

SEQ ID NO: 652297 - DNA, 120 bp, Artificial Sequence
  ENSG00000183166_69 (sequence is synthesized)
agctcaaaatcagctttcaggggtccttattggggtctgattttcttccccagttctgaatccaggaagaagctttttctccaaggaccaaccaaaaacaatgactttggagaaaaatta

SEQ ID NO: 652298 - DNA, 120 bp, Artificial Sequence
  ENSG00000183166_70 (sequence is synthesized)
gactcagaaagtctgtccaggcattgggttggtgaactgtcaactgttggatggggaggaggggtcgctgtgatcgtagcggtcattagacttgggacgtgagttgtctctcaaagcaca

SEQ ID NO: 652299 - DNA, 120 bp, Artificial Sequence
  ENSG00000183166_71 (sequence is synthesized)
gtagtaaatgactgtattttgtatattgcccccaatatgttgggtgtaaatagaagcacagctggggattgatcatggccaggacgattggagcttggcagctctcatatccagaataag

SEQ ID NO: 652300 - DNA, 120 bp, Artificial Sequence
  ENSG00000183166_72 (sequence is synthesized)
ccactaagacggaactcatcaatcaccatcttcccatttacctcattagcatcccattttctctcattcagtattagttgatgatttctgctattaagtgatgagaaagtcagcagacta

SEQ ID NO: 652301 - DNA, 120 bp, Artificial Sequence
  ENSG00000183166_73 (sequence is synthesized)
gaaagtcagcagactagtcaaaaaagaatctttatataaaatgtacatattaatataaattaacttagcatgcaacttaccgatcaaatgaagtatatattattaatatgttatcttagt

SEQ ID NO: 652302 - DNA, 120 bp, Artificial Sequence
  ENSG00000183166_74 (sequence is synthesized)
ccatatttaccagatgttttctttaaccgaacttgtctgtaaatatataatctgtataaaaagagtctaatttaccattatttatgcaatagaaaaaataaaagtttttttttcttttga

SEQ ID NO: 652303 - DNA, 120 bp, Artificial Sequence
  ENSG00000183166_75 (sequence is synthesized)
tcccccgagatcagcaggagcttactgcttactctgggtccgcgccacctttaaagctcacggccgcggtctgcgtcttcgttcttgaagtcagcaagaccgcaagcccaccgggaggag

SEQ ID NO: 652304 - DNA, 120 bp, Artificial Sequence
  ENSG00000183166_76 (sequence is synthesized)
cagacgactccggacgcgccatctttaagagctgtaacactcaccgcgaggtccgtggttttattcttaaagtcggcgagaccaacaacccagcagaaggaataaattccgcacacaggg

SEQ ID NO: 652305 - DNA, 120 bp, Artificial Sequence
  ENSG00000183166_77 (sequence is synthesized)
ggtccatcattctgaggagctgcagtgccctgctccttcctgatggcttagagattctccttaactcccagccatggatcttggagaatttcccccgagatcagcaggagggaaaagatg

SEQ ID NO: 652306 - DNA, 120 bp, Artificial Sequence
  ENSG00000183166_78 (sequence is synthesized)
ctgccagagcaacccggagaggggaagcccgagaatgagaaaaagggggacggaggagccctcggagggggagaggagccgccgaggagccaggcccccgacttccccacctgggaaaag

SEQ ID NO: 652307 - DNA, 120 bp, Artificial Sequence
  ENSG00000183166_79 (sequence is synthesized)
gtgcctccctggacgtctccaggggcggtcacgcggaatgctggtccccgcagtttcggccattggcccctccacttcggcgccccgccttccccctgggctcaggtgtaatcgtggatc

SEQ ID NO: 652308 - DNA, 120 bp, Artificial Sequence
  ENSG00000183172_0 (sequence is synthesized)
cttcccgagggcggcacgagggctgggcggtggggtgcgggtgcccgggtgaggggcggagctgggggcatggcgtccggagcggctcgctggctagtattggcacccgtcaggtccggg

SEQ ID NO: 652309 - DNA, 120 bp, Artificial Sequence
  ENSG00000183172_1 (sequence is synthesized)
gctctccggagcgggcctagcttgaggaaagatggcgatgtctccgccgcatggagcggctcaggccggagcctggtaccgtcgaggtcagtcatcgttacccgcagcggcgccattttg

SEQ ID NO: 652310 - DNA, 120 bp, Artificial Sequence
  ENSG00000183172_2 (sequence is synthesized)
cccaaaccggtgaaaatgtccttcggccttctccgtgtgttctccattgtgatcccctttctctatgtcgggacactcattagcaagaactttgctgctctacttgaggaacatgacatt

SEQ ID NO: 652311 - DNA, 120 bp, Artificial Sequence
  ENSG00000183172_3 (sequence is synthesized)
tttgttccagaggatgatgatgatgatgactaacaggaattacagaaaggagaaagcactaactgaagaaatggtgatgctctcagtttctctgccttccctatcagcagaaaggctcgg

SEQ ID NO: 652312 - DNA, 120 bp, Artificial Sequence
  ENSG00000183172_4 (sequence is synthesized)
ggaaggccctcagcctcccagtctggtgaagcttcctgtatggtccatgaccgtattccaccccaggctctgggaggctccctgagatgtgctgtccactaagcactgcacaaacaagca

SEQ ID NO: 652313 - DNA, 120 bp, Artificial Sequence
  ENSG00000183172_5 (sequence is synthesized)
atcaaattatgaataaacataataaatatcagccgtgcgtgactgagtgatggctgcagtttctcagtatccctaggttctagttggtgcagttgtctctgctgtcctttatttatggga

SEQ ID NO: 652314 - DNA, 120 bp, Artificial Sequence
  ENSG00000183172_6 (sequence is synthesized)
aacataggcccaggctatccaggctgcagtggagcctggtgaactattctgggggccctgggaactattttcattgtttacaaaagcccaacagaaactgtgcattttcccttaagaaag

SEQ ID NO: 652315 - DNA, 120 bp, Artificial Sequence
  ENSG00000183172_7 (sequence is synthesized)
cttcatgggctaactaaagcctcatgccattctgtgttcagtgccagtcatgacagctctgcttgttagcatactacttaaatataactagaatgattcaaaactcgggttctgtgatat

SEQ ID NO: 652316 - DNA, 120 bp, Artificial Sequence
  ENSG00000183172_8 (sequence is synthesized)
gaggatatagataggttttcatctatttcctggcttataactcccaaaacccttgttttaggcttttgttataatgttgggcacttcgggcctcagaaaacagcaggctgtttctcagat

SEQ ID NO: 652317 - DNA, 120 bp, Artificial Sequence
  ENSG00000183172_9 (sequence is synthesized)
cttctcctgacctcctttcacctgctgctttttctccccaaggcaggccatagaaactaaaagtataatcttcctttgcccgtcttccagttggccataaaaagaatcctctgacctacc

SEQ ID NO: 652318 - DNA, 120 bp, Artificial Sequence
  ENSG00000183172_10 (sequence is synthesized)
ttgtctgattttaggtcatgagacccccatttcagaagggattctgccccatacctgagaggaagaaatgtagacaggccttgttggacttccccactccatctgtattagattatgcct

SEQ ID NO: 652319 - DNA, 120 bp, Artificial Sequence
  ENSG00000183172_11 (sequence is synthesized)
cttttgtccaatcccatttctccagtgttgtccatgcttcaatcatccctatccaatgaggtctccataaaaggcccaagaagacaggtttagagagctttcggagaacagaacacttgg

SEQ ID NO: 652320 - DNA, 120 bp, Artificial Sequence
  ENSG00000183172_12 (sequence is synthesized)
ctttgcaaagtggcacgcctggagagaacttggaagctccacgccccttctatacctcaccctatgcatctcttcagctgtatcttttgtgatatcctttataataaaccagtaaacgga

SEQ ID NO: 652321 - DNA, 120 bp, Artificial Sequence
  ENSG00000183172_13 (sequence is synthesized)
ggagcatctgtctgtgatgcagtctggcctggtagcagcatttggacactgggggcagaagcattaatgaattggcccacttggtggctaatgttttcgtttgtttgttttttgagacgg

SEQ ID NO: 652322 - DNA, 120 bp, Artificial Sequence
  ENSG00000183185_0 (sequence is synthesized)
agatggtcctggctttccagttagtctccttcacctacatctggatcatattgaaaccaaatgtttgtgctgcttctaacatcaagatgacacaccagcggtgctcctcttcaatgaaac

SEQ ID NO: 652323 - DNA, 120 bp, Artificial Sequence
  ENSG00000183185_1 (sequence is synthesized)
aaacctgcaaacaagaaactagaatgaagaaagatgacagtaccaaagcgcggcctcagaaatatgagcaacttctccatatagaggacaacgatttcgcaatgagacctggatttggag

SEQ ID NO: 652324 - DNA, 120 bp, Artificial Sequence
  ENSG00000183185_2 (sequence is synthesized)
ggtctccagtgccagtaggtatagatgtccatgttgaaagcattgacagcatttcagagactaacatggactttacaatgactttttatctcaggcattactggaaagacgagaggctct

SEQ ID NO: 652325 - DNA, 120 bp, Artificial Sequence
  ENSG00000183185_3 (sequence is synthesized)
cctttcctagcacagcaaacaaaagcatgacatttgatcatagattgaccagaaagatctgggtgcctgatatcttttttgtccactctaaaagatccttcatccatgatacaactatgg

SEQ ID NO: 652326 - DNA, 120 bp, Artificial Sequence
  ENSG00000183185_4 (sequence is synthesized)
agaatatcatgctgcgcgtacaccctgatggaaacgtcctcctaagtctcaggataacggtttcggccatgtgctttatggatttcagcaggtttcctcttgacactcaaaattgttctc

SEQ ID NO: 652327 - DNA, 120 bp, Artificial Sequence
  ENSG00000183185_5 (sequence is synthesized)
ctcagttcttcattgaagacttcagtgcatctagtggattagctttctatagcagcacaggttggtacaataggcttttcatcaactttgtgctaaggaggcatgttttcttctttgtgc

SEQ ID NO: 652328 - DNA, 120 bp, Artificial Sequence
  ENSG00000183185_6 (sequence is synthesized)
tgcaaacctatttcccagccatattgatggtgatgctttcatgggtttcattttggattgaccgaagagctgttcctgcaagagtttccctgggaatcaccacagtgctgaccatgtcca

SEQ ID NO: 652329 - DNA, 120 bp, Artificial Sequence
  ENSG00000183185_7 (sequence is synthesized)
caatcatcactgctgtgagcgcctccatgccccaggtgtcctacctcaaggctgtggatgtgtacctgtgggtcagctccctctttgtgttcctgtcagtcattgagtatgcagctgtga

SEQ ID NO: 652330 - DNA, 120 bp, Artificial Sequence
  ENSG00000183185_8 (sequence is synthesized)
actacctcaccacagtggaagagcggaaacaattcaagaagacaggaaagatttctaggatgtacaatattgatgcagttcaagctatggcctttgatggttgttaccatgacagcgaga

SEQ ID NO: 652331 - DNA, 120 bp, Artificial Sequence
  ENSG00000183185_9 (sequence is synthesized)
ttgacatggaccagacttccctctctctaaactcagaagacttcatgagaagaaaatcgatatgcagccccagcaccgattcatctcggataaagagaagaaaatccctaggaggacatg

SEQ ID NO: 652332 - DNA, 120 bp, Artificial Sequence
  ENSG00000183185_10 (sequence is synthesized)
ttggtagaatcattctggaaaacaaccatgtcattgacacctattctaggattttattccccattgtgtatattttatttaatttgttttactggggtgtatatgtatgaaggggaattt

SEQ ID NO: 652333 - DNA, 120 bp, Artificial Sequence
  ENSG00000183185_11 (sequence is synthesized)
ggtcatacatggagaggaaaagagagtggtggtttagtagggatagtcagagatgaacatccaggttgcagtatcgatcttgacatcctcaagggcaaattgtaattgagttctttcctt

SEQ ID NO: 652334 - DNA, 120 bp, Artificial Sequence
  ENSG00000183185_12 (sequence is synthesized)
gggaacccggattttagggatgaagtctttgctgactgacctgcagttgggtgatagtaaagaaagggggtgaaattatgaagcataaacagcctcacttttaaagcttatctcttttct

SEQ ID NO: 652335 - DNA, 120 bp, Artificial Sequence
  ENSG00000183185_13 (sequence is synthesized)
tttttaagaaaacctccccatgctttatacaagtccatttagcttttcaggacaaacccttacatcacagaaaggaaaaccttcaaactaattcacactatactcttagtgtattaataa

SEQ ID NO: 652336 - DNA, 120 bp, Artificial Sequence
  ENSG00000183185_14 (sequence is synthesized)
caaattaccttggtgggttaacaagaatgtggaagggatgcttgaatttgaaaatatgaatactgattagaaattaggacttaactaaaagaccaaaatcagaatcaaccacagtggaat

SEQ ID NO: 652337 - DNA, 120 bp, Artificial Sequence
  ENSG00000183185_15 (sequence is synthesized)
ttcaggtacagtggcatattagttggcaggagattttaggtggagagacgttgccagcctcattaagtcactacacagggttgattatctacaccgtctaacatgctatatgcctctgtc

SEQ ID NO: 652338 - DNA, 120 bp, Artificial Sequence
  ENSG00000183185_16 (sequence is synthesized)
acacacactgatttatgggaaccatttcagacccacttagcagttattgagatcttagaaagtagaagataccaagctaagcacttagatgacatgttacttaatgagaacccaagagat

SEQ ID NO: 652339 - DNA, 120 bp, Artificial Sequence
  ENSG00000183185_17 (sequence is synthesized)
aatcccacttgccttttttgctggtcagggctgatccccctcattttatctgattttgctctttcatttgtagtgctctatctagagaggagattgttattattacaatcattgttacaa

SEQ ID NO: 652340 - DNA, 120 bp, Artificial Sequence
  ENSG00000183185_18 (sequence is synthesized)
ttattgtaattatcacacaattcattccagaaagggtggtttgtaagttaatgttcacaaattatatgcatacttcaaaagatcatttgaaagacataaattattaatattaacaatttg

SEQ ID NO: 652341 - DNA, 120 bp, Artificial Sequence
  ENSG00000183185_19 (sequence is synthesized)
ctcacctcctttccctattaaaatattcaatctacaagcatttgagacttgaatatcttcaaggaaaaaataccatctgaataagtaattaaattatttgaactgtttcttcacatcaga

SEQ ID NO: 652342 - DNA, 120 bp, Artificial Sequence
  ENSG00000183185_20 (sequence is synthesized)
gcatgtgccctaacctcagtactgcagtgtggcagcatagacccaaatacaagaccaagggcacatttccagccctctagacacaatgaggaaagcactcagtctataaacgtttatgaa

SEQ ID NO: 652343 - DNA, 120 bp, Artificial Sequence
  ENSG00000183185_21 (sequence is synthesized)
catgattttcagtcatatttctgaagttgactgctctgctcttatactgtgaaaatgacagcaataagagctacttccatggaagggtggagtgaattgggaacactaaaacacttttaa

SEQ ID NO: 652344 - DNA, 120 bp, Artificial Sequence
  ENSG00000183185_22 (sequence is synthesized)
gacatccttgaaattctctgcttcttgcaaccacatctgatcccttagggttaggaaattgctatgcagatttatgtaaaatgcatgcaaatcagaagtgtccctctcccactttttaaa

SEQ ID NO: 652345 - DNA, 120 bp, Artificial Sequence
  ENSG00000183185_23 (sequence is synthesized)
aaaattattttaagagaacagtagtattcctataaaactgttaccttctcaggatttgcttcctaccaccctcacttttttttcaaagataatttgccctcttcttccctagctctttgc

SEQ ID NO: 652346 - DNA, 120 bp, Artificial Sequence
  ENSG00000183185_24 (sequence is synthesized)
aaatgcttagctgcccaattctctggaaggtccctatgaatacctattcatctgtcccaattaccttttctcttctgcctccttccttcaccttctccacagcatttgacattattaggc

SEQ ID NO: 652347 - DNA, 120 bp, Artificial Sequence
  ENSG00000183185_25 (sequence is synthesized)
tagtggtcaagagttccagcctcatcttcctcatctgcaaaatgaaattattcatactacctcctaaaggtcactatgagaattaaatgggagaattaattaatttcatcatgtcaactg

SEQ ID NO: 652348 - DNA, 120 bp, Artificial Sequence
  ENSG00000183185_26 (sequence is synthesized)
cctagcttgatgcctggcccatagtgttggatgaaaccaactacacacacaatgcattagctttcaatactctccgctagtctagtttttttctactcccaaagacttttttttcctttt

SEQ ID NO: 652349 - DNA, 120 bp, Artificial Sequence
  ENSG00000183185_27 (sequence is synthesized)
ctctttcctgctttttcttccactccttaagtatgagtaactccctcccaaggatctgctcacttttgactcttatcaaatggaacaaactttttaattccaactactgtccgtatgtaa

SEQ ID NO: 652350 - DNA, 120 bp, Artificial Sequence
  ENSG00000183185_28 (sequence is synthesized)
gcatgttccatttgggtactttcagttgtatactggacttcaccttcagatactacaagcgttcagcctgtttagaaccgagtctttccttgggaacccagacttcagggatgaagcatg

SEQ ID NO: 652351 - DNA, 120 bp, Artificial Sequence
  ENSG00000183185_29 (sequence is synthesized)
tgccaacagacctgtagctggatgatagtaaggaaagagagtgaaagtatgaagcataaatatcctcacttttaaatcttatcttttccctttctaggtacactcccatgcattacccaa

SEQ ID NO: 652352 - DNA, 120 bp, Artificial Sequence
  ENSG00000183185_30 (sequence is synthesized)
gctcatttagcttttcgtgacaaacccttacatcacggaaaaaaaagaaccttcaaactaattcacattatactgttggtgtcttaataataacttactttaatgggttagcagggaagc

SEQ ID NO: 652353 - DNA, 120 bp, Artificial Sequence
  ENSG00000183185_31 (sequence is synthesized)
cacttattctcttcacttttcctcattctgttcggggcctcccagtttgttgagcctttcatatctgaaacctcaatttccttcttaatctttggcagtgattctcaaactatggcctta

SEQ ID NO: 652354 - DNA, 120 bp, Artificial Sequence
  ENSG00000183185_32 (sequence is synthesized)
ggacccatttacactcttaaaaactaatgaggacactagagagcttttgttgctgtgggtcgtgtctatcattattagccatattagatgttaaaatagaatttgaaaatatgtattaat

SEQ ID NO: 652355 - DNA, 120 bp, Artificial Sequence
  ENSG00000183185_33 (sequence is synthesized)
tcacttaaaactaggaataatcaattcattacaagttaacatggtaacattgtatgaagcataattattttttctaaaacaaaaacatttagtaggaagagtggcatttttaaacatttt

SEQ ID NO: 652356 - DNA, 120 bp, Artificial Sequence
  ENSG00000183185_34 (sequence is synthesized)
tgcaaatatttaatgtctacctttatagagggcagctggattcttatctctgtttcttcattcagtctattgcaataggttttggttgaaatacagggagaaatctgacctcatcagata

SEQ ID NO: 652357 - DNA, 120 bp, Artificial Sequence
  ENSG00000183185_35 (sequence is synthesized)
catagtttgaaaagggagtagtattttaatagtctttccagataattgtggatagcctcccttcacattacaccaaaactcagcaagtgataatcccttaaagtttaattgcaatgtgct

SEQ ID NO: 652358 - DNA, 120 bp, Artificial Sequence
  ENSG00000183185_36 (sequence is synthesized)
atctgaaacaaatattttctactctgttagattacaatccattggtctatcttatacttttgattacaatccattggtctatctcatactttgaatagacttttcactgatgcattggtc

SEQ ID NO: 652359 - DNA, 120 bp, Artificial Sequence
  ENSG00000183185_37 (sequence is synthesized)
atttggaaaacattggttcactgagttacagagatcttccaaatgtttatataattcattatactggtttggatcataatctcaaaagacacaataccaaatgccataatcctgaatgtt

SEQ ID NO: 652360 - DNA, 120 bp, Artificial Sequence
  ENSG00000183185_38 (sequence is synthesized)
gaaatcctgaaagatcaaaatccctaaagtctaaatccctcaagtctaaaatctcaaaaatcacaatcacaggataattacatcatgttaggccagttactatgcactatcttcatgcaa

SEQ ID NO: 652361 - DNA, 120 bp, Artificial Sequence
  ENSG00000183185_39 (sequence is synthesized)
gcaattgcctataacctatcactgtaatacactttcatatatgaaattttctttttgatttttggtctgtttttcttaagttttttttttactatttttaattgtcagaattatattata

SEQ ID NO: 652362 - DNA, 120 bp, Artificial Sequence
  ENSG00000183185_40 (sequence is synthesized)
gctatgctatgtatttcatctttgcatcatttctagtagtggagatataaagaagttagactgttagagagttctaatttgtattatgcatttttgcaaatttagctccatgaaagtgca

SEQ ID NO: 652363 - DNA, 120 bp, Artificial Sequence
  ENSG00000183185_41 (sequence is synthesized)
ttatcacattaaatttgtgtgtaagtattgtgcatgtatgtaaaaatgttgaaactttctcaataaatgaagacatgtcctttttgtacatctgcatttgtgaaatataaaatttcatga

SEQ ID NO: 652364 - DNA, 120 bp, Artificial Sequence
  ENSG00000183185_42 (sequence is synthesized)
gatctcagctctttgtgtgactgcatatgtggtggtgaccatcatggtttttgatcgatcctcaaaagacttaagttgttcatcacggtgtttcagatgaccacagttataaagctgggt

SEQ ID NO: 652365 - DNA, 120 bp, Artificial Sequence
  ENSG00000183185_43 (sequence is synthesized)
gcccacaatgacccaccatagtgatatgcatttatatgtttcccttttgacctatttctgtatcaatatgattcatctgctcataactgttatgcctgtgcaactgttgttagtatacct

SEQ ID NO: 652366 - DNA, 120 bp, Artificial Sequence
  ENSG00000183185_44 (sequence is synthesized)
gagtgtttatgcttacagaaatatgtgttattattgccttattttactgtgtaaagtggcttatgaagtgttatgtctttttttatgtttcttaaataaattacctttttaaaatataaa

SEQ ID NO: 652367 - DNA, 120 bp, Artificial Sequence
  ENSG00000183186_0 (sequence is synthesized)
gccgccgcccgcatcgaagctccggccgcgtcccccgcgccagccccgggagcctgcgcgccgagacccctgcgtgtctgcgaacagacctccggcctcgggccatcaccccgggcagac

SEQ ID NO: 652368 - DNA, 120 bp, Artificial Sequence
  ENSG00000183186_1 (sequence is synthesized)
ctcgggccatcaccccgggcagacgctgcagcccctgtccgggcctcttgcctgccgcccccatgagaaaaaccaacatgtggttcttggagcggcttcgggggtctggggaaaacggtg

SEQ ID NO: 652369 - DNA, 120 bp, Artificial Sequence
  ENSG00000183186_2 (sequence is synthesized)
ctgcccggggcgtggggagtgaggcgggggacaaggcctccaaggggcccctgtacagcaatgtgttgacgcccgacaagatccccgactttttcatcccccccaagctgccctcgggcc

SEQ ID NO: 652370 - DNA, 120 bp, Artificial Sequence
  ENSG00000183186_3 (sequence is synthesized)
ccgcggagggcgagggacaggccgcgctgggcccctccacgtcggaacagaacctggcctctgcggccccccgccagaccccacggagcccccggctgcctgccaagctggcagccgaga

SEQ ID NO: 652371 - DNA, 120 bp, Artificial Sequence
  ENSG00000183186_4 (sequence is synthesized)
gcaagagcctgctgaaggcagccacccggcacgtgatccagatcgagagtgccgaggactggctgtccgaggaggccactgacgccgacccccaggcccagggtgccatgtccctgccct

SEQ ID NO: 652372 - DNA, 120 bp, Artificial Sequence
  ENSG00000183186_5 (sequence is synthesized)
cggtgcccaaggcccagacgtcctacggcttcgccatgctggctgagagcccccacacgaggcgcaaggagtctctgttccacagtgagcacggggctctggcccaggtgggctccccag

SEQ ID NO: 652373 - DNA, 120 bp, Artificial Sequence
  ENSG00000183186_6 (sequence is synthesized)
cgggcgccgccgggcagctgccaaggccaacgggggtgatgggggccccagggaggctggcggggccctcatgagccccggccgctacttcagtggcggggagagcgacacagggtcctc

SEQ ID NO: 652374 - DNA, 120 bp, Artificial Sequence
  ENSG00000183186_7 (sequence is synthesized)
cctcggccgagtcctcccccttcgggtcccctctgctgtcccgctccgtgtctctgctcaaaggtttcgcccaggacagccaggccaaggtgagccagctccggcactccgtgggccgcc

SEQ ID NO: 652375 - DNA, 80 bp, Artificial Sequence
  ENSG00000183186_8 (sequence is synthesized)
cgccacggctccctgtctgcggacgacagcaccccggacgccagccccgggagccggcgccgcctgacccgccgggcacc

SEQ ID NO: 652376 - DNA, 120 bp, Artificial Sequence
  ENSG00000183186_9 (sequence is synthesized)
cggtccacgtgggccctcggggcagcgtgcggctgctggccgagtacgaggccggccaggcccgcctgcgggtgcacctgctggccgccgagggcctctacgaccgcctgtgcgacgccc

SEQ ID NO: 652377 - DNA, 120 bp, Artificial Sequence
  ENSG00000183186_10 (sequence is synthesized)
gcagcatcaactgctgcgtgggcctgtgcctggtgccgggcaagctgcagaagcagcgcagcaccatcgtgaagaacagccgccgccccgtcttcaacgaggatttcttcttcgacggcc

SEQ ID NO: 652378 - DNA, 120 bp, Artificial Sequence
  ENSG00000183186_11 (sequence is synthesized)
tggggcccgccagcgtccggaaactggccctcaggatcaaggtggtgaacaagggcagcagcctcaagcgggacacgctgctcggggagaaggagctgcccctgacctccctgctcccct

SEQ ID NO: 652379 - DNA, 120 bp, Artificial Sequence
  ENSG00000183186_12 (sequence is synthesized)
gggctggggctggccggggaggggctcacactcaggctgggctgggcgctgatgctgtagctgacgcagggtttcctgggtcacccgatgctgactggagtattatttttcatgaattaa

SEQ ID NO: 652380 - DNA, 120 bp, Artificial Sequence
  ENSG00000183186_13 (sequence is synthesized)
tttctcctttggaggaggaggaggaggaggagaggggcctcgggggaagagaaggggccacttcgcggggcagagggtccccctttgcccctccacactgcctcgcgcctttcacgcaga

SEQ ID NO: 652381 - DNA, 120 bp, Artificial Sequence
  ENSG00000183186_14 (sequence is synthesized)
gttctagaaggaggttctcaggggttcaggaatccgtgcatgtggccagggcggggccgtggacagggaggtgacaagtcttggagcccacagtctccttcactgcacgtgtgtcttcct

SEQ ID NO: 652382 - DNA, 120 bp, Artificial Sequence
  ENSG00000183186_15 (sequence is synthesized)
cccccacagcctgccgccatccagttcccaccccgcggagagcagggcctcgcggccacaccaggcccaggctctgcccgggacgccccctcccaggggtcaggcttggctctgggagac

SEQ ID NO: 652383 - DNA, 120 bp, Artificial Sequence
  ENSG00000183186_16 (sequence is synthesized)
cccagcttcccaggctccggtggggagtggggccaggcgagggtgccctgacgagggtgggcgcggagggagcagccgctgccacagtcggagcagaggaggtcttggcagaggtccgcg

SEQ ID NO: 652384 - DNA, 120 bp, Artificial Sequence
  ENSG00000183186_17 (sequence is synthesized)
gggaggagacggctctcctggcctgttttcctccaacactgtcgccgctggctttttgggtacaggcccgtctggccatttctgctgtggcgccggagggtcttgctcagagatgcccag

SEQ ID NO: 652385 - DNA, 120 bp, Artificial Sequence
  ENSG00000183186_18 (sequence is synthesized)
agagcagccctatggcccatccgtcctcgctgggggctgccaccccgtcgcccttttgtccagcgtctgcagctgggagcgacacgcagtgattgacggccgtggctttgacgccacgtg

SEQ ID NO: 652386 - DNA, 120 bp, Artificial Sequence
  ENSG00000183186_19 (sequence is synthesized)
tgtaaataggctgtggctacggtgggtgggtcggagcccaggaggcagctggggggacctggctatggcctttcctgctgttaggtggctgcaaggcttccattgtgtggttatgtgggt

SEQ ID NO: 652387 - DNA, 120 bp, Artificial Sequence
  ENSG00000183186_20 (sequence is synthesized)
ccttgaatgattttggggaggtttccagctcagaatgatgcagaaatgataagactcaaagcaggggccaggccaggccagtgccttcgcctctcccggctgctggtgggcacggaggaa

SEQ ID NO: 652388 - DNA, 120 bp, Artificial Sequence
  ENSG00000183186_21 (sequence is synthesized)
ccagggcacatctgtggtacccagggacgtcccttgtcagcccgtttgccacacattgttcctcttgtccaggggagggtggaggagctgcttcccaggactggaggagcagctgggccc

SEQ ID NO: 652389 - DNA, 120 bp, Artificial Sequence
  ENSG00000183186_22 (sequence is synthesized)
ctgctgcacgtccggtgggacacacctgtgagccctccagagggagagtgcaggccccttctgagcctggtgttgcagggctccgctctctcccggaagccagggcacccagggcggagg

SEQ ID NO: 652390 - DNA, 120 bp, Artificial Sequence
  ENSG00000183186_23 (sequence is synthesized)
ctcctcaggccggggaggcggggagggtgccctgcatggagagagacgccggcgctccccgccttctctgatgctcacccctcccaggccctgttctccctggggtcccccgtttagtag

SEQ ID NO: 652391 - DNA, 120 bp, Artificial Sequence
  ENSG00000183186_24 (sequence is synthesized)
cccccctgcactctttgatatcttagtgtctgaggttgactgtgggtaaatctttaagacactccccagctgtgtttgtttataaatgctgtttatagtgcaataaaggtgtttcgggaa

SEQ ID NO: 652392 - DNA, 120 bp, Artificial Sequence
  ENSG00000183196_0 (sequence is synthesized)
acctcgggaccgcagccacgtctgaaagcgcctcattgtgtgcgctcgggcgggctgcaccgggcagcgccgagggttgccggccggcgcgcggggagtagagggcgcgggccgcagtgc

SEQ ID NO: 652393 - DNA, 120 bp, Artificial Sequence
  ENSG00000183196_1 (sequence is synthesized)
cgggttccagagggagctctgcgccgggtccttccctgtggtagccccaggacacccccagcctcaacatcccattctgggactcctgccctgttcccacattcgttctacctcgagtct

SEQ ID NO: 652394 - DNA, 120 bp, Artificial Sequence
  ENSG00000183196_2 (sequence is synthesized)
ccaggagcttccagtggcttggtcaccgccaactctcgtccatgcctcttagagcccctttcccggcctcaccgggtgtcgcttaatagtcttgggaccttaaggagcaagtcagcccct

SEQ ID NO: 652395 - DNA, 120 bp, Artificial Sequence
  ENSG00000183196_3 (sequence is synthesized)
gcggaccctcccagtgaagagaaagagctggctgtgcggtggaatttggaagagacgacgtttgggagcctttgctgagtccagggagagaggcgtcccccaccgtgccgctgcagctcg

SEQ ID NO: 652396 - DNA, 120 bp, Artificial Sequence
  ENSG00000183196_4 (sequence is synthesized)
ggcagagccgccaagctttggggtgctgaggaacctctaatcatctcccatggatttgtgatcagcgttgcagctctcccagcagccctggacagtggcccccagcagtcagcatgtggc

SEQ ID NO: 652397 - DNA, 120 bp, Artificial Sequence
  ENSG00000183196_5 (sequence is synthesized)
tgccgcgcgtctccagcacagcagtgaccgcgctcctcctggcgcagaccttcctcctcctctttctggtttcccggccagggccctcgtccccagcaggcggcgaggcgcgcgtgcatg

SEQ ID NO: 652398 - DNA, 120 bp, Artificial Sequence
  ENSG00000183196_6 (sequence is synthesized)
tgctggtgctgtcctcgtggcgctcgggctcgtccttcgtgggccaactcttcaaccagcaccccgacgtcttctacctaatggagcccgcgtggcacgtgtggaccaccctgtcgcagg

SEQ ID NO: 652399 - DNA, 120 bp, Artificial Sequence
  ENSG00000183196_7 (sequence is synthesized)
gcagcgccgcaacgctgcacatggctgtgcgcgacctggtgcgctccgtcttcctgtgcgacatggacgtgtttgatgcctatctgccttggcgccgcaacctgtccgacctcttccagt

SEQ ID NO: 652400 - DNA, 120 bp, Artificial Sequence
  ENSG00000183196_8 (sequence is synthesized)
gggccgtgagccgtgcactgtgctcgccacccgcctgcagtgcctttccccgaggcgccatcagcagcgaggccgtgtgcaagccactgtgcgcgcggcagtccttcaccctggcccggg

SEQ ID NO: 652401 - DNA, 120 bp, Artificial Sequence
  ENSG00000183196_9 (sequence is synthesized)
aggcctgccgctcctacagccacgtggtgctcaaggaggtgcgcttcttcaacctgcaggtgctctacccgctgctcagcgaccccgcgctcaacctacgcatcgtgcacctggtgcgcg

SEQ ID NO: 652402 - DNA, 120 bp, Artificial Sequence
  ENSG00000183196_10 (sequence is synthesized)
acccgcgggccgtgctgcgctcccgggagcagacagccaaggctctggcgcgtgacaacggcatcgtgctgggcaccaacggcacgtgggtggaggccgaccccggcctgcgcgtggtgc

SEQ ID NO: 652403 - DNA, 120 bp, Artificial Sequence
  ENSG00000183196_11 (sequence is synthesized)
gcgaggtgtgccgtagccacgtacgcatcgccgaggccgccacactcaagccgccaccctttctgcgcggccgctaccgcctggtgcgcttcgaggacctggcgcgggagccgctggcag

SEQ ID NO: 652404 - DNA, 120 bp, Artificial Sequence
  ENSG00000183196_12 (sequence is synthesized)
aaatccgtgcgctctacgccttcactgggctcagtctcacgccacagctcgaggcctggatccataacatcacccacggatctggacctggtgcgcgccgcgaagccttcaagacttcgt

SEQ ID NO: 652405 - DNA, 120 bp, Artificial Sequence
  ENSG00000183196_13 (sequence is synthesized)
ccaggaatgcgctcaacgtctcccaggcctggcgccatgcgctgccctttgccaagatccgccgcgtgcaggaactgtgcgctggtgcgctgcagctgctgggctaccggcctgtgtact

SEQ ID NO: 652406 - DNA, 120 bp, Artificial Sequence
  ENSG00000183196_14 (sequence is synthesized)
ctgaggacgagcagcgcaacctcgcccttgatctggtgctgccacgaggcctgaacggcttcacttgggcatcatccaccgcctcgcacccccgaaattagtggaggccacagttgtagc

SEQ ID NO: 652407 - DNA, 120 bp, Artificial Sequence
  ENSG00000183196_15 (sequence is synthesized)
aggcgctaggcccgggaggagagtgcatggtgcagagggggctggggcgcacggagaagcaggtccctatattgaccaaggagtttgtggtacgacccctccccctccccaagtaggcaa

SEQ ID NO: 652408 - DNA, 120 bp, Artificial Sequence
  ENSG00000183196_16 (sequence is synthesized)
ggactgcacgtttctttctctcttgattcttggttttcctttgagtcctctggagctgccttctcatcaggtgcactcttcatggaaagcaactcttgcccctcctcctctgggcacagg

SEQ ID NO: 652409 - DNA, 120 bp, Artificial Sequence
  ENSG00000183196_17 (sequence is synthesized)
gtgtgcgttcagatgacttggctcctactcaagggctttcttcccctttaactctctccttctggtgacacatcctgcagcagctgagggggtgccctggcactggctgggagtggagag

SEQ ID NO: 652410 - DNA, 120 bp, Artificial Sequence
  ENSG00000183196_18 (sequence is synthesized)
gcactgtggtgaaatggctccagaggtctgtacatcacatacatatgcacacaggcacacatggcaaaactcggaagtgaaaggacttgtctgaaatcacatggtgagaaggaggatgaa

SEQ ID NO: 652411 - DNA, 120 bp, Artificial Sequence
  ENSG00000183196_19 (sequence is synthesized)
gggaggagagagcttttgctctgggtctccagtggataggagaggacctgcctcctgggtgagaagggtcagattttcctattttaattgctttagggaagagcaagcagagtcatgacc

SEQ ID NO: 652412 - DNA, 120 bp, Artificial Sequence
  ENSG00000183196_20 (sequence is synthesized)
agggacacagctgagagatagaggaggctgtgaatgctgagaccagagtttatcatgctggacaagcctggaaggaggcaataagtgggaaaggtaggaggagagaaggctggggagggc

SEQ ID NO: 652413 - DNA, 120 bp, Artificial Sequence
  ENSG00000183196_21 (sequence is synthesized)
tgggcagcaagccaggcacagtgagtggcagagcaagagggggaaagcaggatcagtgcctggaaggcaggtgtgcccgtcagcggggagtggaactcatcaggcttgccaagaggttgg

SEQ ID NO: 652414 - DNA, 120 bp, Artificial Sequence
  ENSG00000183196_22 (sequence is synthesized)
aagggaaatggctctgggctggaactgtcttcccttggtccttctggtccaggccttggaggaaagcagaggatgatccctgcctgtgagccacacctcctagctctgggggcaaagggg

SEQ ID NO: 652415 - DNA, 120 bp, Artificial Sequence
  ENSG00000183196_23 (sequence is synthesized)
cttagtaaaggaatgctggatgtgtagagggtttagtcccgagctcaggaaatgagagcctataagtgcccagtacatgtttaaaagaagagctcatggaacctctggaaaggacaggga

SEQ ID NO: 652416 - DNA, 120 bp, Artificial Sequence
  ENSG00000183196_24 (sequence is synthesized)
agttgagttagccacataaatgaacccaagtcacattggaacacagagctggtctgggaactgtgttggctgccaacagaacttctgaccctgttacctgtgaaatgaggcagtttccct

SEQ ID NO: 652417 - DNA, 120 bp, Artificial Sequence
  ENSG00000183196_25 (sequence is synthesized)
cacgttgccatcagctaccaggagcgatgctggtggtcactagcttctgatcctcatcctgggtgtggccacagattgggggaacctggattgtggagtcacatcctccctgcaaagcaa

SEQ ID NO: 652418 - DNA, 120 bp, Artificial Sequence
  ENSG00000183196_26 (sequence is synthesized)
gcagggcaagggagatctggcattttctgctttacgtggagggagaacaggcacattagccttgaagctgaagctcattttaggttccttccaggtttagaagcttcaaccaaatgaaac

SEQ ID NO: 652419 - DNA, 120 bp, Artificial Sequence
  ENSG00000183196_27 (sequence is synthesized)
ttgaatctgtccctcgtgacaattataggaggaaggtatttaaaaccccagatttatgaatgtgtactacatggcttagagaatgtctttgttcttgttcaggtggttataacaaaatac

SEQ ID NO: 652420 - DNA, 90 bp, Artificial Sequence
  ENSG00000183196_28 (sequence is synthesized)
gggatgaatcacctgaggtcaggcattcaagaacagcctggccaacatggcgaagcccctcctctactaaaaatacaaaattagcgaggc

SEQ ID NO: 652421 - DNA, 120 bp, Artificial Sequence
  ENSG00000183196_29 (sequence is synthesized)
tcaagaacagcctggccaacatggcgaagcccctcctctactaaaaatacaaaattagcgaggcatggtcgcacatacctgtaatcccagctcctcgggaagctgaggcaggagaatcgc

SEQ ID NO: 652422 - DNA, 84 bp, Artificial Sequence
  ENSG00000183196_30 (sequence is synthesized)
tgggtaacttataaacaaatgttcttctcacaagtctggagactgggaagtccaagatcaagccaccagtgctgtctgatgagg

SEQ ID NO: 652423 - DNA, 120 bp, Artificial Sequence
  ENSG00000183196_31 (sequence is synthesized)
gggaagtccaagatcaagccaccagtgctgtctgatgagggcccactttttcaaagacagtgccttctagctgtgtcctcttatcgtagaagatgggagacagctctccagggccatttt

SEQ ID NO: 652424 - DNA, 120 bp, Artificial Sequence
  ENSG00000183196_32 (sequence is synthesized)
atgtcactaatcccattcttgaggtctccaccttcattatctaatcacctcccaaaggctccacatcccaacaccatcatattgtgggttaagatttcaaccacaagccaggcgtggtgg

SEQ ID NO: 652425 - DNA, 120 bp, Artificial Sequence
  ENSG00000183196_33 (sequence is synthesized)
cctggatgacagagcaagactccatctcatgcccagccagcatgcccaacaagcttcatttgcccctgtttaggtcacaaattttattgatggctgcaattaatggcctcttggtatcca

SEQ ID NO: 652426 - DNA, 120 bp, Artificial Sequence
  ENSG00000183196_34 (sequence is synthesized)
agtcctttgttgtatgacccatccattctcccctgactcccaaggtgtcaggacatgcttgactggctcctgaatttgctctctgcgcatgggcagtacagtcaagcctcacagtgaacc

SEQ ID NO: 652427 - DNA, 120 bp, Artificial Sequence
  ENSG00000183196_35 (sequence is synthesized)
caggtcagctttcaggacaaagaaagtggcctggctgactaggcacagtaaagccagggctgggtaggtacatacttgtgctgatcacgtatgtcttatatctctgtgagagtgcagtcc

SEQ ID NO: 652428 - DNA, 120 bp, Artificial Sequence
  ENSG00000183196_36 (sequence is synthesized)
caacaggaaggtttaatcactggggactgcccaatgctgtgacagggcacagagctctgggttgctgtgggggtgactgcattgaccactgttagtggtttgctgtgttgacactctgtg

SEQ ID NO: 652429 - DNA, 120 bp, Artificial Sequence
  ENSG00000183196_37 (sequence is synthesized)
ctgtgtgaccatggctcctgccatcaagaagtagagtctgtttctccacctctgaatccaggctggtcctgtgacttgctttgtcctgtagacaagtgtagtgcaacttcctgtgagcca

SEQ ID NO: 652430 - DNA, 120 bp, Artificial Sequence
  ENSG00000183196_38 (sequence is synthesized)
gtttgaagcataggccttggaagcaaaactttacctccacctgtcttaggttttcagctggggctctgctgtgatttgattgtgtctcccaaagttggaaccttgatccccagtgttgtg

SEQ ID NO: 652431 - DNA, 120 bp, Artificial Sequence
  ENSG00000183196_39 (sequence is synthesized)
tgtgaggtgaggcttgatggaaagtaaattacgccgtgcgggttatgcccttgtgaatgggtagagaacattatttctgggcgcaggcatggtagctcatgtctgtaatcccagcatttt

SEQ ID NO: 652432 - DNA, 71 bp, Artificial Sequence
  ENSG00000183196_40 (sequence is synthesized)
tcccagcattttgggaggttgaggtgaaaacaccatttctagttaaaatacaaaaattagccaggtgtggt

SEQ ID NO: 652433 - DNA, 120 bp, Artificial Sequence
  ENSG00000183196_41 (sequence is synthesized)
aaaaaaccaccattatttcaggagtgagttggttatcctgagagtggtgccttttaaatgaaggagttcattctttgtctttctctcgccctcactttgcccttctgccatatgatgcct

SEQ ID NO: 652434 - DNA, 120 bp, Artificial Sequence
  ENSG00000183196_42 (sequence is synthesized)
tccatcatgctaggacacagcaagaaggctctcgctagatgctggctccttgatcttgggcttcccagcctccagaactgtaagccaatacacttctatttattatatatgacccttgct

SEQ ID NO: 652435 - DNA, 90 bp, Artificial Sequence
  ENSG00000183196_43 (sequence is synthesized)
gtagtcctagctacttgggaggctgagttgggaggactgcttgaccctgggaggttgaggctacattgaaccatgatcatgccagaccta

SEQ ID NO: 652436 - DNA, 120 bp, Artificial Sequence
  ENSG00000183196_44 (sequence is synthesized)
actccagcctgagtgacagagcaagacacctatctctaaataaatgaccccatctgtggtattgttatagcaaaacaaaacagattaagagagactttttaatgaaaagacagattcaca

SEQ ID NO: 652437 - DNA, 120 bp, Artificial Sequence
  ENSG00000183196_45 (sequence is synthesized)
cagattaagagagactttttaatgaaaagacagattcacaaagaaaaacaatgtttttgtttctgtttttttgaggcagagtcttgctcttgtcccccaggctggagtgcagtggcgcca

SEQ ID NO: 652438 - DNA, 90 bp, Artificial Sequence
  ENSG00000183196_46 (sequence is synthesized)
ccaatgtgctagaaaaacagtttgttaacacaggcagccaacatcactcaggataagcctcaatgaaaagtaacaaagtgatggcttgga

SEQ ID NO: 652439 - DNA, 120 bp, Artificial Sequence
  ENSG00000183196_47 (sequence is synthesized)
ggataagcctcaatgaaaagtaacaaagtgatggcttggaacactgtcttacacagcatttttaaaaaatacaataaatttgtagagataggatgaccaaggacaacagttttaggcttc

SEQ ID NO: 652440 - DNA, 120 bp, Artificial Sequence
  ENSG00000183196_48 (sequence is synthesized)
caaaggtggtaaactatgggatggtaaatatccgagaggaagctgatgcaacaggatttgtctgcagcagcctctggtaccacctctgagtcaagggttgtgtccagtgatggagagttt

SEQ ID NO: 652441 - DNA, 120 bp, Artificial Sequence
  ENSG00000183196_49 (sequence is synthesized)
atatcgtgcctttaggcagaaaaggggagggaaacctgaacttttcctgcactttctgcttcttaattgccttcagctgaaaatcattttttatgtgaaaaaggcatagtctgagctgac

SEQ ID NO: 652442 - DNA, 120 bp, Artificial Sequence
  ENSG00000183196_50 (sequence is synthesized)
gcctctgctttcctccacctgaagagaacctgcgtgctgctcctttgcttcggacctccgcctctgcccgggagaaagcccaggccagcctgctggacaagcagagaccatgagaaggag

SEQ ID NO: 652443 - DNA, 120 bp, Artificial Sequence
  ENSG00000183196_51 (sequence is synthesized)
agttcaggggtcccaaaccaggccatcctagaccagccagctccagctgatccgcacgcagccacttcggctaccttctactggccaaagggagtcccagggctcacccagattcagagg

SEQ ID NO: 652444 - DNA, 120 bp, Artificial Sequence
  ENSG00000183196_52 (sequence is synthesized)
tggggaaactgagtccaccacttgagaagagtagctataaagacatatgagcgaggccagctgagcccagcactgcggccaagtcgaagactttaggagcaataaaagtgcttattgtgt

SEQ ID NO: 652445 - DNA, 120 bp, Artificial Sequence
  ENSG00000183196_53 (sequence is synthesized)
ttcagtcatttgagtgttgtggtggtttgttacgtagcattgcctaaccgatacacttgagaacggagggctcctggcacctgcagcttccaatttccaccagggtccaggctccctccc

SEQ ID NO: 652446 - DNA, 120 bp, Artificial Sequence
  ENSG00000183196_54 (sequence is synthesized)
tgctggtagggctgtaattagtgtctccccttacctgtaggccctgtgatgcagctagaagtgtctaggcccagcagtcacccacaattaggggcaggcacgcttgctgcctctgctctg

SEQ ID NO: 652447 - DNA, 120 bp, Artificial Sequence
  ENSG00000183196_55 (sequence is synthesized)
gctgtgggagctcagaaggggcaatcaaagcactagatgggctgatgggtgcatagaaacagtgttgcctggaataggtcagagaacccacctatcaagaggctgttggggaatcaatgg

SEQ ID NO: 652448 - DNA, 120 bp, Artificial Sequence
  ENSG00000183196_56 (sequence is synthesized)
tgggccttatttttgttattttgcatcaagaagatatattatccacatcaacactgtatcaactcctcatggccaccacagaccctgtgtcccctagctttgtctttgatgtgcctttgt

SEQ ID NO: 652449 - DNA, 120 bp, Artificial Sequence
  ENSG00000183196_57 (sequence is synthesized)
cacccactcctacagactgcgccccaccactgccacaactgccccatcacctctacagggttaaatcaatggttttaatttttgcctacctgatgggtgaaaaatgttacttgatgtttc

SEQ ID NO: 652450 - DNA, 120 bp, Artificial Sequence
  ENSG00000183196_58 (sequence is synthesized)
agtctgcacttctttaattcctggggcagctgaacatcttttcatgcttatgactcaactgtattcctttttcattgttcaaggctgtgcccatgttgctgttgacttaccacagcctct

SEQ ID NO: 652451 - DNA, 120 bp, Artificial Sequence
  ENSG00000183196_59 (sequence is synthesized)
tttgaatatgctttgttatttttgttgtgcaaatggtttctcctagcttgtcatctgttttttgttgttgttgttttgttaacttactttatggcattttcccctcaggcttcttaaaaa

SEQ ID NO: 652452 - DNA, 120 bp, Artificial Sequence
  ENSG00000183196_60 (sequence is synthesized)
aaaagaagcttcattgagctataattgatatacaacatctgcacataaagtgtaaagtttgattaaacatttgtatatacctgtgaaatcaaatcaccacctcatcacaatcaaatttca

SEQ ID NO: 652453 - DNA, 120 bp, Artificial Sequence
  ENSG00000183196_61 (sequence is synthesized)
aaaagtttcacctagtttatcatattgttgaatgtgaatcctttccttatggccagtggattttatgtcttgttgaaacgactttgtcctgctacagtgataaaaatggtcttcacgctt

SEQ ID NO: 652454 - DNA, 120 bp, Artificial Sequence
  ENSG00000183196_62 (sequence is synthesized)
tatcatatggtcactctattcaacctttcgagaaaccaccaaattgtttcttcaggaaatgcaccatctgacatccccattttatgaggatccccacgtctctgtcatctcaccaacact

SEQ ID NO: 652455 - DNA, 120 bp, Artificial Sequence
  ENSG00000183196_63 (sequence is synthesized)
caaggagtttgtgagaacctgcgtgctgctcctttgcttcggacctccgcctctgcccgggagaaagcccaggccagcctgctggacaagcagagaccatgagaaggagagttcaggggt

SEQ ID NO: 652456 - DNA, 120 bp, Artificial Sequence
  ENSG00000183206_0 (sequence is synthesized)
atggtgactgaggtttgttcaatgcccgctgcctctgctgtgaagaagccattcgatctcaggagcaagatgggcaagtggtttcaccaccgcttcccctgctgcaaggggagcggcaag

SEQ ID NO: 652457 - DNA, 120 bp, Artificial Sequence
  ENSG00000183206_1 (sequence is synthesized)
caaggggagcggcaagagcaacatgggcacttctggagaccacgacgactcctttatgaagatgctcaggagcaagatgggcaagtgttgccaccactgcttcccctgctgcagggggag

SEQ ID NO: 652458 - DNA, 90 bp, Artificial Sequence
  ENSG00000183206_2 (sequence is synthesized)
ctgcttcccctgctgcagggggagcggcacgagcaacgtgggcacttctggagaccatgacaactcctttatgaagacgcactgcttccc

SEQ ID NO: 652459 - DNA, 67 bp, Artificial Sequence
  ENSG00000183206_3 (sequence is synthesized)
gggggagcggcaagagcaacgtgggcgcttggggagactacgacgacagcgccttcatggagccgag

SEQ ID NO: 652460 - DNA, 82 bp, Artificial Sequence
  ENSG00000183206_4 (sequence is synthesized)
gaagtagtacaactcctgctggacagacgatgtcaacttaatgtccttgacaacaaaaaaaggacagctctgataaaggccg

SEQ ID NO: 652461 - DNA, 120 bp, Artificial Sequence
  ENSG00000183206_5 (sequence is synthesized)
gtccttgacaacaaaaaaaggacagctctgataaaggccgtacaatgccaggaagatgaatgtgtgttaatgttgctggaacatggcgctgatcaaaatattccagatgagtatggaaat

SEQ ID NO: 652462 - DNA, 120 bp, Artificial Sequence
  ENSG00000183206_6 (sequence is synthesized)
accacttttgcttggcgtacatgaacaaaaacagcaagtggtgaaatttttaatcaagaaaaaagctaatttaaatgcacttgatagatatggaagaactgccctcatacttgctgtatg

SEQ ID NO: 652463 - DNA, 69 bp, Artificial Sequence
  ENSG00000183206_7 (sequence is synthesized)
aaatgcacttgatagatatggtcttctccttgagcaaaatgttgatgtatcttctcaagatctatctgg

SEQ ID NO: 652464 - DNA, 120 bp, Artificial Sequence
  ENSG00000183206_8 (sequence is synthesized)
agtaatcctgtgggattaccagaaaacctgactaatggtgccagtgctggcaatggtgatgatggattaattccacaaaggaggagcagaaaacctgaaaatcagcaatttcctgacact

SEQ ID NO: 652465 - DNA, 120 bp, Artificial Sequence
  ENSG00000183206_9 (sequence is synthesized)
gagaatgaagagtatcacagtgacgaacaaaatgatacccggaaacaactttctgaagaacagaacactggaatatcacaagatgagattctgactaataaacaaaagcagatagaagtg

SEQ ID NO: 652466 - DNA, 80 bp, Artificial Sequence
  ENSG00000183206_10 (sequence is synthesized)
agatgagattctgactaataaacaaaagcagatagaagtggctgaaaagaaaatgaattctgtgaaaacagcatgttgca

SEQ ID NO: 652467 - DNA, 120 bp, Artificial Sequence
  ENSG00000183206_11 (sequence is synthesized)
agtcgctttgcctggtgtttcttgcttggattggcgtttcctccctcgcattcctttgctgggcttgactttttctctgctgggtttggcattcccttgactgggctgggtgtttccttg

SEQ ID NO: 652468 - DNA, 120 bp, Artificial Sequence
  ENSG00000183206_12 (sequence is synthesized)
tcccttgactgggctgggtgtttccttgggagggggggcttggcctttcctggggtgggcgttgggtccccctggtgggcgtgggctttccccgggtgggtgtgggttttccctgggtgg

SEQ ID NO: 652469 - DNA, 120 bp, Artificial Sequence
  ENSG00000183206_13 (sequence is synthesized)
gcaagttttggctgggattgacctttctcttcaaacagattggaaacccagggtttcctgctagttggtgaaactggttggtagacgcgatctgttcgctactaccggcctccccgggct

SEQ ID NO: 652470 - DNA, 120 bp, Artificial Sequence
  ENSG00000183206_14 (sequence is synthesized)
gaagaataatgtttggcagaaggaacatgcaacaagattgtgtgtttgccagaagaacatctaatgaggttgcctgtttggcaggaagagcagcaagtgcaaaacgcaagatgctgagtg

SEQ ID NO: 652471 - DNA, 71 bp, Artificial Sequence
  ENSG00000183206_15 (sequence is synthesized)
agtgaacctaccagaggttgggaataaggtgaatacttagctaagtgtgaaagccaccatgattatatgta

SEQ ID NO: 652472 - DNA, 120 bp, Artificial Sequence
  ENSG00000183206_16 (sequence is synthesized)
tgagctcctataaaactttatttacaaagccaaaaggcagactggatttggcctgtggcctatagcttgctgggattgagggaagataaccatgtaaagaaaccaggagacaaaggaagc

SEQ ID NO: 652473 - DNA, 88 bp, Artificial Sequence
  ENSG00000183206_17 (sequence is synthesized)
gtttccatgtcacacacccttggactagtatcaatgtattctaaggttttcacctgcccatggcaaaataaagtttggaatctcagtt

SEQ ID NO: 652474 - DNA, 120 bp, Artificial Sequence
  ENSG00000183206_18 (sequence is synthesized)
ggaggaaattgaaagtgtgaaagaaaagactgataaacttctaagggctatgcaattgaatgaagaagcattaacgaaaaccaatatttaagtacagtggacagcttaggattttgacaa

SEQ ID NO: 652475 - DNA, 120 bp, Artificial Sequence
  ENSG00000183206_19 (sequence is synthesized)
ctgagaatgctcagttctgaactggagaatgtaagacacagctaggaaacactggaaatggaaattcaatcatgtcattgtagactgactactgctctacatgattgtgatcaaagtcag

SEQ ID NO: 652476 - DNA, 120 bp, Artificial Sequence
  ENSG00000183206_20 (sequence is synthesized)
atagctgaaagggacttctttccagagaacaaacatgaacaggtttatttacaggagaaaatgaattctcatatatctcacctaaaagataacagtgagattctttctgaacaactctaa

SEQ ID NO: 652477 - DNA, 120 bp, Artificial Sequence
  ENSG00000183206_21 (sequence is synthesized)
cgctgacagtaaaattaacaacctaaaaattaagctccatcacacaggataaattctgagagaaaagatgaggcaggccaccatctttcctgtttgggcaacttagcgattccagcgtgc

SEQ ID NO: 652478 - DNA, 120 bp, Artificial Sequence
  ENSG00000183206_22 (sequence is synthesized)
gggctttggagagtacaaacccaccaggggcagaagagatcctgtggcatagcacagctgctttaccaaatcatgtccagaatgcttctgtaagcaggcctctgatcctgttcctcgtca

SEQ ID NO: 652479 - DNA, 120 bp, Artificial Sequence
  ENSG00000183206_23 (sequence is synthesized)
ctggacaggatctcccacctgaggcctccagctacacccaccagtgttccctggccaatggagatttgaaaccttcctgggacagagttcccagagagaggggtgggccatgacctttgt

SEQ ID NO: 652480 - DNA, 120 bp, Artificial Sequence
  ENSG00000183206_24 (sequence is synthesized)
tgtttgggcaactagcccttctggcctgtgggctttggagagcccaagctgaccaggggtggaagtggtacctcagcacagaacagccaccctgcgaaaacgtggccagattcttgttta

SEQ ID NO: 652481 - DNA, 120 bp, Artificial Sequence
  ENSG00000183206_25 (sequence is synthesized)
agccagtccccaaccacatttctaatcactgggtggagcctttcaaccagggtctccagccaccttcactgctgttctctggctcacagaggtttcaggcctcctgagtcagagctccca

SEQ ID NO: 652482 - DNA, 120 bp, Artificial Sequence
  ENSG00000183206_26 (sequence is synthesized)
gggggaggaccagactgtcatctttgctgtttggatgactcagccagttcagtcttagagtttcagagtgtctgaggagaccaggggctgaagtgaaccccccacacagcatagccactc

SEQ ID NO: 652483 - DNA, 120 bp, Artificial Sequence
  ENSG00000183206_27 (sequence is synthesized)
tacaaaaacgtggccagacttcttttttaaacaagtccctattcctgttcctccttactaggcaagacttctcaacttgcttccagtcacatcctacaggtgtgttgagattggcaacag

SEQ ID NO: 652484 - DNA, 120 bp, Artificial Sequence
  ENSG00000183206_28 (sequence is synthesized)
tgataccttcagccactggaaaatacgaggcaattggcgactggagtggacccccagcataccacggcagccccacagaaaagtggccagactgttatgtgggtgcccatttccatatct

SEQ ID NO: 652485 - DNA, 120 bp, Artificial Sequence
  ENSG00000183206_29 (sequence is synthesized)
cctcgatgggcaggtcttcctggcctgggtctccagccagccccccacttgagctttcaagccagtagcaactcagcaactccctggacagagcttccaggagcaacagaaatcctctct

SEQ ID NO: 652486 - DNA, 85 bp, Artificial Sequence
  ENSG00000183206_30 (sequence is synthesized)
gacacctccaacaagctgcagttgacacaaggaacaagtcagtccatcttccacaggtacaacacaccccttactgctcatcacc

SEQ ID NO: 652487 - DNA, 120 bp, Artificial Sequence
  ENSG00000183206_31 (sequence is synthesized)
atcttccacaggtacaacacaccccttactgctcatcaccagacaaggaaccgtggcttgggcccacaacacagaccctccatcctggggtgattacattaagtaactgctaacttacac

SEQ ID NO: 652488 - DNA, 120 bp, Artificial Sequence
  ENSG00000183206_32 (sequence is synthesized)
ctctctggggtggagcccccaggagacaaggaaagtagtggagcagcaagtcagctgatgtggagcctggagggcagggacagctatgtctctaggctccacttgctcttatgagacact

SEQ ID NO: 652489 - DNA, 120 bp, Artificial Sequence
  ENSG00000183206_33 (sequence is synthesized)
ttatcccagcactttaggagtgctgaggtcagaccagccccatctcacgtgcaagattgcccagcacagatcaggtctaagagttctcttcgtaaaaaaggggacttgcttaaaaaagaa

SEQ ID NO: 652490 - DNA, 83 bp, Artificial Sequence
  ENSG00000183206_34 (sequence is synthesized)
gagttctcttcgtaaaaaaggggacttgcttaaaaaagaagtctggccacgtttgtgtagagcagttgtgctgtgctgaggag

SEQ ID NO: 652491 - DNA, 120 bp, Artificial Sequence
  ENSG00000183206_35 (sequence is synthesized)
tgcttgcctctcccaggaccccagccaggccacacctgcttagagggcactttcgggtgcccacaccatagcttctgtacaagcggaccgtgcctgatcagtggagagctgcagcaaggt

SEQ ID NO: 652492 - DNA, 120 bp, Artificial Sequence
  ENSG00000183206_36 (sequence is synthesized)
accatagcttctgtacaagcggaccgtgcctgatcagtggagagctgcagcaaggtgacctctacagccacgcactagcctgcacattaccattccatactgcagccctttatatggaaa

SEQ ID NO: 652493 - DNA, 120 bp, Artificial Sequence
  ENSG00000183206_37 (sequence is synthesized)
ttttgttgtacttgccctaacagcatatgggaatgcagcacacaccccaacccacaccaactgccactgaagatgaagccatggtgggcacagaaccaaaaaccccacccctgctagcat

SEQ ID NO: 652494 - DNA, 120 bp, Artificial Sequence
  ENSG00000183206_38 (sequence is synthesized)
ctcacccttgaggtaatgctgtgcagaggaaaagggaccttcttataccctgagtgaccactgttgcttgggggggatcagagaaggcaccttcactggccagccacccaccccaaacca

SEQ ID NO: 652495 - DNA, 120 bp, Artificial Sequence
  ENSG00000183206_39 (sequence is synthesized)
gcactacctccagtgcaacagcacacacagtcagcaggggcccgtggcccacaccccagctgttttgcctccaccactgggtgaatgcccacagggaggcagggacttttgcatctgcta

SEQ ID NO: 652496 - DNA, 120 bp, Artificial Sequence
  ENSG00000183206_40 (sequence is synthesized)
gcattctgccacagctgctgcactttggtcccctcagtgcagtggactccaaacctcgaggagccagaggacaaagttgtggcccaatacaagttccccagagttaaagcacacagtcca

SEQ ID NO: 652497 - DNA, 120 bp, Artificial Sequence
  ENSG00000183206_41 (sequence is synthesized)
agaattgggagctgcatgttggccccttaaaatcctccaaaaacaaaacctgttggctgaatccaccttacaccacaatcaaatcctcaaggtcatcagatataataaaggaaaaatacc

SEQ ID NO: 652498 - DNA, 120 bp, Artificial Sequence
  ENSG00000183206_42 (sequence is synthesized)
ctgtccaaaggtcagcaacctcaaagattgaagatggataagcccataaagatgagaaaaagactctgtgcaagaacactgaaaactcaaaaattcagcataccttcttttctccaaatg

SEQ ID NO: 652499 - DNA, 120 bp, Artificial Sequence
  ENSG00000183206_43 (sequence is synthesized)
gaactgggctgaggctgagatgtctgaaatgatacaagcagagttcaggatatgggtaggaacaaagttcattgagtgaaagaagtatgttgtaatccaatacaaggaagctaaaaatca

SEQ ID NO: 652500 - DNA, 120 bp, Artificial Sequence
  ENSG00000183206_44 (sequence is synthesized)
taatccaatacaaggaagctaaaaatcattgtaaaacattgcaggaactaacagacaaaatagtgagtataaagaagaaaataactgacctgacagagctgtaaatcacactagaagaat

SEQ ID NO: 652501 - DNA, 120 bp, Artificial Sequence
  ENSG00000183206_45 (sequence is synthesized)
atcacactagaagaattttcataatgtagtcacatggtgattgtgtgtgattgcattatgaatattattgtagtatgtgtgggcacctgagagtgccctgtaagcaggtgtggccaggct

SEQ ID NO: 652502 - DNA, 120 bp, Artificial Sequence
  ENSG00000183206_46 (sequence is synthesized)
caagcagactagggagggctgaggtcagaccagctccatctcatgtgcaagaccatctaacagaatagaccaagaagaggaaagaatcccagagcttgaaaactggctttctgaaataaa

SEQ ID NO: 652503 - DNA, 120 bp, Artificial Sequence
  ENSG00000183206_47 (sequence is synthesized)
acaggcaaacaagaatgggggaaaaaagaatgaaagggaatgaacaaaacatccgagaaatatgggattatataaacgaccaaatctatgactgattaatgtacctgaaagagatgagga

SEQ ID NO: 652504 - DNA, 120 bp, Artificial Sequence
  ENSG00000183206_48 (sequence is synthesized)
gaatggaaccaacttggaaaacacatttcagaatatcattcatgagaatgtccccaacctagccagacaggccaacattcaacttcaggaaatccagagaacctcagtaagatatgccat

SEQ ID NO: 652505 - DNA, 120 bp, Artificial Sequence
  ENSG00000183206_49 (sequence is synthesized)
gagaagatcatccccaagacacataatcatcagattctctgaggtcaaaataaaagaaaaaatgttaaaggcagctagggagaaaggcaacatcacctgcaaagggaattccatcagact

SEQ ID NO: 652506 - DNA, 120 bp, Artificial Sequence
  ENSG00000183206_50 (sequence is synthesized)
aggcaacatcacctgcaaagggaattccatcagacttagcagacctctcaactgaaactgtacaagccagaaaagacattcaacatttcaaagaaaagaaatttcaacccagaatttcat

SEQ ID NO: 652507 - DNA, 69 bp, Artificial Sequence
  ENSG00000183206_51 (sequence is synthesized)
tatcaccagccaccaccagccactacaaaaacacactgaagtacacagacaagtgatgctaaaaaccaa

SEQ ID NO: 652508 - DNA, 120 bp, Artificial Sequence
  ENSG00000183206_52 (sequence is synthesized)
aacacactgaagtacacagacaagtgatgctaaaaaccaaccacatacataagtctgcaaaagagccagctgacagcatgatgacaggatcaaatccacacataccattactaaccttaa

SEQ ID NO: 652509 - DNA, 120 bp, Artificial Sequence
  ENSG00000183206_53 (sequence is synthesized)
atggaaatgggctaaatgctccaattgaaagacacagggggcaagctggataaagaaccaagacccattggagtatgccgtcttcaagaaacccatctcacatgcagtgccatacatagg

SEQ ID NO: 652510 - DNA, 86 bp, Artificial Sequence
  ENSG00000183206_54 (sequence is synthesized)
gaaatggaaaacagaaaaaagcaggtgttgcactcctagtttctgacaaaacagactataccaataaagatttaaaaaaaaaaaaa

SEQ ID NO: 652511 - DNA, 120 bp, Artificial Sequence
  ENSG00000183207_0 (sequence is synthesized)
aggactctggcagttggtgagcatcatggcaaccgttacagccacaaccaaagtcccggagatccgtgatgtaacaaggattgagcgaatcggtgcccactcccacatccggggactggg

SEQ ID NO: 652512 - DNA, 120 bp, Artificial Sequence
  ENSG00000183207_1 (sequence is synthesized)
gctggacgatgccttggagcctcggcaggcttcgcaaggcatggtgggtcagctggcggcacggcgggcggctggcgtggtgctggagatgatccgggaagggaagattgccggtcgggc

SEQ ID NO: 652513 - DNA, 120 bp, Artificial Sequence
  ENSG00000183207_2 (sequence is synthesized)
agtccttattgctggccagccgggcacggggaagacggccatcgccatgggcatggcgcaggccctgggccctgacacgccattcacagccatcgccggcagtgaaatcttctccctgga

SEQ ID NO: 652514 - DNA, 120 bp, Artificial Sequence
  ENSG00000183207_3 (sequence is synthesized)
gatgagcaagaccgaggcgctgacgcaggccttccggcggtccatcggcgttcgcatcaaggaggagacggagatcatcgaaggggaggtggtggagatccagattgatcgaccagcaac

SEQ ID NO: 652515 - DNA, 120 bp, Artificial Sequence
  ENSG00000183207_4 (sequence is synthesized)
agggacgggctccaaggtgggcaaactgaccctcaagaccacagagatggagaccatctacgacctgggcaccaagatgattgagtccctgaccaaggacaaggtccaggccggggacgt

SEQ ID NO: 652516 - DNA, 120 bp, Artificial Sequence
  ENSG00000183207_5 (sequence is synthesized)
gatcaccatcgacaaggcgacgggcaagatctccaagctgggccgctccttcacacgcgcccgcgactacgacgctatgggctcccagaccaagttcgtgcagtgcccagatggggagct

SEQ ID NO: 652517 - DNA, 120 bp, Artificial Sequence
  ENSG00000183207_6 (sequence is synthesized)
gatcaagtcagaagtccgtgagcagatcaatgccaaggtggctgagtggcgcgaggagggcaaggcggagatcatccctggagtgctgttcatcgacgaggtccacatgctggacatcga

SEQ ID NO: 652518 - DNA, 120 bp, Artificial Sequence
  ENSG00000183207_7 (sequence is synthesized)
gagcttctccttcctcaaccgggccctggagagtgacatggcgcctgtcctgatcatggccaccaaccgtggcatcacgcgaatccggggcaccagctaccagagccctcacggcatccc

SEQ ID NO: 652519 - DNA, 120 bp, Artificial Sequence
  ENSG00000183207_8 (sequence is synthesized)
catagacctgctggaccggctgcttatcgtctccaccaccccctacagcgagaaagacacgaagcagatcctccgcatccggtgcgaggaagaagatgtggagatgagtgaggacgccta

SEQ ID NO: 652520 - DNA, 120 bp, Artificial Sequence
  ENSG00000183207_9 (sequence is synthesized)
cacggtgctgacccgcatcgggctggagacgtcactgcgctacgccatccagctcatcacagctgccagcttggtgtgccggaaacgcaagggtacagaagtgcaggtggatgacatcaa

SEQ ID NO: 652521 - DNA, 120 bp, Artificial Sequence
  ENSG00000183207_10 (sequence is synthesized)
gcgggtctactcactcttcctggacgagtcccgctccacgcagtacatgaaggagtaccaggacgccttcctcttcaacgaactcaaaggcgagaccatggacacctcctgagttggatg

SEQ ID NO: 652522 - DNA, 120 bp, Artificial Sequence
  ENSG00000183207_11 (sequence is synthesized)
tcatcccccgaccccaccctgttttccaccagagttctgacactgtgactctgtataaaatggttgggaagctgcacccaccctgtgtatgtgtggttgccctgagcccacagaaagaca

SEQ ID NO: 652523 - DNA, 120 bp, Artificial Sequence
  ENSG00000183207_12 (sequence is synthesized)
gactctggcagttggtgagcatcatggcaaccgttgaactccaactttcaaaatcatcttggcgcaacggccggttccgcagtccttggcgccagtgtgtgatgaggagggttgtaggac

SEQ ID NO: 652524 - DNA, 120 bp, Artificial Sequence
  ENSG00000183207_13 (sequence is synthesized)
aggagggttgtaggaccttgcgcttcgagccatttgggagccttggattgttagtggtgccaatggcacttgagttccaagctggaagcacaggcaggtgtggtggtgcaggcctgtaat

SEQ ID NO: 652525 - DNA, 120 bp, Artificial Sequence
  ENSG00000183207_14 (sequence is synthesized)
ttcagacgcagggaattttcatccctcaggttggcttctgtatcatccagcctggcctatagtaggtatcagtaaatctctcttgacttaagtagatgctgttaggtccaccttacagat

SEQ ID NO: 652526 - DNA, 120 bp, Artificial Sequence
  ENSG00000183207_15 (sequence is synthesized)
aaagaaactgaggaatgaagaggctgggcccacaacaaggagatggccaggcaggatttgaacccaggcaatctggcccagaatgccctcccctcacatgccacactctgctgcctagag

SEQ ID NO: 652527 - DNA, 75 bp, Artificial Sequence
  ENSG00000183207_16 (sequence is synthesized)
tcatggcaaccgttacagccacaaccaaagtcccggagatccgtgatgtaacaaggattgagcgaatcgagatgg

SEQ ID NO: 652528 - DNA, 85 bp, Artificial Sequence
  ENSG00000183207_17 (sequence is synthesized)
gcatgagccaccgcgcctggcgatgaagagccaagcaccgcttgtgagctgaggacccagtagagactagctgcacccaggagcc

SEQ ID NO: 652529 - DNA, 120 bp, Artificial Sequence
  ENSG00000183207_18 (sequence is synthesized)
agttggtgagcatcatggcaaccgtttatttcacacgggctacgtctcagtgtaaatgctcaataaattatcacttgaatatttgaatgaatgaatacatgtgaatgaaggagaggccag

SEQ ID NO: 652530 - DNA, 87 bp, Artificial Sequence
  ENSG00000183207_19 (sequence is synthesized)
atttgaatgaatgaatacatgtgaatgaaggagaggccaggaaacttggcctggcacctgctcaattacctgaataaagaagcgatt

SEQ ID NO: 652531 - DNA, 120 bp, Artificial Sequence
  ENSG00000183207_20 (sequence is synthesized)
actcaaagaacagctaagaattttgcaatcggcctgagcggggcggtggtggggctgagcaaaaggaggaggagccaggagacattgggaatggacccaggagttccggacgcccgtctt

SEQ ID NO: 652532 - DNA, 120 bp, Artificial Sequence
  ENSG00000183207_21 (sequence is synthesized)
ccagcgcagcctcggtgggagggcggggcataaagtcccgccacgcccccacaatatttacatatttatgaggaaccatcgagatctttgaagaaccagctagcctagaggagccagaac

SEQ ID NO: 652533 - DNA, 120 bp, Artificial Sequence
  ENSG00000183207_22 (sequence is synthesized)
agcactggggtgttttcatctcctccatcacccccttgacccatggggtctggatcttcctgttaccctgactgtttgtcctggtactcctgggtcttccctgtaaccctaggacagcag

SEQ ID NO: 652534 - DNA, 120 bp, Artificial Sequence
  ENSG00000183207_23 (sequence is synthesized)
ggcccctcagcctggcactatagcttcgcatggccacatgtggcctgtggcttctaaggtcctccgggagcccccgtgaccctcagcgctctggaatgtccctagtcctgactacctcct

SEQ ID NO: 652535 - DNA, 120 bp, Artificial Sequence
  ENSG00000183207_24 (sequence is synthesized)
ccccttcatgcccttccctgccctgtctccgccgttcttcccccacccccgccccatagaccaagttcgtgcagtgcccagatggggagctccagaaacgcaaggaggtggtgcacaccg

SEQ ID NO: 652536 - DNA, 120 bp, Artificial Sequence
  ENSG00000183208_0 (sequence is synthesized)
tgactatttcaggtcagctctatggctcttccacatgattcaaacgaaacttcctatttgctgcctcccaacaatgaggactggggcaggcaaaccattcctgactttgtttatgggcag

SEQ ID NO: 652537 - DNA, 120 bp, Artificial Sequence
  ENSG00000183208_1 (sequence is synthesized)
aaggatctcatggcagaagggattcagtggccaaggaatgcacctggcatcccagatgctctgccacaatctccctttgatgctgcactctgctctgcctggaagcagcgggtggagctg

SEQ ID NO: 652538 - DNA, 120 bp, Artificial Sequence
  ENSG00000183208_2 (sequence is synthesized)
gggctgtttcgctaccgtctacgggagctacagacccaaatcctccctggtgctgtgggtttcgtggctcagctgaatgtggagcgtggtgtgcagaggaggcccccgcagaccatcaag

SEQ ID NO: 652539 - DNA, 120 bp, Artificial Sequence
  ENSG00000183208_3 (sequence is synthesized)
agtgtgaggcaggcatttgaccctgtacagttcaacttcaacaagatccggcccggagaagtcctcttccgtttgcaccgggagcctgatctccctgggactctgctgcaagaagacatc

SEQ ID NO: 652540 - DNA, 120 bp, Artificial Sequence
  ENSG00000183208_4 (sequence is synthesized)
ggctgtgctgctgagcttacacccgggcttccgtgtcggcttcaacagcctgggaggcttggcctcggtgaaccacctccacctgcatggctattacctggcccacagactgcccgtgga

SEQ ID NO: 652541 - DNA, 120 bp, Artificial Sequence
  ENSG00000183208_5 (sequence is synthesized)
gcaggcgccaagcgagcccctggaccctggaggccatttgcatctgctccaggacctcccagctcctggcttcctcttttacactcgtgggccagggcctgacttggagtccttgataag

SEQ ID NO: 652542 - DNA, 120 bp, Artificial Sequence
  ENSG00000183208_6 (sequence is synthesized)
cagggtatgtcgggccactgattatctgactgaccatgagattgctcataacttgtttgtcacccggggagctccgccgggaaagacatcaccttcctcagccctcacaggggtccgagt

SEQ ID NO: 652543 - DNA, 120 bp, Artificial Sequence
  ENSG00000183208_7 (sequence is synthesized)
aattctgtgggcccggaagtccagctttgggataaaggacggtgaagctttcaatgttgccctctgtgagctggctgggcacctccctgtcaaaacatcccaggacttcagcagcctgac

SEQ ID NO: 652544 - DNA, 120 bp, Artificial Sequence
  ENSG00000183208_8 (sequence is synthesized)
agaggcagctgctgtggccctcattcaggactgtcggctgcccccatcccaggcagaagacgtacaggcagcactggtggccctgatgtcccaggaagagcaataatacttctggatgta

SEQ ID NO: 652545 - DNA, 120 bp, Artificial Sequence
  ENSG00000183208_9 (sequence is synthesized)
ctccccagggccaggcgtcccgcgcacctggtactcggccagcagctccttggacaggcgactgcccgagccccccatcgccccgccgcgcgcacagctccgccaactcgcctcgagacg

SEQ ID NO: 652546 - DNA, 120 bp, Artificial Sequence
  ENSG00000183208_10 (sequence is synthesized)
cagacaactttctcacttccgcccttgggccgcgtcactgcccggtccccgcggcaaccgctcctggggccaccacccccgggcccgccccctcctaaaagctgccaggcgttcccagcc

SEQ ID NO: 652547 - DNA, 120 bp, Artificial Sequence
  ENSG00000183208_11 (sequence is synthesized)
gggtttggcaggcgagctgccggctccaagcggtcctaggctatttactgaggacccactggatgtcaagcattgtgcatagttttcttcgattgttgcaacatcccttgcgagtttctg

SEQ ID NO: 652548 - DNA, 85 bp, Artificial Sequence
  ENSG00000183208_12 (sequence is synthesized)
ccaggctagagtgtagtggtatgatcctggctcactgtagcctccacctctggggctgagactataggcgtgcaccaccacacac

SEQ ID NO: 652549 - DNA, 76 bp, Artificial Sequence
  ENSG00000183208_13 (sequence is synthesized)
ttttttttttttttttttttttaacgattaggtgattttgtatttttttatatagacgaagcagtcctcccacctc

SEQ ID NO: 652550 - DNA, 87 bp, Artificial Sequence
  ENSG00000183208_14 (sequence is synthesized)
tgatctacaggctcctgccaccaaacccggctaatttttttgtatttttaaaagagaaggggtttcaccacattggctaggctggtc

SEQ ID NO: 652551 - DNA, 120 bp, Artificial Sequence
  ENSG00000183208_15 (sequence is synthesized)
gatgagtccctttccagagcactgtccatcatagtcctttggacatttattttcatggctgccttctcacctgtctcagcctaagaagaaggatgaagaaagctgataatgatctcttaa

SEQ ID NO: 652552 - DNA, 120 bp, Artificial Sequence
  ENSG00000183208_16 (sequence is synthesized)
aggggagaaagataatggtctctttaaaggggagctgatagtggtctctttaaaggggagaaaatctggaataattctactgagtaagacatcatgaatgtatctgctacctctccccgt

SEQ ID NO: 652553 - DNA, 120 bp, Artificial Sequence
  ENSG00000183208_17 (sequence is synthesized)
tcttgttcaagccccaggggtgttaaaaaggagtgtgtgtgacagttacacactcctgactttacatttagattttgtcttcctttgatatcaaatgttagcacggtaatagtgcctgtg

SEQ ID NO: 652554 - DNA, 120 bp, Artificial Sequence
  ENSG00000183208_18 (sequence is synthesized)
cccctttgctcaccacttatttttattgctttgtcccttctttccatttagccctgctccacccaaatgccccactccttcactttccctgccaccttgagctttcctctagcccccaac

SEQ ID NO: 652555 - DNA, 120 bp, Artificial Sequence
  ENSG00000183208_19 (sequence is synthesized)
accaagttgaatgctcttcactgacatcatctgatgtaaaaacacagtgttgtcacaactttccgggtgcacgtctttttttgttttgtttttttgtaaggctggggtgcagtggtgcaa

SEQ ID NO: 652556 - DNA, 120 bp, Artificial Sequence
  ENSG00000183208_20 (sequence is synthesized)
agatagggtcttgctatgttgcccgggttgctgtcaaactcctggccttaagaaatcctcccacctcggcctcccagagtgctaagatgccaccacaccttggtgcaggttttttttttt

SEQ ID NO: 652557 - DNA, 86 bp, Artificial Sequence
  ENSG00000183208_21 (sequence is synthesized)
acacagggagacagctaactgcaagcttcaacctcctgggctcaaacaatactcccatctcagcctccctagtagctgggaccaca

SEQ ID NO: 652558 - DNA, 85 bp, Artificial Sequence
  ENSG00000183208_22 (sequence is synthesized)
gctgggaccacaggcatgcgccaccacacccggctatttttttggagagatagcatcttgccaaatcctcccacctcagcctccc

SEQ ID NO: 652559 - DNA, 61 bp, Artificial Sequence
  ENSG00000183208_23 (sequence is synthesized)
aggcatgagccactgcacctggcctgagtttttttttttttttcttgaatctctgcctcct

SEQ ID NO: 652560 - DNA, 120 bp, Artificial Sequence
  ENSG00000183208_24 (sequence is synthesized)
cggctcactgcgtctctgcctcctgggttcaagcaattcagcctgagtcttcttaatacccccattcaaaacgggatggagactgacagtttgtactttgttcaaggtcaggcagctgga

SEQ ID NO: 652561 - DNA, 120 bp, Artificial Sequence
  ENSG00000183208_25 (sequence is synthesized)
gtcgggactgcagcacaggcaggtaccagaagatgagctgggacaatgtgtgcttgtgaccgcctctccagtcagtggttcccatggtgggtagcactgtccttaacagtttgccctccc

SEQ ID NO: 652562 - DNA, 120 bp, Artificial Sequence
  ENSG00000183208_26 (sequence is synthesized)
tgagcctcagccatccctcttggggtctttcccaagcactttagaagctcctcttgatgtagacacaaaatccaaagctaagtcgttgttcctccgtctgcatctgagtcaatgtgggaa

SEQ ID NO: 652563 - DNA, 120 bp, Artificial Sequence
  ENSG00000183208_27 (sequence is synthesized)
atttttttttatctcattgctttgttctgtcctgtttctccagacatttcacactggttccagaggaactagtcagtagacactattctaagagagtatgtgggtgtgaaatctcatttt

SEQ ID NO: 652564 - DNA, 120 bp, Artificial Sequence
  ENSG00000183208_28 (sequence is synthesized)
ccttttagctcccttgaatgttatacagcaaaagtaaaagaagtcttgggttggctgggcacgttggctcacacctttaatcctagcactttgggaagccgaggcaggcaaatcacttgt

SEQ ID NO: 652565 - DNA, 120 bp, Artificial Sequence
  ENSG00000183208_29 (sequence is synthesized)
gaggttgcagtgagctgagattgcacgactgtactccagcctgggcgatagtgcgagactcagtctcaaaataaataaatacataaagtcttgggtccagctctcaacagagattatcac

SEQ ID NO: 652566 - DNA, 120 bp, Artificial Sequence
  ENSG00000183208_30 (sequence is synthesized)
ctctcaacagagattatcaccgccaccactccttcatcaaacatcctgaaggaatgagagtccctgttcacagcgtaagggtgaaagggggctcacacaggtgggttctggctgctgtct

SEQ ID NO: 652567 - DNA, 120 bp, Artificial Sequence
  ENSG00000183208_31 (sequence is synthesized)
gagtgggctcacccaggaggggttttgatttctctgcctcccaaactgtgggtcctagccctggcttaggccttcaggtcgttggctccctatacctaggcctgtataaagccttagttt

SEQ ID NO: 652568 - DNA, 120 bp, Artificial Sequence
  ENSG00000183208_32 (sequence is synthesized)
ccagttttcattagaggttttacatcccaaatgatgttacaaagtctccctgtgataaagcagaatatgtgtccatagcccattttataagaaaaacagtttaggccaggtgcggtggct

SEQ ID NO: 652569 - DNA, 120 bp, Artificial Sequence
  ENSG00000183208_33 (sequence is synthesized)
ggcagagagagactttgtctcaaaaaaaaaaaaaaagaaaaaaacagtttaccattctatcagaaaatgttgaccaccctcatatttttggtaaactgcagtaatttttccttaatactt

SEQ ID NO: 652570 - DNA, 120 bp, Artificial Sequence
  ENSG00000183208_34 (sequence is synthesized)
tttgcaagcttttgcatgcataagctccagtatcacacttaattttgcttgcttgctctctgaagggagttcggatgaccattacagcaaagtggattttgcgttcaaagtgataagcca

SEQ ID NO: 652571 - DNA, 120 bp, Artificial Sequence
  ENSG00000183208_35 (sequence is synthesized)
aatatcaggattttcccagtttctccgtaggactgatgtttagaggaaagccttccctgactcaaatatgtttctccatataaaaaggggaaagtaaaatgggttttctttctggtggta

SEQ ID NO: 652572 - DNA, 120 bp, Artificial Sequence
  ENSG00000183208_36 (sequence is synthesized)
aagtcgcgaggtgcatccgcttcggctgcagtaggtggtggcggcggcagccctgggtggggtcccataggggcatctgagaagtcactggagctagcgtttccgggaaacctggagact

SEQ ID NO: 652573 - DNA, 120 bp, Artificial Sequence
  ENSG00000183208_37 (sequence is synthesized)
cgctgagtggcgggggtcgtcggctgcccctctgcccagcaagggcttttctagatgttatcatcaggcaatcgctgcacctgtcgcagcccccaagccacctcttccagaagtaaccat

SEQ ID NO: 652574 - DNA, 61 bp, Artificial Sequence
  ENSG00000183208_38 (sequence is synthesized)
aggacccactggatgtcaagcattgtgcatagttttcttcgattgttgcaacatcccttgc

SEQ ID NO: 652575 - DNA, 120 bp, Artificial Sequence
  ENSG00000183208_39 (sequence is synthesized)
gtgctggctgcgtatgcgtcacgggcgtcatgacctcgctgtggccccggcagcggctgcggggaaagtcgcgaggtgcatccgcttcggctgcagctatttactgaggacccactggat

SEQ ID NO: 652576 - DNA, 120 bp, Artificial Sequence
  ENSG00000183230_0 (sequence is synthesized)
cccctttctttcttatcctgggtgaacaacgctcagcgaaattgactgccccactgtcatctgcctctcaatttggtactctgtaactctgtgaccaccaagaagcctttttccgtcccc

SEQ ID NO: 652577 - DNA, 120 bp, Artificial Sequence
  ENSG00000183230_1 (sequence is synthesized)
cacaaagctctttttggaaaattccctacgggagctgaattttaagcccatttactttataggaagaaacagaaaggcagcatgtcagctgaaacaccaatcacattgaatatcgatcct

SEQ ID NO: 652578 - DNA, 120 bp, Artificial Sequence
  ENSG00000183230_2 (sequence is synthesized)
caggatctgcaggtccaaacattcaccgtggagaagctactggagcctctcataatccaggttaccacacttgtaaactgtccccagaacccttccagcaggaaaaaaggacgttcgaaa

SEQ ID NO: 652579 - DNA, 120 bp, Artificial Sequence
  ENSG00000183230_3 (sequence is synthesized)
agagccagtgtccttctagcttctgtggaggaagcaacttggaatttattagacaagggagagaagattgcccaggaagctacagttttaaaggatgagcttacggcttcacttgaggaa

SEQ ID NO: 652580 - DNA, 120 bp, Artificial Sequence
  ENSG00000183230_4 (sequence is synthesized)
gttcgcaaagaaagtgaagctctgaaagtatcagctgagagatttacagatgacccctgttttctcccaaaaagggaggctgtggttcaagctgcccgtgccttgctggctgcggtgacg

SEQ ID NO: 652581 - DNA, 120 bp, Artificial Sequence
  ENSG00000183230_5 (sequence is synthesized)
agactccttatccttgcggacatgattgatgtcatgtgcctcttgcaacatgtgtcagcttttcaaaggacatttgagtctctcaaaaatgttgccaacaaatctgacctccagaaaacc

SEQ ID NO: 652582 - DNA, 120 bp, Artificial Sequence
  ENSG00000183230_6 (sequence is synthesized)
taccagaagcttgggaaggagctggaaaatttggattatttagccttcaaacgtcagcaggacttaaaatctccaaatcagagagatgaaattgcaggagcccgagcttcactgaaggag

SEQ ID NO: 652583 - DNA, 120 bp, Artificial Sequence
  ENSG00000183230_7 (sequence is synthesized)
aactctcccctcttgcattcaatttgttcagcttgtttggagcattctgatgttgcttccctcaaagcaagcaaggacacagtttgtgaagaaattcagaatgctctcaatgtaatttca

SEQ ID NO: 652584 - DNA, 120 bp, Artificial Sequence
  ENSG00000183230_8 (sequence is synthesized)
aatgcttcacaagggatccagaatatgacaaccccaccagaacctcaggcagcaaccctgggaagtgcccttgatgagctggagaatttaattgtcctgaatccactcacagtaactgag

SEQ ID NO: 652585 - DNA, 120 bp, Artificial Sequence
  ENSG00000183230_9 (sequence is synthesized)
gaggaaatacgaccatcactagagaaacgccttgaagccattatcagtggggctgctctgctggcggattcttcatgtacgagggacttacaccgagagcggattatcgcagaatgcaac

SEQ ID NO: 652586 - DNA, 120 bp, Artificial Sequence
  ENSG00000183230_10 (sequence is synthesized)
gccattcgccaggctcttcaggatctgctttcagagtacatgaacaacgctggaaaaaaagaaaggagtaataccctgaatattgctttagacaacatgtgtaagaagacaagagacctt

SEQ ID NO: 652587 - DNA, 120 bp, Artificial Sequence
  ENSG00000183230_11 (sequence is synthesized)
cgcagacagctccgcaaggctattatagatcatgtgtcagactctttcctggatacgacagtccctcttttggttctcattgaagctgctaagaatggccgggaaaaggaaataaaagaa

SEQ ID NO: 652588 - DNA, 120 bp, Artificial Sequence
  ENSG00000183230_12 (sequence is synthesized)
tatgctgcgatatttcatgaacacaccagcaggcttgtagaggtggcaaatcttgcttgttccatgtcaacaaatgaagatggaattaaaattgtcaaaattgcagccaatcatttggaa

SEQ ID NO: 652589 - DNA, 120 bp, Artificial Sequence
  ENSG00000183230_13 (sequence is synthesized)
accttgtgtccacagattattaatgctgcacttgctttggctgcaagacccaaaagtcaagcggtcaaaaacaccatggaaatgtacaagcgtacatgggagaatcatatacatgtcctc

SEQ ID NO: 652590 - DNA, 120 bp, Artificial Sequence
  ENSG00000183230_14 (sequence is synthesized)
actgaagccgtagatgacattacaagcattgatgacttccttgctgtatctgaaagccatatcttggaagatgtcaacaagtgtatcatagccttaagagaccaggatgctgataattta

SEQ ID NO: 652591 - DNA, 120 bp, Artificial Sequence
  ENSG00000183230_15 (sequence is synthesized)
gaccgtgctgcgggtgctatcagaggccgggcagcaagagttgctcacatcgtcacgggtgaaatggacagttacgagccaggggcttacacggaaggtgtaatgagaaatgttaacttc

SEQ ID NO: 652592 - DNA, 120 bp, Artificial Sequence
  ENSG00000183230_16 (sequence is synthesized)
cttacaagtactgtaattcctgaatttgtaacacaagtgaatgttgccttggaagccttaagcaaaagctcattgaatgtgttggatgataatcaatttgtggacatctcaaagaagatc

SEQ ID NO: 652593 - DNA, 120 bp, Artificial Sequence
  ENSG00000183230_17 (sequence is synthesized)
tatgatacaattcatgatatcagatgttcagtcatgatgattcggaccccagaggaactggaggatgtttctgaccttgaagaggaacacgaggtccgcagtcacaccagcattcagacc

SEQ ID NO: 652594 - DNA, 120 bp, Artificial Sequence
  ENSG00000183230_18 (sequence is synthesized)
gaagggaaaactgatagggctaagatgactcaactgcctgaggcagaaaaagaaaagattgctgagcaagttgctgatttcaagaaagtaaagagtaagctggatgctgagattgagata

SEQ ID NO: 652595 - DNA, 120 bp, Artificial Sequence
  ENSG00000183230_19 (sequence is synthesized)
tgggatgatacaagcaacgacatcattgttctggccaagaacatgtgtatgatcatgatggagatgacagacttcactaggggcaaaggaccactaaagcatacaactgatgtgatctat

SEQ ID NO: 652596 - DNA, 120 bp, Artificial Sequence
  ENSG00000183230_20 (sequence is synthesized)
gcagcgaaaatgatatcagaatcaggatcaaggatggatgtccttgctcggcagattgctaatcagtgcccagatccatcttgtaaacaggacttgttggcctacctggaacagattaag

SEQ ID NO: 652597 - DNA, 120 bp, Artificial Sequence
  ENSG00000183230_21 (sequence is synthesized)
ttctactcccaccaactgaaaatctgcagtcaagttaaagctgagatccagaacctgggaggagagctcatcatgtcagctttggacagtgtcacatccctgatccaagcagccaaaaat

SEQ ID NO: 652598 - DNA, 120 bp, Artificial Sequence
  ENSG00000183230_22 (sequence is synthesized)
ttaatgaatgctgtagtgcaaacagtgaaaatgtcttacattgcctcaaccaagatcatccgaatccagagtcctgctgggccccggcacccagttgtgatgtggagaatgaaggctcct

SEQ ID NO: 652599 - DNA, 120 bp, Artificial Sequence
  ENSG00000183230_23 (sequence is synthesized)
gcaaaaaaacccttgattaaaagagagaagccagaggaaacgtgtgcagctgtcagacgaggctcagcaaagaaaaaaatccatccattgcaagtcatgagtgaatttagaggaagacaa

SEQ ID NO: 652600 - DNA, 120 bp, Artificial Sequence
  ENSG00000183230_24 (sequence is synthesized)
atctactgaaaccactattctacatatagtgcctatatgacaaaatcctgcctaaccacactgctttattttacacttaagaagttctgtaatttcactaagttttggtgtttaactcac

SEQ ID NO: 652601 - DNA, 120 bp, Artificial Sequence
  ENSG00000183230_25 (sequence is synthesized)
aaataacataaaatattgggcgctaaatcaacaaaagcaatatatatttgggatcatatcactgtcatttctgtatggtcagcacctaatagttaaggaatatttgcttgttgaatgaat

SEQ ID NO: 652602 - DNA, 120 bp, Artificial Sequence
  ENSG00000183230_26 (sequence is synthesized)
gaaattatcacgtgtcattcagcgtttcccatcatagagattatctactattcgttaccaaataaacacaggagaggccagagagtcctgtttatctgtaatacttcatgtacacttatc

SEQ ID NO: 652603 - DNA, 120 bp, Artificial Sequence
  ENSG00000183230_27 (sequence is synthesized)
atccttatcttgaattaaaacactaacatgagctcctaacttggttttttaatagaaacaaaagacttttataaaatattttcccatttaatctccatgctttctttatctgatctaacc

SEQ ID NO: 652604 - DNA, 120 bp, Artificial Sequence
  ENSG00000183230_28 (sequence is synthesized)
tggcacctaaccaggcagaaatgtatgattcctgccatagcaaaaaaaccaccttttaatctctagatagctgtactcattgtcaacttattaggctaatatccattataaactaatcaa

SEQ ID NO: 652605 - DNA, 120 bp, Artificial Sequence
  ENSG00000183230_29 (sequence is synthesized)
atttgaatagttaggctacttgctggattttgaaggtcaaccttgtttattaataaaatgctttcttaacattataaaggttacaatgagttctgatgccacatactcaccttttgggtt

SEQ ID NO: 652606 - DNA, 120 bp, Artificial Sequence
  ENSG00000183230_30 (sequence is synthesized)
tccaatgtgttagagagttctgtacttttgagtgttaggcctatccgaatacatatgtgaaagaagagttatcacccattgggaaaatgagacaacaaactatatcccaaagtgagttat

SEQ ID NO: 652607 - DNA, 120 bp, Artificial Sequence
  ENSG00000183230_31 (sequence is synthesized)
attaataataacagaagtgtaagttctgtatgaccctatttttacaaacataaaaatacatttttatcagcttgcaattgtaattaaaaggaaaatggcagtttgaaaaatcttttgacg

SEQ ID NO: 652608 - DNA, 120 bp, Artificial Sequence
  ENSG00000183230_32 (sequence is synthesized)
ttgagtaaaatataactgcatgaactgtaccattgaactatgaagcagttaatggcaatgaagctggagtgattttaataacgttcttttaaataaaagtcactggggtcattttacaac

SEQ ID NO: 652609 - DNA, 120 bp, Artificial Sequence
  ENSG00000183230_33 (sequence is synthesized)
tccagtcactgtgttcattcctagttgagttcataatggacttcataatagtcttagagtctagtgtacctctctctgtcattctctctctctttttctctcccctgatgacctgcctct

SEQ ID NO: 652610 - DNA, 120 bp, Artificial Sequence
  ENSG00000183230_34 (sequence is synthesized)
ctctgtctttcaaaaatgtccttaacagaaactctttggaggccataagttttgttttcattttttctcattcatagagttctgattcacagactttaaaaaacattttctattctacat

SEQ ID NO: 652611 - DNA, 120 bp, Artificial Sequence
  ENSG00000183230_35 (sequence is synthesized)
tatcataatagtattatattgtacctttttacttctaaaacattgccattgatgagaggcgtctcagcaacgatgtaaccttagattgatgagaaaaaaatttacacatacaataccagt

SEQ ID NO: 652612 - DNA, 120 bp, Artificial Sequence
  ENSG00000183230_36 (sequence is synthesized)
tgatattaggagaaccagtttgggtaaaaggatgcatgaaacatagaaaagcataaagattgacagtacgatatgtgtggaatcttaagcataatggtatgggaaaagaaggatctattt

SEQ ID NO: 652613 - DNA, 120 bp, Artificial Sequence
  ENSG00000183230_37 (sequence is synthesized)
aataggtcattattaattatgcaggaaatgttaaatttcttgtaatgaattatttcaatcttccaagtagctggattgcctgagctcagtgtaaaacttcctaggaggtgaaggcaataa

SEQ ID NO: 652614 - DNA, 120 bp, Artificial Sequence
  ENSG00000183230_38 (sequence is synthesized)
actcctccctgttttgcaccatagactggcctacaataactattctgaacagaatgcactgcccagaagaaaaggcagtgaagaagggaattagggaattcagatgactctgtttttcag

SEQ ID NO: 652615 - DNA, 120 bp, Artificial Sequence
  ENSG00000183230_39 (sequence is synthesized)
aattatctagatgattgaggcaaatagagattttcttttattgaaatgctgccatcattttctgctctaagtgtagatgttgcacgagtgacatctgtggtatatccttcttccagatag

SEQ ID NO: 652616 - DNA, 120 bp, Artificial Sequence
  ENSG00000183230_40 (sequence is synthesized)
aagtataaatttataatttagtggggagaggaattttcttttaatcaccaaactaccagctgtatagaaaatttttttgaaatcaccaaactagcagttgtgtatcttagctcctaaagc

SEQ ID NO: 652617 - DNA, 120 bp, Artificial Sequence
  ENSG00000183230_41 (sequence is synthesized)
cacattcacaagaatcataagcatctcatttagaaaatctaatgtccaccggacccaacatcatctttccacatgttggagtttagaacatgcagtattggacaccaaaagaacagaaat

SEQ ID NO: 652618 - DNA, 120 bp, Artificial Sequence
  ENSG00000183230_42 (sequence is synthesized)
aacttgaaattatacaattaccaaataacctccatctctttgataaaaatgactttttacccaaagtgagatgtgaacaagttctcctctttaacccaggcagattttcagcttagctca

SEQ ID NO: 652619 - DNA, 120 bp, Artificial Sequence
  ENSG00000183230_43 (sequence is synthesized)
aagcaaactataattaaataaaacaataaaaattttaactcaatgaatatcctaggagttaatctgctgtggtaatcgatagtgacataaaaacaagatgcatagagctgaaaaaggcat

SEQ ID NO: 652620 - DNA, 120 bp, Artificial Sequence
  ENSG00000183230_44 (sequence is synthesized)
attcctgtagtaggcagcatttcaagatttagtttgattcaaacctgctgataaaacaaatgcttatatgcaagaaaaactagcagcaagatatgaataaatctccccattatgttaaaa

SEQ ID NO: 652621 - DNA, 120 bp, Artificial Sequence
  ENSG00000183230_45 (sequence is synthesized)
actaatcagcatgacacatttatatttaggtatttcttctgcagaggattgccagaaatttcttaatgagagtgataatttggtgatccacctatgtaccttttgatgtctcatcacaga

SEQ ID NO: 652622 - DNA, 120 bp, Artificial Sequence
  ENSG00000183230_46 (sequence is synthesized)
gattagtgcttcctctgataatacatttgcttgatcctgctaataagaactcacctttctttttaacgaaatcaatttgtgttaatttacatagggaaaaacgttccttgagagggagga

SEQ ID NO: 652623 - DNA, 120 bp, Artificial Sequence
  ENSG00000183230_47 (sequence is synthesized)
gaggggtgtttaccacccacaggagcagttccatccctggttacccaccagtatccctgccagatgttagactggaattagaatgaaaatttaaaaaaaaacgaaataataatccactaa

SEQ ID NO: 652624 - DNA, 120 bp, Artificial Sequence
  ENSG00000183230_48 (sequence is synthesized)
atggccttctaattagagaaatttgaagatttctatcaaatataaaaagtgagaaatagaaatcattccctttaatttatgacaaattaaaattattgaagtaaaatgtttctaagtcag

SEQ ID NO: 652625 - DNA, 120 bp, Artificial Sequence
  ENSG00000183230_49 (sequence is synthesized)
tttctggatagttcttgaatgagtcaagaaaaaactcaaacactaaatttctaagctaatttgttcattattcctttctgtttattatttattatatgagtgcaaattgcaaatgtatta

SEQ ID NO: 652626 - DNA, 120 bp, Artificial Sequence
  ENSG00000183230_50 (sequence is synthesized)
gaaaagacaatatagccttcacattcacaagtgtgccttctggcctttgaaatcttttaacataagatcaatataacatatttgttccccataaaaatctcttatgtacagggaataagg

SEQ ID NO: 652627 - DNA, 120 bp, Artificial Sequence
  ENSG00000183230_51 (sequence is synthesized)
tcctccatagctacacagagacacccattcttgcagtctggcattcttaacacctttagcttcaaaggcagtcggtttcaatttcaagctaaaattgtgaatatacaattaagtgcgcaa

SEQ ID NO: 652628 - DNA, 120 bp, Artificial Sequence
  ENSG00000183230_52 (sequence is synthesized)
cttgggccttcagaccaaataattaatgctcctcaaattaaataatgagtggctgaaaagcctaatgtgtaacaacagagtaagtgacttcaacggcttcctgaaccttcattttgaggg

SEQ ID NO: 652629 - DNA, 120 bp, Artificial Sequence
  ENSG00000183230_53 (sequence is synthesized)
tgttctcatctcacccacctctgggctaggtatcctctgttaattgctaacaatttcctaccaaaatagtgcaatcaggactgcccatcacagcaaattactccaattaatgccctttcc

SEQ ID NO: 652630 - DNA, 120 bp, Artificial Sequence
  ENSG00000183230_54 (sequence is synthesized)
tcttctgtgaaccaaaaatatctctctcctgtctctcatctctatcccaggtataaattgactaataaattttacagagttttagtcaaaattatgaattttaatttccagcaacattat

SEQ ID NO: 652631 - DNA, 120 bp, Artificial Sequence
  ENSG00000183230_55 (sequence is synthesized)
tcctttagtctttctattccccaaaacattcttaaattttggtatcaaatgttcatttctgtcctagagattgtggttcccatggctacagatttttgtatagtggtagtatgagtggaa

SEQ ID NO: 652632 - DNA, 120 bp, Artificial Sequence
  ENSG00000183230_56 (sequence is synthesized)
taagatctgagacttttcctggtgatatccaccattctcttgtgaactcattgcagaataaacagcctctttcactttcattgtaagtagttctttaggttggcaaagcaggcaccagaa

SEQ ID NO: 652633 - DNA, 120 bp, Artificial Sequence
  ENSG00000183230_57 (sequence is synthesized)
tctgaatttgaatgaaatctgtactttcttttgttggcctattttttgccaagacagcctgcctattgtatatttaggaatcaaatattcattttttctgtttgtaaagccagaaatatt

SEQ ID NO: 652634 - DNA, 120 bp, Artificial Sequence
  ENSG00000183230_58 (sequence is synthesized)
taattttatattattttaataattctttttaagtaaagtaggaaaatttctgccacctgagatgttactgtttttatttatatgaaaattccatttttttctttatgactcttttcccat

SEQ ID NO: 652635 - DNA, 120 bp, Artificial Sequence
  ENSG00000183230_59 (sequence is synthesized)
atgactcttttcccataccattatgatatgttcagcattagtattttccattttaccactaaacaaataagccaggactaataacaatagcagtttgagagtttttattttggcattttg

SEQ ID NO: 652636 - DNA, 120 bp, Artificial Sequence
  ENSG00000183230_60 (sequence is synthesized)
gttttaattaggaaagaaaacatggatgctattaaaactagttgtagttaaaaatgttttgaatgaggctactaacgctatcttagtcatctcaaagagaaagagaagaagtaaaatttt

SEQ ID NO: 652637 - DNA, 120 bp, Artificial Sequence
  ENSG00000183230_61 (sequence is synthesized)
aaatacctttttggcatttttaaccaattcatatgaacaaaaacatatattctattaaagcaaaataaagaatagtttaaaacactagtcttcttgcatgtgaatattttccccctaaca

SEQ ID NO: 652638 - DNA, 120 bp, Artificial Sequence
  ENSG00000183230_62 (sequence is synthesized)
gacaagatagaatccatttctggacactctaaaagaaagtaatgttaattgagagagctgtctccaaatggaactcaacctgaccagaatcccatccgcaggcaagagatgggctgtggg

SEQ ID NO: 652639 - DNA, 120 bp, Artificial Sequence
  ENSG00000183230_63 (sequence is synthesized)
gccgaccataagttttattctgagacgagatgctttatggctgctggctgcattatggcatctagcagtccccactggtttgtgggaacaaaacacatggattgatattcaatatgagtt

SEQ ID NO: 652640 - DNA, 120 bp, Artificial Sequence
  ENSG00000183230_64 (sequence is synthesized)
tggtaagttggagaaaaatggagacgatacggagtagtctaaaggcacaacaaataagaaggtgccagaggtagggaagggtctgagaggggtagttgcagaagcatttagctttcatag

SEQ ID NO: 652641 - DNA, 120 bp, Artificial Sequence
  ENSG00000183230_65 (sequence is synthesized)
atgaggggagagttttttggttttatgaagattaggcagccctcctgaggaaagtattaaggatagaatgagacacttgtcttggtggtttggtgaagtcgtgtcgaaggcaaaaggatg

SEQ ID NO: 652642 - DNA, 120 bp, Artificial Sequence
  ENSG00000183230_66 (sequence is synthesized)
aactacacatattttgagcatgatttagtaatattgtttgcaagttgagaaacagaaattcagccattctcctgactgatggtaggtgaaattcttcccaatattagagccaatctgggt

SEQ ID NO: 652643 - DNA, 120 bp, Artificial Sequence
  ENSG00000183230_67 (sequence is synthesized)
taccatacgttcatatatttaacagctatttgttaaacaactgtgatgttccaggcactgttctaggttcttaggatacaccatataacaaaacaaatagtgatccttgccctcatgtgc

SEQ ID NO: 652644 - DNA, 120 bp, Artificial Sequence
  ENSG00000183230_68 (sequence is synthesized)
cagctctgtgttaaatgctaactattatcttattcaatcctccaaataaccctataggatatatatcattccacagacaaggaagctgagggttaaatgggataagaatcttgctcaaag

SEQ ID NO: 652645 - DNA, 120 bp, Artificial Sequence
  ENSG00000183230_69 (sequence is synthesized)
tctcactggctttaaaatattaatatatattttacatcattcaagacagatatataattagctgaatattctcacctctattaactgaatgtagagtgtcaggtacatgggaagtaagtt

SEQ ID NO: 652646 - DNA, 120 bp, Artificial Sequence
  ENSG00000183230_70 (sequence is synthesized)
atttacgtgatctgaaataagaggacaacctttgccaaattacttttattaccatggagaagaaagcttcaatgaaatgcctgtttcagcccatcttcagtattggttggttaataccat

SEQ ID NO: 652647 - DNA, 120 bp, Artificial Sequence
  ENSG00000183230_71 (sequence is synthesized)
ttgttaacaccaatcctttcctcttttactgctaacatgtgactgtgtttaaaattatagattgcagcagagtgttggccaaggattattgtagtaggataaagtttccctgtatttgaa

SEQ ID NO: 652648 - DNA, 120 bp, Artificial Sequence
  ENSG00000183230_72 (sequence is synthesized)
atttacccaaactgtagcaaatacatctttccttctttatggaggtcacacgtgtgcatagtatgtgcctgaatacaggtaaactttgtgttttaaaattacatggccttttttagagtc

SEQ ID NO: 652649 - DNA, 120 bp, Artificial Sequence
  ENSG00000183230_73 (sequence is synthesized)
gactgaaggctagactcttcttgcccatgttgctggataggctttcaaatctcaggccttggagagttaaatgactttctgatatttcttacggtggagccacataagaaatacacacat

SEQ ID NO: 652650 - DNA, 120 bp, Artificial Sequence
  ENSG00000183230_74 (sequence is synthesized)
tcctagtttgagcaatggatgtgtatattggggatcttcacttttatgtatctggtagtcatgatggtgcctattcccaactgtaggaaaggaaagccctcaaggagaaaattctctttc

SEQ ID NO: 652651 - DNA, 120 bp, Artificial Sequence
  ENSG00000183230_75 (sequence is synthesized)
aaaaaggctcagatttctaacaattatgtctaaatgtttcttcaatttagaacatgtacaaaagctacttaatattagcagagtagttcttgtgttttcatttcaaatgaaatattccca

SEQ ID NO: 652652 - DNA, 120 bp, Artificial Sequence
  ENSG00000183230_76 (sequence is synthesized)
gttccaaagtttatttccttggcattttcaagaaggatggttatttttagttctggttatttggtgttggaggtctgtgacacttccttatacatttaaagccccctttgaatagttgta

SEQ ID NO: 652653 - DNA, 120 bp, Artificial Sequence
  ENSG00000183230_77 (sequence is synthesized)
tcaatagttcaaaagcctgtagatatcttgcttttctattctgacagcccagcttctgcagactcaggccaaccttaggtatgtcacatcagttccccatctgtgtaaattacctgaacc

SEQ ID NO: 652654 - DNA, 120 bp, Artificial Sequence
  ENSG00000183230_78 (sequence is synthesized)
tctctgtggtattcactgagagttgagcttctactaagggatttccttgacctgggcttttaacaccagatttgtagtggagtgtttattagtaaagcaaaggagtaagtcagagatgct

SEQ ID NO: 652655 - DNA, 120 bp, Artificial Sequence
  ENSG00000183230_79 (sequence is synthesized)
agcccctgctctcagttaaacagaactatcctccttcctgaatatttaaacataaaattaattttaaactactataaaaatcatgttccattgcttgccaaatcttataccattataatg

SEQ ID NO: 652656 - DNA, 120 bp, Artificial Sequence
  ENSG00000183230_80 (sequence is synthesized)
ctgtatttttacatgttagtatacattgtgtccatagggatataaatatgagaatttcagcaactgtcttgcagggttaagatgtgctatttgttgattttgcaaatttttctcatgtgg

SEQ ID NO: 652657 - DNA, 120 bp, Artificial Sequence
  ENSG00000183230_81 (sequence is synthesized)
tacagtccctccaaagaaaatttccttagacctaaatggtagcataataatttctcctccatatccgtgactaacaagttcctgaaaacagaagtagacatattttatgcccaatttagt

SEQ ID NO: 652658 - DNA, 120 bp, Artificial Sequence
  ENSG00000183230_82 (sequence is synthesized)
acctaataattgaggcttaaaacaaaattttcttgggcaagttgggtgattaaatatgaattaaaacttctagagaaagatttccagatgcccctgttttccattttgattatggtttta

SEQ ID NO: 652659 - DNA, 120 bp, Artificial Sequence
  ENSG00000183230_83 (sequence is synthesized)
gtttcatagcaacttgggggaaaaaaatcatttactttatgtcgtattacaacaacaactttgacagcttaaatgtagtgacctctctgaaggtaatatgcacattataatttaggatga

SEQ ID NO: 652660 - DNA, 120 bp, Artificial Sequence
  ENSG00000183230_84 (sequence is synthesized)
aagcagatttaaactaagactttctgagatgaaataaaagtaaccaattcataatagtcatgtttattgcagcaatatcttgggaacttaagtttagtggcgtttgaggtgtttctgact

SEQ ID NO: 652661 - DNA, 120 bp, Artificial Sequence
  ENSG00000183230_85 (sequence is synthesized)
atcttgcttgttcatttcaccctgctctgcagagacagaatatgattgaatgaactgcccattatattaatgaccagttcaaagcagttttgtgctttggctatagataaaatttggcaa

SEQ ID NO: 652662 - DNA, 120 bp, Artificial Sequence
  ENSG00000183230_86 (sequence is synthesized)
aaatactgtaggcctttctggtccatatttatccttaaagtatttttgccaatcaataaaaatgaaatatttatccagaaatagaaaaagctctttcctatgacattgacatagaagccc

SEQ ID NO: 652663 - DNA, 120 bp, Artificial Sequence
  ENSG00000183230_87 (sequence is synthesized)
aaatactccttgtttgagaccctgcatgtcttttgtgtttaactgaatcaatgattttttttagttgtgctcttaattgcattatttcacatatgtaacactgggtttgttttggttata

SEQ ID NO: 652664 - DNA, 120 bp, Artificial Sequence
  ENSG00000183230_88 (sequence is synthesized)
tagtattattttactttattctaatttcaactcatgtcactctgtagctcattaagaatttgttcaactgaaaattaaaatgtgtgttaaagcaataaaaatgaaaagattggctatgca

SEQ ID NO: 652665 - DNA, 120 bp, Artificial Sequence
  ENSG00000183230_89 (sequence is synthesized)
atcataagccaaattgtgagccatgatagtggcactgaatttctaaatacaagaaattgcttagacaattggtttagtatctgtatatgggcaatactctgtcctgcagtaggcagcatg

SEQ ID NO: 652666 - DNA, 120 bp, Artificial Sequence
  ENSG00000183230_90 (sequence is synthesized)
aagcaggaaagcttatttataacttgaagggcctcattatctgactgagtagtctgtctcttttttgatagattttcttttccatctttgtggtcagactaatacaccttctgtctactt

SEQ ID NO: 652667 - DNA, 120 bp, Artificial Sequence
  ENSG00000183230_91 (sequence is synthesized)
gctcttcaggatctgctttcagagtacatgaacaacctctgtaatcaaaagtctgacctgggcctcactggagtaaaaatcaaattgttggaggaatgcattattttctggagtctctag

SEQ ID NO: 652668 - DNA, 120 bp, Artificial Sequence
  ENSG00000183230_92 (sequence is synthesized)
ggcttgtagaggtaagcatgctagaactgtaactcactaaagtccaggagaatgaggctcccattctccatttatggttgaattgtacctaaataaaaacttttgacaccgtgttacaaa

SEQ ID NO: 652669 - DNA, 120 bp, Artificial Sequence
  ENSG00000183246_0 (sequence is synthesized)
ccagccacctgacccaaatacaccacctgaacccacgaccaggtatgcccacaccccatgggtggccttaacacacacaccctgcccctttctccaagtacaggagcagcagcccagact

SEQ ID NO: 652670 - DNA, 120 bp, Artificial Sequence
  ENSG00000183246_1 (sequence is synthesized)
tccctcggggcaccgcggcctgcttgggactgcacagtgcctgggagggtgcctggggagggtcacaagggacttggtgctagaagcaggaaaagtgtagggaccggaaaagcccccgtg

SEQ ID NO: 652671 - DNA, 120 bp, Artificial Sequence
  ENSG00000183246_2 (sequence is synthesized)
catcctggaagggacatgggccagtttgagcaggggtgtgggagtccagccctggccttgccaggtggagaggcgcctgggccagacatccgcggcaggaggcgggggaacatgccaaga

SEQ ID NO: 652672 - DNA, 120 bp, Artificial Sequence
  ENSG00000183246_3 (sequence is synthesized)
aacatgccaagaggcggaaggggcacgcggagacccccagggggcgccggaaggggcgcgccgggcggtcggcggcggccgttggcgagctgaggcctgccaggcgaagtctggagacca

SEQ ID NO: 652673 - DNA, 120 bp, Artificial Sequence
  ENSG00000183246_4 (sequence is synthesized)
ccgcaatggccaaggactcgcccagccccttgggcgcgtcgcccaagaagccgggctgctccagcccggcggcggcagtgctggagaaccagaggcgggagctggagaagctacgggcgg

SEQ ID NO: 652674 - DNA, 120 bp, Artificial Sequence
  ENSG00000183246_5 (sequence is synthesized)
ggaggcggagcgggcaggctggcgggcggaacggcggcgcttcgctgcccgggagcgccagctgcgtgaggaggccgagcgggagcggcggcagctggctgaccgtctgcgctccaagtg

SEQ ID NO: 652675 - DNA, 120 bp, Artificial Sequence
  ENSG00000183246_6 (sequence is synthesized)
agtgggaggcacagcgcagccgggagttgcggcagctgcaagaggagatgcagcgggaacgcgaggccgagatccggcagctgctgcgctggaaggaggccgagcagcggcagctgcagc

SEQ ID NO: 652676 - DNA, 120 bp, Artificial Sequence
  ENSG00000183246_7 (sequence is synthesized)
agctgctgcaccgggagcgcgatggcgtggtgcgccaagcccgggagctgcagcgccagctggccgaggagctggtgaaccgcggccactgtagccgcccgggggcgtccgaggtttccg

SEQ ID NO: 652677 - DNA, 120 bp, Artificial Sequence
  ENSG00000183246_8 (sequence is synthesized)
cggcgcagtgccgctgtcgcctgcaggaagtgttggcgcagcttcgctggcagactgacggcgagcaggcggcgcgcatccgctatctgcaggcggcgctggaggtggagcgccagctct

SEQ ID NO: 652678 - DNA, 120 bp, Artificial Sequence
  ENSG00000183246_9 (sequence is synthesized)
tcctcaagtacatcctggcgcacttccgcgggcacccggctttgtcgggatcaccggacccccaagctgtgcattccttggaagaaccgctgccccagacctccagcggctcttgccacg

SEQ ID NO: 652679 - DNA, 120 bp, Artificial Sequence
  ENSG00000183246_10 (sequence is synthesized)
cccccaaacccgcctgccaactcggatctctagacagcctgagtgctgaagtcggtgtgcgctcccgctcgctaggcctggtgtcctctgcgtgctccagctccccagacggcctgctct

SEQ ID NO: 652680 - DNA, 120 bp, Artificial Sequence
  ENSG00000183246_11 (sequence is synthesized)
ccacgcacgccagctcccttgattgcttcgcacctgcgtgttcccgctcgcttgacagcacccggagcctccccaaggcctccaaatccgaggagcggccctcctcaccagacacctcca

SEQ ID NO: 652681 - DNA, 120 bp, Artificial Sequence
  ENSG00000183246_12 (sequence is synthesized)
cccctggctcccggaggctctcgccgccaccatcgccactcccgccgccaccaccaccgtcagcccacaggaaactcagcaacccgcggggaggagaaggctctgagagccagccctgcg

SEQ ID NO: 652682 - DNA, 120 bp, Artificial Sequence
  ENSG00000183246_13 (sequence is synthesized)
aagtcctgactccctcacccccgggcctgggccaccacgagctgataaagctgaactggctgctggccaaggcgttgtgggtgctggcgcgccgctgttataccctgcaagaggagaaca

SEQ ID NO: 652683 - DNA, 120 bp, Artificial Sequence
  ENSG00000183246_14 (sequence is synthesized)
agcagctgcggcgtgcaggctgcccctaccaggcagacgagaaggtgaagcggctcaaggtaaagcgcgcggagctgaccgggctcgcgcggcgcctagctgaccgcgcccgcgagctgc

SEQ ID NO: 652684 - DNA, 120 bp, Artificial Sequence
  ENSG00000183246_15 (sequence is synthesized)
aggagaccaacctccgggccgtgagcgcgcctatacccggcgagagttgcgccggcctggagctgtgccaagtctttgcccgccagcgcgctcgggacctgtcggagcaggcgagcgcgc

SEQ ID NO: 652685 - DNA, 120 bp, Artificial Sequence
  ENSG00000183246_16 (sequence is synthesized)
cgctggccaaggacaagcagatcgaagagctgcggcaggagtgccacctcctgcaggcgcgtgtcgcctcgggtccctgcagcgacctgcatactggaaggggcggcccctgcacccagt

SEQ ID NO: 652686 - DNA, 120 bp, Artificial Sequence
  ENSG00000183246_17 (sequence is synthesized)
ggctcaacgtcagagacttagaccgcctgcagcgcgagtcccagcgggaagtgctgcgcctgcagaggcagttgatgcttcagcagggcaacggtggcgcttggcccgaggcgggcggcc

SEQ ID NO: 652687 - DNA, 120 bp, Artificial Sequence
  ENSG00000183246_18 (sequence is synthesized)
agagcgcaacctgcgaggaggtgcgacggcagatgctggcgctggagcgcgagctggaccagcggcggcgcgagtgccaggagctgggcacgcaggcggccccggcgcggcgacgtggcg

SEQ ID NO: 652688 - DNA, 120 bp, Artificial Sequence
  ENSG00000183246_19 (sequence is synthesized)
aggaggccgagacacagctgcaggcggcgctgctcaaaaacgcctggctggcggaggagaatgggcggctgcaggccaagaccgactgggtgcggaaggtggaggctgagaatagcgaag

SEQ ID NO: 652689 - DNA, 120 bp, Artificial Sequence
  ENSG00000183246_20 (sequence is synthesized)
tgcgcggccacctgggccgcgcgtgtcaagagcgcgatgcctccggcttgatcgccgaacagctgctgcagcaggcggcgcgcgggcaggacaggcagcagcagctgcaacgcgacccgc

SEQ ID NO: 652690 - DNA, 120 bp, Artificial Sequence
  ENSG00000183246_21 (sequence is synthesized)
agaaggccctgtgtgacctccatccttcctggaaggagatacaggcgctccagtgtcggcctggtcaccctcctgaacagccctgggagaccagtcaaatgccggagtcccaagttaaag

SEQ ID NO: 652691 - DNA, 120 bp, Artificial Sequence
  ENSG00000183246_22 (sequence is synthesized)
gtagcagaaggcccaagttccacgcacggcctgaagactacgcagtgtcacagcccaacagagacatacaggagaaaagggaagcctccctcgaggagagcccagttgcccttggggagt

SEQ ID NO: 652692 - DNA, 120 bp, Artificial Sequence
  ENSG00000183246_23 (sequence is synthesized)
cagccagtgtcccccaagtttcagagacagtccctgccagccaacctctgtccaagaaaaccagctcccagtcaaactcctcctctgaggggtcgatgtgggccaccgtgccgtcctccc

SEQ ID NO: 652693 - DNA, 120 bp, Artificial Sequence
  ENSG00000183246_24 (sequence is synthesized)
gtgaggtggatgacctggagcctgacagcgtgtccctggccctggaaatggggggctcggcggctcctgctgcccccaagctcaagatcttcatggctcagtataactacaacccatttg

SEQ ID NO: 652694 - DNA, 120 bp, Artificial Sequence
  ENSG00000183246_25 (sequence is synthesized)
aggggcccaatgatcaccctgagggtgagctgcccctcacagctggggactacatatatatcttcggggacatggatgaggatggcttctatgagggggagcttgacgatggccggcggg

SEQ ID NO: 652695 - DNA, 120 bp, Artificial Sequence
  ENSG00000183246_26 (sequence is synthesized)
ggctggtgccctccaacttcgtggagcagattccggacagctacatcccaggctgcctgcctgccaaatcccctgatcttggccccagtcaactcccagcggggcaggatgaagctctgg

SEQ ID NO: 652696 - DNA, 120 bp, Artificial Sequence
  ENSG00000183246_27 (sequence is synthesized)
aggaagacagcttattatctgggaaagcccagggaatggtggacagagggctgtgccagatggtcagggtgggctccaagacagaagtagcaacagagatcctggataccaagacggaag

SEQ ID NO: 652697 - DNA, 120 bp, Artificial Sequence
  ENSG00000183246_28 (sequence is synthesized)
cctgccagctgggcttgctgcagagcatggggaagcagggcctctccagaccccttctggggaccaaaggggtgctccgtatggctcccatgcagctacacctgcagaatgtcacagcca

SEQ ID NO: 652698 - DNA, 120 bp, Artificial Sequence
  ENSG00000183246_29 (sequence is synthesized)
catcagccaacatcacctgggtctacagcagccaccgccacccccatgtggtatatcttgatgaccgagagcatgccctgaccccagcgggcgtgagctgctacaccttccagggcctgt

SEQ ID NO: 652699 - DNA, 120 bp, Artificial Sequence
  ENSG00000183246_30 (sequence is synthesized)
gccccggcacgcactaccgggtgcgggtggaggtgcggctgccatgggacttgctgcaggtgtattggggaactatgtcctccaccgtcaccttcgacacactcttggcaggacctccct

SEQ ID NO: 652700 - DNA, 120 bp, Artificial Sequence
  ENSG00000183246_31 (sequence is synthesized)
acccaccgctggatgtgctggtggagcgccatgcctcgccaggtgtcctggtggtcagctggctccctgtgaccattgactcagctgggtcctccaatggagtccaggtcaccggttatg

SEQ ID NO: 652701 - DNA, 120 bp, Artificial Sequence
  ENSG00000183246_32 (sequence is synthesized)
ctgtgtatgcagatgggcttaaggtttgtgaggtcgccgatgccactgctgggagcaccgtattggaattctcccagctacaggtgcccctcacgtggcagaaggtctcagtgagaacca

SEQ ID NO: 652702 - DNA, 120 bp, Artificial Sequence
  ENSG00000183246_33 (sequence is synthesized)
tgtcactctgtggtgagtccctggattcagtgcctgctcagatccccgaggacttcttcatgtgtcaccgatggccagagactccaccctttagctacacttgtggcgacccatccacct

SEQ ID NO: 652703 - DNA, 120 bp, Artificial Sequence
  ENSG00000183246_34 (sequence is synthesized)
acagagtcaccttccccgtctgcccccagaagctgtcactggctcctccgagtgccaaggccagcccccacaaccctggaagctgcggggagccccaggccaagttcctagaagcattct

SEQ ID NO: 652704 - DNA, 120 bp, Artificial Sequence
  ENSG00000183246_35 (sequence is synthesized)
ttgaagaacccccaaggaggcaatccccagtgtccaacctgggctcagaaggagaatgtccgagttcaggggctggcagccaagcccaggagcttgcagaggcctgggagggctgtagaa

SEQ ID NO: 652705 - DNA, 120 bp, Artificial Sequence
  ENSG00000183246_36 (sequence is synthesized)
aggacctgctctttcagaagagtccccagaaccacaggccaccttcagtcagtgaccagcctggggagaaggaaaattgctaccagcacatgggcaccagcaaaagccctgctccaggat

SEQ ID NO: 652706 - DNA, 120 bp, Artificial Sequence
  ENSG00000183246_37 (sequence is synthesized)
tcatccatctacgcaccgagtgtgggcccaggaaagaaccgtgtcaggaaaaggctgcccttgagagggtacttcggcaaaagcaagatgcccaagggttcacacctccccagctgggcg

SEQ ID NO: 652707 - DNA, 120 bp, Artificial Sequence
  ENSG00000183246_38 (sequence is synthesized)
ccagccaacagtatgcatctgacttccataacgttttgaaggaggagcaggaggcactgtgcttggatctgcggggcacagagaggcgagaggagaggagggagcctgagccccacagca

SEQ ID NO: 652708 - DNA, 120 bp, Artificial Sequence
  ENSG00000183246_39 (sequence is synthesized)
ggcaaggacaagctctgggggtgaagagagggtgccagctccatgagcccagctcggcactgtgtccagctccatccgccaaagtcatcaagatgcccaggggtggcccccaacagctgg

SEQ ID NO: 652709 - DNA, 120 bp, Artificial Sequence
  ENSG00000183246_40 (sequence is synthesized)
ggacgggggccaacactccagccagggtctttgtggccctctctgattacaaccccctggtgatgtctgccaacctcaaggctgcagaggaggagctggtcttccagaaaaggcagttgc

SEQ ID NO: 652710 - DNA, 120 bp, Artificial Sequence
  ENSG00000183246_41 (sequence is synthesized)
taagagtgtggggctctcaggacacccatgatttctacctcagcgagtgcaacaggcaagtgggcaatatccccgggcgcctagtggctgagatggaggtggggacagagcagactgata

SEQ ID NO: 652711 - DNA, 120 bp, Artificial Sequence
  ENSG00000183246_42 (sequence is synthesized)
ggaggtggcgttctccggcccaagggcacctgccttctgtggcccacctcgaggactttcaggggctcatcatcccccagggttcctccctggtgctccaggggaactccaagagactcc

SEQ ID NO: 652712 - DNA, 120 bp, Artificial Sequence
  ENSG00000183246_43 (sequence is synthesized)
cactgtggactccaaagatcatgatagcagctctggactatgatcctggggatgggcaaatggggggccaggggaagggcaggctggcgctgagggcaggagacgtggtcatggtttacg

SEQ ID NO: 652713 - DNA, 120 bp, Artificial Sequence
  ENSG00000183246_44 (sequence is synthesized)
ggcccatggatgaccaaggattctattatggagagttgggcggccacaggggcctggttcctgcccacctgctggatcacatgtccctccatggacactgagcaagcatccttgcccagg

SEQ ID NO: 652714 - DNA, 120 bp, Artificial Sequence
  ENSG00000183246_45 (sequence is synthesized)
tagtggcctctggctgctcacaccctgccagaggagaagcaagcgttcagaccctcacaccagcacccctcctcaccaccataagtagcatgtgctccaagtgccactgtgttaaactga

SEQ ID NO: 652715 - DNA, 120 bp, Artificial Sequence
  ENSG00000183246_46 (sequence is synthesized)
tggtagtccttaagtgtcccctaggctctgaaagtagcaggacttaagcctgagttatttgcaaaagcaaacacaacaagccaacccctgagagtctgagaagccatttcaaagttgctg

SEQ ID NO: 652716 - DNA, 120 bp, Artificial Sequence
  ENSG00000183246_47 (sequence is synthesized)
ataactatggcaggtatacggagaagcgcctttttctgtggccaatgtgtgttttctctgggaggttaaggttatctgtccattgccttgtacgaaagtctcaagaaaagtctacatctt

SEQ ID NO: 652717 - DNA, 120 bp, Artificial Sequence
  ENSG00000183246_48 (sequence is synthesized)
agggttgattcggctgatctggctgactaggcgggtatccccttcctcccgcaccactccatgtgcgtccctccagaagctgtgcgctcaatggaagaggatgaccatccccgatagagg

SEQ ID NO: 652718 - DNA, 120 bp, Artificial Sequence
  ENSG00000183246_49 (sequence is synthesized)
acgatcggtcttcagtcaagagtataagagtagctgcgctcccctgctagaacctccaaacgagctctcagaatgttatttttctgtcttatgtccaacccctcattaaaatgttcatag

SEQ ID NO: 652719 - DNA, 120 bp, Artificial Sequence
  ENSG00000183248_0 (sequence is synthesized)
agccccctcccctcgcctcctcgccgctggcggccaccgcgtcgctccggcccgggccccaccccaggcgactctgtgaggagcggccggaggccggaggcggaggtgcaagatggacaa

SEQ ID NO: 652720 - DNA, 120 bp, Artificial Sequence
  ENSG00000183248_1 (sequence is synthesized)
caagagagacaaggcgaaggcaggggccgccgcgcggacgccggctgctcgcgctcctggacttctgacccccaggcccccaggctctcctcgaccccctcccccagtaactcccgcagc

SEQ ID NO: 652721 - DNA, 120 bp, Artificial Sequence
  ENSG00000183248_2 (sequence is synthesized)
cctccgagttctgggagctgcgggagcagtggggcgaaagcctctggcagagcgagcggggggcatcggcggggccactattcccgagtctgctccccgagcgggaccaacgcggagtgc

SEQ ID NO: 652722 - DNA, 120 bp, Artificial Sequence
  ENSG00000183248_3 (sequence is synthesized)
tgggacaagttcccgaaaccctgcctccaggcccccagcctctgggagaggggagagagctcctcctgccaagaacaccagcccaggccctgtttctagcccagggcgtgccagcgggac

SEQ ID NO: 652723 - DNA, 120 bp, Artificial Sequence
  ENSG00000183248_4 (sequence is synthesized)
caccaggccaggccctcttggccagaagggactccggatctcagcggaggaaactgtggccagaggaaaagctacagaggctcccaaaaggagtgccctcagcgctggggcacggagaga

SEQ ID NO: 652724 - DNA, 120 bp, Artificial Sequence
  ENSG00000183248_5 (sequence is synthesized)
ggcacggagagacacttccgggcctaccccaggaaccccgtccccggccatggcccgtcggtcccgggctgcgggcaccgaggtggggctcccccggccagctccgagtgcccggccacg

SEQ ID NO: 652725 - DNA, 120 bp, Artificial Sequence
  ENSG00000183248_6 (sequence is synthesized)
gggcccccggaaatcagtgagcagcgcctcggagcacagtaccaccgagccaagcccggctgccaggaggcggcccagcgccggtgggggtctccagaggccggcctcgcgctccctgag

SEQ ID NO: 652726 - DNA, 120 bp, Artificial Sequence
  ENSG00000183248_7 (sequence is synthesized)
ctccagcgccacccctctctcctccccagcccgttctgggccctcagcccgcggaacacccagggctcctgcgcatccctcgcagcccaagccgaaaggactgcaggctctgcgaccccc

SEQ ID NO: 652727 - DNA, 120 bp, Artificial Sequence
  ENSG00000183248_8 (sequence is synthesized)
tcaggtcacacccccaaggaaggacgcagccccagcactaggaccgctttcttcctctcctttggccacaccctctccatcgggtaccaaggcaagacccgtaccgcctcccgacaatgc

SEQ ID NO: 652728 - DNA, 120 bp, Artificial Sequence
  ENSG00000183248_9 (sequence is synthesized)
agccactcccctgccagccacgctccctccctctccaccggtaacgccccctccgccagccgctctccaaagtcaggccccgcccaccctgccggccacgccccactcgtcgagccttac

SEQ ID NO: 652729 - DNA, 120 bp, Artificial Sequence
  ENSG00000183248_10 (sequence is synthesized)
ctgtcagttggccacgccccttcctctagcccctccttctccctctgctccaccttctctgcagaccctcccctctccaccagccacgcccccctcgcaagttccacccacacagctgat

SEQ ID NO: 652730 - DNA, 120 bp, Artificial Sequence
  ENSG00000183248_11 (sequence is synthesized)
tatgtcctttccagaagcaggcgtctcttccctggccacagccgcttttgtggcttcagtctctccatcagtttcatcccctctgcagagtatgccccccacccaagctaatccagcgtt

SEQ ID NO: 652731 - DNA, 120 bp, Artificial Sequence
  ENSG00000183248_12 (sequence is synthesized)
gccctctcttccgactctcctctctcccttggccacacctcctctgtcagccatgtctcctctacaaggccctgtttctccggcaacatctctggggaattcggcttttcccctggccgc

SEQ ID NO: 652732 - DNA, 120 bp, Artificial Sequence
  ENSG00000183248_13 (sequence is synthesized)
actccctcagccaggcctttctgctctgaccacgccccctccgcaggccagtccttccccgtctccgccctctctccaggccacgccccacactctggccactcttcctctgcaggactc

SEQ ID NO: 652733 - DNA, 120 bp, Artificial Sequence
  ENSG00000183248_14 (sequence is synthesized)
tcctcttctggccacattgcctctgcaggcctctccctctcctttgaccacagtctctctgcaggatcctcctctagtttctccctctcttttggcctcaccgcctctgcaggctccgcc

SEQ ID NO: 652734 - DNA, 120 bp, Artificial Sequence
  ENSG00000183248_15 (sequence is synthesized)
ccacccacaggccccaccttctatgactacgccccctatgcaggccccgccctctctccagaccattcccccaatacaggtcccacattctctgacctcaccgtctctgcaggcacctcc

SEQ ID NO: 652735 - DNA, 120 bp, Artificial Sequence
  ENSG00000183248_16 (sequence is synthesized)
ctctcctctggctttgtcctctctgcaggccacaacttctttgggctcacccactctgcaggccacacattctttcctgacaatgtcccctaggcaaacccaagcttctttgatctcacc

SEQ ID NO: 652736 - DNA, 120 bp, Artificial Sequence
  ENSG00000183248_17 (sequence is synthesized)
ttctcggccggcctctactccccctgattcaccccctctgcaggcccctctttcccttcctgcctcaccccctctgcagacttctctctctcctgctgtctcacccctaagctcacccct

SEQ ID NO: 652737 - DNA, 120 bp, Artificial Sequence
  ENSG00000183248_18 (sequence is synthesized)
ttctctggcctcccactctcctcaggcacctctctcttccctgatcatgccccctctggagacccaatcttccctagccccaccctctctgcagacacctcctgcttccctgaccacacc

SEQ ID NO: 652738 - DNA, 120 bp, Artificial Sequence
  ENSG00000183248_19 (sequence is synthesized)
ccctctggagaacctaccttctctagccccgcctcctctgcagacagcttctgctcccctgaccacaccccctctggagaacctaccttctctagccccgcctcctctgcagacagcttc

SEQ ID NO: 652739 - DNA, 120 bp, Artificial Sequence
  ENSG00000183248_20 (sequence is synthesized)
tgctcccctgaccacaccccatctggagactccaccttgtccagccccatgccctctgcaagcaccaccttcgccattgaccacgccccctccggagacgccctcttccatagccacgcc

SEQ ID NO: 652740 - DNA, 120 bp, Artificial Sequence
  ENSG00000183248_21 (sequence is synthesized)
tcctccacaggccccacctgctctggcctcaccccctttgcagggcctgccctctccccctctgtctcctttggccacgccccctccacaggccccacctgccctggccttgcctcctct

SEQ ID NO: 652741 - DNA, 120 bp, Artificial Sequence
  ENSG00000183248_22 (sequence is synthesized)
gcaggcccctccctctccccctgcctcaccccctctgtctcctttggccacaccctctccacaggccccaaatgctctggcagtgcaccttctgcaggcccctttctctccccctccctc

SEQ ID NO: 652742 - DNA, 120 bp, Artificial Sequence
  ENSG00000183248_23 (sequence is synthesized)
acccccagtgcaggcccctttctctccccctgcctcacccccagtgtctccttcggccacgcccccttcacaggccccaccctctctagccgcacctcctctgcaggtcccaccctctcc

SEQ ID NO: 652743 - DNA, 120 bp, Artificial Sequence
  ENSG00000183248_24 (sequence is synthesized)
ccctgcctctcccccaatgtctccttcagccacgccccctccacaggccccaccccctctcgctgcgcctcctctgcaggtcccaccctctccccctgcctctcccccaatgtctccttc

SEQ ID NO: 652744 - DNA, 120 bp, Artificial Sequence
  ENSG00000183248_25 (sequence is synthesized)
ggccacgccccctccacgggtcccaccccttcttgccgctcctcctctgcaggtcccgccctctccccctgcctcactcccaatgtctcctttggctaagccccctccacaggccccacc

SEQ ID NO: 652745 - DNA, 120 bp, Artificial Sequence
  ENSG00000183248_26 (sequence is synthesized)
tgctctggccacacctcctctgcaggcccttccctctccgcctgcctcattccctgggcaggcccctttctcaccctctgcctcactcccaatgtctcctttggccacgcctcctccaca

SEQ ID NO: 652746 - DNA, 120 bp, Artificial Sequence
  ENSG00000183248_27 (sequence is synthesized)
ggccccacctgttctggcagcgccccttctgcaggtccctccctctccccctgcctcacccaccctgcaggccccacgccgccccccgaccccgggtccggatacctccgtctcgggccc

SEQ ID NO: 652747 - DNA, 120 bp, Artificial Sequence
  ENSG00000183248_28 (sequence is synthesized)
ccgccgccgccgccctcgcgcagcccgtccagcacgctgagcggcccagacctggccggccacagcagcagcgccacgagcacgccagaggagctgcgtggctacgacagcgggcccgag

SEQ ID NO: 652748 - DNA, 120 bp, Artificial Sequence
  ENSG00000183248_29 (sequence is synthesized)
ccagaggagctgcgtggctacgacagcgggcccgagggcggtgccgcagcctccccgccccccgacgcagagctcgccgcttgccacccggctgcctggagtcgaggccccgctccgccg

SEQ ID NO: 652749 - DNA, 120 bp, Artificial Sequence
  ENSG00000183248_30 (sequence is synthesized)
ccgcggagccccaggtgcgcccctgccgtggcctcccgctaccggaccgggctctgctgacggtctgtgcaccatctacgagactgaagggcccgagtcggcgacccccgcccctggcgc

SEQ ID NO: 652750 - DNA, 80 bp, Artificial Sequence
  ENSG00000183248_31 (sequence is synthesized)
cctggcgcactggatccggggcccagtcccggcacgagcggtgggaaggcggcggctggggccggggccggggcgtcctc

SEQ ID NO: 652751 - DNA, 120 bp, Artificial Sequence
  ENSG00000183248_32 (sequence is synthesized)
cgctgcaggcgagcgtcgtgcagcacctgctgagccggacgctgctgctggcggctgccgagggtgccgcgggcggcagcggcgggggcccaggaggtgcggagggtggtggcgtcacag

SEQ ID NO: 652752 - DNA, 120 bp, Artificial Sequence
  ENSG00000183248_33 (sequence is synthesized)
cgcccgggctgcactcagcgacgccgaactcggccgctgggccgaactactgtctcccctggacgagtcccgtgccagcatcacctcggtcaccagcttctctccggacgacgtggcctc

SEQ ID NO: 652753 - DNA, 120 bp, Artificial Sequence
  ENSG00000183248_34 (sequence is synthesized)
cccgcagggtgactggaccgtggtggaggtggagaccttccactgagccagaccacagccccgcctgctacaccccacccctgccttaggatccgcccctccgggtacgccgtttgtttt

SEQ ID NO: 652754 - DNA, 120 bp, Artificial Sequence
  ENSG00000183248_35 (sequence is synthesized)
agaccccgcctccactgccctggagccccgctgggtggattagtcttagctccctagagcctgagcctttggcctcggaggctcgggacctacccacagctttgacctaggcccgcccct

SEQ ID NO: 652755 - DNA, 120 bp, Artificial Sequence
  ENSG00000183248_36 (sequence is synthesized)
cgagctccgcccctttggcctaggacacgccccgtttccccgagtcccgccccgtgtgcagtgtattgcccaccccgcacagcctgagtttgcaataaaactgggacactgggacttgca

SEQ ID NO: 652756 - DNA, 120 bp, Artificial Sequence
  ENSG00000183251_0 (sequence is synthesized)
atgtggtataacaacagtgctggccccttcttgctgactggcttcttgggctcagaggcagttcactaccggatctctatgtccttctttgtcatctacttctccgtcctttttggaaat

SEQ ID NO: 652757 - DNA, 120 bp, Artificial Sequence
  ENSG00000183251_1 (sequence is synthesized)
ggcactcttcttgtcctcatttggaatgatcacagcctccatgagcccatgtactacttcctggctatgctggcagacacggaccttgggatgacattcactacaatgcccacagtcctg

SEQ ID NO: 652758 - DNA, 120 bp, Artificial Sequence
  ENSG00000183251_2 (sequence is synthesized)
ggtgtcctgctgctagaccagagggagattgcccatgctgcctgtttcacccaatccttcattcattcactggccattgtagaatcaggtatcttgcttgttttggcctatgactgtttc

SEQ ID NO: 652759 - DNA, 120 bp, Artificial Sequence
  ENSG00000183251_3 (sequence is synthesized)
tccattttgcccataattctttcactctactgctacccatattgtggttcccgtgccctcttgcacacattttgcctccatcaagatgtcataaaactcgcctgtgctgatatcacgttt

SEQ ID NO: 652760 - DNA, 120 bp, Artificial Sequence
  ENSG00000183251_4 (sequence is synthesized)
aatcacatatatccaattattcagacttctttgactgtctttttagatgctctaatcatcatcttttcttatatactaatcctcaagacagtgatgggcattgcgtctggacaagaggaa

SEQ ID NO: 652761 - DNA, 120 bp, Artificial Sequence
  ENSG00000183251_5 (sequence is synthesized)
gctaaatctctcaacacttgtgtctcccatattagctgtgtcctagtatttcacatcactgtgatgggactgtcattcattcacaggtttgggaaacatgcacctcatgtggtccccatt

SEQ ID NO: 652762 - DNA, 120 bp, Artificial Sequence
  ENSG00000183251_6 (sequence is synthesized)
accatgagctatgtccattttctctttcctccattcgtgaatcctatcatttatagcatcaagaccaagcagattcaaagaagcattattcgcctattttctgggcagagtagggcttga

SEQ ID NO: 652763 - DNA, 120 bp, Artificial Sequence
  ENSG00000183255_0 (sequence is synthesized)
gttccgggcggagaccgcttgtgctggagtcggagttgtaacgctccactgactgatagagcgaccggccgaccatggcgcccggagtggcccgcgggccgacgccgtactggaggttgc

SEQ ID NO: 652764 - DNA, 120 bp, Artificial Sequence
  ENSG00000183255_1 (sequence is synthesized)
gcctcggtggcgccgcgctgctcctgctgctcatcccggtggccgccgcgcaggagcctcccggagctgcttgttctcagaacacaaacaaaacctgtgaagagtgcctgaagaacgtct

SEQ ID NO: 652765 - DNA, 120 bp, Artificial Sequence
  ENSG00000183255_2 (sequence is synthesized)
cctgtctttggtgcaacactaacaaggcttgtctggactacccagttacaagcgtcttgccaccggcttccctttgtaaattgagctctgcacgctggggagtttgttgggtgaactttg

SEQ ID NO: 652766 - DNA, 120 bp, Artificial Sequence
  ENSG00000183255_3 (sequence is synthesized)
aggcgctgatcatcaccatgtcggtagtcgggggaaccctcctcctgggcattgccatctgctgctgctgctgctgcaggaggaagaggagccggaagccggacaggagtgaggagaagg

SEQ ID NO: 652767 - DNA, 120 bp, Artificial Sequence
  ENSG00000183255_4 (sequence is synthesized)
ccatgcgtgagcgggaggagaggcggatacggcaggaggaacggagagcagagatgaagacaagacatgatgaaatcagaaaaaaatatggcctgtttaaagaagaaaacccgtatgcta

SEQ ID NO: 652768 - DNA, 120 bp, Artificial Sequence
  ENSG00000183255_5 (sequence is synthesized)
gatttgaaaacaactaaagcgctccagcacatcagtcccgacgcttcctgtgaggtgcacgctccgcagcccagcccagccgggagaccacgtggccattgcggtctcctgaccttggcc

SEQ ID NO: 652769 - DNA, 120 bp, Artificial Sequence
  ENSG00000183255_6 (sequence is synthesized)
agtgaacctgccagccttccaggacaggcggccggagagctgcccctgaaggacagtcctctcgtcttgcagactggtgaccttctattccctgttcatctctgtttctagatttagtca

SEQ ID NO: 652770 - DNA, 120 bp, Artificial Sequence
  ENSG00000183255_7 (sequence is synthesized)
cttgaaataagaaatctttggggtttgggcttttttatactcttctcagtttgtgaaacgctaactgcacacgaagccgcctgacggcacccagcgctgtggctgtcattctcccagggc

SEQ ID NO: 652771 - DNA, 120 bp, Artificial Sequence
  ENSG00000183255_8 (sequence is synthesized)
agaaccctgcgtttctctctgtccactaacaagcttcacacgcaacacagggaagtcggtttgacttttgtcatgaggagaactgaccagccctcatcattccccataaaaccacggaca

SEQ ID NO: 652772 - DNA, 120 bp, Artificial Sequence
  ENSG00000183255_9 (sequence is synthesized)
gcgtctgtgtgcgcatcttgagtcttcacacctgttgactcacacggcttttgctgatgacacggggctccagtacacagtctgataaggacttaacgtcctaacctcaattgtattaaa

SEQ ID NO: 652773 - DNA, 120 bp, Artificial Sequence
  ENSG00000183255_10 (sequence is synthesized)
ttcatataaaaattcaggccctttttggacaatttttaaaatttgtatctttactagaacatgagaatctttttcccttggaagcttgaattataaatgtggtgtttggcctgcctcagc

SEQ ID NO: 652774 - DNA, 120 bp, Artificial Sequence
  ENSG00000183255_11 (sequence is synthesized)
agcaccagttgactgctcgtgtgccagcggtgtggggaggacggggcaggacgctgcagctctctccagccctgttggcatcctcagtgcctgcaggcctctcgctgcctgttgggctgt

SEQ ID NO: 652775 - DNA, 120 bp, Artificial Sequence
  ENSG00000183255_12 (sequence is synthesized)
ctggggggtggccatttagggatcgtggggacggggtccaccccaagaagaaagaaaggcccgtccacaggcccggctctgggccacgtgccccggaagcaggtgtgtccagagtcagct

SEQ ID NO: 652776 - DNA, 120 bp, Artificial Sequence
  ENSG00000183255_13 (sequence is synthesized)
gagggctctccccacaccacccagcaggcgctggtgctccttctgcctcatgggaccagtccagcttccagccgctctggctcgagggtggtctgaccacttccttctgagtgggcttct

SEQ ID NO: 652777 - DNA, 120 bp, Artificial Sequence
  ENSG00000183255_14 (sequence is synthesized)
ctgggagctctccagtggcactgctggacctgcccacgtttctgtaaaatcaggatacgtggctttagtaagcagaccaagcgcttcgtggcagggaaagcagcgtgcggggaagtcact

SEQ ID NO: 652778 - DNA, 120 bp, Artificial Sequence
  ENSG00000183255_15 (sequence is synthesized)
gaaaagtgctgcctaaggaagtttggaaatagtccctgttccagattgccttgaattttaaaacattttgctttgggaaagtaggtcagcagcacctaagatcaaggatgcgttccattt

SEQ ID NO: 652779 - DNA, 120 bp, Artificial Sequence
  ENSG00000183255_16 (sequence is synthesized)
tcacacttcacagtcatgaaaactgagaagactgtcttcagcgtgaactaaagttcacaggcagatcactgatccagaacacttcaagaactcgtcaaacagctcgataagcctttttga

SEQ ID NO: 652780 - DNA, 120 bp, Artificial Sequence
  ENSG00000183255_17 (sequence is synthesized)
ctgtgtacatctgtaccgggaataacattcctaggctgaaatttccacaaagaatagaacctgtacccagttcttcaggctgatttccctgacctcttgggcatttgtatttgtagtaaa

SEQ ID NO: 652781 - DNA, 120 bp, Artificial Sequence
  ENSG00000183255_18 (sequence is synthesized)
gtattgcagagattcctaagtattttatagcagccatcaaaattggactttgtattgtttattcataaaagacacttggtaatagacttcagtgaactctgtatgaatgcagtagtgtgt

SEQ ID NO: 652782 - DNA, 120 bp, Artificial Sequence
  ENSG00000183255_19 (sequence is synthesized)
gtgcaaaatccgcttcctgagcgtagggtgctgagctggcgctagggctcggttgtgaaatacagcgtagtcagcccttgcgctcagtgtagaaacccacgtctgtaaggtcggtcttcg

SEQ ID NO: 652783 - DNA, 120 bp, Artificial Sequence
  ENSG00000183255_20 (sequence is synthesized)
tccatctgcttttttctgaaatacactaagagcagccacaaaactgtaacctcaaggaaaccataaagcttggagtgccttaatttttaaccagtttccaataaaacggtttactacctg

SEQ ID NO: 652784 - DNA, 120 bp, Artificial Sequence
  ENSG00000183255_21 (sequence is synthesized)
agtgcagttgtgaaggtcagaggtaggaagcatggtccttgctacagatggtgaccatgctcacccaagtccattcaacacaaactcagtgagtgcctgtgatgggccaggctgtgtcct

SEQ ID NO: 652785 - DNA, 120 bp, Artificial Sequence
  ENSG00000183255_22 (sequence is synthesized)
atccgcgccgcgcaggcgcactgagcctcagccgctctcctcgctaccaggctcctttcctctatcgcgcaggcgcactgaacctcagccgcgccgggaggcgagcccgttggcgagggg

SEQ ID NO: 652786 - DNA, 120 bp, Artificial Sequence
  ENSG00000183255_23 (sequence is synthesized)
gtgctgcgtggcagtgtcgctggcgttgctgtggcctcggatggaggctcttgggttcccaaaagagtgcctgctgatgagcagaaggtcccagcaggtttgtggttagtgattacacag

SEQ ID NO: 652787 - DNA, 120 bp, Artificial Sequence
  ENSG00000183255_24 (sequence is synthesized)
ccacagggcacacttcctctcacagagagatctgaaacacagccttctgtgttggcactcttctctcccagaagagcccttgtggataggagccgcatgtttatactctttgtgccctgc

SEQ ID NO: 652788 - DNA, 120 bp, Artificial Sequence
  ENSG00000183255_25 (sequence is synthesized)
ccggagctgcggggttcctgaacactcgttccacatgtcttgaagaaggcttgttatcagcaggggctcaggaagaggaccttcatttgcttgttctcagaacacaaacaaaacctgtga

SEQ ID NO: 652789 - DNA, 120 bp, Artificial Sequence
  ENSG00000183255_26 (sequence is synthesized)
ggccggtgtgtctctacagccgccggcgttcacgccgccactccctcccggccgcagttccacgcacagcagcgaacgctcgcacttatgccttagaaaggaaggcgtccccaaagccag

SEQ ID NO: 652790 - DNA, 120 bp, Artificial Sequence
  ENSG00000183258_0 (sequence is synthesized)
atgcgtgcagcaaagaatggaggagtcggaacccgaacggaagcgggctcgcaccgacgaggtgcctgccggaggaagccgctccgaggcggaagatgaggacgacgaggactacgtgcc

SEQ ID NO: 652791 - DNA, 120 bp, Artificial Sequence
  ENSG00000183258_1 (sequence is synthesized)
ctatgtgccgttacggcagcgccggcagctactgctccagaagctgctgcagcgaagacgcaagggagctgcggaggaagagcagcaggacagcggtagtgaaccccggggagatgagga

SEQ ID NO: 652792 - DNA, 120 bp, Artificial Sequence
  ENSG00000183258_2 (sequence is synthesized)
cgacatcccgctaggccctcagtccaacgtcagcctcctggatcagcaccagcaccttaaagagaaggctgaagcgcgcaaagagtctgccaaggagaagcagctgaaggaagaagagaa

SEQ ID NO: 652793 - DNA, 120 bp, Artificial Sequence
  ENSG00000183258_3 (sequence is synthesized)
gatcctggagagtgttgccgagggccgagcattgatgtcagtgaaggagatggctaagggcattacgtatgatgaccccatcaaaaccagctggactccaccccgttatgttctgagcat

SEQ ID NO: 652794 - DNA, 120 bp, Artificial Sequence
  ENSG00000183258_4 (sequence is synthesized)
gtctgaagagcgacatgagcgcgtgcggaagaaataccacatcctggtggagggagacggtatcccaccacccatcaagagcttcaaggaaatgaagtttcctgcagccatcctgagagg

SEQ ID NO: 652795 - DNA, 120 bp, Artificial Sequence
  ENSG00000183258_5 (sequence is synthesized)
cctgaagaagaaaggcattcaccacccaacacccattcagatccagggcatccccaccattctatctggccgtgacatgataggcatcgctttcacgggttcaggcaagacactggtgtt

SEQ ID NO: 652796 - DNA, 120 bp, Artificial Sequence
  ENSG00000183258_6 (sequence is synthesized)
cacgttgcccgtcatcatgttctgcctggaacaagagaagaggttacccttctcaaagcgcgaggggccctatggactcatcatctgcccctcgcgggagctggcccggcagacccatgg

SEQ ID NO: 652797 - DNA, 120 bp, Artificial Sequence
  ENSG00000183258_7 (sequence is synthesized)
catcctggagtactactgccgcctgctgcaggaggacagctcaccactcctgcgctgcgccctctgcattgggggcatgtccgtgaaagagcagatggagaccatccgacacggtgtaca

SEQ ID NO: 652798 - DNA, 120 bp, Artificial Sequence
  ENSG00000183258_8 (sequence is synthesized)
tagacatctgtcgctacctggccctggacgaggctgaccgcatgatcgacatgggcttcgagggtgacatccgtaccatcttctcctacttcaagggccagcgacagaccctgctcttca

SEQ ID NO: 652799 - DNA, 120 bp, Artificial Sequence
  ENSG00000183258_9 (sequence is synthesized)
gtgccaccatgccgaagaagattcagaactttgctaagagtgcccttgtaaagcctgtgaccatcaatgtggggcgcgctggggctgccagcctggatgtcatccaggaggtagaatatg

SEQ ID NO: 652800 - DNA, 120 bp, Artificial Sequence
  ENSG00000183258_10 (sequence is synthesized)
tgaaggaggaggccaagatggtgtacctgctcgagtgcctgcagaagacacccccgcctgtactcatctttgcagagaagaaggcagacgtggacgccatccacgagtacctgctgctca

SEQ ID NO: 652801 - DNA, 120 bp, Artificial Sequence
  ENSG00000183258_11 (sequence is synthesized)
agggggttgaggccgtagccatccatgggggcaaagaccaggaggaacggactaaggccatcgaggcattccgggagggcaagaaggatgtcctagtagccacagacgttgcctccaagg

SEQ ID NO: 652802 - DNA, 120 bp, Artificial Sequence
  ENSG00000183258_12 (sequence is synthesized)
gcctggacttccctgccatccagcacgtcatcaattatgacatgccagaggagattgagaactatgtacaccggattggccgcaccgggcgctcgggaaacacaggcatcgccactacct

SEQ ID NO: 652803 - DNA, 120 bp, Artificial Sequence
  ENSG00000183258_13 (sequence is synthesized)
tcatcaacaaagcgtgtgatgagtcagtgctgatggacctcaaagcgctgctgctagaagccaagcagaaggtgccgcccgtgctgcaggtgctgcattgcggggatgagtccatgctgg

SEQ ID NO: 652804 - DNA, 120 bp, Artificial Sequence
  ENSG00000183258_14 (sequence is synthesized)
acattggaggagagcgcggctgtgccttctgcgggggcctgggtcatcggatcactgactgccccaaactcgaggctatgcagaccaagcaggtcagcaacatcggtcgcaaggactacc

SEQ ID NO: 652805 - DNA, 120 bp, Artificial Sequence
  ENSG00000183258_15 (sequence is synthesized)
tggcccacagctccatggacttctgagccgacagtcttcccttctctccaagaggcctcagtccccaagactgccaccagtctacacatacagcagccccctggacagaatcagcatttc

SEQ ID NO: 652806 - DNA, 120 bp, Artificial Sequence
  ENSG00000183258_16 (sequence is synthesized)
agctcagctggcctgggatgggccaggctggtcctggctgcctgttccctgtgctcttcagaattactgtttttgtttccttttaccccagctgccattaaagcccaaacctctagccca

SEQ ID NO: 652807 - DNA, 120 bp, Artificial Sequence
  ENSG00000183258_17 (sequence is synthesized)
ctatgtgccgttacggcagcgccggcagctactggtgaggggcacgcgtccggggagggatggggccgtgaccgcggggtcgcagggggcgggcgtggcctcggcctccgtggggaggag

SEQ ID NO: 652808 - DNA, 120 bp, Artificial Sequence
  ENSG00000183258_18 (sequence is synthesized)
ggcagtctgaggagtgagcttcagtacaccagggcgcggcccccagacaaacgagggaccgacggcttgatctgaggggtagggcagctttgcgcctcgggcacaggatcctcgccccaa

SEQ ID NO: 652809 - DNA, 120 bp, Artificial Sequence
  ENSG00000183258_19 (sequence is synthesized)
ggaacccgaacggaaggtaggagagaggcgagaccccgcgcgtgtgggagcgggcgtgaagaggggagcaggccgtgcctgactggcgtgtgcttgcagcgggctcgcaccgacgaggtg

SEQ ID NO: 652810 - DNA, 120 bp, Artificial Sequence
  ENSG00000183258_20 (sequence is synthesized)
tgcagtcctctgcagaccaccagaggccctggaccaggccctctgttcacagatgggccagaccccatcccggaggccttcctccacggacttctgagtattagggagatgcggtgtaca

SEQ ID NO: 652811 - DNA, 120 bp, Artificial Sequence
  ENSG00000183258_21 (sequence is synthesized)
cacctctgccacctgcgagtctgtggaaaagctaaaggaccctttaccttagccactccacagatcttcacagagggctgctgtgagtgcgaccctcaaggagctcccagtctaatgggg

SEQ ID NO: 652812 - DNA, 120 bp, Artificial Sequence
  ENSG00000183258_22 (sequence is synthesized)
ttcaaagcccctgacgcttaaccagggccatttttagggcaccagcccttggcggccagaggcttctggtcacctcctggtccagatgacgggccatggcagggctgtggcgggtaagcc

SEQ ID NO: 652813 - DNA, 120 bp, Artificial Sequence
  ENSG00000183258_23 (sequence is synthesized)
taatctcaagatcacctgacctgatctttgtggtggcaggaggtagaatatgtgaaggaggaggccaagatggtgtacctgctcgagtgcctgcagaagacacccccgcctgtgagtgca

SEQ ID NO: 652814 - DNA, 120 bp, Artificial Sequence
  ENSG00000183258_24 (sequence is synthesized)
catccagcacgtcatcaattatgacatgccagaggagattgagaactatggtaagagcctggggcccaagggcatgggttaggccggaaaagggccaagccaggcccctagtgtccagcg

SEQ ID NO: 652815 - DNA, 120 bp, Artificial Sequence
  ENSG00000183258_25 (sequence is synthesized)
ctatgtgccgttacggcagcgccggcagctactgccaggatcctgacgctgaccttgtggactccatgcccatcctatctgtggatcccgggtggaacctcagctccagaagctgctgca

SEQ ID NO: 652816 - DNA, 120 bp, Artificial Sequence
  ENSG00000183258_26 (sequence is synthesized)
gtgttgccgagggccgaggtatggttgtagccaggatagtgagaaggtggactgagtcttctcctcccagccccaggcatgttatatctcaagggatctggcttctcagaagcaggagcc

SEQ ID NO: 652817 - DNA, 120 bp, Artificial Sequence
  ENSG00000183258_27 (sequence is synthesized)
acttttataatcaaatgcctgtgaggttatgtcctggctcccactgagctcagccacatctgcattggatccagtcactggggctggagggatttgaggaggagtttctttaggttcctt

SEQ ID NO: 652818 - DNA, 120 bp, Artificial Sequence
  ENSG00000183258_28 (sequence is synthesized)
gttgcctcagctgtacgtgttcattgttctctgctgttacaaagcttcaggaggaaagtgccattgggcatagacactgggtacaaatcctggctgcacctagcctgtgggccttggaca

SEQ ID NO: 652819 - DNA, 120 bp, Artificial Sequence
  ENSG00000183258_29 (sequence is synthesized)
agtctctttttttctttttttttttccactctctctctctctctctgagcctcagtttcatcatctgcaacttgtaggggtagtgccagttttacaggctttggggctctgagaaagtac

SEQ ID NO: 652820 - DNA, 120 bp, Artificial Sequence
  ENSG00000183258_30 (sequence is synthesized)
cttctcctacttcaaggtgccgcccccgcccggccagggcaccctgcaccgccccccactgcacgccacatcagactgcagggaccccatgcccctggccaccccaacccactgctcata

SEQ ID NO: 652821 - DNA, 120 bp, Artificial Sequence
  ENSG00000183258_31 (sequence is synthesized)
ctttgtgggctgtgtctcagttgctcagcttccccagaccccatgcccctcagcccagccctgtgtgcccttggtcgcagcccccctcttcctcagggccagcgacagaccctgctcttc

SEQ ID NO: 652822 - DNA, 120 bp, Artificial Sequence
  ENSG00000183258_32 (sequence is synthesized)
catcaaaaccaggtatgtctgtacagtctgcagttgcccttgcttaggatggtacatgcagggatgctcccaggccagctattcccagggctctcttgatccctgttacccatccacagc

SEQ ID NO: 652823 - DNA, 120 bp, Artificial Sequence
  ENSG00000183258_33 (sequence is synthesized)
gtgctttacctaatgccttcccctgcctggttggcctgccactcccctgtcccatggtggctctgacagtgtctgcctgaccctccccagaccaggaggaacggactaaggccatcgagg

SEQ ID NO: 652824 - DNA, 120 bp, Artificial Sequence
  ENSG00000183260_0 (sequence is synthesized)
gcggcgatcccggcccagcggctgggcgttagggccaccgctcatgtgcgtcatctgcttcgtgaaggcgctggtgcgcgtgttcaagatctacctgaccgccagctacacctacccatt

SEQ ID NO: 652825 - DNA, 120 bp, Artificial Sequence
  ENSG00000183260_1 (sequence is synthesized)
cattccgcggctggcccgtggccttccgctgggatgacgtgcgcgccgtgggccggagcagcagccaccgggcgctgacctgcgcggcagccgcggcgggcgtgtggttgctgcgggacg

SEQ ID NO: 652826 - DNA, 120 bp, Artificial Sequence
  ENSG00000183260_2 (sequence is synthesized)
gctgggcggggatgcgctggggcggcctccacgtggggcgcgcagccaggcgcagtgcctcttgcagcagctccgcgagctgcccggccagctcgctagctacgcgctggcccactcgct

SEQ ID NO: 652827 - DNA, 120 bp, Artificial Sequence
  ENSG00000183260_3 (sequence is synthesized)
gggccgctggctcgtgtaccccggctccgtgtccctgatgacgcgcgcgctgctgccgctgctgcagcagggccaagagcgcctcgtggagcgctaccacggccggcgcgccaagctggt

SEQ ID NO: 652828 - DNA, 120 bp, Artificial Sequence
  ENSG00000183260_4 (sequence is synthesized)
ggcctgtgacggcaacgagatcgacactatgttcatggaccgccgccagcacccgggcagccacgtgcacgggccgcgcctcgtcatctgctgcgaaggcaacgcgggcttctacgagat

SEQ ID NO: 652829 - DNA, 120 bp, Artificial Sequence
  ENSG00000183260_5 (sequence is synthesized)
gggctgtctgtctgcaccgctcgaggccggctactccgtgctgggctggaaccaccccggcttcggcagcagcactggcgtgcccttccctcagcacgacgccaacgccatggacgtggt

SEQ ID NO: 652830 - DNA, 120 bp, Artificial Sequence
  ENSG00000183260_6 (sequence is synthesized)
ctacggctggtctgttggcggcttcacggccacctgggccaccatgacctacccggagctgggtgcactggtgctggacgccaccttcgacgaccttgtgccgctggcgctgaaggtcat

SEQ ID NO: 652831 - DNA, 120 bp, Artificial Sequence
  ENSG00000183260_7 (sequence is synthesized)
gccccacagttggaaggggctggtggtgcgcaccgtgcgcgagcacttcaacctcaacgtggccgagcagctgtgctgctacccggggccggtgctgctgctccgacgcacgcaggatga

SEQ ID NO: 652832 - DNA, 120 bp, Artificial Sequence
  ENSG00000183260_8 (sequence is synthesized)
cgtggtcagcacttcgggccgcctgcgccccctgtcacctggtgacgtggagggcaaccggggcaatgagctgctgctgcgcctgctggagcaccgctaccccgtcgtgatggcgcgaga

SEQ ID NO: 652833 - DNA, 120 bp, Artificial Sequence
  ENSG00000183260_9 (sequence is synthesized)
gggccgcgccgtcgtcacccgctggctgcgcgctggcagcttggcgcaggaggccgccttctatgcacgctaccgcgtggacgaggactggtgcctggcgctgctgcgctcctaccgtgc

SEQ ID NO: 652834 - DNA, 120 bp, Artificial Sequence
  ENSG00000183260_10 (sequence is synthesized)
acgctgcgaagaggagctggagggcgaggaggccctggggccacacggacccgccttcccatggctggtgggccagggcctgagctcgcggcggcgccggcgcctcgcactgttcctggc

SEQ ID NO: 652835 - DNA, 120 bp, Artificial Sequence
  ENSG00000183260_11 (sequence is synthesized)
tcggaagcacctcaagaacgtggaggcgactcacttcagccctctggagcctgaggagtttcagttgccctggcggctgtaacctatatgccccagtgggggatcacgcacttgaactcc

SEQ ID NO: 652836 - DNA, 120 bp, Artificial Sequence
  ENSG00000183269_0 (sequence is synthesized)
ataatcgtcgctggtgtgcccagcagctttatatggcaggaagaatgtctacgtctaatcacacccagttccatccttcttcattcctactgctgggtatcccagggctagaagatgtgc

SEQ ID NO: 652837 - DNA, 120 bp, Artificial Sequence
  ENSG00000183269_1 (sequence is synthesized)
acatttggattggagtcccttttttctttgtgtatcttgttgcactcctgggaaacactgctctcttgtttgtgatccagactgagcagagtctccatgagcctatgtactacttcctgg

SEQ ID NO: 652838 - DNA, 120 bp, Artificial Sequence
  ENSG00000183269_2 (sequence is synthesized)
ccatgttggattccattgacctgggcttgtctacagccaccatccccaaaatgttgggcatcttctggttcaataccaaagaaatatcttttggaggctgcctttctcacatgttcttca

SEQ ID NO: 652839 - DNA, 120 bp, Artificial Sequence
  ENSG00000183269_3 (sequence is synthesized)
tccatttcttcactgctatggagagcattgtgttggtggccatggcctttgaccgctacattgccatttgcaaacctcttcggtacaccatgatcctcaccagcaaaatcatcagcctca

SEQ ID NO: 652840 - DNA, 120 bp, Artificial Sequence
  ENSG00000183269_4 (sequence is synthesized)
tattgtgagcacatgggcattgcccgtctggcctgtgccagcatcaaagtcaacattaggtttggccttggcaacatatctctcttgttactggatgttatccttattattctctcctat

SEQ ID NO: 652841 - DNA, 120 bp, Artificial Sequence
  ENSG00000183269_5 (sequence is synthesized)
gtcaggatcctgtatgctgtcttctgcctgccctcctgggaagctcgactcaaagctctcaacacctgtggttctcatattggtgttatcttagccttttttacaccagcatttttttca

SEQ ID NO: 652842 - DNA, 120 bp, Artificial Sequence
  ENSG00000183269_6 (sequence is synthesized)
ttcttgacacatcgttttggccataatatcccacagtatatacatattatattagccaacctgtatgtggttgtcccaccagccctcaatcctgtaatctatggagtcaggacaaagcag

SEQ ID NO: 652843 - DNA, 120 bp, Artificial Sequence
  ENSG00000183269_7 (sequence is synthesized)
attcgagagagagtgctgaggatttttctcaagaccaatcactaaccagttggaggttggagagtctgtcactctaacctaatagaaagcagaaaaacagaagggaatgctgcagccaat

SEQ ID NO: 652844 - DNA, 120 bp, Artificial Sequence
  ENSG00000183273_0 (sequence is synthesized)
gcagtgcgataaacccctcgttggggccgccttagttctcggccgctctcggaggatggcgatctgggagcccctccatgggacccctctcacactttgtcactggaattttatttattt

SEQ ID NO: 652845 - DNA, 120 bp, Artificial Sequence
  ENSG00000183273_1 (sequence is synthesized)
tttagttcatattttattttgcttatagaagagaaagatatcccttccgaagaggaggaagcttacagaagtttataacctttcaaaaagtaaataagtccaggcttgcctgattctgcc

SEQ ID NO: 652846 - DNA, 120 bp, Artificial Sequence
  ENSG00000183273_2 (sequence is synthesized)
ctacccggacttccttatcccgtctgtgggagacccaggtgctttctcattactcttcagaaggaaaccgctttggagttcgtgtaattgggacttggggatcagggagaagttgccgaa

SEQ ID NO: 652847 - DNA, 120 bp, Artificial Sequence
  ENSG00000183273_3 (sequence is synthesized)
acttctcataccagtaactactgaagtagaagattctggaaaaatccttgtcttgggggcacaggctaaaacctgaaggatttttaagatgaccaaggttccagccaccaagaagcttca

SEQ ID NO: 652848 - DNA, 120 bp, Artificial Sequence
  ENSG00000183273_4 (sequence is synthesized)
gagttcccccaactcgggggctgtccggcccttttatgcctcggagaacctaaggcaggtcccagacaagccaatgaagagcatcaagtatatggacaaggaaataataaacctcaaaaa

SEQ ID NO: 652849 - DNA, 120 bp, Artificial Sequence
  ENSG00000183273_5 (sequence is synthesized)
ggaccttatacgaagccgctttttgatccagtctgtgaagataggccgtggatattttgctattctgagggaagagactgcaaagaaaaagaagcaacaacaacttcagaaactgaaaga

SEQ ID NO: 652850 - DNA, 120 bp, Artificial Sequence
  ENSG00000183273_6 (sequence is synthesized)
ggaggaaagaaataaattccagccagccgaaaagatctcagaaatccactatggggacaccttattgagcacatatgatgatgagaagttgaagacactgggagctagagtcacacgtcg

SEQ ID NO: 652851 - DNA, 120 bp, Artificial Sequence
  ENSG00000183273_7 (sequence is synthesized)
cccattcactcccatccacagctgcatcatttctccctcgctaaccgaggctcacgtcgagcccctcttccgccagctctgtgctctccactggcttctggaggccctgactattgacca

SEQ ID NO: 652852 - DNA, 120 bp, Artificial Sequence
  ENSG00000183273_8 (sequence is synthesized)
cacccaccacaccatgaagcctgtgatcacctgctggaacccaaaggacccgggtggaagcaagagcaccattaaaaaaatcaataaggacaagtccatgggacagaaatgggagcattt

SEQ ID NO: 652853 - DNA, 120 bp, Artificial Sequence
  ENSG00000183273_9 (sequence is synthesized)
catcacagcgccaaagaccaagaaattcaaaattcccacaatgcgagtcaccaaccgcaaaccaagccggcgaggctccacactcagtctgagtcgggccagtggggggtcctctcccca

SEQ ID NO: 652854 - DNA, 120 bp, Artificial Sequence
  ENSG00000183273_10 (sequence is synthesized)
gctcggatgagcccccaagtgtgaacacccaggtgaccagcagcaaggacattgaggacaatgagtcatcttcaaccaagccagatgaagaacctctgtatatgaatctgcagaagctcc

SEQ ID NO: 652855 - DNA, 120 bp, Artificial Sequence
  ENSG00000183273_11 (sequence is synthesized)
tggagatggttcgggaagatgcccggaggacagtcacaatagaaaatgggatgcaaagaaaagcacccagcatcttgtcagtgctgaaacaaaacaagagtaattctgcttataaggaaa

SEQ ID NO: 652856 - DNA, 120 bp, Artificial Sequence
  ENSG00000183273_12 (sequence is synthesized)
tgcagaccactctcaaatcaagtgagagatccagcagtacaagtgcagaaagccacatccaaccagtccagaagaagtctaaaaaccgcactaattgtgacatcaacatccactacaaga

SEQ ID NO: 652857 - DNA, 120 bp, Artificial Sequence
  ENSG00000183273_13 (sequence is synthesized)
gtggggtgtgtaacaccatgagggccaagttttacagcgtagcccaggaggctggcttctgcctgcaggacaagatggaaatcctcatgaagcgccaagaagagagaggtatccagaagt

SEQ ID NO: 652858 - DNA, 120 bp, Artificial Sequence
  ENSG00000183273_14 (sequence is synthesized)
tccgtgcttttgtccttgtctcaaattttcaaaaggacatagcaaaaatgagacatcacatatctgtagtaaaaggagatgcagaagaaattgcagaccactggtactttgatctgttgt

SEQ ID NO: 652859 - DNA, 120 bp, Artificial Sequence
  ENSG00000183273_15 (sequence is synthesized)
ccaaactgccagaggatctaaagaacttccgccccgccaaaaagatcctggtgaaactgcagaagtttggagaaaacctggacttgcggattcgaccccatgtcctcctgaaggtgctgc

SEQ ID NO: 652860 - DNA, 120 bp, Artificial Sequence
  ENSG00000183273_16 (sequence is synthesized)
aggatctgaggatttgggaactgtgctcccctgacatcgctgtggctattgagtttgtgcgagaacacatcatccatatgcctcaagaggattacatcagctggctgcagagccggatca

SEQ ID NO: 652861 - DNA, 120 bp, Artificial Sequence
  ENSG00000183273_17 (sequence is synthesized)
acatacccattgggccctacagcgccctgaggtaggctgggcctgggttgaccagctgtctcagtggaggagtgtttgcctatatcatgttcctgtatcctgcctgtgttcctgcctcct

SEQ ID NO: 652862 - DNA, 120 bp, Artificial Sequence
  ENSG00000183273_18 (sequence is synthesized)
gactaccctcatggatgctctttatggatgaccctttacagtagggtcatctggagactgacttccagcaacatttttagagggggatggccccggtggccctcccctcaattccacacc

SEQ ID NO: 652863 - DNA, 120 bp, Artificial Sequence
  ENSG00000183273_19 (sequence is synthesized)
ccagacccaacctaccagtctctgttcttcaatgatccagcctgactctacctacttcctcttcagattccttcaccctatttaccttcctcaagtactggagaataaaattgaactgaa

SEQ ID NO: 652864 - DNA, 120 bp, Artificial Sequence
  ENSG00000183273_20 (sequence is synthesized)
ctcagcctgtgctcaggggcatgttttccccaagactcaaggagctgtttcccagagaagcccatccagttttctgacctgaggcatgaactcatcattgtgtggtgcaacaggaactaa

SEQ ID NO: 652865 - DNA, 120 bp, Artificial Sequence
  ENSG00000183273_21 (sequence is synthesized)
tcaaccttccaaagaacactcttgctttctaaagtcttgatgtcttgttccccttgtgtctattccaaatctcaagcccaactttttctttttcaccagttagcacttttcagctggaag

SEQ ID NO: 652866 - DNA, 120 bp, Artificial Sequence
  ENSG00000183273_22 (sequence is synthesized)
gccggacacaaaggagaatggggaaaaggccaaacagagaagccacaagcaagcaagaaagaaacgacaatgagatgttccatctggccacacttctggatcccaccaacattaaggaag

SEQ ID NO: 652867 - DNA, 120 bp, Artificial Sequence
  ENSG00000183273_23 (sequence is synthesized)
gaatcaggattccccttcagaaggaaacaccatgttttccaagggaagtcatctctccaagtggcacaaactccctgaccccatatcccagtattaaatgaggcgaattgttaacaaaga

SEQ ID NO: 652868 - DNA, 120 bp, Artificial Sequence
  ENSG00000183273_24 (sequence is synthesized)
actaccggaatctccaccctgccccatccagcagcacaacttcatggaactgatgactgagcccaggaggactcctggaagggtagctgcctgggtgctgacaggtggcaggaagtcaca

SEQ ID NO: 652869 - DNA, 60 bp, Artificial Sequence
  ENSG00000183273_25 (sequence is synthesized)
gggtagctgcctgggtgctgacaggtggcaggaagtcacagtggctaagaaactggctcc

SEQ ID NO: 652870 - DNA, 120 bp, Artificial Sequence
  ENSG00000183273_26 (sequence is synthesized)
gcatgagcaggctatggggtgttgcctacaagtccttgcccagtcccagcatcccccaattctgaacactaagcagaagacttacaggagggtaaccctgggaggagcagagggcaggat

SEQ ID NO: 652871 - DNA, 120 bp, Artificial Sequence
  ENSG00000183281_0 (sequence is synthesized)
actctcatgtaagtcaacaacatcctgggattgggacacactttctgggcactgctggccagtcccaaaatggaacataaggaagtggttcttctacttcttttatttctgaaatcaggt

SEQ ID NO: 652872 - DNA, 120 bp, Artificial Sequence
  ENSG00000183281_1 (sequence is synthesized)
caaggagagcccctggatgactatgtgaatacccaggggccttcactgttcagtgtcactaagaagcagctgggggcaggaagcagagaagaatgtgcagcaaaatgtgaagaggacaaa

SEQ ID NO: 652873 - DNA, 120 bp, Artificial Sequence
  ENSG00000183281_2 (sequence is synthesized)
gaattcacctgcagggcattccaatatcacagtaaagagcaacaatgtgtgataatggctgaaaacaggaagtcctccataatcattaggatgagagatgcagttttatttgaaaagtaa

SEQ ID NO: 652874 - DNA, 120 bp, Artificial Sequence
  ENSG00000183281_3 (sequence is synthesized)
atgtatctttcagagtgcaagactgggaatggaaagaactacagagggacgatgtccaaaacaaaaaatggcatcacctgtcaaaaatggagttccacttctccccgcaaacctaggtca

SEQ ID NO: 652875 - DNA, 120 bp, Artificial Sequence
  ENSG00000183281_4 (sequence is synthesized)
aatccatgcttctcaagtcccttatgtaaaatggtgcagtatttgcatataacctacataccttctcttgtgcaatccctaatataatgtaaatgctatgtaatcgttgttatactgtat

SEQ ID NO: 652876 - DNA, 120 bp, Artificial Sequence
  ENSG00000183281_5 (sequence is synthesized)
tgtttttatttgtattatgttttattgtcatattgttattttctctcatctttttcaagtcttttccatccacagttggttgaatttgtggatgtggaacccatggatacagagggccaa

SEQ ID NO: 652877 - DNA, 120 bp, Artificial Sequence
  ENSG00000183281_6 (sequence is synthesized)
ctgtatttaggataatttcatcacttttaattcaaaccagaatatgtgaataagcagacagaaagaatctttttgatgtcgatgttcaactatttttggcaccatagtagaacatggttg

SEQ ID NO: 652878 - DNA, 120 bp, Artificial Sequence
  ENSG00000183281_7 (sequence is synthesized)
ctttctattttttcttgggtatggaggtttcttgaagacctagaacatagaagaatgcctagttaaaaaaaaaaatcaatgaaactacgagttttaggccaaatctgagaaaagaccaaa

SEQ ID NO: 652879 - DNA, 120 bp, Artificial Sequence
  ENSG00000183281_8 (sequence is synthesized)
gatgactatgtttgggactgaagtaaacatatcaagttagaactctcatcacatgtttgactcaaattgtggagcaaaatagtaaataaaatataaaaatgaaaatgaagatacgtgaaa

SEQ ID NO: 652880 - DNA, 120 bp, Artificial Sequence
  ENSG00000183281_9 (sequence is synthesized)
aggctgcaatcaagatgttggcatggctggggtctcatctgaaggctggactggagaagaatctacttccaaacttatgtggtagttggaagaatttagttcctcaaggctgctaaactg

SEQ ID NO: 652881 - DNA, 120 bp, Artificial Sequence
  ENSG00000183281_10 (sequence is synthesized)
atggcctgtgttccttgcctctgggatggtagcttgcttcaacaaagtgtgcaagcagagaagacagagagagtccgctagcaagatagaagccacaatctcttgtaatctatcattttt

SEQ ID NO: 652882 - DNA, 120 bp, Artificial Sequence
  ENSG00000183281_11 (sequence is synthesized)
gctgtattctactggttaaaaataactcattaggttagcctactggctctcagggggaagagattatacaaaggcatgaatttctggaggagggaatgagggcaaagaactctgaaaagt

SEQ ID NO: 652883 - DNA, 120 bp, Artificial Sequence
  ENSG00000183281_12 (sequence is synthesized)
ttctcttccacaatctgaagaacttctagaaagtagaaggaagcaatattgcttagggatggacaacttggcactggttatgtgttccaagtgaggtaaccttgttcccaggaataaaga

SEQ ID NO: 652884 - DNA, 120 bp, Artificial Sequence
  ENSG00000183281_13 (sequence is synthesized)
gaaccagatgactgtaaacatttccctaaactgaaatgcactgttgtatgttcacctgaaatgaatggtgtaagctgaatatgagatttttgacaaaataaaaattttgctgtgttctca

SEQ ID NO: 652885 - DNA, 120 bp, Artificial Sequence; identical to SEQ ID NO: 261673
  ENSG00000183281_14 (sequence is synthesized)

SEQ ID NO: 652886 - DNA, 120 bp, Artificial Sequence
  ENSG00000183281_15 (sequence is synthesized)
gtagtgttgtgtgactgtcatcagcccagtacaaaaatggccttctttgttggggagcttcttaccctccagtgttttgcccaatttttgtccaaggtggcaacataatttagttcagtt

SEQ ID NO: 652887 - DNA, 120 bp, Artificial Sequence
  ENSG00000183281_16 (sequence is synthesized)
cttgtttatttccaccatcatctatgcaccaaaatttatgtgcctcaaggagggaccattcagaggatgcttcccaccagttcaagtgacagtgtcagaaccaaagcgcatattgtagga

SEQ ID NO: 652888 - DNA, 120 bp, Artificial Sequence; identical to SEQ ID NO: 261676
  ENSG00000183281_17 (sequence is synthesized)

SEQ ID NO: 652889 - DNA, 120 bp, Artificial Sequence; identical to SEQ ID NO: 261677
  ENSG00000183281_18 (sequence is synthesized)

SEQ ID NO: 652890 - DNA, 120 bp, Artificial Sequence; identical to SEQ ID NO: 261678
  ENSG00000183281_19 (sequence is synthesized)

SEQ ID NO: 652891 - DNA, 120 bp, Artificial Sequence; identical to SEQ ID NO: 261679
  ENSG00000183281_20 (sequence is synthesized)

SEQ ID NO: 652892 - DNA, 120 bp, Artificial Sequence; identical to SEQ ID NO: 261680
  ENSG00000183281_21 (sequence is synthesized)

SEQ ID NO: 652893 - DNA, 120 bp, Artificial Sequence
  ENSG00000183281_22 (sequence is synthesized)
gaggtgttttaatcctcagaaacatttagattgggacacaaatcttattttttactcttaaatttttcacattttgggggacatggtctatatttttctcagatttctgatatgttgtct

SEQ ID NO: 652894 - DNA, 120 bp, Artificial Sequence
  ENSG00000183281_23 (sequence is synthesized)
tttaaaaatgtgtaaaagttacagttccttttctatagtttattttaaaatgtgggtcaatagtcccactgcttagaataagaggcacacaggatttcaatagaaattgcatgccttttt

SEQ ID NO: 652895 - DNA, 120 bp, Artificial Sequence
  ENSG00000183283_0 (sequence is synthesized)
gacacggaagtagctccgaacaggaagaggacgaaaaaaataaccgtccgcgacgccgagacaaaccggacccgcaaccaccatgaacagcaaaggtcaatatccaacacagccaaccta

SEQ ID NO: 652896 - DNA, 120 bp, Artificial Sequence
  ENSG00000183283_1 (sequence is synthesized)
ccctgtgcagcctcctgggaatccagtataccctcagaccttgcatcttcctcaggctccaccctataccgatgctccacctgcctactcagagctctatcgtccgagctttgtgcaccc

SEQ ID NO: 652897 - DNA, 120 bp, Artificial Sequence
  ENSG00000183283_2 (sequence is synthesized)
aggggctgccacagtccccaccatgtcagccgcatttcctggagcctctctgtatcttcccatggcccagtctgtggctgttgggcctttaggttccacaatccccatggcttattatcc

SEQ ID NO: 652898 - DNA, 120 bp, Artificial Sequence
  ENSG00000183283_3 (sequence is synthesized)
agtcggtcccatctatccacctggctccacagtgctggtggaaggagggtatgatgcaggtgccagatttggagctggggctactgctggcaacattcctcctccacctcctggatgccc

SEQ ID NO: 652899 - DNA, 120 bp, Artificial Sequence
  ENSG00000183283_4 (sequence is synthesized)
tcccaatgctgctcagcttgcagtcatgcagggagccaacgtcctcgtaactcagcggaaggggaacttcttcatgggtggttcagatggtggctacaccatctggtgaggaaccaaggc

SEQ ID NO: 652900 - DNA, 120 bp, Artificial Sequence
  ENSG00000183283_5 (sequence is synthesized)
cacctctgtgccgggaaagacatcacataccttcagcacttctcacaatgtaactgctttagtcatattaacctgaagttgcagtttagacacatgttgttggggtgtctttctggtgcc

SEQ ID NO: 652901 - DNA, 120 bp, Artificial Sequence
  ENSG00000183283_6 (sequence is synthesized)
caaactttcaggcacttttcaaatttaataaggaaccatgtaatggtagcagtacctccctaaagcattttgaggtaggggaggtatccattcataaaatgaatgtgggtgaagccgccc

SEQ ID NO: 652902 - DNA, 120 bp, Artificial Sequence
  ENSG00000183283_7 (sequence is synthesized)
taaggattttcctttaatttctctggagtaatactgtaccatactggtctttgcttttagtaataaaacatcaaattaggtttggagggaactttgatcttcctaagaattaaagttgcc

SEQ ID NO: 652903 - DNA, 120 bp, Artificial Sequence
  ENSG00000183283_8 (sequence is synthesized)
ctcctttaagtctttgatatatattacttgttataaatggaacgcattagttgtctgccttttcctttccatcccttgccccacccatcccatctccaaccctagtcttccatttcctcc

SEQ ID NO: 652904 - DNA, 120 bp, Artificial Sequence
  ENSG00000183283_9 (sequence is synthesized)
cgccagtctccattgaatcaatggtgcaggacagaaagccagtcagactaatttccttctttcctcgcacttctccccactcgtcatcttttaactagtgtttcacaaggatcctctgaa

SEQ ID NO: 652905 - DNA, 120 bp, Artificial Sequence
  ENSG00000183283_10 (sequence is synthesized)
accctctctgtgccccaagtacagatgccattacttctgctttcgtatctcctcaggcaaaagtggagggtgccttatgggccctcctcataggttgtctctgcatacacgaacctaacc

SEQ ID NO: 652906 - DNA, 120 bp, Artificial Sequence
  ENSG00000183283_11 (sequence is synthesized)
caaatttgctttggtgccagaaaaactgagctatgtttgaacaaagatgtcgtgcaaactgtactgtgaacaacagttggtttaaaatatgaggggcaaggaggaggatgcatttcaaaa

SEQ ID NO: 652907 - DNA, 120 bp, Artificial Sequence
  ENSG00000183283_12 (sequence is synthesized)
gcttgattgatgtgttcagagctaaattaagaggagttttcagatcaaaaactggttaccattttttgtcagagtgtctgatgcggccactcattcggctccccagaattcctagactgg

SEQ ID NO: 652908 - DNA, 120 bp, Artificial Sequence
  ENSG00000183283_13 (sequence is synthesized)
gttaatagggtcatattgtgaatgtctcactacaaaatgacttgagtccagtgaaatctcattagggtttaagaatatttcagggatccttaatgttttgatttttgttttctgaaattg

SEQ ID NO: 652909 - DNA, 120 bp, Artificial Sequence
  ENSG00000183283_14 (sequence is synthesized)
gattttattttattttatcttataatttcagttcatctaaattgtgtgttctgtacatgtgatgtttgactgtaccattgactgttatggaagttcagcgttgtatgtctctctctacac

SEQ ID NO: 652910 - DNA, 120 bp, Artificial Sequence
  ENSG00000183283_15 (sequence is synthesized)
tgtggtgcacttaacttgtggaatttttatactaaaaatgtagaataaagactattttgaagatttgaataaagtgatgaagttgcattacacctcactgcaaggattctttacttagct

SEQ ID NO: 652911 - DNA, 120 bp, Artificial Sequence
  ENSG00000183283_16 (sequence is synthesized)
tgtttttagatttcttctatatatattttatttatatcccatctagaattcagctaggtgctgctgctgctctgtttcctttgatgacgctttgaaataaaggcaggagtacaagcctaa

SEQ ID NO: 652912 - DNA, 120 bp, Artificial Sequence
  ENSG00000183283_17 (sequence is synthesized)
acacggaagtagctccgaacaggaagaggacgaaaaaaataaccgtccgcgacgccgagacaaaccggacccgcaaccaccatgaacagcaaagctctatcgtccgagctttgtgcaccc

SEQ ID NO: 652913 - DNA, 120 bp, Artificial Sequence
  ENSG00000183283_18 (sequence is synthesized)
aacttggaaaggagagggaaaatgtagagatgtttcaggattgaggatgtctcagtagttcctggagtcatctgatttagtcactgttttcgtaaagatcctcttgttttcattaactag

SEQ ID NO: 652914 - DNA, 120 bp, Artificial Sequence
  ENSG00000183283_19 (sequence is synthesized)
tgtccacttccatccaaacccatgttcccccaccaaccccaatttccatggcacataatagctggagtctcctggtgcttaagctaaggacacatgcttttgatttctgacaaaactgaa

SEQ ID NO: 652915 - DNA, 120 bp, Artificial Sequence
  ENSG00000183283_20 (sequence is synthesized)
ctgcctcccaaaccagttcctgattcttaaagaaacgggaaggagggaacaggaaatggcttatcctaacaggaagtggtttatctgatcctccccctcttcctcacccactcaaccaac

SEQ ID NO: 652916 - DNA, 120 bp, Artificial Sequence
  ENSG00000183283_21 (sequence is synthesized)
cacatatatcctcgtccctacccacgtactcaagtgtaacgtccgtatgcatatctatttgcggccacctcccaacctgtcatttactggtagtgcctctgacagaagcctccgagtctt

SEQ ID NO: 652917 - DNA, 73 bp, Artificial Sequence
  ENSG00000183283_22 (sequence is synthesized)
ttcttacaagccagagtgagcccattaatggatttggtcaggctccctctggagagagatgcccttgatccag

SEQ ID NO: 652918 - DNA, 120 bp, Artificial Sequence
  ENSG00000183283_23 (sequence is synthesized)
aagtgcattatttgatgattttgtgttatttggcacaggctaaggtgcagaagatgaatttgcgttctgtgagcccaacattagctatagcagaaagtgatccaggagaatattgaaggc

SEQ ID NO: 652919 - DNA, 120 bp, Artificial Sequence
  ENSG00000183283_24 (sequence is synthesized)
cagtggaaaggcaacttgtataatcttacaaaaagtataacctgcataaggagaattaagaattagctcattaaagagatctcaaataggaatgtcataaagtaacattttgccttctct

SEQ ID NO: 652920 - DNA, 120 bp, Artificial Sequence
  ENSG00000183283_25 (sequence is synthesized)
attcaaacagccccagctcttctgcttgctagctgggtgactttgggcaaattaacatctcgaaaatctgtttcctcattcctaaaatgcgggtctgaaagtgatcatgcctgtaaagcc

SEQ ID NO: 652921 - DNA, 120 bp, Artificial Sequence
  ENSG00000183283_26 (sequence is synthesized)
atctcatatccatggttctagaagcatggtgagcacctcaatttgaataatcagtgccatgctttagctacctcttgactcactcgtttgtggcaggaaatgttcccaaattaatcagaa

SEQ ID NO: 652922 - DNA, 120 bp, Artificial Sequence
  ENSG00000183283_27 (sequence is synthesized)
gaattcagtgactaagaggatgtaatagtatatagcgcaggcactggaatcagctctgctgtgtgatcttggacaagctgcttctgttccgtttctcttatctggggcaatacctgtctg

SEQ ID NO: 652923 - DNA, 120 bp, Artificial Sequence
  ENSG00000183283_28 (sequence is synthesized)
aatagagtgactgttgggacgaaataggttagtaaatatgtactgtaaggcattagaaccttgcctggcacatagtaagtgctcaataaacgctaggtcttgttaccttggcttcccgtt

SEQ ID NO: 652924 - DNA, 120 bp, Artificial Sequence
  ENSG00000183283_29 (sequence is synthesized)
atgaacagcaaaggcaaggaccgagggtggcagaggccgtcggggggagtactgctggcccagagcgagcggattcggagcccagggtcaccaaacgccaggtttggggtgggctgcgcc

SEQ ID NO: 652925 - DNA, 120 bp, Artificial Sequence
  ENSG00000183283_30 (sequence is synthesized)
atgctccttggccggctgcagtccagggcgctgcgcctgacgccttcgtcatacccaaattacggcagcttgctgcctccaggccctttcctccgtaaactctgtggcgcagtttggagc

SEQ ID NO: 652926 - DNA, 120 bp, Artificial Sequence
  ENSG00000183283_31 (sequence is synthesized)
tgcgggctcgggtggtgggggggcttgacatgatgggcatccgcaggagcaaatagagcgctagcgcaggcattcgcgtaggccaatggagagccggcggaggcggggcgccgcgctccg

SEQ ID NO: 652927 - DNA, 120 bp, Artificial Sequence
  ENSG00000183283_32 (sequence is synthesized)
gaacccccagcggggccgaacttaactactgaattgctggagttggttcgtgggccggggcctgtgaggtctcttttccttcccttcgcaccccctcgcccttcgctgacgggatcagaa

SEQ ID NO: 652928 - DNA, 120 bp, Artificial Sequence
  ENSG00000183283_33 (sequence is synthesized)
gctgacgggatcagaacttctccccttttctgtggttgtaccagtgtgtctgtcggaacatgattcccataacgcaggaataggttgagggggtaaaaaaggaatagaaaaaaaaaaaaa

SEQ ID NO: 652929 - DNA, 120 bp, Artificial Sequence
  ENSG00000183283_34 (sequence is synthesized)
cctgggcaaaagagcgagactccgtctcagaacaaacaaaaaaccaaacctgatcccccgcttttccagtgaggatattcctcctcacccctcagccctgcacccttttcccagtctcac

SEQ ID NO: 652930 - DNA, 120 bp, Artificial Sequence
  ENSG00000183283_35 (sequence is synthesized)
tcacggttcacttccatcattcacaccctttgtttggaagtcgaccttgaatagtaatctgtaaggaaaatcagaactgctgttacccacgaagtctgggctggttgtagacaggctgtg

SEQ ID NO: 652931 - DNA, 120 bp, Artificial Sequence
  ENSG00000183283_36 (sequence is synthesized)
gagactacctagagcagaggcacccttgataagccagaacagcagcaggccagaaccccagacctgtcctgcattccggagggaacttgggcccaggtagacttaaccccttacttcggt

SEQ ID NO: 652932 - DNA, 120 bp, Artificial Sequence
  ENSG00000183283_37 (sequence is synthesized)
atgttagtaggagcagtgagcagtgcctttcttgtctcgttagaatccagcaccttccattttaagggtgcaaagacaatgcatattttcttagttccaggaatcaggccctctggggca

SEQ ID NO: 652933 - DNA, 120 bp, Artificial Sequence
  ENSG00000183283_38 (sequence is synthesized)
gactatttgcaaatccccttctgcttgctcccactaagttagctacccgatatgacctgcctcattttggtagctctgtgtagtaggcaaccttcatttttttcttgtctttcaggtcaa

SEQ ID NO: 652934 - DNA, 120 bp, Artificial Sequence
  ENSG00000183283_39 (sequence is synthesized)
ccagtttgccagatttgaactagctgggaatactcttagggtggtcctttagtccttagctaaatctgacttcacatatttactcttcacaaatgctaacatgaataatctaaaacacta

SEQ ID NO: 652935 - DNA, 120 bp, Artificial Sequence
  ENSG00000183283_40 (sequence is synthesized)
accatgaacagcaaaggcaaggaccgagggtggcagaggccgtcggggggagtactgctggcccagagcgagcggattcggagcccagggtcaccaaacgccaggtcaatatccaacaca

SEQ ID NO: 652936 - DNA, 120 bp, Artificial Sequence
  ENSG00000183287_0 (sequence is synthesized)
gaaggcggcggcggccgcggaggagcaggacgcttggtccggacggagctcggcgctgggaagaagccgggagcttccctgatggtgccgccgcctccgagccggggaggagctgccagg

SEQ ID NO: 652937 - DNA, 120 bp, Artificial Sequence
  ENSG00000183287_1 (sequence is synthesized)
ggccagctgggcaggagcctgggtccgctgctgctgctcctggcgttgggacacacgtggacctacagagaggagccggaggacggcgacagagaaatctgctcagagagcaaaatcgcg

SEQ ID NO: 652938 - DNA, 120 bp, Artificial Sequence
  ENSG00000183287_2 (sequence is synthesized)
acgactaaatacccgtgtctgaagtcttcaggcgagctcaccacatgctacaggaaaaagtgctgcaaaggatataaatttgttcttggacaatgcatcccagaagattacgacgtttgt

SEQ ID NO: 652939 - DNA, 120 bp, Artificial Sequence
  ENSG00000183287_3 (sequence is synthesized)
gccgaggctccctgtgaacagcagtgcacggacaactttggccgagtgctgtgtacttgttatccgggataccgatatgaccgggagagacaccggaagcgggagaagccatactgtctg

SEQ ID NO: 652940 - DNA, 120 bp, Artificial Sequence
  ENSG00000183287_4 (sequence is synthesized)
gatattgatgagtgtgccagcagcaatgggacgctgtgtgcccacatctgcatcaataccttgggcagctaccgctgcgagtgccgggaaggctacatccgggaagatgatgggaagaca

SEQ ID NO: 652941 - DNA, 120 bp, Artificial Sequence
  ENSG00000183287_5 (sequence is synthesized)
tgtaccaggggagacaaatatcccaatgacactggccatgagaagtctgagaacatggtgaaagccggaacttgctgtgccacatgcaaggagttctaccagatgaagcagaccgtgctg

SEQ ID NO: 652942 - DNA, 120 bp, Artificial Sequence
  ENSG00000183287_6 (sequence is synthesized)
cagctgaagcaaaagattgctctgctccccaacaatgcagctgacctgggcaagtatatcactggtgacaaggtgctggcctcaaacacctaccttccaggacctcctggcctgcctggg

SEQ ID NO: 652943 - DNA, 120 bp, Artificial Sequence
  ENSG00000183287_7 (sequence is synthesized)
ggccagggccctcccggctcaccaggaccaaagggaagcccaggcttccccggtatgccaggccctcctgggcagcccggcccacggggctcaatgggacccatgggaccatctcctgat

SEQ ID NO: 652944 - DNA, 120 bp, Artificial Sequence
  ENSG00000183287_8 (sequence is synthesized)
ctgtcccacattaagcaaggccggaggggccctgtgggtccaccaggggcaccaggaagagatggttctaagggggagagaggagcgcctgggcccagagggtctccaggaccccctggt

SEQ ID NO: 652945 - DNA, 120 bp, Artificial Sequence
  ENSG00000183287_9 (sequence is synthesized)
tctttcgacttcctgctacttatgctggctgacatccgcaatgacatcactgagctgcaggaaaaggtgttcgggcaccggactcactcttcagcagaggagttccctttacctcaggaa

SEQ ID NO: 652946 - DNA, 120 bp, Artificial Sequence
  ENSG00000183287_10 (sequence is synthesized)
tttcccagctacccagaagccatggacctgggctctggagatgaccatccaagaagaactgagacaagagacttgagagcccccagagacttctacccatagcacatcccaacaccgtca

SEQ ID NO: 652947 - DNA, 120 bp, Artificial Sequence
  ENSG00000183287_11 (sequence is synthesized)
cgccaaaggaagagaaagatcaactcacctgcagttaaaccatctaaagagaagaaagaccactggagacctagaaaacatacatttttctcttctcttctcctgacgtctctccactcc

SEQ ID NO: 652948 - DNA, 120 bp, Artificial Sequence
  ENSG00000183287_12 (sequence is synthesized)
tcttcttccaaatacgatgctattttcagagtcccctcctaggcctgcagacatgagggagtgaatgattgatttacctgcttctcactaagagtccattggggtggtttgcattgtaac

SEQ ID NO: 652949 - DNA, 120 bp, Artificial Sequence
  ENSG00000183287_13 (sequence is synthesized)
ttttcttttacatcctatttttccaggaactttggatttaagtactctcacagtgtcttaaatcataaattcttgaagttaaatttggcagagtatcaaaagggggaaaatgacaaagtg

SEQ ID NO: 652950 - DNA, 120 bp, Artificial Sequence
  ENSG00000183287_14 (sequence is synthesized)
agctctaagaaaatgtgaggctacttctaagatgtgtgttcacaatagaccataactcctctagtatcaaaattggggctcttcagttaaaaaggggtggggaggacaaacgtgtcgatg

SEQ ID NO: 652951 - DNA, 120 bp, Artificial Sequence
  ENSG00000183287_15 (sequence is synthesized)
tgctttggtggagaattttttccttgtgcttctagtagactttaaatattgtatccctttgtcaaaccttgtttcccaaattcaattaaagagaggagagaattgaatggcgtttagaga

SEQ ID NO: 652952 - DNA, 120 bp, Artificial Sequence
  ENSG00000183287_16 (sequence is synthesized)
agatagaaaagaatcacagtcatatatttactgttatatagattgccacattctaaaattcaaatacggtgcttaaggtttcatgccatgcttatctgtaagtatcctatttagggaaga

SEQ ID NO: 652953 - DNA, 120 bp, Artificial Sequence
  ENSG00000183287_17 (sequence is synthesized)
agattaaactctcttttcaaaaaaacaaagtgaaatgcctggattcacattaaaacaatgggctctcgtttgctataatattttaaagctgtttaatcaacagtggagtctgctctataa

SEQ ID NO: 652954 - DNA, 120 bp, Artificial Sequence
  ENSG00000183287_18 (sequence is synthesized)
atatagattatttgttcaataaactggctgagcttagagagaggtgcagaattcctggttctgagcaggtgcccagaaggtaccattaggtgccatgatccaggctgaaccaatatacag

SEQ ID NO: 652955 - DNA, 120 bp, Artificial Sequence
  ENSG00000183287_19 (sequence is synthesized)
tggggctgaagtctgcaaggaggttgctggcttgggctgacctcactaatgccatcagcagcggtaggtaaattttttctccttgggtattacaagtttttgtctggagccaaccaagct

SEQ ID NO: 652956 - DNA, 120 bp, Artificial Sequence
  ENSG00000183287_20 (sequence is synthesized)
tgccaccaacatattgagagtaatacactattgaaagttatcttggatggggagaaaaaaaaatagtggttttccttgtttgcaaaaacttccttcctattctcattttttcttaatttt

SEQ ID NO: 652957 - DNA, 120 bp, Artificial Sequence
  ENSG00000183287_21 (sequence is synthesized)
ctttaatttagtccaagttccagttcttttaggccttctctttgatttattttcccctgcatgtgagaagcagttcagaaaaaggtctatatctccacctcctagtgagttagagtgttt

SEQ ID NO: 652958 - DNA, 120 bp, Artificial Sequence
  ENSG00000183287_22 (sequence is synthesized)
tctcagagcacctctgggtggcaaagggaagcatgttcctgccaaggtttgctgtggattcagaagcaccaggagcaagagaccagaaggatgatctgctcctttgtaacgttgttgagg

SEQ ID NO: 652959 - DNA, 120 bp, Artificial Sequence
  ENSG00000183287_23 (sequence is synthesized)
gccctcttgtttccaatgagcagcttataggttactcacagtccactttctcactggacacacaaagtggctctttatctacctttgcgggagattttcactctcctgcaaatgatcgtt

SEQ ID NO: 652960 - DNA, 120 bp, Artificial Sequence
  ENSG00000183287_24 (sequence is synthesized)
ctcacactcatattagctcatgttggaatttcccatcctgccatgtcctttcccatttctttttggcttttttgcctccaccttttagcccacatcatttaactccactactgtgaaagc

SEQ ID NO: 652961 - DNA, 78 bp, Artificial Sequence
  ENSG00000183287_25 (sequence is synthesized)
ccttttagcccacatcatttaactccactactgtgaaagcttgcttaaagaaaatccctcttggccgggtgtggtagc

SEQ ID NO: 652962 - DNA, 82 bp, Artificial Sequence
  ENSG00000183287_26 (sequence is synthesized)
taacctgcggggggagcctagattgcgctactgcactccagcctaggcaacagagggagactctgtctcattaaaaaaaaaa

SEQ ID NO: 652963 - DNA, 69 bp, Artificial Sequence
  ENSG00000183287_27 (sequence is synthesized)
tcccttttgttgtgtttgaatgccacctttcagtcttcttccttaagaatgttaggaaggggctttgca

SEQ ID NO: 652964 - DNA, 120 bp, Artificial Sequence
  ENSG00000183287_28 (sequence is synthesized)
tcagtcttcttccttaagaatgttaggaaggggctttgcaaacctctagtggcaacagtcttccttcccttcttcctaccacgttggaaatgcaggactcatgtcagtcagcatgtgacc

SEQ ID NO: 652965 - DNA, 120 bp, Artificial Sequence
  ENSG00000183287_29 (sequence is synthesized)
gagtctttcatgaacactttgctcctctatgtctcatttatgcaaaattcctggtgactctccactaacatttttaaagtgaaagcaaactttcactttaaaaaaagtgagcgagaggat

SEQ ID NO: 652966 - DNA, 120 bp, Artificial Sequence
  ENSG00000183287_30 (sequence is synthesized)
cccttgagcccaggagttcaaggccagtctgggcaacatagcaagaccccatccctaaaaaaaaaaaaataagttttattaaatgtggcactttcccctagaagggcagtaaccccagga

SEQ ID NO: 652967 - DNA, 120 bp, Artificial Sequence
  ENSG00000183287_31 (sequence is synthesized)
accagtctgcctcttttcgaataaaggagactttttaaaaagaaaaaatttctttttagggtggggtgctctttatctagcatctttccttcctccttctctctgcaaaattcaacattc

SEQ ID NO: 652968 - DNA, 120 bp, Artificial Sequence
  ENSG00000183287_32 (sequence is synthesized)
atgacagagggccacaccaaccacgggtttatagagagaggaactgaacagctgttgattcccatctggaatatatttaatgtttgcctgcttgtggagcatggtatttaaagggtgtgg

SEQ ID NO: 652969 - DNA, 120 bp, Artificial Sequence
  ENSG00000183287_33 (sequence is synthesized)
atggatgaatgtttaaaaaaaaacacacaaaactatgcacaagctgtatgagagatggctaggtccatctatgattttttttaaaagaagaattttaataccttttctttgacagtgaac

SEQ ID NO: 652970 - DNA, 120 bp, Artificial Sequence
  ENSG00000183287_34 (sequence is synthesized)
tgtatttagaaatatgatctttattgtgaaatgctcataaaatgcaaccaaactgcatgtttggccataggctagaataatatattaaaagaattaatggaaagtagtattgtctgggtt

SEQ ID NO: 652971 - DNA, 120 bp, Artificial Sequence
  ENSG00000183287_35 (sequence is synthesized)
tcatgaaactattccagataatattctccagcaaaacttatggtaacctgtattttataatgtcaatctgctggaccaagttaatttagaaaataatttttaatcctcagattttcaaaa

SEQ ID NO: 652972 - DNA, 120 bp, Artificial Sequence
  ENSG00000183287_36 (sequence is synthesized)
cttggactactgcaagactgatatgtactttttatgcccaaatcatatttttcaaagataggacatcataaggcatcattatttctaatgtatcttttaactagatagaaaaagctttac

SEQ ID NO: 652973 - DNA, 120 bp, Artificial Sequence
  ENSG00000183287_37 (sequence is synthesized)
tgtctaaacaggacttctgctcaaaacctaatgggaaagctatttctggggtaagatttgtaacagtgcttctaggtcatttcatgttttatagggaaaaagatctttgtacacctcctc

SEQ ID NO: 652974 - DNA, 120 bp, Artificial Sequence
  ENSG00000183287_38 (sequence is synthesized)
aacctgttagtagaaatgttgacttcgattttttgcaccctcttcacaggacctcataagttgcctctgttcttggaaagcaatgggaataaaaatatgctgttgaaaatagtgcatggg

SEQ ID NO: 652975 - DNA, 87 bp, Artificial Sequence
  ENSG00000183287_39 (sequence is synthesized)
ttgggaggctgaggcgggcgccaacacgtggtgaaaccccatctctactaaaataaataaaaaaaaaaattagccaggcgtggtggt

SEQ ID NO: 652976 - DNA, 67 bp, Artificial Sequence
  ENSG00000183287_40 (sequence is synthesized)
ccatcctgaccaacacgtggtgaaaccccatctctactaaaataaatgggaagctgagacacaagaa

SEQ ID NO: 652977 - DNA, 120 bp, Artificial Sequence
  ENSG00000183287_41 (sequence is synthesized)
ttgcgccactgcactccagcctggctacagagtgagactccgtctcgaaaaaagaaaatagtacatggagggcatgcattttagtttaggaaacccccctcccttcccagttccagaggg

SEQ ID NO: 652978 - DNA, 120 bp, Artificial Sequence
  ENSG00000183287_42 (sequence is synthesized)
agaaattataagctatactgtgccaaaagtgagtggggctgcagagagaatggtgccttttctcaccttctgagttaatgcccgacatctgccattggattcattgaccaaaggaagtca

SEQ ID NO: 652979 - DNA, 120 bp, Artificial Sequence
  ENSG00000183287_43 (sequence is synthesized)
tttctactgtataaactcaggagtatcatagcccaacaagtaaataataaatgttcattggttttggaaggaaggaaaggtgagtattaccccaccaaataccagcgaagagcaccctgg

SEQ ID NO: 652980 - DNA, 120 bp, Artificial Sequence
  ENSG00000183287_44 (sequence is synthesized)
ctttggccatctttccaaggttcataattgctgtgggcctggtgagccctgttcccaggtatgcaagggagggcttctccaggccagacatttctgtaggttttcaggtagcaactcccc

SEQ ID NO: 652981 - DNA, 120 bp, Artificial Sequence
  ENSG00000183287_45 (sequence is synthesized)
catcatattttgggtgtcattccccactctctctccccacttctcagcctgtgccccagaaacaaccacagcagcctcattctgcagacttaacatctgtcaaataaccttcctgaaaag

SEQ ID NO: 652982 - DNA, 120 bp, Artificial Sequence
  ENSG00000183287_46 (sequence is synthesized)
gaaagttattggaggaatccaggccaaacaacaagtagaatagagccatctaaagttattaataatgagttcagggaaatagatgaattttttcctggcatagtcaatatttatatctca

SEQ ID NO: 652983 - DNA, 120 bp, Artificial Sequence
  ENSG00000183287_47 (sequence is synthesized)
caacaagtcaaaaataattttccatttggaaaacaaaacacaccatgactgtaattgttaaggcatataatcatgaacttcacatgctccctcaacaaacgttactgctctagggaaatc

SEQ ID NO: 652984 - DNA, 120 bp, Artificial Sequence
  ENSG00000183287_48 (sequence is synthesized)
atagaaaaggaccctcttactccccaggggatcaaagcaagtccccttaggaatttcatgtgtgccgtgggtctgtttttatttcacagtgactagtcatatactggagtagctctgttg

SEQ ID NO: 652985 - DNA, 120 bp, Artificial Sequence
  ENSG00000183287_49 (sequence is synthesized)
ttcattatttgtaacaggtccatgtaacagtcaagttagcattcaagcaattatggatgtgatactatgatgtacttttgttatgattgtatatgcttaataacaaagttatttttctta

SEQ ID NO: 652986 - DNA, 120 bp, Artificial Sequence
  ENSG00000183287_50 (sequence is synthesized)
gagtccagcaagtctgtcaatcggacgtgaacgtcccgacgagacaacttgaacctcagggccctcgcgccagccggacaccgcaggtggtgcaaacgcccctgctctccggcgccccct

SEQ ID NO: 652987 - DNA, 120 bp, Artificial Sequence
  ENSG00000183287_51 (sequence is synthesized)
gatcagggtcttcctggcatgtctaaataggaacagctgagcccagcttctagcagggcccctctccctctgtcctcccctcttccctgaccctggggcatgctggcaggacctgagagc

SEQ ID NO: 652988 - DNA, 120 bp, Artificial Sequence
  ENSG00000183287_52 (sequence is synthesized)
tgtaaaatcacccacagttgagccctcgcatgtcccgctgtcagctactctgtccctgggaccgcccttcccgatgctgtctctctgggtctggcttgcatccagcctcccagacaggac

SEQ ID NO: 652989 - DNA, 120 bp, Artificial Sequence
  ENSG00000183287_53 (sequence is synthesized)
ctttgcctgctgccatctatgtaagacgtgacttgttcctcctcgccttttgccgtgattatgaagcctccccagccatgtggaactgaaaaagtgctgcaaaggatataaatttgttct

SEQ ID NO: 652990 - DNA, 120 bp, Artificial Sequence
  ENSG00000183291_0 (sequence is synthesized)
agaaacctgcggaaaatggtagcgatggcggctgggccgagtgggtgtctggtgccggcgtttgggctacggttgttgttggcgactgtgcttcaagcggtgtctgcttttggggcagag

SEQ ID NO: 652991 - DNA, 120 bp, Artificial Sequence
  ENSG00000183291_1 (sequence is synthesized)
ttttcatcggaggcatgcagagagttaggcttttctagcaacttgctttgcagctcttgtgatcttctcggacagttcaacctgcttcagctggatcctgattgcagaggatgctgtcag

SEQ ID NO: 652992 - DNA, 120 bp, Artificial Sequence
  ENSG00000183291_2 (sequence is synthesized)
gaggaagcacaatttgaaaccaaaaagctgtatgcaggagctattcttgaagtttgtggatgaaaattgggaaggttccctcaagtccaagcttttgttaggagtgataaacccaaactg

SEQ ID NO: 652993 - DNA, 120 bp, Artificial Sequence
  ENSG00000183291_3 (sequence is synthesized)
ttcagaggactgcaaatcaagtatgtccgtggttcagaccctgtattaaagcttttggacgacaatgggaacattgctgaagaactgagcattctcaaatggaacacagacagtgtagaa

SEQ ID NO: 652994 - DNA, 120 bp, Artificial Sequence
  ENSG00000183291_4 (sequence is synthesized)
gaattcctgagtgaaaagttggaacgcatataaatcttgcttaaattttgtcctatccttttgttaccttatcaaatgaaatattacagcacctagaaaataatttagttttgcttgctt

SEQ ID NO: 652995 - DNA, 120 bp, Artificial Sequence
  ENSG00000183291_5 (sequence is synthesized)
ccattgatcagtcttttacttgaggcattaaatatctaattaaatcgtgaaatggcagtatagtccatgatatctaaggagttggcaagcttaacaaaacccattttttataaatgtcca

SEQ ID NO: 652996 - DNA, 120 bp, Artificial Sequence
  ENSG00000183291_6 (sequence is synthesized)
acagatttctaaattagagaggttaacaagacagatgattactatgcctcatgtgctgtgtgctctttgaaaggaatgacagcagactacaaagcaaataagatatactgagcctcaaca

SEQ ID NO: 652997 - DNA, 120 bp, Artificial Sequence
  ENSG00000183291_7 (sequence is synthesized)
gattgcctgctcctcagagtctctcctatttttgtattacccagctttctttttaatacaaatgttatttatagtttacaatgaatgcactgcataaaaactttgtagcttcattattgt

SEQ ID NO: 652998 - DNA, 120 bp, Artificial Sequence
  ENSG00000183291_8 (sequence is synthesized)
aaaacatattcaagatcctacagtaagagtgaaacattcacaaagatttgcgttaatgaagactacacagaaaacctttctagggatttgtgtggatcagatacatacttggcaaatttt

SEQ ID NO: 652999 - DNA, 120 bp, Artificial Sequence
  ENSG00000183291_9 (sequence is synthesized)
tgagttttacattcttacagaaaagtccatttaaaagtgatcatttgtaagaccaaaatataaataaaaagtttcaaaaatctatctgaatttggaattcttctggtttgttctttcatg

SEQ ID NO: 653000 - DNA, 120 bp, Artificial Sequence
  ENSG00000183291_10 (sequence is synthesized)
tttaaaaatgatgtttttcaatgcatttttttcatgtaagccctttttttagccaaaatgtaaaaatggctgtaatatttaaaacttataacatcttattgttggtaatagtgctttata

SEQ ID NO: 653001 - DNA, 120 bp, Artificial Sequence
  ENSG00000183291_11 (sequence is synthesized)
atcttattgttggtaatagtgctttatatttgtctgattttatttttcaaagttttttcatttatgaacacattttcattggtatattatttaaggaatatctcttgatatagaattttt

SEQ ID NO: 653002 - DNA, 120 bp, Artificial Sequence
  ENSG00000183291_12 (sequence is synthesized)
ggagaagaaggcggggctaaaactggcgaaggcgtggcttcttggctgcttgacgaagtgtcgtgaataaaagaaaggagaccgcagaagtaaagaagtggggagtttaggcaagtgcct

SEQ ID NO: 653003 - DNA, 120 bp, Artificial Sequence
  ENSG00000183291_13 (sequence is synthesized)
gatttgggtaatcgaaagcacccagtgattgtatttgatgacttttaagctttcatatgccgttatttaatacctgtcacttccaaatgagagatgtaagggcaacggccgttagcgttc

SEQ ID NO: 653004 - DNA, 120 bp, Artificial Sequence
  ENSG00000183291_14 (sequence is synthesized)
ggagaagaaggcggggctaaaactggcgaaggcgtggcttcttggctgcttgacgaagtgtcgtgaataaaagaaaggagaccgcagaagtaaagaagtggggagtttaggtgtctgctt

SEQ ID NO: 653005 - DNA, 120 bp, Artificial Sequence
  ENSG00000183291_15 (sequence is synthesized)
ttgggctacggttgttgttggcgactgtgcttcaagcggtgagtgtagatcaccttcgcagctgccacagggagagtaggagtgattgcagctgagaaagacgcaacattcggtcctggt

SEQ ID NO: 653006 - DNA, 120 bp, Artificial Sequence
  ENSG00000183291_16 (sequence is synthesized)
tgaaaagggtggggaggactgcgcttccttaatgactgctgcggccagaatgcaacgtggcttaatttctcggttgatccttctccttccccgccttgggtttctagcagcagttttctc

SEQ ID NO: 653007 - DNA, 120 bp, Artificial Sequence
  ENSG00000183303_0 (sequence is synthesized)
gggttcatttagtcagcagctacttcgtctcatgaattccctgaaggacgggaatcacaccgctctgacggggttcatcctattgggcttaacagatgatccaatccttcgagtcatcct

SEQ ID NO: 653008 - DNA, 120 bp, Artificial Sequence
  ENSG00000183303_1 (sequence is synthesized)
cttcatgatcatcctatctggtaatctcagcataattattcttatcagaatttcttctcagctccatcatcctatgtatttctttctgagccacttggcttttgctgacatggcctattc

SEQ ID NO: 653009 - DNA, 120 bp, Artificial Sequence
  ENSG00000183303_2 (sequence is synthesized)
atcttctgtcacacccaacatgcttgtaaacttcctggtggagagaaatacagtctcctaccttggatgtgccatccagcttggttcagcggctttctttgcaacagtcgaatgcgtcct

SEQ ID NO: 653010 - DNA, 120 bp, Artificial Sequence
  ENSG00000183303_3 (sequence is synthesized)
tctggctgccatggcctatgaccgctttgtggcaatttgcagtccactgctttattcaaccaaaatgtccacacaagtcagtgtccagctactcttagtagtttacatagctggttttct

SEQ ID NO: 653011 - DNA, 120 bp, Artificial Sequence
  ENSG00000183303_4 (sequence is synthesized)
gatatcagtgtctccacagttgttctctcattttcttctggatccatcattgtggtcactgtgtgtgtcatagccgtctgctacatctatatcctcatcaccatcctgaagatgcgctcc

SEQ ID NO: 653012 - DNA, 120 bp, Artificial Sequence
  ENSG00000183303_5 (sequence is synthesized)
actgaggggcaccacaaggccttctccacctgcacttcccacctcactgtggttaccctgttctatgggaccattaccttcatttatgtgatgcccaattttagctactcaactgaccag

SEQ ID NO: 653013 - DNA, 120 bp, Artificial Sequence
  ENSG00000183303_6 (sequence is synthesized)
aacaaggtggtgtctgtgttgtacacagtggtgattcccatgttgaaccccctgatctacagcctcaggaacaaggagattaagggggctctgaagagagagcttgttagaaaaatactt

SEQ ID NO: 653014 - DNA, 120 bp, Artificial Sequence
  ENSG00000183303_7 (sequence is synthesized)
tctcatgatgcttgttattttagtagaacttcaaataatgatattacatagaaccctatctcttctcttgagaatactcaatgcacgtgtagatacagatttagtgtttgctttcttgac

SEQ ID NO: 653015 - DNA, 120 bp, Artificial Sequence
  ENSG00000183304_0 (sequence is synthesized)
catttttctaagagagcgtcgtggtgccagtgcctgcaggttctgtgaggaagcggcatcaggggtccctcaggttcagggatcgcctctaacttcccaggacagccaaccatggagccc

SEQ ID NO: 653016 - DNA, 120 bp, Artificial Sequence
  ENSG00000183304_1 (sequence is synthesized)
gtgggcaggaagcgcagcaggaaggctgccaaagctcagttggaagctcaagttacggccgcccagggggccacgaaagaaggttcagggatcgcctctaacttcccaggacagccaacc

SEQ ID NO: 653017 - DNA, 120 bp, Artificial Sequence
  ENSG00000183304_2 (sequence is synthesized)
atggagcccgtgggcaggaagcgcagcaggaaggctgccaaagctcagttggaagctcaagttagggccgccccggcgaagaagcacacaggaaaggatccagtccgtgatgaatgtgag

SEQ ID NO: 653018 - DNA, 120 bp, Artificial Sequence
  ENSG00000183304_3 (sequence is synthesized)
gaaagaaacccttttacagaaacaagggaggaagatgtaactgatgagcatggggaaagagaaccttttgctgaaaaagatgaacacacggggattcataccatgaagctagaacatatt

SEQ ID NO: 653019 - DNA, 120 bp, Artificial Sequence
  ENSG00000183304_4 (sequence is synthesized)
gcagctgacattaaaaagggccttgctgcaaaaagagaaatgataaaaatagataaagcagcttacaggaaaaccaagaacacaattgaacgtgctttgaaaaaaaaacaactaaaaagg

SEQ ID NO: 653020 - DNA, 120 bp, Artificial Sequence
  ENSG00000183304_5 (sequence is synthesized)
cagaaacgtgattatagacatactcggaagttgctgaatgtccttaaagaatacatcgcagagaagcagaaagatgatgaagcagaagaagcagaagccgcagcagcagcagcagaagcc

SEQ ID NO: 653021 - DNA, 120 bp, Artificial Sequence
  ENSG00000183304_6 (sequence is synthesized)
aggaggagaaagaagaggaggaagaagaaggagaagaagaaggaggaggagaagaaggagaagaaggaggaggaggaggagaaggagaagaaacagaagaagaggaagaggaagaagaag

SEQ ID NO: 653022 - DNA, 120 bp, Artificial Sequence
  ENSG00000183304_7 (sequence is synthesized)
aagaggaagaggaagaacaaattaaagcatttcaagaaaaacagaagaggtggcaacaacctacaggtgttaggagctggaggctgagagagatgaagccgctacttgagcaattactaa

SEQ ID NO: 653023 - DNA, 120 bp, Artificial Sequence
  ENSG00000183304_8 (sequence is synthesized)
aggctgccaaggacactaaagacaattattgcatcatttcttccagtgaagaaagtgaacttgataactagccgtgtttttaaaaagaatcgtgtcagaactcttttggaagagttggca

SEQ ID NO: 653024 - DNA, 120 bp, Artificial Sequence
  ENSG00000183304_9 (sequence is synthesized)
cttcattgtctcttcaacctctgttattctgatgactgaagaaagaacttgaacctatgttatatgatacgagcacaacttgagctacagtaaactacatgacagtgttttgataattgt

SEQ ID NO: 653025 - DNA, 120 bp, Artificial Sequence
  ENSG00000183304_10 (sequence is synthesized)
tgtataaatcggtatagctcctctgtcacttgtctgttaaatgccagacctcgtttctatgatctgttgaatgaatcctagacacttctgtgagaaggcagggattgcacagttatgtac

SEQ ID NO: 653026 - DNA, 120 bp, Artificial Sequence
  ENSG00000183304_11 (sequence is synthesized)
atggtcaattaaattttaacattaaagataatttagatttcagttcacctctgtggatctgtatcagtttcaaaaacgtagaaagcacgggcatagaaaagtacatttttctctaataaa

SEQ ID NO: 653027 - DNA, 120 bp, Artificial Sequence
  ENSG00000183304_12 (sequence is synthesized)
gaggaagcggcatcaggggtccctcaggtgaagcgctcgcggtggggaggcaggaagtcgagcatgcggccctctcgcaaccagggtgtgaagcgcaggttcagggatcgcctctaactt

SEQ ID NO: 653028 - DNA, 120 bp, Artificial Sequence
  ENSG00000183305_0 (sequence is synthesized)
ttgcgcattggaggtcagaggacagcgagattctcgccctgagcaacggcctgacgtcggcggagggaagcaggcgcaggctccgtgaggaggcaagatctcagggagttgatgaccttg

SEQ ID NO: 653029 - DNA, 120 bp, Artificial Sequence
  ENSG00000183305_1 (sequence is synthesized)
ttttcagaaggtgactcaggtcaacacaggggcccccatctggtcgacagatgcagtggttctaggatctgccaagcatccaggtggagagcctgaggaatcaggagctccaggaaccag

SEQ ID NO: 653030 - DNA, 120 bp, Artificial Sequence
  ENSG00000183305_2 (sequence is synthesized)
gcagtgaggccttggtctgagtcagtgtcctcaggtcacagagcagaggggacgcagacagtgccaacactgaaggttctgagggggacaggctgacaagtaggacccgaggcactggag

SEQ ID NO: 653031 - DNA, 120 bp, Artificial Sequence
  ENSG00000183305_3 (sequence is synthesized)
gagcattgaaggagaagatctgcctgtgggtcttcattgcccagctcctgcccgcactcctgcctgctgccctgaccagagtcatcatgcctcttgagcagaggagtcagcactgcaagc

SEQ ID NO: 653032 - DNA, 120 bp, Artificial Sequence
  ENSG00000183305_4 (sequence is synthesized)
ctgaagaaggccttgaggcccgaggagaggccctgggcctggtgggtgcgcaggctcctgctactgaggagcagcagaccgcttcttcctcttctactctagtggaagttaccctggggg

SEQ ID NO: 653033 - DNA, 120 bp, Artificial Sequence
  ENSG00000183305_5 (sequence is synthesized)
aggtgcctgctgccgactcaccgagtcctccccacagtcctcagggagcctccagcttctcgactaccatcaactacactctttggagacaatccgatgagggctccagcaaccaagaag

SEQ ID NO: 653034 - DNA, 120 bp, Artificial Sequence
  ENSG00000183305_6 (sequence is synthesized)
aggaggggccaagaatgtttcccgacctggagtccgagttccaagcagcaatcagtaggaagatggttgagttggttcattttctgctcctcaagtatcgagccagggagccggtcacaa

SEQ ID NO: 653035 - DNA, 120 bp, Artificial Sequence
  ENSG00000183305_7 (sequence is synthesized)
aggcagaaatgctggagagtgtcctcagaaattgccaggacttctttcccgtgatcttcagcaaagcctccgagtacttgcagctggtctttggcatcgaggtggtggaagtggtcccca

SEQ ID NO: 653036 - DNA, 120 bp, Artificial Sequence
  ENSG00000183305_8 (sequence is synthesized)
tgcctgggcctctcctacgatggcctgctgggcgacaatcaggtcatgcccaagacaggcctcctgataatcgtcctggccataatcgcaatagagggcgactgtgcccctgaggagaaa

SEQ ID NO: 653037 - DNA, 120 bp, Artificial Sequence
  ENSG00000183305_9 (sequence is synthesized)
atctgggaggagctgagtatgttggaggtgtttgaggggagggaggacagtgtcttcgcacatcccaggaagctgctcatgcaagatctggtgcaggaaaactacctggagtaccggcag

SEQ ID NO: 653038 - DNA, 120 bp, Artificial Sequence
  ENSG00000183305_10 (sequence is synthesized)
gtgcccggcagtgatcctgcatgctacgagttcctgtggggtccaagggccctcattgaaaccagctatgtgaaagtcctgcaccatacactaaagatcggtggagaacctcacatttcc

SEQ ID NO: 653039 - DNA, 120 bp, Artificial Sequence
  ENSG00000183305_11 (sequence is synthesized)
tacccacccctgcatgaacgggctttgagagagggagaagagtgagtctcagcacatgttgcagccagggccagtgggagggggtctgggccagtgcaccttccagggccccatccatta

SEQ ID NO: 653040 - DNA, 120 bp, Artificial Sequence
  ENSG00000183305_12 (sequence is synthesized)
gcttccactgcctcgtgtgatatgaggcccattcctgcctctttgaagagagcagtcagcattcttagcagtgagtttctgttctgttggatgactttgagatttatctttgtttcctgt

SEQ ID NO: 653041 - DNA, 120 bp, Artificial Sequence
  ENSG00000183305_13 (sequence is synthesized)
tggaattgttcaaatgttccttttaacaaatggttggatgaacttcagcatccaagtttatgaatgacagtagtcacacatagtgctgtttatatagtttaggggtaagagtcctgtttt

SEQ ID NO: 653042 - DNA, 120 bp, Artificial Sequence
  ENSG00000183305_14 (sequence is synthesized)
ttattcagattgggaaatccattccattttgtgagttgtcacataataacagcagtggaatatgtatttgcctatattgtgaacgaattagcagtaaaatacatgatacaaggaactcaa

SEQ ID NO: 653043 - DNA, 120 bp, Artificial Sequence
  ENSG00000183305_15 (sequence is synthesized)
aagatagttaattcttgccttatacctcagtctattatgtaaaattaaaaatatgtgtatgtttttgcttctttgagaatgcaaaagaaattaaatctgaataaataattcttcctgttc

SEQ ID NO: 653044 - DNA, 120 bp, Artificial Sequence
  ENSG00000183305_16 (sequence is synthesized)
cagaggacagcgagattctcgccctgagcaacggcctgacgtcggcggagggaagcaggcgcaggctccgtgaggaggcaaggttctgagggggacaggctgacaagtaggacccgaggc

SEQ ID NO: 653045 - DNA, 120 bp, Artificial Sequence
  ENSG00000183305_17 (sequence is synthesized)
aggtaagacgccgagggaggactgaggcgggcctcaccccagacagagggcccccaataatccagcgctgcctctgctgccgggcctggaccaccctgcaggggaagacttctcaggctg

SEQ ID NO: 653046 - DNA, 120 bp, Artificial Sequence
  ENSG00000183305_18 (sequence is synthesized)
ggagggaagcaggcgcaggctccgtgaggaggcaagggaactctggcgtaagagctttgtgtgaccagggcagggctggttagaagtgctcagggcccagactcagccaggaatcaaggt

SEQ ID NO: 653047 - DNA, 120 bp, Artificial Sequence
  ENSG00000183305_19 (sequence is synthesized)
caggaccccaagaggggactgagggcaacccaccccctaccctcactaccaatcccatcccccaacaccaaccccacccccatccctcaaacaccaaccccacccccaaaccccattccc

SEQ ID NO: 653048 - DNA, 120 bp, Artificial Sequence
  ENSG00000183305_20 (sequence is synthesized)
gcaacggcctgacgtcggcggagggaagcaggcgcaggctccgtgaggaggcaagaatccgggctttgcccctgcaatcaacccacggaagctccgggaatggcggccaagcacgcggat

SEQ ID NO: 653049 - DNA, 120 bp, Artificial Sequence
  ENSG00000183305_21 (sequence is synthesized)
aacggcctgacgtcggcggagggaagcaggcgcaggctccgtgaggaggcaagggaactctggcgtaagagctttgtgtgaccagggcagggctggttagaagtgctcagggcccagact

SEQ ID NO: 653050 - DNA, 120 bp, Artificial Sequence
  ENSG00000183307_0 (sequence is synthesized)
gtcttcaccgcggtccgctcggttcaccgcctgccccctctccctgccgcccggcccggctcgcccagtccagtggctccagtccggatctcgccgccgcccggcccaggtgcgagtccc

SEQ ID NO: 653051 - DNA, 120 bp, Artificial Sequence
  ENSG00000183307_1 (sequence is synthesized)
ctcggccgcctagcccgcctcgcccgcccggggttggcggggagggaacagctgggcggccccagagcccctcggaggacaatgcgcccggcgctcggccaccctcgctcggtctcctcc

SEQ ID NO: 653052 - DNA, 120 bp, Artificial Sequence
  ENSG00000183307_2 (sequence is synthesized)
ggacaatgcgcccggcgctcggccaccctcgctcggtctcctccgcgtccggttccttcccgccgcccccggcagccgcccggctgcagcccctcttcctccgcgggggctccttccgcg

SEQ ID NO: 653053 - DNA, 120 bp, Artificial Sequence
  ENSG00000183307_3 (sequence is synthesized)
cgacagcagcaccagcaccagcaccagccgcgggggaggcggcggcagacgcggcgggggcggcggctccccgagcagcagcacgggcgccgagcgcgaggacgacgacgagagcctcag

SEQ ID NO: 653054 - DNA, 120 bp, Artificial Sequence
  ENSG00000183307_4 (sequence is synthesized)
cgtcagcaagccgctggtgcccaacgccgcgctcctggggccgccggctcaggtgggcgcccccgccggccccgcgcctgtcgccttctcctcctcagcggccacctcctcctccacctc

SEQ ID NO: 653055 - DNA, 120 bp, Artificial Sequence
  ENSG00000183307_5 (sequence is synthesized)
cttctcctcctcagcggccacctcctcctccacctccacgcccacctcctcctgcagcatgacagccgcggacttcggcgggggcgccgcggccggggccgtcgggggccccgggagccg

SEQ ID NO: 653056 - DNA, 120 bp, Artificial Sequence
  ENSG00000183307_6 (sequence is synthesized)
ccgtgttgctgctgctgcggctgcccagaccgccccggccgcagaggtcggcgccgcggctgcgcccccagtcccaggtgccgctggggctaccaggcgctgtccgtggtgctgctgctg

SEQ ID NO: 653057 - DNA, 120 bp, Artificial Sequence
  ENSG00000183307_7 (sequence is synthesized)
tgtccgtggtgctgctgctggcgcagggcggcctgctggacctgtacctcatcgccgtcaccgacctgtactggtgctcctggatcgccactgacctggtggtggtggtgggctgggcca

SEQ ID NO: 653058 - DNA, 120 bp, Artificial Sequence
  ENSG00000183307_8 (sequence is synthesized)
tcttcttcgccaagaacagccggggccgtcggggcggcgcagccagcggcgcgcacaaccaccacctgcaccaccaccacgccgcgccgcccctgcatctgcccgccccctcggccgcta

SEQ ID NO: 653059 - DNA, 120 bp, Artificial Sequence
  ENSG00000183307_9 (sequence is synthesized)
ggagcccgcgggggcgccggcggcgcggggggcggcctgggggcggccgcggcagcgggcgagttcgccttcgcctacctggcctggcttatctactccatcgccttcactcccaaggtg

SEQ ID NO: 653060 - DNA, 120 bp, Artificial Sequence
  ENSG00000183307_10 (sequence is synthesized)
tcgccttcactcccaaggtggtgctgatcctgggcacgtccatcctagacctcatcgagctacgcgcgcccttcggcaccacgggcttccgtctcaccatggcgctgtcggtgcccctgc

SEQ ID NO: 653061 - DNA, 120 bp, Artificial Sequence
  ENSG00000183307_11 (sequence is synthesized)
tctacagcttggtgcgggccatcagcgaggcgggcgcgcccccgggatcggcaggacccctgctgctgcagccccagcggcaccgcgcggccggatgcttcctgggcacgtgcttggacc

SEQ ID NO: 653062 - DNA, 120 bp, Artificial Sequence
  ENSG00000183307_12 (sequence is synthesized)
tgctcgacagcttcacgctggtggagctgatgctggagggccgcgtgccgctgcccgcgcacctgcgctacctgcttatcgccgtctacttcctcaccctcgcctcgccggtgctctggc

SEQ ID NO: 653063 - DNA, 120 bp, Artificial Sequence
  ENSG00000183307_13 (sequence is synthesized)
tctacgagctcaacgccgcggccgcagcggctgcatcctggggccaggcctccgggcctggcagctgcagccgccttctgcgcctgctgggcggctgcctggtggacgtgcccttgctgg

SEQ ID NO: 653064 - DNA, 120 bp, Artificial Sequence
  ENSG00000183307_14 (sequence is synthesized)
cgctgcgctgcctcctggtggtcagctaccagcagcccctctccatcttcatgctcaagaacctcttcttcctcggctgccggggcctggaggccctggagggctgctgggaccggggca

SEQ ID NO: 653065 - DNA, 120 bp, Artificial Sequence
  ENSG00000183307_15 (sequence is synthesized)
atcgggcctccccgagtcgggccagagggggctacggtgctccgccctccgcccctccaccacctccgccaccacctcagggaggctcccagctgggccactgcatctcggagaacgagg

SEQ ID NO: 653066 - DNA, 120 bp, Artificial Sequence
  ENSG00000183307_16 (sequence is synthesized)
ggggtgctcatggctatgtcaacaccctggctgtggcctctcagaattgagggtgaagggcacgggtccttgtttttgggttgagagtccccaacccccttgtcttctaccttctgtcac

SEQ ID NO: 653067 - DNA, 120 bp, Artificial Sequence
  ENSG00000183307_17 (sequence is synthesized)
ctagatttgatcagggtctatttggaagaggtaacccttttcagggctaagggccagggtgttcttctgcaccctggggtgaggacggcttggagggagaccagcagttaacggtgaggg

SEQ ID NO: 653068 - DNA, 120 bp, Artificial Sequence
  ENSG00000183307_18 (sequence is synthesized)
aggtaggtgcacttaccctctcctctcttctcctatcctaccccaatcctgacctccaaggggctggtacctctgcttcttgctttgcccacctccactctaattcccatccattaggag

SEQ ID NO: 653069 - DNA, 120 bp, Artificial Sequence
  ENSG00000183307_19 (sequence is synthesized)
gagaggggtgctgggccttggaccttctcccttgcttagaagtgccagcctcttttaggctgtggttagtggccattgtcccatgccttgaaattgacccagaacccactttccactgat

SEQ ID NO: 653070 - DNA, 120 bp, Artificial Sequence
  ENSG00000183307_20 (sequence is synthesized)
gtgtctcttggatttcttccaggtgatagatacaaagtgtatgtctctgtgtgtgtagtgttgttttctcgtgtccaccctgtggccctttgcaatgggtaggagatctggggaggccct

SEQ ID NO: 653071 - DNA, 120 bp, Artificial Sequence
  ENSG00000183307_21 (sequence is synthesized)
accctcctcttttctgcctggatttgtgaccatgaattcccaggaagagctgggcccctgggagctgcccaggtactccccttgaagggagaatctcacccaggatcttcctcaatactg

SEQ ID NO: 653072 - DNA, 120 bp, Artificial Sequence
  ENSG00000183307_22 (sequence is synthesized)
ctcctctcttctcagctcagggagaggaggggatccattctctaaggaccaaactgcaccctttcttgggtgagtgagcatttctacctccgtgctttcaacttttgttgcatcatgcac

SEQ ID NO: 653073 - DNA, 120 bp, Artificial Sequence
  ENSG00000183307_23 (sequence is synthesized)
tgatgctgcttgcaaaaaatgaagacaaaatactcagaagttgcatttgccatggccactggctccagctggggtttggtgccagtgttattacagggtctgcggagtatcagccattgg

SEQ ID NO: 653074 - DNA, 120 bp, Artificial Sequence
  ENSG00000183307_24 (sequence is synthesized)
cttggcctctctctgttcctccctctgcacctagaactcttatccttcctgtggtttggtgccgactgggtcggatctgggcttagagtaatagctttggtgggtttcctggatggatgt

SEQ ID NO: 653075 - DNA, 120 bp, Artificial Sequence
  ENSG00000183307_25 (sequence is synthesized)
gaagttgggcctcccatgggcccaagggagtaggaagccccattccccacctgtccttcctctaggaagtgtagatcagaaagtgaggtggtgacctcccacctctggtctggttaagag

SEQ ID NO: 653076 - DNA, 120 bp, Artificial Sequence
  ENSG00000183307_26 (sequence is synthesized)
tctcactagggccaaggcaggctgcagaactttccctcttcctctcattgagggtgatgacaagagacatccggggactgtgcacttacagtcggtgtggaatgtcactcttgcagtctt

SEQ ID NO: 653077 - DNA, 120 bp, Artificial Sequence
  ENSG00000183307_27 (sequence is synthesized)
tgaggcaggataagtatttttacatattttaagggtgcaggaggacagcagctaacaaggccaggaaatactcacttccctccaccctcaacaggatgtggtgggggtgaaacttgaaga

SEQ ID NO: 653078 - DNA, 120 bp, Artificial Sequence
  ENSG00000183307_28 (sequence is synthesized)
atttttgtttccccttctcccttcttacgtttgggaagttttatgtagtgtaacaaactctagacgagttaccagaagatgtggattctagttctgattctgtcactcattggctttgag

SEQ ID NO: 653079 - DNA, 120 bp, Artificial Sequence
  ENSG00000183307_29 (sequence is synthesized)
tgacatatttttatttcctgggcctgttttctcacattaaaaaagtagaagttagatgagtgatctctaaggttgaaggtaatttcagctctcacattcttttgagtttgtggctcttga

SEQ ID NO: 653080 - DNA, 120 bp, Artificial Sequence
  ENSG00000183307_30 (sequence is synthesized)
aagccctggtcctgatgctccctgtaaaggtggctgggagagaagccagccaggctgcacttgcagaacattccctgctctgtactgggtgtgtgaagccccagcagagaaggccggagg

SEQ ID NO: 653081 - DNA, 120 bp, Artificial Sequence
  ENSG00000183307_31 (sequence is synthesized)
gagggcttgggtgcctgggctgggtgtggggcagggcctggcacagctgcagagtgcacagggagggtcagaagtgccaagtcactggccgttaactcagcacccaggccaagcccccgc

SEQ ID NO: 653082 - DNA, 120 bp, Artificial Sequence
  ENSG00000183307_32 (sequence is synthesized)
ctcccacttgaagccccctcttacaactgttttgggggcttggagcagaagacacccttgtagacagacataagaggggcagaaggcttgaccagagttctcttgagcctcctcatgctc

SEQ ID NO: 653083 - DNA, 120 bp, Artificial Sequence
  ENSG00000183307_33 (sequence is synthesized)
tcagagcagggaacagcgggggaaaatgtttacactccatgcacaatctgtgcttccagtccctcaccctatgtggcccaatagctggctggatttcacacttaattggtatttttttct

SEQ ID NO: 653084 - DNA, 120 bp, Artificial Sequence
  ENSG00000183307_34 (sequence is synthesized)
gccttcttcccctgcccccactgactcctctcctctccctttgattgtactcaaggttctggggcctgggccctgggtgggtaccaacagctgctcgctgttcccatgtcctctctccag

SEQ ID NO: 653085 - DNA, 120 bp, Artificial Sequence
  ENSG00000183307_35 (sequence is synthesized)
ctttgctgtgtttctctgctacctaatctcagtgactgtgaaaggacattgtgtctgagccatggccagccgctggctggccccctgatctgccccccttctattgtttggatggccatc

SEQ ID NO: 653086 - DNA, 120 bp, Artificial Sequence
  ENSG00000183307_36 (sequence is synthesized)
tcctgctgggcctccctgactgtaaaatctctgtactgtttgttaggtttttggtgggaggctgtgataagttccaatgagctgccacttccctggatatgtcaagaagctgatggcaac

SEQ ID NO: 653087 - DNA, 120 bp, Artificial Sequence
  ENSG00000183307_37 (sequence is synthesized)
ttggccaattctggcagatatcaggcccccagttcagccccagtcaccctcttttacacatgtgggtcaaccactgtgtgctcagagggtcagtcccttcctctgctgtgtttttcttga

SEQ ID NO: 653088 - DNA, 120 bp, Artificial Sequence
  ENSG00000183307_38 (sequence is synthesized)
gtccttgcactcacttcccctgccccagtcacgatgacccctaaagcttcctttgcccttgctttctagggcatccctagtgaaggggcaaacctgagatttctccgtggacctgacagc

SEQ ID NO: 653089 - DNA, 120 bp, Artificial Sequence
  ENSG00000183307_39 (sequence is synthesized)
caaggcagggcactgtctcctgaggccagtgccagcacgtgcatggttcacagaaaaggatcctgggctcagaatctcgagaaccgcctgctcctaacaattcagcaagtcaggggcttc

SEQ ID NO: 653090 - DNA, 120 bp, Artificial Sequence
  ENSG00000183307_40 (sequence is synthesized)
ctctctgttagtccccaaatccttacttattttaaaaagactagaccctctctaaagactgttccattttaacatgtcctgattctgcatccgtgggttttgtgaaagagagctagctgg

SEQ ID NO: 653091 - DNA, 120 bp, Artificial Sequence
  ENSG00000183307_41 (sequence is synthesized)
cggttagagcctggaagaaggagggaagtggcacctcactagcatttatcacttttttccttctctttttaaaaataaaaccagactctgttctgaaaataaaaaacttgagacttgtga

SEQ ID NO: 653092 - DNA, 120 bp, Artificial Sequence
  ENSG00000183307_42 (sequence is synthesized)
ctcgcctgtcttcaccgcggtccgctcggttcaccgcctgccccctctccctgccgcccggcccggctcgcccagtccagtggctccagtccggatctcgccgccgcccggcccaggtgg

SEQ ID NO: 653093 - DNA, 120 bp, Artificial Sequence
  ENSG00000183309_0 (sequence is synthesized)
gcaccacagaccagtctgtcctggtgttggatgttaaaagtggagccacaaagaagccatcttatgtgggacaggcttgggtgtgagaccagagctgtgggtagcagcatgttgggtcag

SEQ ID NO: 653094 - DNA, 120 bp, Artificial Sequence
  ENSG00000183309_1 (sequence is synthesized)
gatgaggggcagaggaaacactttccacctcttggatatggattttatcctgccctgattcaggagatccccatctgttaagtaaggggaaagatgattttgttgtcttttgtttcagat

SEQ ID NO: 653095 - DNA, 120 bp, Artificial Sequence
  ENSG00000183309_2 (sequence is synthesized)
tctaatgtaggaactggtgagaagaaggtgactgaagcctggatttctgaggatgaaaactcacataggacgacgtcagacagactcacggtgatggagctcccctctcccgagtctgag

SEQ ID NO: 653096 - DNA, 120 bp, Artificial Sequence
  ENSG00000183309_3 (sequence is synthesized)
gaagtccacgagcccagattaggggagctcttgggaaatccagaaggtcagagcctggggagttccccctctcaggacaggggctgcaagcaggtgacagtgacccattggaagatccag

SEQ ID NO: 653097 - DNA, 120 bp, Artificial Sequence
  ENSG00000183309_4 (sequence is synthesized)
acaggagagacagctcaagtgtgcaccaagtcaggaagaaaccatattctgaactcagaccttcttctgcttcagagagagctcatagagggggaagccaatccttgcgatatctgtggc

SEQ ID NO: 653098 - DNA, 120 bp, Artificial Sequence
  ENSG00000183309_5 (sequence is synthesized)
aaaaccttcacgtttaattcggacctagttaggcatcggatttcgcatgctggggagaaaccttacacgtgcgatcagtgtgggaaaggctttggccagagctcacaccttatggagcat

SEQ ID NO: 653099 - DNA, 120 bp, Artificial Sequence
  ENSG00000183309_6 (sequence is synthesized)
cagagaattcacactggagagagactctacgtctgtaatgtgtgtgggaaagacttcattcactattcaggtctcattgagcatcagcgcgttcattcaggagaaaagcccttcaaatgt

SEQ ID NO: 653100 - DNA, 120 bp, Artificial Sequence
  ENSG00000183309_7 (sequence is synthesized)
gcgcagtgtgggaaggcgttttgtcacagttcagacctgattaggcaccagagagttcacaccagagagagaccttttgaatgcaaagagtgtgggaaaggcttcagtcagagctcctta

SEQ ID NO: 653101 - DNA, 120 bp, Artificial Sequence
  ENSG00000183309_8 (sequence is synthesized)
cttattcgccatcagaggattcacacgggagaaaggccctatgagtgcaatgaatgtgggaaatccttcataaggagctcgagcctcattcgccattatcagatccacacagaagtgaaa

SEQ ID NO: 653102 - DNA, 120 bp, Artificial Sequence
  ENSG00000183309_9 (sequence is synthesized)
cagtatgaatgcaaagaatgtgggaaggcattccgtcatcgctcagaccttattgaacaccagagaattcacaccggagagagaccctttgaatgcaatgagtgtgggaaagcctttatt

SEQ ID NO: 653103 - DNA, 120 bp, Artificial Sequence
  ENSG00000183309_10 (sequence is synthesized)
cggagttcaaagctcattcagcatcagaggatccatactggggagaggccttacgtatgcaatgagtgtgggaagcgcttcagccagacgtcaaacttcacccagcatcagagaattcac

SEQ ID NO: 653104 - DNA, 120 bp, Artificial Sequence
  ENSG00000183309_11 (sequence is synthesized)
actggagagaaactctatgaatgtaacgagtgtgggaaagctttctttctgagttcataccttattcgacaccagaaaatccacactggagagagagtgtatgaatgtaaggaatgtggg

SEQ ID NO: 653105 - DNA, 120 bp, Artificial Sequence
  ENSG00000183309_12 (sequence is synthesized)
aaagcgtttctccagaaagcccatctcactgagcaccagaagatccactctggggacaggcccttcgaatgtaaagactgtgggaaagccttcatccagagctccaagctgcttctgcac

SEQ ID NO: 653106 - DNA, 120 bp, Artificial Sequence
  ENSG00000183309_13 (sequence is synthesized)
cagattattcacactggagaaaagccctatgtgtgcagttattgtgggaaaggctttattcagaggtcaaacttccttcaacaccagaaaattcatactgaagagaagctctatgaatgt

SEQ ID NO: 653107 - DNA, 120 bp, Artificial Sequence
  ENSG00000183309_14 (sequence is synthesized)
agtcagtatgggagagattttaactcaactacaaacgttaaaaataatcaaagggttcaccaagagggactctccttgagtaaggcccccatacatttgggtgagaggtctgtagataag

SEQ ID NO: 653108 - DNA, 120 bp, Artificial Sequence
  ENSG00000183309_15 (sequence is synthesized)
ggggaacacacaggtaacttataaaataattactttcccgcccagtgagtgatgtttggaaatgcgtggaattaggattcatgtggtttctaagatttggacatgtcagaattttgtgag

SEQ ID NO: 653109 - DNA, 120 bp, Artificial Sequence
  ENSG00000183309_16 (sequence is synthesized)
tcatggatggggctgcttttgcagtgggtgccacctgccactgtgcagccctactcggctcagcccttctcctcagctgtgagcactgtcctcaggagagtcacagggcttgacacctga

SEQ ID NO: 653110 - DNA, 120 bp, Artificial Sequence
  ENSG00000183309_17 (sequence is synthesized)
ctctgagctggaacagtaggggcagggagaagacaggtctcaagaaaaggtttttaagaagtttcatccccagttaagcagagtccatccttgacttaaatcccttattacagcacaact

SEQ ID NO: 653111 - DNA, 120 bp, Artificial Sequence
  ENSG00000183309_18 (sequence is synthesized)
gtgtatctaatcttacgatttaggagaatgttacctaggacattttgatgtgttaagttgaagaaaggtaactcgtgtatgaaccccgagccatttccctgttgtcctgaggaggaactc

SEQ ID NO: 653112 - DNA, 120 bp, Artificial Sequence
  ENSG00000183309_19 (sequence is synthesized)
caggcctcccatcgtgtgccctaaggcctcctgcgtcctggagccctgcctcccactgcctgacttcctgccacacggttaatgctgcagcaacaccgactgcttcatcttccctgtgct

SEQ ID NO: 653113 - DNA, 120 bp, Artificial Sequence
  ENSG00000183309_20 (sequence is synthesized)
ccacgtggcttcctacctctctcgcctttgttcttgttgaagggtctcttctcagctaattaactctgaatcatggttcaagacaagcctcaggcatcatgtcaatgggtgtttccctca

SEQ ID NO: 653114 - DNA, 120 bp, Artificial Sequence
  ENSG00000183309_21 (sequence is synthesized)
agcttagttggcagcactctccacacttctgtggctcagtgattactgctattactatatttacttgcatatgtcagaatgatgtgatagactatctctgtcactatgctgttgggttcc

SEQ ID NO: 653115 - DNA, 120 bp, Artificial Sequence
  ENSG00000183309_22 (sequence is synthesized)
tgaggacagtgatcatatctgattgatttccatgtgtccactgtctagcacagggcaataaaaaatacacccctaaatctatgtgtaattggcatctctcttgctttgtcctttctatac

SEQ ID NO: 653116 - DNA, 120 bp, Artificial Sequence
  ENSG00000183309_23 (sequence is synthesized)
tgccattctaaaaattttcagctgttggctgttttttttgttgtttgttcattttgtatcagtataatctacgattctgttagaagtatcttctcagccctgctactgtctgctgctcct

SEQ ID NO: 653117 - DNA, 120 bp, Artificial Sequence
  ENSG00000183309_24 (sequence is synthesized)
acttagaagttgcaggcaatatcctgtgcacatccacgccctcctgtgtgccaccttacagctcatgcagaactgtctacttgatctggagggcattgacacctggctcagctggaacag

SEQ ID NO: 653118 - DNA, 120 bp, Artificial Sequence
  ENSG00000183309_25 (sequence is synthesized)
tggggacaggaggaggcaggtctcaagagaaggtctttacttacttgtctgtatctttctgtctcactcgaaaggcacagtctcaatgcgctacgtaactcttctgttgtagcagttctg

SEQ ID NO: 653119 - DNA, 120 bp, Artificial Sequence
  ENSG00000183309_26 (sequence is synthesized)
aggttgaactgagctcttgtcattttccatgctctctggctcattgtgtcatttcaaaatgtattgatatctataaggaatagtcctcaatgttgggaaaacagatgagcaacccactac

SEQ ID NO: 653120 - DNA, 120 bp, Artificial Sequence
  ENSG00000183309_27 (sequence is synthesized)
cctgaagtcatccaccgtgtagtggggaagacggagatcacagtagggtgagttaagtatgtgccctcaggtgtgaaggagcacaggtgagggggtgcctgctgtggcacagagctggga

SEQ ID NO: 653121 - DNA, 120 bp, Artificial Sequence
  ENSG00000183309_28 (sequence is synthesized)
atcagtagagagcagctgaagaagaaaatagggtccaggagaggaatctgcagaaacatggagccatgacagatggctttttggctaggactgttcgaaagcaggcgaggtaaatggaca

SEQ ID NO: 653122 - DNA, 120 bp, Artificial Sequence
  ENSG00000183309_29 (sequence is synthesized)
gtggacagccgcctcgccaaactgttagtctttacctctgaatttcatctggacatgaaccccaaagtccagttttgtaacgatataatttttttctcatgaggccatattttgagttct

SEQ ID NO: 653123 - DNA, 120 bp, Artificial Sequence
  ENSG00000183309_30 (sequence is synthesized)
taaatactaccaaccctgaacgtctcaggacaaataattcaaaaaagagatctacattttctggaaaatcagcattactagagatgtttcaaatgtagattttaccagaccattttaatc

SEQ ID NO: 653124 - DNA, 120 bp, Artificial Sequence
  ENSG00000183309_31 (sequence is synthesized)
aactttattgagattcaattttcatatagtaaaacgcctatttaagtgtacaaggttttgaaaaatctatacacctgtgtaaccaccaccacctgtgtaaccaccaccgccagaaccaaa

SEQ ID NO: 653125 - DNA, 120 bp, Artificial Sequence
  ENSG00000183309_32 (sequence is synthesized)
aacgtttctgtcacccaaagaagttcccttttgccttttcctagttaagcccactccagccccagataaccactttctatcctcatagattagtgttgcttggtttagagcctcatacaa

SEQ ID NO: 653126 - DNA, 120 bp, Artificial Sequence
  ENSG00000183309_33 (sequence is synthesized)
atggattcatttactatgtgttcttttgcgtctgatgtctcactttggcatgtttttagactcatccaagctgttttgtgtttcagtagttctccttgctgaatagtattccattgtgtg

SEQ ID NO: 653127 - DNA, 120 bp, Artificial Sequence
  ENSG00000183309_34 (sequence is synthesized)
gataagccatcatttgtttattcatccatgtgttaatgggtttccagtctcggctcttaaaactatgagcatttgtgtaaaagtatgtatttgcacatgtgtttttatttctcttgggta

SEQ ID NO: 653128 - DNA, 120 bp, Artificial Sequence
  ENSG00000183309_35 (sequence is synthesized)
agtacctaggactttaattgctgtgttgtaagtgtcttagttcattcaggctgccataacaaaataccatcaactgggaggcttataaacaacagaaatttatgttttacagttctggag

SEQ ID NO: 653129 - DNA, 120 bp, Artificial Sequence
  ENSG00000183309_36 (sequence is synthesized)
gctgggaagtccaagatgagggtgtcaacatttggtgtctagtgagggcctgcttccttttaagtagatgtctttttactgtgactgcacgtggtggaaagggactagcaagcttacccc

SEQ ID NO: 653130 - DNA, 120 bp, Artificial Sequence
  ENSG00000183309_37 (sequence is synthesized)
attcatgagggctctccccttgtgattctgtcccctccccaagaccccacctcatatcatcttatgggttaggaatttgacatgaattgtgcaaggatgtaaacattcagtccattgcaa

SEQ ID NO: 653131 - DNA, 120 bp, Artificial Sequence
  ENSG00000183309_38 (sequence is synthesized)
tacgtgtttctaacttcctaagaaattgtcacacagccctctgtagtggttgaatcattttacactattactacattatgggaagattccagttgctccatatctttgctaacacttggc

SEQ ID NO: 653132 - DNA, 120 bp, Artificial Sequence
  ENSG00000183309_39 (sequence is synthesized)
attgtcagtctcttaaaatttaatccactctagcctccttatgattttaatttgtatttgcccactgaataatgtatgtctatgatttcatctgcttattgcttttccgtgtcgtctttt

SEQ ID NO: 653133 - DNA, 120 bp, Artificial Sequence
  ENSG00000183309_40 (sequence is synthesized)
gtgatgtgtctgttcgtgccttttgcctgtttttaagttgggatgcttattgttgactcaagttctttccatattctgcatgaaaaacatacatgtaatatatagaattctttgtctcca

SEQ ID NO: 653134 - DNA, 120 bp, Artificial Sequence
  ENSG00000183309_41 (sequence is synthesized)
tttgtgacaaatattgtgaatattttcatgtttggtttgcctgttcattttcttaatggtgtcttttgaatattttttattaagcctaatttatcaaagatttgggtgtggtggctcatg

SEQ ID NO: 653135 - DNA, 120 bp, Artificial Sequence
  ENSG00000183309_42 (sequence is synthesized)
tataataatttgagtttaagaaatttgcctactcaaaggacatgattttttcctatgttttttatttttatggaacttttatagttttaccttttacatttaagtctgtgatccattttg

SEQ ID NO: 653136 - DNA, 120 bp, Artificial Sequence
  ENSG00000183309_43 (sequence is synthesized)
agttcatttttgtgtaccatatgtgataagggtcaagattcacttttttatctgtgtggttggttggttcggttctatttgttgagactctactttcccaatgaccaagtcttcacaggt

SEQ ID NO: 653137 - DNA, 120 bp, Artificial Sequence
  ENSG00000183309_44 (sequence is synthesized)
ttgtaaaaactgaagtgacatagaagtggtctgttctggacaccattcttcttgtgtgtataactttacaccaatatgacactatattgattactgtagttttatttgaggcagaaatct

SEQ ID NO: 653138 - DNA, 120 bp, Artificial Sequence
  ENSG00000183309_45 (sequence is synthesized)
cattctgttgcccaggctggagcgtagtggcacaatcacagctaatgtaacctcgaacatccgggctcaagtgagcctctttccttagcctcccaagtagttgggactgtaggcatgcat

SEQ ID NO: 653139 - DNA, 65 bp, Artificial Sequence
  ENSG00000183309_46 (sequence is synthesized)
ttccttagcctcccaagtagttgggactgtaggcatgcatcaccacatcttgctaattttttata

SEQ ID NO: 653140 - DNA, 120 bp, Artificial Sequence
  ENSG00000183309_47 (sequence is synthesized)
tacaggtgtgagccaccactcctggccaactgtagttgaactcaggtattggaagggcttccgttttgttcttttcccatttttttttttttgacttctagatcctttgcattttcgtat

SEQ ID NO: 653141 - DNA, 120 bp, Artificial Sequence
  ENSG00000183309_48 (sequence is synthesized)
ttttttttttttgacttctagatcctttgcattttcgtataaaatttgaagtcaacttctatcaacttcaggccaggcccgtggctcatgcctgtataatcccagcactttgggaggccg

SEQ ID NO: 653142 - DNA, 120 bp, Artificial Sequence
  ENSG00000183309_49 (sequence is synthesized)
gaggtggaggtttcagtgagctgagatcgtggcattgcactctagcctgggcaaccaagagtgaaactgtctcaaaaaacaacttttatcaatgtctgcaaaaagaaagtcttctgggat

SEQ ID NO: 653143 - DNA, 120 bp, Artificial Sequence
  ENSG00000183309_50 (sequence is synthesized)
ggatttatagatcaatttagggagaaatgacattttaacaattctgagttttccaattgttgaacatggtgtactgccccatttatttagatctgttaatttctctcagtttgcagctct

SEQ ID NO: 653144 - DNA, 120 bp, Artificial Sequence
  ENSG00000183309_51 (sequence is synthesized)
cacattttgttaaattcatgtatttaatatttctgcatgctattgcaagtggtaaggttttcaaaaagctgttttctagttattgctagtatatagaaatgcattagacttgtacattga

SEQ ID NO: 653145 - DNA, 120 bp, Artificial Sequence
  ENSG00000183309_52 (sequence is synthesized)
tcttgtatcaagcaacttagatcagttaacttattctagtagcttttttctagattctttagcattttctatgtagataatcatgtcatctgtgaataaagtattttacttttccaattt

SEQ ID NO: 653146 - DNA, 120 bp, Artificial Sequence
  ENSG00000183309_53 (sequence is synthesized)
ctccggagcccggccgccttgccagggcacagtccgccgagagggccgggcggggtccgcaggccgctgcccgccccgctagggcgtccaggagcggggccttggctagtcagtctcccg

SEQ ID NO: 653147 - DNA, 120 bp, Artificial Sequence
  ENSG00000183309_54 (sequence is synthesized)
agggcgtccaggagcggggccttggctagtcagtctcccggacgcagccacggccgcccccgcgaggctgcggcgtctctccagcgagcccgcctcgggcccgagcctggggtcttgtcc

SEQ ID NO: 653148 - DNA, 120 bp, Artificial Sequence
  ENSG00000183309_55 (sequence is synthesized)
tctcgcgacttccggtcgcggcgggctggcggcggtgcaggctttgtcggctgatctgtggggcccgcgccggcggggtccagtcagcggctgcagggtcgggctcgcgccgtcctctcc

SEQ ID NO: 653149 - DNA, 120 bp, Artificial Sequence
  ENSG00000183310_0 (sequence is synthesized)
atgtgctcagggaatcagacttctcagaatcaaacagcaagcactgatttcaccctcacgggactctttgctgagagcaagcatgctgccctcctctacaccgtgaccttccttcttttc

SEQ ID NO: 653150 - DNA, 120 bp, Artificial Sequence
  ENSG00000183310_1 (sequence is synthesized)
ttgatggccctcactgggaatgccctcctcatcctcctcatccactcagagccccgcctccacacccccatgtacttcttcatcagccagctcgcgctcatggatctcatgtacctatgc

SEQ ID NO: 653151 - DNA, 120 bp, Artificial Sequence
  ENSG00000183310_2 (sequence is synthesized)
gtgactgtgcccaagatgcttgtgggccaggtcactggagatgataccatttccccgtcaggctgtgggatccagatgttcttccacctgaccctggctggagctgaggttttcctcctg

SEQ ID NO: 653152 - DNA, 120 bp, Artificial Sequence
  ENSG00000183310_3 (sequence is synthesized)
gatggtttgttgctcacccccattaccatgagcttccccttttgccagtctaggaaaatcctgagttttttctgtgagactcctgccctgctgaagctctcctgctctgacgtctccctc

SEQ ID NO: 653153 - DNA, 120 bp, Artificial Sequence
  ENSG00000183310_4 (sequence is synthesized)
tataagatgctcacgtacctgtgctgcatcctcatgcttctcacccccatcatggtcatctccagctcatacaccctcatcctgcatctcatccacaggatgaattctgccgccggccgc

SEQ ID NO: 653154 - DNA, 120 bp, Artificial Sequence
  ENSG00000183310_5 (sequence is synthesized)
aggaaggccttggccacctgctcctcccacatgatcatagtgctgctgctcttcggtgcttccttctacacctacatgctccggagttcctaccacacagctgagcaggacatgatggtg

SEQ ID NO: 653155 - DNA, 120 bp, Artificial Sequence
  ENSG00000183310_6 (sequence is synthesized)
tctgccttttacaccatcttcactcctgtgctgaaccccctcatttacagtctccgcaacaaagatgtcaccagggctctgaggagcatgatgcagtcaagaatgaaccaagaaaagtag

SEQ ID NO: 653156 - DNA, 120 bp, Artificial Sequence
  ENSG00000183313_0 (sequence is synthesized)
ggatgatggttgccccatttggacaatgtgataatgtagcaggaatgcagaaatcatgactttggtttcttttttctctttcctctccaagccattgataatgctccttagcaattcaag

SEQ ID NO: 653157 - DNA, 120 bp, Artificial Sequence
  ENSG00000183313_1 (sequence is synthesized)
ctggaggctatcccagccttcttttctcctggtagggattccaggtttagaggaaagccagcactggattgcactgcccctgggcatcctttacctccttgctttagtgggcaatgttac

SEQ ID NO: 653158 - DNA, 120 bp, Artificial Sequence
  ENSG00000183313_2 (sequence is synthesized)
cattctcttcatcatctggatggacccatccttgcaccaatctatgtacctcttcctgtccatgctagctgccatcgacctggttctggcctcctccactgcacccaaagcccttgcagt

SEQ ID NO: 653159 - DNA, 120 bp, Artificial Sequence
  ENSG00000183313_3 (sequence is synthesized)
gctcctggttcatgcccacgagattgggtacatcgtctgcctgatccagatgttcttcatccatgcattctcctccatggagtcaggggtacttgtggccatggctctggatcgctatgt

SEQ ID NO: 653160 - DNA, 120 bp, Artificial Sequence
  ENSG00000183313_4 (sequence is synthesized)
ccttgcaccattccacaatcctgcatccaggggtcatagggcgcatcggaatggtggtgctggtgaggggattactactccttatccccttccccattttgttgggaacacttatcttct

SEQ ID NO: 653161 - DNA, 120 bp, Artificial Sequence
  ENSG00000183313_5 (sequence is synthesized)
gccaagccaccatcataggccatgcctattgtgaacatatggctgttgtgaaacttgcctgctcagaaaccacagtcaatcgagcttatgggctgactatggccttgcttgtgattgggc

SEQ ID NO: 653162 - DNA, 120 bp, Artificial Sequence
  ENSG00000183313_6 (sequence is synthesized)
tggatgttctggccattggtgtttcctatgcccacatcctccaggcagtgctgaaggtaccagggagtgaggcccgacttaaggcgtttagcacatgtggctctcatatttgtgtcatcc

SEQ ID NO: 653163 - DNA, 120 bp, Artificial Sequence
  ENSG00000183313_7 (sequence is synthesized)
tggtcttctatgtccctggaattttctccttcctcactcaccgctttggtcatcatgtaccccatcatgtccatgttcttctggccacacggtatctcctcatgccacctgcgctcaatc

SEQ ID NO: 653164 - DNA, 120 bp, Artificial Sequence
  ENSG00000183313_8 (sequence is synthesized)
ctcttgtctatggagtgaagactcagcagatccgccagcgagtgctcagagtgtttacacaaaaggattgatctgaacatattctcattgtttccttcggaggcttcttctgcggaccac

SEQ ID NO: 653165 - DNA, 120 bp, Artificial Sequence
  ENSG00000183317_0 (sequence is synthesized)
gctaggctggcgcggcttgagccgccgccggactgacagctcggtctgcggaccatggagacctgcgccggtccacacccgctgcgcctcttcctctgccggatgcagctctgtctcgcg

SEQ ID NO: 653166 - DNA, 120 bp, Artificial Sequence
  ENSG00000183317_1 (sequence is synthesized)
ctgcttttgggaccctggcggcctgggaccgccgaggaagttatcctcctggattccaaagcctcccaggccgagctgggctggactgcactgccaagtaatgggtgggaggagatcagc

SEQ ID NO: 653167 - DNA, 120 bp, Artificial Sequence
  ENSG00000183317_2 (sequence is synthesized)
ggcgtggatgaacacgaccgtcccatccgcacgtaccaagtgtgcaatgtgctggagcccaaccaggacaactggctgcagactggctggataagccgtggccgcgggcagcgcatcttc

SEQ ID NO: 653168 - DNA, 120 bp, Artificial Sequence
  ENSG00000183317_3 (sequence is synthesized)
gtggaactgcagttcacactccgtgactgcagcagcatccctggcgccgcgggtacctgcaaggagaccttcaacgtctactacctggaaactgaggccgacctgggccgtgggcgtccc

SEQ ID NO: 653169 - DNA, 120 bp, Artificial Sequence
  ENSG00000183317_4 (sequence is synthesized)
cgcctaggcggcagccggccccgcaaaatcgacacgatcgcggcggacgagagcttcacgcagggcgacctgggtgagcgcaagatgaagctgaacacagaggtgcgcgagatcggaccg

SEQ ID NO: 653170 - DNA, 120 bp, Artificial Sequence
  ENSG00000183317_5 (sequence is synthesized)
ctcagccggcggggtttccacctggcctttcaggacgtgggcgcatgcgtggcgcttgtctcggtgcgcgtctactacaagcagtgccgcgccaccgtgcggggcctggccacgttccca

SEQ ID NO: 653171 - DNA, 120 bp, Artificial Sequence
  ENSG00000183317_6 (sequence is synthesized)
gccaccgcagccgagagcgccttctccacactggtggaagtggccggaacgtgcgtggcgcactcggaaggggagcctggcagccccccacgcatgcactgcggcgccgacggcgagtgg

SEQ ID NO: 653172 - DNA, 120 bp, Artificial Sequence
  ENSG00000183317_7 (sequence is synthesized)
ctggtgcctgtgggccgctgcagctgcagcgcgggattccaggagcgtggtgacttctgcgaagcctgtcccccagggttttacaaggtgtccccgcggcggcccctctgctcaccgtgc

SEQ ID NO: 653173 - DNA, 120 bp, Artificial Sequence
  ENSG00000183317_8 (sequence is synthesized)
ccagagcacagccgggccctggaaaacgcctccaccttctgcgtgtgccaggacagctatgcgcgctcacccaccgacccgccctcggcttcctgcacccggccgccgtcggcgccgcgg

SEQ ID NO: 653174 - DNA, 120 bp, Artificial Sequence
  ENSG00000183317_9 (sequence is synthesized)
gacctgcagtacagcctgagccgctcgccgctggtgctgcgactgcgctggctgccgccggccgactcgggaggccgctcggacgtcacctactcgctgctgtgcctgcgctgcggccgc

SEQ ID NO: 653175 - DNA, 80 bp, Artificial Sequence
  ENSG00000183317_10 (sequence is synthesized)
tggccttcctaccgcgccaggcagggctgcgggagcgagccgccacgctgctgcacctgcggcccggcgcgcgctacacc

SEQ ID NO: 653176 - DNA, 120 bp, Artificial Sequence
  ENSG00000183317_11 (sequence is synthesized)
gtgcgcgtggccgcgctcaacggcgtctcgggcccggcggccgccgcgggaaccacctacgcgcaggtcaccgtctccaccgggcccggggcgccctgggaggaggatgagatccgcagg

SEQ ID NO: 653177 - DNA, 120 bp, Artificial Sequence
  ENSG00000183317_12 (sequence is synthesized)
gaccgagtggaaccccagagcgtgtccctgtcgtggcgggagcccatccctgccggagcccctggggccaatgacacggagtacgagatccgatactacgagaagggtcagagtgagcag

SEQ ID NO: 653178 - DNA, 120 bp, Artificial Sequence
  ENSG00000183317_13 (sequence is synthesized)
acttactccatggtgaagacaggggcgcccacagtcaccgtcaccaacctgaagccggctacccgctacgtctttcagatccgggccgcttccccggggccatcctgggaggcccagagt

SEQ ID NO: 653179 - DNA, 120 bp, Artificial Sequence
  ENSG00000183317_14 (sequence is synthesized)
tttaaccccagcattgaagtacagaccctgggggaggctgcctcagggtccagggaccagagccccgccattgtcgtcaccgtagtgaccatctcggccctcctcgtcctgggctccgtg

SEQ ID NO: 653180 - DNA, 120 bp, Artificial Sequence
  ENSG00000183317_15 (sequence is synthesized)
atgagtgtgctggccatttggaggaggccctgcagctatggcaaaggaggaggggatgcccatgatgaagaggagctgtatttccacttcaaagtcccaacacgtcgcacattcctggac

SEQ ID NO: 653181 - DNA, 120 bp, Artificial Sequence
  ENSG00000183317_16 (sequence is synthesized)
ccccagagctgtggggacctgctgcaggctgtgcatctgttcgccaaggaactggatgcgaaaagcgtcacgctggagaggagccttggaggagggcggtttggggagctgtgctgtggc

SEQ ID NO: 653182 - DNA, 120 bp, Artificial Sequence
  ENSG00000183317_17 (sequence is synthesized)
tgcttgcagctccccggtcgccaggagctgctcgtagccgtgcatatgctgagggacagcgcctccgactcacagaggctcggcttcctggccgaggccctcacgctgggccagtttgac

SEQ ID NO: 653183 - DNA, 120 bp, Artificial Sequence
  ENSG00000183317_18 (sequence is synthesized)
catagccacatcgtgcggctggagggcgttgttacccgaggaagcaccttgatgattgtcaccgagtacatgagccatggggccctggacggcttcctcaggcggcacgaggggcagctg

SEQ ID NO: 653184 - DNA, 120 bp, Artificial Sequence
  ENSG00000183317_19 (sequence is synthesized)
gtggctgggcaactgatggggttgctgcctgggctggcatcagccatgaagtatctgtcagagatgggctacgttcaccggggcctggcagctcgccatgtgctggtcagcagcgacctt

SEQ ID NO: 653185 - DNA, 120 bp, Artificial Sequence
  ENSG00000183317_20 (sequence is synthesized)
gtctgcaagatctctggcttcgggcggggcccccgggaccgatcagaggctgtctacaccactatgagtggccggagcccagcgctatgggccgctcccgagacacttcagtttggccac

SEQ ID NO: 653186 - DNA, 120 bp, Artificial Sequence
  ENSG00000183317_21 (sequence is synthesized)
ttcagctctgccagtgacgtgtggagcttcggcatcatcatgtgggaggtgatggcctttggggagcggccttactgggacatgtctggccaagacgtgatcaaggctgtggaggatggc

SEQ ID NO: 653187 - DNA, 120 bp, Artificial Sequence
  ENSG00000183317_22 (sequence is synthesized)
tgagcggcccaggttctcccagatccacagcatcctgagcaagatggtgcaggacccagagccccccaagtgtgccctgactacctgtcccaggcctcccaccccactagcggaccgtgc

SEQ ID NO: 653188 - DNA, 120 bp, Artificial Sequence
  ENSG00000183317_23 (sequence is synthesized)
cttctccaccttcccctcctttggctctgtgggcgcgtggctggaggccctggacctgtgccgctacaaggacagcttcgcggctgctggctatgggagcctggaggccgtggccgagat

SEQ ID NO: 653189 - DNA, 120 bp, Artificial Sequence
  ENSG00000183317_24 (sequence is synthesized)
gactgcccaggacctggtgagcctaggcatctctttggctgaacatcgagaggccctcctcagcgggatcagcgccctgcaggcacgagtgctccagctgcagggccagggggtgcaggt

SEQ ID NO: 653190 - DNA, 120 bp, Artificial Sequence
  ENSG00000183317_25 (sequence is synthesized)
gtgagtggaccccattcttccaaggcaggactccggtgggggtccagtcccccagccctgcccaaggaccgtggcaagctgcgctccagcagtgtgggagggagcgctctcttcctctgc

SEQ ID NO: 653191 - DNA, 120 bp, Artificial Sequence
  ENSG00000183317_26 (sequence is synthesized)
ttgggcccagatctggtggggccacagcttccccgctttcactgcctgcccctcccattttcacgagtctgaacgccttggctaactcagtgcccctgaaaagaggttcaaatccctagg

SEQ ID NO: 653192 - DNA, 120 bp, Artificial Sequence
  ENSG00000183317_27 (sequence is synthesized)
gaggacccctgagataacagcaggaggaaattcggggtctcagagaaaagctggggcagggatgggagggaagacagtgggttgagattgccctggctcatgccctactgccatttgtac

SEQ ID NO: 653193 - DNA, 120 bp, Artificial Sequence
  ENSG00000183317_28 (sequence is synthesized)
ccactgggggctggggcctaccccgtggggtgttcccttttcccacagacccattgaccagtcagacagcgtgggtcctgggggggtcttcttctacctggcagtgactgcagctgcctg

SEQ ID NO: 653194 - DNA, 120 bp, Artificial Sequence
  ENSG00000183317_29 (sequence is synthesized)
gtggctcaggcgtcgggggctgggccagaggtgcatccacctcagctccctgtgccttggcaggggctgactggacactggccaaggctcaggcaggcaaagatggtgctgagctcaggg

SEQ ID NO: 653195 - DNA, 120 bp, Artificial Sequence
  ENSG00000183317_30 (sequence is synthesized)
gctgatacccaagagccctagactcaggatctggtttctgtgtccccctgccttgggctgacagttcagggtgaggccaaaagtcctggccaggccgggccatgagaggccctggtgctc

SEQ ID NO: 653196 - DNA, 120 bp, Artificial Sequence
  ENSG00000183317_31 (sequence is synthesized)
cctggggccccatgaggccctcgtgtgcattccttttatgaacttagtggccaggacatctgggaaaagcataaagggccatgttatctccccagggacccaagagcttttctctccagc

SEQ ID NO: 653197 - DNA, 120 bp, Artificial Sequence
  ENSG00000183317_32 (sequence is synthesized)
catggggagggtgaagaggagactcagagatgggtcctctctctcaaacaggctggtctaacccccagtgtacagatgggggaaactgaggccaagtgaggagtcaggagcagagctgag

SEQ ID NO: 653198 - DNA, 120 bp, Artificial Sequence
  ENSG00000183317_33 (sequence is synthesized)
gtcagaacccaatccaggggtaaggctggctctggggagagagtccttggtcctgccctatggcaccaccacttccctgtacagcccttggggactctagaggcgactcccctccagcca

SEQ ID NO: 653199 - DNA, 120 bp, Artificial Sequence
  ENSG00000183317_34 (sequence is synthesized)
gctccgtgccttgggcactacccagccttccatggagcccctccctgctctgactttgaagagccctggcagaagtggttgtgctgagcccaccgtggagttccttatccacaagggccc

SEQ ID NO: 653200 - DNA, 120 bp, Artificial Sequence
  ENSG00000183317_35 (sequence is synthesized)
ccgggaatggtggggcccagtatgccagagctttcgtagggtggcaggaaggcagctggatctcagcagggccacagggactgagtttgtttaggccgcccgtgacacttgtctgctctg

SEQ ID NO: 653201 - DNA, 120 bp, Artificial Sequence
  ENSG00000183317_36 (sequence is synthesized)
cttggctgtgtgttggtggggtgggatggggcgggaaagaggagacaagaggtaaagatgaaaaagacacacagcctgcccttggggggctcagactagaccaggagaagagctcaggta

SEQ ID NO: 653202 - DNA, 120 bp, Artificial Sequence
  ENSG00000183317_37 (sequence is synthesized)
ccaagaagtaattccagggcaccatccacagtgcccagggccccccaggagccctctgggtcagtgggtaggtgggctggagggggagatagccactctcttaatgtgtgaagttgagat

SEQ ID NO: 653203 - DNA, 120 bp, Artificial Sequence
  ENSG00000183317_38 (sequence is synthesized)
gtaagttgaacagggccttgcaggtgggaaagggaaggttctttccttggggtgggtggagttttcggcaggcaagatggcaggcctcggacaaaaggagtccatgcagagaggctagca

SEQ ID NO: 653204 - DNA, 120 bp, Artificial Sequence
  ENSG00000183317_39 (sequence is synthesized)
tgagaaagagcccagaggcgggaaggtgcagtgcctctttgcagagcacccagaggtgggggacagtgactcacagaggtgcctttggccttaccctgccagcagcagctcccctgctct

SEQ ID NO: 653205 - DNA, 120 bp, Artificial Sequence
  ENSG00000183317_40 (sequence is synthesized)
tggaatctccccccagccccctgcctccctgtctcctgagcacctgccccagctcagtgactctgggggtactggggagaccaagatgttgctaccaccttagtcagggttgggggagcc

SEQ ID NO: 653206 - DNA, 120 bp, Artificial Sequence
  ENSG00000183317_41 (sequence is synthesized)
cccggccaggtgccctccaggatccgccttccccacccctcctgggaagcctggaccagcatcccttcttgggtggatggagcctcgtcctcatctccagctacatcagtcattctctgc

SEQ ID NO: 653207 - DNA, 120 bp, Artificial Sequence
  ENSG00000183317_42 (sequence is synthesized)
agggcaaaatctcctccccctaccccagctgtttctgcagaagggcccctggctgtgttggcaggacttcggtgtccagggtagatctcccctccactgaggagtgaggtcccagaatcc

SEQ ID NO: 653208 - DNA, 120 bp, Artificial Sequence
  ENSG00000183317_43 (sequence is synthesized)
tgttgggtcccaggcctcagccctgcacagatgtgatgtggggcgatggctctctgggaaccctctacagatctatttttatatggaacttgttcactggacagaggtggcctgcaagcc

SEQ ID NO: 653209 - DNA, 120 bp, Artificial Sequence
  ENSG00000183317_44 (sequence is synthesized)
cccattaccctggtctgagctcaccctgggagggagggggccagtcggagggggttccttctggagatgtttttatatttcttgggttctctatgcaggataataaaaacttgtctgtga

SEQ ID NO: 653210 - DNA, 120 bp, Artificial Sequence
  ENSG00000183317_45 (sequence is synthesized)
tgagagagagtgtgccctagaggaaagaggcgggtgtggggtcggggggcggtggagaagccttggactctggagcccaaggagagccctgaagtcttgtggagtttccagtgagtccag

SEQ ID NO: 653211 - DNA, 120 bp, Artificial Sequence
  ENSG00000183317_46 (sequence is synthesized)
tcagggccaatgagtgaacttactagatgaaattgactggctaaggaggcattagggatctatatcttaggcaccttgcacaggccttctcgtttatttattttcatggcaataaaggaa

SEQ ID NO: 653212 - DNA, 86 bp, Artificial Sequence
  ENSG00000183317_47 (sequence is synthesized)
caggccttctcgtttatttattttcatggcaataaaggaagtcattgtttttttttttttttaaaataaggagtctcttgatcttg

SEQ ID NO: 653213 - DNA, 87 bp, Artificial Sequence
  ENSG00000183317_48 (sequence is synthesized)
aggaagtcattcttatctctatttcacagatgaagaaacagagcctcagagagattagtacctcacttgcaaagttaggaaatgggg

SEQ ID NO: 653214 - DNA, 120 bp, Artificial Sequence
  ENSG00000183317_49 (sequence is synthesized)
agagagattagtacctcacttgcaaagttaggaaatggggagctaggatttgaattcaggcttgcccaactcacattctatgacatcatgaggtctcctcagtgcataaggaagaactct

SEQ ID NO: 653215 - DNA, 120 bp, Artificial Sequence
  ENSG00000183317_50 (sequence is synthesized)
acagcagcccaatcttcaggctagtgggattggttgcattacagagaggaatctcccagtcacggaccaaatacttgcaagttagaggctggcaggggggatttttatgctggagagagg

SEQ ID NO: 653216 - DNA, 120 bp, Artificial Sequence
  ENSG00000183317_51 (sequence is synthesized)
gattgggaagttgcactagatgattacgaagatcacatcccactctctgaactacaatcactgtgctccctgggggagatccttcatgttgagggttttgctgggttctcaggctagtgg

SEQ ID NO: 653217 - DNA, 120 bp, Artificial Sequence
  ENSG00000183317_52 (sequence is synthesized)
gggcattaggaacagacctctcattctctctcttgcctgtggctttggatacagagggtgatgatggggttattaatgtgtgtacttaatatagaaagatcaaggtatgctttttctaaa

SEQ ID NO: 653218 - DNA, 120 bp, Artificial Sequence
  ENSG00000183317_53 (sequence is synthesized)
tggtgcctctttgagtggcagttgcttgatcattgtatagctggtgtggaagggcttctgcccccttcctcgaggacaggggtgtccagaatctgcgtctgagatctctctgcatagagg

SEQ ID NO: 653219 - DNA, 120 bp, Artificial Sequence
  ENSG00000183317_54 (sequence is synthesized)
tggagaggagccttggaggaggtctctgctcgtgtctggaagccctgcctccacaccaagcccaccctccacccagaaagtccctggcttgcctgattatagggaagaggatggcagaag

SEQ ID NO: 653220 - DNA, 120 bp, Artificial Sequence
  ENSG00000183317_55 (sequence is synthesized)
cggctgccaccccccaggaactgtcctaaccttctgcaccgactaatgctcgactgctggcagaaggacccagactgttccggatacgccaatacctttagctggcgctggctctgcctc

SEQ ID NO: 653221 - DNA, 120 bp, Artificial Sequence
  ENSG00000183317_56 (sequence is synthesized)
ctctggaggctggaagccaagatcaagatgtgcgcaaggttgtttcctgctgagagctgtgaggggagcttctgctctgggcctctctccccggcttgcctgtggccatcttcccactct

SEQ ID NO: 653222 - DNA, 120 bp, Artificial Sequence
  ENSG00000183317_57 (sequence is synthesized)
ctcttcgcatcatcttccctctgtggagagcaaaatatcagctctttgataaggctaactggagaatgttgcttaccaagtttctttgaatctaagatgccattgagtgtaagatgtcct

SEQ ID NO: 653223 - DNA, 120 bp, Artificial Sequence
  ENSG00000183317_58 (sequence is synthesized)
accaagaaagaaacatcacagccaactatgttgtgccatccaactgaaagatgcatcccagtttcagagatgttaacatgtacgtcttcaataaatgagatgccgcgcatcagggacaaa

SEQ ID NO: 653224 - DNA, 120 bp, Artificial Sequence
  ENSG00000183317_59 (sequence is synthesized)
ggacggcttcctcagggtgagtggccctggggctgccaatgaccactttattctgtaaagcgggcaggggtccctcacttttctctttggtagggcttggaattggcatcatccccactg

SEQ ID NO: 653225 - DNA, 120 bp, Artificial Sequence
  ENSG00000183317_60 (sequence is synthesized)
agtgaaagaggagggaggagtggctgtcagtgtgggcactgggctattatcagtgagtgtattcatttgcttgggctactgtaacacagcacctcagactgtaacacagcacccatgggt

SEQ ID NO: 653226 - DNA, 120 bp, Artificial Sequence
  ENSG00000183317_61 (sequence is synthesized)
gccaagaaaaggaaagagatggaattcgaggtcacactgctggtactcagtttaccaggatttaagctggaaacagtccatgatctggagtcacttttttttttgagaccgagtcttgct

SEQ ID NO: 653227 - DNA, 120 bp, Artificial Sequence
  ENSG00000183317_62 (sequence is synthesized)
tcctaagaagcactttctgccagcattgttcaacaaaggcagcctcagaagcgggtgaatgcctcatgataaagtatgtgacaaagactgtggctactgctggggaagctgccggaggac

SEQ ID NO: 653228 - DNA, 120 bp, Artificial Sequence
  ENSG00000183318_0 (sequence is synthesized)
tgcttgggagttcaggtggacaacagcaacttctcagaactactcttcactcctaacttctcccgagcctctagaagagaaacgcactcttctgggtcctaacggagtctggaagaaggc

SEQ ID NO: 653229 - DNA, 120 bp, Artificial Sequence
  ENSG00000183318_1 (sequence is synthesized)
tttggacagaacagggactaggttttgtggacagaaacaaagtgtttgggagagattatggccagtggtcaagcgcgccccccgtttgaggaggagagcccccagcctagcacaacggta

SEQ ID NO: 653230 - DNA, 120 bp, Artificial Sequence
  ENSG00000183318_2 (sequence is synthesized)
cggtcccccgaggtggtggtggatgatgaagtgccaggaccatcagccccttggatagatcccagcccccagcctcaatcccttggcctgaaaaggaagagcgaatggtcagacgaatcc

SEQ ID NO: 653231 - DNA, 120 bp, Artificial Sequence
  ENSG00000183318_3 (sequence is synthesized)
caagatgaagctgaagcgaaagcgagcatcctccgtgctccctgagcaccacgaggccttcaacaggctccttggggatcctgtcgttcaaaaattcctggcctgggacaaagacctgag

SEQ ID NO: 653232 - DNA, 81 bp, Artificial Sequence
  ENSG00000183318_4 (sequence is synthesized)
tttagccgtgccggcctcttctccctggccagtgacatggaggaggacaaccaggccccgaaacaagacatcttctccttc

SEQ ID NO: 653233 - DNA, 120 bp, Artificial Sequence
  ENSG00000183318_5 (sequence is synthesized)
ggaggacaaccaggccccgaaacaagacatcttctccttcctctacgggaagaactactcccagcgacccttgttccataagcttcgataccagctcctctgttccatgcgctggaggac

SEQ ID NO: 653234 - DNA, 81 bp, Artificial Sequence
  ENSG00000183318_6 (sequence is synthesized)
agcttcgataccagctcctctgttccatgcgctggaggacgtgggtttccccagaggagatggaccgagatcgcaccctca

SEQ ID NO: 653235 - DNA, 120 bp, Artificial Sequence
  ENSG00000183318_7 (sequence is synthesized)
cttcccatctgtcaatatccaacaccctgggacagtggacgaagtgggattccaaccttccatctatttttttaccctacttctcctctttactctgtatataaaaacgataagattata

SEQ ID NO: 653236 - DNA, 120 bp, Artificial Sequence
  ENSG00000183323_0 (sequence is synthesized)
agcggcgcacgcgcacggagaggaggctacttgccaggtgagcgagctgagtggggcgccggggcggtaggagggtgctgttcgctgagctggagtccgggctccggtccccgccacgga

SEQ ID NO: 653237 - DNA, 120 bp, Artificial Sequence
  ENSG00000183323_1 (sequence is synthesized)
ccttgagagggtacccggggtcagacctggcagacagcccattttttcttatgataaagacggcatttggctcatgagcaaggtggcaagatcatcaagtgagtcagacgtgcagctctg

SEQ ID NO: 653238 - DNA, 120 bp, Artificial Sequence
  ENSG00000183323_2 (sequence is synthesized)
ggaaacagaagaggatgacatgacagaaggtgatttagggtatggcctcggaaggaaacctggtgggatttatgaaatagaattttcacataggtctagaaaaagatcagatggaaagaa

SEQ ID NO: 653239 - DNA, 120 bp, Artificial Sequence
  ENSG00000183323_3 (sequence is synthesized)
ctttagccctcctccatttccgagaaagggagaagaaagaaatgaagcgagttttcagtattccaagcataagagccagcaagatacattccctcaagtgtccagaatttccaattacag

SEQ ID NO: 653240 - DNA, 120 bp, Artificial Sequence
  ENSG00000183323_4 (sequence is synthesized)
acgacaaagtagcactgtagattcgaattcagaattgtcaaatgaagaattaaggcaatgtcttaatgaaactttagaggaggtagaaatgttaaaaactgaacttgaggcatctcaaag

SEQ ID NO: 653241 - DNA, 120 bp, Artificial Sequence
  ENSG00000183323_5 (sequence is synthesized)
acaactcagaggtaaagaggaagcattgaaaattcttcaaagcatggcaatactgggcaaagccacaagtcatacgcaggcagtgcttcaaaaaactatggaacaaaacagatccttgga

SEQ ID NO: 653242 - DNA, 120 bp, Artificial Sequence
  ENSG00000183323_6 (sequence is synthesized)
gaaggaaataaatgccttgcagtgggaaatagaatttgatcataatagatttaaaaatatagaggaatcttggatccaaaaatatgacaggctaaactgtgaaaatgcagtcctcaaaga

SEQ ID NO: 653243 - DNA, 120 bp, Artificial Sequence
  ENSG00000183323_7 (sequence is synthesized)
gaatttgaaagtgaaaacagaagaaattaaaatgctgaagtctgacaatgcagttttgaatcaacggtatttggaggccctcgccatgcttgatatcaaacagcagaagatggctcagga

SEQ ID NO: 653244 - DNA, 120 bp, Artificial Sequence
  ENSG00000183323_8 (sequence is synthesized)
aaacatgtgctgtgataaaagtggctttgcagaggcttcaggtcttgagcttgcggtcctcggagcctgcctttgtcatgggcccggagggaacccctgttcttgtgccagaatggcagc

SEQ ID NO: 653245 - DNA, 120 bp, Artificial Sequence
  ENSG00000183323_9 (sequence is synthesized)
atccactcggaaactgcttcttcagctcaaacaagagttggaaattttgcagaagagtaaagaagaagcttacgtgatggcagatgctttcagaattgcatttgagcaacaattaatgag

SEQ ID NO: 653246 - DNA, 120 bp, Artificial Sequence
  ENSG00000183323_10 (sequence is synthesized)
aaaaaatgaccaggcactacaattgacacaaatggataaaatgcataaaaaagcaacaaaatggatgaattggaagcaccttaaagaggatggatttccatcaccaaggagtaagaagac

SEQ ID NO: 653247 - DNA, 120 bp, Artificial Sequence
  ENSG00000183323_11 (sequence is synthesized)
cttcgggcagagactgttgggtatgctcccttcagaaaacagttctaagaggatggaagaccaggacagtcctcaagaggtccttaagatgctcatagatttgcttaatgataaagaaga

SEQ ID NO: 653248 - DNA, 120 bp, Artificial Sequence
  ENSG00000183323_12 (sequence is synthesized)
agctttggctcatcaaagaaaagttagctacatgcttgctcgggcattggaagacaaagacactgcttcaaacgagaataaagaaaaaaatcctataaaagagaatttccctttcaacaa

SEQ ID NO: 653249 - DNA, 120 bp, Artificial Sequence
  ENSG00000183323_13 (sequence is synthesized)
cccctggcgtaagacttcagaattctctgttttgggtgatcctatacattcaagtgtctgcattttaaattctgtgggctgcatttgttcaatccagcactctcaaatagatccaaacta

SEQ ID NO: 653250 - DNA, 120 bp, Artificial Sequence
  ENSG00000183323_14 (sequence is synthesized)
tagaactcttaaaagatcccattctttgccatcaagtatcatattttaaagacaagccagttgaaattggaactgagagttgtttatatcgagatactttgaaaaatgattttgtaaatt

SEQ ID NO: 653251 - DNA, 120 bp, Artificial Sequence
  ENSG00000183323_15 (sequence is synthesized)
aattttgctgcatcttgagaagttgtatgtttcctaggtatttctaaattttaggaggtcacttaaatcaaatattttctacattttctttttcttcttttgagatggagtcttgctctg

SEQ ID NO: 653252 - DNA, 120 bp, Artificial Sequence
  ENSG00000183323_16 (sequence is synthesized)
ggcgtgagccaccacacccagcctattttctacattttctacaagaaattagtattctgtgttgacattttatttataaattacattactgtatttataaattacattacaggctgggca

SEQ ID NO: 653253 - DNA, 88 bp, Artificial Sequence
  ENSG00000183323_17 (sequence is synthesized)
ttagtattctgtgttgacattttatttataaattacattactgtatttataaattacattacaggctgggcatggtggctcatgctta

SEQ ID NO: 653254 - DNA, 78 bp, Artificial Sequence
  ENSG00000183323_18 (sequence is synthesized)
cacattacagtgtttgccaacatcctaaaacaaaaaataatgatttttgggaaaaacaaaaaattatttaactatttt

SEQ ID NO: 653255 - DNA, 120 bp, Artificial Sequence
  ENSG00000183323_19 (sequence is synthesized)
aatgatttttgggaaaaacaaaaaattatttaactattttgattgactatagggatcttagcttggctaaatcaacaatatagcaatgtatcttaatgctctaaaaagtaacaataccta

SEQ ID NO: 653256 - DNA, 120 bp, Artificial Sequence
  ENSG00000183323_20 (sequence is synthesized)
ggactgactgaatgttaatttctggaattcatttatcttgttttatttgccttgttcagtatttttcatttaccatatgaagtttagaaataacaatttccttaagttaacttcaataag

SEQ ID NO: 653257 - DNA, 120 bp, Artificial Sequence
  ENSG00000183323_21 (sequence is synthesized)
acagttttgatggtgggaccttggcagaagtatattgagtcagtgccggctgcgttcatggcttcttgtcagggtagtaacattttgcaaccaaatctgcacagatttgtagccaagtct

SEQ ID NO: 653258 - DNA, 120 bp, Artificial Sequence
  ENSG00000183323_22 (sequence is synthesized)
acaaagtgcttaacagctcttttcattgcatcctgtgagatggttgtgatgatccaggaaatggggtctcaggaatctgaagaagctgcctgagccaaggtgatttctaggagttttttt

SEQ ID NO: 653259 - DNA, 120 bp, Artificial Sequence
  ENSG00000183323_23 (sequence is synthesized)
aggagtttttttgtttgtggtatgtgaattggggtgtgtgggggtggggtgtgtgtgtagacagggtcccactgtgttgctcaggctggtgccaaactcctggcctcaagggatcctcct

SEQ ID NO: 653260 - DNA, 120 bp, Artificial Sequence
  ENSG00000183323_24 (sequence is synthesized)
gtgctgggattacaggcataaaccacaactcaataaaaaagtttttaaaaatttacaaagctcatatttgatccagctaggattttaccctgtacatttgtatttcttgtaggctggcgc

SEQ ID NO: 653261 - DNA, 120 bp, Artificial Sequence
  ENSG00000183323_25 (sequence is synthesized)
gcgcacagatatcttaaatggctactaattgctgctgtgtatgaaaacaaatggctatcaaggccgggtgcagtggcttacagatctggtctgaatctcaagtccagaccagtccagagt

SEQ ID NO: 653262 - DNA, 120 bp, Artificial Sequence
  ENSG00000183323_26 (sequence is synthesized)
agcctgggcaacatggtgaaaccccatctatacaaaaactcggcaaggcatggtggcatgcacctgttgtcccagctactcaggggctgaggcaggaggatggcatgagcccaggagctt

SEQ ID NO: 653263 - DNA, 120 bp, Artificial Sequence
  ENSG00000183323_27 (sequence is synthesized)
actccagcctgagtgacagagtgagacccccatctccaaaagaaaaggctatcaatacaaaagtttatctaaattactgtacagctatacaatggaatactctacaaaatggagagatcc

SEQ ID NO: 653264 - DNA, 120 bp, Artificial Sequence
  ENSG00000183323_28 (sequence is synthesized)
acagctatacaatggaatactctacaaaatggagagatccataagataaagcaaatgaataaagcaaaatgcatgtgttgacagctgttgtgatacctcagttcttgtcttcttggttta

SEQ ID NO: 653265 - DNA, 120 bp, Artificial Sequence
  ENSG00000183323_29 (sequence is synthesized)
aaagaatttaaatgagacagcaaaggagatgcagcataatttattgcaaaagaaaaggagtattttgaaagttaggtgcagaacagacagtacacctgagagagagaattcagggccggc

SEQ ID NO: 653266 - DNA, 120 bp, Artificial Sequence
  ENSG00000183323_30 (sequence is synthesized)
tgctcgtaagggtgagacagcattgattattgctggagaaactccctttatgggagttttgcattattattcataaggaggtgaggtgttgcagtaatcatgtcctgggtggtcctctgc

SEQ ID NO: 653267 - DNA, 120 bp, Artificial Sequence
  ENSG00000183323_31 (sequence is synthesized)
acaggtgcagtagctgttaatgcttgttcatacaccacatgtctcagtagcatcttaaatttccacctagaggtgtgttttttattattatcatgtgcaaaggatcagtttgaggacagg

SEQ ID NO: 653268 - DNA, 120 bp, Artificial Sequence
  ENSG00000183323_32 (sequence is synthesized)
taaaatcaaaatgtgtatgctctctagaagggaaagtccctactgaagatagctttgcttaaatgagctcaattacaatgtgaatgctgaggtttattgtgttggctgtatggtcatgag

SEQ ID NO: 653269 - DNA, 120 bp, Artificial Sequence
  ENSG00000183323_33 (sequence is synthesized)
gaaacatggcctctgttgtggctgtctctgatggtgtcatcaaggtgttcaacgacatgaagttgtgtaagtcttcaacaccagagaagttgaagaagcgcaagaaggcggtgctcttcc

SEQ ID NO: 653270 - DNA, 120 bp, Artificial Sequence
  ENSG00000183323_34 (sequence is synthesized)
gcctgagtgaagacaagaagaacatcatcctgaaggggagggcaaggagatactggtgggcaatgtggaccagaccatcgacaacccctatgccacctttgtcaagatgctaccggataa

SEQ ID NO: 653271 - DNA, 120 bp, Artificial Sequence
  ENSG00000183323_35 (sequence is synthesized)
gaagttgtttttaaactttcaccatttacacattccaataataatgttggtatggttttaacttttaaaaccaaggcagaaggacttaatatagttgagggtttttttaggtatgtatat

SEQ ID NO: 653272 - DNA, 120 bp, Artificial Sequence
  ENSG00000183323_36 (sequence is synthesized)
ttttaagagctttataatttatatatcctgaagttcacatgtaaatgtacactacaattcatttttactagatataagagttgtaccaccatcattataatctaattttagaatatttcc

SEQ ID NO: 653273 - DNA, 120 bp, Artificial Sequence
  ENSG00000183323_37 (sequence is synthesized)
aacaccagaaaagggacttggtgcccatcagcagtcattcctcattcccacccctatccccagtaatctattttctgtttgtagatttgccttttctatttaatataaatagaatcataa

SEQ ID NO: 653274 - DNA, 120 bp, Artificial Sequence
  ENSG00000183323_38 (sequence is synthesized)
gatatgtgactggattcttttgcattgagattcttttagttagcatgttttagaggttcatacatgtcgtagcgtgtatcagtactttcttcctttttattgccaagtaatactccattg

SEQ ID NO: 653275 - DNA, 120 bp, Artificial Sequence
  ENSG00000183323_39 (sequence is synthesized)
agtactttcttcctttttattgccaagtaatactccattgtgtagatgcaccatgttttgcttatgcattcaccagttgatggacatttgggtggtgtattagtccatttttatgctgct

SEQ ID NO: 653276 - DNA, 120 bp, Artificial Sequence
  ENSG00000183323_40 (sequence is synthesized)
cagaatcatggtgggaggtgaaaggcagttcctacgtggcagcagcaagagaaaatgaggaagattcaaaagtggaaacctctgataaaaccatcagatctcatgaaacttattcacata

SEQ ID NO: 653277 - DNA, 120 bp, Artificial Sequence
  ENSG00000183323_41 (sequence is synthesized)
ataaaaccatcagatctcatgaaacttattcacataccagaacagtatgggggaaccacccccatgatccaaactatctcccactgggtccctctcacaacacgtgggaattatgggaat

SEQ ID NO: 653278 - DNA, 61 bp, Artificial Sequence
  ENSG00000183323_42 (sequence is synthesized)
gccttcccaacagtcccccaaagtctgaaatcatttcagcattaacccggtaaaatcaaaa

SEQ ID NO: 653279 - DNA, 72 bp, Artificial Sequence
  ENSG00000183323_43 (sequence is synthesized)
aatcaaaagcaagctagttacttcctacatacaatggggatgtaggtgggctcatgcaaatccaaaatccag

SEQ ID NO: 653280 - DNA, 86 bp, Artificial Sequence
  ENSG00000183323_44 (sequence is synthesized)
actgatgcaagaggtgggttcccatggccttgggcagctccgcccctgtggctttgcagagtacagcctccctcctggctgctttc

SEQ ID NO: 653281 - DNA, 69 bp, Artificial Sequence
  ENSG00000183323_45 (sequence is synthesized)
tgtggctttgcaggctttcccaggtgcacagtgtaagccatgggtggatctaccattctggggtctgga

SEQ ID NO: 653282 - DNA, 120 bp, Artificial Sequence
  ENSG00000183323_46 (sequence is synthesized)
tccctgcaggaaacttctgcctggacatccaggcattgccatacatcttctgaaatctagtggaggttcccaaaccccgattctttacttctgtgcacctgcaggctcaacatcatgtgg

SEQ ID NO: 653283 - DNA, 120 bp, Artificial Sequence
  ENSG00000183323_47 (sequence is synthesized)
tgccaaggcttggggcttgcaccctctatattcacagacggagctgtaccttggcccctttcagccaccgctggagtggctgggacgcagggcaccaagtccttagactgcacacagcac

SEQ ID NO: 653284 - DNA, 120 bp, Artificial Sequence
  ENSG00000183323_48 (sequence is synthesized)
caccaagtccttagactgcacacagcacggggaccctgggccctgcccacgaaaccattttttcctccgagacttctggctctgtgatgagagaggctgctgcaaaggtctctgacatgc

SEQ ID NO: 653285 - DNA, 78 bp, Artificial Sequence
  ENSG00000183323_49 (sequence is synthesized)
atgccctggagacattttccccattatctgcagctagcttgaatttatccttagaaaatgggattttcttttctattg

SEQ ID NO: 653286 - DNA, 70 bp, Artificial Sequence
  ENSG00000183323_50 (sequence is synthesized)
ggctgcaaattttctgaacttttatgctgtgcttcccttttaaaatggaatgcctttaacagtacccaag

SEQ ID NO: 653287 - DNA, 83 bp, Artificial Sequence
  ENSG00000183323_51 (sequence is synthesized)
catctgagaccggtttttgtgaaagacactcaacaagtctctagaaagttccaatctttcccacattttcctgtcttcttctg

SEQ ID NO: 653288 - DNA, 65 bp, Artificial Sequence
  ENSG00000183323_52 (sequence is synthesized)
tgtcttcttctgagccctccaaactgtcccaatctctgcctgttacccagtttcaaagtttactg

SEQ ID NO: 653289 - DNA, 60 bp, Artificial Sequence
  ENSG00000183323_53 (sequence is synthesized)
ataacatggcagcagcaagagaaaatgagagagatgcaaaagcagaacccctgataaaat

SEQ ID NO: 653290 - DNA, 120 bp, Artificial Sequence
  ENSG00000183323_54 (sequence is synthesized)
gtgggaggcgaaaggcacttataacatggcagcagcaagagaaaatgagagagatgcaaaagcagaacccctgataaaatcaacagatctcttgagacttattcactaccatgagaacag

SEQ ID NO: 653291 - DNA, 76 bp, Artificial Sequence
  ENSG00000183323_55 (sequence is synthesized)
atggtttccactttttgactgatgaatagtactgttctgaacactttctttgtgtggaaaattcatccattaattc

SEQ ID NO: 653292 - DNA, 120 bp, Artificial Sequence
  ENSG00000183323_56 (sequence is synthesized)
ctgaacactttctttgtgtggaaaattcatccattaattcccacattcattggaaaagagccaaaccaagatctcctgacttttgaactatcagactctccataaaaggtggtcactgtg

SEQ ID NO: 653293 - DNA, 120 bp, Artificial Sequence
  ENSG00000183323_57 (sequence is synthesized)
aaattcttatgtcaattcatcttaattttccattgccttaaaataaaagagaacttcatgatgtacataggagtgattacaaatttaatttatactgatgctagttttatttttcttagg

SEQ ID NO: 653294 - DNA, 120 bp, Artificial Sequence
  ENSG00000183323_58 (sequence is synthesized)
caatactgggcaaagccacaagtcatacgcaggcagtgcttcaaaaaactatggaacaaaacagatccttggagaaggtatttggtgcttttagtgtagacttattgaatccaataagct

SEQ ID NO: 653295 - DNA, 120 bp, Artificial Sequence
  ENSG00000183323_59 (sequence is synthesized)
gttaaatataatttccctaaactcaccatactaatggatctgtcacttgtgcctaccttctgctaggtgtgcttcagttctgatggtcttcccttttggagtttacaatctaaaacagat

SEQ ID NO: 653296 - DNA, 120 bp, Artificial Sequence
  ENSG00000183323_60 (sequence is synthesized)
aaacagattgtcatgtgcacaatgaattcaggttatttttatttccccatgttaaggtagtaggaggcctgccaaattggtacttctcatttcttcttctttttttttttttttgagatg

SEQ ID NO: 653297 - DNA, 120 bp, Artificial Sequence
  ENSG00000183324_0 (sequence is synthesized)
agtgcgtgtggtgaggcaggacatggcggaggcaggaaaagtgcccttgagcctcgggcttaccggaggagaagcggcagagtggcctctgcagcggtacgcccgctgcataccctcaaa

SEQ ID NO: 653298 - DNA, 120 bp, Artificial Sequence
  ENSG00000183324_1 (sequence is synthesized)
caccagagacccacctgggccatgcctggaagctgggacagccccctgccccacatggaaggtttttgattccaatgaagaatctggatatcttgttctcaccatagttatatcaggtca

SEQ ID NO: 653299 - DNA, 120 bp, Artificial Sequence
  ENSG00000183324_2 (sequence is synthesized)
tttcttcattttccaaggacagacactactggaagggttttcactcattggtagcaaggactggttgaagattgtaagacgcgtggattgtctgttgtttggaacaacgataaaggacaa

SEQ ID NO: 653300 - DNA, 120 bp, Artificial Sequence
  ENSG00000183324_3 (sequence is synthesized)
tggcacaatacataaccgtgcaggtgcctgatggaaacatccaggagcttcagctgattcctggcccacccagggcaactgaaagtcaagggaaggattctgcaaagagtgtcccacggc

SEQ ID NO: 653301 - DNA, 120 bp, Artificial Sequence
  ENSG00000183324_4 (sequence is synthesized)
agcctggatcccaccagcactcagaacaacagcaagtgtgtgtaacagcgggcacaggcgctccagacggaaggacctcactgacgcagttagctcagactcttctggcatcggaggagc

SEQ ID NO: 653302 - DNA, 120 bp, Artificial Sequence
  ENSG00000183324_5 (sequence is synthesized)
tgccccatgtctatgaacaatctgcatggggtgcagaagagttaggccccttcctacgtttgtgccttatggatcagaatttcccagcatttgtggaagaggtagaaaaggaactgaaaa

SEQ ID NO: 653303 - DNA, 120 bp, Artificial Sequence
  ENSG00000183324_6 (sequence is synthesized)
agctggcgggtttgagaaattaatgctctatatacatatataactaaggaacttcaaagtattgaaaaatgcttcctcctaaaattaaagaagatattagaataaagagtattatccaaa

SEQ ID NO: 653304 - DNA, 120 bp, Artificial Sequence; identical to SEQ ID NO: 561368
  ENSG00000183336_0 (sequence is synthesized)

SEQ ID NO: 653305 - DNA, 120 bp, Artificial Sequence; identical to SEQ ID NO: 561369
  ENSG00000183336_1 (sequence is synthesized)

SEQ ID NO: 653306 - DNA, 120 bp, Artificial Sequence; identical to SEQ ID NO: 561370
  ENSG00000183336_2 (sequence is synthesized)

SEQ ID NO: 653307 - DNA, 120 bp, Artificial Sequence; identical to SEQ ID NO: 561371
  ENSG00000183336_3 (sequence is synthesized)

SEQ ID NO: 653308 - DNA, 120 bp, Artificial Sequence
  ENSG00000183336_4 (sequence is synthesized)
tggaccgctggaaagcccggctgcttgagggcggaagtactgcgttgacgtacgccttagtaagggcggaagtgagttttccagcggaagtggctcctgtaaggcagcaaggtagcgtgg

SEQ ID NO: 653309 - DNA, 120 bp, Artificial Sequence
  ENSG00000183336_5 (sequence is synthesized)
ccggcgcccgagctggggttgtgtccctgctgggctgccgttccagctggactgccgccatggaactcagcgccgaatacctccgcgagaagctgcagcgggacctggaggcggagcatg

SEQ ID NO: 653310 - DNA, 120 bp, Artificial Sequence
  ENSG00000183336_6 (sequence is synthesized)
tggaggtggaggacacgaccctcaaccgttgctcctgtagcttccgagtcctggtggtgtcggccaagttcgaggggaaaccgctgcttcagagacacaggctggtgaacgcgtgcctag

SEQ ID NO: 653311 - DNA, 120 bp, Artificial Sequence
  ENSG00000183336_7 (sequence is synthesized)
cagaagagctcccgcacatccatgcctttgaacagaaaaccctgaccccagaccagtgggcacgtgagcgacagaaatgagggactgggatctgcacagccattaaattataaatctgga

SEQ ID NO: 653312 - DNA, 120 bp, Artificial Sequence
  ENSG00000183336_8 (sequence is synthesized)
tgactatacattgtgacatggtcattacatatggattagaccaactggagaattgccagacttgtggtaccgattatatcatctcagtcttgaatttactcacgctgattgttgaacaga

SEQ ID NO: 653313 - DNA, 120 bp, Artificial Sequence
  ENSG00000183336_9 (sequence is synthesized)
aatacgaaactgccatcatcatttgtagaaaaactgtttataccatcatctaaactactattcttgcgttatcataaagaaaaagaggttgttgctgtagcccatgctgtttatcaagca

SEQ ID NO: 653314 - DNA, 120 bp, Artificial Sequence
  ENSG00000183336_10 (sequence is synthesized)
atgctcagcttgaagaatattcctgttttggagactgcctataagttaatattgggagaaatgacttgtgccctaaacaacctcctgcacagtctgcaacttcctgaggcctgttctgaa

SEQ ID NO: 653315 - DNA, 120 bp, Artificial Sequence
  ENSG00000183336_11 (sequence is synthesized)
ataaaacatgaggcttttaagaatcatgtgttcaatgtagacaatgcaaaatttgtagttaaatttgacctcagtgccctgactacaattggaaatgccaaaaactcgagtctttaattg

SEQ ID NO: 653316 - DNA, 120 bp, Artificial Sequence
  ENSG00000183336_12 (sequence is synthesized)
taatgactttgttttatccacagttaagccttttctcattacatatttatgtatttcactgtcatgtcaacatgtctgcagaatcactgtatgtaacaaacagccatatttaagacatgc

SEQ ID NO: 653317 - DNA, 120 bp, Artificial Sequence
  ENSG00000183336_13 (sequence is synthesized)
ctggataaataaaattggtaggaatgttttcttgccattatatttaacgtttcttctttttccttgacaaatcttgataagtttttttatattagttttattttctagaaaacgtcttat

SEQ ID NO: 653318 - DNA, 120 bp, Artificial Sequence
  ENSG00000183336_14 (sequence is synthesized)
gaatttctcccatttgctctagcatgcttatagaaaatgtcagtgtttcttacagctcaaatttgtatagttgttttaaaatgcggtctctttcttcttcccctggtacttttttctttc

SEQ ID NO: 653319 - DNA, 120 bp, Artificial Sequence
  ENSG00000183337_0 (sequence is synthesized)
ggtatttccgaagctggccaggccctctgctgctgaccctggaaatcgggtcacactagacaaggctgcatgtgcggggagaaggcgggggggctcctttgcacgcggctgctcgcgttt

SEQ ID NO: 653320 - DNA, 120 bp, Artificial Sequence
  ENSG00000183337_1 (sequence is synthesized)
ccccaaggcctccaaatagtctaaaaactcacctcggaggaggagaaagagcgtgaagtggctctttcgatctgagacaccccctcccggagaactcgccccctcccccccagcccagag

SEQ ID NO: 653321 - DNA, 120 bp, Artificial Sequence
  ENSG00000183337_2 (sequence is synthesized)
cggagtgaaatcttagaagccgtggctgctgggtttgaacggaatgctggagtcagtggaagacggagctggtcggcccgaagactagacgcttgaagcaaagctgccatcccagaagac

SEQ ID NO: 653322 - DNA, 120 bp, Artificial Sequence
  ENSG00000183337_3 (sequence is synthesized)
gacatgctctcagcaacccccctgtatgggaacgttcacagctggatgaacagcgagagggtccgcatgtgtggggcgagcgaagacaggaaaatccttgtaaatgatggtgacgcttca

SEQ ID NO: 653323 - DNA, 120 bp, Artificial Sequence
  ENSG00000183337_4 (sequence is synthesized)
aaagccagactggaactgagggaagagaatcccttgaaccacaacgtggtggatgcgagcacggcccataggatcgatggcctggcagcactgagcatggaccgcactggcctgatccgg

SEQ ID NO: 653324 - DNA, 120 bp, Artificial Sequence
  ENSG00000183337_5 (sequence is synthesized)
gaagggctgcgggtcccgggaaacatcgtctattctagcttgtgtggactgggctcagagaaaggtcgggaggctgccacaagcactctaggtggccttgggttttcttcggaaagaaat

SEQ ID NO: 653325 - DNA, 120 bp, Artificial Sequence
  ENSG00000183337_6 (sequence is synthesized)
ccagagatgcagttcaaaccgaatacacccgagacagtggaggcttctgccgtctctggaaaacccccaaatggcttcagtgctatatacaaaacaccgcctggaatacaaaaaagtgct

SEQ ID NO: 653326 - DNA, 120 bp, Artificial Sequence
  ENSG00000183337_7 (sequence is synthesized)
gtagccacagcagaagcgctgggcttggacaggcctgccagcgacaaacagagccctctcaacatcaatggtgctagttatctgcggctgccctgggtcaatccttacatggagggtgcc

SEQ ID NO: 653327 - DNA, 120 bp, Artificial Sequence
  ENSG00000183337_8 (sequence is synthesized)
acgccagccatctaccctttcctcgactcgccaaataagtattcactgaacatgtacaaggccttgctacctcagcagtcctacagcttggcccagccgctgtattctccagtctgcacc

SEQ ID NO: 653328 - DNA, 120 bp, Artificial Sequence
  ENSG00000183337_9 (sequence is synthesized)
aatggggagcgctttctctacctgccgccacctcactacgtcggtccccacatcccatcgtccttggcatcacccatgaggctctcgacaccttcggcctccccagccatcccgcctctc

SEQ ID NO: 653329 - DNA, 120 bp, Artificial Sequence
  ENSG00000183337_10 (sequence is synthesized)
gtccattgcgcagacaaaagcctcccgtggaagatgggcgtcagccctgggaatcctgttgattcccacgcctatcctcacatccagaacagtaagcagcccagggttccctctgccaag

SEQ ID NO: 653330 - DNA, 120 bp, Artificial Sequence
  ENSG00000183337_11 (sequence is synthesized)
gcggtcaccagtggcctgccgggggacacagctctcctgttgcccccctcgcctcggccgtcaccccgagtccaccttcccacccagcctgctgcagacacctactcggagttccacaag

SEQ ID NO: 653331 - DNA, 120 bp, Artificial Sequence
  ENSG00000183337_12 (sequence is synthesized)
cactatgccaggatctccacctctccttcagttgccctgtcaaagccatacatgacagttagcagcgagttccccgcggccaggctctccaatggcaagtatcccaaggctccggaaggg

SEQ ID NO: 653332 - DNA, 120 bp, Artificial Sequence
  ENSG00000183337_13 (sequence is synthesized)
ggcgaaggtgcccagccagtgcccgggcatgcccggaagacagcggttcaagacagaaaagatggcagctcacctcctctgttggagaagcagaccgttaccaaagacgtcacagataag

SEQ ID NO: 653333 - DNA, 120 bp, Artificial Sequence
  ENSG00000183337_14 (sequence is synthesized)
ccactagacttgtcttctaaagtggtggatgtagatgcttccaaagctgaccacatgaaaaagatggctcccacggtcctggttcacagcagggctggaagtggcttagtgctctccgga

SEQ ID NO: 653334 - DNA, 120 bp, Artificial Sequence
  ENSG00000183337_15 (sequence is synthesized)
agtgagattccgaaagaaacactatctcctccaggaaatggttgtgctatctatagatctgaaatcatcagcactgctccctcatcctgggtggtgcccgggccaagtcctaacgaagag

SEQ ID NO: 653335 - DNA, 120 bp, Artificial Sequence
  ENSG00000183337_16 (sequence is synthesized)
aacaatggcaaaagcatgtcgctgaaaaacaaggcattggactgggcgataccacagcagcggagttcatcatgcccgcgcatgggcggcaccgatgctgtcatcactaacgtttcaggg

SEQ ID NO: 653336 - DNA, 120 bp, Artificial Sequence
  ENSG00000183337_17 (sequence is synthesized)
tcagtgtcgagtgcaggccgcccagcctccgcatcacccgcccccaatgccaatgcagatggcaccaaaaccagcaggagctctgtagaaaccacaccatccgttattcagcacgtgggc

SEQ ID NO: 653337 - DNA, 120 bp, Artificial Sequence
  ENSG00000183337_18 (sequence is synthesized)
cagcccccggccactcctgccaagcacagtagcagcaccagcagcaagggcgccaaagccagcaacccagaaccgagtttcaaagcaaacgagaacggccttccaccaagctctatattt

SEQ ID NO: 653338 - DNA, 120 bp, Artificial Sequence
  ENSG00000183337_19 (sequence is synthesized)
ctgtctccaaatgaggcattcaggtccccaccaattccctaccccaggagttacctcccttacccagcccctgagggcattgctgtaagtcccctctccttacatggcaaaggacctgtc

SEQ ID NO: 653339 - DNA, 120 bp, Artificial Sequence
  ENSG00000183337_20 (sequence is synthesized)
taccctcacccagttttgttacccaatggcagtctgtttcctgggcaccttgccccaaagcctgggctgccctatgggcttcccaccggccgtccagagtttgtgacctaccaagatgcc

SEQ ID NO: 653340 - DNA, 120 bp, Artificial Sequence
  ENSG00000183337_21 (sequence is synthesized)
ctggggttgggcatggtgcatcccatgttgataccacacacgcccatagagattactaaagaggagaaaccagagaggagatcccggtcccatgagagagcccgttacgaggacccaacc

SEQ ID NO: 653341 - DNA, 120 bp, Artificial Sequence
  ENSG00000183337_22 (sequence is synthesized)
ctccggaatcggttttccgagattttggaaactagcagcaccaagttacatccagatgtccccaccgacaagaacctaaagccgaaccccaactggaatcaagggaagactgttgtcaaa

SEQ ID NO: 653342 - DNA, 120 bp, Artificial Sequence
  ENSG00000183337_23 (sequence is synthesized)
agcgacaagcttgtctacgtagaccttctccgagaagaaccagatgctaaaactgacacaaacgtgtccaaacccagctttgcagcagagagtgttggccagagcgctgagccccccaag

SEQ ID NO: 653343 - DNA, 120 bp, Artificial Sequence
  ENSG00000183337_24 (sequence is synthesized)
ccctcagttgagccggccctgcagcagcaccgtgatttcatcgccctgagagaggagttggggcgcatcagtgacttccacgaaacttatactttcaaacagccagtcttcaccgtaagc

SEQ ID NO: 653344 - DNA, 120 bp, Artificial Sequence
  ENSG00000183337_25 (sequence is synthesized)
aaggacagtgttctggcaggtaccaacaaagagaacctagggttgccagtctcgactccattcctggagccacctctggggagcgatggccctgctgtaacttttggtaaaacccaagag

SEQ ID NO: 653345 - DNA, 120 bp, Artificial Sequence
  ENSG00000183337_26 (sequence is synthesized)
ccaccaagtgtggatgtgacccccacctataccaaagatggagctgatgaggctgaatcaaatgatggcaaagttctgaaaccgaagccatctaagctggcaaagagaatcgccaactca

SEQ ID NO: 653346 - DNA, 120 bp, Artificial Sequence
  ENSG00000183337_27 (sequence is synthesized)
gcgggttacgtgggtgaccgattcaaatgtgtcactaccgaactgtatgcagattccagtcagctcagccgggagcaacgggcattgcagatggaaggattacaagaggacagtatttta

SEQ ID NO: 653347 - DNA, 120 bp, Artificial Sequence
  ENSG00000183337_28 (sequence is synthesized)
tgtctacccgctgcttactgtgagcgtgcaatgatgcgcttctcagagttggagatgaaagaaagagaaggtggccacccagcaaccaaagactccgagatgtgcaaattcagcccagcc

SEQ ID NO: 653348 - DNA, 120 bp, Artificial Sequence
  ENSG00000183337_29 (sequence is synthesized)
gactgggaaaggttgaaaggaaatcaggacaaaaagccaaagtcggtcaccctggaggaggccattgcagaacagaacgaaagtgagagatgcgagtatagtgttggaaacaagcaccgt

SEQ ID NO: 653349 - DNA, 120 bp, Artificial Sequence
  ENSG00000183337_30 (sequence is synthesized)
gatccctttgaagccccagaggacaaagatcttcctgtggagaagtactttgtggagaggcagcctgtgagcgagcctcccgcagaccaggtggcctcggacatgcctcacagccccacc

SEQ ID NO: 653350 - DNA, 120 bp, Artificial Sequence
  ENSG00000183337_31 (sequence is synthesized)
ctccgggtggacaggaaacgcaaagtctcaggtgacagcagccacactgagaccactgcggaggaggtgccagaggaccctctgctgaaagccaaacgccgacgagtctctaaagggctc

SEQ ID NO: 653351 - DNA, 120 bp, Artificial Sequence
  ENSG00000183337_32 (sequence is synthesized)
catcctaaaaaacaacgccacttgctgcaccttagagaacgatgggagcagcaggtgtcggcagcagatggcaaacctggccggcaaagcaggaaggaagtgacccaggccactcagcct

SEQ ID NO: 653352 - DNA, 120 bp, Artificial Sequence
  ENSG00000183337_33 (sequence is synthesized)
gaggccattcctcaggggactaacatcactgaagagaaacctggcaggaaaagggcagaggccaaaggcaacagaagctggtcggaagagtctcttaaacccagtgacaatgaacaaggc

SEQ ID NO: 653353 - DNA, 120 bp, Artificial Sequence
  ENSG00000183337_34 (sequence is synthesized)
ttgcctgtgttctccggctctccgcccatgaagagtctttcatccaccagtgcaggcggcaaaaagcaggctcagccaagctgcgcaccagcctccaggccgcctgccaaacagcagaaa

SEQ ID NO: 653354 - DNA, 120 bp, Artificial Sequence
  ENSG00000183337_35 (sequence is synthesized)
attaaagaaaaccagaagacagatgtgctgtgtgcagacgaagaagaggattgccaggctgcctccctgctgcagaaatacaccgacaacagcgagaagccatccgggaagagactgtgc

SEQ ID NO: 653355 - DNA, 120 bp, Artificial Sequence
  ENSG00000183337_36 (sequence is synthesized)
aaaaccaaacacttgatccctcaggagtccaggcggggattgccactgacaggggaatactacgtggagaatgccgatggcaaggtgactgtccggagattcagaaagcggccggagccc

SEQ ID NO: 653356 - DNA, 120 bp, Artificial Sequence
  ENSG00000183337_37 (sequence is synthesized)
agttcggactatgatctgtcaccagccaagcaggagccaaagcccttcgaccgcttgcagcaactgctaccagcctcccagtccacacagctgccatgctcaagttcccctcaggagacc

SEQ ID NO: 653357 - DNA, 120 bp, Artificial Sequence
  ENSG00000183337_38 (sequence is synthesized)
acccagtctcgccctatgccgccggaagcacggagacttattgtcaataagaacgctggcgagacccttctgcagcgggcagccaggcttggctatgaggaagtggtcctgtactgctta

SEQ ID NO: 653358 - DNA, 120 bp, Artificial Sequence
  ENSG00000183337_39 (sequence is synthesized)
gagaacaagatttgtgatgtaaatcatcgggacaacgcaggttactgcgccctgcatgaagcttgtgctaggggctggctcaacattgtgcgacacctccttgaatatggcgctgatgtc

SEQ ID NO: 653359 - DNA, 120 bp, Artificial Sequence
  ENSG00000183337_40 (sequence is synthesized)
aactgtagtgcccaggatggaaccaggcctctgcacgatgctgttgagaacgatcacttggaaattgtccgactacttctctcttatggtgctgaccccaccttggctacgtactcaggt

SEQ ID NO: 653360 - DNA, 120 bp, Artificial Sequence
  ENSG00000183337_41 (sequence is synthesized)
agaaccatcatgaaaatgacccacagtgaacttatggaaaagttcttaacagattatttaaatgacctccagggtcgcaatgatgatgacgccagtggcacttgggacttctatggcagc

SEQ ID NO: 653361 - DNA, 120 bp, Artificial Sequence
  ENSG00000183337_42 (sequence is synthesized)
tctgtttgtgaaccagatgatgaaagtggctatgatgttttagccaaccccccaggaccagaagaccaggatgatgatgacgatgcctatagcgatgtgtttgaatttgaattttcagag

SEQ ID NO: 653362 - DNA, 120 bp, Artificial Sequence
  ENSG00000183337_43 (sequence is synthesized)
acccccctcttaccgtgttataacatccaagtatctgtggctcaggggccacgaaactggctactgctttcggatgtccttaagaaattgaaaatgtcctcccgcatatttcgctgcaat

SEQ ID NO: 653363 - DNA, 120 bp, Artificial Sequence
  ENSG00000183337_44 (sequence is synthesized)
tttccaaacgtggaaattgtcaccattgcagaggcagaattttatcggcaggtttctgcaagtctcttgttctcttgctccaaagacctggaagccttcaaccctgaaagtaaggagctg

SEQ ID NO: 653364 - DNA, 120 bp, Artificial Sequence
  ENSG00000183337_45 (sequence is synthesized)
ttagatctggtggaattcacgaacgaaattcagactctgctgggctcctctgtagagtggctccaccccagtgatctggcctcagacaactactggtgagcaagctggacccaccatgta

SEQ ID NO: 653365 - DNA, 120 bp, Artificial Sequence
  ENSG00000183337_46 (sequence is synthesized)
cagtgtgttatagtgttaatccttgtgcatatgtgtcataatacaactatttctgtaaagaaaggacactattacatatgaaaatatctcttctttatataagagaaattactccagtca

SEQ ID NO: 653366 - DNA, 120 bp, Artificial Sequence
  ENSG00000183337_47 (sequence is synthesized)
gaaggacttagaaacatgtttttttccttttaaacttttaagtcagtttttatgaagttgttataatgtttctttacttttcaatgcacacatgctttgggatacgtttgtttttacttg

SEQ ID NO: 653367 - DNA, 120 bp, Artificial Sequence
  ENSG00000183337_48 (sequence is synthesized)
gaacatttgtttcttttcttttttaaggagaaaaaaaaatgagtaaaaggagctccacactttgacttaatttcatacaaagctctgatgacaggccatgactgtagagtggtcagaact

SEQ ID NO: 653368 - DNA, 120 bp, Artificial Sequence
  ENSG00000183337_49 (sequence is synthesized)
gtgtggttggtttgagggagcgaattcggggaaggcacttggtgatataactttgttttgtttacagagtacctgctcgggccaggtaaatgctattggatgtaatccagtagtgtgtaa

SEQ ID NO: 653369 - DNA, 120 bp, Artificial Sequence
  ENSG00000183337_50 (sequence is synthesized)
tataaattcaaaccatatccacacacaacaactaattgtatgaaacttttatatcctaatttaaaagctgtgaaattagttttcacgcatcaaaccggattgtttatatgtttaaacatt

SEQ ID NO: 653370 - DNA, 120 bp, Artificial Sequence
  ENSG00000183337_51 (sequence is synthesized)
ttatgctcttatttaaagaagactttgagctatttttttctgtaccctgtaaaatattgaaaactaacataatatgttgaggttgcttggaaatgtacataaaactaaaattttctgaat

SEQ ID NO: 653371 - DNA, 120 bp, Artificial Sequence
  ENSG00000183337_52 (sequence is synthesized)
cgtgtgtttatgtttgaaatctgtgttttaactttgtaagtaaattctctgcctttgtatttatattttacaaaaattttcttaaaaggcaataaaactgttgaggaaaggagaaaattg

SEQ ID NO: 653372 - DNA, 120 bp, Artificial Sequence
  ENSG00000183337_53 (sequence is synthesized)
gctcgccgcgcttctccggcccggctccttctccgctcgttaacgtcgccaaccccccccacccctcatatctctctccacccacccaaccgccccccgctccttctcgccgcctcgagt

SEQ ID NO: 653373 - DNA, 120 bp, Artificial Sequence
  ENSG00000183337_54 (sequence is synthesized)
agacggagcctgggctcccagcggcaaggtgaggcagagctgcgctcctcgctgaacgcgggccgagctcggcggctgcgggggagacgcgcaggagcccagaccgcgaccgagagcggg

SEQ ID NO: 653374 - DNA, 120 bp, Artificial Sequence
  ENSG00000183337_55 (sequence is synthesized)
agctaggcgggcggcggcggcggagggggagcccgcgagccgccgggcggagagcccaagccgcgctgtcgccgcgcagggacgacttggccaacactcacacacactcacacacaccca

SEQ ID NO: 653375 - DNA, 120 bp, Artificial Sequence
  ENSG00000183337_56 (sequence is synthesized)
cacacccagcccgagcgggcgctcgcggcgaaccgtcaacatggcgctggggctcctgcccgagcgcgggcggcggcggcagcgcgggagctgctgagctcggccaagcccagtccagct

SEQ ID NO: 653376 - DNA, 80 bp, Artificial Sequence
  ENSG00000183337_57 (sequence is synthesized)
cccagtccagctgcgggagcccggaggatcgcacggggctgtcgccacctgcccggaggccccgagcccgccccgccccg

SEQ ID NO: 653377 - DNA, 120 bp, Artificial Sequence
  ENSG00000183337_58 (sequence is synthesized)
atgtatgtgctgtgccttataggaccatgatgcaaggagaaagtggtagacggtgtaggactcagccatgttcacatctgcctagatctcatgaccaaaggcacatggcattccactcac

SEQ ID NO: 653378 - DNA, 120 bp, Artificial Sequence
  ENSG00000183337_59 (sequence is synthesized)
cagtaaaacagacctgtagaaatgatttaagcagaagaggactggtgaagctgaactaccatcaaagctacgagagatcctacacacccagatttaaaaaataataaaaacttaagggca

SEQ ID NO: 653379 - DNA, 120 bp, Artificial Sequence
  ENSG00000183337_60 (sequence is synthesized)
ccgtgttataacatccaagtatctgtggctcaggggtgagcatggctgtcatgtgattgaaaactagctgagctgctcttgaggccacgaaactggctactgctttcggatgtccttaag

SEQ ID NO: 653380 - DNA, 120 bp, Artificial Sequence
  ENSG00000183337_61 (sequence is synthesized)
tccattcatgcactgaagcgcgtgcagagctgctgatcgctgccattgttactcgcgggcggtgtgggagctgagcctccactctggcgagagataaatggcctctgacagcccctcctc

SEQ ID NO: 653381 - DNA, 120 bp, Artificial Sequence
  ENSG00000183337_62 (sequence is synthesized)
gcagggcaccaggcagatttggtgaatgaagcttgtggtaatttgaatatatgcaatgtggccagtaagagaacgtgagtggtagcactgaggcgtgtctggatgctttaagttattctg

SEQ ID NO: 653382 - DNA, 120 bp, Artificial Sequence
  ENSG00000183337_63 (sequence is synthesized)
tagattataagggaactccactcaattgctgataaccgatgttttaattattgtgaagggtatctaaagactgcatgacgtttacctatcaattgctttgatttctctgcctgtaagata

SEQ ID NO: 653383 - DNA, 120 bp, Artificial Sequence
  ENSG00000183337_64 (sequence is synthesized)
gcaaatatacctagaagtgctgcttagaatgccttacttgatacctggtagagatgtgtagcagccgcatgtctgtgggattcatgcaaatttttcaccaaaaagaaaggaaaaaaaaaa

SEQ ID NO: 653384 - DNA, 120 bp, Artificial Sequence
  ENSG00000183337_65 (sequence is synthesized)
cttttatcccctgtaagttaccttcatatggtccatgactacttaaatttgttgaaaatgttttcattttgggcttgacttccttcttaggccttggattaagatagggtttgcagctgg

SEQ ID NO: 653385 - DNA, 78 bp, Artificial Sequence
  ENSG00000183337_66 (sequence is synthesized)
cacttttatcagcctggaaaacatagtaagaccccgtccctacaaaaagaaaaaattagccaggtgtggtggcatgcg

SEQ ID NO: 653386 - DNA, 64 bp, Artificial Sequence
  ENSG00000183337_67 (sequence is synthesized)
gctatgatgatccgccccactgcactccagcctggacagtggagtgagaccctgtccaccccca

SEQ ID NO: 653387 - DNA, 120 bp, Artificial Sequence
  ENSG00000183337_68 (sequence is synthesized)
ctccagcctggacagtggagtgagaccctgtccacccccacccccacccccgcaaaaaaaggatagatttgggtttgagatttaggcctgaaatagtctcttcatctgccctgtaaaggg

SEQ ID NO: 653388 - DNA, 120 bp, Artificial Sequence
  ENSG00000183337_69 (sequence is synthesized)
ttagtcatcaaaataacagtgattcattgcttgacgttgagccactcactgtagctcagtttccctatctgtgcagtggcggtgactgtgcacacctcctggatgaaatactgtgcttag

SEQ ID NO: 653389 - DNA, 120 bp, Artificial Sequence
  ENSG00000183337_70 (sequence is synthesized)
gaggctcagtacccaaggtgcacatgtgcccagctttgcctgttgcttttaaaggagacaactgctttataagcaagtgtggcttgcatgagcataattctattgcgcctctcttcctag

SEQ ID NO: 653390 - DNA, 120 bp, Artificial Sequence
  ENSG00000183337_71 (sequence is synthesized)
aagcaaagctgccatcccagaagacgacatgctctcagcaacccccctgtatgggaacgttcacagctggatgaacagcgagagggtccgcatgtgtggggcgagcgaagacaggtgaat

SEQ ID NO: 653391 - DNA, 120 bp, Artificial Sequence
  ENSG00000183337_72 (sequence is synthesized)
gcgcccatctgggccgggcctgagtggagcccacgcccatgctgaagcccccctcaacttctcacagccaccgtgggcccaaaaggggtgggagagaaagagcttcccgcctagtaggcc

SEQ ID NO: 653392 - DNA, 120 bp, Artificial Sequence
  ENSG00000183337_73 (sequence is synthesized)
gctcttgatttacagttttaacaggcaacctggctcagtgaagcattgccgccctttaaaagattagcccctaaagcggcctttcagtgcactttcgtccttaatttattatttcatatt

SEQ ID NO: 653393 - DNA, 120 bp, Artificial Sequence
  ENSG00000183337_74 (sequence is synthesized)
tatgaaggagaattaatcccagtctatatactgctttaactctaaatgtcaggagtgtgggcccaggtggagcagcattctatgtgcttttaaaacaaatagtttgctcagtaataaatg

SEQ ID NO: 653394 - DNA, 120 bp, Artificial Sequence
  ENSG00000183337_75 (sequence is synthesized)
gggagagagccaccgttttccttcattgaagcccaggatctctcattgtcctctgctgcctgttcccagaggccactggcgcctgcttttggtcgtcagacagctctgttatgcttccta

SEQ ID NO: 653395 - DNA, 120 bp, Artificial Sequence
  ENSG00000183337_76 (sequence is synthesized)
atcagtaattttggagttgtggggtggaggcagctaagcagtagatgattgaagctgctcttcggggtaatgaggaaacttttcctctgccgcttgtcagcgatttttatcctggggatt

SEQ ID NO: 653396 - DNA, 120 bp, Artificial Sequence
  ENSG00000183337_77 (sequence is synthesized)
tggaagttggcaccaagcactttctttatcgatgctctctgataacaagtcccagggcagccgcagcagcctggcacagatgtgcagcttccttttcagcctggaacagctgacatttgt

SEQ ID NO: 653397 - DNA, 120 bp, Artificial Sequence
  ENSG00000183337_78 (sequence is synthesized)
atgatactagtgtgtatccccctgtcattttgacaaaggcagtcaaatatggcttttttatcaccatggaaaccagtttcgtaggacatggtccctaactttgttttggaaaaagttttg

SEQ ID NO: 653398 - DNA, 120 bp, Artificial Sequence
  ENSG00000183337_79 (sequence is synthesized)
gagctcgacctgccgccgctgccgcgcaactcgggaggggagtcccgttttttcttggcttgccccaaagcacgaatcacgtggattaaaaaaaaaaactactaagaaatcgagcagagc

SEQ ID NO: 653399 - DNA, 120 bp, Artificial Sequence
  ENSG00000183340_0 (sequence is synthesized)
aggggcggagcgactgccgcgcgatagtcagggagctgtgcgggtcctggttgcaagagagtctatttgccagccaaccccagcccgggaggggatcagggccaccaggttgctggtaag

SEQ ID NO: 653400 - DNA, 120 bp, Artificial Sequence
  ENSG00000183340_1 (sequence is synthesized)
gatgaaagactgagtgtgttaagactgttgaagtgagcctgtgtaagagaaggaaggattttgtggattgctacattgtgagtgtggggtgagtcccagaacctcgctatgtcagggaaa

SEQ ID NO: 653401 - DNA, 120 bp, Artificial Sequence
  ENSG00000183340_2 (sequence is synthesized)
cggaagcgtgtggtgttgactattaaagataagcttgatataataaagaaacttgaagacggaggttcttccaaacaactggcagtgatttatggaattggtgaaacaacagttcgggat

SEQ ID NO: 653402 - DNA, 120 bp, Artificial Sequence
  ENSG00000183340_3 (sequence is synthesized)
ataagaaaaaataaggaaaagattataacttatgcaagcagttctgattccacaagtcttttggccaagaggaaatctatgaagccatccatgtatgaggaattggacagggcaatgctg

SEQ ID NO: 653403 - DNA, 120 bp, Artificial Sequence
  ENSG00000183340_4 (sequence is synthesized)
gaatggttcaaccagcaaagagcaaaagggaatcccatatctggaccaatttgtgcaaaaagggcagagttcttcttttatgctttgggaatggatggtgattttaacccctctgccggt

SEQ ID NO: 653404 - DNA, 120 bp, Artificial Sequence
  ENSG00000183340_5 (sequence is synthesized)
tggctaactcgttttaagcagcggcacagcattagagagattaacattagaaatgaaagattaaatggagatgagactgcggtggaagatttttgtaataactttcgagattttattgaa

SEQ ID NO: 653405 - DNA, 120 bp, Artificial Sequence
  ENSG00000183340_6 (sequence is synthesized)
cgagagaatttacagcctgaacaaatctacaatgcagatgaaactggactcttttggaagtgcttgccttctaggatttcagtaatcaaaggtaaatgcactgtccctgggcacaaatca

SEQ ID NO: 653406 - DNA, 120 bp, Artificial Sequence
  ENSG00000183340_7 (sequence is synthesized)
attgaagaaagagtcacaatcatgtgttgtgccaatgcaacaggtttacacaaacttaaactttgtgttgtggggaaagcaaagaaacctcgctcctttaaatcaactgacaccttaaac

SEQ ID NO: 653407 - DNA, 120 bp, Artificial Sequence
  ENSG00000183340_8 (sequence is synthesized)
ctgccagtctcttatttcagccaaaaaggtgcatggatggatctttccattttccgacaatggtttgataaaatttttgtgccgcaagttcgagagtatttaagatctaaaggcttgcag

SEQ ID NO: 653408 - DNA, 120 bp, Artificial Sequence
  ENSG00000183340_9 (sequence is synthesized)
gaaaaggctgtgctcttgttggataattcaccaacacatccaaatgaaaatgtcctaaggtcagatgatggccaaatatttgctaaatatttaccacctaatgtggcctcattgattcag

SEQ ID NO: 653409 - DNA, 120 bp, Artificial Sequence
  ENSG00000183340_10 (sequence is synthesized)
ccttcagatcagggagtcatagcaacgatgaagagaaattatcgtgcaggtcttctccagaacaacttggaagaaggtaatgacctgaaatcattctggaagaagctaactctgttggat

SEQ ID NO: 653410 - DNA, 120 bp, Artificial Sequence
  ENSG00000183340_11 (sequence is synthesized)
gcactttatgaaatagcaatggcatggaacttagtaaaaccagttaccattagcagagcatggaagaagattctccctatggtagaggagaaagagagcctggactttgatgttgaagat

SEQ ID NO: 653411 - DNA, 120 bp, Artificial Sequence
  ENSG00000183340_12 (sequence is synthesized)
atttctgtggctactgtggctgccattttacaacacaccaaaggattggaaaatgtgactactgagaaccttgaaaaatggcttgaagtagacagtactgaaccaggctatgaagtgtta

SEQ ID NO: 653412 - DNA, 120 bp, Artificial Sequence
  ENSG00000183340_13 (sequence is synthesized)
aagagcacaaggccaggcagatgaatccagtgaaaatgaggaggaggaaatagaactaattccagagaaacatattaatcatgcagctgccctccagtggactgaaaatttattggatta

SEQ ID NO: 653413 - DNA, 120 bp, Artificial Sequence
  ENSG00000183340_14 (sequence is synthesized)
tctagaacaacaaggtgatatgattctacctgatagactggtaatacgtaaacttcgagccaccatcagaaataaacagaagatgacaaagtcaagtcaataatgtcatttcaattttat

SEQ ID NO: 653414 - DNA, 120 bp, Artificial Sequence
  ENSG00000183340_15 (sequence is synthesized)
tgttctgctcattgtgtttgtgacaaactctttgcaatatggcttaattttctttgtgttctgaattctcagacttggtcctgtgaaatacaggcacaaaatgtatctgaagtggtttga

SEQ ID NO: 653415 - DNA, 120 bp, Artificial Sequence
  ENSG00000183340_16 (sequence is synthesized)
ggattatgtgttttcatcatctgtgtcttttgtccttttatttgtacagataatcagaagatgatactgaatagatataaattacatgtacacatgtattcactttttagaatctgcaat

SEQ ID NO: 653416 - DNA, 120 bp, Artificial Sequence
  ENSG00000183340_17 (sequence is synthesized)
tataccttctgtaacagtggcattcccttaattttctagtgaaagttagagataactgaacagactgaagcacttttctgaaatcttttgcttgatttatgaaggctgccatagttatct

SEQ ID NO: 653417 - DNA, 120 bp, Artificial Sequence
  ENSG00000183340_18 (sequence is synthesized)
gttaaccatcttaaatgatgttttgtatattttaatagactgataggatgagaaagatttatattattagatttcaggatgatttataataattcaaaaatgaaattcaataatggggaa

SEQ ID NO: 653418 - DNA, 120 bp, Artificial Sequence
  ENSG00000183340_19 (sequence is synthesized)
atggggaaataattatgaattatagaaattatgccttcattctcttacatttgtgtgggttgcaagagggggagattattctggaaatgaagtaaatatgggaagttattgccaaatgag

SEQ ID NO: 653419 - DNA, 120 bp, Artificial Sequence
  ENSG00000183340_20 (sequence is synthesized)
agagaaactatgggaaagctgatctataaagaggcattctgatcaattcatttgtaggaaactgggaaataaaaacctggggaactttaggttatttatacaaagggaataaataggctg

SEQ ID NO: 653420 - DNA, 120 bp, Artificial Sequence
  ENSG00000183340_21 (sequence is synthesized)
attttaatttggtaagttgatctttttattatgaatttggtaatagtataggtttattatttattcatctaattttatagtacaggttttgtaatgttacatgtgatgatatgagctccc

SEQ ID NO: 653421 - DNA, 87 bp, Artificial Sequence
  ENSG00000183340_22 (sequence is synthesized)
agcatactcacaaatgttgtctataatttgaaaaatattgtcatatctggccctttgatgagaaaaggaaattacaataataaagtt

SEQ ID NO: 653422 - DNA, 120 bp, Artificial Sequence
  ENSG00000183340_23 (sequence is synthesized)
tggccctttgatgagaaaaggaaattacaataataaagttttatgattttaaataagtcatatgtttgtatcctgttttatgaagaaagcagaaataattactgaaagtgccagacacta

SEQ ID NO: 653423 - DNA, 120 bp, Artificial Sequence
  ENSG00000183340_24 (sequence is synthesized)
attattttaatacatataaaaagggattaatctgctaaaatgtaatctaaatcagaattttgataaattttttttgtaaactaagtatgtttattcaagacattgaaactactttgcaca

SEQ ID NO: 653424 - DNA, 120 bp, Artificial Sequence
  ENSG00000183340_25 (sequence is synthesized)
gaaactactttgcacatatgaatattaatgtaacttgtaatttaaaagtaaagtgtttccatgctatttcatgttttggccaaaaatttttaaaaaataaattacaattgttctctatta

SEQ ID NO: 653425 - DNA, 120 bp, Artificial Sequence
  ENSG00000183340_26 (sequence is synthesized)
ggatcatcttccgggagcgtggctaggggcggagcgactgccgcgcgatagtcagggagctgtgcgggtcctggttgcaagagaggaaggattaaaggaatggagggcatcataaacatg

SEQ ID NO: 653426 - DNA, 120 bp, Artificial Sequence
  ENSG00000183340_27 (sequence is synthesized)
aagaaaaatgtgagagagtatgataattgaaagaagagtttgtgttcaaagggagagattaaagatgtgcaacttcagaccttggccaaagtgaaacatttcaccaagattcaggctgtg

SEQ ID NO: 653427 - DNA, 120 bp, Artificial Sequence
  ENSG00000183340_28 (sequence is synthesized)
agaaacatcttgcctacccacctgaccacaaggcagacaaaggcccaacggaagaaacattcttatcataccctactcggcaaaggcccaacggaagaaacattcttatcataccctact

SEQ ID NO: 653428 - DNA, 120 bp, Artificial Sequence
  ENSG00000183340_29 (sequence is synthesized)
aaagaaacatctctatcatattctgttgggagaaagtgcaaagaaacaccacgttctggaggaataagagccagaactgcctcatcatgggaacatcttatgaatatcctgccgggcagc

SEQ ID NO: 653429 - DNA, 120 bp, Artificial Sequence
  ENSG00000183340_30 (sequence is synthesized)
cagctatatggcccagatctctgccgctcagacccattaagtaccccagcctgtaagcggcggtgagctctgtctggccctaagttagttggccctcaacttccgcaggtgtctgcaata

SEQ ID NO: 653430 - DNA, 120 bp, Artificial Sequence
  ENSG00000183340_31 (sequence is synthesized)
tacctgtgttgctgtttgagctgccccctctctgtgtctttttttaaccctcgtctcccttcaaaacctaacagtaagcactcaattcttacttgttgaataaatgaatgatagacaatg

SEQ ID NO: 653431 - DNA, 120 bp, Artificial Sequence
  ENSG00000183346_0 (sequence is synthesized)
gagattgcggcgatgtcgcaggggacgactccctgggggccgaccccggcgggaaccacgcccgaatcggaggtacaccgcccctttcccttcccggtaccggtgccggtaccagagacc

SEQ ID NO: 653432 - DNA, 120 bp, Artificial Sequence
  ENSG00000183346_1 (sequence is synthesized)
tccgagcgctcattcccagtccgcggagtctgcggccaagccaaatccggtctccgaagaggcgccgcacgtctggccccggctgaaaactgagaatatttttgaatttcaaaaaccttg

SEQ ID NO: 653433 - DNA, 120 bp, Artificial Sequence
  ENSG00000183346_2 (sequence is synthesized)
aaacttgtttaaaggatgccattctactagattattatgtatctggatttttgtgggctagaggaatggatttctctattattcagtattcaaaatttatgactttactagctatgtcac

SEQ ID NO: 653434 - DNA, 120 bp, Artificial Sequence
  ENSG00000183346_3 (sequence is synthesized)
ttcaaaatcttaaaacactacatatgtccttagaggaaagcataaaatggcttggagaagttatggctgaaataggaccaacacattcgcaaaagagtgaggactggaatatctttgatg

SEQ ID NO: 653435 - DNA, 120 bp, Artificial Sequence
  ENSG00000183346_4 (sequence is synthesized)
taaaacaagccaatgctatcattgattacttaaaaatcagcttatttcaacactacaagctatacgagtttatgttctactctgccagggaagaaattgtgataggaactgagcaagtga

SEQ ID NO: 653436 - DNA, 120 bp, Artificial Sequence
  ENSG00000183346_5 (sequence is synthesized)
tagaggttgtcaagtctgcatgtggccctttcccaaatcctctggaagaaggaatctcatttgatatttattcaacattcatagagccccccacaatattggatacggaaatgaagaggt

SEQ ID NO: 653437 - DNA, 120 bp, Artificial Sequence
  ENSG00000183346_6 (sequence is synthesized)
tggatcaagaacaaggccctgaggagtctcagccagaaactgacacctcagacatggatcctttagttggttttaccattgaagatgtaaaatcagtgctggatcaagtcacagatgaca

SEQ ID NO: 653438 - DNA, 120 bp, Artificial Sequence
  ENSG00000183346_7 (sequence is synthesized)
atcggcattcagaccgagataaacgaaaaactgcaaatacaggaagaggcctttaatgcacgaatagaaaaattgaaaaaggcctaaggacttggtacaaggagagtgatgctaaacttc

SEQ ID NO: 653439 - DNA, 120 bp, Artificial Sequence
  ENSG00000183346_8 (sequence is synthesized)
acagaaacaaacaaaaccagccagaataacagactctctggagcgtcgtgtctccatcacttagttgtgaaaggaaaaccaagccccactttttattttcctaagtaattagaaaagtat

SEQ ID NO: 653440 - DNA, 120 bp, Artificial Sequence
  ENSG00000183346_9 (sequence is synthesized)
tggtcccaattttgctatctcccatcccataacagcctctgaatttattgcaccaagtgtaatgagaacattttgtatacaagagtttgaaaaattatatataaaaatacaattactttt

SEQ ID NO: 653441 - DNA, 120 bp, Artificial Sequence
  ENSG00000183346_10 (sequence is synthesized)
atgatagtcctttgacgttttgactaataaatcctattcatcttcaaggagaatgaagtcaactttttaaataaccagaaataaagaaagatgataataacttcatccattttgacccaa

SEQ ID NO: 653442 - DNA, 120 bp, Artificial Sequence
  ENSG00000183346_11 (sequence is synthesized)
acggactgccacgttactggaacactgtgaaaacataccagtaccacactattgaggataaaatttgttaaacaatagcaattcaaatgcatatatgaggttttttttttttttactgaa

SEQ ID NO: 653443 - DNA, 120 bp, Artificial Sequence
  ENSG00000183346_12 (sequence is synthesized)
atcatttggttttcttatttaaacgtttcagtgtgaaaccaattttctgaaattatataatgcagtttgaagcactttaatttattctgtactgtatttgttatttctaatcttgttact

SEQ ID NO: 653444 - DNA, 120 bp, Artificial Sequence
  ENSG00000183346_13 (sequence is synthesized)
ctcccaggagaatacatgacctatataaaaagaagcaatgtataaatggttattaaagaccaacctatatatagattgtaaaaatcttaaatacaaatcaaactcatagagttcccagaa

SEQ ID NO: 653445 - DNA, 120 bp, Artificial Sequence
  ENSG00000183346_14 (sequence is synthesized)
gagattgcggcgatgtcgcaggggacgactccctgggggccgaccccggcgggaaccacgcccgaatcggagagagacactgaattccaggagcatgaaaagattctgtctccggatttt

SEQ ID NO: 653446 - DNA, 120 bp, Artificial Sequence
  ENSG00000183347_0 (sequence is synthesized)
ggaggaaagaaaacaagaggtgagtgaggcaactgaaaactgttcttggacctgcggtgctatagagcaggctcttctaggttggcagttgccatggaatctggacccaaaatgttggcc

SEQ ID NO: 653447 - DNA, 120 bp, Artificial Sequence
  ENSG00000183347_1 (sequence is synthesized)
cccgtttgcctggtggaaaataacaatgagcagctattggtgaaccagcaagctatacagattcttgaaaagatttctcagccagtggtggtggtggccattgtaggactgtaccgtaca

SEQ ID NO: 653448 - DNA, 120 bp, Artificial Sequence
  ENSG00000183347_2 (sequence is synthesized)
gggaaatcctacttgatgaaccatctggcaggacagaatcatggcttccctctgggctccacggtgcagtctgaaaccaagggcatctggatgtggtgcgtgccccacccatccaagcca

SEQ ID NO: 653449 - DNA, 120 bp, Artificial Sequence
  ENSG00000183347_3 (sequence is synthesized)
aaccacaccctggtccttctggacaccgaaggtctgggcgatgtggaaaagggtgaccctaagaatgactcctggatctttgccctggctgtgctcctgtgcagcacctttgtctacaac

SEQ ID NO: 653450 - DNA, 120 bp, Artificial Sequence
  ENSG00000183347_4 (sequence is synthesized)
agcatgagcaccatcaaccaccaggccctggagcagctgcattatgtgacggagctcacagaactaattaaggcaaagtcctccccaaggcctgatggagtagaagattccacagagttt

SEQ ID NO: 653451 - DNA, 120 bp, Artificial Sequence
  ENSG00000183347_5 (sequence is synthesized)
gtgagtttcttcccagactttctttggacagtacgggatttcactctggagctgaagttgaacggtcaccctatcacagaagatgaatacctggagaatgccttgaagctgattcaaggc

SEQ ID NO: 653452 - DNA, 120 bp, Artificial Sequence
  ENSG00000183347_6 (sequence is synthesized)
aataatcccagagttcaaacatccaattttcccagggagtgcatcaggcgtttctttccaaaacggaagtgtttcgtctttgaccggccaacaaatgacaaagaccttctagccaatatt

SEQ ID NO: 653453 - DNA, 120 bp, Artificial Sequence
  ENSG00000183347_7 (sequence is synthesized)
gagaaggtgtcagaaaagcaactggatcccaaattccaggaacaaacaaacattttctgttcttacatcttcactcatgcaagaaccaagaccctcagggagggaatcacagtcactggg

SEQ ID NO: 653454 - DNA, 120 bp, Artificial Sequence
  ENSG00000183347_8 (sequence is synthesized)
aatcgtctgggaactctggcagtgacttatgtagaggccatcaacagtggagcagtgccttgtctggagaatgcagtgataactctggcccagcgtgagaactcagcggccgtgcagagg

SEQ ID NO: 653455 - DNA, 120 bp, Artificial Sequence
  ENSG00000183347_9 (sequence is synthesized)
gcagctgactactacagccagcagatggcccagcgagtgaagctccccacagacacgctccaggagctgctggacatgcatgcggcctgtgagagggaagccattgcaatcttcatggag

SEQ ID NO: 653456 - DNA, 120 bp, Artificial Sequence
  ENSG00000183347_10 (sequence is synthesized)
cactccttcaaggatgaaaatcaggaattccagaagaagttcatggaaaccacaatgaataagaagggggatttcttgctgcagaatgaagagtcatctgttcaatactgccaggctaaa

SEQ ID NO: 653457 - DNA, 120 bp, Artificial Sequence
  ENSG00000183347_11 (sequence is synthesized)
ctcaatgagctctcaaagggactaatggaaagtatctcagcaggaagtttctctgttcctggagggcacaagctctacatggaaacaaaggaaaggattgaacaggactattggcaagtt

SEQ ID NO: 653458 - DNA, 120 bp, Artificial Sequence
  ENSG00000183347_12 (sequence is synthesized)
gaaggcagtagcagtggatcgggccaagaaggaggcagctgagaaggaacaggaacttttaaaacagaaattacaggagcagcagcaacagatggaggctcaagataagagtcgcaagga

SEQ ID NO: 653459 - DNA, 120 bp, Artificial Sequence
  ENSG00000183347_13 (sequence is synthesized)
aaacatagcccaactgaaggagaagctgcagatggagagagaacacctactgagagagcagattatgatgttggagcacacgcagaaggtccaaaatgattggcttcatgaaggatttaa

SEQ ID NO: 653460 - DNA, 120 bp, Artificial Sequence
  ENSG00000183347_14 (sequence is synthesized)
gaagaagtatgaggagatgaatgcagagataagtcaatttaaacgtatgattgatactacaaaaaatgatgatactccctggattgcacgaaccttggacaaccttgccgatgagctaac

SEQ ID NO: 653461 - DNA, 120 bp, Artificial Sequence
  ENSG00000183347_15 (sequence is synthesized)
tgcaatattgtctgctcctgctaaattaattggtcatggtgtcaaaggtgtgagctcactctttaaaaagcataagctccccttttaaggatattatagattgtacatatatgctttgga

SEQ ID NO: 653462 - DNA, 120 bp, Artificial Sequence
  ENSG00000183347_16 (sequence is synthesized)
ccttttaaggatattatagattgtacatatatgctttggactatttttgatctgtatgtttttcattttcattcagcaagttttttttttttttcagagtcttactctgttgcccaggct

SEQ ID NO: 653463 - DNA, 60 bp, Artificial Sequence
  ENSG00000183347_17 (sequence is synthesized)
acctgcctcagccccctagtagctgggattataggtgtacaccaccacacccagctaatt

SEQ ID NO: 653464 - DNA, 65 bp, Artificial Sequence
  ENSG00000183347_18 (sequence is synthesized)
tttagcaaagttttaaacataaaaagtgcttattagaggatatcagtgcctggcccacatgagag

SEQ ID NO: 653465 - DNA, 120 bp, Artificial Sequence
  ENSG00000183347_19 (sequence is synthesized)
gtgcttattagaggatatcagtgcctggcccacatgagagaacagatccatacacactttgaaaaactttgttcacttttaggaaatataattttgaaaaatcatttacatacaagaggt

SEQ ID NO: 653466 - DNA, 120 bp, Artificial Sequence
  ENSG00000183347_20 (sequence is synthesized)
ccactgaggcattgcttttaatggcaaaatattgcaatgtacttgaatgtccttcacattagattggtaagataaattttagtatgtgcatgtactggaatattatatagccagtaaaca

SEQ ID NO: 653467 - DNA, 120 bp, Artificial Sequence
  ENSG00000183347_21 (sequence is synthesized)
aattgacaatgaagctctatttgtaccagtaaagaatggtcttgaagagacattgtaaaatgaaaaaaaaaaaaaccaagttgtaaagcaatgtagattatcttatcagcatggaaaaaa

SEQ ID NO: 653468 - DNA, 120 bp, Artificial Sequence
  ENSG00000183347_22 (sequence is synthesized)
tgcaattattatatggaagcatgcaaatatatctctggaaagattaatcaaaatctattattattggctccttctgggaagaaccaagtgaatgtaggggttgaaggaacacatactctt

SEQ ID NO: 653469 - DNA, 120 bp, Artificial Sequence
  ENSG00000183347_23 (sequence is synthesized)
cactttatactcttgaattttgtaaagaaatcttattttaccgattcagaaataaataagaaaatgtaagagacaatgctaataatgataacaataaaaaaatagtgaaattggctatca

SEQ ID NO: 653470 - DNA, 120 bp, Artificial Sequence
  ENSG00000183354_0 (sequence is synthesized)
acgcatgcgcaccggggatggcgacagggcctctttctttgcttctctccacagctcttcccagccggggggctgagtgccctcccccttctctccctgcccctcccctttctcccccct

SEQ ID NO: 653471 - DNA, 120 bp, Artificial Sequence
  ENSG00000183354_1 (sequence is synthesized)
caccgcccagcggggcttctaactgacagttgtcgccgggccccgtccgtgcaccgcctccttctgcccgtgtcccccgcaggtagaggggggcgggagggggtgtgagggagaggagga

SEQ ID NO: 653472 - DNA, 120 bp, Artificial Sequence
  ENSG00000183354_2 (sequence is synthesized)
aggtagaggggggcgggagggggtgtgagggagaggaggagccggagccgccgctgcggccccctccggggaggggagaggagaacccccttcctcctcgccccctcccagccccccgct

SEQ ID NO: 653473 - DNA, 120 bp, Artificial Sequence
  ENSG00000183354_3 (sequence is synthesized)
ggcctggccggtgaagagcaggcgggcggggtgcggaggggtgaggccggcgagggccgtgcgcgcgccgccgccgggggggaggggagaggagggcacctaggctctcctcttctctcc

SEQ ID NO: 653474 - DNA, 120 bp, Artificial Sequence
  ENSG00000183354_4 (sequence is synthesized)
ctcccccctcctcgcgcgccatgtaaccccgccccgccggcggtgagctcaagacccccgcgcgcaccgagccgagccggcggctgaggagagccaggcccgatgtggcgggggctacgc

SEQ ID NO: 653475 - DNA, 120 bp, Artificial Sequence
  ENSG00000183354_5 (sequence is synthesized)
gccgcggccgagccgtgaggaagcggctcgcgctcacgcgtcccccagcacctcgagcggctgttccacaccgcccagcctaggcctgccggggcatgagtgtgcccgggacgccgggag

SEQ ID NO: 653476 - DNA, 120 bp, Artificial Sequence
  ENSG00000183354_6 (sequence is synthesized)
cgatggagccggctggggaggaagagcggccgccaccggcggccgaaggagaggacgacgaggaggaggtggcagcggcggcccagacctcagggccggcccacggaaggagtgcctcct

SEQ ID NO: 653477 - DNA, 120 bp, Artificial Sequence
  ENSG00000183354_7 (sequence is synthesized)
cgctggaggacgcggacgatcaggaggaagagatggaggcgatggtgatcggaggcggttgctgcaaggagcaggagctgacctacgagctacagcagggctaccgcatcctgggcgagt

SEQ ID NO: 653478 - DNA, 120 bp, Artificial Sequence
  ENSG00000183354_8 (sequence is synthesized)
gagttcctgcaggagaagcaccggggcctcaccgccccctttctgcagcccttggggggcgttgccaccgcggaggaggaggtggcggaagggccgcgcagcgggggccggggcggtcgc

SEQ ID NO: 653479 - DNA, 120 bp, Artificial Sequence
  ENSG00000183354_9 (sequence is synthesized)
tcccgcagcagcccggacagggcatgtgtctgctgcagatggaagagaagttcgccagcggccagtacgggggcatcaccgagttcgtggcggacttcaggttgatgctggagacgtgct

SEQ ID NO: 653480 - DNA, 120 bp, Artificial Sequence
  ENSG00000183354_10 (sequence is synthesized)
accgcctgcacggagtggaccactggatctccaaacagggccagaagctggagatgatgctggagcagaagttagcgcttctctctcggcacttgagagaaaagacaacgatagcagtta

SEQ ID NO: 653481 - DNA, 120 bp, Artificial Sequence
  ENSG00000183354_11 (sequence is synthesized)
catctagaggctattatggattggaggatgagaagggaactgcatgtacctcaacaaggcgtcggtcaacaccgcgaagtttggcaggcttgacaagtggagtttttgaatctataatgg

SEQ ID NO: 653482 - DNA, 120 bp, Artificial Sequence
  ENSG00000183354_12 (sequence is synthesized)
ttcaagttttgagacaggaagaacagctgagagcaaaagaagaaaaaaggcttcgggagcaggaaagaaaagaagcagaagaagctagtcaaaaggaaatagaagaatgggaaagaaaac

SEQ ID NO: 653483 - DNA, 120 bp, Artificial Sequence
  ENSG00000183354_13 (sequence is synthesized)
ttctagctcaagcagctccaacttgtatggagaccatgtgggaaattccagctattgggcatttcctttgtttagctcagcaaattctaaatttgccagaaatagtcttttacgaattgg

SEQ ID NO: 653484 - DNA, 120 bp, Artificial Sequence
  ENSG00000183354_14 (sequence is synthesized)
aacgttgtcttctgatgcctcagtgtaatgcttttctatcgaaaataatgacttctctattaagtcctccccatcgcagacctaccttacatcgaagacctactttgccttataggacct

SEQ ID NO: 653485 - DNA, 120 bp, Artificial Sequence
  ENSG00000183354_15 (sequence is synthesized)
gggaagcagcgctgaggcagaaagtacaacagtggtacactgctgtagggcaaactgaaaatcctgataactgtgctgaaaaactggggttgtgtcctcagttttttaaagttcttggag

SEQ ID NO: 653486 - DNA, 120 bp, Artificial Sequence
  ENSG00000183354_16 (sequence is synthesized)
aagttaatccattggaagaaaaaccttttcacgaactacctttttaccaaaaagtgtggctacttaagggtctttgtgactttgtgtatgaaacacaaaaggaagttcaagatgctgtac

SEQ ID NO: 653487 - DNA, 120 bp, Artificial Sequence
  ENSG00000183354_17 (sequence is synthesized)
ttggacagcctatccatgaatgcagggaagttattcttggttatgattatttggagaatgcttatgtacattttccacagttctgtggtgcagatgtacggatttataaacagagaccct

SEQ ID NO: 653488 - DNA, 120 bp, Artificial Sequence
  ENSG00000183354_18 (sequence is synthesized)
ttcaggccccagaatttccaattccacccattaaaatacaaagagtacctcggattaaattggagaaattgaagtgtgactatgttagtacaagtaatggagaacatagatgtagcagag

SEQ ID NO: 653489 - DNA, 120 bp, Artificial Sequence
  ENSG00000183354_19 (sequence is synthesized)
atagcctgccctcttccttcaagaaagagcaggaaaataattttgatccagcttgctgtcctgctaaaatgatcttggataatcatgacatctctgttgaaatgggagtaaaatccaact

SEQ ID NO: 653490 - DNA, 120 bp, Artificial Sequence
  ENSG00000183354_20 (sequence is synthesized)
atgaaattagaattcgcaggccttgtgaaattaaaaaaactgattgttgtaaagaaaatttagagaaaccaaggagtccaggggaagttactggctttggagagcctcttagtccaggtg

SEQ ID NO: 653491 - DNA, 120 bp, Artificial Sequence
  ENSG00000183354_21 (sequence is synthesized)
aaataaggtttatagaaaatcaggaaaaatacggtgaagcttccagaataaagattgaacccagtccattaaaagaaaatactctaaaatcttgccaaatacatgtaaatggaagtcaca

SEQ ID NO: 653492 - DNA, 120 bp, Artificial Sequence
  ENSG00000183354_22 (sequence is synthesized)
gtgatcatccagaaattaactgccacaaagttgtaagggatattctattagagcagtcactacagagccacaagaaactcaaactaactaaaatgagggcaaaaaagaagaaaaagaaaa

SEQ ID NO: 653493 - DNA, 120 bp, Artificial Sequence
  ENSG00000183354_23 (sequence is synthesized)
aaaagaaattgaaagatgttttgaatgaaaacttacagagaaagcgtgaaggtcttcattctcttgcattcaagtcttacaaacctgagatccagaataagttattgatcatcaaaaaaa

SEQ ID NO: 653494 - DNA, 120 bp, Artificial Sequence
  ENSG00000183354_24 (sequence is synthesized)
aagcaaaacacaagaagcacaaatctggaaaaaaatccgtctctaaaaaagcaatcacaaagaagaggaaaactgtcataaagtcacctactgtaccagagtttcagcttatttgcacta

SEQ ID NO: 653495 - DNA, 120 bp, Artificial Sequence
  ENSG00000183354_25 (sequence is synthesized)
atcttgatgaactcagggaattaatcacaaaaatcgagaatgaactcaaagatctggaaaacagtagaaaaaaatcgggaaaatggtatcatcggaggcaagctgtaaaagaattacata

SEQ ID NO: 653496 - DNA, 120 bp, Artificial Sequence
  ENSG00000183354_26 (sequence is synthesized)
gtacattgatacgtcttttaaatgaattgctgccatgggaaccaaagttaatgaaggctttccaaagaaacaggagccgcctgaagaaagactatgatgatttcagaagacaacctgatc

SEQ ID NO: 653497 - DNA, 120 bp, Artificial Sequence
  ENSG00000183354_27 (sequence is synthesized)
atgatacatttaatagagaactatggaccactgatgaaggtgaaggagatcttggaaaagactctcctaagggagaaatcagtaagtctatagactcaacagaacctctggatatcctgg

SEQ ID NO: 653498 - DNA, 120 bp, Artificial Sequence
  ENSG00000183354_28 (sequence is synthesized)
agaaagatcactttgattcagatgatatgaagttgtcagaaatagattttcctatggctagaagcaagctgttgaaaaaggaattgccttcaaaagacttaccgaagacactgcttaaaa

SEQ ID NO: 653499 - DNA, 120 bp, Artificial Sequence
  ENSG00000183354_29 (sequence is synthesized)
cacttaaacgacagtccaaacaaactgattatgtggatgacagcacaaaagagctttctccaaggaagaaggcaaagttaagcacaaatgagacaacagttgagaatctagaaagtgatg

SEQ ID NO: 653500 - DNA, 120 bp, Artificial Sequence
  ENSG00000183354_30 (sequence is synthesized)
tgcagattgactgtttcagtgaatcaaagcatacagagccatcatttccagagtcatttgcctcattggattcagtaccagtgtctactctccagaaagggaccaaacccattcaggctt

SEQ ID NO: 653501 - DNA, 120 bp, Artificial Sequence
  ENSG00000183354_31 (sequence is synthesized)
aagcccgataaagccagcattgacctgccacaccaatacaaaaggtcctttacaaatggtatacaaaatgccctgtggccagtggttgccaatagatcttcaaaatagctctgtaaagat

SEQ ID NO: 653502 - DNA, 120 bp, Artificial Sequence
  ENSG00000183354_32 (sequence is synthesized)
tcaggtgcagcctatggtggatcctaaaacaggagaaaaaatcatgcagcaagttcttattctgcctaagaattttgtgattcagcataaagaaggaaaagcagttgcaaaagaagtgcc

SEQ ID NO: 653503 - DNA, 120 bp, Artificial Sequence
  ENSG00000183354_33 (sequence is synthesized)
accacttcaacagaaaggtacagaacaacattgttcatctttcccacagacaacaaatataaattcttctttagcatcagtttttgtcaactcaccaggaactgtttctacccaactacc

SEQ ID NO: 653504 - DNA, 120 bp, Artificial Sequence
  ENSG00000183354_34 (sequence is synthesized)
aaatacagctttcaacaaaacaattacacctttatcaaatataagtagtgctagaccacagcctttgtcgcctgtaacctctgtaagtaacttattaacaccatcagttaagactagcca

SEQ ID NO: 653505 - DNA, 120 bp, Artificial Sequence
  ENSG00000183354_35 (sequence is synthesized)
gagtgaggcaggaaaagccaagaatgcagtttcagcagccacattctccttgcccagtgcttcaccgaccatttcctccacaggtcagcctctgtcatcaacaacaacactaaatgggtc

SEQ ID NO: 653506 - DNA, 120 bp, Artificial Sequence
  ENSG00000183354_36 (sequence is synthesized)
tacaaatcctggtagttccttcaactgttttgcacaacagactgctgattcttctgaagcaaagcaagagctgaaaactgtgtgcataagagattcacagtcaattcttgttaggacacg

SEQ ID NO: 653507 - DNA, 120 bp, Artificial Sequence
  ENSG00000183354_37 (sequence is synthesized)
aggtgggaacactggagttgtaaaagtacagaccaacccagatcaaaattcacccaatactgtatcttcaagttcagttttcacttttgctcctcagctgcaggcatttctggtgccaaa

SEQ ID NO: 653508 - DNA, 120 bp, Artificial Sequence
  ENSG00000183354_38 (sequence is synthesized)
atcaacaacttcttcctctgctttttcacctgtagctggaacaactactacatctagtctttcaccttttagccaaacaccaacttctgtttccattccagctagctttgccccatccat

SEQ ID NO: 653509 - DNA, 120 bp, Artificial Sequence
  ENSG00000183354_39 (sequence is synthesized)
ggggaaaaatctcaaacttacattaggccacaccactggcagtggtgatttgggccacgtgatagataaaacttcacacatgccctcttctcccttgaagtcctctatttgttctagtac

SEQ ID NO: 653510 - DNA, 120 bp, Artificial Sequence
  ENSG00000183354_40 (sequence is synthesized)
tctactaccatcaacaacaagtagttcggtaagtgtaattagcatatcagcagcaaattttggacaaaacaatgcaaatattattcatactccaactaaacagcaacaagtagattatat

SEQ ID NO: 653511 - DNA, 120 bp, Artificial Sequence
  ENSG00000183354_41 (sequence is synthesized)
cacaaaaagttaccctgttacaaggtcagaagcaacagcagcaacaaatggagatgtaatcagtgggactccagttcagaaacttatgctggtatcagctccatctattctttcttctgg

SEQ ID NO: 653512 - DNA, 120 bp, Artificial Sequence
  ENSG00000183354_42 (sequence is synthesized)
caatggaactgcaattaatatgacacctgcgctgacatctacaggtgtttctgcccagaaattagtttttattaatgccccagttcctagtggtacatcaaccccaactcttgttgcaga

SEQ ID NO: 653513 - DNA, 120 bp, Artificial Sequence
  ENSG00000183354_43 (sequence is synthesized)
atcattaaaacaaactcttcctcctccattgcataaagcatatgttaagactccagagcaaccccaaatagtactgattccgtctacagtgggcacaccaataaaaataaattcatcacc

SEQ ID NO: 653514 - DNA, 120 bp, Artificial Sequence
  ENSG00000183354_44 (sequence is synthesized)
agctgtgtctcagataaaggatgtgaaaattggactaaacataggtcaagcaattgtaaatacttcaggcactgtgccagctataccatcaattaacatattacaaaatgtaaccccaaa

SEQ ID NO: 653515 - DNA, 120 bp, Artificial Sequence
  ENSG00000183354_45 (sequence is synthesized)
aggagaagacaaaagtagcaagggctatattttgccattgtcaacaagtggtaattcagttccagtaagctcaaattttgtgagtcagaatattacccctgttaatgaatcagtggtttc

SEQ ID NO: 653516 - DNA, 120 bp, Artificial Sequence
  ENSG00000183354_46 (sequence is synthesized)
ttcagcaagagcagtaaatgtgctttcagttaccggagcaaatttatctttgggttcctttccagtgacctcagcctctgcttcagctggggcacaacctcctgttttagtcagtggaaa

SEQ ID NO: 653517 - DNA, 120 bp, Artificial Sequence
  ENSG00000183354_47 (sequence is synthesized)
tgatacctcttcaagaattatgcctattttgtcaaatagactttgctcatcaagtctcggaaacactgtggctatatcaactgtgaaaacaggacaccttgcatcatctgttctgatttc

SEQ ID NO: 653518 - DNA, 120 bp, Artificial Sequence
  ENSG00000183354_48 (sequence is synthesized)
aactacacaaccagtagtgtctcctaaatgtttaacatcagctttgcaaattcctgttacggttgccttacctacacctgcgactacatcccctaaaataataaacacagttccacattc

SEQ ID NO: 653519 - DNA, 120 bp, Artificial Sequence
  ENSG00000183354_49 (sequence is synthesized)
ggcagcagtaccaggagccacacgttctgtatctatttctaaaagacaatctcggacttcactccagttccattcaccagggatttcaactacagtgccaacaaatgtaaacacaaataa

SEQ ID NO: 653520 - DNA, 120 bp, Artificial Sequence
  ENSG00000183354_50 (sequence is synthesized)
acctcaaactgaattgtcgtccctttcaacaagtccaggtaaaataactaatacgtccaattttgcttctctgccaaatcagcaagctttagtaaaaacccccagttacagttctgctcc

SEQ ID NO: 653521 - DNA, 120 bp, Artificial Sequence
  ENSG00000183354_51 (sequence is synthesized)
aggtggcactaccattcacacggcttcggcaccatccaatgtaactagtctagtcgggagtcagttcagtgaaccttgtattcagcaaaaaatagtcatcaataccagtacacctttggc

SEQ ID NO: 653522 - DNA, 120 bp, Artificial Sequence
  ENSG00000183354_52 (sequence is synthesized)
acctggtactcagattatgattaacggaacccggtttattgttccaccacaaggtcttggagctggcagccatgttctccttatatctactaatccaaaatatggagcccccttagttct

SEQ ID NO: 653523 - DNA, 120 bp, Artificial Sequence
  ENSG00000183354_53 (sequence is synthesized)
taacagtggccaaggcattcaatctacaccaatagataactctgcccagaagatcacactagcatcaaataattccttaagtggccaacctctacaacatcctctaagaagccctacaaa

SEQ ID NO: 653524 - DNA, 120 bp, Artificial Sequence
  ENSG00000183354_54 (sequence is synthesized)
atttataaactcttttgggaatgcaagttctatacccacagtacatacatcaccacaactcataaacacaactgctaaggttcctgttccacctcctgtaccaacagtatcactgacttc

SEQ ID NO: 653525 - DNA, 120 bp, Artificial Sequence
  ENSG00000183354_55 (sequence is synthesized)
agtaattaagtctccagctactcttttggctaagacatctttggtttctgccatttgccccagtaatcctccactgccaagtagcacttcagtgtttcatttggacccacctgtcaaaaa

SEQ ID NO: 653526 - DNA, 120 bp, Artificial Sequence
  ENSG00000183354_56 (sequence is synthesized)
attgttggttagcccagaaggagccattttgaataccataaatactccagcatctaaggtttcttcactctctccatctctctctcagattgttgtatctgccagtcgaagtcctgcgtc

SEQ ID NO: 653527 - DNA, 120 bp, Artificial Sequence
  ENSG00000183354_57 (sequence is synthesized)
tgtcttccctgcttttcagtcgtcgggcttagagaagcctgacagagctgcatcttgaatttagactaaaagagccagtttttaaataatggggcattgttttgactcccataaaaattt

SEQ ID NO: 653528 - DNA, 74 bp, Artificial Sequence
  ENSG00000183354_58 (sequence is synthesized)
atcttttcattagcttgcaacaaggctttgttttcttggggagggaaagatctgttccatttcacttactgttc

SEQ ID NO: 653529 - DNA, 120 bp, Artificial Sequence
  ENSG00000183354_59 (sequence is synthesized)
cttggggagggaaagatctgttccatttcacttactgttctgaggagggtttcaaggttctgtgtttaaagtcaggatttacctgtctgtagaacataaagtgaacaaagtttgaatagt

SEQ ID NO: 653530 - DNA, 120 bp, Artificial Sequence
  ENSG00000183354_60 (sequence is synthesized)
ttagagtaagctagccttttgcacatttacattgacatgtttcttcttgaatttggactgttgcagcatatctatgatatggtattcagtgtcattagtgaaatcttatttttgtttctg

SEQ ID NO: 653531 - DNA, 120 bp, Artificial Sequence
  ENSG00000183354_61 (sequence is synthesized)
taaaaaaaaaaatacatatatatatttatgcattgtgaaaaatgcagtccatgatgtaaaattgtacatattccagaatccctaacaacctgtactaaatatatgtacaaagaactatgc

SEQ ID NO: 653532 - DNA, 120 bp, Artificial Sequence
  ENSG00000183354_62 (sequence is synthesized)
tgtcttatttatgttttgtttacataatgtatagttttttaagtattttagtaattttggaccagtgaactgttagcaacaatgcagaagaatctgcatgtaataaactgagttgctgta

SEQ ID NO: 653533 - DNA, 120 bp, Artificial Sequence
  ENSG00000183354_63 (sequence is synthesized)
atgtccccagcatcagtagattgccaactccctctccttgccacactccagccagtgttatgctggtgctgtcatacccatcccagattactgtagcagaatgcagttgttctttagttg

SEQ ID NO: 653534 - DNA, 120 bp, Artificial Sequence
  ENSG00000183354_64 (sequence is synthesized)
tgccaagctgccatccaactttcttgagcattttttctcatgggaaatgatcaagttttgatagcagaaagtgcttctttccaagactttctcgaggccatcttcctgtaggcgtcatgc

SEQ ID NO: 653535 - DNA, 120 bp, Artificial Sequence
  ENSG00000183354_65 (sequence is synthesized)
ttctgatgttacacagctgatattttcatatgagctgcatttttagactacaaagatgcttactcagactcagcccaagtctccatgtccatcacctgggacactgtctgaggaactctg

SEQ ID NO: 653536 - DNA, 120 bp, Artificial Sequence
  ENSG00000183354_66 (sequence is synthesized)
tgaggagagccttttccacagagaaatgagagcaccctcagtatcgctctgaagacttgatgaaggtttgctgacaagaaagggcttactcactgtacacagcccttcaataactcctac

SEQ ID NO: 653537 - DNA, 120 bp, Artificial Sequence
  ENSG00000183354_67 (sequence is synthesized)
cagactcagcccaagtctccatgtccatcacctgggacactgtctgaggaactctgtgaggagagccttttccacagagaaatgagagcaccctcagaccttttcctctaaatgaagtgc

SEQ ID NO: 653538 - DNA, 120 bp, Artificial Sequence
  ENSG00000183354_68 (sequence is synthesized)
attatgcatcaacctgaaaagctttcagatctgtaataacaagaaagagagacagcgagatctatggagaatgccttcgggtgctgaagtgctgaagtgctacctggctttaagcaagat

SEQ ID NO: 653539 - DNA, 120 bp, Artificial Sequence
  ENSG00000183354_69 (sequence is synthesized)
tgctgaaacctgtaatttttatagcttataaactcagttgatgtttcccattcatggaggatactggtaccagaagattggattgtgtaattgtgttagcttcctgcatatttgggtaaa

SEQ ID NO: 653540 - DNA, 120 bp, Artificial Sequence
  ENSG00000183378_0 (sequence is synthesized)
tttcagggaaaaactatgagtctcaaaatgcttataagcaggaacaagctgattttactactaggaatagtcttttttgaacgaggtaaatctgcaactctttcgctccccaaagctccc

SEQ ID NO: 653541 - DNA, 120 bp, Artificial Sequence
  ENSG00000183378_1 (sequence is synthesized)
agttgtgggcagagtctggttaaggtacagccttggaattattttaacattttcagtcgcattcttggaggaagccaagtggagaagggttcctatccctggcaggtatctctgaaacaa

SEQ ID NO: 653542 - DNA, 120 bp, Artificial Sequence
  ENSG00000183378_2 (sequence is synthesized)
aggcagaagcatatttgtggaggaagcatcgtctcaccacagtgggtgatcacggcggctcactgcattgcaaacagaaacattgtgtctactttgaatgttactgctggagagtatgac

SEQ ID NO: 653543 - DNA, 120 bp, Artificial Sequence
  ENSG00000183378_3 (sequence is synthesized)
ttaagccagacagacccaggagagcaaactctcactattgaaactgtcatcatacatccacatttctccaccaagaaaccaatggactatgatattgcccttttgaagatggctggagcc

SEQ ID NO: 653544 - DNA, 120 bp, Artificial Sequence
  ENSG00000183378_4 (sequence is synthesized)
ttccaatttggccactttgtggggcccatatgtcttccagagctgcgggagcaatttgaggctggttttatttgtacaactgcaggctggggccgcttaactgaaggtggcgtcctctca

SEQ ID NO: 653545 - DNA, 120 bp, Artificial Sequence
  ENSG00000183378_5 (sequence is synthesized)
caagtcttgcaggaagtgaatctgcctattttgacctgggaagagtgtgtggcagctctgttaacactaaagaggcccatcagtgggaagacctttctttgcacaggttttcctgatgga

SEQ ID NO: 653546 - DNA, 120 bp, Artificial Sequence
  ENSG00000183378_6 (sequence is synthesized)
gggagagacgcatgtcagggagattcaggaggttcactcatgtgccggaataagaaaggggcctggactctggctggtgtgacttcctggggtttgggctgtggtcgaggctggagaaac

SEQ ID NO: 653547 - DNA, 120 bp, Artificial Sequence
  ENSG00000183378_7 (sequence is synthesized)
aatgtgaggaaaagtgatcaaggatcccctgggatcttcacagacattagtaaagtgcttccctggatccacgaacacatccaaactggtaatcggagaaagagctccagagcctggtgc

SEQ ID NO: 653548 - DNA, 120 bp, Artificial Sequence
  ENSG00000183378_8 (sequence is synthesized)
gtgagcaggatgtcatagtcagcggggctgaggggaagctgcacttcccagaaagcctccacctatattatgagagcaagcaacggtgtgtctggaccctgctggtaccagaggaaatgc

SEQ ID NO: 653549 - DNA, 120 bp, Artificial Sequence
  ENSG00000183378_9 (sequence is synthesized)
atgtgttgctcagtttttcccacctagatgttgagtcttgtcaccacagttacctgtcaatgtattctttagaagacagacccattggaaaattttgtggagaaagcctcccttcatcca

SEQ ID NO: 653550 - DNA, 120 bp, Artificial Sequence
  ENSG00000183378_10 (sequence is synthesized)
ttcttattggctctaattctctaaggctgaaattcgtctctgatgccacagataatgcagctgggtttaatcttacctataaagctcttaaaccaaactacattcctgattcaggttgca

SEQ ID NO: 653551 - DNA, 120 bp, Artificial Sequence
  ENSG00000183378_11 (sequence is synthesized)
gttacttaactgtcctttttgaagaaggtctcatacagagtctaaactatcctgaaaactacagtgacaaggctaactgtgactggatttttcaagcctccaaacatcacctaattaagc

SEQ ID NO: 653552 - DNA, 120 bp, Artificial Sequence
  ENSG00000183378_12 (sequence is synthesized)
tttcatttcagagtctggaaatagaagaaagtggagactgcacttccgactatgtgacagtgcacagcgatgtagaaaggaagaaggaaatagctcggctgtgtggctatgatgtcccca

SEQ ID NO: 653553 - DNA, 120 bp, Artificial Sequence
  ENSG00000183378_13 (sequence is synthesized)
cccctgtgctgagcccctccagcatcatgctcatcagcttccaatcagatgaaaacgggacctgcaggggctttcaggctacagtctccttcattcctaaagcagtatacccagatttaa

SEQ ID NO: 653554 - DNA, 120 bp, Artificial Sequence
  ENSG00000183378_14 (sequence is synthesized)
acatctccatatcagaggatgaatcaatgtttctggagacatgagatgtgccaaatggagaaaccaatgtttctggccaaggggcaccagtgactgtcagtaaaccaccagaagctagag

SEQ ID NO: 653555 - DNA, 120 bp, Artificial Sequence
  ENSG00000183378_15 (sequence is synthesized)
gagaggcttggggcagactcctcgtcacagccctcagacagagccatccctgctgacacgttgatcttggacttctagcctccagaactatgagacaataaatttctgttgttctaagcc

SEQ ID NO: 653556 - DNA, 120 bp, Artificial Sequence
  ENSG00000183378_16 (sequence is synthesized)
ggaaccaaaaaggcatcatagaagcaaagacaggagaagatttcatgaagaacgaagagtacatcaagaagaaccaggaggctatggtgtttgcagcttctggagggaggggctgctgtg

SEQ ID NO: 653557 - DNA, 120 bp, Artificial Sequence
  ENSG00000183379_0 (sequence is synthesized)
ctgcgggcgggagctgtccgcggtgctgaagcggcggctgctcagggacgcggggacgagagcaggggagccctcctgggagttccaccgcgaccgcgaggcgggggcgccgtcgctcac

SEQ ID NO: 653558 - DNA, 120 bp, Artificial Sequence
  ENSG00000183379_1 (sequence is synthesized)
cggcccatgccgagcccccgagccccgcggaggaggcgggaccgtccgcggcgggacaggctctgaggactgctcagctggcccaggcccccctccccagcagctgccccagaaccatgg

SEQ ID NO: 653559 - DNA, 120 bp, Artificial Sequence
  ENSG00000183379_2 (sequence is synthesized)
agagtctgagtgaactacagaacccgctgctgcccaggagccctgcccatctccatggcccctatccctacccggagaccccacccagctggtcctgccaggaaaagctctactcctacc

SEQ ID NO: 653560 - DNA, 120 bp, Artificial Sequence
  ENSG00000183379_3 (sequence is synthesized)
tcctaggtggcgctgggcctgccggagcccaccagctcctggacccagggtccctgcagctggccgtggaggcctggtaccggcccagctgcctcctggggagagacaaggtcaaggagc

SEQ ID NO: 653561 - DNA, 120 bp, Artificial Sequence
  ENSG00000183379_4 (sequence is synthesized)
ccagggcaggcagctgtgagacaagcttcacagaggacagggagccccaggaggggcctccagagcagcccacaggacctggccaagctgcagagaatgtcaccatccagactgtgtcct

SEQ ID NO: 653562 - DNA, 120 bp, Artificial Sequence
  ENSG00000183379_5 (sequence is synthesized)
atggggtacaagaggagctgcgggaccaggaggatgaccaggaggaagaggagagcgatgccacttcaacggagagtgaaagtgaagacaacttcctcacgctgcctcccagggaccacc

SEQ ID NO: 653563 - DNA, 120 bp, Artificial Sequence
  ENSG00000183379_6 (sequence is synthesized)
tgggacttactctcttctccatgctctgctgcttctggccactgggcattgctgccttctacttctcccaggggaccagcaaggccatctccaaaggggacttccgcctggccagcacca

SEQ ID NO: 653564 - DNA, 120 bp, Artificial Sequence
  ENSG00000183379_7 (sequence is synthesized)
cctcccgccgggccctcttcctagccacactcgccatcgccgtgggggccggtctctacgtggctgtggtggtggctctggcagcttacatgtcccagaacggtcatggctagtagccag

SEQ ID NO: 653565 - DNA, 120 bp, Artificial Sequence
  ENSG00000183379_8 (sequence is synthesized)
tagggcctgcatcctgactcccctgcccacctgaggaagcagtggggcttggagttgcagaccctatggaaaggcccggcccctgaagatgatcccgtgagagtggcttgctgaggggga

SEQ ID NO: 653566 - DNA, 120 bp, Artificial Sequence
  ENSG00000183379_9 (sequence is synthesized)
gacccccattccacagcctgcagagctcagccttcacttctgcttgcccgctgctcccagccccagagcagggcccggggcgccactctctaacccaggctacagacgggaaacagaagg

SEQ ID NO: 653567 - DNA, 120 bp, Artificial Sequence
  ENSG00000183379_10 (sequence is synthesized)
cctgccctacagccagcccaccacctaccctgccaacctccccacagagaaagagcaggaggttacagggagaaaagggggtgcccagagcacaaggggacccgtcccaatcctttcagc

SEQ ID NO: 653568 - DNA, 120 bp, Artificial Sequence
  ENSG00000183379_11 (sequence is synthesized)
ccacagggatcttcacctggggacagcctgagcttcccccaactccactgtctggccccatcatgcccagacctcagcaggccaagaaggaaatacgtggaggcaagggggcctcttgct

SEQ ID NO: 653569 - DNA, 120 bp, Artificial Sequence
  ENSG00000183379_12 (sequence is synthesized)
gtctctgattctagagggtgcttatctctgcatgggcttgtgaggcactgtagattctagatagggaagaggagcctcggtatgtaaactctgaaccaagggcaggttcttggagcttct

SEQ ID NO: 653570 - DNA, 120 bp, Artificial Sequence
  ENSG00000183379_13 (sequence is synthesized)
tcatgcgggtgcaaaaggcagttgcaatgacagagaatagagggtcctgaaatattgctgtactacatgactcttcctactctccccccactccccgcccctatcatccttttctgggct

SEQ ID NO: 653571 - DNA, 120 bp, Artificial Sequence
  ENSG00000183379_14 (sequence is synthesized)
ttgcctgggggtccgtgagctggtgccatcacaagtagactagacccagagagtgccctcagctcaccagccactgagcgcacggccctaggtccagccctacagaaaacgcagcaagga

SEQ ID NO: 653572 - DNA, 120 bp, Artificial Sequence
  ENSG00000183379_15 (sequence is synthesized)
gagaccctagggagtagtgagtatagatgagggaagggactcagggaaggaatggcctgctgagtagtcagcggtgcttaggaaggcttcctggaggaggtatcccttgagcaagtccta

SEQ ID NO: 653573 - DNA, 120 bp, Artificial Sequence
  ENSG00000183379_16 (sequence is synthesized)
ggatgaatagaattcatctaagggatttggtcacataactctttgtatttgtaggcagggatgtggcaggaaccttccatgggaagcttccaggctgtttggattctgcctggaacatct

SEQ ID NO: 653574 - DNA, 120 bp, Artificial Sequence
  ENSG00000183379_17 (sequence is synthesized)
gggctggagccaaactacagccattcctaagggttctgccaactcaaggaggaacgtcacacctgtctctcaaagaccaatgatgttttcccatctctgaatgctagggggtcagtggtg

SEQ ID NO: 653575 - DNA, 120 bp, Artificial Sequence
  ENSG00000183379_18 (sequence is synthesized)
ggtacctggttacccctggggcatcttcactgatatctctgctcagtgccagtctcaacaccctcagccactagggcacatccagaattttagagacatctccaggtaggcggggggcag

SEQ ID NO: 653576 - DNA, 120 bp, Artificial Sequence
  ENSG00000183379_19 (sequence is synthesized)
caccaatgtgggcaggcctgtctggactcaagctacaggcccctgctgtgcatgatgtgggaacctggtcattcccatgccccatccagagcccagggctgtggctccaccactgagcat

SEQ ID NO: 653577 - DNA, 120 bp, Artificial Sequence
  ENSG00000183379_20 (sequence is synthesized)
cccttgtcccactgtcctcccctgcctcgggcactgcccagccctccactcctgcatcacagcagttttaaggtcccattattgtactgatttatccttgtaataaatgtttctgtaaca

SEQ ID NO: 653578 - DNA, 80 bp, Artificial Sequence
  ENSG00000183386_0 (sequence is synthesized)
actcgcccacacggtccgtctgcagtcggcagcctcgccggcagctcgctcggcccccgcttggcccggcccgcaggtag

SEQ ID NO: 653579 - DNA, 120 bp, Artificial Sequence
  ENSG00000183386_1 (sequence is synthesized)
tgcgccgcgcgctccccgctcccgccgcccgcttcgagggttctctccccttgccaccatgagcgagtcatttgactgtgcaaaatgcaacgagtccctgtatggacgcaagtacatcca

SEQ ID NO: 653580 - DNA, 120 bp, Artificial Sequence
  ENSG00000183386_2 (sequence is synthesized)
gacagacagcggcccctactgtgtgccctgctatgacaatacctttgccaacacctgtgctgagtgccagcagcttatcgggcatgactcgagggagctgttctatgaagaccgccattt

SEQ ID NO: 653581 - DNA, 120 bp, Artificial Sequence
  ENSG00000183386_3 (sequence is synthesized)
ccacgagggctgcttccgctgctgccgctgccagcgctcactagccgatgaacccttcacctgccaggacagtgagctgctctgcaatgactgctactgcagtgcgttttcctcgcagtg

SEQ ID NO: 653582 - DNA, 120 bp, Artificial Sequence
  ENSG00000183386_4 (sequence is synthesized)
ctccgcttgtggggagactgtcatgcctgggtcccggaagctggaatatggaggccagacatggcatgagcactgcttcctgtgcagtggctgtgaacagccactgggctcccgttcttt

SEQ ID NO: 653583 - DNA, 120 bp, Artificial Sequence
  ENSG00000183386_5 (sequence is synthesized)
tgtgcccgacaagggtgctcactactgcgtgccctgctatgagaacaagtttgctcctcgctgcgcccgctgcagcaagacgctgacacagggtggagtgacataccgtgatcagccgtg

SEQ ID NO: 653584 - DNA, 120 bp, Artificial Sequence
  ENSG00000183386_6 (sequence is synthesized)
tggagaactctttgcacctaagtgcagcagctgcaagcgccccatcgtaggactcggtggaggcaagtatgtgtcctttgaagaccgacactggcaccacaactgcttctcctgcgcccg

SEQ ID NO: 653585 - DNA, 120 bp, Artificial Sequence
  ENSG00000183386_7 (sequence is synthesized)
ctgctctacctccctggtgggccagggcttcgtaccggatggagaccaagtgctctgccagggctgtagccaggcagggccctaagccagggctcctggacccaggctttcccataccac

SEQ ID NO: 653586 - DNA, 120 bp, Artificial Sequence
  ENSG00000183386_8 (sequence is synthesized)
gggcccaggactgtggctccttttctaaaccacctctgggactcagctccccccgccaaaaaaaatgggtctccttctgggctccaggattgtctccccactccagcatccccaaactgg

SEQ ID NO: 653587 - DNA, 120 bp, Artificial Sequence
  ENSG00000183386_9 (sequence is synthesized)
tactccctgacccagggccccaaacctgggctcttacagagcctccatgagtcaagccccctccccacacctggactccagaattcaccctctcccctgcagtctgggttcccagactga

SEQ ID NO: 653588 - DNA, 120 bp, Artificial Sequence
  ENSG00000183386_10 (sequence is synthesized)
gtcctctccccaaatcagggctctagacccgagccctccaaacctggactctgggacttaggcccccttaaatctagacttctctttataggtttcaggtctcctatgggtgcctgggaa

SEQ ID NO: 653589 - DNA, 120 bp, Artificial Sequence
  ENSG00000183386_11 (sequence is synthesized)
gtccttgaaagtggactgttctcaggcttgacctgccccaccccatccccgcggttgaggctgtgggggcagcagatcaggagcccactgataaggggccctagggtacagggtgctgcc

SEQ ID NO: 653590 - DNA, 120 bp, Artificial Sequence
  ENSG00000183386_12 (sequence is synthesized)
cagcaggtcgccaccgagtgtcttctcattttatttcagctccattttgcccatagatgggcagaggggtgagattggctcatcccccttccagattctgcaataaagcggtgtgaggaa

SEQ ID NO: 653591 - DNA, 120 bp, Artificial Sequence
  ENSG00000183386_13 (sequence is synthesized)
tcatcttgtgtgagaactggcatctgcgtagggtctttgcatgtgtctgtctgatacatggagacttggtctgtgtaaagacctgcatacacagcatgtttctggaaatttagtatatac

SEQ ID NO: 653592 - DNA, 120 bp, Artificial Sequence
  ENSG00000183386_14 (sequence is synthesized)
gggatctgtttgcctggtatactcctgggggctactatgtacaggcagattgacacatgtgatacatacttgggggcttagcatgtgtgaatatctgcatgtttagtacaggtaggaact

SEQ ID NO: 653593 - DNA, 80 bp, Artificial Sequence
  ENSG00000183386_15 (sequence is synthesized)
gcggggcgggcccgcgctcacttcctcggggaggggttggggccgcgctcccactcgcccacacggtccgtctgcagtcg

SEQ ID NO: 653594 - DNA, 120 bp, Artificial Sequence
  ENSG00000183389_0 (sequence is synthesized)
aatagcagcagtacagccttctgaatttgtctagggtatgaactgatggagttggcatactgaagatcgaaaacaatgccccagatggtcaacaattcttcatttctcagattaggaggc

SEQ ID NO: 653595 - DNA, 120 bp, Artificial Sequence
  ENSG00000183389_1 (sequence is synthesized)
ctcaatttcactaaggaaaattcagagggaggaaaaatcattccagctattaaggaattacaaggtacactgggtctccagattgatcaggaaactttacatggcatctcccagcaatga

SEQ ID NO: 653596 - DNA, 120 bp, Artificial Sequence
  ENSG00000183389_2 (sequence is synthesized)
ctccactgccccagtctctgaattcctcctcatctgcttccccaacttccagagctggcagcactggttgtctctgcccctcagccttctcttcctcctggccatgggagctaacaccac

SEQ ID NO: 653597 - DNA, 120 bp, Artificial Sequence
  ENSG00000183389_3 (sequence is synthesized)
cctcctgatcaccatccagctggaggcctctctgcaccagcccctgtactacctgctcagcctcctctccctgctggacatcgtgctctgcctcaccgtcatccccaaggtcctggccat

SEQ ID NO: 653598 - DNA, 120 bp, Artificial Sequence
  ENSG00000183389_4 (sequence is synthesized)
cttctggtttgacctcaggtcgatcagcttcccagcctgcttcctccagatgttcatcatgaacagttttttgaccatggagtcctgcacgttcatggtcatggcctatgaccgttatgt

SEQ ID NO: 653599 - DNA, 120 bp, Artificial Sequence
  ENSG00000183389_5 (sequence is synthesized)
ggccatctgccatccattgagatacccgtctatcatcactgaccagtttgtggctagggccgtggtctttgttatagcccggaatgcctttgtttctcttcctgttcccatgctttctgc

SEQ ID NO: 653600 - DNA, 120 bp, Artificial Sequence
  ENSG00000183389_6 (sequence is synthesized)
caggctcagatactgtgcaggaaacataatcaagaactgcatctgcagtaacctgtctgtgtccaaactctcttgtgatgacatcactttcaatcagctctaccagtttgtggcaggctg

SEQ ID NO: 653601 - DNA, 120 bp, Artificial Sequence
  ENSG00000183389_7 (sequence is synthesized)
gactctgttgggctctgatcttatccttattgttatctcctattcttttatattgaaagttgtgcttaggatcaaggccgagggtgctgtggccaaggccttgagcacgtgtggttccca

SEQ ID NO: 653602 - DNA, 120 bp, Artificial Sequence
  ENSG00000183389_8 (sequence is synthesized)
cttcatcctcatcctcttcttcagcacagtcctgctggttctggtcatcactaacctggccaggaagagaattcctccagatgtccccatcctgctcaacatcctgcaccacctcattcc

SEQ ID NO: 653603 - DNA, 120 bp, Artificial Sequence
  ENSG00000183389_9 (sequence is synthesized)
cccagctctgaaccccattgtttatggtgtgagaaccaaggagatcaagcagggaatccaaaacctgctgaagaggttgtaagaataaaaaggattagatccacctttagagttgttaat

SEQ ID NO: 653604 - DNA, 120 bp, Artificial Sequence
  ENSG00000183389_10 (sequence is synthesized)
tgttagtgaaaattgggaaatagggaattaattttatgttggaaaggaaatttcactttaaatcctgcctgagttcggattcttctgttctcaatatctcaggcaacaatgaacacattt

SEQ ID NO: 653605 - DNA, 120 bp, Artificial Sequence
  ENSG00000183389_11 (sequence is synthesized)
atttgtgaatctttgttttctgttgcttgaaaggaaacctcccttttctggattctatggttactttggaatttttcctgatctaatctgcaacaaagaatcttgccaagactttgacaa

SEQ ID NO: 653606 - DNA, 120 bp, Artificial Sequence
  ENSG00000183389_12 (sequence is synthesized)
atggagctgtattagaatggaagtgtttgaccactaaagaaacaaactttatataatgcccttaaaaagatcagcctgttttttgatttgcaaatgacactgattccttccctgtctctg

SEQ ID NO: 653607 - DNA, 120 bp, Artificial Sequence
  ENSG00000183389_13 (sequence is synthesized)
attcagcctggtagacggctacctggcttgtgtgcgatgaaggcatggcttgggttaagtccagatgtccaccctggaacaacttggggttgagtgccttgccctgaataccccgactct

SEQ ID NO: 653608 - DNA, 120 bp, Artificial Sequence
  ENSG00000183389_14 (sequence is synthesized)
cttccatggcacctgaggcagatgtgctattcactggctcctaaaattctcctagacccaattaagatattcagtctgtaccacctctctgagggcagcgttttctattctttctctcta

SEQ ID NO: 653609 - DNA, 120 bp, Artificial Sequence
  ENSG00000183389_15 (sequence is synthesized)
gttttaggatttttaggttggggaggagttgtactgtttgaagtgctgtatgttcttttcttcatcatcttcatcttcatgtcgttataatcctagttcctatctcaccttgaagtcccc

SEQ ID NO: 653610 - DNA, 120 bp, Artificial Sequence
  ENSG00000183389_16 (sequence is synthesized)
atcctaggcacaaatgagccatcctgttcattccctctgatgctgtttgctgcatcctccctcctgagctgtggctggcaaagctgccaacagtttcccagacatgaaagttctaggttt

SEQ ID NO: 653611 - DNA, 120 bp, Artificial Sequence
  ENSG00000183389_17 (sequence is synthesized)
gtttttcacagaatagtgtattctactattttggcatttccttcttaatgatgccacacagttcagtatctccaaggaatataaacagtcttaatctgtctcttttggggatgcaaattc

SEQ ID NO: 653612 - DNA, 120 bp, Artificial Sequence
  ENSG00000183389_18 (sequence is synthesized)
agatttcaagtccatcatttgtccaggcattgtttgacaactgtcccaactggactatcctacttccatttgtactgaagcttatctttgctgaatgacttgcattaaaataaatatctc

SEQ ID NO: 653613 - DNA, 120 bp, Artificial Sequence
  ENSG00000183389_19 (sequence is synthesized)
tacagtgtttaaaatgtttaatatgttacagcattttttattacagacctgctatattctagccctaacatactttcgacttatcttaaactttgttttctctgccactgtagccaaaat

SEQ ID NO: 653614 - DNA, 120 bp, Artificial Sequence
  ENSG00000183389_20 (sequence is synthesized)
gagctgctcattatttcttgaaaattacttattcccattttgctctctctcttcaatcatttgatgcttctcacatcagccttcttttaccattatcaccatttgccaaaccccatcttt

SEQ ID NO: 653615 - DNA, 69 bp, Artificial Sequence
  ENSG00000183389_21 (sequence is synthesized)
cctaccaggttgaattcaaatgccatctcccacagtaggtcttccttccctgatcctcccgactggaat

SEQ ID NO: 653616 - DNA, 120 bp, Artificial Sequence
  ENSG00000183389_22 (sequence is synthesized)
ccacagtaggtcttccttccctgatcctcccgactggaatcattattcttgcatcttgtgtggctgtatttctttctctgacactgtcataagcttcttttaggttgagagtattttatt

SEQ ID NO: 653617 - DNA, 120 bp, Artificial Sequence
  ENSG00000183389_23 (sequence is synthesized)
catctttaaaattctgcatggctacttttactgtctcttatacatacagataaatttaaaataaaaatgtgttgaacaaaatctgtagaacattttataagtgatctctcatctctcatt

SEQ ID NO: 653618 - DNA, 120 bp, Artificial Sequence
  ENSG00000183389_24 (sequence is synthesized)
ttctttaataactacttggaaacaacaataaaatcttatactattatatgtccttatagtacctaacagagagccatatttttagccagcacaaaatgaacctttatatagtgaagacca

SEQ ID NO: 653619 - DNA, 120 bp, Artificial Sequence
  ENSG00000183389_25 (sequence is synthesized)
ttaggattgagacagtctggagaactggaattttattctcagataaaataatttggctaaatttgtgtactccgcttttgtgaactttggttaaactcataaattctggcttaattacct

SEQ ID NO: 653620 - DNA, 120 bp, Artificial Sequence
  ENSG00000183389_26 (sequence is synthesized)
cattgtggctggcatatgatacatacttggttaaatataagggaggatgatgacagtgattttaaaaactttattgggacagatacagggcctcagtggaaacccacactctactacgtc

SEQ ID NO: 653621 - DNA, 120 bp, Artificial Sequence
  ENSG00000183395_0 (sequence is synthesized)
aggctgacagagaaatttttcattttctttcttgtttgactgtatgcaaacatcaaactaagaatggcaaaaatgaatctctcttcctatatattaatactaactttttctttgttttct

SEQ ID NO: 653622 - DNA, 120 bp, Artificial Sequence
  ENSG00000183395_1 (sequence is synthesized)
caaggtattttactttcagcatccaagtccataagaaatttagatgatgacatggtatttaatacattcaggttggggaaaggctttcagaaggaagacactgcagaaaaatcagttatt

SEQ ID NO: 653623 - DNA, 120 bp, Artificial Sequence
  ENSG00000183395_2 (sequence is synthesized)
gctccttccctggaacaatataaaaatgatgagagcagtttcatgaacgaagaggaaaataaagtttcaaagaacacaggctccaaacataatttcttaaatcatggtctgccactgaat

SEQ ID NO: 653624 - DNA, 120 bp, Artificial Sequence
  ENSG00000183395_3 (sequence is synthesized)
ctgtagctttcccagctgagaatggagttcagaatactgaatcaacacaagaaaagagagaaattggggatgaagaaaactcagctaaatttcctataggaaggagagattttgacatgc

SEQ ID NO: 653625 - DNA, 120 bp, Artificial Sequence
  ENSG00000183395_4 (sequence is synthesized)
tcagatgtatgctgggaagagtctaccgaccttgttggcaagtctgatacctgttggtccacatcatcttttcagaagaaaataaaagcatttaattgccaatgggaggagaagcccata

SEQ ID NO: 653626 - DNA, 120 bp, Artificial Sequence
  ENSG00000183395_5 (sequence is synthesized)
ctgctactataacttgtgtatgttaaatgtctgttttaaaagaaagtagtgttaagatgtatcagtaactgaaatgatatgctttctctgtgcattaaactttgtgaaaattctgcataa

SEQ ID NO: 653627 - DNA, 120 bp, Artificial Sequence
  ENSG00000183396_0 (sequence is synthesized)
actagcgacggccatgctgcatgtgctggcctcgctgcctttgctgctcctgctggtgacgtctgcctccacccacgcctggtcgagacccctctggtaccaggtggggctggacttgca

SEQ ID NO: 653628 - DNA, 120 bp, Artificial Sequence
  ENSG00000183396_1 (sequence is synthesized)
gccctgggggtgtcagccaaagagtgtggagggctgtaggggtggcctgagctgtcctggctactggctgggccctggagcaagccgcatctaccccgtggctgcggtcatgatcaccac

SEQ ID NO: 653629 - DNA, 120 bp, Artificial Sequence
  ENSG00000183396_2 (sequence is synthesized)
accctggaaacggcgggccccaatctcagaccacaccctgctccgtggggtcctgcacatgctggatgccctcctggtccacatcgaaggccacctacgtcatctagccacccagcggca

SEQ ID NO: 653630 - DNA, 120 bp, Artificial Sequence
  ENSG00000183396_3 (sequence is synthesized)
aatccaaataaaggggacttccacccagagtgggtgaccgaacatgtgcctctctttgcctgacagcctgaggtcctgggccaggtctgctctttccaggcctgtctggaccgtgtgtcc

SEQ ID NO: 653631 - DNA, 120 bp, Artificial Sequence
  ENSG00000183397_0 (sequence is synthesized)
ggagcccgggggatccaggcagacatgcaaaccctcaggcaagaggctgcacggccctgtatcccctcggggaccctcgaggccagcttcccagcaccgctgtacagcgatgactacctg

SEQ ID NO: 653632 - DNA, 120 bp, Artificial Sequence
  ENSG00000183397_1 (sequence is synthesized)
tccctggagggttcccgctggccaccagccatcaggcaggccacacgctggaagtacacgcccatgggacgggacgcagccggccagctgtggtacacaggcctgaccaactcggacgcc

SEQ ID NO: 653633 - DNA, 120 bp, Artificial Sequence
  ENSG00000183397_2 (sequence is synthesized)
ctaccaacaccgtgagtgcagcatgccatcggcctacacccagcacctgcgggagaccgcctggcatgaccccatcgtccctgcccagtaccaggcccccagcacccggtgggggagcgc

SEQ ID NO: 653634 - DNA, 120 bp, Artificial Sequence
  ENSG00000183397_3 (sequence is synthesized)
gctgtggaaagacaggccaatccggggcaaggaatacgtgctcaacaggaaccggtacggggtggagccactgtggagggcatcagactacgtgccctccctgtcggcaccccagcgccc

SEQ ID NO: 653635 - DNA, 120 bp, Artificial Sequence
  ENSG00000183397_4 (sequence is synthesized)
gcccggcaccacccagaactaccgggagtgggtcctggaaccatactgcccctccacctgccagcggtccccgccttccctcacacccactccccgataaaggcatgctaccaggatgca

SEQ ID NO: 653636 - DNA, 120 bp, Artificial Sequence
  ENSG00000183401_0 (sequence is synthesized)
gactcagtctctgagcgttttaatacgatggtgtccccgcgggatcaaacttcagcgtcacagctgaggactggcttcgtggtccctgatgggagagcatgaacaggtgaagcccttgga

SEQ ID NO: 653637 - DNA, 120 bp, Artificial Sequence
  ENSG00000183401_1 (sequence is synthesized)
gaccagctcttccaaagtcaaagccaagaccattgtgatgattcccgactcccagaagctcctgcgatgtgaacttgagtcactcaagagccagttacaggcccagaccaaggctttcga

SEQ ID NO: 653638 - DNA, 120 bp, Artificial Sequence
  ENSG00000183401_2 (sequence is synthesized)
gttcctgaaccactcagtgaccatgttggagaaggagagctgcttgcagcaaatcaagattcagcagcttgaagaggtgctgagccccacaggccgccagggagagaaggaggagcacaa

SEQ ID NO: 653639 - DNA, 120 bp, Artificial Sequence
  ENSG00000183401_3 (sequence is synthesized)
gtggggcatggagcagggccggcaggagctgtatggggccctgacccaaggccttcaggggctggagaagaccctgcgtgacagtgaggagatgcagcgggcccgcaccactcgctgcct

SEQ ID NO: 653640 - DNA, 120 bp, Artificial Sequence
  ENSG00000183401_4 (sequence is synthesized)
agaagctccaagcgcaggaggatgagatctcagagaacttggtgaacattcagaaaatgcagaaaacgcaggtgaaatgccgcaaaatcctgaccaagatgaagcagcagggtcatgaga

SEQ ID NO: 653641 - DNA, 120 bp, Artificial Sequence
  ENSG00000183401_5 (sequence is synthesized)
cagccgcctgtccggagactgaagagataccgcagggagccagtggctgctggaaggatgacctccagaaggaactgagtgatatatggtctgctgtgcacgtgctgcagaactccatag

SEQ ID NO: 653642 - DNA, 120 bp, Artificial Sequence
  ENSG00000183401_6 (sequence is synthesized)
acagcctcactttgtgctcgggggcctgtcccaaggcctcgagcctaagaggccacaaggggcaccagtgcctgagccctccactcccctcctgggactctgactccgactgtgaccagg

SEQ ID NO: 653643 - DNA, 120 bp, Artificial Sequence
  ENSG00000183401_7 (sequence is synthesized)
acctctcccagccacctttcagcaagagcggccgctccttcccacccgcttgagcagccgggactgctctccctgaagacccctccagagagaaaataaactagcccagaccctcctcta

SEQ ID NO: 653644 - DNA, 120 bp, Artificial Sequence
  ENSG00000183401_8 (sequence is synthesized)
aagatgcagaggttgatgaaggcacagcccatggagatgtggaagtagaaggggaagagtttgctctgcactagtccgaagggatccagttctgacagccaagaccactcctctcataaa

SEQ ID NO: 653645 - DNA, 120 bp, Artificial Sequence
  ENSG00000183401_9 (sequence is synthesized)
ataataccggatattaggtgaagatcccgaaagccccgaggaaaccctaaatctcatcctgaggacaccgatcccaccaaagccccgaggaaacgccaaatctcatcccgaggacaccga

SEQ ID NO: 653646 - DNA, 120 bp, Artificial Sequence
  ENSG00000183401_10 (sequence is synthesized)
gctgaggactggcttcgtggtccctgatgggagagcatgaacaggtggtatgtggctcttcctcggacaaggctctggagcgtacagctcactggtccaggactccagagccagagacct

SEQ ID NO: 653647 - DNA, 120 bp, Artificial Sequence
  ENSG00000183401_11 (sequence is synthesized)
tgggatgccctgcttctggggacacagtgaggactgcagactgcaggccagggtggggctcagggccttcgccacatgaggctgccccctcccccagtccagacctgcagaagcagtgct

SEQ ID NO: 653648 - DNA, 120 bp, Artificial Sequence
  ENSG00000183401_12 (sequence is synthesized)
gtaatgaccaggacattttgaagaggcatcacaacgtagctaaggtcacccccacccgggaaaccccttcaatgcagaaaaccactgcaatctactgctgtggggcttagggaaggggct

SEQ ID NO: 653649 - DNA, 120 bp, Artificial Sequence
  ENSG00000183401_13 (sequence is synthesized)
tggcactcagcaggccctggctaagcaagtcttaaatgaatggatgaaggaatgaatggaaggaaagagtgtggttgtgtgtcttccatggggatttggctgtgatcgtctctcagccac

SEQ ID NO: 653650 - DNA, 120 bp, Artificial Sequence
  ENSG00000183401_14 (sequence is synthesized)
ataagtgcacttctgagcatatgtagcccaagggggaggtgcatgaatatgcctggagtgcagctttgcctgcacttacggtttgggacacctagaactgaggagatccaactcttgtcc

SEQ ID NO: 653651 - DNA, 120 bp, Artificial Sequence
  ENSG00000183401_15 (sequence is synthesized)
agccctcaaaactgggttgaggtgagcaaggaggcagctcagggacaaatttctactcccatctcatctctcttccttagaagcccttggagaccagctcttccaaagtcaaaggtgaga

SEQ ID NO: 653652 - DNA, 120 bp, Artificial Sequence
  ENSG00000183401_16 (sequence is synthesized)
ggggatggcgggagggcagcttggagtccacaggagggaagggagacccagaactggggaatggaggcaggatgggggaaatggcagatgcctgggggagggggactgagggatggtgga

SEQ ID NO: 653653 - DNA, 64 bp, Artificial Sequence
  ENSG00000183401_17 (sequence is synthesized)
atggcagatgcctgggggagggggactgagggatggtggaaagcctgagggacaagaagaggga

SEQ ID NO: 653654 - DNA, 120 bp, Artificial Sequence
  ENSG00000183401_18 (sequence is synthesized)
ggtgatgcccagcctgcagtctgacccctgaccctcctctgaacccgttcccccaacgggatctggcagtgaccaccagaacctggagcccacctgagtccagacttccctcacccccta

SEQ ID NO: 653655 - DNA, 120 bp, Artificial Sequence
  ENSG00000183401_19 (sequence is synthesized)
ccacggcccccaaccttagctgtactgctgtctacaccctgagcagtgtggagtctcccagcgcccccagctccttgtcttcttgcaggtctgctgtgcacgtgctgcagaactccatag

SEQ ID NO: 653656 - DNA, 120 bp, Artificial Sequence
  ENSG00000183401_20 (sequence is synthesized)
aatacgatggtgtccccgcgggatcaaacttcagcgtcacagctgaggactggcttcgtggtccctgatgggagagcatgaacaggtgccctcaaaactgggttgaggtgagcaaggagg

SEQ ID NO: 653657 - DNA, 120 bp, Artificial Sequence
  ENSG00000183401_21 (sequence is synthesized)
ggggatgagggtagggggattgtagaaggggaggggaaaagggcagggaagtgtggggaggggacagagcttgcggggatgggtggaggcacagataggggcatgggaggtcaggggcca

SEQ ID NO: 653658 - DNA, 120 bp, Artificial Sequence
  ENSG00000183401_22 (sequence is synthesized)
ggcagggagtgcaggtctaggctgcactgtcccctcagcaagaagttcctgtgggaggagctggaactggtgcgggaggaggtgaccttcatctatcagaagctccgtgagttcctggag

SEQ ID NO: 653659 - DNA, 120 bp, Artificial Sequence
  ENSG00000183401_23 (sequence is synthesized)
cgcgggatcaaacttcagcgtcacagctgaggactggcttcgtggtccctgatgggagagcatgaacaggtggtatgtgccctcaaaactgggttgaggtgagcaaggaggcagctcagg

SEQ ID NO: 653660 - DNA, 120 bp, Artificial Sequence
  ENSG00000183401_24 (sequence is synthesized)
tatggggccctgacccaaggccttcaggggctggagaagaccctgcgtgacagtgaggagatgcagcgggcccgcaccactcgctgcctgcagctgctggcccaggagatccgggacaga

SEQ ID NO: 653661 - DNA, 120 bp, Artificial Sequence
  ENSG00000183401_25 (sequence is synthesized)
agctagcagggagatgctgggggatagacagggctgctggggactgttgtacaggctgtgcactgctcaagggtgtagccataggcgctgactgaggtcctgggaacaagtctccagagg

SEQ ID NO: 653662 - DNA, 120 bp, Artificial Sequence
  ENSG00000183401_26 (sequence is synthesized)
gtcggggccaaatgggctgaatctggtacctcactcccacgcccccgggtggacagcgaccctcctcggccgcgtcccctcgtgggtttcccccaaccaataattcgtcccgcctcccag

SEQ ID NO: 653663 - DNA, 120 bp, Artificial Sequence
  ENSG00000183401_27 (sequence is synthesized)
cctcctgggtattgactaatcgtagaaacccccctgggatcccgccccctccacgggcttttatccaattacgccgcggctactaagcgcagctgaagcgtgaaggcgccaatgaggcct

SEQ ID NO: 653664 - DNA, 120 bp, Artificial Sequence
  ENSG00000183401_28 (sequence is synthesized)
tcctccccagtccccccctccacccatttccctcctgacctgcccttgactcccacagtctagaccctcagaacaggcccagatcctgatctgggcatgcggtccctgacctgcagcccc

SEQ ID NO: 653665 - DNA, 120 bp, Artificial Sequence
  ENSG00000183401_29 (sequence is synthesized)
ggagtcccctggacctggccaggccctgacccaccctctctctccacagcttgagcagccgggactgctctccctgaagacccctccagagagaaaataaactagcccagaccctcctct

SEQ ID NO: 653666 - DNA, 120 bp, Artificial Sequence
  ENSG00000183401_30 (sequence is synthesized)
ggaggagatggggaccctggggaggagtgggagagggagggatggggattttggccagcctccaccatgagattggagcctgggttcaaatctcagctctgccactcactgctgtgtgac

SEQ ID NO: 653667 - DNA, 120 bp, Artificial Sequence
  ENSG00000183401_31 (sequence is synthesized)
ctctgccactcactgctgtgtgactgtgggcaagtcacttgacctctctgagcctcagtttcctcatctgtataatggatgtaataataactcatcttggctgggcgcggtggctcacgc

SEQ ID NO: 653668 - DNA, 120 bp, Artificial Sequence
  ENSG00000183421_0 (sequence is synthesized)
agacgtgcgcgatggagggcgacggcgggaccccatgggccctggcgctgctgcgcaccttcgacgcgggcgagttcacgggctgggagaaggtgggctcgggcggcttcgggcaggtgt

SEQ ID NO: 653669 - DNA, 120 bp, Artificial Sequence
  ENSG00000183421_1 (sequence is synthesized)
acaaggtgcgccatgtccactggaagacctggctggccatcaagtgctcgcccagcctgcacgtcgacgacagggagcgcatggagcttttggaagaagccaagaagatggagatggcca

SEQ ID NO: 653670 - DNA, 120 bp, Artificial Sequence
  ENSG00000183421_2 (sequence is synthesized)
agtttcgctacatcctgcctgtgtatggcatctgccgcgaacctgtcggcctggtcatggagtacatggagacgggctccctggaaaagctgctggcttcggagccattgccatgggatc

SEQ ID NO: 653671 - DNA, 120 bp, Artificial Sequence
  ENSG00000183421_3 (sequence is synthesized)
tccggttccgaatcatccacgagacggcggtgggcatgaacttcctgcactgcatggccccgccactcctgcacctggacctcaagcccgcgaacatcctgctggatgcccactaccacg

SEQ ID NO: 653672 - DNA, 120 bp, Artificial Sequence
  ENSG00000183421_4 (sequence is synthesized)
tcaagatttctgattttggtctggccaagtgcaacgggctgtcccactcgcatgacctcagcatggatggcctgtttggcacaatcgcctacctccctccagagcgcatcagggagaaga

SEQ ID NO: 653673 - DNA, 120 bp, Artificial Sequence
  ENSG00000183421_5 (sequence is synthesized)
gccggctcttcgacaccaagcacgatgtatacagctttgcgatcgtcatctggggcgtgctcacacagaagaagccgtttgcagatgagaagaacatcctgcacatcatggtgaaggtgg

SEQ ID NO: 653674 - DNA, 120 bp, Artificial Sequence
  ENSG00000183421_6 (sequence is synthesized)
tgaagggccaccgccccgagctgccgcccgtgtgcagagcccggccgcgcgcctgcagccacctgatacgcctcatgcagcggtgctggcagggggatccgcgagttaggcccaccttcc

SEQ ID NO: 653675 - DNA, 120 bp, Artificial Sequence
  ENSG00000183421_7 (sequence is synthesized)
aagaaattacttctgaaaccgaggacctgtgtgaaaagcctgatgacgaagtgaaagaaactgctcatgatctggacgtgaaaagccccccggagcccaggagcgaggtggtgcctgcga

SEQ ID NO: 653676 - DNA, 120 bp, Artificial Sequence
  ENSG00000183421_8 (sequence is synthesized)
ggctcaagcgggcctctgcccccaccttcgataacgactacagcctctccgagctgctctcacagctggactctggagtttcccaggctgtcgagggccccgaggagctcagccgcagct

SEQ ID NO: 653677 - DNA, 120 bp, Artificial Sequence
  ENSG00000183421_9 (sequence is synthesized)
cctctgagtccaagctgccatcgtccggcagtgggaagaggctctcgggggtgtcctcggtggactccgccttctcttccagaggatcactgtcgctgtcctttgagcgggaaccttcaa

SEQ ID NO: 653678 - DNA, 120 bp, Artificial Sequence
  ENSG00000183421_10 (sequence is synthesized)
ccagcgatctgggcaccacagacgtccagaagaagaagcttgtggatgccatcgtgtccggggacaccagcaaactgatgaagatcctgcagccgcaggacgtggacctggcactggaca

SEQ ID NO: 653679 - DNA, 120 bp, Artificial Sequence
  ENSG00000183421_11 (sequence is synthesized)
gcggtgccagcctgctgcacctggcggtggaggccgggcaagaggagtgcgccaagtggctgctgctcaacaatgccaaccccaacctgagcaaccgtaggggctccaccccgttgcaca

SEQ ID NO: 653680 - DNA, 120 bp, Artificial Sequence
  ENSG00000183421_12 (sequence is synthesized)
tggccgtggagaggagggtgcggggtgtcgtggagctcctgctggcgcggaagatcagtgtcaacgccaaggatgaggaccagtggacagccctccactttgcagcccagaacggggacg

SEQ ID NO: 653681 - DNA, 120 bp, Artificial Sequence
  ENSG00000183421_13 (sequence is synthesized)
agtctagcacacggctgctgttggagaagaacgcctcggtcaacgaggtggactttgagggccggacgcccatgcacgtggcctgccagcacgggcaggagaatatcgtgcgcatcctgc

SEQ ID NO: 653682 - DNA, 120 bp, Artificial Sequence
  ENSG00000183421_14 (sequence is synthesized)
tgcgccgaggcgtggacgtgagcctgcagggcaaggatgcctggctgccactgcactacgctgcctggcagggccacctgcccatcgtcaagctgctggccaagcagccgggggtgagtg

SEQ ID NO: 653683 - DNA, 120 bp, Artificial Sequence
  ENSG00000183421_15 (sequence is synthesized)
gcctgctggcacagacacccctgcacgtggccgcggagacggggcacacgagcactgccaggctgctcctgcatcggggcgctggcaaggaggccatgacctcagacggctacaccgctc

SEQ ID NO: 653684 - DNA, 120 bp, Artificial Sequence
  ENSG00000183421_16 (sequence is synthesized)
tgcacctggctgcccgcaacggacacctggccactgtcaagctgcttgtcgaggagaaggccgatgtgctggcccggggacccctgaaccagacggcgctgcacctggctgccgcccacg

SEQ ID NO: 653685 - DNA, 120 bp, Artificial Sequence
  ENSG00000183421_17 (sequence is synthesized)
ggcactcggaggtggtggaggagttggtcagcgccgatgtcattgacctgttcgacgagcaggggctcagcgcgctgcacctggccgcccagggccggcacgcacagacggtggagactc

SEQ ID NO: 653686 - DNA, 120 bp, Artificial Sequence
  ENSG00000183421_18 (sequence is synthesized)
tgctcaggcatggggcccacatcaacctgcagagcctcaagttccagggcggccatggccccgccgccacgctcctgcggcgaagcaagacctagctggctgcctgcggagaccgggggt

SEQ ID NO: 653687 - DNA, 120 bp, Artificial Sequence
  ENSG00000183421_19 (sequence is synthesized)
ccacgtggggctcttgtcctgtcctgtgttcctcgtggggatggaacgatcctgcgtggggccctgttgtggcttacctaaatgttaaccaagcagaggtgacatggtgccatcaggagg

SEQ ID NO: 653688 - DNA, 120 bp, Artificial Sequence
  ENSG00000183421_20 (sequence is synthesized)
cggctgctgctgaccggagtgtcccctccaggtgaagctggctcaggtgcacatgcccgctccatcatcgatctaggcacctgctgtctgaagggaccgtgggtcagaatcatttcgttg

SEQ ID NO: 653689 - DNA, 120 bp, Artificial Sequence
  ENSG00000183421_21 (sequence is synthesized)
tgctcctaatgggtcgctgaggctggtctctcagtgatgaagccccaggcgtggaagcatccactctctcctgaggcgagccaccttgggttgctggagctcaccagtcttgagggaggt

SEQ ID NO: 653690 - DNA, 120 bp, Artificial Sequence
  ENSG00000183421_22 (sequence is synthesized)
gcaggggaaactgtgttttttatcttcatacatgacggtgggcagagaggcctgtcttaaagtttccatggaattgttttataaaatatcttaagagatgaataccttatcagctgttgc

SEQ ID NO: 653691 - DNA, 120 bp, Artificial Sequence
  ENSG00000183421_23 (sequence is synthesized)
ttgaaacctgttaaaaatgttcataacattggatagtctagtctctaaatgatgactaagtagtggggttggctttgaaaacaatgttttatgcaacaaggaacgaatggtagcagccag

SEQ ID NO: 653692 - DNA, 120 bp, Artificial Sequence
  ENSG00000183421_24 (sequence is synthesized)
ctttgcggggcgtatgtgtggccagctcttaaccattccagtctattacttgggtgagtccttgtggacaaccacacacacgtgcccacatggtactagctgccgttcgtttctcgttgc

SEQ ID NO: 653693 - DNA, 120 bp, Artificial Sequence
  ENSG00000183421_25 (sequence is synthesized)
ctaagatgttttggcaactctagagccacaggcctaagtcattaaaaaattctccctttgtaacctcagtgctggggactgaggcgagccccctcaggtcgctggagtgcaccagtcttg

SEQ ID NO: 653694 - DNA, 120 bp, Artificial Sequence
  ENSG00000183421_26 (sequence is synthesized)
gggaagaggtgcaggagaagctgtgttttttatctccacacgcagtatgaagataaaattacatagtattacctagacatagacagtattacctaggtagatgcactgctcacctgcgcc

SEQ ID NO: 653695 - DNA, 120 bp, Artificial Sequence
  ENSG00000183421_27 (sequence is synthesized)
cttcccagctctcatttttgttaggtgatttgggatagggatagtgttttggggtatggggggagtgtttctgacctgctttgcagacgtgcctccgcacctcagcagtttggggtgtgg

SEQ ID NO: 653696 - DNA, 120 bp, Artificial Sequence
  ENSG00000183421_28 (sequence is synthesized)
ccccagggcggttcttggatgtaaaagatgtggccatctagcctcgtaacttcactgtcacctgtgtcccatagggtgccttctgaatactgttattagaataagtttgttgcagaacgt

SEQ ID NO: 653697 - DNA, 120 bp, Artificial Sequence
  ENSG00000183421_29 (sequence is synthesized)
gaccctgcgtgcaaacatgtaccgtggcctggtatatgatagagattgatattaatgtaccatgtatgttaatgtgaatctgtgggcaggatacttttccatggcaggaaatatccaagc

SEQ ID NO: 653698 - DNA, 120 bp, Artificial Sequence
  ENSG00000183421_30 (sequence is synthesized)
tgttgaaactggctatgttttaatatgcctcattgtgcctttactgttgtgtggactgcgtgagggacaagaagttccatttgatgtcaataaagcaaagtacttgcctacttttttgaa

SEQ ID NO: 653699 - DNA, 120 bp, Artificial Sequence
  ENSG00000183423_0 (sequence is synthesized)
gttactaaatggctgtttgtattccaggcataccaggttctgaatgcttaggattcggtttttaccttttgtttaaataacctctaaaaggagcaatgcatctctttgcatgtctgtgca

SEQ ID NO: 653700 - DNA, 120 bp, Artificial Sequence
  ENSG00000183423_1 (sequence is synthesized)
ttgtccttagctttttggaaggagtgggctgtttgtgtccttcacagtgcacctgtgattatcacggcagaaatgacggctcaggatcaaggttggtgctatgtaatgacatggatatga

SEQ ID NO: 653701 - DNA, 120 bp, Artificial Sequence
  ENSG00000183423_2 (sequence is synthesized)
acgagctgcctacgaacctccccgtggacactgtgaagcttcgcatagagaagactgtcatccgcagaatctctgcggaggccttctattacctggtggagctccagtatctctgggtga

SEQ ID NO: 653702 - DNA, 120 bp, Artificial Sequence
  ENSG00000183423_3 (sequence is synthesized)
cttacaattccgtggccagcattgaccccagcagcttttacaacctgaagcaactgcatgagttgcgcttggatgggaattctctggctgctttcccttgggcatctctgctggacatgc

SEQ ID NO: 653703 - DNA, 120 bp, Artificial Sequence
  ENSG00000183423_4 (sequence is synthesized)
cccttctgaggaccctggacttgcacaataacaaaataaccagtgtgccaaatgaggcgctcaggtatctgaagaaccttgcctacttggatttatcaagcaacagactcaccacattgc

SEQ ID NO: 653704 - DNA, 120 bp, Artificial Sequence
  ENSG00000183423_5 (sequence is synthesized)
caccagatttcctggagagctggactcatttagtttcaacaccttctggagtcctggacctttccccaagcaggattattcttggtctacaggacaatccttggttctgtgactgtcata

SEQ ID NO: 653705 - DNA, 120 bp, Artificial Sequence
  ENSG00000183423_6 (sequence is synthesized)
tttccaaaatgattgagttgtcaaaggtcgttgaccctgctatagtgcttctggatccactgatgacttgcagtgaacctgagcgcctcacaggaattttgtttcagcgggctgaattgg

SEQ ID NO: 653706 - DNA, 120 bp, Artificial Sequence
  ENSG00000183423_7 (sequence is synthesized)
agcattgtctgaaaccatcagtgatgacctcagccaccaaaatcatgtctgctctgggcagtaatgttctactgcggtgtgatgccactggcttccccaccccacagatcacatggacca

SEQ ID NO: 653707 - DNA, 120 bp, Artificial Sequence
  ENSG00000183423_8 (sequence is synthesized)
gatctgacagctcgccagttaattatacagtaatacaagaatctccagaggaaggagtcagatggtccataatgagcttgacaggcatttcttccaaagacgctggggattacaaatgta

SEQ ID NO: 653708 - DNA, 120 bp, Artificial Sequence
  ENSG00000183423_9 (sequence is synthesized)
aggccaaaaatctggctgggatgtcagaagctgtggttactgtgacagtgcttggcattaccacaactccaataccaccagacacttctgaaagaactggagatcatcctgagtgggatg

SEQ ID NO: 653709 - DNA, 120 bp, Artificial Sequence
  ENSG00000183423_10 (sequence is synthesized)
tccagccgggatctggaagatctacatctgtatctagcgcatcatcatatctttggtcctcttccttctcccccacatcttctttttctgcttctactttgtctcctccctctactgctt

SEQ ID NO: 653710 - DNA, 120 bp, Artificial Sequence
  ENSG00000183423_11 (sequence is synthesized)
ccttctctttatctcctttctcctcctccactgtttcttcaaccacaactctgagcacaagcatctcagcaagtaccaccatggccaacaagcgatcattccagctccaccaaggtggga

SEQ ID NO: 653711 - DNA, 120 bp, Artificial Sequence
  ENSG00000183423_12 (sequence is synthesized)
aaagaaatttaaaggtggcaaagaatggaagtaagcttcctccagccagcacaagtaagaaagaagagctggcattgttggatcaaacaatgcttacggagacaaatgccgcaatagaaa

SEQ ID NO: 653712 - DNA, 120 bp, Artificial Sequence
  ENSG00000183423_13 (sequence is synthesized)
acctcagggtggtcagtgagactaaagagagtgtgacattgacgtggaatatgatcaacaccacacataactctgcagtgactgtgttgtattccaagtatggtgggaaggacctgctgc

SEQ ID NO: 653713 - DNA, 120 bp, Artificial Sequence
  ENSG00000183423_14 (sequence is synthesized)
tgttgaatgcagactccagcaagaaccaagtaaccatagatggcttggaacccggtgggcaatacatggcctgtgtctgtccaaaaggagtgcctccccagaaagaccaatgcatcacct

SEQ ID NO: 653714 - DNA, 120 bp, Artificial Sequence
  ENSG00000183423_15 (sequence is synthesized)
tactgcctgtgttgttatcttaccattgatttgtttcttgttgtacaaagtttgcaaactgcaatgtaaatcagaacctttttgggaagatgatttggcaaaggagacttatatccaatt

SEQ ID NO: 653715 - DNA, 120 bp, Artificial Sequence
  ENSG00000183423_16 (sequence is synthesized)
tgagaccctgtttcccaggtctcaaagtgtaggtgagctctggacacgaagccacagggatgactcagagaaattgctgctttgttctaggtcaagtgtggaatctcaggtgacttttaa

SEQ ID NO: 653716 - DNA, 120 bp, Artificial Sequence
  ENSG00000183423_17 (sequence is synthesized)
aagtgaaggttccagaccagagtattattgctaaggttctgcagctcaggtgcatgtgagctacaaaactagcatctaagggtataattgaccctaggtttggatgacttttggacagac

SEQ ID NO: 653717 - DNA, 120 bp, Artificial Sequence
  ENSG00000183423_18 (sequence is synthesized)
tttcacattgtacatgaaaatcacaaatggaatgcttttaagtatgtttaaaaaataccatgagacctctgaactgaaaagacaaataatgttgattttttttcttgtgtggaaaaggtc

SEQ ID NO: 653718 - DNA, 120 bp, Artificial Sequence
  ENSG00000183423_19 (sequence is synthesized)
tacagaaataatttttagagtggtgcttaataaattattaatactttttagggtaatgttttagttcttaaaaataagttcatgtgaaagtagcaagtgaactctgtatttaaaaatata

SEQ ID NO: 653719 - DNA, 120 bp, Artificial Sequence
  ENSG00000183423_20 (sequence is synthesized)
gttttttgagtcatgaggaaacattagcaaaaccagctaagccttgatgtttattcatgttcgaagtgcattatagcatttgctgtggatgttttctgacattgcctaatggagagcgtg

SEQ ID NO: 653720 - DNA, 120 bp, Artificial Sequence
  ENSG00000183423_21 (sequence is synthesized)
ggatcataaaggattttgtgttcactaaggttaaatctaactcacgggagagagagggctctgtctcttggtaccattatgcattgtgatactatagagttgtgttcatatttcttgtaa

SEQ ID NO: 653721 - DNA, 120 bp, Artificial Sequence
  ENSG00000183423_22 (sequence is synthesized)
gaaaaatttttgcttttctttagaaatataggtattagcaaaagtaagtatacaaagaggattatgacaaatagaccatttctttaaaaatggtaactgttgcatttaaacacatcgact

SEQ ID NO: 653722 - DNA, 120 bp, Artificial Sequence
  ENSG00000183423_23 (sequence is synthesized)
gacagattatatggatatttaaaaataactttaaatcaatcttttaatattttgctgtttgctcttatgttctcccttctttcttccttccttgtcttccctccctttccttccttcatt

SEQ ID NO: 653723 - DNA, 120 bp, Artificial Sequence
  ENSG00000183423_24 (sequence is synthesized)
ctttctttcttctgctctgtcagaagatatacaagtagccaaagcatcacgagccaagctgtttgtcttttgccatattgtcttttgattctcttgataaagagaaagcttttgaaatta

SEQ ID NO: 653724 - DNA, 120 bp, Artificial Sequence
  ENSG00000183423_25 (sequence is synthesized)
cttactgccctttgaaagtctgttttacaaccccaaaggatattttaggactttaaaagggaagcttcagtggattcatttggttagattcttttcctaggttaaaaacatcggggaact

SEQ ID NO: 653725 - DNA, 120 bp, Artificial Sequence
  ENSG00000183423_26 (sequence is synthesized)
taaatacataggaaaggagttcacaaataaaatttagtttttttagaaagagaatattttaataactgtagtatactacaagaaacatctcatggctttaagattaacgatagcgataag

SEQ ID NO: 653726 - DNA, 120 bp, Artificial Sequence
  ENSG00000183423_27 (sequence is synthesized)
gcccactcaagcatctcacagtggtgatattacatgtcacttagcaggatgcaacctggcctagggatttccagaagacaaggccacctcagcacagatgcaactttcataaattttaga

SEQ ID NO: 653727 - DNA, 120 bp, Artificial Sequence
  ENSG00000183423_28 (sequence is synthesized)
acaaagcctaaccttactagattaaacttgctctatgaaagaaacacttggtaattgacccagactgaatacatgtataagaaatgggaaagatctcccaaactctgagaacggtcctca

SEQ ID NO: 653728 - DNA, 120 bp, Artificial Sequence
  ENSG00000183423_29 (sequence is synthesized)
aatagaagctctcctagtcagttggtcatctgacctctgactatatccggcctatgacaccagccagctcctgctttctgtcttgtaagagcactgctggaataaactacttgagcatta

SEQ ID NO: 653729 - DNA, 81 bp, Artificial Sequence
  ENSG00000183423_30 (sequence is synthesized)
agctgaaaattgatacatttttcaaatgagaagtatttttttcaaatgggtgttggaaagtgagtttcctcacattgttca

SEQ ID NO: 653730 - DNA, 120 bp, Artificial Sequence
  ENSG00000183423_31 (sequence is synthesized)
acaggctcagcaaggttgcatcacccaggtcacagaattaactaatggttgagcctcatcaggaacccaggcacagtaaagttggtctacaggacaatccttggttctgtgactgtcata

SEQ ID NO: 653731 - DNA, 60 bp, Artificial Sequence
  ENSG00000183426_0 (sequence is synthesized)
ctgactttggtggaagtccttggttacttatcattactgtgtttctgagaagttataaat

SEQ ID NO: 653732 - DNA, 79 bp, Artificial Sequence
  ENSG00000183426_1 (sequence is synthesized)
tgaccatcgtcatcgtgggactgactttggtggaagtccttggttacttatcattactgtgtttctgagaagttacttt

SEQ ID NO: 653733 - DNA, 120 bp, Artificial Sequence
  ENSG00000183426_2 (sequence is synthesized)
tccacggatgtacagcagagagccaggaggtccaaccgccgtagacaggaaggaattaaaattgtcctggaagacatctttactttatggagacaggtggaaaccaaagttcgagctaaa

SEQ ID NO: 653734 - DNA, 89 bp, Artificial Sequence
  ENSG00000183426_3 (sequence is synthesized)
agaacatctgaggaaactaagcatgaaagaacgtgagcacggagaaaaggagaggcaggtgtcagaggcagaggaaaatgggaaattgg

SEQ ID NO: 653735 - DNA, 89 bp, Artificial Sequence
  ENSG00000183426_4 (sequence is synthesized)
ttggatatgaaagaaatacacacctacatggaaatgtttcaacgtgcgcaagcgttgcggcggcgggcagaggactactacagatgcaa

SEQ ID NO: 653736 - DNA, 80 bp, Artificial Sequence
  ENSG00000183426_5 (sequence is synthesized)
caagcgttgcggcggcgggcagaggactactacagatgcaaagaatggcggcagtggagcatcgtcattcttcaggattg

SEQ ID NO: 653737 - DNA, 120 bp, Artificial Sequence
  ENSG00000183426_6 (sequence is synthesized)
cggagactctggtgtccctgagggtccacactgtggatgacatccagcagatcgctgctgcgctggcccagtgcatggggcccagcagggagctcgtatgccgctcgtgcctgaagcaga

SEQ ID NO: 653738 - DNA, 120 bp, Artificial Sequence
  ENSG00000183426_7 (sequence is synthesized)
cgctgcacaagctggaggccatgatgcgcatcctgcaggcagagaccaccgcgggcaccgtgacgcccaccgccatcggagacagcatcctcaacatcacaggagacctcatccacctgg

SEQ ID NO: 653739 - DNA, 120 bp, Artificial Sequence
  ENSG00000183426_8 (sequence is synthesized)
ccagctcagacgtgcgggcaccacagcgctcagagctgggagccgagtcaccatcgcggatggtggcgtcccaggcctacaacctgacctctgccctcacgcccatcctcacgcgctccc

SEQ ID NO: 653740 - DNA, 120 bp, Artificial Sequence
  ENSG00000183426_9 (sequence is synthesized)
gcgtgctcaacgaggagcccctgacgctggcgggccgctacctgtctgaggaacccgagccctacctggcagtctacctgcactcggagccccggcccaatgagcgcaactgctcggcta

SEQ ID NO: 653741 - DNA, 120 bp, Artificial Sequence
  ENSG00000183426_10 (sequence is synthesized)
gcaggaggatccgcccagagtccctccagggtgccgaccaccggccctacaccttcttcatttccccggggaccagagacccagtggggagttaccgtctgaacctctccagtcacttcc

SEQ ID NO: 653742 - DNA, 120 bp, Artificial Sequence
  ENSG00000183426_11 (sequence is synthesized)
gctggtcggcgctggaggtgtccgtgggcttgtacacgtccctgtgccagtacttcagcgaggaggacgtggtgtggcggacagaggggctgctgcccctggaggagacctcgccccgcc

SEQ ID NO: 653743 - DNA, 120 bp, Artificial Sequence
  ENSG00000183426_12 (sequence is synthesized)
aggccgtctgcctcacccgccacctcaccgccttcggcaccagcctcttcgtgcccccaagccatatccgctttgtgtttcctgagccaacagcggatgtaaactacatcgtcatgctga

SEQ ID NO: 653744 - DNA, 120 bp, Artificial Sequence
  ENSG00000183426_13 (sequence is synthesized)
catgtgctgtgtgcctggtgacctacatggtcatggccgccatcctgcacaagctggaccagttggatgccagccggggccgcgccatccccttctgtgggcagcggggccgcttcaagt

SEQ ID NO: 653745 - DNA, 84 bp, Artificial Sequence
  ENSG00000183426_14 (sequence is synthesized)
ggacagccggagcggccaccggcacctggacggcgacagagccttccaccgcaacagtctggacatcttccagatcgccacccc

SEQ ID NO: 653746 - DNA, 120 bp, Artificial Sequence
  ENSG00000183426_15 (sequence is synthesized)
tccaccgcaacagtctggacatcttccagatcgccaccccgcacagcctgggtagcgtgtggaagatccgagtgtggcacgacaacaaagggctcagccctgcccggttcctgcagcaca

SEQ ID NO: 653747 - DNA, 120 bp, Artificial Sequence
  ENSG00000183426_16 (sequence is synthesized)
tcatcgtcagggacctgcagacggcacgcagcaccttcttcctggtcaatgactggctttcggtggagacggaggccaacgggggcctggtggagaaggaggtgctggccgcgagtcacg

SEQ ID NO: 653748 - DNA, 120 bp, Artificial Sequence
  ENSG00000183426_17 (sequence is synthesized)
actcacatccagagggccacctgctgcgttctcctcatctgtctcttcctgggcgccaacgccgtgtggtacggggctgttggagactctgcctacagcacggggcgtgtgtccaggctg

SEQ ID NO: 653749 - DNA, 120 bp, Artificial Sequence
  ENSG00000183426_18 (sequence is synthesized)
aacccgctgagcgtcgacacagtcgctgttggcctggtgtccagcgtggttgtctatcccgtctacctggccatcctctttctcttccggatgtcccggagcaaggtggctgggagcccg

SEQ ID NO: 653750 - DNA, 120 bp, Artificial Sequence
  ENSG00000183426_19 (sequence is synthesized)
agccccacacctgccgggcagcaggtgctggacgtcgacagctgcctggactcatccgtgctggacagctccttcctcacgttctgaggcctccacgctgagcaggcctttgctggacag

SEQ ID NO: 653751 - DNA, 72 bp, Artificial Sequence
  ENSG00000183426_20 (sequence is synthesized)
gttctgaggcctccacgctgagcaggcctttgctggacagatgaagagtgacttgtttctggatgattctaa

SEQ ID NO: 653752 - DNA, 64 bp, Artificial Sequence
  ENSG00000183426_21 (sequence is synthesized)
gggtgcggtggctgctcttttggctgggtgctgtggctgctcttttggctcctgctgggattta

SEQ ID NO: 653753 - DNA, 120 bp, Artificial Sequence
  ENSG00000183426_22 (sequence is synthesized)
cgtggtcttcaatgtcatttatcagagcgcggcggtcttcaagctctcactgacggcctccaaccacgtgagcaacgtcaccgtgaactacaacatcaccgtggagcggatgaacaggat

SEQ ID NO: 653754 - DNA, 120 bp, Artificial Sequence
  ENSG00000183426_23 (sequence is synthesized)
gcagggcctgcgggtctctacagtgccagccgtgctgtcccccaatgccacgctggcactgacggcgggcgtgctggtggactcggccgtggaggtggccttcctgtggacctttgggga

SEQ ID NO: 653755 - DNA, 120 bp, Artificial Sequence
  ENSG00000183426_24 (sequence is synthesized)
gccccaggtgagtacgtcctgaccttgctggcatctaatgccttcgagaaccggacgcagcaggtgcctgtgagcgtgtgcgcctccctgccctctgtgctgatccgcagtggccgggtg

SEQ ID NO: 653756 - DNA, 120 bp, Artificial Sequence
  ENSG00000183426_25 (sequence is synthesized)
cccattgtgtccttggagtgtgtgtcctgcaaggcacaggccgtgtacgaagtgagccgcagctcctacgtgtacctggagggccgctgcctcaattgcagcagcggctccaagcgaggg

SEQ ID NO: 653757 - DNA, 81 bp, Artificial Sequence
  ENSG00000183426_26 (sequence is synthesized)
cagtaagcaagaggaggaatcaatatagcaacagtttggatcagactgtacagtttttttgtttttgtttttgtttttgtt

SEQ ID NO: 653758 - DNA, 120 bp, Artificial Sequence
  ENSG00000183426_27 (sequence is synthesized)
gcagacagggtgctcacacagggcgtgaggcctggcttcccagtgagggcagcagcccagttactggggacgtcggccccgggcaggtcctgctggctggctcctcaggctacctggtgg

SEQ ID NO: 653759 - DNA, 120 bp, Artificial Sequence
  ENSG00000183426_28 (sequence is synthesized)
gctttaaattcctggaaagtcacggctctgacagcggctccgctaactcattccaccgtctcatttcacgaaatgaatttaaaactccgctccctgacctcacacgagtccccgtgagtc

SEQ ID NO: 653760 - DNA, 120 bp, Artificial Sequence
  ENSG00000183426_29 (sequence is synthesized)
tctcacgccctctgctgtgttctcgcctggctaaagcaagtggcttttgaggtggagtccgaacccctgatgggaaactgcgggctgcccgcggtgccaccatgctggaggtacagcccc

SEQ ID NO: 653761 - DNA, 120 bp, Artificial Sequence
  ENSG00000183426_30 (sequence is synthesized)
caagacgctggtgctggatgagaccaccacatccacgggcagcgcaggcatgtgactggtgctgcggcggggcgtgctgcgggacggcgagggatacaccttcacgctgacggtgctggg

SEQ ID NO: 653762 - DNA, 120 bp, Artificial Sequence
  ENSG00000183426_31 (sequence is synthesized)
ccgctctggcgaggaggagggctgcgcctccatccccctgtcccccaaccgcccgccgctggggggctcttgccgcctcttcccactgggcgctgtgcacgctctcaccaccaaggtgca

SEQ ID NO: 653763 - DNA, 120 bp, Artificial Sequence
  ENSG00000183426_32 (sequence is synthesized)
cttcgaatgcatgggctggcatgacgcggaggatgctggcgccccgctggtgtacgccctgctgctgcagcgctgtcgccagggccactgcgaggagttctgtgtctacaagggcagcct

SEQ ID NO: 653764 - DNA, 120 bp, Artificial Sequence
  ENSG00000183426_33 (sequence is synthesized)
ctccggctacggagccgtgctgcccccgggtttcaggccacacttcgaggtgggcctggccgtggtggtgcaggaccagctgggagccgctgtggtcgccctcaacaggtctctggccat

SEQ ID NO: 653765 - DNA, 120 bp, Artificial Sequence
  ENSG00000183426_34 (sequence is synthesized)
caccctcccagagcccaacggcagcgcaatggggctcacagtctggctgcacgggctcaccgctagtgtgctcccggggctgctgcggcaggccgatccccagcacgtcatcgagtactc

SEQ ID NO: 653766 - DNA, 120 bp, Artificial Sequence
  ENSG00000183426_35 (sequence is synthesized)
gcccctgacgctggcgggtgaggagatcgtggcccagggcaagcgctcggacccgcggagcctgctgtgctatggcggcgccccagggcctggctgccacttctccatcccctaggcttt

SEQ ID NO: 653767 - DNA, 120 bp, Artificial Sequence
  ENSG00000183426_36 (sequence is synthesized)
cagcagggccccggccaacctcagtgacgtggtgcagctcatctttctggtggactccaatccctttccctttggctatatcagcaactacaccgtctccaccaaggtggcctcgatggc

SEQ ID NO: 653768 - DNA, 120 bp, Artificial Sequence
  ENSG00000183426_37 (sequence is synthesized)
gttccagacacaggccggcgcccagatccccatcgagcggctggcctcagagcgcgcctcaccgtgaaggtgcccaacaactcggactgggctgcccggggccaccgcagctccgccaac

SEQ ID NO: 653769 - DNA, 120 bp, Artificial Sequence
  ENSG00000183426_38 (sequence is synthesized)
tccgttgtggtccagccccaggcctccgtcggtgctgtggtcaccctggacagcagcaaccctgcggccgtgctgcatctgcagctcaactatacgctgctggacggtgcatgcagcggt

SEQ ID NO: 653770 - DNA, 120 bp, Artificial Sequence
  ENSG00000183426_39 (sequence is synthesized)
tggggcacacgcggccccctggccttgttcttggggggaaggcgtttctcgtagggcttccatgggtgtctctggtgaaatttgctttctgtttcatgggctgctgggggcctggccgga

SEQ ID NO: 653771 - DNA, 120 bp, Artificial Sequence
  ENSG00000183431_0 (sequence is synthesized)
aggagttgcttccggccgtgttggtggtctgaattgagaagccgcgactaagggaagatggagacaatactggagcagcagcggcgctatcatgaggagaaggaacggctcatggacgtc

SEQ ID NO: 653772 - DNA, 120 bp, Artificial Sequence
  ENSG00000183431_1 (sequence is synthesized)
atggctaaagagatgctcaccaagaagtccacgctccgggaccagatcaattctgatcaccgcactcgggccatgcaagataggtatatggaggtcagtgggaacctgagggatttgtat

SEQ ID NO: 653773 - DNA, 120 bp, Artificial Sequence
  ENSG00000183431_2 (sequence is synthesized)
gatgataaggatggattacgaaaggaggagctcaatgccatttcaggacccaatgagtttgctgaattctataatagactcaagcaaataaaggaattccaccggaagcacccaaatgag

SEQ ID NO: 653774 - DNA, 120 bp, Artificial Sequence
  ENSG00000183431_3 (sequence is synthesized)
atctgtgtgccaatgtcagtggaatttgaggaactcctgaaggctcgagagaatccaagtgaagaggcacaaaacttggtggagttcacagatgaagagggatatggtcgttatctcgat

SEQ ID NO: 653775 - DNA, 120 bp, Artificial Sequence
  ENSG00000183431_4 (sequence is synthesized)
ctccatgactgttacctcaagtacattaacctgaaggcatctgagaagctggattatatcacatacctgtccatctttgaccaattatttgacattcctaaagaaaggaagaatgcagag

SEQ ID NO: 653776 - DNA, 120 bp, Artificial Sequence
  ENSG00000183431_5 (sequence is synthesized)
tataagagatacctagagatgctgcttgagtaccttcaggattacacagatagagtgaagcctctccaagatcagaatgaactttttgggaagattcaggctgagtttgagaagaaatgg

SEQ ID NO: 653777 - DNA, 120 bp, Artificial Sequence
  ENSG00000183431_6 (sequence is synthesized)
gagaatgggacctttcctggatggccgaaagagacaagcagtgccctgacccatgctggagcccatcttgacctctctgcattctcctcctgggaggagttggcttctctgggtttggac

SEQ ID NO: 653778 - DNA, 120 bp, Artificial Sequence
  ENSG00000183431_7 (sequence is synthesized)
agattgaaatctgctctcttagctttaggcttgaaatgtggcgggaccctagaagagcgagcccagagactattcagtaccaaaggaaagtccctggagtcacttgatacctctttgttt

SEQ ID NO: 653779 - DNA, 120 bp, Artificial Sequence
  ENSG00000183431_8 (sequence is synthesized)
gccaaaaatcccaagtcaaagggcaccaagcgagacactgaaaggaacaaagacattgcttttctagaagcccagatctatgaatatgtagagattctcggggaacagcgacatctcact

SEQ ID NO: 653780 - DNA, 120 bp, Artificial Sequence
  ENSG00000183431_9 (sequence is synthesized)
catgaaaatgtacagcgcaagcaagccaggacaggagaagagcgagaagaagaggaagaagagcagatcagtgagagtgagagtgaagatgaagagaacgagatcatttacaaccccaaa

SEQ ID NO: 653781 - DNA, 120 bp, Artificial Sequence
  ENSG00000183431_10 (sequence is synthesized)
aacctgccacttggctgggatggcaaacctattccctactggctgtataagcttcatggcctaaatatcaactacaactgtgagatttgtggaaactacacctaccgagggcccaaagcc

SEQ ID NO: 653782 - DNA, 120 bp, Artificial Sequence
  ENSG00000183431_11 (sequence is synthesized)
tgctgaatggcgtcatgctcatggcatgaggtgtttgggcatcccaaacactgctcactttgctaatgtgacacagattgaagatgctgtctccttgtgggccaaactgaaattgcagaa

SEQ ID NO: 653783 - DNA, 120 bp, Artificial Sequence
  ENSG00000183431_12 (sequence is synthesized)
ggcttcagaacgatggcagcctgacactgaggaagaatatgaagactcaagtgggaatgttgtgaataagaagacatacgaggatctgaaaagacaaggactgctctagtgttcagggat

SEQ ID NO: 653784 - DNA, 120 bp, Artificial Sequence
  ENSG00000183431_13 (sequence is synthesized)
gtagctcagcttttgggctagcccaggcttccctaagatctgctttttctatttctcccaaccaaatcctcttaaagaccctttgctatgtagtctcatggtctagcatgcatcttgtag

SEQ ID NO: 653785 - DNA, 120 bp, Artificial Sequence
  ENSG00000183431_14 (sequence is synthesized)
aaacaaggcatgctggcagattgcagggttgagatgtgttttatctgttttatattttaaaagattctgccagaaaataaaaccagaccttgttctaaagcccagggttatggaccaact

SEQ ID NO: 653786 - DNA, 120 bp, Artificial Sequence
  ENSG00000183431_15 (sequence is synthesized)
cagtgcttcaggtcttaacgcctccatacctcttcctcaccaactttactagtagctgagatttaatgggcacctattatgctacatatcatgttaggtaaatctgacctgacctctttc

SEQ ID NO: 653787 - DNA, 120 bp, Artificial Sequence
  ENSG00000183431_16 (sequence is synthesized)
cccaccctcctttgttgctgcttccctgaatgagtattaccccaggatgaggtctgccatcagcttagttagccattgatgcaaatactagggaaagactaggaggatgagccagggttg

SEQ ID NO: 653788 - DNA, 120 bp, Artificial Sequence
  ENSG00000183431_17 (sequence is synthesized)
aggaggatgagccagggttgctactaaggactaagtgtcgcaccaaggtttgccttttgtatttgcataaagaaaggagttggagctgggtgcagtggcttgtgcctgtagtcccagcta

SEQ ID NO: 653789 - DNA, 120 bp, Artificial Sequence
  ENSG00000183431_18 (sequence is synthesized)
ggaggctgaggcaggagggttgcttgagactagcctaggtaacatagtgagaccctgtctcattaaaaaaaaaaaaaaggcatggtggcacgcactgtagtcccagctactcaggagact

SEQ ID NO: 653790 - DNA, 120 bp, Artificial Sequence
  ENSG00000183431_19 (sequence is synthesized)
ttgaacctaggagtttgagaccagcctgggcgatatagtgaggccccatctcaaaaaaaaaaaaaggggggggggggggagttgggctgtgttggaatgggcctgcagcccaacaaacaa

SEQ ID NO: 653791 - DNA, 120 bp, Artificial Sequence
  ENSG00000183431_20 (sequence is synthesized)
gggaactaggaccgacagtgacttcaccagcttgctaggtcagaatgagagactggtgggtctgtctacctgtttcttctacaagatccctatttgactgtaaaagtagctaatactcac

SEQ ID NO: 653792 - DNA, 120 bp, Artificial Sequence
  ENSG00000183431_21 (sequence is synthesized)
atgttctccaatcccaggtagccatggtagagttgggtagagttgagcagctgccccaggatccaaatgtggtgtctgaaatggaaagaactaaggcaaccaggaaggcactgatctgcc

SEQ ID NO: 653793 - DNA, 120 bp, Artificial Sequence
  ENSG00000183431_22 (sequence is synthesized)
ttataagcacagtcatctgaaagtcaggcctgctgcaggacaggatcccccagagaccccatttgcctctcaacactcagaccttcaactgttttttaataaatctactttttaaaaaaa

SEQ ID NO: 653794 - DNA, 120 bp, Artificial Sequence
  ENSG00000183431_23 (sequence is synthesized)
ctggagagtttagacttactgctagattggctgtgaaatgtgtggtcctgccacagcctcaggaacacccaccctctggcctgcatttggggtttcccaaaaatctgttaatgtaatatt

SEQ ID NO: 653795 - DNA, 120 bp, Artificial Sequence
  ENSG00000183431_24 (sequence is synthesized)
gtaatttttctcttctttgtataggagttggcttctctgggtttggacagattgaaatctgctctcttagctttaggcttgaaatgtggcgggtaaggaatagtttttctatcaaaacta

SEQ ID NO: 653796 - DNA, 120 bp, Artificial Sequence
  ENSG00000183431_25 (sequence is synthesized)
tcgatttactgtgtgtttgcacagtcttctaagtagctctgattccattttttttgttgctccacactgcaaaaataagccagcctgtgtggtaaagtaaccctaaaatcctttgccgtc

SEQ ID NO: 653797 - DNA, 120 bp, Artificial Sequence
  ENSG00000183431_26 (sequence is synthesized)
gagcgagagtccgtctcaaaaaaaaagattcaagttgttctttccctggtttgtatctgtttttttcttgtgtatacttgtctgatcactccttctgaagctacaatgatttttttggat

SEQ ID NO: 653798 - DNA, 120 bp, Artificial Sequence
  ENSG00000183431_27 (sequence is synthesized)
ttttggatgtctttaccttttctccttcatagagattgttattgaactattagaatttttatattatgagctttaagaaagtaaagtcactttccccattattctcataggttgttccac

SEQ ID NO: 653799 - DNA, 120 bp, Artificial Sequence
  ENSG00000183431_28 (sequence is synthesized)
attaacctccttcaagagtatcagtttctctgttttcggaggtctttggttatatttgatccaacttttatagcaaagcaagatcatgatgaattttgcagtggaaagggttttgtctat

SEQ ID NO: 653800 - DNA, 120 bp, Artificial Sequence
  ENSG00000183431_29 (sequence is synthesized)
gtcttctagggagcatcctaatggcagggagagaggattataacactggatacccaacagatgttcagtccatcctgattgctgttcatttctcatcctgcagtgtgggccaaactgaaa

SEQ ID NO: 653801 - DNA, 120 bp, Artificial Sequence
  ENSG00000183434_0 (sequence is synthesized)
gcacctcacggcagccctacactcggcctggaagaattgtttttcttctctggaaaggtgaacatttatagcatttatttcccaaatctgttaacatggcaaaatatgtcagtctcactg

SEQ ID NO: 653802 - DNA, 120 bp, Artificial Sequence
  ENSG00000183434_1 (sequence is synthesized)
aagctaacgaagaactcaaggtcttaatggacgagaaccagaccagccgccccgtggccgttcacacctccaccgtgaacccgctcgggaagcagctcttgccgaaaacctttggacagt

SEQ ID NO: 653803 - DNA, 120 bp, Artificial Sequence
  ENSG00000183434_2 (sequence is synthesized)
ccagtgtcaacattgaccagcaagtggtaattggtatgcctcagagaccagcagcatcaaacatccctgtggtaggaagcccaaacccacccagcactcactttgcctctcagaaccagc

SEQ ID NO: 653804 - DNA, 120 bp, Artificial Sequence
  ENSG00000183434_3 (sequence is synthesized)
attcctactcctcacctccttgggccgggcagcacaacaggaaaggagagaagaatggcatgggcctgtgccgtctttccatgaaggtctgggagacggtgcagaggaaagggaccactt

SEQ ID NO: 653805 - DNA, 120 bp, Artificial Sequence
  ENSG00000183434_4 (sequence is synthesized)
cctgccaggaagtggtgggcgagctggtcgccaagttcagagctgccagcaaccacgcctcaccaaacgagtcagcttatgacgtgaaaaacataaaacggcgcacctacgatgccttaa

SEQ ID NO: 653806 - DNA, 120 bp, Artificial Sequence
  ENSG00000183434_5 (sequence is synthesized)
acgtgctgatggccatgaatatcatctccagggagaaaaagaagatcaagtggattggtctgaccaccaactcggctcagaactgtcagaacttacgggtggaaagacagaagagacttg

SEQ ID NO: 653807 - DNA, 120 bp, Artificial Sequence
  ENSG00000183434_6 (sequence is synthesized)
aaagaataaagcagaaacagtctgaacttcaacaacttattctacagcaaattgctttcaagaacctggtgctgagaaaccagtatgtggaggagcaggtcagccagcggccgctgccca

SEQ ID NO: 653808 - DNA, 120 bp, Artificial Sequence
  ENSG00000183434_7 (sequence is synthesized)
cgtgcccttcatcatcatcagcagtagcaagaagaccgtcatcaactgcagcatctccgacgacaaatcagaatatctgtttaagtttaacagctcctttgaaatccacgatgacacaga

SEQ ID NO: 653809 - DNA, 120 bp, Artificial Sequence
  ENSG00000183434_8 (sequence is synthesized)
agtgctgatgtggatgggcatgacttttgggctagagtccgggagctgctctgccgaagaccttaaaatggccagaaatttggtcccaaaggctctggagccgtacgtgacagaaatggc

SEQ ID NO: 653810 - DNA, 120 bp, Artificial Sequence
  ENSG00000183434_9 (sequence is synthesized)
tcagggaacttttggaggtgtgttcacgacggcaggttccaggtctaatggcacgtggctttctgccagtgacctgaccaacattgcgattgggatgctggccacaagctccggtggatc

SEQ ID NO: 653811 - DNA, 120 bp, Artificial Sequence
  ENSG00000183434_10 (sequence is synthesized)
tcagtacagtggctccagggtggagaccccagcagtcgaggaggaagaggaggaggacaacaacgatgacgacctcagtgagaatgacgaggatgactgacgtcctctcgccttaagatt

SEQ ID NO: 653812 - DNA, 120 bp, Artificial Sequence
  ENSG00000183434_11 (sequence is synthesized)
cagcttcaggaaaacatttagggaaaagaaactttttttttttttttaatgtgaggttttctgtttcttttttgcctactcccaagaagatattggtaagctatagaatttagatatgca

SEQ ID NO: 653813 - DNA, 120 bp, Artificial Sequence
  ENSG00000183434_12 (sequence is synthesized)
cctctgataagcaaggattgtttcccgtatgattaagacgtgctgttgatgtgtgttttgataccagtgtgctgacacagaatctttatttactttttaggattttgtgttttcattttc

SEQ ID NO: 653814 - DNA, 120 bp, Artificial Sequence
  ENSG00000183434_13 (sequence is synthesized)
tatttttctttaaatgcagagttcattgttgccccttaacagtttttcctgagtttactgaagaaattgtacttcatccacatccatgaaaataaaatgctctccttttgtgcacagtga

SEQ ID NO: 653815 - DNA, 120 bp, Artificial Sequence
  ENSG00000183439_0 (sequence is synthesized)
aactgccaaccaccgcgcaggctgagccccaggcaggaagcagcccacttggtggggttggggtatgagtccttcctcgcgggggctcggtgggtcctgagtattctttggccggatttg

SEQ ID NO: 653816 - DNA, 120 bp, Artificial Sequence
  ENSG00000183439_1 (sequence is synthesized)
ctgatccgtctgctccaggttcacaaagtacagtccgcaggccagcagcatcatctgggaacttaggaaaaaaccagccctactgagtcagaaactggggatgtggcccaggcaatcttt

SEQ ID NO: 653817 - DNA, 120 bp, Artificial Sequence
  ENSG00000183439_2 (sequence is synthesized)
taccaagacctccaggtgattataatgcaaggaaggattccctatcttggacctgaggctgctttcttgaagaaaacttgactttatttcatttagtgggaagagcagcagcccagctat

SEQ ID NO: 653818 - DNA, 120 bp, Artificial Sequence
  ENSG00000183439_3 (sequence is synthesized)
taagttctaatatgcaataggctgcaggctgtgaagtgttcgtggcagtagactctgaagctaaggagctgagggcttaacaagtttctagaagctgccatcaacatgccaagtcagtaa

SEQ ID NO: 653819 - DNA, 120 bp, Artificial Sequence
  ENSG00000183439_4 (sequence is synthesized)
aactgatagttgatcagatttcaaggtctggggagtatatccactgtgtactgggtcttgagctctagagagctaggccttgctaaaataaaagaattaccttacctaccatctttgttc

SEQ ID NO: 653820 - DNA, 120 bp, Artificial Sequence
  ENSG00000183439_5 (sequence is synthesized)
aagtctcaatggaatttgttacggccctggctgacctccgagcagaggctagctgtcccatctgtctggactacttgaaagacccagtgaccatcagctgtgggcataacttctgtctct

SEQ ID NO: 653821 - DNA, 120 bp, Artificial Sequence
  ENSG00000183439_6 (sequence is synthesized)
cctgcatcattatgtcctggaaggatctacatgatagtttcccctgccccttttgccacttttgctgtccagaaaggaaatttataagcaatccccagctgggtagtttgactgaaattg

SEQ ID NO: 653822 - DNA, 120 bp, Artificial Sequence
  ENSG00000183439_7 (sequence is synthesized)
ctaagcaactccagataagaagcaagaagaggaagaggcaggaagagaagcatgtgtgtaagaagcataatcaggttttgactttcttctgtcagaaagacctagagcttttatgtccaa

SEQ ID NO: 653823 - DNA, 120 bp, Artificial Sequence
  ENSG00000183439_8 (sequence is synthesized)
ggtgcagtttgtccactgatcaccagcatcactgtgtttggcccataaagaaggctgcctcctatcataggaaaaaactggaggaatacaatgcaccgtggaaggagagagtggaactaa

SEQ ID NO: 653824 - DNA, 120 bp, Artificial Sequence
  ENSG00000183439_9 (sequence is synthesized)
aagtctgaatttgagcaacttaggttatttctccaaaatgagcaagagactgttcttaggcaattacaagatgaagagatggatattttagcacaactaaatgaaagcctaacaaaattt

SEQ ID NO: 653825 - DNA, 120 bp, Artificial Sequence
  ENSG00000183439_10 (sequence is synthesized)
tcagattatacctcctcattaaaatatctactaaaggagatagagagcatatatgtgaagtcagaactggaattactggcaaatgttaaggatatctatcacagatatgagaatttaaaa

SEQ ID NO: 653826 - DNA, 120 bp, Artificial Sequence
  ENSG00000183439_11 (sequence is synthesized)
ttccctgagctgtttttattcaaattaaaaaaatatggttaccatctgcctccacaatattctggcctagacaaaattatcaagcgatttcaagtagatgtaattctagatcctgaaaca

SEQ ID NO: 653827 - DNA, 120 bp, Artificial Sequence
  ENSG00000183439_12 (sequence is synthesized)
gcacatcgtaaacttatagtctcagaagatagaaaaactgtgcgctatggaaatacaacacaaaatgtacctcataacccaagaagattttatctcctcccagctgttctgggttctaag

SEQ ID NO: 653828 - DNA, 120 bp, Artificial Sequence
  ENSG00000183439_13 (sequence is synthesized)
ggatatagttgtggcaggcagtactgggaagtagaagtgaaagacaagcctgaatggattcttggtgtctgtaatgactgtcttcccagaaggaggaagagtcaaccaattttagtacag

SEQ ID NO: 653829 - DNA, 120 bp, Artificial Sequence
  ENSG00000183439_14 (sequence is synthesized)
gatggattatggggaatttggcgatctagtcagaataattatattgtattgggccacagggaaattattctgctgccacaagtaattcctagtaagattggcatttttttagactatgaa

SEQ ID NO: 653830 - DNA, 120 bp, Artificial Sequence
  ENSG00000183439_15 (sequence is synthesized)
atgaatgaagtttccttttataatttgaatgatagatctcttctctatacttttaatgataattttacaggagcactttggccttatttttatactggaactgactcaaaacctcttaaa

SEQ ID NO: 653831 - DNA, 120 bp, Artificial Sequence
  ENSG00000183439_16 (sequence is synthesized)
atttctacagtaacagattctgaatgaattattagaagactcagtttctttcacctagtagacataactgagccagtgaatctagttttggctattctgtattttgtccagtttttccca

SEQ ID NO: 653832 - DNA, 120 bp, Artificial Sequence
  ENSG00000183439_17 (sequence is synthesized)
taagaaagcaatatttttttatctcagtttcagcaacttccaaaaaatgtgattatgggacctactttatattaaattatggggtcagtgacaaggtactttagaaattctacagtaaaa

SEQ ID NO: 653833 - DNA, 120 bp, Artificial Sequence
  ENSG00000183439_18 (sequence is synthesized)
atgcaaaccaggaaatcactggaactgaagaaaaagatggagtctccttctgtcaccaggctggagtgcagttgcacgatctcggctcacttcaacctccgcctcccgggatcaagcgat

SEQ ID NO: 653834 - DNA, 85 bp, Artificial Sequence
  ENSG00000183439_19 (sequence is synthesized)
ctcggctcacttcaacctccgcctcccgggatcaagcgattcttctgcctctggctcctgagtagctgggactacagagatgcga

SEQ ID NO: 653835 - DNA, 120 bp, Artificial Sequence
  ENSG00000183439_20 (sequence is synthesized)
atgctgccaaccatgtgtagggtatgtatatgttcctataccataataaaattttaattacatttgtaaggtatgtaattatatgtatttctgtataatatgtacatataaatatgctaa

SEQ ID NO: 653836 - DNA, 80 bp, Artificial Sequence
  ENSG00000183439_21 (sequence is synthesized)
ttttagatgtatattggaatgtttatctttctaataatacaaaactgatggttaaaaaataaaatgcacaaactccccaa

SEQ ID NO: 653837 - DNA, 120 bp, Artificial Sequence
  ENSG00000183454_0 (sequence is synthesized)
ctctttctctccctacctccctcgctcagcagctcccggtcgcacaactcccagcagccggcgctggggaggtggtagggggtgcgggtggaggtgcccagttagcttctcgtgggtggc

SEQ ID NO: 653838 - DNA, 120 bp, Artificial Sequence
  ENSG00000183454_1 (sequence is synthesized)
caacctggggctcccattctcctgtgcaccctggagtggagctcccgctatcagccacaggggctgaggatccgcactgggggcgtcgtgggcatcgggcttcagcttcccccctcttgt

SEQ ID NO: 653839 - DNA, 120 bp, Artificial Sequence
  ENSG00000183454_2 (sequence is synthesized)
ctagcccccctgggcgcataggggggcttgtgagcactgcagactgcagccttcccctcaaccctccctcccctcgttggtgggctgaccctgcctctccttctctcctccgccccgtta

SEQ ID NO: 653840 - DNA, 120 bp, Artificial Sequence
  ENSG00000183454_3 (sequence is synthesized)
gagccctgctgcagagcctccggctgggatagccgccccccgtgggggcgatgcggacagcgcgggacagccaggggagcgcgctggggccgcagcatgcgggaacccgctaaacccggt

SEQ ID NO: 653841 - DNA, 120 bp, Artificial Sequence
  ENSG00000183454_4 (sequence is synthesized)
ggctgctgaggcggccgagatgctcgtgcgcgcagcgcgccccactgcatcctcgaccttctcgggctacagggaccgtcagtggcgactatgggcagagtgggctattggaccctgctg

SEQ ID NO: 653842 - DNA, 120 bp, Artificial Sequence
  ENSG00000183454_5 (sequence is synthesized)
gtgctgccggcccttctggtctggcgcggtccggcgccgagcgcggcggcggagaagggtccccccgcgctaaatattgcggtgatgctgggtcacagccacgacgtgacagagcgcgaa

SEQ ID NO: 653843 - DNA, 120 bp, Artificial Sequence
  ENSG00000183454_6 (sequence is synthesized)
cttcgaacactgtggggccccgagcaggcggcggggctgcccctggacgtgaacgtggtagctctgctgatgaaccgcaccgaccccaagagcctcatcacgcacgtgtgcgacctcatg

SEQ ID NO: 653844 - DNA, 120 bp, Artificial Sequence
  ENSG00000183454_7 (sequence is synthesized)
tccggggcacgcatccacggcctcgtgtttggggacgacacggaccaggaggccgtagcccagatgctggattttatctcctcccacaccttcgtccccatcttgggcattcatgggggc

SEQ ID NO: 653845 - DNA, 120 bp, Artificial Sequence
  ENSG00000183454_8 (sequence is synthesized)
gcatctatgatcatggctgacaaggatccgacgtctaccttcttccagtttggagcgtccatccagcagcaagccacggtcatgctgaagatcatgcaggattatgactggcatgtcttc

SEQ ID NO: 653846 - DNA, 120 bp, Artificial Sequence
  ENSG00000183454_9 (sequence is synthesized)
tccctggtgaccactatcttccctggctacagggaattcatcagcttcgtcaagaccacagtggacaacagctttgtgggctgggacatgcagaatgtgatcacactggacacttccttt

SEQ ID NO: 653847 - DNA, 120 bp, Artificial Sequence
  ENSG00000183454_10 (sequence is synthesized)
gaggatgcaaagacacaagtccagctgaagaagatccactcttctgtcatcttgctctactgttccaaagacgaggctgttctcattctgagtgaggcccgctcccttggcctcaccggg

SEQ ID NO: 653848 - DNA, 120 bp, Artificial Sequence
  ENSG00000183454_11 (sequence is synthesized)
tatgatttcttctggattgtccccagcttggtctctgggaacacggagctcatcccaaaagagtttccatcgggactcatttctgtctcctacgatgactgggactacagcctggaggcg

SEQ ID NO: 653849 - DNA, 120 bp, Artificial Sequence
  ENSG00000183454_12 (sequence is synthesized)
agagtgagggacggcattggcatcctaaccaccgctgcatcttctatgctggagaagttctcctacatccccgaggccaaggccagctgctacgggcagatggagaggccagaggtcccg

SEQ ID NO: 653850 - DNA, 120 bp, Artificial Sequence
  ENSG00000183454_13 (sequence is synthesized)
atgcacaccttgcacccatttatggtcaatgttacatgggatggcaaagacttatccttcactgaggaaggctaccaggtgcaccccaggctggtggtgattgtgctgaacaaagaccgg

SEQ ID NO: 653851 - DNA, 120 bp, Artificial Sequence
  ENSG00000183454_14 (sequence is synthesized)
gaatgggaaaaggtgggcaagtgggagaaccatacgctgagcctgaggcacgccgtgtggcccaggtacaagtccttctccgactgtgagccggatgacaaccatctcagcatcgtcacc

SEQ ID NO: 653852 - DNA, 120 bp, Artificial Sequence
  ENSG00000183454_15 (sequence is synthesized)
ctggaggaggccccattcgtcatcgtggaagacatagaccccctgaccgagacgtgtgtgaggaacaccgtgccatgtcggaagttcgtcaaaatcaacaattcaaccaatgaggggatg

SEQ ID NO: 653853 - DNA, 120 bp, Artificial Sequence
  ENSG00000183454_16 (sequence is synthesized)
aatgtgaagaaatgctgcaaggggttctgcattgatattctgaagaagctttccagaactgtgaagtttacttacgacctctatctggtgaccaatgggaagcatggcaagaaagttaac

SEQ ID NO: 653854 - DNA, 120 bp, Artificial Sequence
  ENSG00000183454_17 (sequence is synthesized)
aatgtgtggaatggaatgatcggtgaagtggtctatcaacgggcagtcatggcagttggctcgctcaccatcaatgaggaacgttctgaagtggtggacttctctgtgccctttgtggaa

SEQ ID NO: 653855 - DNA, 120 bp, Artificial Sequence
  ENSG00000183454_18 (sequence is synthesized)
acgggaatcagtgtcatggtttcaagaagtaatggcaccgtctcaccttctgcttttctagaaccattcagcgcctctgtctgggtgatgatgtttgtgatgctgctcattgtttctgcc

SEQ ID NO: 653856 - DNA, 120 bp, Artificial Sequence
  ENSG00000183454_19 (sequence is synthesized)
atagctgtttttgtctttgaatacttcagccctgttggatacaacagaaacttagccaaagggaaagcaccccatgggccttcttttacaattggaaaagctatatggcttctttggggc

SEQ ID NO: 653857 - DNA, 120 bp, Artificial Sequence
  ENSG00000183454_20 (sequence is synthesized)
ctggtgttcaataactccgtgcctgtccagaatcctaaagggaccaccagcaagatcatggtatctgtatgggccttcttcgctgtcatattcctggctagctacacagccaatctggct

SEQ ID NO: 653858 - DNA, 120 bp, Artificial Sequence
  ENSG00000183454_21 (sequence is synthesized)
gccttcatgatccaagaggaatttgtggaccaagtgaccggcctcagtgacaaaaagtttcagagacctcatgactattccccaccttttcgatttgggacagtgcctaatggaagcacg

SEQ ID NO: 653859 - DNA, 120 bp, Artificial Sequence
  ENSG00000183454_22 (sequence is synthesized)
gagagaaacattcggaataactatccctacatgcatcagtacatgaccaaatttaatcagaaaggagtagaggacgccttggtcagcctgaaaacggggaagctggacgctttcatctac

SEQ ID NO: 653860 - DNA, 120 bp, Artificial Sequence
  ENSG00000183454_23 (sequence is synthesized)
gatgccgcagtcttgaattacaaggctgggagggatgaaggctgcaagctggtgaccatcgggagtgggtacatctttgccaccaccggttatggaattgcccttcagaaaggctctcct

SEQ ID NO: 653861 - DNA, 120 bp, Artificial Sequence
  ENSG00000183454_24 (sequence is synthesized)
tggaagaggcagatcgacctggccttgcttcagtttgtgggtgatggtgagatggaggagctggagaccctgtggctcactgggatctgccacaacgagaagaacgaggtgatgagcagc

SEQ ID NO: 653862 - DNA, 120 bp, Artificial Sequence
  ENSG00000183454_25 (sequence is synthesized)
cagctggacattgacaacatggcgggcgtattctacatgctggctgccgccatggcccttagcctcatcaccttcatctgggagcacctcttctactggaagctgcgcttctgtttcacg

SEQ ID NO: 653863 - DNA, 120 bp, Artificial Sequence
  ENSG00000183454_26 (sequence is synthesized)
ggcgtgtgctccgaccggcctgggttgctcttctccatcagcaggggcatctacagctgcattcatggagtgcacattgaagaaaagaagaagtctccagacttcaatctgacgggatcc

SEQ ID NO: 653864 - DNA, 120 bp, Artificial Sequence
  ENSG00000183454_27 (sequence is synthesized)
cagagcaacatgttaaaactcctccggtcagccaaaaacatttccagcatgtccaacatgaactcctcaagaatggactcacccaaaagagctgctgacttcatccaaagaggttccctc

SEQ ID NO: 653865 - DNA, 120 bp, Artificial Sequence
  ENSG00000183454_28 (sequence is synthesized)
atcatggacatggtttcagataaggggaatttgatgtactcagacaacaggtcctttcaggggaaagagagcatttttggagacaacatgaacgaactccaaacatttgtggccaaccgg

SEQ ID NO: 653866 - DNA, 120 bp, Artificial Sequence
  ENSG00000183454_29 (sequence is synthesized)
cagaaggataacctcaataactatgtattccagggacaacatcctcttactctcaatgagtccaaccctaacacggtggaggtggccgtgagcacagaatccaaagcgaactctagaccc

SEQ ID NO: 653867 - DNA, 120 bp, Artificial Sequence
  ENSG00000183454_30 (sequence is synthesized)
cggcagctgtggaagaaatccgtggattccatacgccaggattcactatcccagaatccagtctcccagagggatgaggcaacagcagagaataggacccactccctaaagagccctagg

SEQ ID NO: 653868 - DNA, 120 bp, Artificial Sequence
  ENSG00000183454_31 (sequence is synthesized)
tatcttccagaagagatggcccactctgacatttcagaaacgtcaaatcgggccacgtgccacagggaacctgacaacagtaagaaccacaaaaccaaggacaactttaaaaggtcagtg

SEQ ID NO: 653869 - DNA, 120 bp, Artificial Sequence
  ENSG00000183454_32 (sequence is synthesized)
gcctccaaataccccaaggactgtagtgaggtcgagcgcacctacctgaaaaccaaatcaagctcccctagagacaagatctacactatagatggtgagaaggagcctggtttccactta

SEQ ID NO: 653870 - DNA, 120 bp, Artificial Sequence
  ENSG00000183454_33 (sequence is synthesized)
gatccaccccagtttgttgaaaatgtgaccctgcccgagaacgtggacttcccggacccctaccaggatcccagtgaaaacttccgcaagggggactccacgctgccaatgaaccggaac

SEQ ID NO: 653871 - DNA, 120 bp, Artificial Sequence
  ENSG00000183454_34 (sequence is synthesized)
cccttgcataatgaagaggggctttccaacaacgaccagtataaactctactccaagcacttcaccttgaaagacaagggttccccgcacagtgagaccagcgagcgataccggcagaac

SEQ ID NO: 653872 - DNA, 120 bp, Artificial Sequence
  ENSG00000183454_35 (sequence is synthesized)
tccacgcactgcagaagctgcctttccaacatgcccacctattcaggccacttcaccatgaggtcccccttcaagtgcgatgcctgcctgcggatggggaacctctatgacatcgatgaa

SEQ ID NO: 653873 - DNA, 120 bp, Artificial Sequence
  ENSG00000183454_36 (sequence is synthesized)
gaccagatgcttcaggagacaggtaacccagccaccggggagcaggtctaccagcaggactgggcacagaacaatgcccttcaattacaaaagaacaagctaaggattagccgtcagcat

SEQ ID NO: 653874 - DNA, 120 bp, Artificial Sequence
  ENSG00000183454_37 (sequence is synthesized)
tcctacgataacattgtcgacaaacctagggagctagaccttagcaggccctcccggagcataagcctcaaggacagggaacggcttctggagggaaatttttacggcagcctgtttagt

SEQ ID NO: 653875 - DNA, 120 bp, Artificial Sequence
  ENSG00000183454_38 (sequence is synthesized)
gtcccctcaagcaaactctcggggaaaaaaagctcccttttcccccaaggtctggaggacagcaagaggagcaagtctctcttgccagaccacacctccgataaccctttcctccactcc

SEQ ID NO: 653876 - DNA, 120 bp, Artificial Sequence
  ENSG00000183454_39 (sequence is synthesized)
cacagggatgaccaacgcttggttattgggagatgcccctcggacccttacaaacactcgttgccatcccaggcggtgaatgacagctatcttcggtcgtccttgaggtcaacggcatcg

SEQ ID NO: 653877 - DNA, 120 bp, Artificial Sequence
  ENSG00000183454_40 (sequence is synthesized)
tactgttccagggacagtcggggccacaatgatgtgtatatttcggagcatgttatgccttatgctgcaaataagaataatatgtactctacccccagggttttaaattcctgcagcaat

SEQ ID NO: 653878 - DNA, 120 bp, Artificial Sequence
  ENSG00000183454_41 (sequence is synthesized)
agacgcgtgtacaagaaaatgcctagtatcgaatctgatgtttaaaaatcttccattaatgttttatctatagggaaatatacgtaatggccaatgttctggagggtaaatgttggatgt

SEQ ID NO: 653879 - DNA, 120 bp, Artificial Sequence
  ENSG00000183454_42 (sequence is synthesized)
ccaatagtgccctgctaagaggaagaagatgtagggaggtattttgttgttgttgttgttggctcttttgcacacggcttcatgccataatcttccactcaaggaatcttgtgaggtgtg

SEQ ID NO: 653880 - DNA, 120 bp, Artificial Sequence
  ENSG00000183454_43 (sequence is synthesized)
tgctgagcatggcagacaccagataggtgagtccttaaccaaaaataactaactacataagggcaagtctccgggacatgcctactgggtatgttggcaataatgatgcattggatgcca

SEQ ID NO: 653881 - DNA, 120 bp, Artificial Sequence
  ENSG00000183454_44 (sequence is synthesized)
atggtgatgttatgatttcctatattccaaattccattaaggtcagcccaccatgtaattttctcatcagaaatgcctaatggtttctctaatacagaataagcaatatggtgtgcatgt

SEQ ID NO: 653882 - DNA, 120 bp, Artificial Sequence
  ENSG00000183454_45 (sequence is synthesized)
aaacctgacacagacaaaataaaaacagttaagaatgcatctgcactgtagtgcgattgacatgtgcaagagattaggaagtttggctcgtaacagtttcagctttcttgttatgccttc

SEQ ID NO: 653883 - DNA, 120 bp, Artificial Sequence
  ENSG00000183454_46 (sequence is synthesized)
catcacagcccaggctcaccccaagaactccaggctcccctaaagaatagcaaatcagtgtgttcgtgatgactgtgctaccttcattatagttcatttccaagacacatctggagccaa

SEQ ID NO: 653884 - DNA, 120 bp, Artificial Sequence
  ENSG00000183454_47 (sequence is synthesized)
aggcccgagggaccctcaggtggggagagctacaggaatctctttggatgttgatgtgtgtttctctcaccctcggcttcgatggtcttgttcagagctgcataaactaacacatttatg

SEQ ID NO: 653885 - DNA, 120 bp, Artificial Sequence
  ENSG00000183454_48 (sequence is synthesized)
tctccgagatctaagtgtggatcttctgtctgtgacacagtggccattgtagtttatcccgaagacgcctatgtacgtaagtttgcatttcctcccttctggtgatgactcagggttgta

SEQ ID NO: 653886 - DNA, 120 bp, Artificial Sequence
  ENSG00000183454_49 (sequence is synthesized)
tagtatctgttaccccttccctcccagagtaaccataactcgttccgtttccaaacagccatggtggtgtccaattagctgtgtatcgctcttcccagagttgttaatgtggtgacatgc

SEQ ID NO: 653887 - DNA, 120 bp, Artificial Sequence
  ENSG00000183454_50 (sequence is synthesized)
accaacagccgtatgtgtactgtgatctgtaagaagtacaatgccatctgtctgccgaaggctagcatggttttaggtttatcttccttcacatccagaaattctgttggacactcactt

SEQ ID NO: 653888 - DNA, 120 bp, Artificial Sequence
  ENSG00000183454_51 (sequence is synthesized)
ccaccccaaactcctcaaatcaaaagccttcaaaacacgaggcactcttggatctaccctgagtatcctccaaactgtggatacagtttagtgagacaagcaatttctcccttctgagtt

SEQ ID NO: 653889 - DNA, 120 bp, Artificial Sequence
  ENSG00000183454_52 (sequence is synthesized)
attctctctgttggtggcaaaccacttcatagcaccaacagagatgtaggaaaaattcctcaaagtatttgtcatttctgagtcgcctgcattatcccattcttattctcctcaaacctg

SEQ ID NO: 653890 - DNA, 120 bp, Artificial Sequence
  ENSG00000183454_53 (sequence is synthesized)
tgcatatatgacatgaaatgatatccattttttttttaagttagagacagagaggggaatacttatgcatggggagcctgttagcacagtgcctgccacaaaaacaagtgcccccgacaa

SEQ ID NO: 653891 - DNA, 120 bp, Artificial Sequence
  ENSG00000183454_54 (sequence is synthesized)
gatagttgctatgttatgacactttctcagatcaggattttctagtttaaaaattaaatatcataaaaccagcaaataatattaactaaaccttttatatagttctactctgttaattag

SEQ ID NO: 653892 - DNA, 120 bp, Artificial Sequence
  ENSG00000183454_55 (sequence is synthesized)
tgtatttcatgtacatgaatatttttgaagtatttgggataactagccatcagtgtttgcagaagacctcagtctgttttgggccattacggaaacactaagctaatgtagactcgcctg

SEQ ID NO: 653893 - DNA, 120 bp, Artificial Sequence
  ENSG00000183454_56 (sequence is synthesized)
gccatttcctggtttcctcctgcattctgctttacattcttgaagaaagggataaagtggcaggttgaaaaattatcccatttcttctcctcatggtgtgcgttctgttttgtaagtatt

SEQ ID NO: 653894 - DNA, 120 bp, Artificial Sequence
  ENSG00000183454_57 (sequence is synthesized)
attttcttgcatgtgggcaagtgtcagggatgattcccttaaagctcaaggatgcatggaatagctccatctttgggaaagtacacctgacctacagtgttcctataatgaaaagtggtt

SEQ ID NO: 653895 - DNA, 120 bp, Artificial Sequence
  ENSG00000183454_58 (sequence is synthesized)
gcaataaatttcagggtcaatcatagggagacagagggaggcagtgggtgagaggagcttcctttcatttttgaaaggcagaaggggctgactaggtgctggggatgcatgtgcttgaaa

SEQ ID NO: 653896 - DNA, 120 bp, Artificial Sequence
  ENSG00000183454_59 (sequence is synthesized)
atgacattttatttcccggatgctgtacctctgctgccccaagacccagccatggagaagcctggatcgaagggcccagaatagtcaccccaacatctgatcctaaatctgaatctccat

SEQ ID NO: 653897 - DNA, 120 bp, Artificial Sequence
  ENSG00000183454_60 (sequence is synthesized)
gactgtgtagccttttagccctttctaccttctgcccttccagtgcattccagaccttaatccaccccagcaaggatcgcctccatttcctcatgagtctgggatgttttgacatgaatg

SEQ ID NO: 653898 - DNA, 120 bp, Artificial Sequence
  ENSG00000183454_61 (sequence is synthesized)
cctctggtgtcctctaaacccagggggctgccaaatgccacagagacctccagggagagtgagagttatacttggactgacttcatcggtcagaaagccttcccctaacagcagcattat

SEQ ID NO: 653899 - DNA, 120 bp, Artificial Sequence
  ENSG00000183454_62 (sequence is synthesized)
ttctgctattaaccccatacatctctggataaagaaactgaaaacgtggcctttggaagaatcaacagtaatgttgtgaaaaaaatatatattcttttcactgaccgaagtgttttttca

SEQ ID NO: 653900 - DNA, 120 bp, Artificial Sequence
  ENSG00000183454_63 (sequence is synthesized)
agtgttttttcaaataaataatcagaaatgttatgctacacaaagtttatggtatcccttctctactaattcaatgactcttcaatgtgatgatcccaagcaaaaaaaaaaaaaaaaaaa

SEQ ID NO: 653901 - DNA, 120 bp, Artificial Sequence
  ENSG00000183454_64 (sequence is synthesized)
ctgatcagatggtcaatttctaaggaaaagatgtagagttattcaaaggtcatctaagtcagttcagtctttgcaaaaagaatatcaggaatgtaacgtccagtggtaaatggaacccac

SEQ ID NO: 653902 - DNA, 120 bp, Artificial Sequence
  ENSG00000183454_65 (sequence is synthesized)
agtatgagaagtaacaagaattaaataggaagcctggaagcctgagactatagatctatcacagaagattcccgtaacatatcccagctctgagttcttagatttgttgatgtcaaggag

SEQ ID NO: 653903 - DNA, 120 bp, Artificial Sequence
  ENSG00000183454_66 (sequence is synthesized)
cccaaatttctgaacacaaatgcctgagtttcagctggcttaagtcagagctggcatccataatgatattttgttaattctaattggttttccccacttgagaaggacccaactagtcct

SEQ ID NO: 653904 - DNA, 120 bp, Artificial Sequence
  ENSG00000183454_67 (sequence is synthesized)
cagataggtacacttgaatgcaaacggttgggtctctgtccatgggtaatagcacgcacatgcaaccaatttaaaatactctgggtaagagagtcttctagagcataaactgtacttgag

SEQ ID NO: 653905 - DNA, 120 bp, Artificial Sequence
  ENSG00000183454_68 (sequence is synthesized)
aaacctttgtgcttctggaaaatgggtttcatcatccttacatctgcaggttcttaggccacttatggtttcaatgctctgagctggcaagtccctataggtctatctttctgccagaga

SEQ ID NO: 653906 - DNA, 120 bp, Artificial Sequence
  ENSG00000183454_69 (sequence is synthesized)
gacttgcaggattataatctcacaatctcaccactcattactgttatgtcctctgcaaatctctctgcgttattttagccagcaccatgactgggcatccacggattactcttgattttc

SEQ ID NO: 653907 - DNA, 120 bp, Artificial Sequence
  ENSG00000183454_70 (sequence is synthesized)
tcttccctgattcacaggatgccagagagtctgagtatttagtttttctggtgaaagcattaaaattcacacattgcagcaaaatctgtcaaatcatttcacgcttattttctggggaga

SEQ ID NO: 653908 - DNA, 120 bp, Artificial Sequence
  ENSG00000183454_71 (sequence is synthesized)
aaaatagaaaattacaccttgtttacaaatgaaatagtttcacttaaatgggactctagccaaggcagttaattagtcaaaagatccacagctgtcatatagtcacacattgtttattct

SEQ ID NO: 653909 - DNA, 120 bp, Artificial Sequence
  ENSG00000183454_72 (sequence is synthesized)
atttgctatgtcgaccactgatgtgtatttaatattctgcatccttcacaggaaatgacaaatgccctgaattatttgcaaatagaattgctaatgaaaaagaaaaaaaatgttgatgtt

SEQ ID NO: 653910 - DNA, 120 bp, Artificial Sequence
  ENSG00000183454_73 (sequence is synthesized)
aattaaatggtgattaaaaatttatctcctttaaatctaaaaagtgcagctttaataatcagttgtcatataaataagtaccttgtactgaaatcccttgcggtttaagacctaaataaa

SEQ ID NO: 653911 - DNA, 120 bp, Artificial Sequence
  ENSG00000183454_74 (sequence is synthesized)
cactaatttgagaactctaaataccttacagaggagctggatatattcgttaacattatgcacattcctgtactgtttctttgtgcatagctgttgtgcatgaatccttgaaaaggggac

SEQ ID NO: 653912 - DNA, 120 bp, Artificial Sequence
  ENSG00000183454_75 (sequence is synthesized)
atgcgttgtttctgaaatggagcctgtttgtattaaccatggctatagtagacatgattggactcaaagaaaaagaagtttgagtaggtggaagctaaatgtgttgcttgatatttaatg

SEQ ID NO: 653913 - DNA, 120 bp, Artificial Sequence
  ENSG00000183454_76 (sequence is synthesized)
agtgaagggttctatgtaaaggcaattttccttccaaaagtactgtttattttcactggagacaaaattagacctttccagataccccatctctttttggtgaacagggttgaaagtgct

SEQ ID NO: 653914 - DNA, 120 bp, Artificial Sequence
  ENSG00000183454_77 (sequence is synthesized)
gtggggtctatacttgaaaagttctcccaatatgcagttactgtttcccattcaatccctatacattgtactgtgttcatatctaattgtatcagatgaggtcagcttgccacttgatat

SEQ ID NO: 653915 - DNA, 120 bp, Artificial Sequence
  ENSG00000183454_78 (sequence is synthesized)
agatcagagatgatcaaatgcacttatcctgtgaatacaactgcttgtgtacacatgtatataatatacatgcttgatttctacaattcacacgtaagtgtattatccaaataaaattgt

SEQ ID NO: 653916 - DNA, 120 bp, Artificial Sequence
  ENSG00000183454_79 (sequence is synthesized)
acatattgtaaagtttatgttaaaaattaaatggtgatgatggtattaacacatggaaaacccattctggttatttttatgggaggatatttctgtagagagggcactatatttttttaa

SEQ ID NO: 653917 - DNA, 120 bp, Artificial Sequence
  ENSG00000183454_80 (sequence is synthesized)
tctcagttgtagggaggatgacagagcctaagtagaatatgggtgttggcgttcttggccccttctttaaaaaacaaaactctgggatgaggggtatagaatatattctgctcgcatttg

SEQ ID NO: 653918 - DNA, 120 bp, Artificial Sequence
  ENSG00000183454_81 (sequence is synthesized)
cttctgaagacaatgccgatatggacttgtgtgtgatttccttaaacacatcaaagggcatagatttcctatttaaattccttatcctctttcctcacctgcactctttctgtgcccagc

SEQ ID NO: 653919 - DNA, 120 bp, Artificial Sequence
  ENSG00000183454_82 (sequence is synthesized)
agtactttcagtatagtattagctagaagtgcctgcccagaagggtcttagaaaaatagagttcgtagaaccacaccaaaagttaggagaaggggaggagagatgagaaaaatgaagttt

SEQ ID NO: 653920 - DNA, 120 bp, Artificial Sequence
  ENSG00000183454_83 (sequence is synthesized)
acaaatgggcagttgcctgtttaagatcatcaagttagagagtatcagagcgaggattagatccaagacatggttcaatttctggctcgattctctgaccgggctgacttatttctaggt

SEQ ID NO: 653921 - DNA, 120 bp, Artificial Sequence
  ENSG00000183454_84 (sequence is synthesized)
ttctttcaaggggaaactcctgagtagctctggaataagagccagagatccccataaggctgccctggtttttgttttgttttgttttttgtttttgccacttgccccagaaagacctac

SEQ ID NO: 653922 - DNA, 120 bp, Artificial Sequence
  ENSG00000183454_85 (sequence is synthesized)
ccatgcttctttgaatttggttttcctttaaactccctcacaatccctgtcttaaagttcctagaagagaaaacttttctcagagaccgtctccttaggaaaaatcaacagggatattgt

SEQ ID NO: 653923 - DNA, 120 bp, Artificial Sequence
  ENSG00000183454_86 (sequence is synthesized)
ttaaaacctcaaactgaagataaaaggctggcagtgaccattgaaataattgaggtctatgtatcatgcattgaggaagaaccaagcacattgaccagctaataggacttcactgaatgt

SEQ ID NO: 653924 - DNA, 120 bp, Artificial Sequence
  ENSG00000183454_87 (sequence is synthesized)
ccactttattttgaaagccagtttgggattgtgggggaggggatgcaaaataaatagaaaatatagtctcttcccataagtagcttatggtttagaagttcagttctctaatacaaagga

SEQ ID NO: 653925 - DNA, 120 bp, Artificial Sequence
  ENSG00000183454_88 (sequence is synthesized)
taaccaaggacccatgcaatgcaaacagagactaaacagcaaaaattagaaatgacaactaaagttgtagccaggaaaaaaaaaataatctgattctatgagcataccttttttaaaaaa

SEQ ID NO: 653926 - DNA, 120 bp, Artificial Sequence
  ENSG00000183454_89 (sequence is synthesized)
aaaaaaaaagtccttccctaaacctttaagtaactccggagaatagagttagtggtcccggaaatgcagttgatttattttaatcttcaaataatggacttaggagacccaggagctgct

SEQ ID NO: 653927 - DNA, 120 bp, Artificial Sequence
  ENSG00000183454_90 (sequence is synthesized)
aaccaggtgaacacactcacactcctacatttttgcacaggaaggcttttgtctggttccaaccagttctccagtccttgccaaatcatgcctcctcccagccttgcattatgacatgtg

SEQ ID NO: 653928 - DNA, 120 bp, Artificial Sequence
  ENSG00000183454_91 (sequence is synthesized)
cctcaagaaaaggttgaaaaaattccccaaaggattagaaaatagaccatgatgtaaaaagacgaagcatttccctaaagcttttttgtttggttttgtttttgacatttgaagaaccct

SEQ ID NO: 653929 - DNA, 120 bp, Artificial Sequence
  ENSG00000183454_92 (sequence is synthesized)
tctgatacaccagggtatgaatgtatcagggaagcatagagggaaaattctttatcaagttccaagtgcctactgctgtggctgacagaaagcatcaggttccctagagagaaaacgggg

SEQ ID NO: 653930 - DNA, 120 bp, Artificial Sequence
  ENSG00000183454_93 (sequence is synthesized)
caaagagatggcaaaaggaatagaggtgtatttcaggaaggatggcgaggtggagagggagcttttgtcactctgtctatcccattctgtgcattcttggaatgttacattttctgctta

SEQ ID NO: 653931 - DNA, 120 bp, Artificial Sequence
  ENSG00000183454_94 (sequence is synthesized)
tcgcaagtacttgccatggatctgcacctgaatttgaaaatatcaaaatatatctaaattgagtgtaggcgatattctaggcatatcctagaatgtgatcctcaaaacaaccttaagata

SEQ ID NO: 653932 - DNA, 120 bp, Artificial Sequence
  ENSG00000183454_95 (sequence is synthesized)
taaatatgattgctcccattttacagataaggaaactgaggctcaggtttttctcaacctcgtcagcaactagaattagctagtaaatccctaacgttagacatattttcaaagtgcctg

SEQ ID NO: 653933 - DNA, 120 bp, Artificial Sequence
  ENSG00000183454_96 (sequence is synthesized)
gtctcctccagggaggtcagaatagaagtcagaaagagaggtgtgctcttttgaggttcctgggcatatacccttgagtatcagcctctgtgacagggaagtctgttagggtcttacccc

SEQ ID NO: 653934 - DNA, 120 bp, Artificial Sequence
  ENSG00000183454_97 (sequence is synthesized)
tcattgcctgatctgtgtgtatggagaacttctggggatctcacctctgttcatagttccttctgagacttgaacactgtttgtgtctccctttcatatgcttgcacttagcatttaaaa

SEQ ID NO: 653935 - DNA, 120 bp, Artificial Sequence
  ENSG00000183454_98 (sequence is synthesized)
aaatttctggggagttattttctctacttagcatgtgcctaatcttaaatatctctttcctaatgtctcatctttttatcagtcaacatcagggctaattccattaaacatatatacata

SEQ ID NO: 653936 - DNA, 120 bp, Artificial Sequence
  ENSG00000183454_99 (sequence is synthesized)
gtacatgctctcatgtgtgtgggtatgcacacacacacacacagccatgtgaccctccattaaagtcctcctaaatattgtgacccatgttcaaagaggtgatattatttgcaagttgac

SEQ ID NO: 653937 - DNA, 120 bp, Artificial Sequence
  ENSG00000183454_100 (sequence is synthesized)
tattcctcctatttcatgtctatgtttggttatctttgccaggcagatggaatgagtttcagaggtgggacagggaataggaaatagagtttctgcatgaatgatggagagctttggtag

SEQ ID NO: 653938 - DNA, 120 bp, Artificial Sequence
  ENSG00000183454_101 (sequence is synthesized)
tcagaatgattgaggaccagctattaaaatgttgttgttgttttccttcttggtctgttcctttttttttttcttttccaaattgtcttagagataattcccggctcacttagcattagg

SEQ ID NO: 653939 - DNA, 120 bp, Artificial Sequence
  ENSG00000183454_102 (sequence is synthesized)
ataatgacggttattctgtcccactgaagagtgttgaactggaacgcttccaccgggctttataggtacccagaatggcctaatgtttaacatatcctgcaggcatgcccctgagcacac

SEQ ID NO: 653940 - DNA, 120 bp, Artificial Sequence
  ENSG00000183454_103 (sequence is synthesized)
actgcctttcctgcattcccccctctccatggtctaagccacatttctttcctggcatttatatttactgagaggtgaggggtgcattaggcccatttgatggatgaggacactagcggg

SEQ ID NO: 653941 - DNA, 120 bp, Artificial Sequence
  ENSG00000183454_104 (sequence is synthesized)
gatttgaaggaatgtctttctgggagtctccatgaattctctggagagttagctaacttaatgcaagttaagtgctagtctatgagaaaaatttctcagctgttttcatctttcaagctg

SEQ ID NO: 653942 - DNA, 120 bp, Artificial Sequence
  ENSG00000183454_105 (sequence is synthesized)
gcagtaaaaagccttttaagacagaaagattattatttgttatttggagatcctgttgttgggtctacaagtgcgtgaccatgttctccttggaatgttgagctatgcagaaatggagca

SEQ ID NO: 653943 - DNA, 120 bp, Artificial Sequence
  ENSG00000183454_106 (sequence is synthesized)
ctccaaagaacgatttgaccaatagcatttcttctctgggggttgtatttcaaagcatgcaactctccagggaaccagaactaaattgcttaaaatgaagtcattcctcagattaacttc

SEQ ID NO: 653944 - DNA, 120 bp, Artificial Sequence
  ENSG00000183454_107 (sequence is synthesized)
ctcagataaagtgtcagcggtctgcagaaacgaagaagacaaaactgagattatcactcataattctcttacttactatgtcagtgaaacaatgagtttgcatttttgcaatcctagaac

SEQ ID NO: 653945 - DNA, 120 bp, Artificial Sequence
  ENSG00000183454_108 (sequence is synthesized)
attcttcattagccctgggtcatgacctcttccagttaattctctttcacacctttaggaaagatttaagatgaaccttcaataggatattaacataactcatagccaataccacagctg

SEQ ID NO: 653946 - DNA, 120 bp, Artificial Sequence
  ENSG00000183454_109 (sequence is synthesized)
cctttcaaattaatgaggttaattgttctccagcaaacatgagtttgtctttggcattttaaatgcttcccattgatctgacattttgctgtttcaagttttaaagggctcaaatcaaag

SEQ ID NO: 653947 - DNA, 120 bp, Artificial Sequence
  ENSG00000183454_110 (sequence is synthesized)
actattgataactgagcaaagagcgaagatccagaaatacgaaaacattgtctttttttttccatgaaaaacaatcatagccttttgaattcaatcgaagtttctacattagccatctaa

SEQ ID NO: 653948 - DNA, 120 bp, Artificial Sequence
  ENSG00000183454_111 (sequence is synthesized)
gacttatttaattatttctgttctcagtcaagctaattcaagtgaatgaacagtattgacttttaaaatcttttttaaatttttttaaatctttagtttattaagtttgtagaaaagctc

SEQ ID NO: 653949 - DNA, 120 bp, Artificial Sequence
  ENSG00000183454_112 (sequence is synthesized)
tggggccatgaccacttacgtaaatgtttcagtttaaaaacaaaagattcaggcctctaatttgagccaaatccaggtgatcttgtttgaaatttttgatgaatttgaaaagatgaaagt

SEQ ID NO: 653950 - DNA, 120 bp, Artificial Sequence
  ENSG00000183454_113 (sequence is synthesized)
ggaacttttaacattcatgttccccaaatttttcactgggaagggatgctaattgcctacttaagatataagttcaagaataacattttcatagaaaattcagaaaactgcttgacacag

SEQ ID NO: 653951 - DNA, 120 bp, Artificial Sequence
  ENSG00000183454_114 (sequence is synthesized)
cagtgacatagttagatgtggctcagatgccttccaaacctgagggtccccaaagatttctttaccagttgtttttaactatgaatcttaatcttgttcattcccctgccaaaacaaatt

SEQ ID NO: 653952 - DNA, 120 bp, Artificial Sequence
  ENSG00000183454_115 (sequence is synthesized)
taaaagcataaacctgctgaattaattggcagaattcaccatagtttatatcaccccagaatgtttatgtgtatatgtttatgtatagtatatatatttcaagctgaatgttcagaaaga

SEQ ID NO: 653953 - DNA, 120 bp, Artificial Sequence
  ENSG00000183454_116 (sequence is synthesized)
ataaggtgagtttcttggtagcttgaataagaattagatcataaaaattataaataatggccttctcaaagaggataaatgattcatttttcactcacgtattaataatatgacttgttg

SEQ ID NO: 653954 - DNA, 120 bp, Artificial Sequence
  ENSG00000183454_117 (sequence is synthesized)
cataatacacaagctggtcattgcctgcaagaaagttattgaattaagcagctatccaggtttatgtctgagtccatttttaacccaacaaggctaggattgaactccatatgcagaggg

SEQ ID NO: 653955 - DNA, 120 bp, Artificial Sequence
  ENSG00000183454_118 (sequence is synthesized)
tttctattcacagctacattcaaacagaatccaaaacccacatcagaactgacttgatgtcttgtatggtggagctgaaagcaagctgtctgctctaagcaatggtcttcatttgggaat

SEQ ID NO: 653956 - DNA, 120 bp, Artificial Sequence
  ENSG00000183454_119 (sequence is synthesized)
taatgttcactgatcaactgcagcagtttatatctgtcatgttttaatccactgcatgaggaagtgctaataagtgtattaaatatttccaagcatagctacaaaattatatgtttgctt

SEQ ID NO: 653957 - DNA, 120 bp, Artificial Sequence
  ENSG00000183454_120 (sequence is synthesized)
aacacctttctatgatagaggaagtatatactatggttgtcttcttgtagtatgtcttttaattttgttcaatgtgttatcaactgttttaaggaatggggattgaaattcgtgtgcaaa

SEQ ID NO: 653958 - DNA, 120 bp, Artificial Sequence
  ENSG00000183454_121 (sequence is synthesized)
ctgatatgtatataactcctgaggcaacagaagtgcccggtcatatggtgtaaaaatgtaaatacaggaaaatttcatttttctaataaagataatttctgccaattgatatgaaaatga

SEQ ID NO: 653959 - DNA, 120 bp, Artificial Sequence
  ENSG00000183454_122 (sequence is synthesized)
gggctctctgctgggtgccaggaacgcagcactgaccacgacaaagcccctgccttagagagatgacgtttctgtataaggacagagacggcaaatggacaagcaagtgaatgaatgtgg

SEQ ID NO: 653960 - DNA, 120 bp, Artificial Sequence
  ENSG00000183454_123 (sequence is synthesized)
ggacctgggaagccaccagctgcatggcagctgctgcaggtcttcggacgcccctagaatctgtcttgatgtgaagtgggggtgggggtgggagggtcgtggccactggccctggtgaga

SEQ ID NO: 653961 - DNA, 120 bp, Artificial Sequence
  ENSG00000183454_124 (sequence is synthesized)
accaggtcttgcctctccaacccagaaatgaatggaaatgccttttgccttgtttctgaaaatggtgtacacaggagcactttggtgtgtgtgtgccaggaagcgctcagaaaactgaga

SEQ ID NO: 653962 - DNA, 120 bp, Artificial Sequence
  ENSG00000183454_125 (sequence is synthesized)
agtaggctgtggggtggtggtggtggcggtggtggcatgtttggagatttacgagtaccatggggcacagaggtgggcccaggagcactggagacatatgcttcctattttcacaatgcc

SEQ ID NO: 653963 - DNA, 120 bp, Artificial Sequence
  ENSG00000183454_126 (sequence is synthesized)
agttttacctgattgttttgtgggaaaatgtccattttttcctcttatggtaagtgactaaaactatttctaaaaattattaaatgtgggtaggttctggaagaaaatgcaaagttttta

SEQ ID NO: 653964 - DNA, 120 bp, Artificial Sequence
  ENSG00000183454_127 (sequence is synthesized)
ccatcttgggcattcatgggggcgcatctatgatcatggctgacaaggacttgctgagagctttatcctggcaaacggaagctaaatgtggccagcatgaaagtgatcgcaggagaagac

SEQ ID NO: 653965 - DNA, 120 bp, Artificial Sequence
  ENSG00000183454_128 (sequence is synthesized)
gcacccgtaagaaagggcttgttgtctcccaaagtgggatcagagttttgctgttgtcattgtttgcttgcttacatactcattgttggaaatacgcactgaaaatgcagaatgttatgt

SEQ ID NO: 653966 - DNA, 120 bp, Artificial Sequence
  ENSG00000183454_129 (sequence is synthesized)
gtttacttacgggacttttattttgctctcctctctctttctttcatctcctttgtaagaaaagtcacattagactttgtttcctgcaacttaacttttttttctactcaacaatatatc

SEQ ID NO: 653967 - DNA, 120 bp, Artificial Sequence
  ENSG00000183454_130 (sequence is synthesized)
agatgatgagctcatgcctttgtgactttgtttcttgagacctgcctgatttccatggtcacaagaacacagagaaagatgtgtgggctcccggggctctgcctgacactgttgagagcg

SEQ ID NO: 653968 - DNA, 120 bp, Artificial Sequence
  ENSG00000183454_131 (sequence is synthesized)
attccagaggagaaggtatctgtggggtaatcttcggatgttattctgaaaagccccaacgtcttcctcataacagcttctaagcttgaggaccaagagttatcctctaaaaaggtgtcc

SEQ ID NO: 653969 - DNA, 120 bp, Artificial Sequence
  ENSG00000183454_132 (sequence is synthesized)
aggccagcccatgctgaaagctcaccaactccagcactcaccagcgaggactcctcatgtctcactgggttccccttccatcatcagaagccaaggatgtttccaaaatattccatcgat

SEQ ID NO: 653970 - DNA, 120 bp, Artificial Sequence
  ENSG00000183454_133 (sequence is synthesized)
gtccagagcagcactggaagagcagtgagcatggggagagaagtgcttttgcttcagaaccaaagtgggtgtatgaaatctgttcctctcccccagctgcacattctaaggaagccgagt

SEQ ID NO: 653971 - DNA, 120 bp, Artificial Sequence
  ENSG00000183454_134 (sequence is synthesized)
tggaaacccagcaaactcagaaacttgtcttaaggttacatagctgtgagttgcacatcgtctgttccaaacccagaagcgtctgccccaaagtgcatgttctggtcctcactgcctgtg

SEQ ID NO: 653972 - DNA, 120 bp, Artificial Sequence
  ENSG00000183463_0 (sequence is synthesized)
actcactcaccgagaggggagctggacgtcccgctgtctccagtggaatacaaggaatggacattgagaaggtcaactccatggaccttggagaattcgtggatgtgtttgggaatgcca

SEQ ID NO: 653973 - DNA, 120 bp, Artificial Sequence
  ENSG00000183463_1 (sequence is synthesized)
ctgagagatgtcctctgattgcagctgctgtttggtcccagcggccattctctgatttggaagatttagagaagcacttttttgcctttattgatgcccttgcacagtcaggccaggagg

SEQ ID NO: 653974 - DNA, 120 bp, Artificial Sequence
  ENSG00000183463_2 (sequence is synthesized)
gcatcctgcgctgccacccggacctggcgggcagcgagctgcagcggggcacgctcacggccgagtcgcagcgggaacagagcggcgcaggcctgaggagcctgggcgcggacgagcggc

SEQ ID NO: 653975 - DNA, 120 bp, Artificial Sequence
  ENSG00000183463_3 (sequence is synthesized)
tgcggctggccgagctcaacgcgcagtaccgcgcgcgcttcggtttccccttcgtgctcgccgcgcgcttcagcgaccggacggcggtgccgcgcgagctggcgcgccggctgctctgcc

SEQ ID NO: 653976 - DNA, 120 bp, Artificial Sequence
  ENSG00000183463_4 (sequence is synthesized)
gcaggagctgcgcactgctctgggcgaggtgaagaagatcggcagcctgcgcctggccgacctcctccgcgcagaccccgccaagctgtagctgccgcgcgggccagggacccgggacgc

SEQ ID NO: 653977 - DNA, 120 bp, Artificial Sequence
  ENSG00000183463_5 (sequence is synthesized)
acaaccggacgcgcgggggccacggcccggagctgtgcgtcctgggcgggaggcggactcgggcctggaacagcgtccacacacgtgcacaaaggaagtggagaattgaggcaatcatac

SEQ ID NO: 653978 - DNA, 120 bp, Artificial Sequence
  ENSG00000183463_6 (sequence is synthesized)
gagtaatgagtccttttgtccgcccacccacacgcgcacgcgttgccaaaatatccatattgtttagtgctttgccccggatttatccagctcactgcttcaattcttcactccctttgc

SEQ ID NO: 653979 - DNA, 120 bp, Artificial Sequence
  ENSG00000183463_7 (sequence is synthesized)
ggcccccgacaccaccggcctttgtggattccaaagcgtttatccagttctccccaaccctctcctgctaagcccgaactgcaaagcaaaacggacggaaaaggaatcttttatgccaca

SEQ ID NO: 653980 - DNA, 120 bp, Artificial Sequence
  ENSG00000183474_0 (sequence is synthesized)
gtccgcgtgtggaagtctgtgaggcgcagaggtggggcaggccgtctgactagctaggcggctgggagcgttttcgtggcggggaacggaggttgaattgccctgcctgggctcataggg

SEQ ID NO: 653981 - DNA, 89 bp, Artificial Sequence
  ENSG00000183474_1 (sequence is synthesized)
ggggaacggaggttgaattgccctgcctgggctcatagggaaggaggatgtgaaggagcttgtgaaggcagaggagctccagtgtctac

SEQ ID NO: 653982 - DNA, 120 bp, Artificial Sequence
  ENSG00000183474_2 (sequence is synthesized)
tagctgggattacagattattgaataataaaatacagttttgaaaaaaatggatgaagaacctgaaagaactaagcgatgggaaggaggctatgaaagaacatgggagattcttaaagaa

SEQ ID NO: 653983 - DNA, 120 bp, Artificial Sequence
  ENSG00000183474_3 (sequence is synthesized)
gatgaatctggatcacttaaagctacaatagaagacattctattcaaggcaaagagaaaaagagtatttgagcaccatggacaagttcgacttggaatgatgcgccacctttatgtggta

SEQ ID NO: 653984 - DNA, 120 bp, Artificial Sequence
  ENSG00000183474_4 (sequence is synthesized)
gtagatggatcaagaacaatggaagaccaagatttaaagcctaatagactgacgtgtactttaaagttgttggaatactttgtagaggaatattttgatcaaaatcctattagtcagatt

SEQ ID NO: 653985 - DNA, 120 bp, Artificial Sequence
  ENSG00000183474_5 (sequence is synthesized)
ggaataattgtaactaagagtaaaagagctgaaaaattgactgaactttcaggaaacccaagaaaacatataacgtctttgaaggaagctgtggatatgacctgccatggagagccatct

SEQ ID NO: 653986 - DNA, 120 bp, Artificial Sequence
  ENSG00000183474_6 (sequence is synthesized)
ctttataattccctaagcatggctatgcagactctaaaacacatgcctggacatacaagtcgagaagtactaatcatctttagcagccttacaacttgcgatccatctaatatttatgat

SEQ ID NO: 653987 - DNA, 120 bp, Artificial Sequence
  ENSG00000183474_7 (sequence is synthesized)
atcaagaccctaaaggcagctaaaattagagtatctgttattggattgtctgcagaagttcgcgtttgcactgtacttgctcgtgaaactggtggcacgtaccatgttattttagatgaa

SEQ ID NO: 653988 - DNA, 120 bp, Artificial Sequence
  ENSG00000183474_8 (sequence is synthesized)
agccattacaaagagttgctcacacatcatcttagtcctcctcctgctagctcaagttctgaatgctcacttattcgtatgggatttcctcagcacaccattgcttctttatctgaccag

SEQ ID NO: 653989 - DNA, 120 bp, Artificial Sequence
  ENSG00000183474_9 (sequence is synthesized)
gatgcaaaaccctctttcagcatggcgcatttggatggcaatactgagccagggcttacattaggaggctatttctgcccacagtgtcgggcaaagtactgtgagctacctgttgaatgt

SEQ ID NO: 653990 - DNA, 120 bp, Artificial Sequence
  ENSG00000183474_10 (sequence is synthesized)
aaaatctgtggtcttactttggtgtctgctccccacttggcacggtcttaccatcatttgtttcctttggatgcttttcaagaaattcccctagaagaatataatggagaaagattttgt

SEQ ID NO: 653991 - DNA, 120 bp, Artificial Sequence
  ENSG00000183474_11 (sequence is synthesized)
tatggatgtcagggggaattgaaagaccaacatgtttatgtttgtgctgtgtgccaaaatgttttctgtgtggactgtgatgtttttgttcatgattctctacactgttgccctggctgt

SEQ ID NO: 653992 - DNA, 120 bp, Artificial Sequence
  ENSG00000183474_12 (sequence is synthesized)
attcataagattccagctccttcaggtgtttgattccagcatgtagtatacattgtatgtgttaaaaagaaatttgcaactgtgaataaaaggacttctttagaagaagcttcatttaaa

SEQ ID NO: 653993 - DNA, 120 bp, Artificial Sequence
  ENSG00000183474_13 (sequence is synthesized)
acatgaaaggataatctgacttaagaaactttttgctaagaaaaggtaatattttattaaattttaaatttgtgttgtcacagaaatacctgaaattcagtagtacttcattcaattaat

SEQ ID NO: 653994 - DNA, 120 bp, Artificial Sequence
  ENSG00000183474_14 (sequence is synthesized)
cctgaaattcagtagtacttcattcaattaattttgttttctattattttgagttatactgttttcaaagtcattatgcagtatgtataaacttataagaattaaattgatgtgataatt

SEQ ID NO: 653995 - DNA, 120 bp, Artificial Sequence
  ENSG00000183474_15 (sequence is synthesized)
taattcattaatttagtgtaagaagaaagttaagtctgaatgtaaattcagtgtaagatgaaaatttatcaatacttatgaaattaggctgggcgctgtggctcacacctgtaatcccaa

SEQ ID NO: 653996 - DNA, 85 bp, Artificial Sequence
  ENSG00000183474_16 (sequence is synthesized)
agagtaagactccctctcaaaaaaaaaaaaagttatgaaattaatacatatgaaatgatgtactgctacatccaccagagaggtc

SEQ ID NO: 653997 - DNA, 120 bp, Artificial Sequence
  ENSG00000183474_17 (sequence is synthesized)
acatatgaaatgatgtactgctacatccaccagagaggtctttttaggtttaaccaaacatctggaatatgtttatcaagttagtacatctgaaattatttgtggctatgaccaacagaa

SEQ ID NO: 653998 - DNA, 120 bp, Artificial Sequence
  ENSG00000183474_18 (sequence is synthesized)
gtcactttacattaaacattcaaactcacaagactgccatggccatacttggtacccgcttactcagaaggatattaaacagaaacaacagcctgccagcacagcatcaagcagtcctca

SEQ ID NO: 653999 - DNA, 120 bp, Artificial Sequence
  ENSG00000183474_19 (sequence is synthesized)
ttagcagtggaagtccttgtagcagtccactagtacaatttgggtgcaaggagataagatcctccacaggcatcaaggaaccaatatctcttaacaattccataaacacagcttccaggt

SEQ ID NO: 654000 - DNA, 120 bp, Artificial Sequence
  ENSG00000183474_20 (sequence is synthesized)
atccacaagggatgtgtcaatttcaagagtcactacactcaggaaagcctaaagcttgaagactccatttatttatagtgcatcccaatccagatacgtaacaattaacgagttattttt

SEQ ID NO: 654001 - DNA, 120 bp, Artificial Sequence
  ENSG00000183474_21 (sequence is synthesized)
actataagcaaagttgcctaaaatcatagttgatactaaccatggttaacagagctctaaagtttgacagaaagtgagattcaaatcctttcactctcatatgctaaaccttttgcctta

SEQ ID NO: 654002 - DNA, 120 bp, Artificial Sequence
  ENSG00000183474_22 (sequence is synthesized)
ctctgggtcatcagagaaatttaggtgagaatgtatgatgaagtctgtgttttagattcaatgcagatatatcattgtgggcagaactctttctggttatatccagttaagagtaaatca

SEQ ID NO: 654003 - DNA, 120 bp, Artificial Sequence
  ENSG00000183474_23 (sequence is synthesized)
attgtaaccactccagtaagatccttcacattcatttacaattaatttaaatcttaatttaattccacctgtgggcaatcattagtctactttttgtctccaaattttaaccttttctgg

SEQ ID NO: 654004 - DNA, 120 bp, Artificial Sequence
  ENSG00000183474_24 (sequence is synthesized)
acatttcacaaaaatgtgatcatatacaatcatgtgccacataatgatgttttggtcaaagacagactgcatatatgacaatggtcccataatattataatactgtatttttactctacc

SEQ ID NO: 654005 - DNA, 120 bp, Artificial Sequence
  ENSG00000183474_25 (sequence is synthesized)
ttttctatgtatgtttagatatacaaatactgaacattgtgttacagttgtcttaagatattcagtatagtaacgtgctgtacaggtttgtaacctaggcgtgggataggctataccatc

SEQ ID NO: 654006 - DNA, 120 bp, Artificial Sequence
  ENSG00000183474_26 (sequence is synthesized)
taggtttgtgtaagtataccctgtgatattcacacaataatgaaattgcctaacaatgcatttctcagaatgtatccctgtcagtaagcgatgcatgactataatagttggtctgttgtg

SEQ ID NO: 654007 - DNA, 120 bp, Artificial Sequence
  ENSG00000183474_27 (sequence is synthesized)
atgccacattattgtttatccattcactagtctgtggatatttaggttctttacagtttttgactgttaggaaaatgcagccatgaacacttacatgcaaatctttgtgtggacatatat

SEQ ID NO: 654008 - DNA, 120 bp, Artificial Sequence
  ENSG00000183474_28 (sequence is synthesized)
cagggttcgagtttgtgacccgcttgagaaagtgaccaacctctgagcctgaatcccatacctgaaaaacaaggacagtaatcacccttgccagtttcacatagcttggctggagtgcag

SEQ ID NO: 654009 - DNA, 79 bp, Artificial Sequence
  ENSG00000183474_29 (sequence is synthesized)
aaaattgactgaactttcacaatttcggatcactgcaaagtccgcctcacgggttcaagcgattccctgcctcagcctc

SEQ ID NO: 654010 - DNA, 120 bp, Artificial Sequence
  ENSG00000183474_30 (sequence is synthesized)
gctgggattacaggcttgagccaccgcatccggccttatcctgaagatattaaaatacagttattgtaatcatttataaaatccagttaatcttaaaattaaattcttaaaaagttaagc

SEQ ID NO: 654011 - DNA, 120 bp, Artificial Sequence
  ENSG00000183474_31 (sequence is synthesized)
aaattcttaaaaagttaagcatctaatttaaaagggaaaaagtataaaaattaaactgtagctattgctaatgaatcaatttttctgcttccatgacatacctaactgaattttagtttc

SEQ ID NO: 654012 - DNA, 120 bp, Artificial Sequence
  ENSG00000183474_32 (sequence is synthesized)
ttattttctgtgaaatacactctcccttaaatctggttttcaaccttttatccttgccggcacacataagggaaatgacatactttcttcattagtagtttttcattaaatgcagtgagg

SEQ ID NO: 654013 - DNA, 120 bp, Artificial Sequence
  ENSG00000183474_33 (sequence is synthesized)
agtgaaatgtacattggcctggagtgattcaagaaactcagttgtgagtaaccaaaagaatgtcacactagcttaagtgcagaaggaaaattttgggctatgttcaaaggtgggccaatt

SEQ ID NO: 654014 - DNA, 120 bp, Artificial Sequence
  ENSG00000183474_34 (sequence is synthesized)
ccatatatagttgctgcatatgttggggtcctggctttgtctggcttcattctctgatagattttctggaagttgaaaagatgtctcttaattgtcccagttctacattgtacccgtagc

SEQ ID NO: 654015 - DNA, 120 bp, Artificial Sequence
  ENSG00000183474_35 (sequence is synthesized)
ctatagcttcagcacacgtctagggagaactctgattggcctgagttacgatctgcccatccatgaacaaagtggccaggaaatgaagtattttgtttgtacgcttcgattgcctgctga

SEQ ID NO: 654016 - DNA, 120 bp, Artificial Sequence
  ENSG00000183474_36 (sequence is synthesized)
tgcccagagcaggatagaagtagggtcagcaccacatgaactaagcaggattattatatagtggaagaaggatggttcctccaaggtaggaatataaggtcaatattttcctctcacttt

SEQ ID NO: 654017 - DNA, 120 bp, Artificial Sequence
  ENSG00000183474_37 (sequence is synthesized)
ctcactttacccaccccgagttaccagcagttttctattgcttcttttttttttttttgagaaggagtctctcactctgtcgcccaggcggtgctgtcttggctcactgcaacctccgcc

SEQ ID NO: 654018 - DNA, 120 bp, Artificial Sequence
  ENSG00000183474_38 (sequence is synthesized)
caatagaagacattctattcaaggcaaagagaaaaagatgcgccacctttatgtggtagtagatggatcaagaacaatggaagaccaagatttaaagcctaatagactgacgtgtacttt

SEQ ID NO: 654019 - DNA, 120 bp, Artificial Sequence
  ENSG00000183474_39 (sequence is synthesized)
tcatctttgtgttagatgtattgaatttattactagttttcagagcattctttatttttcaaatacattaaatcttaaatgtttttcttctttcctaaaactatctatctacttggattt

SEQ ID NO: 654020 - DNA, 120 bp, Artificial Sequence; identical to SEQ ID NO: 396006
  ENSG00000183474_40 (sequence is synthesized)

SEQ ID NO: 654021 - DNA, 120 bp, Artificial Sequence
  ENSG00000183474_41 (sequence is synthesized)
attttataactaagaatttttagttaagaacattatcagtaaagacaacgtaatcccaccctggagagtttattgggagcccaggaatattcatttttaatacacacacacacacacaca

SEQ ID NO: 654022 - DNA, 120 bp, Artificial Sequence
  ENSG00000183474_42 (sequence is synthesized)
agagtaacgggagtttctctcaggagtcatactccatgagcctggacccagtggttctttatgtggaaacaaatttcacctataggtaacctggtaactgctattttcttctgtgtgctc

SEQ ID NO: 654023 - DNA, 120 bp, Artificial Sequence
  ENSG00000183474_43 (sequence is synthesized)
tgtcaacaaaggtatcagtggcttgcaggagatgcctttaatactcagagcattctatctccccctatctggtttagaaggaaggccttcattagttaccttttgagaagttactagaac

SEQ ID NO: 654024 - DNA, 120 bp, Artificial Sequence
  ENSG00000183474_44 (sequence is synthesized)
tattcattttaagcctttctatctataaatactcctcagtacttcattttagctgtgtttcagggaaactgacctattgccttctgactatggggaaagaactagccacctacccttgcc

SEQ ID NO: 654025 - DNA, 120 bp, Artificial Sequence
  ENSG00000183474_45 (sequence is synthesized)
ccagcaggaaatggtctttagagactgtctacaatacctataattatgtgtattgtattccataagttaattatttactccactaaaaatgcacgttatgacattcttaatcagaattag

SEQ ID NO: 654026 - DNA, 120 bp, Artificial Sequence
  ENSG00000183474_46 (sequence is synthesized)
aatcacttaaacttttactaaaaaagtggggaagaacactggattctaaaggatatttttaaagaatgcaatattttttattttttgccttgtatttttagttaatgctaatgatagcta

SEQ ID NO: 654027 - DNA, 120 bp, Artificial Sequence
  ENSG00000183474_47 (sequence is synthesized)
ttgaagtgatgtgttaatatggggcccataaacccagctataacaaaattgttaagtacgagaattatgtagtgttatttatgatgtttagtgtggtgttggttagtaatttttatttta

SEQ ID NO: 654028 - DNA, 120 bp, Artificial Sequence
  ENSG00000183474_48 (sequence is synthesized)
gtggtgttggttagtaatttttattttacattttagtaagatattgttaaaggttttataaaaatataatttaaaactgtcggcagtatcaatagtacaaaaataggttgatgaaaaaat

SEQ ID NO: 654029 - DNA, 120 bp, Artificial Sequence
  ENSG00000183475_0 (sequence is synthesized)
aggctcaggctccactgcgggcgctgattggttgttgaaggcttggtcccatcccagtgaccccaaagtgctgaagggagggggcgggggtggcccagtgcaaagtgcatcccgaaagcc

SEQ ID NO: 654030 - DNA, 120 bp, Artificial Sequence
  ENSG00000183475_1 (sequence is synthesized)
ccctgtccggagaccccacggctggcacttcgggccccgtatgacctgggacctcgccgtcccgagacctcctgggtccctccgtagctggaagcctccggcccggagcgcggcagcccc

SEQ ID NO: 654031 - DNA, 120 bp, Artificial Sequence
  ENSG00000183475_2 (sequence is synthesized)
ctgctccgagccctggaccgggactgcccccccacccgagccaggacttcctccctgcctccctgcacctctgccccaaggctgcccggcggccgggatcgccacctcctgccttctcgg

SEQ ID NO: 654032 - DNA, 120 bp, Artificial Sequence
  ENSG00000183475_3 (sequence is synthesized)
ctgttcggatgttcgccgggctggggccgtgaggcaccgaggaggatcaggaacaccagggtccggccctgcctggggtatttcttcaatggagaagttggtgagtgtagaggaggctga

SEQ ID NO: 654033 - DNA, 120 bp, Artificial Sequence
  ENSG00000183475_4 (sequence is synthesized)
aaggaggaagagaagcagcagctgaggagacaggtttgagctggctgaagaagacgcgaaagcaggaagaggtctgcccacctatcagagaagcagaaggcacagtgcctctgaccagca

SEQ ID NO: 654034 - DNA, 120 bp, Artificial Sequence
  ENSG00000183475_5 (sequence is synthesized)
tcgtctgtaaaggttaagaaggcttttttgctctgtagcctggacgtactttgaagcccctccccacgatgctgtacgtgcacaatggttactaggcaatccgtacatcaggagaaggga

SEQ ID NO: 654035 - DNA, 120 bp, Artificial Sequence
  ENSG00000183475_6 (sequence is synthesized)
cactcttccataaggctgatccccgtaacctaatgaatcctttgtaaaaagtggactcagctaggatgttacaccatcattgtcgaaggaaccctgagctccaggaagagttgcagattc

SEQ ID NO: 654036 - DNA, 120 bp, Artificial Sequence
  ENSG00000183475_7 (sequence is synthesized)
aggccgcggtggctgctggggatgtccacacagtgcgaaagatgctagaacaaggctattccccgaatggccgagatgcgaatggctggactctgcttcatttctctgcagcaagaggaa

SEQ ID NO: 654037 - DNA, 120 bp, Artificial Sequence
  ENSG00000183475_8 (sequence is synthesized)
aggaaagatgtgttcgggtttttctagaacacggagctgatcctacagttaaagacttaatcggaggcttcacggctcttcactatgcagccatgcatggccgggcccgcattgcacgct

SEQ ID NO: 654038 - DNA, 120 bp, Artificial Sequence
  ENSG00000183475_9 (sequence is synthesized)
tgatgttagaatctgaatacaggagcgacatcattaatgcaaaaagcaatgacggctggactcccctccatgtggctgcccactacggcagggactcatttgtccggctcctcctggagt

SEQ ID NO: 654039 - DNA, 120 bp, Artificial Sequence
  ENSG00000183475_10 (sequence is synthesized)
tcaaggctgaggttgacccactcagtgataaaggtaccacaccgcttcagctcgccattatccgagagaggtcaagctgtgtgaaaatcctcctggaccacaatgccaacatcgacattc

SEQ ID NO: 654040 - DNA, 120 bp, Artificial Sequence
  ENSG00000183475_11 (sequence is synthesized)
agaatggtttcctgttgcgatacgccgtgatcaaaagcaatcactcttattgccgaatgttccttcagagaggggcagacacaaacttgggtcgcttagaagacggacagactcctttac

SEQ ID NO: 654041 - DNA, 120 bp, Artificial Sequence
  ENSG00000183475_12 (sequence is synthesized)
acttatctgcccttagggatgatgtgctgtgtgcacggatgttatataattacggagcagacacgaacacacggaactatgaaggacagaccccattggctgtttcaataagtatttctg

SEQ ID NO: 654042 - DNA, 120 bp, Artificial Sequence
  ENSG00000183475_13 (sequence is synthesized)
gaagtagtcgaccatgtttggatttcttacaagaagtcacaagacagcccagaaacttgcaggacctgtgccgaattaaaattcgacaatgtataggccttcaaaacctaaagctacttg

SEQ ID NO: 654043 - DNA, 120 bp, Artificial Sequence
  ENSG00000183475_14 (sequence is synthesized)
atgaactaccaattgccaaggtcatgaaagactacttaaaacacaaatttgatgatatctgatatgccagaactgtgagcaagattaggagttctattctagatacttaaaaggcttttt

SEQ ID NO: 654044 - DNA, 120 bp, Artificial Sequence
  ENSG00000183475_15 (sequence is synthesized)
gccttgcacaaagtatatcctatgcaatttctgatttgctgtgaaatcagaaagcaggtatacacttttgggttttctgtttgtttggttggttttcattgtaggggagggattttttat

SEQ ID NO: 654045 - DNA, 120 bp, Artificial Sequence
  ENSG00000183475_16 (sequence is synthesized)
atatatataaaaacacacaccacatgcttgaaggtcttaatttggtttcttggtccaagtttaagaggtccaagctttgtatacaatactgcatttagaaaaattgtcttttcttaaatg

SEQ ID NO: 654046 - DNA, 120 bp, Artificial Sequence
  ENSG00000183475_17 (sequence is synthesized)
acacaagcaggtttagagtggagaatttaccctttccaaatttatggttccttggtaagcacggtattctaaaccagcagagcacttgttaacgtttggaggcacagtttcacccagggc

SEQ ID NO: 654047 - DNA, 120 bp, Artificial Sequence
  ENSG00000183475_18 (sequence is synthesized)
gaccctgggttcttttggaaaatgccctaagaaatgtttgaagtaacgctgtcacctcattcatttttaatgagtacaaactggccgtttcaaactgttctttttcctaattaatgtagc

SEQ ID NO: 654048 - DNA, 120 bp, Artificial Sequence
  ENSG00000183475_19 (sequence is synthesized)
tttcggatgacataaatccagtatctctgcttatgacataaatccagtacctctgcttttcttttgctgtgctcttgtttttaacttattttttttttaacaactgtagtacactaccct

SEQ ID NO: 654049 - DNA, 120 bp, Artificial Sequence
  ENSG00000183475_20 (sequence is synthesized)
aaaataactttgtgaagccagtgtattctgtttttaaaactgtgcctgcagtgcaatactccttctggtgtattttatccattatttcacttgctggtcgtcatttcacagccagctttg

SEQ ID NO: 654050 - DNA, 120 bp, Artificial Sequence
  ENSG00000183475_21 (sequence is synthesized)
acatgcccgtgaggacaggagccgccgcttcagttgtcactgcagagccatcgtatgtcagttgcaatttccatctgaagctatgtctttgacttcactttaagcagaaaattttgtacc

SEQ ID NO: 654051 - DNA, 120 bp, Artificial Sequence
  ENSG00000183475_22 (sequence is synthesized)
ctggtggtcgagtcttcccttaaaaattgttaaatcatttggctttaatggttcaataatttggggtggcttcatggtgtttcttttcttcccagtttaaaaaaaaaactttttaagcgt

SEQ ID NO: 654052 - DNA, 120 bp, Artificial Sequence
  ENSG00000183475_23 (sequence is synthesized)
aaaatctttaaggggtacacatttataagtctggctaatttctaatatgctaattaaacatttcccattttaaggttatatacagtgaggctcttcaggacaattattttctgggttgat

SEQ ID NO: 654053 - DNA, 120 bp, Artificial Sequence
  ENSG00000183475_24 (sequence is synthesized)
tgggcatatgtttgccgtgtaaacacggatatgataaagtgtcagtaacaatggaaaaggtcccagaggcattaggcatctaagaggatgccctcagaaacgtattctggcttgatttgt

SEQ ID NO: 654054 - DNA, 120 bp, Artificial Sequence
  ENSG00000183475_25 (sequence is synthesized)
gttattaacttcagaagaaccttttcaaatgtcccagtatcgttcttagtgctttgggaaaaaatatttaacacactgttaataaatttgttatcagaagtttacaagacgaagggcttc

SEQ ID NO: 654055 - DNA, 120 bp, Artificial Sequence
  ENSG00000183475_26 (sequence is synthesized)
tctcgtctgaatttctagatttaagtcatgaagtgtaaaactgtttcacccagaagtgtaactaagcagaactaggagttttctctggcttcacctttttcagagccagcagtgctgttt

SEQ ID NO: 654056 - DNA, 120 bp, Artificial Sequence
  ENSG00000183475_27 (sequence is synthesized)
tctcaagcacagcgtttgctcttagactctgatctgcttgtgcctaagcattgcacaggtttccgaagacgggcagcttcagagaagaggattattcgggagattgctggtgtggcccat

SEQ ID NO: 654057 - DNA, 120 bp, Artificial Sequence
  ENSG00000183475_28 (sequence is synthesized)
agactctttggcatagactctttcgcaggcagccactctgagtgtggccagttctataaccatccccaaactagctggagcctgatggataggaacgggtagtctgtcctcttccccata

SEQ ID NO: 654058 - DNA, 120 bp, Artificial Sequence
  ENSG00000183475_29 (sequence is synthesized)
aaaatgttccaaaaagttatctccagagagagtcccttatgaagacagttgccaagctgtattctcattctttaaaccaatacccaggtcagggctagttcacactagcactgttaggga

SEQ ID NO: 654059 - DNA, 120 bp, Artificial Sequence
  ENSG00000183475_30 (sequence is synthesized)
catggtgtggctagaaatgaattgagtgtgacttctccctacaaccccaggcccagggataggaggaggcagaggggtgcctggagtttctgcactctcatcagtgatgttcatgttaca

SEQ ID NO: 654060 - DNA, 120 bp, Artificial Sequence
  ENSG00000183475_31 (sequence is synthesized)
cttgcacaagggctgatttccacgtatgtgtgtgttaatttattcacttagtttcaaaagattttctctccccagccattcagaggtttccaaactaagccactgagtttgagtcaggga

SEQ ID NO: 654061 - DNA, 120 bp, Artificial Sequence
  ENSG00000183475_32 (sequence is synthesized)
attccacgtaaaaagatcagattaaggtaaattctttgttctgtattgctgctgtgacttcagaaaaaaaaaattatgagagctcttcctggaattttgaaatttctatttaatgaagaa

SEQ ID NO: 654062 - DNA, 120 bp, Artificial Sequence
  ENSG00000183475_33 (sequence is synthesized)
gtgtataattccattatttattgtttgaggtttgatttatctggaagcttaaaaagaatgttttatttttgttgttaataaaatcccaatcacatttcacaataactaaaatgtctccag

SEQ ID NO: 654063 - DNA, 120 bp, Artificial Sequence
  ENSG00000183475_34 (sequence is synthesized)
gtgggttactggtagatgatagtggtgacacctgcaggtctgcatttgaattggattcacagagaagcattccatggtcacataatgaatagggagaacagatattttcagaaaaatcaa

SEQ ID NO: 654064 - DNA, 120 bp, Artificial Sequence
  ENSG00000183475_35 (sequence is synthesized)
ccgattgttttttccagaaacagaacagaaaatgttcagaatattttcaaatttgtcagattcttttatgtttcctttgaaatttattatttaagcctattactaaacctttataaaaat

SEQ ID NO: 654065 - DNA, 120 bp, Artificial Sequence
  ENSG00000183475_36 (sequence is synthesized)
atatttggcaaatacaccaaagaaaccagcttacaaaagattatgatcattaatgaactgcaaacctcatctttcgaaaacaaggttttgtgtttttttttttttgtaaatatttgtgtt

SEQ ID NO: 654066 - DNA, 120 bp, Artificial Sequence
  ENSG00000183475_37 (sequence is synthesized)
tataaatgtacagcagagtaagagtgttttttagattatttaattcccatatttctaaactatttactacacagtaatccatgcctgttagtttggaggacttgactgtctcatttttta

SEQ ID NO: 654067 - DNA, 120 bp, Artificial Sequence
  ENSG00000183475_38 (sequence is synthesized)
attcattgtcagtcatgcttggaacagcatttccactagagaatccagcgttctggcagtagcaagagtacacatctggagcatgagggactctagcatgactcgtcagatgcacacccc

SEQ ID NO: 654068 - DNA, 120 bp, Artificial Sequence
  ENSG00000183475_39 (sequence is synthesized)
aagagacaagaatgtgtagtttaatgaccggcgtggaccatacgaaattgagattctaactttcctgcaggagtgctcatgagcccagaatgtgattgggataaggccatttgcccacaa

SEQ ID NO: 654069 - DNA, 120 bp, Artificial Sequence
  ENSG00000183475_40 (sequence is synthesized)
atttagctttcatgtaactcctagtgtgttatatcataatgtattttgttcttcctttttaatgtaagttttgctttgggtcaatttgaattaaaaaaatcaaatctgatttaaaacatg

SEQ ID NO: 654070 - DNA, 120 bp, Artificial Sequence
  ENSG00000183475_41 (sequence is synthesized)
cttctgaggagcttaatgtgtttttgcaacttaagatgactagatattaatcattcctataaccactgcttggtaagcgatgcctcattcttctgaaataaaaaaaaaactttgactgta

SEQ ID NO: 654071 - DNA, 120 bp, Artificial Sequence
  ENSG00000183475_42 (sequence is synthesized)
aagattattttctgtaagagttgatctgagttctttctctgctctatagatttattgtaaagcactgaagtttacattcatcaaaaggtagactatgcagacagctatgattattatttt

SEQ ID NO: 654072 - DNA, 120 bp, Artificial Sequence
  ENSG00000183475_43 (sequence is synthesized)
ggaaagatgtgttcgggtttttctagaacacggaggtgagttttgtagaagcaaatctttttccccatggagaaacataaatgatgtttagtttaaaatgtgtctatttgtaatttttaa

SEQ ID NO: 654073 - DNA, 120 bp, Artificial Sequence
  ENSG00000183476_0 (sequence is synthesized)
atggaggacagcctaaagcagctcagcctggggagagatcctgagggggcaggggacagccaggccctggctgagctccaggagcttgccctgaagtggttcatggagacacaggccccc

SEQ ID NO: 654074 - DNA, 120 bp, Artificial Sequence
  ENSG00000183476_1 (sequence is synthesized)
ttcattctgcagaacggtgccctgcctccctggtttcatggattcatcacccgcaagcagacggagcagctactcagggacaaagctcttggttccttccttatccgcctcagtgaccga

SEQ ID NO: 654075 - DNA, 120 bp, Artificial Sequence
  ENSG00000183476_2 (sequence is synthesized)
gccactggctacatcttgtcctacaggggcagtgatcgctgccgacattttgtcatcaaccagcttcgaaaccggcgttacatcatctcaggagacacccagagccacagcaccctggct

SEQ ID NO: 654076 - DNA, 120 bp, Artificial Sequence
  ENSG00000183476_3 (sequence is synthesized)
gagcttgtgcaccattaccaggaggcacagctcgagcccttcaaagagatgctgactgctgcctgcccccggccagaggacaatgatctgtatgatgccatcacccggggcctccaccag

SEQ ID NO: 654077 - DNA, 120 bp, Artificial Sequence
  ENSG00000183476_4 (sequence is synthesized)
accatcgtggacccagaaaacccacctgccacggcattcctcacagtggtccccgacaaggccgccagcccccgctcttctccaaagccccaggtctccttcctccatgcacagaaaagc

SEQ ID NO: 654078 - DNA, 120 bp, Artificial Sequence
  ENSG00000183476_5 (sequence is synthesized)
ctggatgtgagtccccggaacctctcccaggaggaaagcatggaggctcccatcagagtgtctccactccctgagaagagttcctccctcctggaagagtcttttggaggccccagtgac

SEQ ID NO: 654079 - DNA, 120 bp, Artificial Sequence
  ENSG00000183476_6 (sequence is synthesized)
atcatctatgcagacctgaggaggatgaaccaggcacggctaggcttgggcacagaggggtccggcaggcatgggccagttccagctggcagccaggcctactccccaggcagggaggcc

SEQ ID NO: 654080 - DNA, 120 bp, Artificial Sequence
  ENSG00000183476_7 (sequence is synthesized)
caaaggagactctcagatggagaacagaacaggcctgatggcctggggcctgtcctttctggggtgagcccagaccagggtcccacagagtctcccacttcctggggatgttctgatgcc

SEQ ID NO: 654081 - DNA, 120 bp, Artificial Sequence
  ENSG00000183476_8 (sequence is synthesized)
atgggatccctgggggctacctggaggcaggagtttccaaagctgagccaagaggctcagccctgctcccagggcagctctgcagatatctatgagttcatcgggacagaaggcctcctg

SEQ ID NO: 654082 - DNA, 120 bp, Artificial Sequence
  ENSG00000183476_9 (sequence is synthesized)
caagaggccagggacacaccagaccaagaaggcagcacctatgagcagatcccagcttgctggggtggcccagccagggccccacatcctggggccagtcccacatatagcccatgggtc

SEQ ID NO: 654083 - DNA, 120 bp, Artificial Sequence
  ENSG00000183476_10 (sequence is synthesized)
catggctacaagaggatctcagggaccccagagctctcagagcctgggaacacctatgaacagatcccagcaaccaagagcaaggagactggacggacacacaagcctgacaagcttcgg

SEQ ID NO: 654084 - DNA, 120 bp, Artificial Sequence
  ENSG00000183476_11 (sequence is synthesized)
agctcacttgaaggcaccctttggatcttgagactcatccagcctgctacagaactaggctccgagacagccgaggtgcctgcctgagagcaggtggaagaggaccttgcaggtgcctgc

SEQ ID NO: 654085 - DNA, 120 bp, Artificial Sequence
  ENSG00000183476_12 (sequence is synthesized)
agctcctggctatgtcctgctttccttgtgcctcccatccatgcacaggagggactggagaggaatgagattggccaaaggcaggggtcaccacccccatttcccagataagcatgctga

SEQ ID NO: 654086 - DNA, 120 bp, Artificial Sequence
  ENSG00000183476_13 (sequence is synthesized)
ggcccaggcagactgactgaacctgcctcccactactgagcacttaccgaatgtgtggcaggctgtgtgctagcacagacacctttctaactggccaagtgacatcatgcaattgctacc

SEQ ID NO: 654087 - DNA, 120 bp, Artificial Sequence
  ENSG00000183476_14 (sequence is synthesized)
gagaacaaaaccagttcccctccttgcggccccatcagcgaaaaggaggggagggccagaagccacatcctctgcttcaggcctcttcgctccagctgtaccctcaggtcaggctggctc

SEQ ID NO: 654088 - DNA, 120 bp, Artificial Sequence
  ENSG00000183476_15 (sequence is synthesized)
ttcctggaactctgtccctcaggaaacttcctgttttgtgtgtcacttcccttcctatccacatgtccccttctctataagggtggacagctggcttgctaccccactcccaacaacccc

SEQ ID NO: 654089 - DNA, 120 bp, Artificial Sequence
  ENSG00000183476_16 (sequence is synthesized)
caggcctgggatgcagaaaacaggactgatcatctccagagagaacaccatacgtgcccctcctccctgccctgaccctgggcagagcgggctcaggttgcatttgtgggaaatctactc

SEQ ID NO: 654090 - DNA, 120 bp, Artificial Sequence
  ENSG00000183476_17 (sequence is synthesized)
ttagtgaccacttggctatgcagcttttcctgaaatataggcctgtaagagtccctccctccttgggggtttaaggattgagactgaagcaactgtccctgtgcctgagtggttagcact

SEQ ID NO: 654091 - DNA, 120 bp, Artificial Sequence
  ENSG00000183476_18 (sequence is synthesized)
cccaaatgttaaccagagatactgtcagggaattcacggaaggttcggggcatgaatgtgttttcctcccgatggcacacgcactgaaatcaaagttagtgcctaaagcaggaggcactg

SEQ ID NO: 654092 - DNA, 120 bp, Artificial Sequence
  ENSG00000183476_19 (sequence is synthesized)
cctaatgccgagaggtgagacaccaatggtgggatttcaaggatcagaagcaaaggtaccctcaaacatttcctaacattagcatacatggagagcaaagggatgcaaaagtgttttact

SEQ ID NO: 654093 - DNA, 120 bp, Artificial Sequence
  ENSG00000183476_20 (sequence is synthesized)
accaggagttcacaaatctgtggacagcacaccagtgaggattccacggtgttggggaggcaggcagggtggtactcatgacccagaggcagagacaggagcaagagcccttgggcccac

SEQ ID NO: 654094 - DNA, 120 bp, Artificial Sequence
  ENSG00000183476_21 (sequence is synthesized)
tgcacccacagcttcacattgtgaaggaggccgggagaaggggaacaggcaggggtgggaagcagcccaaccttgggttttggaaaaagattgcatagctcgttaaaaccctgacctctt

SEQ ID NO: 654095 - DNA, 120 bp, Artificial Sequence
  ENSG00000183476_22 (sequence is synthesized)
gccgttgccccctcagcccccggaggcagggtcctgcgaccagcaccccgcgggtcagttgccttcgtgccacctgggctccaagtcctcgccctgccggatgaagcaatggtctatttc

SEQ ID NO: 654096 - DNA, 120 bp, Artificial Sequence
  ENSG00000183479_0 (sequence is synthesized)
atgggcggggcgcggctcggagcgcgaaacatggcggggcaggacgctggctgcggccgtggcggcgacgactactcagaggacgagggcgacagcagcgtgtccagggcggctgtggag

SEQ ID NO: 654097 - DNA, 120 bp, Artificial Sequence
  ENSG00000183479_1 (sequence is synthesized)
gtgttcgggaagctgaaggacctaaactgccccttcctcgagggtctgtatatcacagagccaaagacaattcaggaactgctgtgcagcccctcagagtaccgcttggagatcctagag

SEQ ID NO: 654098 - DNA, 120 bp, Artificial Sequence
  ENSG00000183479_2 (sequence is synthesized)
tggatgtgtacccgggtctggccctcactgcaggacaggttcagctcactgaaaggggtcccaacagaggtgaagatccaagaaatgacgaagctgggccacgagctgatgctgtgtgcg

SEQ ID NO: 654099 - DNA, 120 bp, Artificial Sequence
  ENSG00000183479_3 (sequence is synthesized)
ccagatgaccaggagctcctcaagggctgtgcctgcgcccagaagcagctacacttcatggaccagttgctcgataccatccggagcctgaccattgggtgctccagttgctcgagcctg

SEQ ID NO: 654100 - DNA, 120 bp, Artificial Sequence
  ENSG00000183479_4 (sequence is synthesized)
atggagcacttcgaggacaccagggagaagaacgaggccttgctgggggagctcttctctagcccccacctgcagatgctcctgaatccagagtgcgacccgtggcccctggacatgcag

SEQ ID NO: 654101 - DNA, 120 bp, Artificial Sequence
  ENSG00000183479_5 (sequence is synthesized)
cccctcctcaacaagcagagtgatgactggcagtgggccagtgcctctgccaagtccgaggaggaggagaagctggcggagcttgccaggcagctgcaggagagtgctgccaagttgcac

SEQ ID NO: 654102 - DNA, 120 bp, Artificial Sequence
  ENSG00000183479_6 (sequence is synthesized)
gcgcttagaacggagtactttgcacagcatgagcaaggggctgctgcgggcgcagccgacatcagcaccctagaccagaagctgcgtctggtcacttccgacttccaccagctaatcttg

SEQ ID NO: 654103 - DNA, 120 bp, Artificial Sequence
  ENSG00000183479_7 (sequence is synthesized)
gcttttctccaagtctacgacgacgagctgggcgagtgctgccagcgcccaggccctgacctccacccgtgcggccccatcatccaggccacgcaccagaatctgacttcctacagccaa

SEQ ID NO: 654104 - DNA, 120 bp, Artificial Sequence
  ENSG00000183479_8 (sequence is synthesized)
atccccagaggccaacctaaaaagccggctttagttacgatgactacagttcccacgtgcgcaactctgcccttggctcaaggattccgtgatgttcattttggttttctaagcgagagg

SEQ ID NO: 654105 - DNA, 120 bp, Artificial Sequence
  ENSG00000183479_9 (sequence is synthesized)
gtggagaccgtgaagaagcagcaaggcgagcagatctgctggggtggcagcagctccgtcatgagtctagctaccaagatgaatgaactaatggagaaatagaaagtcttcagtgatggc

SEQ ID NO: 654106 - DNA, 120 bp, Artificial Sequence
  ENSG00000183479_10 (sequence is synthesized)
ctacgccaaagcacaggatggggcgggcaggaagccctctcccaagatcgagttggccgaggatggatgattgtggcagcagaagccgttgcagccccacgttgtgctctaggcagctgg

SEQ ID NO: 654107 - DNA, 120 bp, Artificial Sequence
  ENSG00000183479_11 (sequence is synthesized)
gggcgggctgcggccgctgattaaaggccgcctagagcagcctgtgtggcgacaggtgcccagaagcccaggaagccggtcagtgcccgccccagtttgaggacttgctatccccgtggg

SEQ ID NO: 654108 - DNA, 120 bp, Artificial Sequence
  ENSG00000183479_12 (sequence is synthesized)
aacatcaccatgtccgaggcaccccgggccgagacctttgtcttcctggacctggaagccactgggctccccagtgtggagcccgagattgccgagctgtccctctttgctgtccaccgc

SEQ ID NO: 654109 - DNA, 120 bp, Artificial Sequence
  ENSG00000183479_13 (sequence is synthesized)
tcctccctggagaacccggagcacgacgagtctggtgccctagtattgccccgggtcctggacaagctcacgctgtgcatgtgcccggagcgccccttcactgccaaggccagcgagatc

SEQ ID NO: 654110 - DNA, 120 bp, Artificial Sequence
  ENSG00000183479_14 (sequence is synthesized)
accggcctgagcagtgagggcctggcgcgatgccggaaggctggctttgatggcgccgtggtgcggacgctgcaggccttcctgagccgccaggcagggcccatctgccttgtggcccac

SEQ ID NO: 654111 - DNA, 120 bp, Artificial Sequence
  ENSG00000183479_15 (sequence is synthesized)
aatggctttgattatgatttccccctgctgtgtgccgagctgcggcgcctgggtgcccgcctgccccgggacactgtctgcctggacacgctgccggccctgcggggcctggaccgcgcc

SEQ ID NO: 654112 - DNA, 120 bp, Artificial Sequence
  ENSG00000183479_16 (sequence is synthesized)
cacagccacggcacccgggcccggggccgccagggttacagcctcggcagcctcttccaccgctacttccgggcagagccaagcgcagcccactcagccgagggcgacgtgcacaccctg

SEQ ID NO: 654113 - DNA, 120 bp, Artificial Sequence
  ENSG00000183479_17 (sequence is synthesized)
ctcctgatcttcctgcaccgcgccgcagagctgctcgcctgggccgatgagcaggcccgtgggtgggcccacatcgagcccatgtacttgccgcctgatgaccccagcctggaggcctga

SEQ ID NO: 654114 - DNA, 120 bp, Artificial Sequence
  ENSG00000183479_18 (sequence is synthesized)
caccttggtcacactccagagctcgcttcatccccacgagcggcacctgatctccagtgacggggagactgaggcctggcaaagaggacctgttgcctttgtgtaactggccccagcatg

SEQ ID NO: 654115 - DNA, 120 bp, Artificial Sequence
  ENSG00000183479_19 (sequence is synthesized)
ggggaggcattggccccagcatgggggaggcattgaccccaggcctgccaggcctggcagccacagcctggctaggtggaggttactgccttccgcaccactctggcttcctccccgtgc

SEQ ID NO: 654116 - DNA, 120 bp, Artificial Sequence
  ENSG00000183479_20 (sequence is synthesized)
ctgtgaagagctcggggcctgcttcctaatttgtaaacacggggcgtgtgtctcagtggctgtgagctagcgagggggtggcgagcgagccggctgcgcaggtcctgaggccccaggcct

SEQ ID NO: 654117 - DNA, 120 bp, Artificial Sequence
  ENSG00000183479_21 (sequence is synthesized)
tggcctacgccaaagcacaggatggggcgggcaggaagccctctcccaagatcgagttggccgaggatggatgattgtggcagcagaagccgttgcagccccacgttgtgctctagtagg

SEQ ID NO: 654118 - DNA, 120 bp, Artificial Sequence
  ENSG00000183484_0 (sequence is synthesized)
agctaggactgcagggaggggtgcgaggctagccacgcaggcggggccctgggtcattttaaactctcagagtgaacgtcttgataggaccgacaagacgcatgacatgtacttagaaag

SEQ ID NO: 654119 - DNA, 120 bp, Artificial Sequence
  ENSG00000183484_1 (sequence is synthesized)
cttatcttagagccacactgagattggaacccgcaaaatatgccagggaggaaggtgagcaagggacacgacactcacccggagaaacccagcaagcgcagcgaggctgtggggagaccg

SEQ ID NO: 654120 - DNA, 120 bp, Artificial Sequence
  ENSG00000183484_2 (sequence is synthesized)
gagccctgcacaccgccgggggaaggtgggccagcgccaccaccgtggagaacagcgcggaggcaccccacgagatgagacggaactgccgtgagatccagcaatgccaactgtgggtct

SEQ ID NO: 654121 - DNA, 120 bp, Artificial Sequence
  ENSG00000183484_3 (sequence is synthesized)
gacccaggagaacggaaagcagggacgtgaacagccctcctcatgttcttgacaccgtcattctcagcagctcagctaaggcacagaggcagccgagcgtctgtcagcggagtcgtggct

SEQ ID NO: 654122 - DNA, 120 bp, Artificial Sequence
  ENSG00000183484_4 (sequence is synthesized)
gagcagaacacgccacacgccacacgccacacgccacacgtgcaggattgctcaagatggaagggcacagtggaatatatatatatatttatatttttggcgagaccctggaggacacac

SEQ ID NO: 654123 - DNA, 120 bp, Artificial Sequence
  ENSG00000183484_5 (sequence is synthesized)
tgaatacaatggaataccatcccgcctttgaaaggaagggaaatcctggcacacgctgcaacaggagggagcttgaggacactgtggtgagtggagcacgtgagacacggaaggacacac

SEQ ID NO: 654124 - DNA, 120 bp, Artificial Sequence
  ENSG00000183484_6 (sequence is synthesized)
gctgaagacacgcagagatgcccacccacgtggggaggtgacaggggagcccagcgcacagagacaaagtggaatggaggcctgggggctgggagcaaatgcggagcgagtgcttcctgg

SEQ ID NO: 654125 - DNA, 120 bp, Artificial Sequence
  ENSG00000183484_7 (sequence is synthesized)
ggcagagtctccgtttgggaagatgagaaggttctgccgacggatgctggcgatggttgcagaagaatgtgaatgtgcccaatgctactgaaaaacggttacaatggaaacgccacccca

SEQ ID NO: 654126 - DNA, 120 bp, Artificial Sequence
  ENSG00000183484_8 (sequence is synthesized)
gtgaccaccactgccccgtgggcctccctgggcctctccgccaagacctgcaacaacgtgtccttcgaagagagcaggatagtcctggtcgtggtgtacagcgcggtgtgcacgctgggg

SEQ ID NO: 654127 - DNA, 120 bp, Artificial Sequence
  ENSG00000183484_9 (sequence is synthesized)
gtgccggccaactgcctgactgcgtggctggcgctgctgcaggtactgcagggcaacgtgctggccgtctacctgctctgcctggcactctgcgagctgctgtacacaggcacgctgcca

SEQ ID NO: 654128 - DNA, 120 bp, Artificial Sequence
  ENSG00000183484_10 (sequence is synthesized)
ctctgggtcatctatatccgcaaccagcaccgctggaccctaggcctgctggcctgcaaggtgaccgcctacatcttcttctgcaacatctacgtcagcatcctcttcctgtgctgcatc

SEQ ID NO: 654129 - DNA, 120 bp, Artificial Sequence
  ENSG00000183484_11 (sequence is synthesized)
tcctgcgaccgcttcgtggccgtggtgtacgcgctggagagtcggggccgccgccgccggaggaccgccatcctcatctccgcctgcatcttcatcctcgtcgggatcgttcactacccg

SEQ ID NO: 654130 - DNA, 120 bp, Artificial Sequence
  ENSG00000183484_12 (sequence is synthesized)
gtgttccagacggaagacaaggagacctgctttgacatgctgcagatggacagcaggattgccgggtactactacgccaggttcaccgttggctttgccatccctctctccatcatcgcc

SEQ ID NO: 654131 - DNA, 120 bp, Artificial Sequence
  ENSG00000183484_13 (sequence is synthesized)
ttcaccaaccaccggattttcaggagcatcaagcagagcatgggcttaagcgctgcccagaaggccaaggtgaagcactcggccatcgcggtggttgtcatcttcctagtctgcttcgcc

SEQ ID NO: 654132 - DNA, 120 bp, Artificial Sequence
  ENSG00000183484_14 (sequence is synthesized)
ccgtaccacctggttctcctcgtcaaagccgctgccttttcctactacagaggagacaggaacgccatgtgcggcttggaggaaaggctgtacacagcctctgtggtgtttctgtgcctg

SEQ ID NO: 654133 - DNA, 120 bp, Artificial Sequence
  ENSG00000183484_15 (sequence is synthesized)
tcccgccaagaagtgtccagaatccataaggggtggaaagagtggtccatgaagacagacgtcaccaggctcacccacagcagggacaccgaggagctgcagtcgcccgtggcccttgca

SEQ ID NO: 654134 - DNA, 120 bp, Artificial Sequence
  ENSG00000183484_16 (sequence is synthesized)
gaccactacaccttctccaggcccgtgcacccaccagggtcaccatgccctgcaaagaggctgattgaggagtcctgctgagcccactgtgtggcagggggatggcaggttgggggtcct

SEQ ID NO: 654135 - DNA, 120 bp, Artificial Sequence
  ENSG00000183484_17 (sequence is synthesized)
ggggccagcaatgtggttcctgtgcactgagcccaccagccacagtgcccatgtcccctctggaagacaaactaccaatttctcgttcctgaagccactccctccgtgaccactggcccc

SEQ ID NO: 654136 - DNA, 120 bp, Artificial Sequence
  ENSG00000183484_18 (sequence is synthesized)
aggctttcccacatggaaggtggctgcatgccaaggggaggagcgacacctccaggcttccgggagcccagagagcatgtggcaggcagtggggcctcttcatcagcagcctgcctggct

SEQ ID NO: 654137 - DNA, 120 bp, Artificial Sequence
  ENSG00000183484_19 (sequence is synthesized)
ggctcccttggctgtgggcaggtagcacgcctgctggcagaggtacctggtggctgccctgttcgcatcagtggcgatgactttatttgcggagcatttctgcaagcgttgcctggatgc

SEQ ID NO: 654138 - DNA, 120 bp, Artificial Sequence
  ENSG00000183484_20 (sequence is synthesized)
ggtggtgcattgtgggccctctgggctcctgcctcagaatgtcagtgagcaccatgctggaggtcacccagcactgtggcagcgcccaggagggcatagggcagcctaccacctccaagg

SEQ ID NO: 654139 - DNA, 120 bp, Artificial Sequence
  ENSG00000183484_21 (sequence is synthesized)
gggcaggcgccctcatctggggttgggtctgtgctgagctggagggcctctagggaaccgtggggcagggtggccagctgctggctcccagagcgcagcccaggcgtcctcaacggggag

SEQ ID NO: 654140 - DNA, 120 bp, Artificial Sequence
  ENSG00000183484_22 (sequence is synthesized)
ccccaaatgtccacgcccagaacaacagttggcaggacaggtgtgacacagccacagcagaggcaaggggtgccaggagtccccagcggcatcctcggggagatgctggtgaggggtccg

SEQ ID NO: 654141 - DNA, 120 bp, Artificial Sequence
  ENSG00000183484_23 (sequence is synthesized)
tacagggtggggtccccacccctagccccttactgaggggggagtgcagcagttggcctgcttgtctggcggagaaagccagctccctgcaccctcggggctgagtcagatctgggtctg

SEQ ID NO: 654142 - DNA, 120 bp, Artificial Sequence
  ENSG00000183484_24 (sequence is synthesized)
ccgcaaaggccttgcctagaccaggtcacactgatgccctggtttccctatctgtaaaatggggccaatgacacctacctcactgggtcaccatcgagatcaatcctcctccctgccccg

SEQ ID NO: 654143 - DNA, 120 bp, Artificial Sequence
  ENSG00000183484_25 (sequence is synthesized)
acacctcgggcacatcgcatgcactcagagcacagagccgggcagacgcagcacctgcatggggagcccagtgcccggcacagcacaggggcttccagggaggccgcgcagggccgtggg

SEQ ID NO: 654144 - DNA, 89 bp, Artificial Sequence
  ENSG00000183484_26 (sequence is synthesized)
cagcacaggggcttccagggaggccgcgcagggccgtggggctgagccacgctctcgttttgtcaggcagctatgcagttgctcttcca

SEQ ID NO: 654145 - DNA, 61 bp, Artificial Sequence
  ENSG00000183484_27 (sequence is synthesized)
atatttatttttttagagacagggccttgctctgttgcctgggctggagacgctcagcctc

SEQ ID NO: 654146 - DNA, 120 bp, Artificial Sequence
  ENSG00000183484_28 (sequence is synthesized)
acacccagccaaaacagccatcctccccttgagagtcatcagaaaaatacattaggaaaatgtgtttagaaataaaagcacaaggcagggcagtgctcacgcctgtcatcccagcacttt

SEQ ID NO: 654147 - DNA, 86 bp, Artificial Sequence
  ENSG00000183484_29 (sequence is synthesized)
gagacgggacggcaacatggcaaaatcttgtctcttttttttggtattaaaaaaatcataaaaataaaagaaataatgcaatttaa

SEQ ID NO: 654148 - DNA, 89 bp, Artificial Sequence
  ENSG00000183484_30 (sequence is synthesized)
agctaggactgcagggaggggtgcgaggctagccacgcaggcggggccctggctttataaaggtataattgacaaacaagaagagtacc

SEQ ID NO: 654149 - DNA, 120 bp, Artificial Sequence
  ENSG00000183484_31 (sequence is synthesized)
gacgttttgatgcctgttggcttggagccttgcttgtgtttctcatgtgggatgcaacggcagattctcaacatttaaaaaacacctacgaatcaacgggccacttagtaaattagtaaa

SEQ ID NO: 654150 - DNA, 120 bp, Artificial Sequence
  ENSG00000183484_32 (sequence is synthesized)
tactcactagccgtttgtcaatgggttaacttgtgactcaatctgatttccctaaaacaatttcaacctactctttttccaggtcattttaaactctcagagtgaacgtcttgataggac

SEQ ID NO: 654151 - DNA, 120 bp, Artificial Sequence
  ENSG00000183484_33 (sequence is synthesized)
ccagaagcatgaactcagccagagtgggcagccaggacactggagctggtggcgctggcagagcttggggaagtcacaccactgcacaccctgcgtgacctctagcaaccccctggctgg

SEQ ID NO: 654152 - DNA, 120 bp, Artificial Sequence
  ENSG00000183486_0 (sequence is synthesized)
gatgatttctccatcctgaacgtgcagcgagcttgtcaggaagatcggaggtgccaagtagcagagaaagcatcccccagctctgacagggagacagcacatgtctaaggcccacaagcc

SEQ ID NO: 654153 - DNA, 120 bp, Artificial Sequence
  ENSG00000183486_1 (sequence is synthesized)
ttggccctaccggaggagaagtcaattttcttctcgaaaatacctgaaaaaagaaatgaattccttccagcaacagccaccgccattcggcacagtgccaccacaaatgatgtttcctcc

SEQ ID NO: 654154 - DNA, 120 bp, Artificial Sequence
  ENSG00000183486_2 (sequence is synthesized)
aaactggcagggggcagagaaggacgctgctttcctcgccaaggacttcaactttctcactttgaacaatcagccaccaccaggaaacaggagccaaccaagggcaatggggcccgagaa

SEQ ID NO: 654155 - DNA, 120 bp, Artificial Sequence
  ENSG00000183486_3 (sequence is synthesized)
caacctgtacagccagtacgagcagaaggtgcgcccctgcattgacctcatcgactccctgcgggctctgggtgtggagcaggacctggccctgccagccatcgccgtcatcggggacca

SEQ ID NO: 654156 - DNA, 120 bp, Artificial Sequence
  ENSG00000183486_4 (sequence is synthesized)
gagctcgggcaagagctctgtgctggaggcactgtcaggagtcgcgcttcccagaggcagcggaatcgtaaccaggtgtccgctggtgctgaaactgaaaaagcagccctgtgaggcatg

SEQ ID NO: 654157 - DNA, 120 bp, Artificial Sequence
  ENSG00000183486_5 (sequence is synthesized)
ggccggaaggatcagctaccggaacaccgagctagagcttcaggaccctggccaggtggagaaagagatacacaaagcccagaacgtcatggccgggaatggccggggcatcagccatga

SEQ ID NO: 654158 - DNA, 120 bp, Artificial Sequence
  ENSG00000183486_6 (sequence is synthesized)
gctcatcagcctggagatcacctcccctgaggttccagacctgaccatcattgaccttcccggcatcaccagggtggctgtggacaaccagccccgagacatcggactgcagatcaaggc

SEQ ID NO: 654159 - DNA, 120 bp, Artificial Sequence
  ENSG00000183486_7 (sequence is synthesized)
tctcatcaagaagtacatccagaggcagcagacgatcaacttggtggtggttccctgtaacgtggacattgccaccacggaggcgctgagcatggcccatgaggtggacccggaagggga

SEQ ID NO: 654160 - DNA, 120 bp, Artificial Sequence
  ENSG00000183486_8 (sequence is synthesized)
caggaccatcggtatcctgaccaaaccagatctaatggacaggggcactgagaaaagcgtcatgaatgtggtgcggaacctcacgtaccccctcaagaagggctacatgattgtgaagtg

SEQ ID NO: 654161 - DNA, 120 bp, Artificial Sequence
  ENSG00000183486_9 (sequence is synthesized)
ccggggccagcaggagatcacaaacaggctgagcttggcagaggcaaccaagaaagaaattacattctttcaaacacatccatatttcagagttctcctggaggaggggtcagccacggt

SEQ ID NO: 654162 - DNA, 120 bp, Artificial Sequence
  ENSG00000183486_10 (sequence is synthesized)
tccccgactggcagaaagacttaccactgaactcatcatgcatatccaaaaatcgctcccgttgttagaaggacaaataagggagagccaccagaaggcgaccgaggagctgcggcgttg

SEQ ID NO: 654163 - DNA, 120 bp, Artificial Sequence
  ENSG00000183486_11 (sequence is synthesized)
cggggctgacatccccagccaggaggccgacaagatgttctttctaattgagaaaatcaagatgtttaatcaggacatcgaaaagttagtagaaggagaagaagttgtaagggagaatga

SEQ ID NO: 654164 - DNA, 120 bp, Artificial Sequence
  ENSG00000183486_12 (sequence is synthesized)
gacccgtttatacaacaaaatcagagaggattttaaaaactgggtaggcatacttgcaactaatacccaaaaagttaaaaatattatccacgaagaagttgaaaaatatgaaaagcagta

SEQ ID NO: 654165 - DNA, 120 bp, Artificial Sequence
  ENSG00000183486_13 (sequence is synthesized)
tcgaggcaaggagcttctgggatttgtcaactacaagacatttgagatcatcgtgcatcagtacatccagcagctggtggagcccgcccttagcatgctccagaaagccatggaaattat

SEQ ID NO: 654166 - DNA, 120 bp, Artificial Sequence
  ENSG00000183486_14 (sequence is synthesized)
caaccttaaccaaactgttcagagcacgattgaagacataaaagtgaaacacacagcaaaggcagaaaacatgatccaacttcagttcagaatggagcagatggttttttgtcaagatca

SEQ ID NO: 654167 - DNA, 120 bp, Artificial Sequence
  ENSG00000183486_15 (sequence is synthesized)
gatttacagtgttgttctgaagaaagtccgagaagagatttttaaccctctggggacgccttcacagaatatgaagttgaactctcattttcccagtaatgagtcttcggtttcctcctt

SEQ ID NO: 654168 - DNA, 120 bp, Artificial Sequence
  ENSG00000183486_16 (sequence is synthesized)
tactgaaataggcatccacctgaatgcctacttcttggaaaccagcaaacgtctcgccaaccagatcccatttataattcagtattttatgctccgagagaatggtgactccttgcagaa

SEQ ID NO: 654169 - DNA, 120 bp, Artificial Sequence
  ENSG00000183486_17 (sequence is synthesized)
agccatgatgcagatactacaggaaaaaaatcgctattcctggctgcttcaagagcagagtgagaccgctaccaagagaagaatccttaaggagagaatttaccggctcactcaggcgcg

SEQ ID NO: 654170 - DNA, 120 bp, Artificial Sequence
  ENSG00000183486_18 (sequence is synthesized)
acacgcactctgtcaattctccagcaaagagatccactgaagggcggcgatgcctgtggttgttttcttgtgcgtactcattcattctaaggggagtcggtgcaggatgccgcttctgct

SEQ ID NO: 654171 - DNA, 120 bp, Artificial Sequence
  ENSG00000183486_19 (sequence is synthesized)
ttggggccaaactcttctgtcactatcagtgtccatctctactgtactccctcagcatcagagcatgcatcaggggtccacacaggctcagctctctccaccacccagctcttccctgac

SEQ ID NO: 654172 - DNA, 120 bp, Artificial Sequence
  ENSG00000183486_20 (sequence is synthesized)
cttcacgaagggatggctctccagtccttgggtcccgtagcacacagttacagtgtcctaagatactgctatcattcttcgctaatttgtatttgtattcccttccccctacaagattat

SEQ ID NO: 654173 - DNA, 120 bp, Artificial Sequence
  ENSG00000183486_21 (sequence is synthesized)
gagaccccagagggggaaggtctgggtcaaattcttcttttgtatgtccagtctcctgcacagcacctgcagcattgtaactgcttaataaatgacatctcactgaacgaatgagtgctg

SEQ ID NO: 654174 - DNA, 120 bp, Artificial Sequence
  ENSG00000183486_22 (sequence is synthesized)
tgtaagtgatggagatacctgaggctattgctcaagcccaggccttggacatttagtgactgttagccggtccctttcagatccagtggccatgccccctgcttcccatggttcactgtc

SEQ ID NO: 654175 - DNA, 120 bp, Artificial Sequence
  ENSG00000183486_23 (sequence is synthesized)
attgtgtttcccagcctctccactcccccgccagaaaggagcctgagtgattctcttttcttcttgtttccctgattatgatgagcttccattgttctgttaagtcttgaagaggaattt

SEQ ID NO: 654176 - DNA, 120 bp, Artificial Sequence
  ENSG00000183486_24 (sequence is synthesized)
gaagaggaatttaataaagcaaagaaactttttaaaaacgtagccaggttcagtgactcatacctgtaatcccagtgactctggagactgaagcagaaggatcacttgagcccaggagtt

SEQ ID NO: 654177 - DNA, 120 bp, Artificial Sequence
  ENSG00000183486_25 (sequence is synthesized)
gggcaacacagggagaccctgtctctaaaaaaatttgtttgtaagtagccagacatggtggtgcacacctgtagtcccagccactcaggtggctggagcaggaggatcccttgagcccag

SEQ ID NO: 654178 - DNA, 120 bp, Artificial Sequence
  ENSG00000183486_26 (sequence is synthesized)
ccttgagcccaggattttgaggctgcagtgagccatgactgcaccatgtactacagcctgggtgacagagtgagagtgagactctgtctctgaatacacacacacacacacacacacata

SEQ ID NO: 654179 - DNA, 120 bp, Artificial Sequence
  ENSG00000183486_27 (sequence is synthesized)
gagagagaacttcacaccagtgatcatcattatgggtaattttcttttcttcttcatgttttcctgtatgtttcaaatgatgaacatatagattccttaataaaaaggcaatagaataaa

SEQ ID NO: 654180 - DNA, 120 bp, Artificial Sequence
  ENSG00000183486_28 (sequence is synthesized)
gatttctccatcctgaacgtgcagcgggtcttcctgctctgtttcccaggctggagtgcaatggtaccatcatagctcactgcagccttaaacttccgggctcaagtgatcctcctgcct

SEQ ID NO: 654181 - DNA, 120 bp, Artificial Sequence
  ENSG00000183486_29 (sequence is synthesized)
cggcctcccaatgcattgggattacaggtgtgagtccctgcgtctggccaggatgtatgtgagctttatttaggtttagcccctgccctagaatgcaagctcccccagagatctttgtct

SEQ ID NO: 654182 - DNA, 120 bp, Artificial Sequence
  ENSG00000183486_30 (sequence is synthesized)
gcctgactcgatatgtatctcaaggacttagtgctcaatatatatctttgagtgggtgaaaaacaagcggtcttaaaaagaaaggaggtgagcccggggagataaggtcgcattcagtgc

SEQ ID NO: 654183 - DNA, 120 bp, Artificial Sequence
  ENSG00000183486_31 (sequence is synthesized)
cagtgcttggtcagccatgaccctgcaccatgcgagtgacattgggactggagcaaagggacacagcagagtggcccctggtgcccaggacccggcagagctctcggactggttgcaagc

SEQ ID NO: 654184 - DNA, 120 bp, Artificial Sequence
  ENSG00000183486_32 (sequence is synthesized)
cagcaatagtggctatgcccgtgtgggagacgcagcttgccttagacttcagcgggaaccaccatgtccggcacagccatttccatccttcccaggggtgcttacgtgatcctggcagtc

SEQ ID NO: 654185 - DNA, 120 bp, Artificial Sequence
  ENSG00000183486_33 (sequence is synthesized)
tcagtcaaacttccaaactcagcagggaatgtgtgtgcttgtcctccaatctcaacaccctgggatgcagtgtcaggtgcaggtcagagacagcagtggagacccgattcccagccctgg

SEQ ID NO: 654186 - DNA, 120 bp, Artificial Sequence
  ENSG00000183486_34 (sequence is synthesized)
gctggggcccccacaaggcctccagcatctccccatggcccagtttcctcatctgcaggacaggctctcttgagaatttggggggatgatagacccaaaagcattctggagccagaggct

SEQ ID NO: 654187 - DNA, 120 bp, Artificial Sequence
  ENSG00000183486_35 (sequence is synthesized)
tctgccttcgtcgggggcatcagggagtgtcagtcatgaattcaccatgacttctgaccacctctgcctggactccctcacctcagtgctgcctaagctgggtaaccaccagcttcctgg

SEQ ID NO: 654188 - DNA, 120 bp, Artificial Sequence
  ENSG00000183486_36 (sequence is synthesized)
gccttcaccccgcagggccttcctctccagtgatgcgcctggaaagagggatttctctttgcaaaggtctctggaattgccaagttatggctttaagcatatgtagggaaactccctccc

SEQ ID NO: 654189 - DNA, 120 bp, Artificial Sequence
  ENSG00000183486_37 (sequence is synthesized)
ctttgcacttttggagtttttttccagccctcaatagaaatcaatacagtgaccaggctgcccttttcaccacactctcaggctcctgaggaccctggtggaagatggactaagcacatc

SEQ ID NO: 654190 - DNA, 120 bp, Artificial Sequence
  ENSG00000183486_38 (sequence is synthesized)
ctgggcatcggggacaggcaccggctcctcaagcgtggacagggacagggatggggcggggcagcgctgcaggaggtggggcctgggctgattttcttgctgtactactttcagtcacta

SEQ ID NO: 654191 - DNA, 120 bp, Artificial Sequence
  ENSG00000183486_39 (sequence is synthesized)
cgtacctgttatgggttgaactaggctccctgtattagtcagagttctctagagggacagaactaatggaatataaaaaaataaatatatacatatatatggaagtttactaagtatgaa

SEQ ID NO: 654192 - DNA, 120 bp, Artificial Sequence
  ENSG00000183486_40 (sequence is synthesized)
ggaagtttactaagtatgaatttacaggatcacaaggtccacaataagcaatctgcagcctgaggagcaaggggagccagtgtgagtcccaaaacctgaagaacttggagtccaatgttc

SEQ ID NO: 654193 - DNA, 120 bp, Artificial Sequence
  ENSG00000183486_41 (sequence is synthesized)
acaggagaaagctgtaggctgggaggctaaaccagtctctcttttcacatttttcagcctgctttatattctagctttgctgacagctgattagatggtgcccacctagactgaaggtgg

SEQ ID NO: 654194 - DNA, 120 bp, Artificial Sequence
  ENSG00000183486_42 (sequence is synthesized)
tcacacccctcaaatgtatatgttcaaatcctaacctcagaacctctgaatgtgaccttagttggaaatagggtctttgcagatgtaattaaagacgaggttgttttccagtagggtggg

SEQ ID NO: 654195 - DNA, 120 bp, Artificial Sequence
  ENSG00000183486_43 (sequence is synthesized)
aggtttgttacatgggtagattgtgtcatgggagtttagtgcacacattatttcatcactcgggtaataagcgtagtagccaatggatagctttttgctcctctccttcctcccaccctc

SEQ ID NO: 654196 - DNA, 120 bp, Artificial Sequence
  ENSG00000183486_44 (sequence is synthesized)
tacccttgagtaggctcaggtgtctcttgttctcttctttgtggccatgtgtgtttaatgtttagctcccactaataattgagaacatgtggtatttggttttctgttactagattagtt

SEQ ID NO: 654197 - DNA, 89 bp, Artificial Sequence
  ENSG00000183486_45 (sequence is synthesized)
ctgcaaaggacatgatctcattctttttgatggtgcttttttatccagtctaccattgatggccatttaggttgattctatgtctttgc

SEQ ID NO: 654198 - DNA, 120 bp, Artificial Sequence
  ENSG00000183486_46 (sequence is synthesized)
ggttgattctatgtctttgctattgtaacggtgctgccatgaacattcgtctgcatgtgtctttgcggtagaatgatttctattcctttgggtacatacgctgtaatgggattgctgggt

SEQ ID NO: 654199 - DNA, 120 bp, Artificial Sequence
  ENSG00000183486_47 (sequence is synthesized)
aatgggattgctgggtcgaatggtaatcctgtttaagttctttgaggagtcaccagactgctttccacatggctgaactaattcgcactcccaccagcagtgcagaagtgttccccaaaa

SEQ ID NO: 654200 - DNA, 120 bp, Artificial Sequence
  ENSG00000183486_48 (sequence is synthesized)
ggggacatttggacacagacacgcagaagcccactcctgcctcctcactcagcctggatttgtctcagtcgccctcgcttgcctctcacacgtgtgcaccctcacactgcttcagcatct

SEQ ID NO: 654201 - DNA, 120 bp, Artificial Sequence
  ENSG00000183486_49 (sequence is synthesized)
gccggtcctccggcctttgctcttagagcagagattctcaacctttctccatttgggcttccctgagtggttccgtagttcatttatggtgcccgccacccaaaataaattcctggcagt

SEQ ID NO: 654202 - DNA, 120 bp, Artificial Sequence
  ENSG00000183486_50 (sequence is synthesized)
tctatttactaattaggtaggtccaaacaactcagtaatagtaggctgggtggtgtccaacagctgccttcgtgtatcactgggaaatcttaaagatcccacagtggcctgtgagtttgc

SEQ ID NO: 654203 - DNA, 120 bp, Artificial Sequence
  ENSG00000183486_51 (sequence is synthesized)
tgaaataccccaggtgcacagtttggggaacatagtcttatagatttgatgaattccctttttgcacctgtatatcactcacggggctgatctatgactggtgtgctagtccatttgtgt

SEQ ID NO: 654204 - DNA, 90 bp, Artificial Sequence
  ENSG00000183486_52 (sequence is synthesized)
acggggctgatctatgactggtgtgctagtccatttgtgtcacgatagaggtaaacctgagactgagtaacttacaaagaaaagaggttt

SEQ ID NO: 654205 - DNA, 77 bp, Artificial Sequence
  ENSG00000183486_53 (sequence is synthesized)
catctctactaaaaatacaaagggcaggcagaggtccttctcagatgctttgggtcctgccattgaaagggaagaag

SEQ ID NO: 654206 - DNA, 120 bp, Artificial Sequence
  ENSG00000183486_54 (sequence is synthesized)
ttctcagatgctttgggtcctgccattgaaagggaagaagagaagtcccttccctgggagagcctcagtgatccctgcacaagaccagccgtcttcctccgccccatattgttcagccct

SEQ ID NO: 654207 - DNA, 120 bp, Artificial Sequence
  ENSG00000183486_55 (sequence is synthesized)
ggcaccctgtgttgtgcgtggagtcccttgttttcctctatcttatcaggaaccagttctaggttcctaacctggtctgaccccggcaccctgtcctgttacacaagaaacccggatgct

SEQ ID NO: 654208 - DNA, 120 bp, Artificial Sequence
  ENSG00000183486_56 (sequence is synthesized)
gatatatatatgtcccaacattgcccttccagagcctctccagctgtgactcactgttgacatggcaacccccaccccctggactcctcgctcaacccacaaagactatctcttgcgtac

SEQ ID NO: 654209 - DNA, 120 bp, Artificial Sequence
  ENSG00000183486_57 (sequence is synthesized)
tctgctctgaggtgttttaaaaagcgccaccataaacctgtaacacaagaatgaaacccagcaagaatcaggggacaggaaccaaggaacatgacatcacgtgagaactaagggccgctc

SEQ ID NO: 654210 - DNA, 120 bp, Artificial Sequence
  ENSG00000183486_58 (sequence is synthesized)
tgattgaccatagcatttggctctcagcctcccacggccaaggctaagggaggataggacaattgtctctctcactcttgaacaagagggagctcctggattcaccgggagagtaaattt

SEQ ID NO: 654211 - DNA, 120 bp, Artificial Sequence
  ENSG00000183486_59 (sequence is synthesized)
gactagcttggacttctgcaaggtaatttgttgtgactgcatattaaggagactaatcttaacataatcttaacataatttctttatattaaggagattaaataaatccatggatatgtt

SEQ ID NO: 654212 - DNA, 120 bp, Artificial Sequence
  ENSG00000183486_60 (sequence is synthesized)
tgtaatatataatgaaataattacacagctcaccaaaatatagaatcctcattatggtgggagccctcagcttgtcttcctgcaactagactgtcccatctagcggtgatgggagacagt

SEQ ID NO: 654213 - DNA, 120 bp, Artificial Sequence
  ENSG00000183486_61 (sequence is synthesized)
actagactgtcccatctagcggtgatgggagacagtgacagatcgtcaggcattagattctcataaggaacacgcaacctagatccctcgcacgtgcagctcacaacagggtttgtgctc

SEQ ID NO: 654214 - DNA, 120 bp, Artificial Sequence
  ENSG00000183486_62 (sequence is synthesized)
ctgtgagaatctagtgccaccgcagatctgaaaagaggtggggctcaggcagcagtgctcactagctcactgcacacctcctgccggacacggactggaactggtccagcctgggagttg

SEQ ID NO: 654215 - DNA, 120 bp, Artificial Sequence
  ENSG00000183486_63 (sequence is synthesized)
gggacccctgatgtaaggaatagtcagaggctaacatgcacacaggcacgggaaatggacaggacctgcccaggctgcatgagggctggattgtgtggccctggaatgatgtcccaccct

SEQ ID NO: 654216 - DNA, 120 bp, Artificial Sequence
  ENSG00000183486_64 (sequence is synthesized)
ctcctatcgcggtttgcaggtctagggaactcagtctcctggaatgggtcagtgtatcatcagtcatcctccctgtgtctttaaccagttttatttctgcttgcattttactgatgtttt

SEQ ID NO: 654217 - DNA, 120 bp, Artificial Sequence
  ENSG00000183486_65 (sequence is synthesized)
cttcttcttctcctttttgctttttttggtcagaaattatccagcaagctttcattaacgtggccaaaaaacattttggcgaatttttcaaccttaaccaaactgttcaggtaagcaccc

SEQ ID NO: 654218 - DNA, 120 bp, Artificial Sequence
  ENSG00000183486_66 (sequence is synthesized)
agagttcacttgctagtcacctggaccactggctgtttaaccttgagagaagttggatattcactgtcatttggaaccatgaggccagggatgtaatggcaggctggcgaggctggcagg

SEQ ID NO: 654219 - DNA, 120 bp, Artificial Sequence
  ENSG00000183486_67 (sequence is synthesized)
gctggcggggctggtggagctggtgactccaggagcacctgcctgcctggcttctgctcaggaggcggcttcactccccaggagaaatgaaatgcggcccgtgccctgccatctgttctg

SEQ ID NO: 654220 - DNA, 120 bp, Artificial Sequence
  ENSG00000183486_68 (sequence is synthesized)
atgataagtgtgccaagagtggaacacgtccatccaagaccgtggaacccttggtaatcagcaactgtctctcaacgaacaaaacccagaaatatggggcatcgacctcagcaactcaac

SEQ ID NO: 654221 - DNA, 120 bp, Artificial Sequence
  ENSG00000183486_69 (sequence is synthesized)
acagggcaattccactgcctctgatgtcctcgtgtcttgattttgttttgttttgttgagacagggtctccctctgttgcctaggctggagtgtagtggcgcaatcatgactcactgcag

SEQ ID NO: 654222 - DNA, 120 bp, Artificial Sequence
  ENSG00000183486_70 (sequence is synthesized)
tacatacgtacatacatacatacatacataaaaattaagattgcttataactttagccagttaagttttctcctggccgaggcttcattgggcctgtttgtatttgatgattttatttga

SEQ ID NO: 654223 - DNA, 120 bp, Artificial Sequence
  ENSG00000183486_71 (sequence is synthesized)
ctccagtgctcaatttcttctgtgttgtcagctcgggctaatgggacacagaatggctcatttttggctgtgcagttttctgtcttctgtgcacaacttaaaataattatatggggcact

SEQ ID NO: 654224 - DNA, 120 bp, Artificial Sequence
  ENSG00000183486_72 (sequence is synthesized)
gtctgagcacaactatatgtaaattgtgccaaaatataaggaactatgtcccaaggtgccagctttttccttgtctgtttgtgttgttgttgagaaaaataatattaaaagttggcattt

SEQ ID NO: 654225 - DNA, 120 bp, Artificial Sequence
  ENSG00000183486_73 (sequence is synthesized)
taaggcatatgttgcctacatctccattttgcctacacagtctaataaattttattagatttctcttatttgattgaactagaccccttccaagaacaaatcgcaggtaaaaagtcacta

SEQ ID NO: 654226 - DNA, 120 bp, Artificial Sequence
  ENSG00000183486_74 (sequence is synthesized)
atattagaaagaaacacgtggagatattctccatgggaagcatctgaggtccctgcctctggggaactgtgtggggagcaggcattgctcgctgagcacctgctgcctgggctccgtgct

SEQ ID NO: 654227 - DNA, 120 bp, Artificial Sequence
  ENSG00000183486_75 (sequence is synthesized)
ggactctgcatggggacaccaggacagagaagatgtcaccgctggccgcaaaggcatctctggacttctgagtcagatacaacatacgcacaagtcactctaatagaaggcaggatctcc

SEQ ID NO: 654228 - DNA, 120 bp, Artificial Sequence
  ENSG00000183486_76 (sequence is synthesized)
aaggcatctcgggtgagatctagaggggagggaggggttgtacttggttgcaggaatcagggggtcttcaggaaagaagacatgccagccgtgggctttgaaggacaagtgggaggtcat

SEQ ID NO: 654229 - DNA, 120 bp, Artificial Sequence
  ENSG00000183486_77 (sequence is synthesized)
cagagaccagggcagggccgccggggcaggcattcccaggacggggctcggcctagcaaagcccagagtcacactgtgggacaatgttgcctttgcgccatcatgcctgcctgcctggcc

SEQ ID NO: 654230 - DNA, 120 bp, Artificial Sequence
  ENSG00000183486_78 (sequence is synthesized)
ataaaagtgaagtggaggaaagggaagagatgatttctccatcctgaacgtgcagcgcctttattaagctcctactgtatgccaggtactttgggctgcaggtacagctgtgaaaaaaaa

SEQ ID NO: 654231 - DNA, 120 bp, Artificial Sequence
  ENSG00000183486_79 (sequence is synthesized)
agaccttcaagttaattgttggaacctgcggctctaacacttccagcaaagctacttctgtgaaagctgtgacgagcagaggaaatgggacaggagaggagctgaatcctgagattgtat

SEQ ID NO: 654232 - DNA, 120 bp, Artificial Sequence
  ENSG00000183486_80 (sequence is synthesized)
cgctaggagcccccaaagtacgatgacggtcctcgggccagcatgggggtgcattggcaccatgtaaggaaaggggccctcccgtggcaccgttggagtggggcggtgtggggttgttcg

SEQ ID NO: 654233 - DNA, 120 bp, Artificial Sequence
  ENSG00000183486_81 (sequence is synthesized)
gagagaaaagtttcccatgagctctgtttcagcaaacggcgatgaccacttccgtggcaactaaacagtcttgccttcctgcacgtggacatttttcttcatgcatatttctcttgcaaa

SEQ ID NO: 654234 - DNA, 120 bp, Artificial Sequence
  ENSG00000183486_82 (sequence is synthesized)
ttctattgtttgtataacagtatttcatgagcggagaagagttggaagcaaaaatctgttcatgagaaatcctttattaagctcctactgtatgccaggtactttgggctgcaggtacag

SEQ ID NO: 654235 - DNA, 120 bp, Artificial Sequence
  ENSG00000183486_83 (sequence is synthesized)
ctgtgaaaaaaaacagcaggcgggaaccagccctgggacaggctccacacactcactgagcaccgcctcctgcacagcgcagtccctgctctcagcctgagcaggcgcagcagccctgcc

SEQ ID NO: 654236 - DNA, 120 bp, Artificial Sequence
  ENSG00000183486_84 (sequence is synthesized)
ctcccaagaaaggggatggtgagaagcctagtgtcccctccacagagaccagcgccacacatgacagccacacatgacagtgttggtaccagcactcagtctttgagccacaagtgctta

SEQ ID NO: 654237 - DNA, 120 bp, Artificial Sequence
  ENSG00000183486_85 (sequence is synthesized)
taagatagcttgtcaggaagatcggaggtgccaagtagcagagaaagcatcccccagctctgacagggagacagcacatgtctaaggcccacaagccttggccctaccggaggagaagtc

SEQ ID NO: 654238 - DNA, 120 bp, Artificial Sequence
  ENSG00000183486_86 (sequence is synthesized)
gcatgagccactgctcccagcccctaaacacttttaaactatcagatcctgtgagaactcacttaccatcatgagagcagcatgagaaaaaccacccccatgacctaatcacctcccacc

SEQ ID NO: 654239 - DNA, 120 bp, Artificial Sequence
  ENSG00000183486_87 (sequence is synthesized)
agatttggatggggacacagagccaaacacaatttgagatgagatttggttggggacacagagccaaacacaatttgagatgagatttggttggggacacagagccaaaccatctcattg

SEQ ID NO: 654240 - DNA, 120 bp, Artificial Sequence
  ENSG00000183486_88 (sequence is synthesized)
tgagatttggttggggacacagagccaaaccatctcattgtgtgtgtgctgttgtgtttttgttctggcacttggagaaaacagcactgtttacctccgtggaaagatccctccaacggt

SEQ ID NO: 654241 - DNA, 120 bp, Artificial Sequence
  ENSG00000183486_89 (sequence is synthesized)
aaactgtggctgtatgcttgggaggtaaggggtacaagattaagtttccatattcatttaactgatcagatttttgtgtttagttttgtttttgtttttcagagacaggctcttgccgtc

SEQ ID NO: 654242 - DNA, 120 bp, Artificial Sequence
  ENSG00000183486_90 (sequence is synthesized)
acccaggctggagcacagtggtgtgatcattcccagatagctgggactaaaggcacataccaccatgcctggctcatcttttttttatttttgtagagacaggatcttgttatgttgccc

SEQ ID NO: 654243 - DNA, 120 bp, Artificial Sequence
  ENSG00000183486_91 (sequence is synthesized)
caagtgatcctcccaccttgacctcccaaagtgatgatattacaggtgtgagccaccacacctagtttctaatcaggtttttttttttttcctaccagttagaaacaatagcttctctct

SEQ ID NO: 654244 - DNA, 120 bp, Artificial Sequence
  ENSG00000183486_92 (sequence is synthesized)
agttagaaacaatagcttctctcttggggtgatgactttcaattgaaacacattttcatagaataagatttttttcccccaaaagtcagtatttcttaaactcctgttattagaccatga

SEQ ID NO: 654245 - DNA, 120 bp, Artificial Sequence
  ENSG00000183486_93 (sequence is synthesized)
atatttttctcattgtgaacaaaactccactttgcaacattgcctctgcgtacagtggggagcaagactttataaaactgttgctagctttacgacgtctgcagaattagcagaattcac

SEQ ID NO: 654246 - DNA, 120 bp, Artificial Sequence
  ENSG00000183486_94 (sequence is synthesized)
gtttactagtcctactcccaaatttgtatgtttgactcaaagatgttgccgtagctctgtgggtttctacttagcaactcttcccccgagttaccttcagcaaaggcaagagagggcatg

SEQ ID NO: 654247 - DNA, 120 bp, Artificial Sequence
  ENSG00000183486_95 (sequence is synthesized)
tggcacttgggctgtagataaaattcctcttctgcccaggcctgggctggtggattgaaatctcattccatagtgcaggcaagcaagaaggacaattttcgtcatttttccgtcatataa

SEQ ID NO: 654248 - DNA, 120 bp, Artificial Sequence
  ENSG00000183486_96 (sequence is synthesized)
attaatttcttctttcaccctttttgcctgttagtgaaaattaaatcccagttctgactcccgcccactttctcaggggctgtgtctgagtcccgggtgcctgctcatggggtgggtgac

SEQ ID NO: 654249 - DNA, 120 bp, Artificial Sequence
  ENSG00000183486_97 (sequence is synthesized)
ctgcctggtccccagtcaccaagatgtccattgtccttcccgggccttggtccccttggtccctgagctcctgcccagccccgccgggacacaggaagcactcggctgcaggcccaactg

SEQ ID NO: 654250 - DNA, 120 bp, Artificial Sequence
  ENSG00000183486_98 (sequence is synthesized)
ctctgggccatgggaactctggcatccaccaagggccttcacctcttttgtgctgcccttggatagacacagccttgcagcagctcccggctcctcaccagggactgcggggctctccaa

SEQ ID NO: 654251 - DNA, 120 bp, Artificial Sequence
  ENSG00000183486_99 (sequence is synthesized)
ggccatgacctgcacactgccctcagccacaacagagcctggggggctcgctgcctcctgtgtcacaaatcttgaggagtgcggcacaggccacttctgctcccagagggtctactgtcc

SEQ ID NO: 654252 - DNA, 120 bp, Artificial Sequence
  ENSG00000183486_100 (sequence is synthesized)
tttgttgtgtagaccgaaagtgactgaggcagatctgcctcgatccgagatttattttgcccaggtcgaggatgtacgtgggaaaaagaaatacaagttccagtgctatctgtgacctgt

SEQ ID NO: 654253 - DNA, 120 bp, Artificial Sequence
  ENSG00000183486_101 (sequence is synthesized)
gcttttcctaagagggtttaggggaacttcagtatttaaaaaggaaagagcgagcaggtggggaagaaagaaggaaggagggtaggcaatgaggcaatgaggcagaggtcaccctcgtgt

SEQ ID NO: 654254 - DNA, 120 bp, Artificial Sequence
  ENSG00000183486_102 (sequence is synthesized)
aaggctctgaccagcactcagtgaatctatgtgttaaatgtgaaaagaaaggcgtggagagaaagtcaatcatgcattcatctcgcgctcagtaaatctacattttacatcggataaagt

SEQ ID NO: 654255 - DNA, 120 bp, Artificial Sequence
  ENSG00000183486_103 (sequence is synthesized)
gcacatgtgaaatcacagcttctgtttgggaacaaaagaaaggcagttaactttccctttagtatagtaagtttggggtcccaagaatctatttttctttcacagttgtcacatatactc

SEQ ID NO: 654256 - DNA, 120 bp, Artificial Sequence
  ENSG00000183495_0 (sequence is synthesized)
cgcgccgccgcttcctcccgccggggccccggatgcactgagcggctgcggcgcggcttccatcctcccgccctcctgacgcggccggagcgcagccctgaggcccagggagaacgacac

SEQ ID NO: 654257 - DNA, 120 bp, Artificial Sequence
  ENSG00000183495_1 (sequence is synthesized)
aacgacacattggatacagaagggaggtgatcatgcaccatggcactggcccccagaacgtccagcatcagctgcagaggtccagggcctgccctggcagcgagggtgaggagcagccgg

SEQ ID NO: 654258 - DNA, 120 bp, Artificial Sequence
  ENSG00000183495_2 (sequence is synthesized)
cccaccccaacccacccccgtcccccgcagctcccttcgctccctcagcaagcccgtcggcaccccagtctcccagttatcaaatacagcagctgatgaataggagccctgcaaccgggc

SEQ ID NO: 654259 - DNA, 120 bp, Artificial Sequence
  ENSG00000183495_3 (sequence is synthesized)
agaacgtgaacatcaccctgcagagcgtgggccctgtcgtcgggggaaaccagcagatcacactggccccactgccgctccccagccccacctctccaggcttccagttcagcgctcagc

SEQ ID NO: 654260 - DNA, 120 bp, Artificial Sequence
  ENSG00000183495_4 (sequence is synthesized)
ctcggcggtttgagcatgggtctccatcatacattcaggtcacgtcccccttgtcccagcaggtccagacccagagtcccacgcagcccagtccggggccggggcaggccttgcagaatg

SEQ ID NO: 654261 - DNA, 120 bp, Artificial Sequence
  ENSG00000183495_5 (sequence is synthesized)
tgcgtgcaggtgcccctggccctgggctgggcctctgcagcagcagccctacagggggcttcgtggatgccagcgtgctggtgaggcagatcagcttgagcccctccagtggtggacact

SEQ ID NO: 654262 - DNA, 120 bp, Artificial Sequence
  ENSG00000183495_6 (sequence is synthesized)
ttgtgtttcaggatgggtcagggctcacccagatcgcccagggagcccaggttcagctccagcacccgggtacgcccatcacagtccgagagcggagaccctcccagccccacacacagt

SEQ ID NO: 654263 - DNA, 120 bp, Artificial Sequence
  ENSG00000183495_7 (sequence is synthesized)
cagggggcaccatccaccacctgggaccccagagccctgcagccgcgggtggggccggcctgcagcccctggccagcccaagccacatcaccacggctaacttgccaccgcagatcagca

SEQ ID NO: 654264 - DNA, 120 bp, Artificial Sequence
  ENSG00000183495_8 (sequence is synthesized)
gcatcatccagggccagctggttcagcagcagcaggtgctgcaggggccgccgctgccccggcccctgggcttcgagaggacacccggcgtgctgctccccggggctgggggcgcagcgg

SEQ ID NO: 654265 - DNA, 120 bp, Artificial Sequence
  ENSG00000183495_9 (sequence is synthesized)
ggtttgggatgacgtccccacccccgcccaccagcccttccaggactgccgtgcccccaggcctttccagcctcccactcacgtctgtggggaacacgggaatgaagaaggttcccaaga

SEQ ID NO: 654266 - DNA, 120 bp, Artificial Sequence
  ENSG00000183495_10 (sequence is synthesized)
agttagaggagattcccccagcctctccggagatggcacagatgaggaagcagtgcctggactatcattaccaggagatgcaggctctgaaggaggtcttcaaggagtatttgattgaac

SEQ ID NO: 654267 - DNA, 120 bp, Artificial Sequence
  ENSG00000183495_11 (sequence is synthesized)
tgtttttcttgcaacactttcaagggaacatgatggatttcttagctttcaagaagaaacattatgccccattacaagcatatcttaggcagaatgatttggacattgaagaagaggagg

SEQ ID NO: 654268 - DNA, 120 bp, Artificial Sequence
  ENSG00000183495_12 (sequence is synthesized)
aggaggaggaagaggaggaagaaaaatctgaggttatcaatgacgagcagcaagccctcgcagggagcctggtagcaggggccggaagcacagtagagacggacctgtttaagaggcagc

SEQ ID NO: 654269 - DNA, 120 bp, Artificial Sequence
  ENSG00000183495_13 (sequence is synthesized)
aggcgatgccctccacaggtatggcagagcagtctaagaggcctcgccttgaagtgggtcaccaaggggtagttttccagcacccaggggcggacgcaggcgttcctctccagcaactaa

SEQ ID NO: 654270 - DNA, 120 bp, Artificial Sequence
  ENSG00000183495_14 (sequence is synthesized)
tgccgaccgcacaaggaggaatgccccccacgccgcaggccgcgcagctcgctggacagaggcagagtcagcagcagtatgacccctccacggggcctcccgtgcagaacgctgccagct

SEQ ID NO: 654271 - DNA, 120 bp, Artificial Sequence
  ENSG00000183495_15 (sequence is synthesized)
tgcacaccccactgccgcagctgcccgggaggctgcccccagccggtgttcccactgcagccctctcctctgcgctgcagtttgcacagcagccgcaagtggtagaggcccagacacagc

SEQ ID NO: 654272 - DNA, 120 bp, Artificial Sequence
  ENSG00000183495_16 (sequence is synthesized)
tccaaatcccggtgaagactcagcagcccaatgttcccatccctgcaccgcccagcagccaactccccatccctccctcgcagcctgcacagctggccctccacgttcccacacctggaa

SEQ ID NO: 654273 - DNA, 120 bp, Artificial Sequence
  ENSG00000183495_17 (sequence is synthesized)
aggtgcaggtgcaggcctctcagctttcctccctgccacagatggtagcatcgacaaggctccctgtggaccctgccccgccctgcccacggcctctgcccacctcttctacctcgtccc

SEQ ID NO: 654274 - DNA, 120 bp, Artificial Sequence
  ENSG00000183495_18 (sequence is synthesized)
tcgcgcctgtgagtggctccggcccaggaccctcccctgctcgatcctctccagtaaatagaccttcctcagccaccaataaggcactatctccagtcacttcccggaccccaggggtgg

SEQ ID NO: 654275 - DNA, 120 bp, Artificial Sequence
  ENSG00000183495_19 (sequence is synthesized)
tggcatctgcccccaccaaaccacagagtcctgctcagaatgccacctcgtcccaagacagttctcaggatacgctgacagaacaaataactctggagaaccaggtgcatcagcgcattg

SEQ ID NO: 654276 - DNA, 120 bp, Artificial Sequence
  ENSG00000183495_20 (sequence is synthesized)
cggagctgaggaaagcaggtctgtggtcccagaggcgtctgccaaagctgcaggaggccccacgccccaagtcccactgggactatctgctggaggagatgcagtggatggccacagact

SEQ ID NO: 654277 - DNA, 120 bp, Artificial Sequence
  ENSG00000183495_21 (sequence is synthesized)
ttgcccaggagaggaggtggaaggtggctgctgcgaagaagctcgttagaactgtggtgcgccatcacgaggagaagcagctccgtgaagaaagggggaagaaggaagagcagagcagac

SEQ ID NO: 654278 - DNA, 120 bp, Artificial Sequence
  ENSG00000183495_22 (sequence is synthesized)
tgaggcggatagccgcctccacggcccgggagatagagtgcttttggtcgaatattgaacaggttgtggaaataaaactacgagtagaattagaagaaaaaaggaagaaggccttaaatt

SEQ ID NO: 654279 - DNA, 120 bp, Artificial Sequence
  ENSG00000183495_23 (sequence is synthesized)
tacagaaagtttccaggagagggaaagaattgagacctaaaggatttgacgcattacaggaaagttctctggattcaggaatgtctggaagaaaaagaaaagctagcatatctttgactg

SEQ ID NO: 654280 - DNA, 120 bp, Artificial Sequence
  ENSG00000183495_24 (sequence is synthesized)
atgacgaagtggacgatgaagaggaaacaattgaagaggaggaagcaaatgaaggcgttgtggaccaccaaacagaactttctaatttagccaaggaagctgagctgcccctcctggacc

SEQ ID NO: 654281 - DNA, 120 bp, Artificial Sequence
  ENSG00000183495_25 (sequence is synthesized)
tgatgaagctgtacgaaggcgccttcctgccgagttctcagtggccccggccgaagcctgatggggaggacacaagcggagaggaagatgcagatgactgtccaggcgacagggagagtc

SEQ ID NO: 654282 - DNA, 120 bp, Artificial Sequence
  ENSG00000183495_26 (sequence is synthesized)
gcaaggacttggttctcatcgactcgcttttcatcatggatcagttcaaagctgccgagaggatgaatatcgggaagccaaacgccaaggacattgcggacgtcactgcggtggctgaag

SEQ ID NO: 654283 - DNA, 120 bp, Artificial Sequence
  ENSG00000183495_27 (sequence is synthesized)
ccatcctgccgaagggcagtgctcgggtcacaacctcggtcaagtttaatgctccatctttgttgtatggggctctcagagattatcagaagattggcctggactggctggccaaacttt

SEQ ID NO: 654284 - DNA, 120 bp, Artificial Sequence
  ENSG00000183495_28 (sequence is synthesized)
acaggaagaatctcaatggcatattggcagatgaagctgggctgggtaaaacagtgcagatcattgctttttttgcccacctagcttgtaacgaaggtaattggggcccccatcttgttg

SEQ ID NO: 654285 - DNA, 120 bp, Artificial Sequence
  ENSG00000183495_29 (sequence is synthesized)
ttgtgagaagttgtaacatactcaagtgggagcttgaattgaaacgttggtgtcccggactcaaaatcctctcatatattggcagccacagagaactcaaagcaaagagacaggagtggg

SEQ ID NO: 654286 - DNA, 120 bp, Artificial Sequence
  ENSG00000183495_30 (sequence is synthesized)
ccgaacccaacagcttccacgtctgcatcacgtcctacactcagttcttccggggcctcaccgccttcacacgagtgcgctggaagtgcctggtcattgatgagatgcagcgcgtgaagg

SEQ ID NO: 654287 - DNA, 120 bp, Artificial Sequence
  ENSG00000183495_31 (sequence is synthesized)
gcatgaccgagaggcactgggaagcggttttcaccctgcagagccaacaacgtctgcttctgatcgactcgccgctgcacaataccttcctggagctctggaccatggtgcacttcctgg

SEQ ID NO: 654288 - DNA, 120 bp, Artificial Sequence
  ENSG00000183495_32 (sequence is synthesized)
tcccagggatctccaggccctacctgagctcccctctgagggcccccagtgaagagagccaggattactaccataaagtggtcataaggttacacagggtgacacagccatttattttga

SEQ ID NO: 654289 - DNA, 120 bp, Artificial Sequence
  ENSG00000183495_33 (sequence is synthesized)
ggagaactaagagagatgtggaaaagcaactaacaaagaaatatgagcatgttttgaagtgtcgcctttctaaccgacaaaaagccttatacgaggacgttatcctgcaacctggcactc

SEQ ID NO: 654290 - DNA, 120 bp, Artificial Sequence
  ENSG00000183495_34 (sequence is synthesized)
aggaggccttgaagagcgggcactttgtcaacgtcctgagcatccttgtgcggctgcagcgcatctgcaaccaccctgggctcgtcgagccccggcacccaggctcttcctacgtggcgg

SEQ ID NO: 654291 - DNA, 120 bp, Artificial Sequence
  ENSG00000183495_35 (sequence is synthesized)
ggccactggagtatccgtccgcatctctaatcctgaaggcactggagagagatttctggaaggaagcagatctttctatgtttgatctcatcggcttagaaaataaaatcactcgtcacg

SEQ ID NO: 654292 - DNA, 120 bp, Artificial Sequence
  ENSG00000183495_36 (sequence is synthesized)
aggcagagttgctgtctaagaaaaagataccgcggaaactcatggaggaaatctccacttcagcagccccagcagcccgaccagcagcagcaaagctgaaggccagcaggttgtttcagc

SEQ ID NO: 654293 - DNA, 120 bp, Artificial Sequence
  ENSG00000183495_37 (sequence is synthesized)
ctgtgcagtatggccagaagcccgagggtcgcaccgtggctttccccagcactcacccgccccggacggcagcccccaccacggcctctgctgctccacagggcccgcttcgaggacggc

SEQ ID NO: 654294 - DNA, 120 bp, Artificial Sequence
  ENSG00000183495_38 (sequence is synthesized)
cgcccatcgccacgttctctgccaatccggaggcaaaagcagcagcagccccgtttcagacctctcaggcttccgccagtgctccacgacaccagcccgcctcggcctccagcacagccg

SEQ ID NO: 654295 - DNA, 120 bp, Artificial Sequence
  ENSG00000183495_39 (sequence is synthesized)
gcccatcctgcgaaactgcgggcccagaccacagcacaggcctccaccccaggccagcccccgccccagccccaggccccctcgcacgcggccgggcagagcgcgctgcctcagaggctg

SEQ ID NO: 654296 - DNA, 120 bp, Artificial Sequence
  ENSG00000183495_40 (sequence is synthesized)
agaggctggtgctcccctcgcaggcccaggcccgcttgcccagtggagaggtagtgaaaatagctcagctggcatccatcacaggaccacagagccgcgtggctcagccagagacgccgg

SEQ ID NO: 654297 - DNA, 120 bp, Artificial Sequence
  ENSG00000183495_41 (sequence is synthesized)
tgacactgcagttccagggcagcaagttcaccctgtcacacagccagctccggcagctcacagcgggccagccgctgcagctgcaaggcagcgtcctccagatcgtgtccgcccccgggc

SEQ ID NO: 654298 - DNA, 120 bp, Artificial Sequence
  ENSG00000183495_42 (sequence is synthesized)
agccctaccttcgagcccctggccctgtggtgatgcagaccgtgtctcaggcgggcgctgtgcacggcgccctgggaagcaagcccccggccggcggtcccagccctgcacccttgaccc

SEQ ID NO: 654299 - DNA, 120 bp, Artificial Sequence
  ENSG00000183495_43 (sequence is synthesized)
cacaagttggcgttccgggccgcgtggcggtgaatgccttggctgtaggagaacccggaacggcctccaaaccagcttctcccattggagggccgacccaggaggaaaagaccagactct

SEQ ID NO: 654300 - DNA, 120 bp, Artificial Sequence
  ENSG00000183495_44 (sequence is synthesized)
tgaaagagcgcctggatcagatttatttagtcaacgagcggcgctgttctcaagctccagtctatggcagagacttgctaaggatttgtgccctgcctagccatggaagggtacagtggc

SEQ ID NO: 654301 - DNA, 120 bp, Artificial Sequence
  ENSG00000183495_45 (sequence is synthesized)
gtgggtccctggatggccgtcgtgggaaggaggccgggccagcgcacagttacacttcatcctcagaaagtccaagtgagctgatgttgacgctttgtcggtgtggagagtctctgcagg

SEQ ID NO: 654302 - DNA, 120 bp, Artificial Sequence
  ENSG00000183495_46 (sequence is synthesized)
atgttattgacagggtggcctttgtgattcctccggtggtggcagcacccccgtccctacgggtgccgcggccgccacccctgtacagccacagaatgaggatcttgaggcagggcctga

SEQ ID NO: 654303 - DNA, 120 bp, Artificial Sequence
  ENSG00000183495_47 (sequence is synthesized)
gagagcacgctgcgccgtacttccagcagctgcggcagaccacggctccacgcctgctgcagttccctgagctgaggctggtgcagttcgactcagggaagttggaagctttagctatct

SEQ ID NO: 654304 - DNA, 120 bp, Artificial Sequence
  ENSG00000183495_48 (sequence is synthesized)
tgcttcagaaattgaaatctgaaggacgtcgggtgctgattttatcacagatgattcttatgttggacattttagagatgttcttgaacttccattacctcacctatgtaagaatcgatg

SEQ ID NO: 654305 - DNA, 120 bp, Artificial Sequence
  ENSG00000183495_49 (sequence is synthesized)
aaaatgccagcagtgagcaacggcaggaactgatgaggagtttcaacagagacaggcggattttttgtgccattctctccactcacagccgtaccacaggtataaaccttgtagaggcgg

SEQ ID NO: 654306 - DNA, 120 bp, Artificial Sequence
  ENSG00000183495_50 (sequence is synthesized)
acaccgtcgtgttttatgacaatgacctgaatccagtgatggatgccaaagctcaggagtggtgcgataggatcgggagatgcaaagacatccacatatacaggcttgtgagtggcaatt

SEQ ID NO: 654307 - DNA, 120 bp, Artificial Sequence
  ENSG00000183495_51 (sequence is synthesized)
atggctttcttaactcagcgaaccatccaggagctgtttgaagtttattctcccatggatgatgctggcttcccggtcaaagctgaggagtttgtggtgctttctcaggaaccttctgtc

SEQ ID NO: 654308 - DNA, 120 bp, Artificial Sequence
  ENSG00000183495_52 (sequence is synthesized)
acggaaaccattgcacccaaaattgcaagacctttcatagaggccctcaagagtattgagtatctggaggaggatgcccagaagtccgcacaggagggggtgctgggaccacacactgat

SEQ ID NO: 654309 - DNA, 120 bp, Artificial Sequence
  ENSG00000183495_53 (sequence is synthesized)
gctctgtcatcagactctgagaacatgccgtgtgatgaagaaccatcccaattagaggagctagctgacttcatggagcagcttacaccaattgaaaaatatgctttaaattacctggaa

SEQ ID NO: 654310 - DNA, 120 bp, Artificial Sequence
  ENSG00000183495_54 (sequence is synthesized)
ttattccatacttctattgagcaagaaaaggagagaaacagtgaggacgcagtgatgactgcagtgagggcatgggagttctggaacctgaagaccctgcaggagagggaggcccggctg

SEQ ID NO: 654311 - DNA, 120 bp, Artificial Sequence
  ENSG00000183495_55 (sequence is synthesized)
cggctggagcaggaggaggcggagctcctgacctacacgcgagaggatgcctacagcatggagtatgtctacgaagatgtcgatgggcagacagaagtcatgccgctctggaccccaccc

SEQ ID NO: 654312 - DNA, 120 bp, Artificial Sequence
  ENSG00000183495_56 (sequence is synthesized)
accccgccgcaggacgacagcgacatctacctcgactcggtcatgtgtctcatgtatgaagccactcccatcccagaggctaagctgccccctgtgtacgtgaggaaggagcggaagcga

SEQ ID NO: 654313 - DNA, 120 bp, Artificial Sequence
  ENSG00000183495_57 (sequence is synthesized)
cacaaaacagacccctcagctgcaggcaggaagaagaagcagcgtcacggggaggcggtcgtccctcctcggtccctgtttgaccgcgcaacaccaggacttctgaaaattcgcagagag

SEQ ID NO: 654314 - DNA, 120 bp, Artificial Sequence
  ENSG00000183495_58 (sequence is synthesized)
ggcaaggagcagaagaagaatattctgctgaagcagcaggtgccattcgccaagcccctgccaacttttgccaaacccacagctgagcctggtcaagacaaccccgagtggctcatcagt

SEQ ID NO: 654315 - DNA, 120 bp, Artificial Sequence
  ENSG00000183495_59 (sequence is synthesized)
gaggactgggcgctgctgcaggctgtaaagcagttactggagctgcctttgaacctcacaatcgtgtcacctgctcacacacctaattgggatcttgtcagtgacgttgttaactcctgt

SEQ ID NO: 654316 - DNA, 120 bp, Artificial Sequence
  ENSG00000183495_60 (sequence is synthesized)
agccgaatctaccgctcttccaaacagtgccggaatcgctacgagaatgtcatcattccacgagaggaggggaagagtaaaaacaaccgtcctctccgtacgagccagatctatgcccag

SEQ ID NO: 654317 - DNA, 120 bp, Artificial Sequence
  ENSG00000183495_61 (sequence is synthesized)
gatgagaatgccacacacacccagctgtacacgagccactttgacttaatgaaaatgactgctggcaagaggagtcccccaatcaaacctctgcttggcatgaatccctttcagaagaac

SEQ ID NO: 654318 - DNA, 120 bp, Artificial Sequence
  ENSG00000183495_62 (sequence is synthesized)
cccaagcacgcgtctgtgttggcagaaagtggaatcaactatgacaagccgctgcctcccatccaggtggcatctctccgtgcagagcgaatcgcaaaagagaaaaaggctctggctgat

SEQ ID NO: 654319 - DNA, 120 bp, Artificial Sequence
  ENSG00000183495_63 (sequence is synthesized)
gctctggctgatcagcagaaggcacagcagccggccgtggcccagccacccccgccccagccgcagcccccaccacccccgcagcagccaccgccaccgctgccacaaccacaggcagcg

SEQ ID NO: 654320 - DNA, 120 bp, Artificial Sequence
  ENSG00000183495_64 (sequence is synthesized)
ccagcagggccaccagctgtccagccccaaccccagccacagccccagacccagccacagcctgtgcaggccccagcgaaggcgcagcccgcaatcacgacggggggcagtgcagccgta

SEQ ID NO: 654321 - DNA, 120 bp, Artificial Sequence
  ENSG00000183495_65 (sequence is synthesized)
ctggcaggaaccattaaaacatcagttactgggacgagcatgcccactggtgccgtgagtggaaatgtgatcgtgaacaccatcgcaggggtcccagctgccaccttccagtccatcaac

SEQ ID NO: 654322 - DNA, 120 bp, Artificial Sequence
  ENSG00000183495_66 (sequence is synthesized)
aagcgcctggcgtcgccagtggctcctggggccttgactacgccgggaggctctgctcccgcccaggtggtgcacacccagcccccgccacgggcagtcggctccccagccacggcgacc

SEQ ID NO: 654323 - DNA, 120 bp, Artificial Sequence
  ENSG00000183495_67 (sequence is synthesized)
cctgacctggtgtccatggcaacgactcagggtgttcgagcggtcacttctgtgacagcctcggccgtggtcactaccaacctgaccccagtgcagaccccggcacggtctttggtgccc

SEQ ID NO: 654324 - DNA, 120 bp, Artificial Sequence
  ENSG00000183495_68 (sequence is synthesized)
caagtgtcccaagccacaggagttcagctccctggaaaaaccatcacacctgcacatttccagcttctcaggcagcagcagcagcagcagcaacaacagcagcagcagcagcagcagcag

SEQ ID NO: 654325 - DNA, 120 bp, Artificial Sequence
  ENSG00000183495_69 (sequence is synthesized)
cagcagcagcagcagcagcaacagcagcagcagcaacagacgacgacgacctctcaggtgcaagttccacagatccagggccaggcccagtccccagcacagatcaaagctgtgggcaag

SEQ ID NO: 654326 - DNA, 120 bp, Artificial Sequence
  ENSG00000183495_70 (sequence is synthesized)
ctgacgccggaacacctcatcaaaatgcagaagcagaaactgcagatgcccccgcagcccccaccgccacaggcccagtctgcgcccccgcagccaacagcccaagtgcaagtgcagacc

SEQ ID NO: 654327 - DNA, 120 bp, Artificial Sequence
  ENSG00000183495_71 (sequence is synthesized)
tcgcagccgccgcagcagcagagcccccagctcacgacggtcacggccccaaggcctggtgccctgctgacgggcaccaccgtggccaacctccaggtggcccggctcacccgggttccc

SEQ ID NO: 654328 - DNA, 120 bp, Artificial Sequence
  ENSG00000183495_72 (sequence is synthesized)
acttctcagctgcaggcgcaagggcagatgcagacccaggcaccccagccagcccaggtggccttggcgaagcctccggtggtgtccgtcccggcagctgtggtctcctcaccgggagtc

SEQ ID NO: 654329 - DNA, 120 bp, Artificial Sequence
  ENSG00000183495_73 (sequence is synthesized)
accaccctgcccatgaacgtcgcggggatcagcgtggcgatcggtcagccacagaaggcagcaggacagaccgtggtggcccagcccgtgcacatgcagcagctgctgaagctgaagcag

SEQ ID NO: 654330 - DNA, 120 bp, Artificial Sequence
  ENSG00000183495_74 (sequence is synthesized)
caggccgtccagcagcagaaggccatccagccccaggctgcacagggcccggcagccgtccagcagaagatcaccgcacagcagatcaccacccctggcgcgcagcagaaggttgcctac

SEQ ID NO: 654331 - DNA, 120 bp, Artificial Sequence
  ENSG00000183495_75 (sequence is synthesized)
gccgcgcagccggcccttaagacccagtttcttaccacacccatctcccaggcccagaaactggccggggcccagcaagtgcagacccagatccaggttgcaaaacttcctcaagttgtt

SEQ ID NO: 654332 - DNA, 120 bp, Artificial Sequence
  ENSG00000183495_76 (sequence is synthesized)
caacagcaaacacccgtggccagcatccagcaagttgcctctgcttcccagcaggcttctccacagactgtggcgctcacgcaggcgacggcggccgggcagcaggtgcagatgatccct

SEQ ID NO: 654333 - DNA, 120 bp, Artificial Sequence
  ENSG00000183495_77 (sequence is synthesized)
gcagtgaccgcgactgcccaggtggttcagcagaaactcattcagcagcaggtggtgaccacggcgtcggccccgctccagactccaggcgctcccaacccagcccaggtgcccgccagc

SEQ ID NO: 654334 - DNA, 120 bp, Artificial Sequence
  ENSG00000183495_78 (sequence is synthesized)
tccgacagcccaagccagcagcccaagttacagatgagggtccctgctgtcaggctaaagacacctactaagcctccgtgccagtagtcagggcagcagggctgcctctcatctaaagca

SEQ ID NO: 654335 - DNA, 120 bp, Artificial Sequence
  ENSG00000183495_79 (sequence is synthesized)
aaactaccttcctcacagaaaacgctttattagtgaaccttgggaccatgtcacgcaagagattcagcactgggaaagatataattgaaacaaaatagtgtaatcattttattaaaatgc

SEQ ID NO: 654336 - DNA, 120 bp, Artificial Sequence
  ENSG00000183495_80 (sequence is synthesized)
atcccacactgcaggacaaatggtccttatggagtgccgcgttctctgtactacgtggctcatggaaaaagtgacaacatggcttcctctaaatcatttcacctttcagtccccacccgc

SEQ ID NO: 654337 - DNA, 120 bp, Artificial Sequence
  ENSG00000183495_81 (sequence is synthesized)
acccgtcccctagagccatagtactgtgttctgaaagccatttagaatttctttgtgagcatgtagtgctttgcacgccacagaagccgtctgccgtgtgtgaggagcatacaatggact

SEQ ID NO: 654338 - DNA, 120 bp, Artificial Sequence
  ENSG00000183495_82 (sequence is synthesized)
ttctaaagataaggcgtgggcttccacagtgtctgccagagtttagttctttataccttactgaaaaatgcctcgtggtcttcgcagaggggaaggcctgtctaaagtcaatcatccgag

SEQ ID NO: 654339 - DNA, 120 bp, Artificial Sequence
  ENSG00000183495_83 (sequence is synthesized)
atgggttttccattccaaagaaaggcaatatggttccttccttccctcctaaaatatgacttaacttttaagagaaatgttctgacacccacctaaacacacaaggcacgttcctggcct

SEQ ID NO: 654340 - DNA, 120 bp, Artificial Sequence
  ENSG00000183495_84 (sequence is synthesized)
gtgttcaagggaaatgatcagtcattgcattgttattccaaagagcagccaacagtggcctcccccaggccctaccctgcaatgggattcgctttcatttaatggaaacttctgggactg

SEQ ID NO: 654341 - DNA, 120 bp, Artificial Sequence
  ENSG00000183495_85 (sequence is synthesized)
atgcccaactcagtgcactcaagacgcatctccagttttcgggggaagctggtatttgacatagtgtgttaaacagctcctgagaacctttgggacactctgccatggctggcgtgaggc

SEQ ID NO: 654342 - DNA, 120 bp, Artificial Sequence
  ENSG00000183495_86 (sequence is synthesized)
ccagaggaccacgcagaggcaatggtagtacagatgtcacagctgagggtacgatgaggcctgggctcagtgagccaggacgaatgtgacagacaccccttgctgccacagtcagccctt

SEQ ID NO: 654343 - DNA, 120 bp, Artificial Sequence
  ENSG00000183495_87 (sequence is synthesized)
tgacgaaggtgggctggtgattctggaagtattggctatagcggtgggcccagtcaactcttccttgtggacttacgacagcagattttctctaggataagcttgtgtggttctgccagt

SEQ ID NO: 654344 - DNA, 120 bp, Artificial Sequence
  ENSG00000183495_88 (sequence is synthesized)
gaagcagagaaccacctgtgctgttgtggaaggcgtgccgttgagggggaaaacgaagcccagtatttgctactgtttttcctttttttactatgacaggaaaataaatgcaattttagt

SEQ ID NO: 654345 - DNA, 120 bp, Artificial Sequence
  ENSG00000183495_89 (sequence is synthesized)
ggaattgattgacagtgtctccttactttgaagttttcaccaaagcaaaaaggtccatatccaatagtatcctttgtgctgtggcttgattttggcctattttacattatttggtccagg

SEQ ID NO: 654346 - DNA, 120 bp, Artificial Sequence
  ENSG00000183495_90 (sequence is synthesized)
aaattaggttatattaggttttttgtatactaaaaatcagttatggcacaataaagattttctgtttttaaattgtatttcatctgcttcctccccattctctcactttaagtgacattg

SEQ ID NO: 654347 - DNA, 120 bp, Artificial Sequence
  ENSG00000183495_91 (sequence is synthesized)
aggaaggtattctgtcccacaggtttctgtggacagcgatacagcaggagtcagtgaaatcaactggggagctcacttgagctcttgataagaaatgtggagaaaagtaaaaaccaagct

SEQ ID NO: 654348 - DNA, 120 bp, Artificial Sequence
  ENSG00000183495_92 (sequence is synthesized)
ttgaagaaacagaagaaattaatcttttagttagttgaacataccaaagcagaggactggaatctgtttgttctaaccaacccgttctccctggcttggcacgtgccgtgagagcgcagc

SEQ ID NO: 654349 - DNA, 120 bp, Artificial Sequence
  ENSG00000183495_93 (sequence is synthesized)
ttgccggagggagggccgctgtgtgcgcctcacatctggctcccagtggaaacttttactcctcctcatccgcagatgtgatagaactgaagtatctaggaattctgcctttgtcatttg

SEQ ID NO: 654350 - DNA, 120 bp, Artificial Sequence
  ENSG00000183495_94 (sequence is synthesized)
ttttaatttgtgtgccctgttcattttttttgtctttcccaaatcttggtagtctccttatagttgaagataaaatgttgagtgcacttattttagaatatcctagacataactgtctaa

SEQ ID NO: 654351 - DNA, 120 bp, Artificial Sequence
  ENSG00000183495_95 (sequence is synthesized)
gtaaaagcgctctattaatctaaaacactacaagagaatttaacaccatctctcaaatgcttttttggagagcttaatgggattctgaatatttgcaatgtggagtttccgccccgatct

SEQ ID NO: 654352 - DNA, 120 bp, Artificial Sequence
  ENSG00000183495_96 (sequence is synthesized)
cacgtcagtgagggtctcctgtctctcaagtgtgtttcctttggctgttccctaatacaaaacacggacatatttttactcgtagcactcaatttagtaacttctagatgctaccgttga

SEQ ID NO: 654353 - DNA, 120 bp, Artificial Sequence
  ENSG00000183495_97 (sequence is synthesized)
cctgagttaaattcatttagtcgtgtacgtaaaaactctccttttagtgtgttattttcttggccttcccttttaaaggttaaagtttctaacctaagaattaagtacgcgttcaggaag

SEQ ID NO: 654354 - DNA, 120 bp, Artificial Sequence
  ENSG00000183495_98 (sequence is synthesized)
ctgttgtctaggccttccccttgtgaatctgggttcattccaatacggcaagtaagagttggaaactttgagaacacagactataaaggcagcagcccgaacactgtcagactctaattg

SEQ ID NO: 654355 - DNA, 120 bp, Artificial Sequence
  ENSG00000183495_99 (sequence is synthesized)
gcgaccctgggaaacagttgccctgctattctttaaagaaagacgtttattctgatgataaaaacagttagccagactgtttttaaagcacctggcgggaagcagaaggttggatccaag

SEQ ID NO: 654356 - DNA, 120 bp, Artificial Sequence
  ENSG00000183495_100 (sequence is synthesized)
cccttgttcagatttggtgcctgataagacaggggtttctctttttgtgacctttattattattattttgttaactgttgtaaccagttagctgttgtgttttaagatagaaaggaacaa

SEQ ID NO: 654357 - DNA, 120 bp, Artificial Sequence
  ENSG00000183495_101 (sequence is synthesized)
gactaaaattgtaaatactttgtaaacatcagcatttgtacttgaatagtaggattttaaagggcattgatagcataccaaacaaaaggcaaaataaagtgacctttttatatatttttt

SEQ ID NO: 654358 - DNA, 120 bp, Artificial Sequence
  ENSG00000183495_102 (sequence is synthesized)
aatgagatgctgaatttttcatttgtgtgaagaaaaaaccaacaagtaatgttggagccagaggtgttcccctcacccactcttccgtggccatagaaggacctggaaggaacagaaatc

SEQ ID NO: 654359 - DNA, 120 bp, Artificial Sequence
  ENSG00000183495_103 (sequence is synthesized)
acattcaccaagtccaccaggcagccgcttcccaaagccgcacgtggaggaaagagctggcaccgccctgccccatgtggcctgccaccctcacagcacccgtcgtcaatgtcctggggg

SEQ ID NO: 654360 - DNA, 120 bp, Artificial Sequence
  ENSG00000183495_104 (sequence is synthesized)
ccacactggcaccagtgtccttccacacccagtctgtgtgcccaactggcaccagtgtccttccacacccagtctgtgtgcccaactggcaccagtgtccttccacacccagtctgtgtg

SEQ ID NO: 654361 - DNA, 120 bp, Artificial Sequence
  ENSG00000183495_105 (sequence is synthesized)
cccaactggcaccagtgtccttccacacccagtctgtgtgcccaagtaagggcagggacaccggctcacaggtgctcaccaccgaaaacgcctgtgagcagatggcctgcgagttgttgc

SEQ ID NO: 654362 - DNA, 120 bp, Artificial Sequence
  ENSG00000183495_106 (sequence is synthesized)
ttctctttttcttctgcttttagacttttcttcgtttcgttttaaatctgattacaaaaatcaacgtacacttttaattgaaaacgcacacattacgcaaagtaaagaagcatcccagaa

SEQ ID NO: 654363 - DNA, 120 bp, Artificial Sequence
  ENSG00000183495_107 (sequence is synthesized)
ttttccaaaagcagcatctttttatgttttaacacagctgttgcgcttgctcaggtgcgtgtcacgtgttacaggagtgagtgtgagacgggttcttttccccgagaacttagtacccct

SEQ ID NO: 654364 - DNA, 120 bp, Artificial Sequence
  ENSG00000183495_108 (sequence is synthesized)
tggacagaggacgggactcaccactcgtggaacattaacacagcagcagctcccagagcccatccaggcatcaccaagcttctcagggcttgaattgaggggggtggagagtgagcgagg

SEQ ID NO: 654365 - DNA, 120 bp, Artificial Sequence
  ENSG00000183495_109 (sequence is synthesized)
tgagatgcagcctgcgtggcttccctgtgctgctgagggaccctgcagggaccaaggcctgtgtggctggagcagagggcgctgtgcatgtaagccgtaggcatgggcaggtggcggtct

SEQ ID NO: 654366 - DNA, 120 bp, Artificial Sequence
  ENSG00000183495_110 (sequence is synthesized)
ctgaagctgctctcaggtgaccgctgtaggcagggagagcatttggagatttcagaagggactagcatcaggcgcaagtgctgtctgggaagactggctctcagcaggtgccagcgtccc

SEQ ID NO: 654367 - DNA, 120 bp, Artificial Sequence
  ENSG00000183495_111 (sequence is synthesized)
ggggcaggcagcgtcactgcaccgtgactagagctcagctaggggtactggtgacagctgccctgttggaggctcaccctgagctagactttgcccttcgttctcttgtgtctttcacct

SEQ ID NO: 654368 - DNA, 120 bp, Artificial Sequence
  ENSG00000183495_112 (sequence is synthesized)
ggcccagtgctcatggactgccccaggcagggataagggtcttactattaattccattttacaggttaagaaactgaggcatgtaggctaagttcccacccaaatcccacaaccaatcag

SEQ ID NO: 654369 - DNA, 120 bp, Artificial Sequence
  ENSG00000183495_113 (sequence is synthesized)
ctgcaactcaagctaggatttggggacccaggtgctcaggctaagctgtgtgggtgctggacccccactttgggtcttccctgggaggggctagccctccacagcagagtgagtagaagt

SEQ ID NO: 654370 - DNA, 120 bp, Artificial Sequence
  ENSG00000183495_114 (sequence is synthesized)
ggataaaaaactacagaagggtgcttggtttcattcatgttcacaaaaatgcaaattcactgagaagggtggtaacacctagtggtagccagggtaccgggttcttgttggacaggaatc

SEQ ID NO: 654371 - DNA, 120 bp, Artificial Sequence
  ENSG00000183495_115 (sequence is synthesized)
agtggcctctttttggagaggattttggtaattacgctatgaaaatgtgcacgcttatttaactaaacacccccttatgtcctgcagagataactgaacatttacaaagtgatgaatgta

SEQ ID NO: 654372 - DNA, 120 bp, Artificial Sequence
  ENSG00000183495_116 (sequence is synthesized)
caagcttgtttgcttcatgagtgttagaggaaattaaatgtccattactaagaatttcattaagtaaatgatgtatcatccaaacaatggaatattaagcaattttgaaagtggtttttt

SEQ ID NO: 654373 - DNA, 120 bp, Artificial Sequence
  ENSG00000183495_117 (sequence is synthesized)
gtaaagagaagagaaacagatttcaaaatatttataattcatgtcatttttgcacactttcacggtgagccacacagatatgaacagtggctgaaggctaaataccagttttaatattca

SEQ ID NO: 654374 - DNA, 120 bp, Artificial Sequence
  ENSG00000183495_118 (sequence is synthesized)
gatatgagtagtttgaggagtgtgggtaatttttactttgtattttcttatgtaatcttagtctctatacatacaaaaatggaagtacttccatttaccattttttaaatggtaacttaa

SEQ ID NO: 654375 - DNA, 120 bp, Artificial Sequence
  ENSG00000183495_119 (sequence is synthesized)
gagaaaatgcgggacgggaggctgaggcagtcattttgaagtgagggacaggctgatgtcgagtgctcgctgaaggaacaggaagtgaaaagccttctgtgggaaaaacgggacaggatg

SEQ ID NO: 654376 - DNA, 120 bp, Artificial Sequence
  ENSG00000183495_120 (sequence is synthesized)
cggttactggttcaggagatggagggaagtgaaggtgatgtcccgtgagatcactgacatctgaacgcagcagcatgtgtgatgagcctgcaggtcttgcgggagcttcagaagcgcggg

SEQ ID NO: 654377 - DNA, 120 bp, Artificial Sequence
  ENSG00000183495_121 (sequence is synthesized)
ctgacctgtgacttgacatttccctgcggcgtgcagatctctcagttttcctttcctgttgggccactttaaactttgttgatctttgtaaattttctcatggcatgacctcttgtggag

SEQ ID NO: 654378 - DNA, 120 bp, Artificial Sequence
  ENSG00000183495_122 (sequence is synthesized)
cctcacacccacccacttgagcgtgccatcacgtgttctagcacaaacgtgccttggcgctttccaggcgcaaggctgggtcctcaattgaactgttaacattctgaaatttccgtctta

SEQ ID NO: 654379 - DNA, 120 bp, Artificial Sequence
  ENSG00000183495_123 (sequence is synthesized)
atttaagtgtaatttgtgaacccagaaacattttaatgtagttaagggatggcttacttgtctccatagagtttcatagtttgttattttctgtagaggtgagtcagttggaacagagct

SEQ ID NO: 654380 - DNA, 120 bp, Artificial Sequence
  ENSG00000183495_124 (sequence is synthesized)
atcatgtaatttcacatatttcgcagaataatcttgggaaatattattttcatccgttttctgtaagtaacaggacccagcaagagaccagggtccgtgagggccttgtgcagggagggc

SEQ ID NO: 654381 - DNA, 120 bp, Artificial Sequence
  ENSG00000183495_125 (sequence is synthesized)
ccttgaaatcagggcccccagcagctgcccacgctggagcctctcttgtgttctgggtgcacgccatgacggtgctgataggacacacaggtggcccagagcctcttactacgtcaagac

SEQ ID NO: 654382 - DNA, 120 bp, Artificial Sequence
  ENSG00000183495_126 (sequence is synthesized)
agcgggagatgcatgcagtagcaagtgcacagaaagtgggcactgggtggaaagtgttgctttataaatagccagatctcaatcatgactaagaagaatgtagaaaaatgataaaattac

SEQ ID NO: 654383 - DNA, 120 bp, Artificial Sequence
  ENSG00000183495_127 (sequence is synthesized)
cagcctcaaaaccttggtgcgtcaccgggttccccacttcagctggctgccctagctgcactgtacagctcattactggaacgtcgtccaggcctgtcatatgcagagcccttgggactc

SEQ ID NO: 654384 - DNA, 120 bp, Artificial Sequence
  ENSG00000183495_128 (sequence is synthesized)
acaagacgctcaaatacttaccatcctcagtctgattctttcatataaacttgcagtcgtttttgtgaaaagaaaaaatgtgtctgaaatatgagaccaaaaataagcttaaatgatgag

SEQ ID NO: 654385 - DNA, 120 bp, Artificial Sequence
  ENSG00000183495_129 (sequence is synthesized)
tgatggcaaattggggaggcagtcagttgactcaccatgcagtggaacgacttgctctctcactgctgcaggtgggcacactacgagaattgctcttctgtgtcacctggtcattgtgtt

SEQ ID NO: 654386 - DNA, 120 bp, Artificial Sequence
  ENSG00000183495_130 (sequence is synthesized)
cagttctttcagatcaggaagcagaattaatggaaaaaaagaaaactgggagtgcttctccaaggccgaacaagccacttctggcttctcctggtctgggagtgactatgtcagtgacct

SEQ ID NO: 654387 - DNA, 120 bp, Artificial Sequence
  ENSG00000183495_131 (sequence is synthesized)
tgtgctcctggagtttttctttcgagtactgatttgtctttgtgtactcctccctcattgaacatcatgggtgaccattcgttcagtttgaatacagctgggagtgagtcatagttgatg

SEQ ID NO: 654388 - DNA, 120 bp, Artificial Sequence
  ENSG00000183495_132 (sequence is synthesized)
tccatagcaagggccttctggtgcaggtgacctccacaggttgcaaggtgggccttaggttggctgtgcgatcttcgctctattgtcattgtcctgaaggctccttcaccctgagtctgg

SEQ ID NO: 654389 - DNA, 120 bp, Artificial Sequence
  ENSG00000183495_133 (sequence is synthesized)
cccccgtcctggtggcacagtggctatagcagttctagggtccacgagacagtgcacctttgtcccaaagtttccagctgaagacacactagaaagagaatggcttatctctgacctggt

SEQ ID NO: 654390 - DNA, 120 bp, Artificial Sequence
  ENSG00000183495_134 (sequence is synthesized)
gcctgcggcctagggaatccacccccattgatccatcagccctggactgtctgaattagtccccgaggtggtggttattggccaggactggttaggatctgcctcgttgggcccctgccc

SEQ ID NO: 654391 - DNA, 120 bp, Artificial Sequence
  ENSG00000183495_135 (sequence is synthesized)
gtgtgccaacacccacatccccatgtgactgggttgagccctgctgtttcctgggacttggactgtcagaagtctgccccatctttcaggagcccccatgctgggtgaaggtgtgtggct

SEQ ID NO: 654392 - DNA, 120 bp, Artificial Sequence
  ENSG00000183495_136 (sequence is synthesized)
tatttctctattcgtgacacatttgttactgtttggaaggatttcattccagtgtcatctaagttcagtgagttcagcaaatcgttgtgcacttagcgtgttcaggcatcagctggacgt

SEQ ID NO: 654393 - DNA, 120 bp, Artificial Sequence
  ENSG00000183495_137 (sequence is synthesized)
ggcagtgcgcagaacctgcaggagagaggtgcttttcctgccgtgggctagggtatgcataggacggcccctgccctgtctctgtgttacagggattgtccttgctggccctcagtgggg

SEQ ID NO: 654394 - DNA, 120 bp, Artificial Sequence
  ENSG00000183495_138 (sequence is synthesized)
aaagacgctgacagatgtgatgagtgtgccagggccatgtggccaaccacaaggggctttcttcctcacaccccacctctcaggcactgattttgttcgccatatcttaagaacacacca

SEQ ID NO: 654395 - DNA, 120 bp, Artificial Sequence
  ENSG00000183495_139 (sequence is synthesized)
agctctgcctccagggacttctgctcgtggtggctcatcggtggcacccagcccaagtcccgggcttcggatggctggtgtgggccctcagaccccacgttctgttggcactgctgtctg

SEQ ID NO: 654396 - DNA, 120 bp, Artificial Sequence
  ENSG00000183495_140 (sequence is synthesized)
gctagagctagaaggcgggctctgatgggaagccacatggctgtgtggggagctgccctgttccctgagcgctgtgctggacccctgcaggcacctggtgcttatcctcaagacggagga

SEQ ID NO: 654397 - DNA, 120 bp, Artificial Sequence
  ENSG00000183495_141 (sequence is synthesized)
tgttgtcttgaggaaactgaggctcagagaaaaggacttgcccagatcacagggccagtaaaaggcagctggctgactccagcaggcccagggttctttgtgccacaccacctggacact

SEQ ID NO: 654398 - DNA, 120 bp, Artificial Sequence
  ENSG00000183495_142 (sequence is synthesized)
ggctgtgctgtgagccgctgctacctcctgcagaagaccagtgcccaggggccctatgggtgaagccctgctggtgtgcagcaatggcatgctctgtggggagctggaagcagagctgtc

SEQ ID NO: 654399 - DNA, 120 bp, Artificial Sequence
  ENSG00000183495_143 (sequence is synthesized)
ctttggaacccagagggagagggagtgagcactgaggggacacaaagccgggaggcgcagggtgtctgggtagtgccaccagctccgccgtggccgggttccaaagaccagcctgcatcc

SEQ ID NO: 654400 - DNA, 120 bp, Artificial Sequence
  ENSG00000183495_144 (sequence is synthesized)
ccacttggcacgaccgctgcagggaagtgcatgtcctttgggtcgggatggtcacctgcatttatttacctctggaagaaggagacagtgctgggacttacctcctgggcctggtcagca

SEQ ID NO: 654401 - DNA, 120 bp, Artificial Sequence
  ENSG00000183495_145 (sequence is synthesized)
gtccctgggtgcgtcatggtggtccatgggcagacgtggccatgctgatgcacaggtgggtgtggtccctcaggcttgagctgtgcttgagggagcagtggagggctgcagctgaagtgc

SEQ ID NO: 654402 - DNA, 120 bp, Artificial Sequence
  ENSG00000183495_146 (sequence is synthesized)
tgggctgtgtgttcctacgattggacaaaacatccttagatgttaaaaacccctatttacccataagcatggctgataaagcagatacgtaaacgtcagatgtacacaatatgatctgca

SEQ ID NO: 654403 - DNA, 120 bp, Artificial Sequence
  ENSG00000183495_147 (sequence is synthesized)
aaaatggtgcataccagtttgttaccccgtgtactaaatattttctttatgtctgccaagtttttacattggatttgagagattgtgatcgctttcagtcacctaagtagcagccccgtg

SEQ ID NO: 654404 - DNA, 120 bp, Artificial Sequence
  ENSG00000183495_148 (sequence is synthesized)
caggtgtgacaagggtgtcagggtgccccaccagcccgactattcagggagcagtgtcccgggtggggtgggctgcaggcaacggccaggcctcctggaggagaagctggcggccatgcc

SEQ ID NO: 654405 - DNA, 120 bp, Artificial Sequence
  ENSG00000183495_149 (sequence is synthesized)
gcatgggcagaggtaggcctggaggcagcggcagggatgggacagggggcaggagatgtgggtatgcacagggttggtctgggaggtaggctggaaaggggctgggttctgccatagggc

SEQ ID NO: 654406 - DNA, 120 bp, Artificial Sequence
  ENSG00000183495_150 (sequence is synthesized)
ccagagcgggcaggcgtcccgggagtcttgagcgcggcatggtctctgcggccctaatttcgcagtctctccccagatcaccgcacagcagatcaccacccctggcgcgcagcagaaggt

SEQ ID NO: 654407 - DNA, 120 bp, Artificial Sequence
  ENSG00000183496_0 (sequence is synthesized)
gcttttcgctcggcattgcggccagccagccgggcactcggggggcacgcgcggccaccgctagagctctgcccccaccccacccgccagcaggtctggggtggggacccaggtgggggc

SEQ ID NO: 654408 - DNA, 120 bp, Artificial Sequence
  ENSG00000183496_1 (sequence is synthesized)
tcctgcagccactgcccggtgcggaccgcacggagcgacccactcctcccagcaccgaggaagaagcaacggagccctcagcaggcgaccggcctccccgcccctgaccacccgcttccc

SEQ ID NO: 654409 - DNA, 120 bp, Artificial Sequence
  ENSG00000183496_2 (sequence is synthesized)
ggctgcctttgtggccgcagcttctcgccgccgagccgagggccggcgggggcgcggcgcgcacggccgagcgatgcccagctcgctgttcgcagacctggagcgcaacggcagcggcgg

SEQ ID NO: 654410 - DNA, 120 bp, Artificial Sequence
  ENSG00000183496_3 (sequence is synthesized)
cggcggcggcggcagcagcggagggggagagaccctggatgaccaaagagccctgcagctcgcgctcgaccagctctccctgctggggctggacagtgacgagggcgcctctctgtacga

SEQ ID NO: 654411 - DNA, 120 bp, Artificial Sequence
  ENSG00000183496_4 (sequence is synthesized)
cagcgagccgcgcaagaagagcgtgaacatgaccgagtgcgtgccagtacccagttctgagcatgtcgccgagatcgtggggcggcaaggttgtaaaatcaaagcgctgcgggcgaagac

SEQ ID NO: 654412 - DNA, 120 bp, Artificial Sequence
  ENSG00000183496_5 (sequence is synthesized)
caatacttacatcaagaccccagttcgcggggaggagcctgtctttgttgtgacgggcaggaaggaggatgtggccatggctcggagggagatcatctctgctgccgagcacttctccat

SEQ ID NO: 654413 - DNA, 120 bp, Artificial Sequence
  ENSG00000183496_6 (sequence is synthesized)
gatccgcgcctcccggaataagaacacggcactcaacggcgcggtgcctgggccgcccaacctgcccgggcagaccaccatccaagtgcgggtaccctaccgcgtggtggggctcgtggt

SEQ ID NO: 654414 - DNA, 120 bp, Artificial Sequence
  ENSG00000183496_7 (sequence is synthesized)
ggggcccaaaggcgccacaatcaagcgcatccagcagcagacgcacacgtacatcgtgacgcccagccgggataaggagccggtgttcgaggtgaccggcatgccagagaacgtggatcg

SEQ ID NO: 654415 - DNA, 120 bp, Artificial Sequence
  ENSG00000183496_8 (sequence is synthesized)
cgctcgagaggagattgaggcgcacattgctctgcgtaccggcggcatcattgagctcacagacgagaacgacttccacgccaacggcaccgatgtgggcttcgatctgcatcatgggtc

SEQ ID NO: 654416 - DNA, 120 bp, Artificial Sequence
  ENSG00000183496_9 (sequence is synthesized)
cggcgggtccggcccaggcagcctctggagcaagcccacccccagcatcacgcccacccccggccgcaagcctttctctagctaccgcaacgacagctccagctcgcttggcagtgcttc

SEQ ID NO: 654417 - DNA, 120 bp, Artificial Sequence
  ENSG00000183496_10 (sequence is synthesized)
cacagactcttatttcggcggcgggaccagcagcagcgcagcggctacccagcgcctggcggactacagcccccctagccccgccctgagctttgcgcacaacggaaacaataacaataa

SEQ ID NO: 654418 - DNA, 120 bp, Artificial Sequence
  ENSG00000183496_11 (sequence is synthesized)
cggcaatgggtacacctacacagcggggggagaagcctcagtgccatcccccgacggctgccccgagctgcagcccacttttgacccggctcccgctcccccacctggggcaccacttat

SEQ ID NO: 654419 - DNA, 120 bp, Artificial Sequence
  ENSG00000183496_12 (sequence is synthesized)
ctgggcccagttcgagcggtccccgggaggcggacctgcagctccggtatcttcttcctgctcttcttctgcatcttcgtctgcttcttcctcctccgtggtcttccccgggggtggcgc

SEQ ID NO: 654420 - DNA, 120 bp, Artificial Sequence
  ENSG00000183496_13 (sequence is synthesized)
cagtgcgccctccaacgccaacctggggctattggtgcaccgccggctgcaccctggcaccagctgcccgcgcctgtctccacccttgcacatggccccgggggcgggagagcaccacct

SEQ ID NO: 654421 - DNA, 120 bp, Artificial Sequence
  ENSG00000183496_14 (sequence is synthesized)
cgccgcttatgccaacgggctgggggcacagctgcctggcttgcagccgtcggacacgtcgggctcctcctcttcgtccagctcctcctccagctcttcatcctcttcctccgggcttcg

SEQ ID NO: 654422 - DNA, 120 bp, Artificial Sequence
  ENSG00000183496_15 (sequence is synthesized)
gcgtaaaggcagccgcgactgctccgtgtgcttcgagagcgaagtgattgccgcgctggtgccctgtggccacaacctcttctgcatggagtgcgccaatcgcatctgtgagaagagcga

SEQ ID NO: 654423 - DNA, 120 bp, Artificial Sequence
  ENSG00000183496_16 (sequence is synthesized)
gcccgagtgcccggtctgccacaccgcggtcactcaggccatccgcatcttttcttaaaggcagcgggcgctgctagtgcgcaccgtgctgggggaagggggaacccctccccaccctct

SEQ ID NO: 654424 - DNA, 120 bp, Artificial Sequence
  ENSG00000183496_17 (sequence is synthesized)
ttccccagcgctcgcctgcctccctgggtgccccccctctcccttctccttcccggccccaccaacactctgagatccgagaggagcttggaaagctgtagtatccgctcatttttaaaa

SEQ ID NO: 654425 - DNA, 120 bp, Artificial Sequence
  ENSG00000183496_18 (sequence is synthesized)
tttaatttttaagtaaaggaatttgccaggatatctgcatcaagagtactgtagcctgggaaacctgaacacctgaaatgcatgctctataaataataggaacggcgacattctagtaat

SEQ ID NO: 654426 - DNA, 120 bp, Artificial Sequence
  ENSG00000183496_19 (sequence is synthesized)
gatagtttttacactgtacttaataggaagcttccaaaagaagaaaaccccacaagttttccattttcttaaagtaggaaaaaatgaacagtaataattatgatgaagatgatagtagtg

SEQ ID NO: 654427 - DNA, 120 bp, Artificial Sequence
  ENSG00000183496_20 (sequence is synthesized)
ctatgggatgtgtggactgtttagtgtgttcccctttgtgggtgggttcctatgatacttattatagaacacagtggatcctttttgaatgttcgtggaagggccaggagttcctgtgaa

SEQ ID NO: 654428 - DNA, 120 bp, Artificial Sequence
  ENSG00000183496_21 (sequence is synthesized)
accaggatactgcagctttattaaagttaaagaaactgtaacatatctcttatatattaaaaacgtttaaaagttttaaagagaaattgcattaatacagattgaagtattttattcttt

SEQ ID NO: 654429 - DNA, 120 bp, Artificial Sequence
  ENSG00000183496_22 (sequence is synthesized)
tttgacttgaaaaattatatttcatattgcaaagatgtttacaagtattttaatttaagttcagtgaacttttttgtagctgggttaaatctttttattttagtatggccttatggcaaa

SEQ ID NO: 654430 - DNA, 120 bp, Artificial Sequence
  ENSG00000183496_23 (sequence is synthesized)
gaacactgtattattttaataatcacacaattgtgacggaattacaaccataaaatgtgtaatgttttgaacagtattctgttgggatggagattttataggttcagacaaatcttctag

SEQ ID NO: 654431 - DNA, 120 bp, Artificial Sequence
  ENSG00000183496_24 (sequence is synthesized)
atctgcttcacccagcatattttctattcagtgatataaagcatattttattctatattattacaaaaacggaaatgtataaacatgtcaaaaagaactgttgatgctttctaacatttg

SEQ ID NO: 654432 - DNA, 120 bp, Artificial Sequence
  ENSG00000183496_25 (sequence is synthesized)
tataaatagaattcagtgcaagttacaaaaattctgttgcaccactctagttttagtatttctattttaatacatttgtttaccacttgtttatgtatatgtaggtgatgttacttgagc

SEQ ID NO: 654433 - DNA, 120 bp, Artificial Sequence
  ENSG00000183496_26 (sequence is synthesized)
ttaaatgtactttactgagcaaagtttaaaaaacaaagtatattttattttatgataaagggcctttaacctcatggtcaaatactaatattatatttgctgagacaagatttgaaattg

SEQ ID NO: 654434 - DNA, 120 bp, Artificial Sequence
  ENSG00000183496_27 (sequence is synthesized)
tgagacaagatttgaaattgtatcaagagttttatttttctgacatttaaagttctacataataaaggtaaaacttaagtaatggtgctacttcattttttaagtatttctatataaata

SEQ ID NO: 654435 - DNA, 120 bp, Artificial Sequence
  ENSG00000183496_28 (sequence is synthesized)
gccactgcctcgaggggaaggcgtgttcagtatcgggatccgcggcgtggggtgccttggggagagaggaagagccgcgcgatgggccggcgccccagacaaagaaagtgcaggcaggct

SEQ ID NO: 654436 - DNA, 120 bp, Artificial Sequence
  ENSG00000183496_29 (sequence is synthesized)
gtctcccggagccgcgccgctgccctggcgggatgcactttcttctgctaaaatcactgccttctcccctaacgccccccaaccagcccacctccagaaagacaatttaaatgtaagatg

SEQ ID NO: 654437 - DNA, 120 bp, Artificial Sequence
  ENSG00000183496_30 (sequence is synthesized)
cttgggggagggggcctttgatcagtcctttgggaggaggaaggaggaggagtgagcataggatgggaggaggattctggatttctgcaaagcggaatggagcccagaggaggaacaatg

SEQ ID NO: 654438 - DNA, 120 bp, Artificial Sequence
  ENSG00000183496_31 (sequence is synthesized)
ggtcccgggactcacaccccaccccctacccccagtcgaccagcgctgaggcatcgcgacttcagctgccttccccgagccccttccccgtgtcttcagagctgacggcgcgcccagctg

SEQ ID NO: 654439 - DNA, 120 bp, Artificial Sequence
  ENSG00000183496_32 (sequence is synthesized)
gatcccagcggcatctccccagatgacttttctgggattctcgggtttggttcgggacgactgcagtcactgggggagggccaggcagccaatgggctgttcctcgagcgcctcgcgggt

SEQ ID NO: 654440 - DNA, 120 bp, Artificial Sequence
  ENSG00000183496_33 (sequence is synthesized)
gggatccgctgcccagcccgtggcgcggcccgaggtcagtgagggagacgccccctttccgcccatctcttgtcctgccgtctcgctgtcctggacgcgggctgtccccggtccccgcgg

SEQ ID NO: 654441 - DNA, 120 bp, Artificial Sequence
  ENSG00000183508_0 (sequence is synthesized)
ggctcactcggtgccgctgcctaggggctgtagaggtcgcgccgctcctgctggggcctgcccacgccaaggacctgcctctgtcgcctcctcttctattgcccagtttccccagccaga

SEQ ID NO: 654442 - DNA, 120 bp, Artificial Sequence
  ENSG00000183508_1 (sequence is synthesized)
acatcccctgaagatggcagaggagagcagctgtaccagggattgcatgtccttcagcgtgctcaactgggatcaggttagccggctgcatgaggtcctcactgaagttgtacctatcca

SEQ ID NO: 654443 - DNA, 120 bp, Artificial Sequence
  ENSG00000183508_2 (sequence is synthesized)
cggacgaggcaactttccaaccttggagataactctgaaggacatcgtccagaccgtccgcagtcggctggaggaggcaggcatcaaagtgcacgacgtccggctgaatggctccgcagc

SEQ ID NO: 654444 - DNA, 120 bp, Artificial Sequence
  ENSG00000183508_3 (sequence is synthesized)
tggccacgttttggtcaaagacaatggcttgggctgcaaagacctggacctaatcttccatgtggctcttccaacagaggcagaatttcagctggttagagatgtggttctgtgttccct

SEQ ID NO: 654445 - DNA, 120 bp, Artificial Sequence
  ENSG00000183508_4 (sequence is synthesized)
tctgaacttcctgccagagggtgtgaacaagctcaaaatcagtccagtcactctgaaggaggcatatgtgcagaagctagtgaaggtttgcacggacactgaccgctggagcctgatctc

SEQ ID NO: 654446 - DNA, 120 bp, Artificial Sequence
  ENSG00000183508_5 (sequence is synthesized)
cctctccaacaagaacgggaagaacgtggagctgaagtttgtcgactccattcggcgtcagtttgagttcagtgtggactctttccaaatcatcctggattctttgcttttcttctatga

SEQ ID NO: 654447 - DNA, 120 bp, Artificial Sequence
  ENSG00000183508_6 (sequence is synthesized)
ctgttccaataatcccatctctgagcacttccaccccaccgtgattggggagagcatgtacggggactttgaggaagcttttgaccatctgcagaacagactgatcgccaccaagaaccc

SEQ ID NO: 654448 - DNA, 120 bp, Artificial Sequence
  ENSG00000183508_7 (sequence is synthesized)
agaagaaatcagaggcgggggacttctcaagtacagcaaccttcttgtgcgggacttcaggcccacagaccaggaagaaatcaaaactctagagcgctacatgtgctccaggttcttcat

SEQ ID NO: 654449 - DNA, 120 bp, Artificial Sequence
  ENSG00000183508_8 (sequence is synthesized)
cgacttcccggacatccttgaacagcagaggaagttggagacttaccttcaaaaccacttcgctgaagaagagagaagcaagtacgactacctcatgatccttcgcagggtggtgaacga

SEQ ID NO: 654450 - DNA, 120 bp, Artificial Sequence
  ENSG00000183508_9 (sequence is synthesized)
gagcaccgtgtgtctcatggggcatgaacgcaggcagactctgaacctcatctccctcctggccttgcgtgtgctggcggaacaaaacatcatccccagtgccaccaacgtcacctgtta

SEQ ID NO: 654451 - DNA, 120 bp, Artificial Sequence
  ENSG00000183508_10 (sequence is synthesized)
ctaccagccggccccttacgtcagtgatggcaacttcagcaactactacgttgcccatcctccagtcacctacagccagccttaccctacctggctgccctgtaactaaccttgagacct

SEQ ID NO: 654452 - DNA, 120 bp, Artificial Sequence
  ENSG00000183508_11 (sequence is synthesized)
gagggtttccacagtgggaaccccaatagggctagggctctcaggtaggggagcctccttctagatgtaggcatttggcttttaaaggggaactcagctctgattctgcttttttttttt

SEQ ID NO: 654453 - DNA, 120 bp, Artificial Sequence
  ENSG00000183508_12 (sequence is synthesized)
tttttcctttgtgtacccattggaatgggtctacagtgtatcatgagccaaccctcaaaggacccgtattacagtgccacgttggaaaacgctacaggaagcatgacctatccacatctt

SEQ ID NO: 654454 - DNA, 120 bp, Artificial Sequence
  ENSG00000183508_13 (sequence is synthesized)
tccaagatagacactaacatgtcatgtcccaaacattagcacgtgggggttgagctctgtgcagtaatcgagattgggagaatttgggcagcgcgtgagaagtgctaagctacttgtttt

SEQ ID NO: 654455 - DNA, 120 bp, Artificial Sequence
  ENSG00000183508_14 (sequence is synthesized)
ctcacttgagcccgggtaggctgtgttggccctcacttgggattctcagcagttacatgaaagttgtgctgataatctcttctcttgtaccaattttagtcaggcagaaaatggtaaaca

SEQ ID NO: 654456 - DNA, 120 bp, Artificial Sequence
  ENSG00000183508_15 (sequence is synthesized)
tgagggtgctcttgtgacttaatttttgttcaagggactaaattgcttatgtttattccctgtcagcggagtggagaatgtcattcatcaataaaccaaagccaatagctggagaattga

SEQ ID NO: 654457 - DNA, 120 bp, Artificial Sequence
  ENSG00000183508_16 (sequence is synthesized)
gatctggttgaaagtggtttatggtttacatgctgtactatcctgaggaattgcgagatattgctgaggggaaaaaaaaatgaccttttcttgaaatgtaacttgaaaacaaaataaaat

SEQ ID NO: 654458 - DNA, 120 bp, Artificial Sequence
  ENSG00000183508_17 (sequence is synthesized)
gtggaacataatgtttaattagaattgtggtggtggtagtggaaggggataattgtaaataggaaacatgaatgttcatttttttctttaaagaattcttattaaatggctccctgcctt

SEQ ID NO: 654459 - DNA, 120 bp, Artificial Sequence
  ENSG00000183508_18 (sequence is synthesized)
ttttttcttttttcctcatcagctctttcatggctgaattttgttttattcttcctaagactgaggattgtgctgagtccagagtcattgtggtaactgacatgagggtcttcccatgtt

SEQ ID NO: 654460 - DNA, 120 bp, Artificial Sequence
  ENSG00000183508_19 (sequence is synthesized)
ctgacatgagggtcttcccatgttttaactggaaacccactttggtcacattccaagtatgacacagctgttcttctggagtactttagctattttttgtttttgttcttttcgtttttt

SEQ ID NO: 654461 - DNA, 120 bp, Artificial Sequence
  ENSG00000183508_20 (sequence is synthesized)
ttctccaggtgtgtttgacagcaactcaattcaggaatttcggtagaactgagtgacctgtggaactgctttagaatctaacctgctgtcttcgtgctctgtgtgaaggggaagctgggg

SEQ ID NO: 654462 - DNA, 120 bp, Artificial Sequence
  ENSG00000183508_21 (sequence is synthesized)
ggttagcatgaagtctggccttgtgtgcattggagcttccaaggcactttgaaatcattccagtatatttgggaagaattgagtgaatgagaatgctcttccttattctggtagatttga

SEQ ID NO: 654463 - DNA, 120 bp, Artificial Sequence
  ENSG00000183508_22 (sequence is synthesized)
cttgtttataattctgcactttagaagaaaaacagtgttaatctgtagttgaaagaaagcttagtagatgagagagttctaggctactgtggctttttccagtagatttagatgagatta

SEQ ID NO: 654464 - DNA, 120 bp, Artificial Sequence
  ENSG00000183508_23 (sequence is synthesized)
ttttgtgggatcccttagaaagcatcacttcagggcagagacactcaatattgccagccagcttgggttctaaagtgatttaatcaaattcatgctcctgatcttttttttcccccttcc

SEQ ID NO: 654465 - DNA, 120 bp, Artificial Sequence
  ENSG00000183508_24 (sequence is synthesized)
tttggctatgaaaacccaaagcccggagtgattgttttctccttgctttaagcagtgaagttatcctaatgcaaaagagcttagtagaaaatgagtggtttacctttttttctaaaagta

SEQ ID NO: 654466 - DNA, 120 bp, Artificial Sequence
  ENSG00000183508_25 (sequence is synthesized)
tattttcaagtttattctggaatgtgatgtcttggtcctcttaaaagcagatcagccatgactgaaactcaaggcttagctggtatctatgttgtgctacattaggtgactagaagccac

SEQ ID NO: 654467 - DNA, 120 bp, Artificial Sequence
  ENSG00000183508_26 (sequence is synthesized)
ttcttagtgtaatcagctcctgtttccctgtgagccttagttatattttaattcagtggctttgagtcaaggccggttctaattgaggggacccagtgtgcttcagtgttaagagtgggg

SEQ ID NO: 654468 - DNA, 120 bp, Artificial Sequence
  ENSG00000183508_27 (sequence is synthesized)
caatgaagagtgaaccccaatgaagagtgatcccaactttggaaactatctggtcattcatgaccttaaaaagctgccatggtggtcaaatggcatgtgtttgcacaaaaatgaccgatg

SEQ ID NO: 654469 - DNA, 120 bp, Artificial Sequence
  ENSG00000183508_28 (sequence is synthesized)
tgtttaaccaaagctttgaaatgtgatgaagccaccaacataagcacttgcctaacagaaatcagtatttcttctacttagaaggcttggggcccagggtaatgaggcaccagatgaaga

SEQ ID NO: 654470 - DNA, 120 bp, Artificial Sequence
  ENSG00000183508_29 (sequence is synthesized)
taagatctgcatcaaggaattaaatttccagtttgtccttggggttctttctgcttatgttttttcccccccatctggtaatagtcctcttctgagaatgaaaggaggcacagaagttgc

SEQ ID NO: 654471 - DNA, 120 bp, Artificial Sequence
  ENSG00000183508_30 (sequence is synthesized)
gagaaagacccagtccccagtctttgccaccattgcaccatggttgtctcggagtcccttcacctgacctttttagtcagctcagatctttttgtagtttgagaatagacctattcaaga

SEQ ID NO: 654472 - DNA, 120 bp, Artificial Sequence
  ENSG00000183508_31 (sequence is synthesized)
gctatcagggttaaaagctgcactgaccaaagctgtacttttaaaacacaacccctgggctagtgatgtctctacttgctctatgagccttttgccagcctcagaataggcgaggtaacc

SEQ ID NO: 654473 - DNA, 120 bp, Artificial Sequence
  ENSG00000183508_32 (sequence is synthesized)
ttgaatttcagggccctggaaactctagctgaaacctgcctttcctaatgctcacacaagcaccaggtaccctgagcttatactgagtccagtggttcctattttatgtgtgtgtgtatg

SEQ ID NO: 654474 - DNA, 120 bp, Artificial Sequence
  ENSG00000183508_33 (sequence is synthesized)
tgtgtgtgttgagtaacatgaaacttggcagtagcagagagcactgaagttcacatgcaagttctaatctaaagttaagcagtctcttatttgtttcgggactctgatttgactcttttt

SEQ ID NO: 654475 - DNA, 120 bp, Artificial Sequence
  ENSG00000183508_34 (sequence is synthesized)
ctgatgctttcggcatgtctgcagcctgttctcctagcctgctgcttggagtcaggttgagcatcagtgagatgaagacagtaccttttcctctcacattggcagaatagcacgcactag

SEQ ID NO: 654476 - DNA, 120 bp, Artificial Sequence
  ENSG00000183508_35 (sequence is synthesized)
atgcctgaccttgagctctagtctcccctttaaatcttaccttggcagtaacacattattcctcattcaataatttcaatgctgaaactgaactctattactaatgccttccaatcagag

SEQ ID NO: 654477 - DNA, 120 bp, Artificial Sequence
  ENSG00000183508_36 (sequence is synthesized)
ttcctgatggggatgcctgtgggatggcccacacctgggggacctggcagatggggtgagttgggtaaggaagatgatgcttagttcctgatagatgctacagatgtagtttggcatttc

SEQ ID NO: 654478 - DNA, 120 bp, Artificial Sequence
  ENSG00000183508_37 (sequence is synthesized)
agtttttgtccagtttgattttcactggggtttgagtcacagcaagctgtgtatgaacttgtgttttgtggtgacacattaataatcaaattgctaaaaccctgaatctgcttattcttc

SEQ ID NO: 654479 - DNA, 120 bp, Artificial Sequence
  ENSG00000183508_38 (sequence is synthesized)
agcttcacctctgcactaaccccttacccttatggtacgtcaggattttaactagtactgctttgttgactttgggaaatggtgccactcaaaagcaacttcctaacttgaggaataact

SEQ ID NO: 654480 - DNA, 120 bp, Artificial Sequence
  ENSG00000183508_39 (sequence is synthesized)
cctttgtagtttactttctggtactggttggtgccttgtattgggatacagctatattcttagctcaaatgtcctctttttgagagcaaagtagttatccaatggtgagacgagaccctg

SEQ ID NO: 654481 - DNA, 120 bp, Artificial Sequence
  ENSG00000183508_40 (sequence is synthesized)
acgctcatagaggccattccttcctgggtgtcggaccagggctctgtgtcagggaaaaccttctgggtggactttgtaagaatccagtttccaaggttagattcacatccttaatcttgc

SEQ ID NO: 654482 - DNA, 120 bp, Artificial Sequence
  ENSG00000183508_41 (sequence is synthesized)
agagactagaatttcacagctcgctttggaacatattccaattcaaccagttaaaatcagaggaccaagtcgtgggggaggggggcggtgttgaggagaggtatttttaaagatctggca

SEQ ID NO: 654483 - DNA, 120 bp, Artificial Sequence
  ENSG00000183508_42 (sequence is synthesized)
gcggtgttgaggagaggtatttttaaagatctggcaacttttcaggattatttgtggagaactctaaggttaagatcaggaaataaaagactgtgtgtgtgtgtgtgtgtgcgtgtgtgt

SEQ ID NO: 654484 - DNA, 120 bp, Artificial Sequence
  ENSG00000183508_43 (sequence is synthesized)
aaaaaataattgaagtgtaagctaaataaaatgcttggagttttgcctgggctagtgagagttggtgcaaattcttgtgtgtgtttgcataggaaggtgagatgaccatctactaaagag

SEQ ID NO: 654485 - DNA, 120 bp, Artificial Sequence
  ENSG00000183508_44 (sequence is synthesized)
gaagtagctaaatacagatctgtgggtgtttttaaaaaaactcaacctatctggtgttttattttaatggataaaaatgtaatttttctaaggtagcaacttatttccaaattaatatag

SEQ ID NO: 654486 - DNA, 120 bp, Artificial Sequence
  ENSG00000183508_45 (sequence is synthesized)
atgaaaaatagataccaattagactaaattgaaagctttttgttctatatttgcatagcctttgaaatatttcttagtgcctaggaggtctggggattcctctttcgtggtggtcactaa

SEQ ID NO: 654487 - DNA, 120 bp, Artificial Sequence
  ENSG00000183508_46 (sequence is synthesized)
ccttacttgatgcagataaaatcacttgtcaatgcaaaatgtgttagaacttgataaagctttgagtttgagaaataaaggtatatttaaaatttaaataaaacttgtcatttatgctca

SEQ ID NO: 654488 - DNA, 120 bp, Artificial Sequence
  ENSG00000183513_0 (sequence is synthesized)
gccgctggcttccggtcccctgagactggggcctcgctcgctcccgacccggttgcaagtgttgcggtgggagaaagtcgcgtccgcatcggaggggaagcgccgtcatgcctaagtatt

SEQ ID NO: 654489 - DNA, 120 bp, Artificial Sequence
  ENSG00000183513_1 (sequence is synthesized)
atgaggacaagccgcagggcggcgcgtgcgcgggcctgaaggaggacctgggcgcgtgtctgctgcagtcggactgtgtggtccaggaaggaaaatcacctcggcagtgtttgaaggaag

SEQ ID NO: 654490 - DNA, 120 bp, Artificial Sequence
  ENSG00000183513_2 (sequence is synthesized)
gatactgcaactctttgaagtacgcattttttgagtgtaaaagatcagtgttggataacagggcaagattcagaggaagaaaaggatattgatgcattatgttgaagccaacatggaaaa

SEQ ID NO: 654491 - DNA, 120 bp, Artificial Sequence
  ENSG00000183513_3 (sequence is synthesized)
caacaaatattttccctggtcattaacacaaagaagccaaaacaggaaacatactttttactacatctgtttggttggaccagatttcccctccgtggaacactgaagaaagtggatgag

SEQ ID NO: 654492 - DNA, 120 bp, Artificial Sequence
  ENSG00000183513_4 (sequence is synthesized)
ttgttttcgaatatgtataaagtaaatgattctcttgatccaagttatttttagaagaaaaacctaattgaacaggtatgggttgggagcataataaatgtgttttgagaattgttctaa

SEQ ID NO: 654493 - DNA, 120 bp, Artificial Sequence
  ENSG00000183513_5 (sequence is synthesized)
agcacagaaaatggaaagactgttatttgcaaacttgactcttcaattgaattacccaattagtacaggccactgatttgactgacacagtcgataacatgcagcctatccagaaggtgt

SEQ ID NO: 654494 - DNA, 120 bp, Artificial Sequence
  ENSG00000183513_6 (sequence is synthesized)
ctgttgggaaagtttaggataaaactttttctttagttcagtcttttcctgtctagttctaaaatgaattgtgtttgattccttagagaagaaatacttcatttgtgctctgattcactg

SEQ ID NO: 654495 - DNA, 120 bp, Artificial Sequence
  ENSG00000183513_7 (sequence is synthesized)
cggactgtttttgtttcctggttacattttcagtctggcccgctctacataatgggccagtgtcagctccaagtccacatccttattatccatgattcaaaagggagagagagaacttcc

SEQ ID NO: 654496 - DNA, 120 bp, Artificial Sequence
  ENSG00000183513_8 (sequence is synthesized)
tttttcagggtccacaaatcaaatctataaaaggactctggtcttcccaggatcacctgcccttgcattggaccagtccctgtggaagaggggatgggggcctgtgatcttggccaggcc

SEQ ID NO: 654497 - DNA, 120 bp, Artificial Sequence
  ENSG00000183513_9 (sequence is synthesized)
tgggctatctatctgcactgtcattgctaactcctgtcagaatcacatggatgagtagtgggctgaatcccaaaaggaaaggggtttagagcaagtggaaacaacagatgttcactatag

SEQ ID NO: 654498 - DNA, 120 bp, Artificial Sequence
  ENSG00000183513_10 (sequence is synthesized)
aaagcaagaatgaaaaccatgaagtggttgaagattagccttacagtaattttattctgatcacttaatacagtagagtcaaacaggaatccaagtttccaactttattatttttggcac

SEQ ID NO: 654499 - DNA, 120 bp, Artificial Sequence
  ENSG00000183513_11 (sequence is synthesized)
tgaagaattacaaagaactctagcgtctttatacctccgtggttcactggagttaaagcaatcggggcgttgtacagctcacttgagtttttaaaggttctactaaaaagtgagaattcc

SEQ ID NO: 654500 - DNA, 120 bp, Artificial Sequence
  ENSG00000183513_12 (sequence is synthesized)
acagcaatatgggtcattgttgcagaatatcacaaaggtctgttgtgtatactccttttcaccaggaaagggacaataatagtttttttcaatgtatatatatataagtgatctaacttt

SEQ ID NO: 654501 - DNA, 120 bp, Artificial Sequence
  ENSG00000183513_13 (sequence is synthesized)
ttattaataaaagtaaacaactctaaaatgtatattataaagccctgtcatctttgttgagtaatagctttattgagctttatttggagaaatacacataccgtaaaattcacactgaaa

SEQ ID NO: 654502 - DNA, 120 bp, Artificial Sequence
  ENSG00000183513_14 (sequence is synthesized)
catagtaccctgtagcttttcataggaaaaactggcagagcgtgcctggcacttgcaacataaaggttctggggagtggctgcagtgatgcggctgtagagtcaaaatctgcttgaggga

SEQ ID NO: 654503 - DNA, 120 bp, Artificial Sequence
  ENSG00000183513_15 (sequence is synthesized)
aaatccctgattatgcagagcagatgagctttgggttatattttttctggtgcatgaatgggccacatgtttctatttaagtagtattccagcctgccttgttaatatctttgtgaagtg

SEQ ID NO: 654504 - DNA, 120 bp, Artificial Sequence
  ENSG00000183513_16 (sequence is synthesized)
tttcgtgccaacactaaaaatattctgattttagggtacccagttcacacatttcacccataaggaaatgaagataaccctttctagatttttatataaacagtttaaggaaaagtatcc

SEQ ID NO: 654505 - DNA, 120 bp, Artificial Sequence
  ENSG00000183513_17 (sequence is synthesized)
cataactttctattttcctcctttaacacttttaaaaaggactattttcagaaggacaattattttgtactttgtgagaaaatttccaaggtgtttatattgttttatgtgtctgtcata

SEQ ID NO: 654506 - DNA, 86 bp, Artificial Sequence
  ENSG00000183513_18 (sequence is synthesized)
aaaagatcagtgatgagtgtgatcttggctcgctgcaacctctgcgtcctgggttcaagtgattctcgtgcttcagcctcccgagt

SEQ ID NO: 654507 - DNA, 120 bp, Artificial Sequence
  ENSG00000183520_0 (sequence is synthesized)
agtggacttggcggcagaggcagtgcggatccggcgttctccactgatcttttccaaggctgtacagacatggcggcggcttttcggaaggcggctaagtcccggcagcgggaacacaga

SEQ ID NO: 654508 - DNA, 120 bp, Artificial Sequence
  ENSG00000183520_1 (sequence is synthesized)
gagcgaagccagcctggctttcgaaaacatctgggcctgctggagaaaaagaaagattacaaacttcgtgcagatgactaccgtaaaaaacaagaatacctcaaagctcttcggaagaag

SEQ ID NO: 654509 - DNA, 120 bp, Artificial Sequence
  ENSG00000183520_2 (sequence is synthesized)
gctcttgaaaaaaatccagatgaattctactacaaaatgactcgggttaaactccaggatggagtacatattattaaggagactaaggaagaagtaaccccagaacaactaaagctgatg

SEQ ID NO: 654510 - DNA, 120 bp, Artificial Sequence
  ENSG00000183520_3 (sequence is synthesized)
agaactcaggacgtcaaatatatagaaatgaagagggttgcagaagctaagaaaatcgaaagactaaaatcagagctccatctgctggatttccaggggaagcaacagaacaagcatgtg

SEQ ID NO: 654511 - DNA, 120 bp, Artificial Sequence
  ENSG00000183520_4 (sequence is synthesized)
ttcttttttgacaccaaaaaggaagttgaacagtttgatgtcgcaactcacctgcaaacagccccggagctagtcgacagagtctttaataggcccaggatagagaccttgcagaaagaa

SEQ ID NO: 654512 - DNA, 120 bp, Artificial Sequence
  ENSG00000183520_5 (sequence is synthesized)
aaagtgaaaggagttaccaatcagactggacttaagcgaatagctaaagaaaggcaaaagcagtataactgcctgacacagcggattgaacgagagaagaaattgttcgttattgctcag

SEQ ID NO: 654513 - DNA, 120 bp, Artificial Sequence
  ENSG00000183520_6 (sequence is synthesized)
aaaattcaaacacgcaaagatcttatggataaaactcagaaagtgaaggtgaagaaagaaacggtgaactccccagctatttataaatttcagagtcgtcgaaaacgttgacgtgttata

SEQ ID NO: 654514 - DNA, 120 bp, Artificial Sequence
  ENSG00000183520_7 (sequence is synthesized)
gataagccttgtcattctgtatcaaaaatctgttgtcgttttctagtaacttcaaattccattactccaaatggcatggttttccggtttgtaaccataactaaattgtcagtctgacat

SEQ ID NO: 654515 - DNA, 120 bp, Artificial Sequence
  ENSG00000183520_8 (sequence is synthesized)
ttatttttatatacttaattttttttttctttgagatagggtctttgttgccaggctggaagtgcagtgtgtgattatggctcactgcaactttgaactcctgggctcaagtgatcttcc

SEQ ID NO: 654516 - DNA, 78 bp, Artificial Sequence
  ENSG00000183520_9 (sequence is synthesized)
gatcttcctgcatcagcctcttgagtagctgggaccacagacatgtgccaccatgtctgagtaatgtttaaattttct

SEQ ID NO: 654517 - DNA, 120 bp, Artificial Sequence
  ENSG00000183520_10 (sequence is synthesized)
gggctgggattacagggatgagccactatgcccagcccataattttttttgttatgaaacataggatctcattacagcagatttggaaagtagattaattcattcctaatcccagtgctt

SEQ ID NO: 654518 - DNA, 120 bp, Artificial Sequence
  ENSG00000183520_11 (sequence is synthesized)
attcaataataacaaatatttattgcatgcttaactgtgctaggagctagagctgtggaggtggacaattactgtgagtagtctagttgatttcctccattttgtaaaacgaggcatcac

SEQ ID NO: 654519 - DNA, 90 bp, Artificial Sequence
  ENSG00000183520_12 (sequence is synthesized)
gtctagttgatttcctccattttgtaaaacgaggcatcactttttgtccatgtttttgtgttttatagttacagtaaacaatttgatgtc

SEQ ID NO: 654520 - DNA, 120 bp, Artificial Sequence
  ENSG00000183520_13 (sequence is synthesized)
ccggccgatgtcctactttttaattaaatcattagctctttcccagtttgttacatcacaaaagttttttacagtaatatatgctagagtaaacgttaaaataaatattatttttaatga

SEQ ID NO: 654521 - DNA, 120 bp, Artificial Sequence
  ENSG00000183520_14 (sequence is synthesized)
ttctctctttgtttaggcagatcattatttatttaactgtagttgcattgtgaattatttgtattatgttgttccagatcattttctcatagtggctttgatttggctctgccttggtgt

SEQ ID NO: 654522 - DNA, 120 bp, Artificial Sequence
  ENSG00000183520_15 (sequence is synthesized)
ttgagcccaaagttgaatctttttctctttgttttcttgaagtgcaggatataatctgaaattccatttgttgagtctcttacatcaccatgtgtgtgatgtggaatgaagagatgtgaa

SEQ ID NO: 654523 - DNA, 120 bp, Artificial Sequence
  ENSG00000183520_16 (sequence is synthesized)
agatggattcatgagaccaagcgtgggtgataatgaactctgaaaacattttataaaacaattatccccattcttgttctctgttagcactttgtttgcaaaatacttcttaattatttg

SEQ ID NO: 654524 - DNA, 120 bp, Artificial Sequence
  ENSG00000183520_17 (sequence is synthesized)
ttagcgatacatgtcagctgaggtcctttttatgcccctggtctagatggtggtgatggattaaatgggtttctgtaggtcccagagattttaaggctaatgataattaagtattgttat

SEQ ID NO: 654525 - DNA, 120 bp, Artificial Sequence
  ENSG00000183520_18 (sequence is synthesized)
tgggccaggcagtgttctaggatatttaccgtttttacactgatttgtccctcccaacaaccttctgggatgggttactattaccgtattcattttacaaatgaaattgggattcaggat

SEQ ID NO: 654526 - DNA, 120 bp, Artificial Sequence
  ENSG00000183520_19 (sequence is synthesized)
ggttaaataacttatccaaggttacttagccagaagttgtcaagtccagatttgaacccatgctgtctggctccagagtccatgattctagtcattgcgctatactgtactgtgtagttt

SEQ ID NO: 654527 - DNA, 120 bp, Artificial Sequence
  ENSG00000183520_20 (sequence is synthesized)
ctgaattacatatggtcatttggtgcccaagcttgcaccatatcctaaggagttttaatttgtactttgtttggtgtctccctgtaatgatataaatggcactgaaacatatataggctg

SEQ ID NO: 654528 - DNA, 120 bp, Artificial Sequence
  ENSG00000183520_21 (sequence is synthesized)
ccagatccagtcagtgcttttggcttttttgagtttcactctgtgtgaccttttagatgcttgtaaagtttgcttattgtgggtttttggttttttaaaattatctattttttttttttt

SEQ ID NO: 654529 - DNA, 120 bp, Artificial Sequence
  ENSG00000183527_0 (sequence is synthesized)
gtctcgcgcaagccggcgtgcggtcccgcggcgctgcagttgtgtccagccggtcacggggcggctatggcggccacgttcttcggagaggtggtgaaggcgccgtgccgagctgggact

SEQ ID NO: 654530 - DNA, 120 bp, Artificial Sequence
  ENSG00000183527_1 (sequence is synthesized)
gaggacgaagaggaggaggaggaggggcggagggagacgcccgaggacagggaggtgcgtctgcagctggcgcggaagagggaagtgcggctccttcgaagacaaacaaaaacatctttg

SEQ ID NO: 654531 - DNA, 120 bp, Artificial Sequence
  ENSG00000183527_2 (sequence is synthesized)
gaagtttctttgctagaaaaatatccgtgctccaagtttataattgctataggaaataatgcagtagcatttctgtcatcatttgttatgaattcaggagtctgggaggaagttggttgt

SEQ ID NO: 654532 - DNA, 120 bp, Artificial Sequence
  ENSG00000183527_3 (sequence is synthesized)
gctaaactctggaatgaatggtgtagaacaacagacactacacatctgtcctccacagaggctttttgtgtgttttatcatctaaaatccaatccctcggtttttctctgtcagtgcagt

SEQ ID NO: 654533 - DNA, 120 bp, Artificial Sequence
  ENSG00000183527_4 (sequence is synthesized)
tgctatgttgcagaagatcaacagtatcagtggctggaaaaggtttttggctcttgtccaaggaagaacatgcagataactattctcacatgtcgacatgttaccgattataaaacctca

SEQ ID NO: 654534 - DNA, 120 bp, Artificial Sequence
  ENSG00000183527_5 (sequence is synthesized)
gaatccaccggcagccttccttctcctttcctgagagccctaaaaacacagaatttcaaagactcggcgtgttgtccattgctagaacaaccgaatatagtacacgaccttcctgcagca

SEQ ID NO: 654535 - DNA, 120 bp, Artificial Sequence
  ENSG00000183527_6 (sequence is synthesized)
gttctaagctactgtcaagtatggaaaatcccagcaattctgtacttgtgttatactgatgtgatgaaattagacctaatcacagtggaagcttttaagcctatactttctaccagaagc

SEQ ID NO: 654536 - DNA, 120 bp, Artificial Sequence
  ENSG00000183527_7 (sequence is synthesized)
gagtaacatttatacatgatcttaaacattgttttgtagtgtatattacttgtccattcctttaaggggagcagcctgcactcttttgtagattacttttgggggatatattttgagaat

SEQ ID NO: 654537 - DNA, 120 bp, Artificial Sequence
  ENSG00000183527_8 (sequence is synthesized)
gatgaaacggaataaaattgtaaaaaattaattgtagttttaattccttatttatggtggtattattcacaaccaaaataagccaagcattttccttttatccactaggtgggagtattg

SEQ ID NO: 654538 - DNA, 120 bp, Artificial Sequence
  ENSG00000183527_9 (sequence is synthesized)
tccactaggtgggagtattgttgtatttgaatattttaaggtactatagttaaatttttatcttatttatttatttatttattttttgaggctgggtcttgctctgttgcccaggctgaa

SEQ ID NO: 654539 - DNA, 76 bp, Artificial Sequence
  ENSG00000183527_10 (sequence is synthesized)
gctctgttgcccaggctgaagtgcagtgtgctatcatggttcactgcatcctcgacctcctgggctcaagcatttc

SEQ ID NO: 654540 - DNA, 120 bp, Artificial Sequence
  ENSG00000183527_11 (sequence is synthesized)
atcagcagatggtattcatgtggcaaagtgtagttaattaggtgtaactattcattgacctgttggtgattcttaatatgtggaaagtttctggatattttaggagtcctgcagtttttt

SEQ ID NO: 654541 - DNA, 120 bp, Artificial Sequence
  ENSG00000183527_12 (sequence is synthesized)
ttatcttgtgggtaaaaattgatgacaaagtaacaaaattatatatttactaaaaatgaaacagaaatgtgtatgtcctcactttttagtaatatctgacagatagcctcttcacccaga

SEQ ID NO: 654542 - DNA, 120 bp, Artificial Sequence
  ENSG00000183527_13 (sequence is synthesized)
ctttcccagggctctctttcaaggctggctctgcgcgtgtcagcagttctcttacagtcatgtgttatcattaggagtgtgaatggaatcatgaacccggagtagccacacaacttcaca

SEQ ID NO: 654543 - DNA, 120 bp, Artificial Sequence
  ENSG00000183527_14 (sequence is synthesized)
caagatcaaacccaggttgtgacagcaggtgtgttctgtttctccaaggcacactcccacccctgctaggcatgctattattgtctgtggtgttaggtgaatacctagaggaatgtttcc

SEQ ID NO: 654544 - DNA, 120 bp, Artificial Sequence
  ENSG00000183527_15 (sequence is synthesized)
ggacagggaggtgcgtctgcagctggcgcggaagaggtgaggcaccgggataagggcagcgcgctcaccgcagctggaaggtgcgcgggcctggcagccgcgacggcgcctaaggccggg

SEQ ID NO: 654545 - DNA, 120 bp, Artificial Sequence
  ENSG00000183527_16 (sequence is synthesized)
gctccgcggtcttccgagtggcccccgcggttgccgccgctccttggctctgcttgggccctgggtctccgtgaagccgcggcgtccagcggcgccagccccagggaagtgcggctcctt

SEQ ID NO: 654546 - DNA, 120 bp, Artificial Sequence
  ENSG00000183530_0 (sequence is synthesized)
agagacgaagaggtggcggcggccggagcgcccccggcctctgtcggctccgtaggctcaggtagacctggcgacgacggggctgcagctgcaggggctgagctggctgggcaagcgcgg

SEQ ID NO: 654547 - DNA, 120 bp, Artificial Sequence
  ENSG00000183530_1 (sequence is synthesized)
gccgcggaggaggtctcaggggtgaatcatttgatgtaaaagacttgactccataatctgcatctgtcctaatgctgtcatctggagtagagactcagccagttccacttgattcctcca

SEQ ID NO: 654548 - DNA, 120 bp, Artificial Sequence
  ENSG00000183530_2 (sequence is synthesized)
tgtctgccgtggtacaggaattatactctgaactcccagtaagtgtctccagagagcttcatgctgaccctgagccaagtgtgattccagatgtaaaacctggagcctcaagctctcttt

SEQ ID NO: 654549 - DNA, 120 bp, Artificial Sequence
  ENSG00000183530_3 (sequence is synthesized)
taagtcagaatagggcattgcccttggagctgcagaggactcatgtggagagttgttgtgaagaaacctatgagaccttggatcatgggagtgagcctgggcgatgtgggctagtggact

SEQ ID NO: 654550 - DNA, 120 bp, Artificial Sequence
  ENSG00000183530_4 (sequence is synthesized)
ccacagcaggaggttctgtggcatctgggatcttggatagggcaaagagaagcgagagcatggagccaaaggtcttcagagatccagggggccaggcaggaattataagagaaccctctg

SEQ ID NO: 654551 - DNA, 120 bp, Artificial Sequence
  ENSG00000183530_5 (sequence is synthesized)
agggagcaaaggaagatccacatcaacattccacagctgctgaagaaaagactagcccgagtcaggaggatctcctgatgcagtccagcaaagaactttcacatgtggacctccctgaag

SEQ ID NO: 654552 - DNA, 120 bp, Artificial Sequence
  ENSG00000183530_6 (sequence is synthesized)
attttctaaggagcaaagaaggaaatgtacagattacagctgaaactctgctaaaatccgccgaagtacaaggtatgaaggtcaatgggactaagacggataataatgaaggacacaaaa

SEQ ID NO: 654553 - DNA, 120 bp, Artificial Sequence
  ENSG00000183530_7 (sequence is synthesized)
atggcaatgtgagtaaagatctctcagctggatgcggtgaattccaagaagtagacaaaatcatgaccagtgatgaggtttcagaaaccagcacattagttaccccagaacctttaacct

SEQ ID NO: 654554 - DNA, 120 bp, Artificial Sequence
  ENSG00000183530_8 (sequence is synthesized)
ttgtggaccctgtattaacagaagcaactcctaaagaaaaagaatgtgaagaattaaaaagttgtccttggttgtcattaccaggaaacagtgccatttctaatgtggacaatgggaagg

SEQ ID NO: 654555 - DNA, 120 bp, Artificial Sequence
  ENSG00000183530_9 (sequence is synthesized)
aagagttgtgtaaaccaaacctggtctgtgaagcagatgacaatcaccaacagcttcatggccaccataatgaacaacccagttctacacatgatagtcccacagccacaagccctttga

SEQ ID NO: 654556 - DNA, 120 bp, Artificial Sequence
  ENSG00000183530_10 (sequence is synthesized)
aagaaaattctgaagtttcatgtttcacatcagacttgtctggtccagaatccagaacaatatccttagaaaactgtggttttgaaggtggtggtttgctaaagagatctgctgaaaaga

SEQ ID NO: 654557 - DNA, 120 bp, Artificial Sequence
  ENSG00000183530_11 (sequence is synthesized)
cagacagttcttatttttataggggggatgatcaagggaagaacttggcttctagagaagaaaatgaggaacggcttttgattcctaggagtgaaagaggtggaccttttctttttaatg

SEQ ID NO: 654558 - DNA, 120 bp, Artificial Sequence
  ENSG00000183530_12 (sequence is synthesized)
ccagggaaccagaaaaggagattagtggtcgttgttctggtgaaaaagagcctgttgtttctccaaaggaaaatatccacaataactgcattcaagacagtctccatacagggaactcta

SEQ ID NO: 654559 - DNA, 120 bp, Artificial Sequence
  ENSG00000183530_13 (sequence is synthesized)
gttctttaatgcccaattcttttactgaagccacagaagtaatgttaaataaaaatgatttgaaaattactgtacacgttcaaggtaacttgacaaaccctgaggaccataaagaaactt

SEQ ID NO: 654560 - DNA, 120 bp, Artificial Sequence
  ENSG00000183530_14 (sequence is synthesized)
ttactaatatgagccatcctggtggacactctgaagaaagcagtttttcctccttgatgcagattgaagaggcaggacagacaacccctgtagagcccaatatattaagtaaatcttttt

SEQ ID NO: 654561 - DNA, 120 bp, Artificial Sequence
  ENSG00000183530_15 (sequence is synthesized)
acactaaagactgtaactccttagtcagcatccagagaaatctggaaggcaacacccagttaaatgaagcatcatgtaatgattttctgtttgaaagaaaatccattgtgagtttaatgc

SEQ ID NO: 654562 - DNA, 120 bp, Artificial Sequence
  ENSG00000183530_16 (sequence is synthesized)
cagaggatcaaataagtcctgtaagtgaggtattaaaacccaagcaaggtactgctctgttgctaccatccccagaatttgattacagacctgagtcagaaaaagttatacagacctcac

SEQ ID NO: 654563 - DNA, 120 bp, Artificial Sequence
  ENSG00000183530_17 (sequence is synthesized)
atgatgatattccacttttagatgaacagagcatagcctgtgagatgaatgaactttcttgtaccaatgaactggttgtaaacaaagtagaaagtgaatgtgttttaaatcaacaagtgt

SEQ ID NO: 654564 - DNA, 120 bp, Artificial Sequence
  ENSG00000183530_18 (sequence is synthesized)
cccttaattctcaagaacatgcaaatttgccaactgactctctactgcatttaaacaaagagatgcctttagcaacaggcagagatgcccatcagagccatcaccctccattagagggta

SEQ ID NO: 654565 - DNA, 120 bp, Artificial Sequence
  ENSG00000183530_19 (sequence is synthesized)
gagcagatgtcattgctgatatacaaaccattcccattcagacaaaaataaaagacatctctccaccaggtaaccaaacctgtggtgcctcttcaaactgtcccaccttaaacatcaaac

SEQ ID NO: 654566 - DNA, 120 bp, Artificial Sequence
  ENSG00000183530_20 (sequence is synthesized)
cagtaagcctagagagaaaaaaggaaatggctgattcaggaacaaaagctctacattccaggctgcgctcaaataagagagaagcagctggctttcctcaagtggtctctgtcatagaat

SEQ ID NO: 654567 - DNA, 120 bp, Artificial Sequence
  ENSG00000183530_21 (sequence is synthesized)
gtcacagcgttcaatctcaggatatctctagctgtcatcgtgtaagaaaaaatgtatcccaggaaaacatgtgttctgcttctgctgctttcaagtccagcaaaatcagcctgcaagttg

SEQ ID NO: 654568 - DNA, 120 bp, Artificial Sequence
  ENSG00000183530_22 (sequence is synthesized)
ataactctttgataacaaaatatgaaaatgcatttcagcaccgtgatcactgctgccaaggaacaggacactctgtggaaaaaagcagctgtaaagtgagttacacatcacaggaaaggg

SEQ ID NO: 654569 - DNA, 120 bp, Artificial Sequence
  ENSG00000183530_23 (sequence is synthesized)
aacttgatgggaaagaaacgaatggcagccttccaggagataagatcagaaacaaaatggtagcaggcttgttaaatagtggaatttcaaacaaaaccattcacacctccagtagcatca

SEQ ID NO: 654570 - DNA, 120 bp, Artificial Sequence
  ENSG00000183530_24 (sequence is synthesized)
aactcagtgaggaagggctggaaggaaaggagcaggatgtatccaaagaaactgtattttgtaagtataacatctctgatcatgctatacaagaactaaaccagactgtaaacattccag

SEQ ID NO: 654571 - DNA, 120 bp, Artificial Sequence
  ENSG00000183530_25 (sequence is synthesized)
gtcctgaaaaagtgttggaccagtctcctactgttatgttctccagttttaaaaatgtaaaatcagttgaaacactcgatcagaaggcagatgaagtccttgactgtcagagtaaccaaa

SEQ ID NO: 654572 - DNA, 120 bp, Artificial Sequence
  ENSG00000183530_26 (sequence is synthesized)
acagaccagatgaatgcaaaagtgaaggtcagtcagccaaggagatgctaagtagtgaccagagagagactgtcaccgagcctcacggggaggtaaaccacaaccaaaaggatctgctgg

SEQ ID NO: 654573 - DNA, 120 bp, Artificial Sequence
  ENSG00000183530_27 (sequence is synthesized)
tcagctcaggcagtaataactcactaccttgtggtagtccaaagaaatgcaatttgaaaggagcctttgtcaagatgtctggttgtgatgagtccacagaaggtatggtagacatcgtct

SEQ ID NO: 654574 - DNA, 120 bp, Artificial Sequence
  ENSG00000183530_28 (sequence is synthesized)
acacggactgtagtaataagcttgcagaaggtgtgctggacgtgaaggcatctaatctactggattgtggtgcaaggcaagagaaactggcatttcaagaggactccaggagtaccttgt

SEQ ID NO: 654575 - DNA, 120 bp, Artificial Sequence
  ENSG00000183530_29 (sequence is synthesized)
ctcggagagaactggatgctgcacatacaggaacaactggtcaggattcagatttcccagttactgctgcttctacagtggactttctcaaaataaaaaaatcatgtgaagaaaacgtat

SEQ ID NO: 654576 - DNA, 120 bp, Artificial Sequence
  ENSG00000183530_30 (sequence is synthesized)
gcagatctttaaaagactgtgaaatggaaaagtgtccagactcttgtgcccatgagatggagtctgttgcagatcatgaaccaaataaaagaatattgggcagagtaaatttgtctttaa

SEQ ID NO: 654577 - DNA, 120 bp, Artificial Sequence
  ENSG00000183530_31 (sequence is synthesized)
atgatagccattatggacagcaagataaaggaacatctctcagagaaacacaagaaatgactgaaggatcaagactagaaccaaactctgagtttggcaaagaaagtacctttggaattt

SEQ ID NO: 654578 - DNA, 120 bp, Artificial Sequence
  ENSG00000183530_32 (sequence is synthesized)
cctcaaaagagtcgatgtcttgccatgatgaaagctctgtttccctaagaagcctgaaatccattgaaataatgccttctcaagaaaattcagaaactaatgttaacagtgaagaaactg

SEQ ID NO: 654579 - DNA, 120 bp, Artificial Sequence
  ENSG00000183530_33 (sequence is synthesized)
acctgaaaaatctttgtaaaccaaaagatggtgaaatgctttgtgaaaatgtaaaggactgcacagtccttcctgagatgaaggaaatagtatcaagagattggagtaattctagtgaca

SEQ ID NO: 654580 - DNA, 120 bp, Artificial Sequence
  ENSG00000183530_34 (sequence is synthesized)
gagacagcgtatgtacctgtgtggaaaagaatgcttgcaaagcttgtcaccctcacgagaattcctctgacagacatttgcctttgacagtgaaaacagatattaaagtgaaaggagaag

SEQ ID NO: 654581 - DNA, 120 bp, Artificial Sequence
  ENSG00000183530_35 (sequence is synthesized)
aaaccgaagagcatcagaggggacgactgggttacttaactgttggggagcaatctgaggagttggttaccagagaaactggcgatggcgatcccgtgagcaacatctctcagacccatt

SEQ ID NO: 654582 - DNA, 120 bp, Artificial Sequence
  ENSG00000183530_36 (sequence is synthesized)
ttaaatgccgggggatacttaatcatgctgaaaaacagcagagccctgaggttttggactacatgttgcagaaagaagagaaatatatacgtcaacaaaaagcacatacgatatcgcaac

SEQ ID NO: 654583 - DNA, 120 bp, Artificial Sequence
  ENSG00000183530_37 (sequence is synthesized)
agtgcatatcatctagtctgttgttagatgatgcacaaaatcagaaccaaccgaaggctgacaaagatgagtccaccatgatcaatgaaatcaccctagcaaagctggccaaggacagca

SEQ ID NO: 654584 - DNA, 120 bp, Artificial Sequence
  ENSG00000183530_38 (sequence is synthesized)
ttgtggcacagactcagaagttagaagaccagaaggaggaaaggttacatcatccattaaggaaggacactgagtcatgcacaagtccttgccttcttggtgcccctcggaaagcacaag

SEQ ID NO: 654585 - DNA, 120 bp, Artificial Sequence
  ENSG00000183530_39 (sequence is synthesized)
acccctcctctgctgggtgtgatcaaatacatggtgcctttgcgaagaaaggagttcttcccttaaagaagcagccccatcgaacttgtaagaaagtttcctatcaggagcaaatcattg

SEQ ID NO: 654586 - DNA, 120 bp, Artificial Sequence
  ENSG00000183530_40 (sequence is synthesized)
ttgggagaaaaataggtaaaatcagaagttctgcctttttaaagagttcttccaatcccatccccacaaaagcgcacagacttctcagtttgtgtactctgtctgcacctacacgattag

SEQ ID NO: 654587 - DNA, 120 bp, Artificial Sequence
  ENSG00000183530_41 (sequence is synthesized)
aacctgaaacagcacctaccaagagcttggttagtcacataccaaagcagatgtctacaccgtgccatcccttgaggagcctgaattttaggaagactaccaaagaatcagccttactaa

SEQ ID NO: 654588 - DNA, 120 bp, Artificial Sequence
  ENSG00000183530_42 (sequence is synthesized)
acaagctgtccatccttgcctccaaactggccccagccatgaagactcagaagctaagataccgacggtgttcctctgaacttcttccaatggctaaaagctacaagcgcctcagatata

SEQ ID NO: 654589 - DNA, 120 bp, Artificial Sequence
  ENSG00000183530_43 (sequence is synthesized)
aaagactcctggacggattttcatccagcacagagcagctgaatccatatttggcagctagtggatgggataagaggcctaacagtaagcccatggcactttattctctcgaatccatca

SEQ ID NO: 654590 - DNA, 120 bp, Artificial Sequence
  ENSG00000183530_44 (sequence is synthesized)
agatgaccttcatagatttgagcaacaagatgccgtccctgctgtttggttctgaaatcttcccagtatcctttcatgtgaaatcatccagctcagattgcacgactgagtcctcaagga

SEQ ID NO: 654591 - DNA, 120 bp, Artificial Sequence
  ENSG00000183530_45 (sequence is synthesized)
ggcttgccttaggagaggccctccagtgcccgtctcaacctcccaagtggaccttttctttcttcttgtcccacggttgccctgggatggcaacattcagggaagacactggcgtccata

SEQ ID NO: 654592 - DNA, 120 bp, Artificial Sequence
  ENSG00000183530_46 (sequence is synthesized)
gtcagacccacactcaggctcctccccagcctccagctcctctccaagactatggaggcactgccatagtccagaccagagcagactgctctgtccttggccttcacacacttctagcac

SEQ ID NO: 654593 - DNA, 120 bp, Artificial Sequence
  ENSG00000183530_47 (sequence is synthesized)
tttgttccccaggatgttaccgaatctggacaaaaaaacggagcttctccagccacatgcctaccatgcagaggctcttcatgacccagtttacacagggcctgaaagggttacggtctc

SEQ ID NO: 654594 - DNA, 120 bp, Artificial Sequence
  ENSG00000183530_48 (sequence is synthesized)
cagcctccatagcagacaaggtcttctgttctctgccctactcggtgggcagagtcctatccatttggagccagcatggtccttctgtctgctccttcgaaatctcttctcttcattccc

SEQ ID NO: 654595 - DNA, 120 bp, Artificial Sequence
  ENSG00000183530_49 (sequence is synthesized)
ctcactgcaagcggcaaccaagtctgggcaccacaagcagccacaccatgttaccatatgtgcctcttccaggcatggaagctacatataacaccagcggcagtcagacgaggctggagc

SEQ ID NO: 654596 - DNA, 120 bp, Artificial Sequence
  ENSG00000183530_50 (sequence is synthesized)
ctccattccctgccttggtaccaaagtcttgcttggtagcagaatcagctgtcagcaagctcctgctttcagcctctgagttccaggttcgtggattggatgagctggatggtgtgaaag

SEQ ID NO: 654597 - DNA, 120 bp, Artificial Sequence
  ENSG00000183530_51 (sequence is synthesized)
cagcatgcccctgcccacagagcagccccccagaacagaaagaggctgagccagagaagaggccaaagaaagtctcacagattcgcatccggaaaaccattcctaggccagatcctaatc

SEQ ID NO: 654598 - DNA, 120 bp, Artificial Sequence
  ENSG00000183530_52 (sequence is synthesized)
ttacccccatgggccttcctcgacccaaaaggttaaagaagaaggagtttagtttagaagagatatataccaacaagaattataaatctcctcctgcaaacaggtgtttagagaccatct

SEQ ID NO: 654599 - DNA, 120 bp, Artificial Sequence
  ENSG00000183530_53 (sequence is synthesized)
ttgaggaacccaaggaacgaaatggtacactaatctcaatcagccaacagaagaggaagcgagttctagaatttcaggattttacagtcccgcgaaagaggagagctcgaggcaaagtca

SEQ ID NO: 654600 - DNA, 120 bp, Artificial Sequence
  ENSG00000183530_54 (sequence is synthesized)
aggtggcaggcagctttaccagggcccagaaggcagctgtgcagagtcgagagctggatgctcttttgatacagaaactaatggaactggagaccttctttgccaaggaagaggagcagg

SEQ ID NO: 654601 - DNA, 120 bp, Artificial Sequence
  ENSG00000183530_55 (sequence is synthesized)
ggagaccttctttgccaaggaagaggagcaggaacaatcatcaggctgttgagaagcgattcagtttgagggtctcaattttagggtttttttgttttgttttgtttttgggtttttttt

SEQ ID NO: 654602 - DNA, 120 bp, Artificial Sequence
  ENSG00000183530_56 (sequence is synthesized)
aattttgccctaccgccaaaccactcaaaaatgcacagtccatgaatttttacctatttcaaggtgcaacctttttagaaactggtgaaggagggtcctctacttttactgctgagtata

SEQ ID NO: 654603 - DNA, 120 bp, Artificial Sequence
  ENSG00000183530_57 (sequence is synthesized)
gaacctcaggaatgctccctttctcctggaaatggacctgaacgacatccagccacctcctcagtctctgccatccacaggaggaagcagcagcctatcttcagtaacactaggattcca

SEQ ID NO: 654604 - DNA, 120 bp, Artificial Sequence
  ENSG00000183530_58 (sequence is synthesized)
aggacacacaggatttgcacgtccatatgaaagttccgctttgtttacggtggtgctagaccaagattattagaaacgtggcctagggagggggacctggcgtcctgtcctgtgtggtct

SEQ ID NO: 654605 - DNA, 120 bp, Artificial Sequence
  ENSG00000183530_59 (sequence is synthesized)
cactggctcatttcagtagttgaggaaagatgagctgttgtgttttcttatcttttgtctgcccaggacctattgatgtgagtgtatgtgagagtgtttgtgtgtgtgtggctttttccc

SEQ ID NO: 654606 - DNA, 120 bp, Artificial Sequence
  ENSG00000183530_60 (sequence is synthesized)
atcgttttctcccctctgtgactgggtcactagtgccagaggagcccgtccaggccccattcgaagtaagttgcactttttaatgttgtggtgtggattattttcatttgttttattttc

SEQ ID NO: 654607 - DNA, 120 bp, Artificial Sequence
  ENSG00000183530_61 (sequence is synthesized)
ttttttgttgttgtttttgtactattattgctgcatgtgtggagcctttaaatgtgattttaaaacatttttttaaggagaaaaacaatacatgtcttaagaatacatgataggcatttg

SEQ ID NO: 654608 - DNA, 120 bp, Artificial Sequence
  ENSG00000183530_62 (sequence is synthesized)
acccagttgatcgctgcatggaagagacatttttcctattcatgtgtttcaggcaatcccttccccatctccagcttctagtgtaactcattagagggagcactttttttcatctgggtt

SEQ ID NO: 654609 - DNA, 120 bp, Artificial Sequence
  ENSG00000183530_63 (sequence is synthesized)
ctcattcttgcccaccaaatacatgtatttattttagtgatttaagtaagagcaggtttctctcccgatcattgaaaaactactatggttgggtgtggtcttaatggtttttatctgaaa

SEQ ID NO: 654610 - DNA, 120 bp, Artificial Sequence
  ENSG00000183530_64 (sequence is synthesized)
tggtgttaggtaacaaaattgagtacaacggcttgggcagtgatacaggctgacccacagtatttgtggctttccaggcagcccgcttcaagtgtggggagagagtcggggtcatgtttc

SEQ ID NO: 654611 - DNA, 120 bp, Artificial Sequence
  ENSG00000183530_65 (sequence is synthesized)
agacccagagatgtgttcctgcagtgggatctcaaaaatccccagccagccttctttgagggccacctcattgtactctgggctcctacgtcacatctaccggaactgtcaaatgctgga

SEQ ID NO: 654612 - DNA, 120 bp, Artificial Sequence
  ENSG00000183530_66 (sequence is synthesized)
gttagccgagtttctgggtttgtgcctgcaggagtctgtgggcagagggatgctgtgggtcagcagcctcgaggtcttgttccttttccactgaagtcctgtgtgtccatatcctgctcc

SEQ ID NO: 654613 - DNA, 120 bp, Artificial Sequence
  ENSG00000183530_67 (sequence is synthesized)
ccttcccctccttctctaggggtttctctttctctctcaaaacaagagtttagagaattaacattccatggctagtgagtgggatgcaaaagtcatcgtcaggacaccagcatcacctct

SEQ ID NO: 654614 - DNA, 120 bp, Artificial Sequence
  ENSG00000183530_68 (sequence is synthesized)
tcatatcctcctgggagccactggcatggagcagccgccgatgggaaccgtcagagttctagggacatttccaagtcagtctattagagaagagtgagtggcacgtcctggaatgttggc

SEQ ID NO: 654615 - DNA, 120 bp, Artificial Sequence
  ENSG00000183530_69 (sequence is synthesized)
caactctcctaggtttcttttgcttccccatttgctagtggatggggagatgggttgggggtggggggtctctatgtgccttgcttttgcaggttgacagtctatgccacactggagcag

SEQ ID NO: 654616 - DNA, 120 bp, Artificial Sequence
  ENSG00000183530_70 (sequence is synthesized)
aaaaactgacatgagccagagggaaaagtgtgccacggctatgttctaggcccactgcctcagacatagcattgagacgagtgaaatacacacttggtcatccacggaggcttccaaggc

SEQ ID NO: 654617 - DNA, 120 bp, Artificial Sequence
  ENSG00000183530_71 (sequence is synthesized)
catggccaaatacagttagaagagagccaggcttccgtaccagctctgaatgatgctaaccagattctgtcattctacatccactttgcccagactgtatagacacgacctatgtttcac

SEQ ID NO: 654618 - DNA, 120 bp, Artificial Sequence
  ENSG00000183530_72 (sequence is synthesized)
ctcaatacctctcccttcctgggacagggttcttagacactaaatgcttctctctgacttttttgcttaagggagtgggatgagtagtacattttgcccttgtccaggcatgtttaagga

SEQ ID NO: 654619 - DNA, 120 bp, Artificial Sequence
  ENSG00000183530_73 (sequence is synthesized)
gctcctactggacaggttgcagactagcagtgagtcaacagagccctgtttgccagctctgttgccagtatagatgcagtgatgtggcggctatgtttcccagagacaacagtgggcaca

SEQ ID NO: 654620 - DNA, 120 bp, Artificial Sequence
  ENSG00000183530_74 (sequence is synthesized)
gctatagtgtcaccaacatggcagagatagtttcaactgtgcctgttacaggtgtggcactcgaaggaccagaagcagcggtttggaacatgggtaactgggagcagaggactggaagaa

SEQ ID NO: 654621 - DNA, 120 bp, Artificial Sequence
  ENSG00000183530_75 (sequence is synthesized)
acagagctgggctccttccctgtcctgacaatgtaggagaggagttgttgtgaggccagccctgcccgtcgttgaaattctggacctaccctctagctaggtcccttcccctgctccaaa

SEQ ID NO: 654622 - DNA, 120 bp, Artificial Sequence
  ENSG00000183530_76 (sequence is synthesized)
gttgagaagggggccccactgcaaacttgaaattacttacctgaaggtgatgtatatacctaggctccagctgcgctcagccacacctgtcttaacattcagtttcggcactgagccagc

SEQ ID NO: 654623 - DNA, 120 bp, Artificial Sequence
  ENSG00000183530_77 (sequence is synthesized)
tgcagtgttgtcaggggtccccaggcccgtggtccctaaccacgatgggacatggtaatcggctgctggcacaccacctgcccagagctacaggaggtctggttctggggtggagttggt

SEQ ID NO: 654624 - DNA, 120 bp, Artificial Sequence
  ENSG00000183530_78 (sequence is synthesized)
acagtttctgagtatgggaacttccctccccaagtggtgggaagttacagttaactacagcttactcaactatcacttccagaggtttagtgtttttaatatgggaaagaggagaaatct

SEQ ID NO: 654625 - DNA, 120 bp, Artificial Sequence
  ENSG00000183530_79 (sequence is synthesized)
caggtctaatcagggttctgcccatcagcttttcactgaaactttcaactgtgttttgttttttgtttttttttccatctttcagtttctagctgtgtttgccttctccctccgcgttcc

SEQ ID NO: 654626 - DNA, 120 bp, Artificial Sequence
  ENSG00000183530_80 (sequence is synthesized)
ctcctctttttttgcttttggtctcctttccagcttcatgtctccatgagttcagctgtacctcatctcctgttaaagcagatcatgtccactttttcttactgaccttactctaagcta

SEQ ID NO: 654627 - DNA, 120 bp, Artificial Sequence
  ENSG00000183530_81 (sequence is synthesized)
cagtagctgagggaggtacggtgaagacatgtagcgtttgccttattcggagcctgaggagcccagaaacccatgctgtgaatcccaaaactcagcgctcctcaagagctgtgaaaatca

SEQ ID NO: 654628 - DNA, 120 bp, Artificial Sequence
  ENSG00000183530_82 (sequence is synthesized)
tgatactttgtcacaattttgcctgaaagggtctttggcacgggctccagagccaacctgaggtccattccagatcccactatctgggcgtgagacctcccccgtggctccttccttgcc

SEQ ID NO: 654629 - DNA, 120 bp, Artificial Sequence
  ENSG00000183530_83 (sequence is synthesized)
cactgagccaagagcagcagggagcgtacaggacgggagcagcagatccaaggccgcggtgcagccaatgaatgcacggccgtcgctccgtctccaggctggaattccgtctcataatca

SEQ ID NO: 654630 - DNA, 120 bp, Artificial Sequence
  ENSG00000183530_84 (sequence is synthesized)
atgccatgtacattaagatctgcgaaagaccaacttttaggcagtgatacttttctcccattccctggggtggggggagtatgcagttggtgctttctgtaattcccttgttctgttttg

SEQ ID NO: 654631 - DNA, 120 bp, Artificial Sequence
  ENSG00000183530_85 (sequence is synthesized)
tttctgtaagcttttcccctggtgtcatggaaaggacttcttaaataaccacattgtgggtggctgtatccaaagtttaaataattggccagaagtgcagagtatcctttcctggattcg

SEQ ID NO: 654632 - DNA, 120 bp, Artificial Sequence
  ENSG00000183530_86 (sequence is synthesized)
tgtcagaaaagggctccttgccacaactgaacttactgtataaaaacctggctagggagatttaattttactaaaattacagtttaatgttaccgtctagccacaaatcaagcagcaaaa

SEQ ID NO: 654633 - DNA, 120 bp, Artificial Sequence
  ENSG00000183530_87 (sequence is synthesized)
gctattttgatgatgaaagggggtccccgttgagctggccatctagtgcagtgtgctctcagattccatgtttgttgattgtgtgtcttcacaagcccctctctggtgctgaattggatt

SEQ ID NO: 654634 - DNA, 120 bp, Artificial Sequence
  ENSG00000183530_88 (sequence is synthesized)
tgaattcttggtgagaggcctcagcatctccttgggctggtctgggccagtaaaaatagctgcctgacatgtttatatattatcatggtcagtagttcaatgaaatttgtacatttttgg

SEQ ID NO: 654635 - DNA, 120 bp, Artificial Sequence
  ENSG00000183530_89 (sequence is synthesized)
taacattggtatacatgatgcccctgcagttccttttctgtttggtagtttgtgactctaagatttccactgttatgtgtgttaatttatgaaaataaatttttttgaaaacctttcaaa

SEQ ID NO: 654636 - DNA, 120 bp, Artificial Sequence
  ENSG00000183530_90 (sequence is synthesized)
ggtagacctggcgacgacggggctgcagctgcaggggctgagctggctgggcaagcgcgggccgcggaggaggtctcagggaggatctcctgatgcagtccagcaaagaactttcacatg

SEQ ID NO: 654637 - DNA, 120 bp, Artificial Sequence
  ENSG00000183530_91 (sequence is synthesized)
gcatgactttgacctcttgtccttgtaaacctgatctatgtctctcagataaacatttctgagattgaaatctgttctattacaagcagcaactaggaatgtgtaataatacaatttgtt

SEQ ID NO: 654638 - DNA, 120 bp, Artificial Sequence
  ENSG00000183530_92 (sequence is synthesized)
cacttcctggtattcggatatgcgcagcgccaagcgcagccgcacccactgctggcctcacgccgtctgattggctgcagctctccggaggggcggggccatccgagaagctatccatat

SEQ ID NO: 654639 - DNA, 120 bp, Artificial Sequence
  ENSG00000183530_93 (sequence is synthesized)
atccatattggaggaggctgctagtcctttgctggtacctgccgggctggagagcggggagggtcacgtggttaagactcgccacgtgggccgggcgcggtgactcaagcctgtaatccc

SEQ ID NO: 654640 - DNA, 84 bp, Artificial Sequence
  ENSG00000183530_94 (sequence is synthesized)
gccagaaagactcgcctaagcagtttctctcttttcttttgcatttttaatcttagacttttggagatgttgaaatggtcgctg

SEQ ID NO: 654641 - DNA, 120 bp, Artificial Sequence
  ENSG00000183530_95 (sequence is synthesized)
ttttaatcttagacttttggagatgttgaaatggtcgctgaaacactgcaaacacagggatgggggacagatcccaaagtatagcagctactcatgagtcccagcgcccctcctgtcctt

SEQ ID NO: 654642 - DNA, 120 bp, Artificial Sequence
  ENSG00000183530_96 (sequence is synthesized)
cccctactgctgcctaagtggtcttcctaaaacacaagtttgcacttgtcagaaccactccttaagatctctcatgggttgccctcgtctccaaataaagatactaaccactgagctggc

SEQ ID NO: 654643 - DNA, 120 bp, Artificial Sequence
  ENSG00000183542_0 (sequence is synthesized)
taaaactttaggaaattagtaccagacttttatattggtcaacagcaaaatgaacattactactcagcctccaacacatgcagtttgcctataccagggatcctgtcaaaatatacacca

SEQ ID NO: 654644 - DNA, 120 bp, Artificial Sequence
  ENSG00000183542_1 (sequence is synthesized)
cttatagcttcttaagtgcagttatcatagagcacagtccctgacatcacacagctgcagagatgaataaacaaagaggaacctactcagaagtgagtctggcccaggacccaaagaggc

SEQ ID NO: 654645 - DNA, 120 bp, Artificial Sequence
  ENSG00000183542_2 (sequence is synthesized)
agcaaaggaaacttaagggcaataaaatctccatttcaggaaccaaacaggaaatattccaagtagaattaaaccttcaaaatgcttcttcggatcatcaagggaatgacaagacatatc

SEQ ID NO: 654646 - DNA, 120 bp, Artificial Sequence
  ENSG00000183542_3 (sequence is synthesized)
caatagttcttattccttgtattggagtactggagcagaacaatttttccctgaatagaagaatgcagaaagcacgtcattgtggccattgtcctgaggagtggattacatattccaaca

SEQ ID NO: 654647 - DNA, 120 bp, Artificial Sequence
  ENSG00000183542_4 (sequence is synthesized)
gttgttattacattggtaaggaaagaagaacttgggaagaaagagtttgctggcctgtgcttcgaagaactctgatctgctttctatagataatgaggaagaaatggtaagacgtaaatg

SEQ ID NO: 654648 - DNA, 120 bp, Artificial Sequence
  ENSG00000183542_5 (sequence is synthesized)
tttcaacactttactaaaagcttatttctgtcaatatcatatttgtagaaatcatccatatgtttatacatatatttacttcatatatttttaagtctgtgtagtattcaactgacttca

SEQ ID NO: 654649 - DNA, 120 bp, Artificial Sequence
  ENSG00000183542_6 (sequence is synthesized)
taatatttttatattcatatactgttaatgcacatttggttatttccagttttgcttttcatggaaacccatgcttctataaatgtttttatcacaaaataaatataaagaaaactaagc

SEQ ID NO: 654650 - DNA, 120 bp, Artificial Sequence
  ENSG00000183549_0 (sequence is synthesized)
gcatttggggctgaagttccctgtgggaggctgttttctgagggagctgagtgtttacagccactcagccctgctctgctcagctgaagcagaaaacagagaccttttgcattactttgg

SEQ ID NO: 654651 - DNA, 120 bp, Artificial Sequence
  ENSG00000183549_1 (sequence is synthesized)
ttcaagagcaagacaggaggcgactgcatgagaccatggctgagacacctagtcctccaggcactgaggaactccagggcattctgtgggtctcatgggaagccagcacctctacctgtt

SEQ ID NO: 654652 - DNA, 120 bp, Artificial Sequence
  ENSG00000183549_2 (sequence is synthesized)
cctcagaagatcgtggccacctgggaagccatcagcctgggaaggcagctggtgcctgagtacttcaacttcgcccatgatgtgctggatgtgtggagtcggctggaagaggctggacac

SEQ ID NO: 654653 - DNA, 120 bp, Artificial Sequence
  ENSG00000183549_3 (sequence is synthesized)
cgccccccaaatcctgccttctggtgggtcaatggcacaggagcagagatcaagtggagctttgaggagctggggaagcagtccaggaaggcagccaatgtgctggggggtgcatgcggc

SEQ ID NO: 654654 - DNA, 120 bp, Artificial Sequence
  ENSG00000183549_4 (sequence is synthesized)
ctgcagcctggggacagaatgatgctggtactcccacggctcccggagtggtggctggtcagtgtggcttgcatgcggacagggactgtgatgattccgggtgtgactcagctgacagag

SEQ ID NO: 654655 - DNA, 120 bp, Artificial Sequence
  ENSG00000183549_5 (sequence is synthesized)
aaggacctcaagtaccggctgcaggcgtccagggccaagtccattatcaccagtgactccctagctccaagggtggatgccatcagtgccgaatgcccctccctccagaccaagctgctg

SEQ ID NO: 654656 - DNA, 120 bp, Artificial Sequence
  ENSG00000183549_6 (sequence is synthesized)
gtgtcagacagcagtcggccaggctggttgaacttcagggaactcctccgggaggcttctacagagcacaactgcatgaggacaaagagtcgagacccgctggccatctactttaccagc

SEQ ID NO: 654657 - DNA, 120 bp, Artificial Sequence
  ENSG00000183549_7 (sequence is synthesized)
ggaaccaccggggcccccaagatggtcgagcactcccagagcagctacggactgggttttgtggccagcggaagacggtgggtggccttgaccgaatctgacatcttctggaacacgact

SEQ ID NO: 654658 - DNA, 120 bp, Artificial Sequence
  ENSG00000183549_8 (sequence is synthesized)
gacactggctgggtgaaggcagcctggactctcttctctgcctggcctaatggatcttgcatttttgtgcatgagctgccccgagttgatgccaaagttatcctgaatactctctccaaa

SEQ ID NO: 654659 - DNA, 120 bp, Artificial Sequence
  ENSG00000183549_9 (sequence is synthesized)
ttcccgataaccaccctctgctgtgtcccaaccatctttcggctgcttgtgcaggaggatctgaccaggtaccagtttcagagcctgaggcactgtctgaccggaggagaggccctcaac

SEQ ID NO: 654660 - DNA, 120 bp, Artificial Sequence
  ENSG00000183549_10 (sequence is synthesized)
cctgacgtgagggagaagtggaaacaccagactggtgtggagctgtacgaaggctatggccagtctgaaacggttgtcatctgtgccaatccaaaaggcatgaaaatcaagtctggatcc

SEQ ID NO: 654661 - DNA, 120 bp, Artificial Sequence
  ENSG00000183549_11 (sequence is synthesized)
gtggatgatgagggcaacgtcctgcctcctggagaagaggggaatgttgccgtccgtatcagacccactcggcccttctgtttcttcaattgctatttggacaatcctgagaagacagct

SEQ ID NO: 654662 - DNA, 120 bp, Artificial Sequence
  ENSG00000183549_12 (sequence is synthesized)
gcatcagaacaaggggacttttacatcacaggggaccgagctcgcatggacaaggatggctacttttggttcatgggaagaaacgacgatgtgatcaattcttcaagctaccggatcggg

SEQ ID NO: 654663 - DNA, 120 bp, Artificial Sequence
  ENSG00000183549_13 (sequence is synthesized)
cctgttgaagtggaaagtgccctggcagagcatcctgctgtcctggagtcggctgtggtcagcagcccagaccccatcaggggagaggtggtaaaggcatttatagtccttactccagcc

SEQ ID NO: 654664 - DNA, 120 bp, Artificial Sequence
  ENSG00000183549_14 (sequence is synthesized)
tactcctctcatgacccagaggcactaacgcgggaactccaggagcatgtgaaaagggtgactgctccatacaaataccccaggaaggtggcctttgtttcagaactgccaaagacggtt

SEQ ID NO: 654665 - DNA, 120 bp, Artificial Sequence
  ENSG00000183549_15 (sequence is synthesized)
tctggaaagatccaaaggagtaaattgcgaagtcaggagtgggggaaatgaggtgcaccccaggaaggccccgtagacctccgaagactccacaagaaactaatggatcactggtcagtc

SEQ ID NO: 654666 - DNA, 120 bp, Artificial Sequence
  ENSG00000183549_16 (sequence is synthesized)
cccatggggagcatcatctcttcgaccctaaagatgtcaaaggtgtgcagcttccaaacggcatccccaggatcactgggcaatgctggaaagagcaaaagaatatcattggccctgatc

SEQ ID NO: 654667 - DNA, 120 bp, Artificial Sequence
  ENSG00000183549_17 (sequence is synthesized)
acatagatgctgcgccgcctagcaaatgcttggtggttcgacttctccctctgtctgggggcaggctcagcatctgcccactggtctcactaagagctttcagatttccctccataggac

SEQ ID NO: 654668 - DNA, 120 bp, Artificial Sequence
  ENSG00000183549_18 (sequence is synthesized)
aggttaccatagacttggggcacttgtgggtactcattttctgccagtgggaatgtaaaggcttcatcctttgtatgtaaccatttggcaaaagtatgcaggaacataaaataaaatatc

SEQ ID NO: 654669 - DNA, 120 bp, Artificial Sequence
  ENSG00000183549_19 (sequence is synthesized)
ctttagctcagaaattctatcttcgggagtcaccacaaaagaaaaaaatcaaaatgcagaaaatgtgtggtgcactaagatgatcacacagcattaaaactaaaaaaaaaaaagaaaaaa

SEQ ID NO: 654670 - DNA, 120 bp, Artificial Sequence
  ENSG00000183549_20 (sequence is synthesized)
ttaacaattaacatccaaacaacaaggaaatgattaacaaaattgtagtagattaactcaattacatatgatgtagccactaaaatatttgagagcagtttagtatgtcttgggaaaagt

SEQ ID NO: 654671 - DNA, 120 bp, Artificial Sequence
  ENSG00000183549_21 (sequence is synthesized)
gtaagctatattaattttaaaaatcagagcaaaaatattcatactggagaatcccaactctgaaaaataaagggaaaactgtggttaattgtaatcctcctggagattgaggagggaggg

SEQ ID NO: 654672 - DNA, 120 bp, Artificial Sequence
  ENSG00000183549_22 (sequence is synthesized)
agagaaaataatggatggtagtttttcttcttcctttttccattacatttctgtattttccaagtttttgtacgaagcacatacaactattttaatgaaaaagttatgttaaagaaagca

SEQ ID NO: 654673 - DNA, 120 bp, Artificial Sequence
  ENSG00000183549_23 (sequence is synthesized)
tcagtttcctggtctgcaaaagggttataatgatagtacctaccccatgaggtggttgcagattacccaagccagagctttcagcacagcacctcacatgtggtatttatgaaacggtag

SEQ ID NO: 654674 - DNA, 120 bp, Artificial Sequence
  ENSG00000183549_24 (sequence is synthesized)
tcatattgttgttacacatattattggtgctactaactgtttttaccgtggtagtgccacctagtgtatttacgttttacagggaggcttctacagagcacaactgcatgaggacaaaga

SEQ ID NO: 654675 - DNA, 120 bp, Artificial Sequence
  ENSG00000183549_25 (sequence is synthesized)
gtgaattggggctctccagaacagcagaaaaatgaagtcatttcccctttaagcaacaaaagatgaaatgcattgctgattccacacatagagagcgaatcagagaggagcactcccatt

SEQ ID NO: 654676 - DNA, 120 bp, Artificial Sequence
  ENSG00000183549_26 (sequence is synthesized)
ggcagccaggctgacctgagcataatcctggtccctaccttaatgttcaaggtccctcattcagtcagtgctggatttgtcagcagcttttctgtgcttcatttgcttctataatgcggt

SEQ ID NO: 654677 - DNA, 120 bp, Artificial Sequence
  ENSG00000183549_27 (sequence is synthesized)
ggtagttattagagctaccattcagagtacatgaaataaccaatatggtgcatttagcacatagcaggtggtcagttaataataaactagtggccatgtattgggtacttagtgtatcgc

SEQ ID NO: 654678 - DNA, 120 bp, Artificial Sequence
  ENSG00000183549_28 (sequence is synthesized)
ctgaggctgccctcatgtaccacaatgagactcaaggctccaagcatgttgatgaggaaatttggacctgggaattttgctagttctaaaatgtaaactgttggcatttgagacttagga

SEQ ID NO: 654679 - DNA, 120 bp, Artificial Sequence
  ENSG00000183549_29 (sequence is synthesized)
aaaaattctgagtcagtgttgtgagccttagacatgcttgttccttctctgaagtgtcctgcattcttgagcccaaatcacacagtgagacagttatgtcccttccgattcccttccagt

SEQ ID NO: 654680 - DNA, 120 bp, Artificial Sequence
  ENSG00000183549_30 (sequence is synthesized)
tgttcatcaactgaaggaggaagttttgttttgctgctactctgtctttgatgtttttctctcactgtcacgcccttctcttctaaataaggaaagaaggccgggcgcggtggctcatga

SEQ ID NO: 654681 - DNA, 75 bp, Artificial Sequence
  ENSG00000183549_31 (sequence is synthesized)
ttctaaataaggaaagaaggccgggcgcggtggctcatgaccataatcccagcactttgggacacaccaacatgg

SEQ ID NO: 654682 - DNA, 120 bp, Artificial Sequence
  ENSG00000183559_0 (sequence is synthesized)
gtcttagaaacaaactccaggtgtgaacacctcccgtcctagcttattgccggagtatgatcagagaatggaagaatgactgtcagaggattgaaaaacagagggctagtgacacaatgg

SEQ ID NO: 654683 - DNA, 120 bp, Artificial Sequence
  ENSG00000183559_1 (sequence is synthesized)
tgcaagaaaggaagaatgaaaagccagttagaatatttaataccaactcttcctttcaggatcaagccccaacgtgttgccaagaggatctgagttctgcttcaccgttgcggatatgga

SEQ ID NO: 654684 - DNA, 120 bp, Artificial Sequence
  ENSG00000183559_2 (sequence is synthesized)
gcaaattctacagatcagacccacggattgcccttgggaaatactcccccttggaaaaagagatcctacgtctaggtggcattcacaccatagcagcaagaaggcttttggcttacaagc

SEQ ID NO: 654685 - DNA, 120 bp, Artificial Sequence
  ENSG00000183559_3 (sequence is synthesized)
aagaggaagaatgcagaatgctcaaggaactacagttgctgtctccggactacaaacaagcaatggagtataaaaagaaacattcctctccttgtgctatttgtgtacccctagaaaaaa

SEQ ID NO: 654686 - DNA, 120 bp, Artificial Sequence
  ENSG00000183559_4 (sequence is synthesized)
gcaaaggtgattgcgcccctggaggcatttaaaatgccacaacgagagcaggtgaacgtcagtaagcacatagagaggatgaggcttgctcgggctctgggaaatcatcagcctttaccc

SEQ ID NO: 654687 - DNA, 120 bp, Artificial Sequence
  ENSG00000183559_5 (sequence is synthesized)
tacattgaaaggtttacacgctcctcatttctgtctggggtgggcctgggtccaatggcaaaaaataaggccagacgaaaggaagacaactatgacacccataattgtgatgatgccaac

SEQ ID NO: 654688 - DNA, 120 bp, Artificial Sequence
  ENSG00000183559_6 (sequence is synthesized)
caagataagaaagaggaggcagagggaaaaaacacaaaaagacgagaaataaaaatgaatgtagttttcaagtcaaaagaaccaaaaaaatgtttaacataccatggaaatgatcgcaaa

SEQ ID NO: 654689 - DNA, 120 bp, Artificial Sequence
  ENSG00000183559_7 (sequence is synthesized)
tcattcctccccgcaaagaaaccggaacggtccatcgcaggcctaacaaaccgaaatcttttctgcatatcagaattccctggtgacttaatgctaatgaatcaggattttatatcacgg

SEQ ID NO: 654690 - DNA, 120 bp, Artificial Sequence
  ENSG00000183559_8 (sequence is synthesized)
agagaccacttcagtgatctggtcaagacctacagcctggaagaagagagtatctggaaagagcgcatgcgtaaagcaactccttatcattattaaagttttatttgttgcccagggtaa

SEQ ID NO: 654691 - DNA, 120 bp, Artificial Sequence
  ENSG00000183560_0 (sequence is synthesized)
gtcatttccatcaagtgtgcagcatgggtctctctgtagcaggccatggcatgctggtggccgctcctgctagagctgtggacagtcatgcccacctgggctggggacgagctgctcaac

SEQ ID NO: 654692 - DNA, 120 bp, Artificial Sequence
  ENSG00000183560_1 (sequence is synthesized)
atctgcatgaatgccaaacaccacaagagagtgcccagcccagaagacaagctctatgaggagtgcatcccctggaaggacaatgcctgctgcaccctcacgacaagctgggaagcccat

SEQ ID NO: 654693 - DNA, 120 bp, Artificial Sequence
  ENSG00000183560_2 (sequence is synthesized)
ctggatgtatccccactctacaacttcagcctgtttcactgtggactgctgatgcctggctgtcggaagcacttcatccaggctatctgcttctatgagtgctccccaaacctggggccc

SEQ ID NO: 654694 - DNA, 120 bp, Artificial Sequence
  ENSG00000183560_3 (sequence is synthesized)
tgccaggaggactgtgaggagtggtgggaagactgtcgcatgtcttacacatgcaaatccaactggcgtggtggctgggactggagtcaggggaagaaccgctgccccaaaggggcccag

SEQ ID NO: 654695 - DNA, 120 bp, Artificial Sequence
  ENSG00000183560_4 (sequence is synthesized)
tgcctccctttctcccattacttccccaccccagctgacctgtgtgagaagacttggagcaattccttcaaagccagccctgagcgacggaacagtgggcggtgtctccagaagtggttt

SEQ ID NO: 654696 - DNA, 120 bp, Artificial Sequence
  ENSG00000183560_5 (sequence is synthesized)
gagcctgctcagggcaaccccaatgtggccgtggcccgcctcttcgccagctctgccccatcctgggaactgtcctacaccatcatggtctgctccctgttcctgccgttcctttcctga

SEQ ID NO: 654697 - DNA, 120 bp, Artificial Sequence
  ENSG00000183569_0 (sequence is synthesized)
actctgctcctgcgacctagccaggcgtgagggagtgacagcagcgcattcgcgggacgagagcgatgagtgagaacgccgcaccaggtctgatctcagagctgaagctggctgtgccct

SEQ ID NO: 654698 - DNA, 120 bp, Artificial Sequence
  ENSG00000183569_1 (sequence is synthesized)
ggggccacatcgcagccaaagcctggggctccctgcagggccctccagttctctgcctgcacggctggctggacaatgccagctccttcgacagactcatccctcttctcccgcaagact

SEQ ID NO: 654699 - DNA, 120 bp, Artificial Sequence
  ENSG00000183569_2 (sequence is synthesized)
tttattacgttgccatggatttcggaggtcatgggctctcgtcccattacagcccaggtgtcccatattacctccagacttttgtgagtgagatccgaagagttgtggcagccttgaaat

SEQ ID NO: 654700 - DNA, 120 bp, Artificial Sequence
  ENSG00000183569_3 (sequence is synthesized)
ggaatcgattctccattctgggccacagcttcggtggcgtcgtgggcggaatgtttttctgtaccttccccgagatggtggataaacttatcttgctggacacgccgctctttctcctgg

SEQ ID NO: 654701 - DNA, 120 bp, Artificial Sequence
  ENSG00000183569_4 (sequence is synthesized)
aatcagatgaaatggagaacttgctgacctacaagcggagagccatagagcacgtgctgcaggtagaggcctcccaggagccctcgcacgtgttcagcctgaagcagctgctgcagaggt

SEQ ID NO: 654702 - DNA, 120 bp, Artificial Sequence
  ENSG00000183569_5 (sequence is synthesized)
cacttgagtgaggagtgcggggagcttctcctgcaaagaggaaccacgaaggtggccacaggtctggttctgaacagagaccagaggctcgcctgggcagagaacagcattgacttcatc

SEQ ID NO: 654703 - DNA, 120 bp, Artificial Sequence
  ENSG00000183569_6 (sequence is synthesized)
agcagggagctgtgtgcgcattccatcaggaagctgcaggcccatgtcctgttgatcaaagcagtccacggatattttgattcaagacagaattactctgagaaggagtccctgtcgttc

SEQ ID NO: 654704 - DNA, 120 bp, Artificial Sequence
  ENSG00000183569_7 (sequence is synthesized)
atgatagacacgatgaaatccaccctcaaagagcagttccagtttgtggaagtcccaggcaatcactgtgtccacatgagcgaaccccagcacgtggccagtatcatcagctccttctta

SEQ ID NO: 654705 - DNA, 120 bp, Artificial Sequence
  ENSG00000183569_8 (sequence is synthesized)
cagtgcacacacatgctcccagcccagctgtagctctgggcctggaactatgaagacctagtgctcccagactcaacactgggactctgagttcctgagccccacaacaaggccagggat

SEQ ID NO: 654706 - DNA, 120 bp, Artificial Sequence
  ENSG00000183569_9 (sequence is synthesized)
ggtggggacaggcctcactagtcttgaggcccagcctaggatggtagtcaggggaaggagcgagattccaacttcaacatctgtgacctcaagggggagacagagtctgggttccagggc

SEQ ID NO: 654707 - DNA, 120 bp, Artificial Sequence
  ENSG00000183569_10 (sequence is synthesized)
tgctttctcctggctaataataaatatccagccagctggaggaaggaagggcaggctgggcccacctagcctttccctgctgcccaactggatggaaaataaaaggttcttgtattctca

SEQ ID NO: 654708 - DNA, 86 bp, Artificial Sequence
  ENSG00000183569_11 (sequence is synthesized)
ctgcagaggttactgaagagcaatagccacttgagtgaggagtgcggggagcttctcctgcaaagaggaaccacgaaggtggccac

SEQ ID NO: 654709 - DNA, 120 bp, Artificial Sequence
  ENSG00000183569_12 (sequence is synthesized)
cccatgtcctgttgatcaagtaagtctggacccatccccttcagccacccgccaaggagacatgggcgccaggaatctccgggagggggccctggcatgaggctccaagttctctgcgtg

SEQ ID NO: 654710 - DNA, 120 bp, Artificial Sequence
  ENSG00000183569_13 (sequence is synthesized)
tcgaccacatcgctaaggctcaagatcttttttgggaagcccccctggcagcagggtcatggaaggaggaaggtcagaggaggggagggctcgggcagcaggggatgggccggggctgtc

SEQ ID NO: 654711 - DNA, 120 bp, Artificial Sequence
  ENSG00000183569_14 (sequence is synthesized)
tgtcccatgcctttccacaggtgtcagcggggggcatgcccaggtaaggctccataaccagtgagcccagtctcggctgactgcaacctctgtctcctggattcaaacgattctcctgcc

SEQ ID NO: 654712 - DNA, 120 bp, Artificial Sequence
  ENSG00000183569_15 (sequence is synthesized)
caccatagacgatttttaagccataaaaagaaacgaagcactgacacgggctccagcatggatgagcctttaaaacatcgcgctaagtggacgaattcagacacaaccgtctacgtgttg

SEQ ID NO: 654713 - DNA, 120 bp, Artificial Sequence
  ENSG00000183569_16 (sequence is synthesized)
aactcgctgtggttgctccccgggtctggtcccgcgcggacgtgggggcggccatcaggactgcccgggggttggcgccctgctgggttccaagccggtctgatctcagagctgaagctg

SEQ ID NO: 654714 - DNA, 120 bp, Artificial Sequence
  ENSG00000183569_17 (sequence is synthesized)
tgaccgggcccggagtagggctgggagggaaggataggagctgctgccccacccctttcccctgcacttatgagatctgcaaagagagatgagagggtcagtcagaggttgaccactgta

SEQ ID NO: 654715 - DNA, 120 bp, Artificial Sequence
  ENSG00000183569_18 (sequence is synthesized)
ccctctgacctcaggcaactgccgcaagggacacagggatgagggaaatgtggtcttttgagtggtcaggtctgatgaaggggacatcatggcccagatgctgagcccccagccacccat

SEQ ID NO: 654716 - DNA, 80 bp, Artificial Sequence
  ENSG00000183570_0 (sequence is synthesized)
tcgggctggagcgcctgaagccgcgaccgccgcctcagccgcctcagccgcggtcgccgccgcttcggctgacttaggct

SEQ ID NO: 654717 - DNA, 120 bp, Artificial Sequence
  ENSG00000183570_1 (sequence is synthesized)
gggcctcccggcctctccccgccggcccgcgggctcgccgtccggcgcagggcaggactgtctacaagagagaagctccccacgtggttccgtgtcggtaggctccacgacaaaagtcaa

SEQ ID NO: 654718 - DNA, 120 bp, Artificial Sequence
  ENSG00000183570_2 (sequence is synthesized)
cccttctgtaaatcacctgctgtggttatgatgctctgagttcaatacgtctgaacctttgctgtctatggatctgctctaaaccttatagcctgcttatgggggaaggtgacgccttct

SEQ ID NO: 654719 - DNA, 120 bp, Artificial Sequence
  ENSG00000183570_3 (sequence is synthesized)
gggccccatctgtccttcctcacagcaccctcagcaccttaagccaccaccctcagccacaatttggcagaaggatggagtccaaggtctcagaaggtggcctgaatgtgaccctcacca

SEQ ID NO: 654720 - DNA, 120 bp, Artificial Sequence
  ENSG00000183570_4 (sequence is synthesized)
tccgcctgctgatgcatggaaaggaagttggaagcatcatcgggaagaaaggagaaactgtgaagaagatgcgtgaggagagtggtgcaaggatcaacatctcagagggaaactgcccag

SEQ ID NO: 654721 - DNA, 120 bp, Artificial Sequence
  ENSG00000183570_5 (sequence is synthesized)
agaggattgtgaccatcacaggccccacagacgccatcttcaaggcctttgccatgatcgcatacaagtttgaggaggatatcatcaactccatgagcaacagccctgccaccagcaagc

SEQ ID NO: 654722 - DNA, 120 bp, Artificial Sequence
  ENSG00000183570_6 (sequence is synthesized)
ccccagtgacgctgaggctggtggtgcctgccagccagtgtgggtccctgatcggcaaaggaggctccaagatcaaggagatcagggagtccacaggtgcccaggtgcaggtggctgggg

SEQ ID NO: 654723 - DNA, 120 bp, Artificial Sequence
  ENSG00000183570_7 (sequence is synthesized)
acatgctgcccaactccacggagcgagcggtgaccatctcggggaccccagatgccatcatccagtgcgtcaagcagatctgtgtggtcatgctggagtccccaccgaaaggtgccacca

SEQ ID NO: 654724 - DNA, 120 bp, Artificial Sequence
  ENSG00000183570_8 (sequence is synthesized)
ttccctaccgcccaaagcccgcctccacccctgtcatttttgcaggtggtcaggcctacacaatccagggacagtatgccatccctcacccggatcagttgaccaagctccaccagttgg

SEQ ID NO: 654725 - DNA, 120 bp, Artificial Sequence
  ENSG00000183570_9 (sequence is synthesized)
ccgctttccccggagaaaagctgcctttacactcctccgaagaagctcaaaatctgatgggccagtcatcaggtctggacgccagcccaccggccagcactcatgagctcaccattccca

SEQ ID NO: 654726 - DNA, 120 bp, Artificial Sequence
  ENSG00000183570_10 (sequence is synthesized)
atgatctaataggctgcataattggacgccaagggaccaaaatcaatgaaattcgacagatgtctggagctcagatcaaaatcgccaacgccacggaagggtcctcagagcgtcagatca

SEQ ID NO: 654727 - DNA, 120 bp, Artificial Sequence
  ENSG00000183570_11 (sequence is synthesized)
ccatcacggggaccccggccaacatcagccttgcccagtatctcatcaacgccaggctgacgtccgaggtcaccgggatgggcacgctgtaatcctacccagcacccttcccccgcgtca

SEQ ID NO: 654728 - DNA, 120 bp, Artificial Sequence
  ENSG00000183570_12 (sequence is synthesized)
cccacctgccagagcctaaggcccccggctctcgcactctgtacagcccaccttccctgcctcacagataccaatagagaggttttcttaattaacaaaaggacgtatgccatggagaaa

SEQ ID NO: 654729 - DNA, 120 bp, Artificial Sequence
  ENSG00000183570_13 (sequence is synthesized)
cacacccgcgcacacagctgctctctacagaggctgcaggctccgccgagtcccccctcagtgttattttatttatgacttacgctcccgtctgcccatgcaccggcatgcagtggtaat

SEQ ID NO: 654730 - DNA, 120 bp, Artificial Sequence
  ENSG00000183570_14 (sequence is synthesized)
tattttagaaatattgttccttggtgtcagcgtagctgtctgtcttaggagctgggtcggcgttccgacagcacttcctgtccgcccttctcctctgccatccagaaccgtccagaactg

SEQ ID NO: 654731 - DNA, 120 bp, Artificial Sequence
  ENSG00000183570_15 (sequence is synthesized)
ttgcctgagacccctcctctctcacacagccctgccatgctgactcggtttcccctcagagccattgttgtctgggctcgagtttctgccccaggttgtgtgctggaatcggggggtggc

SEQ ID NO: 654732 - DNA, 120 bp, Artificial Sequence
  ENSG00000183570_16 (sequence is synthesized)
tctcctgccacccatggggagcgccaggagaggagggtcatggaggatgttggggctctgaccccaggagtggggtggagggcggagcctgctgggggccctgccttcacagagatgccg

SEQ ID NO: 654733 - DNA, 120 bp, Artificial Sequence
  ENSG00000183570_17 (sequence is synthesized)
cgtgctgggaaggctcttggggtcccctgagcgtcttccagggtggctggagagcacagacgcgccagggagccccctctgtgctcctcagagttcaataaatgtcgtggcccctcctca

SEQ ID NO: 654734 - DNA, 120 bp, Artificial Sequence
  ENSG00000183570_18 (sequence is synthesized)
actgccaacctcagccttttactgcagcacccgccgctgcccgcctacacaatccagggacagtatgccatccctcacccggatttgaccaagctccaccagttggccatgcagcaaacc

SEQ ID NO: 654735 - DNA, 120 bp, Artificial Sequence
  ENSG00000183570_19 (sequence is synthesized)
gtacacgccatggtgtgggagcagcctgaccatcgggactcaggagcttacagaattttctggggtttcgatactctagaggtttcccctggttacttggcgaatattctatgaaaatga

SEQ ID NO: 654736 - DNA, 120 bp, Artificial Sequence
  ENSG00000183570_20 (sequence is synthesized)
agagaatgaagtgaagtcagagtcatttactcagaatgcaccctactgtaaatggagaggatgctacttggagtgtgtggtctgtataaatggagaggatgcatatgaagttacaaaggg

SEQ ID NO: 654737 - DNA, 120 bp, Artificial Sequence
  ENSG00000183570_21 (sequence is synthesized)
ttctcccgactttggttaccactcacgactaataaaccatctgcaagaagcccctggaagaccatgcggaaatcctgcatcttgtgacgtttccccaggacttagccgtggttggtttct

SEQ ID NO: 654738 - DNA, 120 bp, Artificial Sequence
  ENSG00000183570_22 (sequence is synthesized)
gccttgacccgtctttactgtgatggctgtaagtggtgcttgtgcagctcccatgcagacttggccacctgctgggagcagaccccccccccccccccttcttcctggactcctgtgtct

SEQ ID NO: 654739 - DNA, 120 bp, Artificial Sequence
  ENSG00000183570_23 (sequence is synthesized)
tcattcaccgctgtcctagtgtctaattcatcactgtcctcgaggattttgtgctcaaattctcctagatttgatcagtgggagcccaccaggccaattcccagctccttccctctttcg

SEQ ID NO: 654740 - DNA, 120 bp, Artificial Sequence
  ENSG00000183570_24 (sequence is synthesized)
ttcccacctccttccctctttcgttccccaccttcctttctcttcctgctaccctctgcctcatttaaagaaacagtttcctaacttttccatataatgtttcacacccatcttgtacct

SEQ ID NO: 654741 - DNA, 120 bp, Artificial Sequence
  ENSG00000183570_25 (sequence is synthesized)
gctgtcgagtgtctttgcttctaaccctgttaggggtcagagctgggaaatacgtgcatgtacacatacacacctctgtgtaagcatacatacatgtaagtgtgtgtgtgtgtgtgtgtg

SEQ ID NO: 654742 - DNA, 120 bp, Artificial Sequence
  ENSG00000183570_26 (sequence is synthesized)
tatatatatatatgcacatatacatgcatatatgtgcgtgtataaaacagacaagtcccacaatgtcctttctcttcctgttatccccaccccttgtacatgacagtgatgttctaaggt

SEQ ID NO: 654743 - DNA, 120 bp, Artificial Sequence
  ENSG00000183570_27 (sequence is synthesized)
ggtctctcaccagctcctggagccacttctgcacatctcttcccagctctgtgtttagtgacatcatgcgcatccctggagtcgctctgtaccagggtggagtgatcgtcctcattcttc

SEQ ID NO: 654744 - DNA, 120 bp, Artificial Sequence
  ENSG00000183570_28 (sequence is synthesized)
cttttgcttcctctgctgcccagtgctgcgtcctcgtctgggtttcatgatggtgggatgatgacgtagtttacgatattttgcagttacacccagtgcagtgatatttttatctgtggc

SEQ ID NO: 654745 - DNA, 90 bp, Artificial Sequence
  ENSG00000183570_29 (sequence is synthesized)
ttgcagttacacccagtgcagtgatatttttatctgtggcatcctcctgtagtctcagcattttgggaggctgaagatgaaaacctaggc

SEQ ID NO: 654746 - DNA, 120 bp, Artificial Sequence
  ENSG00000183570_30 (sequence is synthesized)
gtgaggcctccccagccatgtggaactgccgtcagcggattgaagctgcgcacatcgctgggatgctgctgcgggaggattcggtctaatccgggagcatctggctgggcagtgggcagc

SEQ ID NO: 654747 - DNA, 120 bp, Artificial Sequence
  ENSG00000183570_31 (sequence is synthesized)
gaggtaacctgcaccccaggcacctctgccagcctggcgggggcaggcctggtcccagctggctccctgggtcctctcccctacacctggactaggggatgccccagcccgcccaggcaa

SEQ ID NO: 654748 - DNA, 120 bp, Artificial Sequence
  ENSG00000183570_32 (sequence is synthesized)
ccccataactacgctcacctcctttgcctcccagggcctctccgcagctctggttcacccagtcaggggccagtgtctctccatccttctgaagccagctactcccggctgtatgcctta

SEQ ID NO: 654749 - DNA, 120 bp, Artificial Sequence
  ENSG00000183570_33 (sequence is synthesized)
ggtccacctccctcagcttccccagaccctgccctggggcaccgagcacggcctcagaacaccccacccttcccctggggcgtgcagcctggctgacccttgggccacaccagcacctcc

SEQ ID NO: 654750 - DNA, 120 bp, Artificial Sequence
  ENSG00000183570_34 (sequence is synthesized)
agcctccagccagctctgccacatggctctcgatgaagccctggctggcacagccctggtcctcagccacacagcaccatgcctctggggcccccgtgacagctgatgtagccttgctga

SEQ ID NO: 654751 - DNA, 120 bp, Artificial Sequence
  ENSG00000183570_35 (sequence is synthesized)
ccgctcgcggcctccactgccaacctcagccttttactgcagcacccgccgctgcccgcctacacaatccagggacagtatgccatccctcacccggatgtctggacgccagcccaccgg

SEQ ID NO: 654752 - DNA, 120 bp, Artificial Sequence
  ENSG00000183570_36 (sequence is synthesized)
gactgtctacaagagagaagctccccacgtggttccgtcttcagaagggaggaaaacacagaagacgagggctgaaagatggcattggacttggcacagggatggtcaggaggtcctgag

SEQ ID NO: 654753 - DNA, 120 bp, Artificial Sequence
  ENSG00000183570_37 (sequence is synthesized)
tcactttgagaaggtacaaaggaagccagattgagccagcttgaagagtcagggagagggaggggtggagatggctgtggaaaatgtttgactctgaaaacttggggtctagaagggagg

SEQ ID NO: 654754 - DNA, 120 bp, Artificial Sequence
  ENSG00000183570_38 (sequence is synthesized)
aattaagagacagagagcacgtggatgctgctagacattggtccctgaggagtcaagagggtgattcagaggatggagaggtgctgtttcctgggaatgggggtgtcctctcatcaccac

SEQ ID NO: 654755 - DNA, 120 bp, Artificial Sequence
  ENSG00000183570_39 (sequence is synthesized)
agcaccattgtcagcttacaaaacccgtctagatgctgcaccccagtatttccagtccccccagtaatgtcttttatattattttccctccagcacaggatgtggtctgggatcaggtgt

SEQ ID NO: 654756 - DNA, 120 bp, Artificial Sequence
  ENSG00000183570_40 (sequence is synthesized)
agttcagagtagacttgaattcctgggctcaggactgtctacaagagagaagctccccacgtggttccgtagacagagccacactctgttggatgttgatcccagctcaccgcagccttg

SEQ ID NO: 654757 - DNA, 120 bp, Artificial Sequence
  ENSG00000183570_41 (sequence is synthesized)
gttgtgtgtctgtcatctctgtcaatcaggaacattttccacagcctttctgtcactttcatgacattgatgttttgaagaacagtctcttttaataagtagatgtttccccctttgggg

SEQ ID NO: 654758 - DNA, 120 bp, Artificial Sequence
  ENSG00000183570_42 (sequence is synthesized)
gggcctcccggcctctccccgccggcccgcgggctcgccgtccggcgcagggcagaattcacctgcaaagtcatctcggtcagcacttttctttgtgggaaggttttatcttgaatgcag

SEQ ID NO: 654759 - DNA, 120 bp, Artificial Sequence
  ENSG00000183570_43 (sequence is synthesized)
tttctttggactgtctacaagagagaagctccccacgtggttccgtatggacagtgtgtcaccctcggggagcaggtgggctggcaggacaggcggccccaggccgggagaaggagacac

SEQ ID NO: 654760 - DNA, 120 bp, Artificial Sequence
  ENSG00000183570_44 (sequence is synthesized)
actctcgtctacccctgctggtgacctgcctgcccggccccgttctgttccagatgatggctcacctgtgaccctgcctgccctgcccagcttcgcccccatgtctgcctgtccccaacc

SEQ ID NO: 654761 - DNA, 120 bp, Artificial Sequence
  ENSG00000183570_45 (sequence is synthesized)
tcagtgctgtcggctgacctacctcagcccacgccctgccctcttttttcccaccccacggggccgatcctgacttctggttgctccctttgcttgaccgttctcttgaggttcttaacc

SEQ ID NO: 654762 - DNA, 120 bp, Artificial Sequence
  ENSG00000183570_46 (sequence is synthesized)
ctgaactgcacccgactcccattgacctcactcactgtgggccgccacgagggcccctcagagacgatgctaacggcctctcagatgctgacctgcttcatgtctatttccttttacagg

SEQ ID NO: 654763 - DNA, 120 bp, Artificial Sequence
  ENSG00000183570_47 (sequence is synthesized)
gggccttcttgctttgaatctttttctgctttgaagacaggcagaagtgaatacctggcctgagcttctcctggggcccttgtggaagcaacatgagatgactgatgtgcaaacacattc

SEQ ID NO: 654764 - DNA, 120 bp, Artificial Sequence
  ENSG00000183570_48 (sequence is synthesized)
ggaaaacacagaagacgagggctgaaagatggcattggacttggcacagggatggtcaggaggtcctgagtcactttgagaagcacaggatgtggtctgggatcaggtgttgcatctgct

SEQ ID NO: 654765 - DNA, 120 bp, Artificial Sequence
  ENSG00000183570_49 (sequence is synthesized)
gttcctgttctgaagtaaatgtaactgctatcctctggaggtaatctattgccataaaggattttccaattatccttaggtttctgtggtttcactaagttccatgcatccctgcctgag

SEQ ID NO: 654766 - DNA, 120 bp, Artificial Sequence
  ENSG00000183570_50 (sequence is synthesized)
tgtgcacgaggctaggaagagaagagatttccaaaaaggtgaagtaaacctggagcagaggaagacatgcatgtgtctcgggctgggcggaggaggaacggcttctcgtcttgtcttagt

SEQ ID NO: 654767 - DNA, 120 bp, Artificial Sequence
  ENSG00000183570_51 (sequence is synthesized)
tcttgaattgtagctcccacaattcctacaggtcatgggagggactcagtgggagcatagttcctctgcacgtgccctctcttgccggccaccatgtaagacgtccctttgctcttcctg

SEQ ID NO: 654768 - DNA, 74 bp, Artificial Sequence
  ENSG00000183570_52 (sequence is synthesized)
cctgttccagcactgagtgcgcctttggggatcgtgcaccgtgagcagcacagctggaccccaggtgagggcac

SEQ ID NO: 654769 - DNA, 120 bp, Artificial Sequence
  ENSG00000183570_53 (sequence is synthesized)
ctctacttcagcccttcatttcctggtagccactgagctgccccatggacactgggcagatggccagtgttagctgggaaggacagcagcagccgcagaggtggcagcaaggccagggca

SEQ ID NO: 654770 - DNA, 120 bp, Artificial Sequence
  ENSG00000183570_54 (sequence is synthesized)
tgcagacggcatggacgggtgacgccttctgggccccatctgtccttcctcacagcaccctcagcaccttaagccaccaccctcagccacaatttggcagaaggatggagtccaaggtct

SEQ ID NO: 654771 - DNA, 120 bp, Artificial Sequence
  ENSG00000183570_55 (sequence is synthesized)
ggcggccctgcgtgcagagacagtgatagatctggagagctgttgctgctggtccgtggtgactggggatggcatgtcaggtggagaagaatttcctctgtgtgcgcatttagacagctt

SEQ ID NO: 654772 - DNA, 120 bp, Artificial Sequence
  ENSG00000183570_56 (sequence is synthesized)
gactcctgtgataggattcactcgggcactcttggctggcgcctgcctgcgtgggattgtgcttcctcagggcctcacctcgccaggtgcggagcaacgctctgcccccacgttgggatg

SEQ ID NO: 654773 - DNA, 120 bp, Artificial Sequence
  ENSG00000183571_0 (sequence is synthesized)
ccaggcagagaaggtgcccggagctcagagcgcgcagagcccggccgctgggccgctgcctgagccagggaggcgcagcgcgagctcccacttcgtcttcatggattcccagcccagctg

SEQ ID NO: 654774 - DNA, 120 bp, Artificial Sequence
  ENSG00000183571_1 (sequence is synthesized)
tcgtcttcatggattcccagcccagctgcgtggtggtgactgcatgttttcaaggttgagccacgtggtagtgtgtccagaattggtgggttgttggtctcactgacttcaagaatgaag

SEQ ID NO: 654775 - DNA, 120 bp, Artificial Sequence
  ENSG00000183571_2 (sequence is synthesized)
tgggcctggggaatgaaacagtggtgcagctgcggactctggagctgcctgtagattacagggaggctaagcggagggtcaccggaatctgggaagatcatcagccgcaactcgtcgtgc

SEQ ID NO: 654776 - DNA, 120 bp, Artificial Sequence
  ENSG00000183571_3 (sequence is synthesized)
atgtgggcatggacaccgccgccaaggcgatcattctggaacagtctggcaagaaccaaggctaccgggacgccgacatccgcagcttctggcccgagggcggcgtgtgcctacctggca

SEQ ID NO: 654777 - DNA, 120 bp, Artificial Sequence
  ENSG00000183571_4 (sequence is synthesized)
gcagtctgcaagcgcgtagctgtggagggtgtcgacgtgatcttttcccgagatgcaggcagatacgtctgtgattatacctattacctgtctctgcatcatggaaagggctgcgcggca

SEQ ID NO: 654778 - DNA, 120 bp, Artificial Sequence
  ENSG00000183571_5 (sequence is synthesized)
ctcatccatgtccctccactatcgcgcgggctcccggccagcctgctgggaagagccttgagagtcatcatccaggaaatgctggaagaggtgggaaagcccaagcacagagcccagttc

SEQ ID NO: 654779 - DNA, 120 bp, Artificial Sequence
  ENSG00000183571_6 (sequence is synthesized)
gaagaaaactcaaccatggtccttccagccaaagggaactgaccgggggattgctcctctagagaaaattgaatgtttcaatcctgtatgtagcactcaactgtgcattgagaaactttt

SEQ ID NO: 654780 - DNA, 120 bp, Artificial Sequence
  ENSG00000183571_7 (sequence is synthesized)
tcaaaaattgcttgtaagacaaagagggtggaaaactctgaattagcccaacaaaatcacaaagggttattttattgtcaggagaaagaacactctgaaaggtggacatttcacagggga

SEQ ID NO: 654781 - DNA, 88 bp, Artificial Sequence
  ENSG00000183571_8 (sequence is synthesized)
agcaacttgctggagtcgccttctgtgctgtggaagttttgttgttttgcttgtttgcaataaccgttgctgctgcttactggctcac

SEQ ID NO: 654782 - DNA, 120 bp, Artificial Sequence
  ENSG00000183571_9 (sequence is synthesized)
cgtgaaggtctgcagcttcgttcttaaagccagccacatcacggacccaccgggagaaacgaataactccaaacacgccaccttaagagccgtagcactcatgatgaaggtccgtagctt

SEQ ID NO: 654783 - DNA, 120 bp, Artificial Sequence
  ENSG00000183571_10 (sequence is synthesized)
cactcctgaagtcagcgagatcacgaatctgccagaaggaagaaactccgaacacatgcgagcatcagaagaaacaaacttgggacacgctgcctttaaaaactgtaacactcaccgcca

SEQ ID NO: 654784 - DNA, 120 bp, Artificial Sequence
  ENSG00000183571_11 (sequence is synthesized)
tcgttcttgaagtcagtgagaccaagaatccgccgattctggacacaccatgacggaactagatccttggcctttcggggcccagaacgctacggacgccgggcggccaggaggggttgg

SEQ ID NO: 654785 - DNA, 120 bp, Artificial Sequence
  ENSG00000183576_0 (sequence is synthesized)
cctcccgtccggccgccgccgccgccaccgccgccaccgcctgggggttggttgaggcggacggcggggtccgggccggagtacgtcgttcccgctgcgctaggggaagcgggcagtcag

SEQ ID NO: 654786 - DNA, 120 bp, Artificial Sequence
  ENSG00000183576_1 (sequence is synthesized)
ggaagcgggcagtcagaaaaatgggtaagaagagtcgagtaaaaactcagaaatctggcactggtgctacagcaactgtgtcaccaaaggaaatcttgaacctgaccagtgagctgctgc

SEQ ID NO: 654787 - DNA, 120 bp, Artificial Sequence
  ENSG00000183576_2 (sequence is synthesized)
agaaatgcagcagtccggcgcctggcccaggaaaagagtgggaagagtatgtgcagatccggactctggttgagaaaatacggaaaaagcaaaaaggtctgtccgttacttttgatggaa

SEQ ID NO: 654788 - DNA, 120 bp, Artificial Sequence
  ENSG00000183576_3 (sequence is synthesized)
aaagagaagattactttcctgatctaatgaaatgggcctctgaaaatggggcttctgtcgagggttttgaaatggttaacttcaaagaagagggctttggtttgagagcaacaagagata

SEQ ID NO: 654789 - DNA, 120 bp, Artificial Sequence
  ENSG00000183576_4 (sequence is synthesized)
tcaaggcagaagaattgtttttatgggttccacgaaaattgctaatgactgttgaatctgctaaaaattcagtgttggggcccttatattctcaagaccgaatccttcaagccatgggaa

SEQ ID NO: 654790 - DNA, 120 bp, Artificial Sequence
  ENSG00000183576_5 (sequence is synthesized)
acatcgcactggcctttcatttgctgtgtgagcgagccagccctaactccttctggcagccctatattcaaaccctccccagtgaatatgacactcctctctactttgaagaagatgaag

SEQ ID NO: 654791 - DNA, 120 bp, Artificial Sequence
  ENSG00000183576_6 (sequence is synthesized)
ttcggtatcttcagtccacacaagctatacatgatgtcttcagccagtataaaaacacagctcgacagtacgcctacttctataaagtcatccagacccatcctcatgccaacaaactac

SEQ ID NO: 654792 - DNA, 120 bp, Artificial Sequence
  ENSG00000183576_7 (sequence is synthesized)
ccttgaaggattctttcacttacgaggactacaggtgggcagtctcttctgttatgacgaggcaaaaccaaattcccacagaggatggttcccgcgtgaccctggctctgattcctttat

SEQ ID NO: 654793 - DNA, 120 bp, Artificial Sequence
  ENSG00000183576_8 (sequence is synthesized)
gggatatgtgtaaccacaccaacggcctgatcactactggttacaacctggaagatgaccgctgtgagtgtgtggctctgcaggattttcgggctggagagcagatttacattttttatg

SEQ ID NO: 654794 - DNA, 120 bp, Artificial Sequence
  ENSG00000183576_9 (sequence is synthesized)
gcactcgatccaacgcagagtttgtgatccacagtggttttttctttgacaataactcacacgacagagtgaaaataaagcttggagtgagtaaaagtgacagactctacgccatgaagg

SEQ ID NO: 654795 - DNA, 120 bp, Artificial Sequence
  ENSG00000183576_10 (sequence is synthesized)
ccgaggtcttggctcgtgccggcatccccacttccagtgtttttgcattgcattttaccgagccgcccatctctgctcagcttttggcttttctccgagtattctgtatgactgaagaag

SEQ ID NO: 654796 - DNA, 120 bp, Artificial Sequence
  ENSG00000183576_11 (sequence is synthesized)
tttggacatttcttgaagatagagcctcacttcttttaaaaacatataaaacaactattgaggaagataaatccgtcttgaaaaaccacgatctttctgttcgtgcaaaaatggccatca

SEQ ID NO: 654797 - DNA, 120 bp, Artificial Sequence
  ENSG00000183576_12 (sequence is synthesized)
aattgcgcttaggtgagaaagagattttggaaaaagcagtaaagagtgcagctgtcaaccgggaatactatcgccaacagatggaggaaaaggctccgcttcccaaatatgaagagagta

SEQ ID NO: 654798 - DNA, 120 bp, Artificial Sequence
  ENSG00000183576_13 (sequence is synthesized)
accttgggctgttggagagcagcgtgggggactcgaggctccccctggtcttgagaaacctcgaggaggaggctggagtgcaggatgccttgaacatcagagaggcaatcagcaaagcaa

SEQ ID NO: 654799 - DNA, 120 bp, Artificial Sequence
  ENSG00000183576_14 (sequence is synthesized)
aggccacagaaaacgggcttgtaaacggtgaaaactctatccctaatgggaccaggtccgaaaatgaaagtctcaatcaagaaagtaaaagagcagttgaagacgccaaaggatcttctt

SEQ ID NO: 654800 - DNA, 120 bp, Artificial Sequence
  ENSG00000183576_15 (sequence is synthesized)
cagacagcactgctggagttaaggagtagctcgaggtgaagctggatgggggatccagtggagcaggagttgacggacagtccgttcacatcgctgtgtttccttgttaacatttttctt

SEQ ID NO: 654801 - DNA, 120 bp, Artificial Sequence
  ENSG00000183576_16 (sequence is synthesized)
tctgcagagaggaagatatgtttttgctgctttatataaaaatggtttttttaagttattttaaaaatctagcttccctttttgattaagattgccatcttgcttttaggcaaaacaaac

SEQ ID NO: 654802 - DNA, 120 bp, Artificial Sequence
  ENSG00000183576_17 (sequence is synthesized)
caattaacaaacaaccacaagaaagggagaagaggtgcctgtgggagattttgcagacctattgtgggtataggtattttcttcctggggaagaattcagttcccgtctcagctgtactt

SEQ ID NO: 654803 - DNA, 120 bp, Artificial Sequence
  ENSG00000183576_18 (sequence is synthesized)
ttgtgggcctgtcatcttgatgaccagaatgaaagcttgctctgcctcctgccagccagaattggtggcgggacttggggatacagcgtgaaggtggggaagttgcacagcagaaaacag

SEQ ID NO: 654804 - DNA, 120 bp, Artificial Sequence
  ENSG00000183576_19 (sequence is synthesized)
aattgaagttgggaaactctagagtctgggcaaaatgtttggttttttctcttaaaaaaaataacaccccattaccaaaagaaaaggtaaggtggcaaccttatttttaatagtttgaaa

SEQ ID NO: 654805 - DNA, 120 bp, Artificial Sequence
  ENSG00000183576_20 (sequence is synthesized)
atcctaattatataaaaatatatatataaacacacatatatatagtgatttctaaagatttgtttacttttgtgttttgttttactgtactaagaacttgtcctttctccttgaatcaaa

SEQ ID NO: 654806 - DNA, 120 bp, Artificial Sequence
  ENSG00000183576_21 (sequence is synthesized)
gaatcaaagtaggacatgcatcatcctcctaattttaaatgttggctctgattttaaagtggtgcatttgattccagccttggtaatggagagtttgcaaacacacagcggcccacagct

SEQ ID NO: 654807 - DNA, 120 bp, Artificial Sequence
  ENSG00000183576_22 (sequence is synthesized)
tcacgtggtggtgtgcagtgtgaggcagctccttggctttcctggttttcacaacaagctagagattttcaaagctacacttttgagtaaaaacccttattaaaagaaaaacatgattaa

SEQ ID NO: 654808 - DNA, 120 bp, Artificial Sequence
  ENSG00000183576_23 (sequence is synthesized)
ttccttaggcacttacgggactcactcatagacctcctccagcgtggctgccctgagcaccctatgtggaatgactacgcctccagctcatccgccctcctgccctgtcctgttacattt

SEQ ID NO: 654809 - DNA, 120 bp, Artificial Sequence
  ENSG00000183576_24 (sequence is synthesized)
ccctctattgtccagatccgcttgtttctgcctttttaaaaaattattgttggttcacccccccgcctcccattagaatggaagatccatgaacgcagggtgattttgggggagggtctg

SEQ ID NO: 654810 - DNA, 120 bp, Artificial Sequence
  ENSG00000183576_25 (sequence is synthesized)
ttttgctcattgctatatcgctgtggtttttaatgaattcatgaccggtaaataaatgactgtaaaagccccatgcctaggaaaaaagatcagaaagaaataaaccaaaatgttaacgtg

SEQ ID NO: 654811 - DNA, 120 bp, Artificial Sequence
  ENSG00000183576_26 (sequence is synthesized)
ccctggctctttcaaaccctgggtttgtttttaaatgatgatgaaggccaaacattacctttgttacttaggaaaagactttgtacgtttgtaagagatcaaacctaaatttttggttat

SEQ ID NO: 654812 - DNA, 120 bp, Artificial Sequence
  ENSG00000183576_27 (sequence is synthesized)
gttatttcttactgcaattggcttttaaatgttccaaccttaagtcaccatttatcttgttataggtgggcagtctcttctgttatgacgaggcaaaaccaaattcccacagaggatggt

SEQ ID NO: 654813 - DNA, 120 bp, Artificial Sequence
  ENSG00000183576_28 (sequence is synthesized)
tcccgcgtgaccctggctctgattcctttatgggatatgtgtaaccacaccaacggcctgaagaactgaaagaacacttgctgggagacagcgctattgatagaatcttcaccttgggga

SEQ ID NO: 654814 - DNA, 120 bp, Artificial Sequence
  ENSG00000183576_29 (sequence is synthesized)
tgtgttgaatctgggaggctgttgttgctaagctttgggagggggctgttattccacctacccatcgtactccccccgttgcctccctccaaaaggaacaaacaaaaccgaaccggccac

SEQ ID NO: 654815 - DNA, 120 bp, Artificial Sequence
  ENSG00000183576_30 (sequence is synthesized)
tcctccccaccgcccacagatagaagctggtatttttcttttactgcattgactaatactgaaaactgggagcttgaatcttataccattttcaaaagccacagtgaactacatgtgttt

SEQ ID NO: 654816 - DNA, 120 bp, Artificial Sequence
  ENSG00000183576_31 (sequence is synthesized)
tttcttatcttattgtaccacagactaaaccaaagtttctttttacttattctctttaaaatgctcatttattggggaaaaaaaatcatatttctcattttcccttttgtgtcttctttt

SEQ ID NO: 654817 - DNA, 120 bp, Artificial Sequence
  ENSG00000183576_32 (sequence is synthesized)
ctttgctgacactctgtttccagttctgtacctttgattctttcttgtccccggtcccttcccctgatgggctgacgaatccctggccatgtttatgaacctgtgtttgttacttgcttt

SEQ ID NO: 654818 - DNA, 120 bp, Artificial Sequence
  ENSG00000183576_33 (sequence is synthesized)
ccctggtgctgtggggcgggaggagggggctcatgccttgggctcctcgcccttgactgcaggagtcagctggcatcatcatacctgggaagcctggggaggaggaagttgtattattat

SEQ ID NO: 654819 - DNA, 120 bp, Artificial Sequence
  ENSG00000183576_34 (sequence is synthesized)
ggtcccccacagctgggaagaggtggaggcaggctctgtttctccacattcttcggattccgggcagcagcataggtgaagcgctctgtgctctgtgagagggttgtctgataaagattt

SEQ ID NO: 654820 - DNA, 120 bp, Artificial Sequence
  ENSG00000183576_35 (sequence is synthesized)
cctgatattagtaggcagaaataagatacatttcagatcattttgaaatatcatactttatactagtatactgtttgattaggttttatgttcatcttttctctgtcagctttccttgtt

SEQ ID NO: 654821 - DNA, 120 bp, Artificial Sequence
  ENSG00000183576_36 (sequence is synthesized)
attagcagtattataaatagaataaagaaatgccgtgaatgattatttcacattgaattccctggaatggccagaacacacgtagtgtgcgccagacactgaagacagaatatcctagtg

SEQ ID NO: 654822 - DNA, 120 bp, Artificial Sequence
  ENSG00000183576_37 (sequence is synthesized)
ctaatttgggaaggtctagcaacaagtatgttcttgaatcttaaaagtatttaaattgtggcaagaaagaatagttccatttttataattacattttggccttaatttagatatggttaa

SEQ ID NO: 654823 - DNA, 120 bp, Artificial Sequence
  ENSG00000183576_38 (sequence is synthesized)
atagcatgttttataacttattttcattaatgaatataattttacattttttgttttgtttttcttcagagttattttaaattgacggtaagcttgaaatttaagaaatcttcaaatagc

SEQ ID NO: 654824 - DNA, 120 bp, Artificial Sequence
  ENSG00000183576_39 (sequence is synthesized)
cttgaaatttaagaaatcttcaaatagcttttaatatctgactgtagtgtttttcttcttctttttttgaatgagatcatttgttcccaaactcaattgattattagagttctttttaat

SEQ ID NO: 654825 - DNA, 120 bp, Artificial Sequence
  ENSG00000183576_40 (sequence is synthesized)
acctctgtagcaaggtgagcagtgccctacccccagccccacagtccacctgatggtgttgaggccgccaccaggccaccgtggtccctagcgaagcttccatccattggcacctcacac

SEQ ID NO: 654826 - DNA, 120 bp, Artificial Sequence
  ENSG00000183576_41 (sequence is synthesized)
actcatctgcacattggtttttgtttagcttccatgtaaatgggataaaacaattcctttttccctaccaagtgttaaaaaaaaaagaggtttatctcaaaataaagaaattgatgacaa

SEQ ID NO: 654827 - DNA, 80 bp, Artificial Sequence
  ENSG00000183578_0 (sequence is synthesized)
gccggacgctcgggctcctcggcgctcgcgcctcccctccctcctcccggctgtctcccggagcgccccaccctccgccc

SEQ ID NO: 654828 - DNA, 120 bp, Artificial Sequence
  ENSG00000183578_1 (sequence is synthesized)
gtgcgccgcggctgcccgagcgccccgcagacgggcgggtggccgtggacgcccagccagcagcccgcagcatggattcggattccggggagcagagcgagggcgagcccgtgaccgccg

SEQ ID NO: 654829 - DNA, 120 bp, Artificial Sequence
  ENSG00000183578_2 (sequence is synthesized)
caggtcctgatgtttttagttcaaagagtcttgcgcttcaagcccagaagaagattctgagcaaaatagccagcaaaactgtggccaacatgttgattgatgacaccagcagcgagatct

SEQ ID NO: 654830 - DNA, 120 bp, Artificial Sequence
  ENSG00000183578_3 (sequence is synthesized)
ttgatgagctctacaaagtcaccaaagagcacacacacaacaagaaggaagcccacaagatcatgaaagacttaatcaaggtggcgatcaaaatcgggatcctctaccggaacaaccagt

SEQ ID NO: 654831 - DNA, 120 bp, Artificial Sequence
  ENSG00000183578_4 (sequence is synthesized)
ttagccaagaggagctggttattgtggagaagttccggaagaagctgaaccagaccgccatgaccattgtcagcttctatgaggtggaatacaccttcgataggaacgtgctctccaatc

SEQ ID NO: 654832 - DNA, 120 bp, Artificial Sequence
  ENSG00000183578_5 (sequence is synthesized)
tcctgcatgagtgcaaggacctggtgcatgaactggtgcagcggcacctgacgcccaggacccacgggcgcatcaaccacgtctttaaccactttgccgatgtggagttcctctccaccc

SEQ ID NO: 654833 - DNA, 120 bp, Artificial Sequence
  ENSG00000183578_6 (sequence is synthesized)
tctatagtctggatggagactgtaggcccaacctcaagaggatttgtgaaggaatcaataagttgctagatgagaaagtcctttaaatgccttccctcctactggactttgctgctttaa

SEQ ID NO: 654834 - DNA, 120 bp, Artificial Sequence
  ENSG00000183578_7 (sequence is synthesized)
agttacagcactcaaccatgatctgggtgagaatcaagaacataagcagaaacccttgtcaaagatgtccatgttctttcctgttcatccctctgatgctgattctgatgctgaactgag

SEQ ID NO: 654835 - DNA, 120 bp, Artificial Sequence
  ENSG00000183578_8 (sequence is synthesized)
aaatcacctgtgtgcaagcccaaaggacatttcatctattctaagcagaaaggctgttttgttcattacagtgagtgctgttcatctcatggagtgggaggagcactaaaccaggagaca

SEQ ID NO: 654836 - DNA, 120 bp, Artificial Sequence
  ENSG00000183578_9 (sequence is synthesized)
gaggacatggatttggtttccagcttaaccagttaggactctgtcctctgcattctggaaccatgatgcctgcctgcctgcctcacagggctgttgtgaggaccagatgagatgatgtat

SEQ ID NO: 654837 - DNA, 120 bp, Artificial Sequence
  ENSG00000183578_10 (sequence is synthesized)
gttcatacttttggaatctctaatttaaagtcttaatattttgtcttctgagtgtgaggggataaacctggatgtagactattaagcagcataggagaaaagaacaatagaatctaatgg

SEQ ID NO: 654838 - DNA, 120 bp, Artificial Sequence
  ENSG00000183578_11 (sequence is synthesized)
actgggtttgcaatctctctctaaatgcactgcttcagacaaagtgaaatccaaaggtgtgaaaaagtatagctgcaaattggaaaaatgtgtttcaagagtcgtctttttggccaggca

SEQ ID NO: 654839 - DNA, 120 bp, Artificial Sequence
  ENSG00000183578_12 (sequence is synthesized)
aacagagcaagactctgtctctaaaaaataataataataataataatttttttaaaaagaggtgtttttgaggtcttagatgttcaggttgatgatcctgcagagggaaactttccatgg

SEQ ID NO: 654840 - DNA, 120 bp, Artificial Sequence
  ENSG00000183578_13 (sequence is synthesized)
aactttccatgggggggtggggagagagagttttccatccacaatatagaaacagagaagcactgtgctccctctgcaggaccagccttcccttatctaaggggcatggagctcagggag

SEQ ID NO: 654841 - DNA, 120 bp, Artificial Sequence
  ENSG00000183578_14 (sequence is synthesized)
gctttattccatatgcacgggagaatcaggcagaatgaacccctacccatctttcttggcttttcagtcattttgtgctgttttctctggttcattaataaattgaaactgccctccaaa

SEQ ID NO: 654842 - DNA, 120 bp, Artificial Sequence
  ENSG00000183578_15 (sequence is synthesized)
acttgctagtcttacctcaagtaatgggaaacgaccagacctcctaaagagtcagtgtgcaagttagggctactgtcccaagaaggacacctgagtccaaatggggaaaccacggcaaaa

SEQ ID NO: 654843 - DNA, 120 bp, Artificial Sequence
  ENSG00000183578_16 (sequence is synthesized)
cccaagcacactggtttccacactctgtgaggcagagccaaaggggaaactgtgggtcaacggatatgcagggacccaaggcacaagggatgccacgttacaaacaagactcatcccctt

SEQ ID NO: 654844 - DNA, 120 bp, Artificial Sequence
  ENSG00000183579_0 (sequence is synthesized)
gcacagaagtttgctgcatcactggtgagctggggagtgtcctgtgtggtgtccacttaatcttactaggaaggatcccctcatttcaacaagatgcacccactgggcctatgtaataac

SEQ ID NO: 654845 - DNA, 120 bp, Artificial Sequence
  ENSG00000183579_1 (sequence is synthesized)
aatgacgaagaggacttgtatgaatatggctgggtaggagtggtgaagctggaacagccagaattggacccgaaaccatgcctcactgtcctaggcaaggccaagcgagcagtacagcgg

SEQ ID NO: 654846 - DNA, 120 bp, Artificial Sequence
  ENSG00000183579_2 (sequence is synthesized)
ggagctactgcagtcatctttgatgtgtctgaaaacccagaagctattgatcagctgaaccagggctctgaagacccgctcaagaggccggtggtgtatgtgaagggtgcagatgccatt

SEQ ID NO: 654847 - DNA, 120 bp, Artificial Sequence
  ENSG00000183579_3 (sequence is synthesized)
aagctgatgaacatcgtcaacaagcagaaagtggctcgagcaaggatccagcaccgccctcctcgacaacccactgaatactttgacatggggattttcctggctttcttcgtcgtggtc

SEQ ID NO: 654848 - DNA, 120 bp, Artificial Sequence
  ENSG00000183579_4 (sequence is synthesized)
tccttggtctgcctcatcctccttgtcaaaatcaagctgaagcagcgacgcagtcagaattccatgaacaggctggctgtgcaggctctagagaagatggaaaccagaaagttcaactcc

SEQ ID NO: 654849 - DNA, 120 bp, Artificial Sequence
  ENSG00000183579_5 (sequence is synthesized)
aagagcaaggggcgccgggaggggagctgtggggccctggacacactcagcagcagctccacgtccgactgtgccatctgtctggagaagtacattgatggagaggagctgcgggtcatc

SEQ ID NO: 654850 - DNA, 120 bp, Artificial Sequence
  ENSG00000183579_6 (sequence is synthesized)
ccctgtactcaccggtttcacaggaagtgcgtggacccctggctgctgcagcaccacacctgcccccactgtcggcacaacatcatagaacaaaagggaaacccaagcgcggtgtgtgtg

SEQ ID NO: 654851 - DNA, 120 bp, Artificial Sequence
  ENSG00000183579_7 (sequence is synthesized)
gagaccagcaacctctcacgtggtcggcagcagagggtgaccctgccggtgcattaccccggccgcgtgcacaggaccaacgccatcccagcctaccctacgaggacaagcatggactcc

SEQ ID NO: 654852 - DNA, 120 bp, Artificial Sequence
  ENSG00000183579_8 (sequence is synthesized)
cacggcaaccccgtcaccttgctgaccatggaccggcacggggagcagagcctctattccccgcagacccccgcctacatccgcagctacccacccctccacctggaccacagcctggcc

SEQ ID NO: 654853 - DNA, 120 bp, Artificial Sequence
  ENSG00000183579_9 (sequence is synthesized)
gctcaccgctgcggcctggagcaccgggcctactccccagcccaccccttccgcaggcccaagttgagtggccgcagcttctccaaggcagcttgcttctcccagtatgagaccatgtac

SEQ ID NO: 654854 - DNA, 120 bp, Artificial Sequence
  ENSG00000183579_10 (sequence is synthesized)
cagcactactacttccagggcctcagctacccggagcaggaggggcagtccccacctagcctcgcaccccggggcccggcccgtgcctttcctccgagcggcagtggcagcctgctcttc

SEQ ID NO: 654855 - DNA, 120 bp, Artificial Sequence
  ENSG00000183579_11 (sequence is synthesized)
tcccacctggagagcggcagcacgtccagcttcagctgctatcacggccaccgctcggtgtgcagtggctacctggccgactgcccaggcagcgacagcagcagcagcagcagctccggc

SEQ ID NO: 654856 - DNA, 120 bp, Artificial Sequence
  ENSG00000183579_12 (sequence is synthesized)
cagtgccactgttcctccagtgactctgtggtagactgcactgaggtcagcaaccagggcgtgtacgggagctgctccaccttccgcagctccctcagcagcgactatgaccccttcatc

SEQ ID NO: 654857 - DNA, 120 bp, Artificial Sequence
  ENSG00000183579_13 (sequence is synthesized)
taccgcagccggagcccctgtcgtgccagtgaggcggggggctcgggcagctcgggccggggacctgccctgtgcttcgagggctccccgcctcccgaggagctcccggcggtgcacagt

SEQ ID NO: 654858 - DNA, 120 bp, Artificial Sequence
  ENSG00000183579_14 (sequence is synthesized)
catggtgctgggcggggcgagccttggccgggccctgcctctccctcgggggatcaggtgtccacctgcagcctggagatgaactacagcagcaactcctccctggagcacagggggccc

SEQ ID NO: 654859 - DNA, 120 bp, Artificial Sequence
  ENSG00000183579_15 (sequence is synthesized)
aatagctctacctcagaagtggggctcgaggcttctcctggggccgcccctgacctcaggaggacctggaaggggggccacgagttgccgtcgtgtgcctgctgctgcgagccccagccc

SEQ ID NO: 654860 - DNA, 120 bp, Artificial Sequence
  ENSG00000183579_16 (sequence is synthesized)
tccccagccgggcctagcgccggagcagctggcagcagcaccttgttcctggggccccacctctacgagggctctggcccggcgggtggggagccccagtcaggaagctcccagggcttg

SEQ ID NO: 654861 - DNA, 120 bp, Artificial Sequence
  ENSG00000183579_17 (sequence is synthesized)
tacggccttcaccccgaccatttgcccaggacagatggggtgaaatacgagggtctgccctgctgcttctatgaagagaagcaggtggcccgcgggggcggagggggcagcggctgctac

SEQ ID NO: 654862 - DNA, 120 bp, Artificial Sequence
  ENSG00000183579_18 (sequence is synthesized)
actgaggactactcggtgagtgtgcagtacacgctcaccgaggaaccaccgcccggctgctaccccggggcccgggacctgagccagcgcatccccatcattccagaggatgtggactgt

SEQ ID NO: 654863 - DNA, 120 bp, Artificial Sequence
  ENSG00000183579_19 (sequence is synthesized)
gatctgggcctgccctcggactgccaagggacccacagcctcggctcctggggtgggacgcgaggcccggataccccacggccccacaggggcctgggagcaacccgggaagaggagcgg

SEQ ID NO: 654864 - DNA, 120 bp, Artificial Sequence
  ENSG00000183579_20 (sequence is synthesized)
gctctgtgctgccaggctagggccctactgcggcctggctgccctccggaggaggcgggtgctgtcagggccaacttccctagtgccctccaggacactcaggagtccagcaccactgcc

SEQ ID NO: 654865 - DNA, 120 bp, Artificial Sequence
  ENSG00000183579_21 (sequence is synthesized)
actgaggctgcaggaccgagatctcactcagcagacagcagcagcccgggagcctgagctcaggaggaactcttacctggaaattgggaactgtatggagactccaaactgacttctttc

SEQ ID NO: 654866 - DNA, 120 bp, Artificial Sequence
  ENSG00000183579_22 (sequence is synthesized)
cacaaaagtggtaataaagagagccctccttgtcaacccaaaatgtgagccccctgtggcaaaaccaccccctaccccattaacaaatcaacagacaaaattctccgagtcctttgcctc

SEQ ID NO: 654867 - DNA, 120 bp, Artificial Sequence
  ENSG00000183579_23 (sequence is synthesized)
ttttgataacatgttgttctgttttgtaaagtgtgtgtgcttggggttccgaggtgtgggattgagttctctgctttgtttttttttaagatattgtatgtaaatgtaaaaagttattta

SEQ ID NO: 654868 - DNA, 120 bp, Artificial Sequence
  ENSG00000183579_24 (sequence is synthesized)
gataacccctcacgtggagcagatgaaagggccgcggcgcgacggccgggggagccgagctgagcctgcgacccacaaagccgccgccgccgccgccgtgatggggctgtgaggcgtccg

SEQ ID NO: 654869 - DNA, 80 bp, Artificial Sequence
  ENSG00000183579_25 (sequence is synthesized)
cccgcgttcggtcctcagccggcccgcgactatgcccggccgcgcccgccctccgcgccctcccgccgcaggaccatgag

SEQ ID NO: 654870 - DNA, 80 bp, Artificial Sequence
  ENSG00000183579_26 (sequence is synthesized)
tgccgctgctgctcgggctgctgctggcggccgcggggcccggcgcggcgcgggccaaggagacggcgttcgtggaggtg

SEQ ID NO: 654871 - DNA, 120 bp, Artificial Sequence
  ENSG00000183579_27 (sequence is synthesized)
aaggagacggcgttcgtggaggtggtgctgttcgagtcgagcccaagcggcgattacaccacctacaccaccggcctcacgggccgcttctcgcgggccggggccacgctcagcgccgag

SEQ ID NO: 654872 - DNA, 120 bp, Artificial Sequence
  ENSG00000183579_28 (sequence is synthesized)
aagaaaaaaaaatcactgctgcattaaatgaaccacatcatgtgtagatactgttgtctccctgaagggagctcaggcctttgaaaagctcagggcttcacctgccttagaaaatgaacc

SEQ ID NO: 654873 - DNA, 120 bp, Artificial Sequence
  ENSG00000183579_29 (sequence is synthesized)
agaaacttgaagtaaagctagttgataggggtacaggctctgaggagcagtgcaaaactgcctctttctttctcgtggcaaatcccaatgtacacgatttcaggtctcagacgccatgcc

SEQ ID NO: 654874 - DNA, 120 bp, Artificial Sequence
  ENSG00000183579_30 (sequence is synthesized)
tctccagcccacgcctttaggcaggtgatggcagcagctaggaatagggtgtacatgatccacagccctgcggagccaggtcaagccgctgctatgaaagctccagggtgatggggacga

SEQ ID NO: 654875 - DNA, 120 bp, Artificial Sequence
  ENSG00000183579_31 (sequence is synthesized)
ttctgcccagtgtcctcagtctgtcccctcaggtcatggtcccaagtgaaatgacagagttcacagccctggtcttggctgaggtccaggtcatagtaagggcatgttcttggggccctc

SEQ ID NO: 654876 - DNA, 120 bp, Artificial Sequence
  ENSG00000183579_32 (sequence is synthesized)
gacctgaactctgaccctccgggcagggaagaggaggttgtcccctttggttgtcctggctttggagtcctttgcaaaaatattttgggccccctgccactggctgcagaaatggctcga

SEQ ID NO: 654877 - DNA, 120 bp, Artificial Sequence
  ENSG00000183579_33 (sequence is synthesized)
cggggtgtgtggggacagacacccagaaggaatgtacttttgtggccttggtgtccgatggggctgggggagagtgctctccactgacccagcagcacacccatgtgcagtgcgcctgca

SEQ ID NO: 654878 - DNA, 120 bp, Artificial Sequence
  ENSG00000183579_34 (sequence is synthesized)
tctgtgtgggggcagccacaccccttggctgctgcttccttgggctgcctttctgggggcatgtgactggacctacgaggtctgcactgagctccatttgaatgatacctttcctatccc

SEQ ID NO: 654879 - DNA, 120 bp, Artificial Sequence
  ENSG00000183579_35 (sequence is synthesized)
atttcccccacggaagcaccgcttcagggttattcagtcctctgcctcatggctgaaattgctcatctcgtctgcagatgtctactatcctgtctacctaatgcactattatgtattgat

SEQ ID NO: 654880 - DNA, 120 bp, Artificial Sequence
  ENSG00000183579_36 (sequence is synthesized)
tctccatgagacagagagagagagagactatcagatagtttacacccaaagggtaggtttttgtatatttttccagccttttttattaaggggaaggggagagtttaaaaacccaaaccg

SEQ ID NO: 654881 - DNA, 120 bp, Artificial Sequence
  ENSG00000183579_37 (sequence is synthesized)
ttgtggttttaaggtgtttcatttttaaaagggagagagaatctatttaaagctatttcagatcagggattgtcatccttttttgtccaatgtattccttgttctttaaaaaaatttttt

SEQ ID NO: 654882 - DNA, 120 bp, Artificial Sequence
  ENSG00000183579_38 (sequence is synthesized)
ttagaggaaactaatattagtctttgtgttcactaactcttctggtcacttgtatttatttattcattcattcatcagatatttgttgccatctgaaagaactggcccagtgggtctgaa

SEQ ID NO: 654883 - DNA, 120 bp, Artificial Sequence
  ENSG00000183579_39 (sequence is synthesized)
agctcgcttgagaataggaaacttgagacctggccccctgtgggtaggagaacaaggaccacctgggttctccagtcttgaacgagaatctcactcttatcagaatgtttttcttaacct

SEQ ID NO: 654884 - DNA, 120 bp, Artificial Sequence
  ENSG00000183579_40 (sequence is synthesized)
cagcgtatgatgaggaaatttacttatctctagctaggatttgacaaattccaacatcaaatgatcaaaacatttgccactgaggcttcactggtgagatccgttctccgtcctcgggtg

SEQ ID NO: 654885 - DNA, 120 bp, Artificial Sequence
  ENSG00000183579_41 (sequence is synthesized)
cagtcccttgggggctgctcctcggactgcgccccgcacacctgttatcgagggtgtgagaagcgcctaagctggtgacatgtgatctgggacgccttcatttctcgggccaggagtagc

SEQ ID NO: 654886 - DNA, 120 bp, Artificial Sequence
  ENSG00000183579_42 (sequence is synthesized)
agctgctaaggacagcagcttgcattgcgtggttttagggaagcagggtctggcttttaatatgaactgcaaaaagcagcttctcactgatatttttttgttgttgtttctggggggttt

SEQ ID NO: 654887 - DNA, 120 bp, Artificial Sequence
  ENSG00000183579_43 (sequence is synthesized)
ttttgttttgtttttaatgcctttgagtgcatattttcttcctcgtctgaaaccgaactcccaaagtggctttctttagccctggctggaaaaccacctctcaatagccttaagcaataa

SEQ ID NO: 654888 - DNA, 120 bp, Artificial Sequence
  ENSG00000183579_44 (sequence is synthesized)
atagatgagtagagaatgtggcttcaactgggcttattaaagtaagtgtgtctagttttcacttgaacaagtgatagctgcagatggcgaaagaaacccatttaatttttgtagcttaca

SEQ ID NO: 654889 - DNA, 120 bp, Artificial Sequence
  ENSG00000183579_45 (sequence is synthesized)
tggcgaaagaaacccatttaatttttgtagcttacaggtggtagaaacaaaaatgcaattttaaaaccttaaataccaaataccaaccattgccttttttttttttgagatggaattttg

SEQ ID NO: 654890 - DNA, 120 bp, Artificial Sequence
  ENSG00000183579_46 (sequence is synthesized)
caaccattgtcttttaaattcgtgttggcttctcagacagggagatcactggaataaaataaccgatggtcttattttgtcacacgtaaatcaaaagaaatgtcctctttgaagttgtaa

SEQ ID NO: 654891 - DNA, 120 bp, Artificial Sequence
  ENSG00000183579_47 (sequence is synthesized)
gactccaccaatgacagacacccttttcggtggactctgagtggtgtgtagtggttttatagccatggaaactaggagtatctcactttccactgagaacccctgcccccaatccctcta

SEQ ID NO: 654892 - DNA, 120 bp, Artificial Sequence
  ENSG00000183579_48 (sequence is synthesized)
agttggggtgtggcagttgggcagggtcaagtgacccagccctggctgtaggacagccatatacagtgaagagttctagaaccagctaaaaatggaagtttgggtgtttaccaacaaggt

SEQ ID NO: 654893 - DNA, 120 bp, Artificial Sequence
  ENSG00000183579_49 (sequence is synthesized)
acctctttatggatgcagccccagtaagctggctttaactctcagctccttccctgtctcctcctaatccaagcccttttataaaataaagccccttctgtcccactgctcacatactta

SEQ ID NO: 654894 - DNA, 120 bp, Artificial Sequence
  ENSG00000183579_50 (sequence is synthesized)
tgtgctgctagtctctactcgaagttcgtgcaggactaatgcttttaaaatgaggtctaaaaaataattactagtcgagactattattctttaaacagaactgcctttttctactcttta

SEQ ID NO: 654895 - DNA, 120 bp, Artificial Sequence
  ENSG00000183579_51 (sequence is synthesized)
tgtaaactctttctattgtgttggtctaacaaggcactattttaaaattttttaatttttcccatagcacttaaaagagattttgtaaagaccttgctgtaaagattttgtaataaaatg

SEQ ID NO: 654896 - DNA, 120 bp, Artificial Sequence
  ENSG00000183579_52 (sequence is synthesized)
gtctaagggctctttttccaacattaccatttttaaaaaatgttttaaaagctagaagacaacttatgtatattctgtatatgtatagcagcacatttcatttatggaaatatgttctca

SEQ ID NO: 654897 - DNA, 120 bp, Artificial Sequence
  ENSG00000183579_53 (sequence is synthesized)
gaatatttatttactaatatatttatcttaagccatgtcttatgttgagagtgtgacattgttggaataatcattgaaaatgactaacacaagaccctgtaaatacatgataattgcaca

SEQ ID NO: 654898 - DNA, 120 bp, Artificial Sequence
  ENSG00000183579_54 (sequence is synthesized)
cagattttacatatttgcagaccaaaaatgatttaaaacaagttgtagtcttctatggttttgtaacaaattgtacacatgactgtaaaaaaaaaatacaattttatcaagtatgtgtta

SEQ ID NO: 654899 - DNA, 120 bp, Artificial Sequence
  ENSG00000183580_0 (sequence is synthesized)
gccgggtcgctagtcttcactcgctccggggacccgcaacaagtggccgccgcgccctccccggggaagccgcgggcgcgcaggggcagccgaaggaggcggtcgagccgcggagcccag

SEQ ID NO: 654900 - DNA, 80 bp, Artificial Sequence
  ENSG00000183580_1 (sequence is synthesized)
aaggaggcggtcgagccgcggagcccaggggcctgcccggctcagcgcccaccggaggggatcggggcgggcggatgggg

SEQ ID NO: 654901 - DNA, 120 bp, Artificial Sequence
  ENSG00000183580_2 (sequence is synthesized)
cgccggcccccagcgcggattgtaagtgctgcagctgtgcccggccccgcctggagccaccgggggtgccaggaggggacgcagcaccccctcccactggagtgcggggacctctccagg

SEQ ID NO: 654902 - DNA, 120 bp, Artificial Sequence
  ENSG00000183580_3 (sequence is synthesized)
ccggaggtcggccccggagcttgggggggatgtgcagctaacggtcccgtcgggcgggctttcctcgggccgagcgcgcaggacgtgcgccgcagctatggagtgtcccgggagacggcg

SEQ ID NO: 654903 - DNA, 120 bp, Artificial Sequence
  ENSG00000183580_4 (sequence is synthesized)
ggcatgacggctacaggatgggcgcgaacaatggcaaacagtacggcagtgagggcaaaggcagctcgagcatctcatctgacgtgagttcaagtacagatcacacgcccactaaagccc

SEQ ID NO: 654904 - DNA, 120 bp, Artificial Sequence
  ENSG00000183580_5 (sequence is synthesized)
agaagaatgtggctaccagcgaagactccgacctgagcatgcgcacactgagcacgcccagcccagccctgatatgtccaccgaatctcccaggatttcagaatggaaggggctcgtcca

SEQ ID NO: 654905 - DNA, 120 bp, Artificial Sequence
  ENSG00000183580_6 (sequence is synthesized)
cctcctcgtcctccatcaccggggagacggtggccatggtgcactccccgcccccgacccgcctcacacacccgctcatccggctcgcctccagaccccagaaggagcaggccagcatag

SEQ ID NO: 654906 - DNA, 120 bp, Artificial Sequence
  ENSG00000183580_7 (sequence is synthesized)
accggctcccggaccactccatggtgcagatcttctccttcctgcccaccaaccagctgtgccgctgcgcgcgagtgtgccgccgctggtacaacctggcctgggacccgcggctctgga

SEQ ID NO: 654907 - DNA, 120 bp, Artificial Sequence
  ENSG00000183580_8 (sequence is synthesized)
ggactatccgcctgacgggcgagaccatcaacgtggaccgcgccctcaaggtgctgacccgcagactctgccaggacacccccaacgtgtgtctcatgctggaaaccgtaactgtcagtg

SEQ ID NO: 654908 - DNA, 120 bp, Artificial Sequence
  ENSG00000183580_9 (sequence is synthesized)
gctgcaggcggctcacagaccgagggctgtacaccatcgcccagtgctgccccgaactgaggcgactggaagtctcaggctgttacaatatctccaacgaggccgtctttgatgtggtgt

SEQ ID NO: 654909 - DNA, 120 bp, Artificial Sequence
  ENSG00000183580_10 (sequence is synthesized)
ccctctgccctaatctggagcacctggatgtgtcaggatgctccaaagtgacctgcatcagcttgacccgggaggcctccattaaactgtcacccttgcatggcaaacagatttccatcc

SEQ ID NO: 654910 - DNA, 120 bp, Artificial Sequence
  ENSG00000183580_11 (sequence is synthesized)
gctacctggacatgacggactgcttcgtgctggaggacgaaggcctgcacaccatcgcggcgcactgcacgcagctcacccacctctacctgcgccgctgcgtccgcctgaccgacgaag

SEQ ID NO: 654911 - DNA, 120 bp, Artificial Sequence
  ENSG00000183580_12 (sequence is synthesized)
gcctgcgctacctggtgatctactgcgcctccatcaaggagctgagcgtcagcgactgccgcttcgtcagcgacttcggcctgcgggagatcgccaagctggagtcccgcctgcggtacc

SEQ ID NO: 654912 - DNA, 120 bp, Artificial Sequence
  ENSG00000183580_13 (sequence is synthesized)
tgagcatcgcgcactgcggccgggtcaccgacgtgggcatccgctacgtggccaagtactgcagcaagctgcgctacctcaacgcgaggggctgcgagggcatcacggaccacggtgtgg

SEQ ID NO: 654913 - DNA, 120 bp, Artificial Sequence
  ENSG00000183580_14 (sequence is synthesized)
agtacctcgccaagaactgcaccaaactcaaatccctggatatcggcaaatgccctttggtatccgacacgggcctggagtgcctggccctgaactgcttcaacctcaagcggctcagcc

SEQ ID NO: 654914 - DNA, 120 bp, Artificial Sequence
  ENSG00000183580_15 (sequence is synthesized)
tcaagtcctgcgagagcatcaccggccagggcttgcagatcgtggccgccaactgctttgacctccagacgctgaatgtccaggactgcgaggtctccgtggaggccctgcgctttgtca

SEQ ID NO: 654915 - DNA, 120 bp, Artificial Sequence
  ENSG00000183580_16 (sequence is synthesized)
aacgccactgcaagcgctgcgtcatcgagcacaccaacccggctttcttctgaagggacagagttcatccggcgttgtattcacacaaacctgaacaaagcaaatttttttaaaagcagc

SEQ ID NO: 654916 - DNA, 120 bp, Artificial Sequence
  ENSG00000183580_17 (sequence is synthesized)
gtatgtaagcaccgacacccactcaaaacagctctttcttccgggaaggttattaggaatctggcctttatttttcctcatttctcatgggcaacagaggccaaagaaacgaagcaagac

SEQ ID NO: 654917 - DNA, 120 bp, Artificial Sequence
  ENSG00000183580_18 (sequence is synthesized)
aaacagcaaacaggcattttggtcaggtcatttgtaggcagtttctcttctcacaaaagatgtacttaagcaggctgatcgctgttccttgagcaaggcgcttactctcctccgctcagg

SEQ ID NO: 654918 - DNA, 120 bp, Artificial Sequence
  ENSG00000183580_19 (sequence is synthesized)
ctcgcacacaggccccacccccacagttccacgccccccccccaaggccacaccctccctccctagagcagcagcgaggatccatcatcagaatcacagtgctctccagacctcctctct

SEQ ID NO: 654919 - DNA, 120 bp, Artificial Sequence
  ENSG00000183580_20 (sequence is synthesized)
aaactgcttcattgacctaagtcactctcttcaatcccacacccatggacattcttgtcaactcaataccatagcactttgcataggcaaaatacttttcaggcctttttaaaaaattca

SEQ ID NO: 654920 - DNA, 120 bp, Artificial Sequence
  ENSG00000183580_21 (sequence is synthesized)
ttacagcaaacagctggggaaggacatgcagtcctcccccagctctgtcaatgactatgaccttggccaaagcacttcactgctctgggctgcagcttccagcactgaatcagaggccac

SEQ ID NO: 654921 - DNA, 120 bp, Artificial Sequence
  ENSG00000183580_22 (sequence is synthesized)
acagcccaaagattagcttcatgtccattatagcattgagggagcagagatacccatacacagaagcaccttggcatagagcacccaggcatcgacctcttccaggagaactgattctgt

SEQ ID NO: 654922 - DNA, 120 bp, Artificial Sequence
  ENSG00000183580_23 (sequence is synthesized)
ggatggatgtgatttcaggagattgtgcagtgccagcatcagtgcataaagggtcctgtatgtcctttggctgcaaatcacccacttccctgtgtttcagtgggagaatttcctctccca

SEQ ID NO: 654923 - DNA, 120 bp, Artificial Sequence
  ENSG00000183580_24 (sequence is synthesized)
cctcctcacatcctcttttgccaggctggatgctgtcgtctctgtacacaaatactttctgcattcccccctccacaccatcctagcgaggcaccagcacacctaatcacagcaaagccc

SEQ ID NO: 654924 - DNA, 120 bp, Artificial Sequence
  ENSG00000183580_25 (sequence is synthesized)
agatccccccatcagttgcttttactcagtgttttcaaataggagtaaaggcccttgcaatttttaattaacaagcaaggcccaagggaacacatgtcctcaaaagtttttctgatccct

SEQ ID NO: 654925 - DNA, 120 bp, Artificial Sequence
  ENSG00000183580_26 (sequence is synthesized)
cgccttgcacacctggcatgcatcaggcacatctgtcctacagctggcagagacagatgcctcggttctttgtcattcagattgcatttgacctcttctcatctatttatttctttatac

SEQ ID NO: 654926 - DNA, 120 bp, Artificial Sequence
  ENSG00000183580_27 (sequence is synthesized)
atccagacttcatcacatgaagcctattggggttaagtttgtaagtgtttaattgtgcaaattgccaccctgtgtacctcctccatgtctgtctgcgtgttttccaccaaagaatgcaaa

SEQ ID NO: 654927 - DNA, 120 bp, Artificial Sequence
  ENSG00000183580_28 (sequence is synthesized)
gcagacttccaggtgtttaaattctgttcactcaacaatgccagatgaatggaagagggaacacactgagatgacttagactctggtccaccaaccagacccttggaaaggaatactaaa

SEQ ID NO: 654928 - DNA, 120 bp, Artificial Sequence
  ENSG00000183580_29 (sequence is synthesized)
atcattacaaggtatggattttaaatggatgaaacttcaaattatcttatttggatagaagtctatattctagcctcatttgcatgaagtcagatagccagaagaaattccattgctggt

SEQ ID NO: 654929 - DNA, 120 bp, Artificial Sequence
  ENSG00000183580_30 (sequence is synthesized)
tttcacgaaattcacttgtcttttgctaataaacacatggccctttcccagattattctctagccaagccccacctttgttacgttgaaatccctcatttattttcttctcaaaatgccc

SEQ ID NO: 654930 - DNA, 120 bp, Artificial Sequence
  ENSG00000183580_31 (sequence is synthesized)
attatccaaatgcagaacctctgcatctccaagccagttatgctgaatttgtcaaacttagacacccttgacaactgcactcctactgtaggctcctgtgcatactgtcgtcttctgtgg

SEQ ID NO: 654931 - DNA, 120 bp, Artificial Sequence
  ENSG00000183580_32 (sequence is synthesized)
gggatggagaggttagtgtgatgaggtggtgtctgcccaggaggtttctttcaaacatcatggcctcccatccaatcaacatcatcaaattacatgtgtaatcaaggctctgtgccatgg

SEQ ID NO: 654932 - DNA, 120 bp, Artificial Sequence
  ENSG00000183580_33 (sequence is synthesized)
gggaaatgaatcatttagctaggccaggatctagtgaaagccacagagtttaaaaccatgaaagaagttgaaggcagcattcctcagctctgtgacttgtgaccctatttgaagtttcag

SEQ ID NO: 654933 - DNA, 120 bp, Artificial Sequence
  ENSG00000183580_34 (sequence is synthesized)
gatttgggtgtcacaaaggattgtccctaatccttggccctggggtcttccgagtgagctggtttaatactctgagaatgagcagggagatccagagaatgaatccctgaccgcatcacc

SEQ ID NO: 654934 - DNA, 120 bp, Artificial Sequence
  ENSG00000183580_35 (sequence is synthesized)
taaactgtcttccaaacatgagacaaagctgactgttcacactgattgcccagcacataccgtcttgccagtttcttcttttctcccagtctcctgttcatccattctgttctcccttgg

SEQ ID NO: 654935 - DNA, 120 bp, Artificial Sequence
  ENSG00000183580_36 (sequence is synthesized)
ggtgggaatctatgatggaggttactggggaaacagctcagcagatttttggagaccaaaccaaaggtctcactaggaaatttatctgttttaaaacattgcttccttcctggctctgct

SEQ ID NO: 654936 - DNA, 120 bp, Artificial Sequence
  ENSG00000183580_37 (sequence is synthesized)
aaattgaatgctcattgtttgttgttgttgttttttaattctaatgttcaaatcactgcgtgctgtatgaatctagaaagccttaatttactaccaagaaataaagcaatatgttcgtaa

SEQ ID NO: 654937 - DNA, 120 bp, Artificial Sequence
  ENSG00000183580_38 (sequence is synthesized)
ataaaaccgtagcgttgtatcccaattagcagctagcccctgatacgcataaggcaaaggcatttttctgcagttcaaaagttaagaaggtttgtgtctagtggtcttggctgaagagga

SEQ ID NO: 654938 - DNA, 120 bp, Artificial Sequence
  ENSG00000183580_39 (sequence is synthesized)
gtggaagagaccgggtcagttttacagcccgcccccagaggacagttggttacaaaggaggggccagcgcttgcagactggtaggaatgcaggctagctattcagcctgtggcctggagg

SEQ ID NO: 654939 - DNA, 120 bp, Artificial Sequence
  ENSG00000183597_0 (sequence is synthesized)
ggtgagtgcgcggctccggggctggccgactccgctagtggcccggccggcctgggctcgggggctccgggctctgggctctgggtgcgcggaccgggccaggctgcttgaagacctcgc

SEQ ID NO: 654940 - DNA, 120 bp, Artificial Sequence
  ENSG00000183597_1 (sequence is synthesized)
ggccaggctgcttgaagacctcgcgacctgtgtcagcagagccgccctgcaccaccatgtgcatcatcttctttaagtttgatcctcgccctgtttccaaaaacgcgtacaggctcatct

SEQ ID NO: 654941 - DNA, 120 bp, Artificial Sequence
  ENSG00000183597_2 (sequence is synthesized)
tggcagccaacagggatgaattctacagccgaccctccaagttagctgacttctgggggaacaacaacgagatcctcagtgggctggacatggaggaaggcaaggaaggaggcacatggc

SEQ ID NO: 654942 - DNA, 120 bp, Artificial Sequence
  ENSG00000183597_3 (sequence is synthesized)
tgggcatcagcacacgtggcaagctggcagcactcaccaactacctgcagccgcagctggactggcaggcccgagggcgaggtgaacttgtcacccactttctgaccactgacgtggaca

SEQ ID NO: 654943 - DNA, 120 bp, Artificial Sequence
  ENSG00000183597_4 (sequence is synthesized)
gcttgtcctacctgaagaaggtctctatggagggccatctgtacaatggcttcaacctcatagcagccgacctgagcacagcaaagggagacgtcatttgctactatgggaaccgagggg

SEQ ID NO: 654944 - DNA, 120 bp, Artificial Sequence
  ENSG00000183597_5 (sequence is synthesized)
agcctgatcctatcgttttgacgccaggcacctacgggctgagcaacgcgctgctggagactccctggaggaagctgtgctttgggaagcagctcttcctggaggctgtggaacggagcc

SEQ ID NO: 654945 - DNA, 120 bp, Artificial Sequence
  ENSG00000183597_6 (sequence is synthesized)
aggcgctgcccaaggatgtgctcatcgccagcctcctggatgtgctcaacaatgaagaggcgcagctgccagacccggccatcgaggaccagggtggggagtacgtgcagcccatgctga

SEQ ID NO: 654946 - DNA, 120 bp, Artificial Sequence
  ENSG00000183597_7 (sequence is synthesized)
gcaagtacgcggctgtgtgcgtgcgctgccctggctacggcaccagaaccaacactatcatcctggtagatgcggacggccacgtgaccttcactgagcgtagcatgatggacaaggacc

SEQ ID NO: 654947 - DNA, 120 bp, Artificial Sequence
  ENSG00000183597_8 (sequence is synthesized)
tctcccactgggagaccagaacctatgagttcacactgcagagctaaccccacctctgggcctggccagtgggctcctggggggccctgccttgaggggcactgtggacaggaaaccttc

SEQ ID NO: 654948 - DNA, 120 bp, Artificial Sequence
  ENSG00000183597_9 (sequence is synthesized)
ctttgccatactgcattgcactgcccgtggcttggccagcatcccccggatcagggccctgtggtttgcgtgttacccatctgtgtccccatgcccagttcagggtctgcctttatgcca

SEQ ID NO: 654949 - DNA, 120 bp, Artificial Sequence
  ENSG00000183597_10 (sequence is synthesized)
gtgaggagcagcagagtctgatactaggtctaggaccggccgaggtataccatgaacatgtggatacacctgagcccactcttgcacatgtacacaggcactcacatggcacacacatac

SEQ ID NO: 654950 - DNA, 120 bp, Artificial Sequence
  ENSG00000183597_11 (sequence is synthesized)
actcctgcgtgtgcacaagcacacacatgcaagccatatacatggacaccgacacaggcacatgtacgtgcacaggtgtgctacacatgtgcacacatgcacagttgcacagacacacac

SEQ ID NO: 654951 - DNA, 120 bp, Artificial Sequence
  ENSG00000183597_12 (sequence is synthesized)
acacaggtgcacacacacgatgccgaacaaggcagaagggcgactctcacctctcatgtgcttctggccagtaggtctttgttctggtccaacgacaggagtaggcttgtatttaaaagc

SEQ ID NO: 654952 - DNA, 120 bp, Artificial Sequence
  ENSG00000183597_13 (sequence is synthesized)
ggcccctcctctcctgtggccacagaacacaggcgtgcttggactcttgacaagcagacctgctcctgcagaggagacagccacatttggaattgggcaccgagaagacctgagaaaaac

SEQ ID NO: 654953 - DNA, 120 bp, Artificial Sequence
  ENSG00000183597_14 (sequence is synthesized)
ggcgtgagccaccacgcctggccgaaaaacccactctcataacagaagtgcagactcattgctagattcagtgcccttgagtgtgccagaggtcctctgtgtttgagacaatcctgtgtg

SEQ ID NO: 654954 - DNA, 120 bp, Artificial Sequence
  ENSG00000183597_15 (sequence is synthesized)
caatcctgtgtgtgccaggaggctccgtgtgcaccaggggctctcagaatcccgcttacccagctggagaccatgcctctggcagccccatctcagccagccctgctctctccctcttcc

SEQ ID NO: 654955 - DNA, 120 bp, Artificial Sequence
  ENSG00000183597_16 (sequence is synthesized)
ctccaggtgaggcaaacttcataggaatctgtacctgaatgtgagctcctgataataaaactctgaggctttggtgagcgcatttcgaggcctttcccttgtatgcagggtgccagtggg

SEQ ID NO: 654956 - DNA, 120 bp, Artificial Sequence
  ENSG00000183597_17 (sequence is synthesized)
agctgctatgtctcctgtgcagccagacaccctggacgaggcccttcccacctccccctttcctcacggcttcttcagcaccacatgtggatgcctgtgggtcagtccatctgtccatgg

SEQ ID NO: 654957 - DNA, 120 bp, Artificial Sequence
  ENSG00000183597_18 (sequence is synthesized)
gcaggggccgctgtgagagaccccatgcgcgtgggatgtggtagatgctgattatggggccagccacccatacaggtctatcaggtcgcaatggaggccccactggagcgggaggcaggc

SEQ ID NO: 654958 - DNA, 120 bp, Artificial Sequence
  ENSG00000183597_19 (sequence is synthesized)
tggcctggacttctgttggatgatgggggccaggggatggtaggaggggcaggagagcaggtctgcatctgtctcagccccaggagctcctggtttggggccagctctaaggagcttcat

SEQ ID NO: 654959 - DNA, 120 bp, Artificial Sequence
  ENSG00000183597_20 (sequence is synthesized)
ccctgagcctggccgagtataagggggtcccggatatccaatgctgagacctagacttttctaagcctctgcacccaacccctaacttggccttttcagacccatgagagtgcagggtgg

SEQ ID NO: 654960 - DNA, 120 bp, Artificial Sequence
  ENSG00000183597_21 (sequence is synthesized)
gtgtggacctgcgccagggcttcccagcctgattgtgacatgatgtgagtccacctagggaggagcaggggcctccccgtctcttccccttcttgcccagaccactttgctgggctcaga

SEQ ID NO: 654961 - DNA, 120 bp, Artificial Sequence
  ENSG00000183597_22 (sequence is synthesized)
gccttccatggctcactttgaactcagaagagtttcccagctgcgacccaggctgcacccccaggcctgaggagaaactgaggccccacatcccatacgtgtcctctgagtcaggacaac

SEQ ID NO: 654962 - DNA, 120 bp, Artificial Sequence
  ENSG00000183597_23 (sequence is synthesized)
aggctcccggctgggggcactgcccttgctgccaacacattcacctgccccagtggctaccatgtcctgtgccggtgaccagtgccagtccccaacctggatggtgccctgccctcatga

SEQ ID NO: 654963 - DNA, 120 bp, Artificial Sequence
  ENSG00000183597_24 (sequence is synthesized)
agagccccccggatgttcacctctgcccagagacccggcctgcccaggaagagcagtctctgctcttgtgtgggtccctctgcccccaccctgcccagggctccccagcagcctgaggcc

SEQ ID NO: 654964 - DNA, 120 bp, Artificial Sequence
  ENSG00000183597_25 (sequence is synthesized)
cctaaggaagaacagccctcaatggtgattctattggtgttatgagttgtgtccccaaagagatatatcagtgtcctgacccacagtacctcagaatgtgactgcatttggagatagggt

SEQ ID NO: 654965 - DNA, 120 bp, Artificial Sequence
  ENSG00000183597_26 (sequence is synthesized)
tcttccaggggtaaccaaggtagaatgaggtcgttagtgtgggccctaatccaatatgacggctatccttataaaaagaggaacatttaggctggatacagtggctcatgcctataatcc

SEQ ID NO: 654966 - DNA, 120 bp, Artificial Sequence
  ENSG00000183597_27 (sequence is synthesized)
ccaggacggggctgcacaggcctggcactgccctccaggacagggtcactcagtgtgggatgctgtcagaatgcctctcggggcggggactccagtcaatgtacaaagacgtgaagactc

SEQ ID NO: 654967 - DNA, 120 bp, Artificial Sequence
  ENSG00000183597_28 (sequence is synthesized)
ctcatcaggaagtggggttccactgggggctgtggcagcctctccagggacgttgctcctcgtgacttggcaaacattctgaggactgagcctgtcacagatgtaccaactcgggtattt

SEQ ID NO: 654968 - DNA, 120 bp, Artificial Sequence
  ENSG00000183597_29 (sequence is synthesized)
gggggtgaagcccaaggcttcctgtgatggcatgagggctgccggatccctggagaaagctgaggctgtgaagaacagtcacatagagtggctctggccgggtgtcctccctcccacggg

SEQ ID NO: 654969 - DNA, 120 bp, Artificial Sequence
  ENSG00000183597_30 (sequence is synthesized)
caggctgtgcagagcagccctccgcagccctggcttggagtgactgggatgctgtgctcccagggaagctcctgttggagatgaggccgcaggaactgcggaggttttggtgttttgccc

SEQ ID NO: 654970 - DNA, 120 bp, Artificial Sequence
  ENSG00000183597_31 (sequence is synthesized)
ttccgtgaagtgagcattcctccctcctgccctcctccccctccaaagccccagaacttggccaatgctgttagtccggggccttctgccaggacaggcaaacgggaagtggtcggcaca

SEQ ID NO: 654971 - DNA, 120 bp, Artificial Sequence
  ENSG00000183597_32 (sequence is synthesized)
ttgtggcgggccctgaagctgcctccttccacaagggcaggtccatgggcctctctcctggctcccgagctccaggcctgctgttcgttgagcatcccttgtgtgtggcatgcccagccc

SEQ ID NO: 654972 - DNA, 120 bp, Artificial Sequence
  ENSG00000183597_33 (sequence is synthesized)
tgccccacatgggtctgcacacttgctatggaggctgggagagttgcagtgtcccctaggtggaaggccgagggctggtgcggggcacttgctgtccggagccgttcttcctgcccatgc

SEQ ID NO: 654973 - DNA, 120 bp, Artificial Sequence
  ENSG00000183597_34 (sequence is synthesized)
cttcgtgactccaggtggcagagcccctgtgctctctgcatgcccccatgctcaggaaccacttttcccggtcagtagttccatgtgggtctgattagtctcaggagagttcctctgcgg

SEQ ID NO: 654974 - DNA, 120 bp, Artificial Sequence
  ENSG00000183597_35 (sequence is synthesized)
ccgtggcaccagcaggacttggcactcagcagctgtgtggaggtggggtgccaagggtgccatgccttgagcagatacacgggctcctgtggttgggggttgggggtttgggctcctcag

SEQ ID NO: 654975 - DNA, 120 bp, Artificial Sequence
  ENSG00000183597_36 (sequence is synthesized)
aagctggtgccagggccgaggctggagggcgggggcatcggaggtcagtgagcagccctgctggtaggtgcagatgaggaagccaaggcctggaagggagagaggcttgtcatggccaca

SEQ ID NO: 654976 - DNA, 120 bp, Artificial Sequence
  ENSG00000183597_37 (sequence is synthesized)
gctatccctgggtgaggcctgccctccgcctggcctgtggtatagtgctggcagcatgggtgtccagttctgtaggtccttacacagaaagcccagaggagatttttgcctgcaaacagt

SEQ ID NO: 654977 - DNA, 120 bp, Artificial Sequence
  ENSG00000183597_38 (sequence is synthesized)
ctctgaaattatgaaccaagtatcttaggaaagttgccaaagaccatggtgaggaagaacgggagtggaatgtgaacatagacgggggggcccttgaagcctaccaggggtggggaaggt

SEQ ID NO: 654978 - DNA, 120 bp, Artificial Sequence
  ENSG00000183597_39 (sequence is synthesized)
gggtcccacctgggggcagcacttcggggaggaaggcaccatgcctggctctttctctgcatctgttccatcttgaaggcccagggctccatgcccagcatctggcctgggagggcatct

SEQ ID NO: 654979 - DNA, 120 bp, Artificial Sequence
  ENSG00000183597_40 (sequence is synthesized)
cacaggccacaaagagatcctcttcactttgcaaaaaaggcactccaagttctagaagacttactgtggtattgaggattggaatattttcagctggggagcattttgaactattttctt

SEQ ID NO: 654980 - DNA, 90 bp, Artificial Sequence
  ENSG00000183597_41 (sequence is synthesized)
gctatgttgcccagtctggttccttagtctccagattagctgggactataggcatgagtcactatgcccagctctactgtcccttaacta

SEQ ID NO: 654981 - DNA, 120 bp, Artificial Sequence
  ENSG00000183597_42 (sequence is synthesized)
ggcatgagtcactatgcccagctctactgtcccttaactattttaaagtgtacacttaacacttgagagtaggaaaatgtggtctttggcgctttctttggaagcctcgatcaccctggg

SEQ ID NO: 654982 - DNA, 120 bp, Artificial Sequence
  ENSG00000183597_43 (sequence is synthesized)
gccacactggggccacctgtccagaaaccctcatagatgagctgtggtaaggggcctgatggagaggttggtgatgtggggatggggctcagccctgcagttgtccccatgggcagcctc

SEQ ID NO: 654983 - DNA, 120 bp, Artificial Sequence
  ENSG00000183597_44 (sequence is synthesized)
tgtgtgtccatgccatggggcattcggcatggcaggagggcattttagatcctgtgcctcctgggctggtgggccccgaggtgagctgggaacatacccgtgatgctggacaagagctgg

SEQ ID NO: 654984 - DNA, 120 bp, Artificial Sequence
  ENSG00000183597_45 (sequence is synthesized)
ggcctccatgaccccgcctgccaggcacctgaggggctgggtcctgcaagctcctgacctggccgcagcgggctactgcgcacatcgctagcctccagaaacagggctgtgagatcaccg

SEQ ID NO: 654985 - DNA, 120 bp, Artificial Sequence
  ENSG00000183597_46 (sequence is synthesized)
ggcagtgtcggggaggacgccctatggctgtagtctgacattctctccccttggcctgcagcacagcaaagggagacgtcatttgctactatgggaaccgaggggagcctgatcctatcg

SEQ ID NO: 654986 - DNA, 120 bp, Artificial Sequence
  ENSG00000183597_47 (sequence is synthesized)
ttttgacgccaggtgagcctgccctggcagcctgatggggtgggggactgtttctatgcagaggtcacccttgtgctttttagagaccaggcacttgtcatattactcttctgagatgac

SEQ ID NO: 654987 - DNA, 120 bp, Artificial Sequence
  ENSG00000183597_48 (sequence is synthesized)
tttgtggccatttaagtgccttatggtctgtgggcaccttgccctgcacctggacacttcagagagccctggctccctgctcaccccctccccatgggcttttcctgctgagcaaggtgc

SEQ ID NO: 654988 - DNA, 120 bp, Artificial Sequence
  ENSG00000183597_49 (sequence is synthesized)
cggccccgcacctgcccgaacctctgcggcggcggtggcagggtacgcgggaccgctccctcccagccgacttacgagaacatcccccgaccatccagccccgagcagggactggcagag

SEQ ID NO: 654989 - DNA, 120 bp, Artificial Sequence
  ENSG00000183597_50 (sequence is synthesized)
caaagggagacgtcatttgctactatgggaaccgaggggagcctgatcctatcgttttgacgccaggtggccccccaacctggcgtgaggtgaagaggttccctcttggctgtccccttt

SEQ ID NO: 654990 - DNA, 120 bp, Artificial Sequence
  ENSG00000183597_51 (sequence is synthesized)
ctggccgactccgctagtggcccggccggcctgggctcgggggctccgggctctgggctctgggtgcgcggaccgggccaggctgcttgaaggtgggtgggctggccgcacttcctcacc

SEQ ID NO: 654991 - DNA, 120 bp, Artificial Sequence
  ENSG00000183597_52 (sequence is synthesized)
gactctggccgcgtagcctccgccaccactcccagttcacagctccatgcggacagctgtgaggcccccggagaaagccacagagagaaaatgctttcagctgggtgtcaagaacttttc

SEQ ID NO: 654992 - DNA, 88 bp, Artificial Sequence
  ENSG00000183597_53 (sequence is synthesized)
aggtgatccgcctgcctcggccttccgaagtgctgacattacaggcatgagctgccgctcccagccgctttgcttggaacttctcctt

SEQ ID NO: 654993 - DNA, 68 bp, Artificial Sequence
  ENSG00000183597_54 (sequence is synthesized)
gggatgaattctacagccgaccctccaagttagctgacttctgggggaacaacaacgagatcctcagt

SEQ ID NO: 654994 - DNA, 120 bp, Artificial Sequence
  ENSG00000183597_55 (sequence is synthesized)
cgtgagtgggcgggtcctgctggggtgagccccagtgtcccgccaccagggcagagggaaaggcaggccctgctgccccgggaggcccatggaagtggccaggctgggtccccagctgca

SEQ ID NO: 654995 - DNA, 120 bp, Artificial Sequence
  ENSG00000183598_0 (sequence is synthesized)
atggcccgtactaagcagactgcccgcaagtcgaccggcggcaaggccccgaggaagcagctggctaccaaagcggcccgcaagagcgcgccggccacgggcggggtgaagaagccgcac

SEQ ID NO: 654996 - DNA, 120 bp, Artificial Sequence
  ENSG00000183598_1 (sequence is synthesized)
tctacggagctgctgatccgcaagctgcccttccagcggctggtacgcgagatcgcgcaggactttaagacggacctgcgcttccagagctcggccgtgatggcgctgcaggaggccagc

SEQ ID NO: 654997 - DNA, 120 bp, Artificial Sequence
  ENSG00000183598_2 (sequence is synthesized)
gaggcctacctggtggggctgttcgaagacacgaacctgtgcgccatccatgccaagcgcgtgaccatcatgcccaaggacatccagttggcccgccgcatccgcggggagcgggcctaa

SEQ ID NO: 654998 - DNA, 120 bp, Artificial Sequence
  ENSG00000183605_0 (sequence is synthesized)
ggggctcgccgcccggctcctcctccacgcgcggcctggcggcggcggccactctaaccagcgcaaaatgtccctggaacaggaggaggaaacgcaacctgggcggctcctaggacgcag

SEQ ID NO: 654999 - DNA, 120 bp, Artificial Sequence
  ENSG00000183605_1 (sequence is synthesized)
agacgccgtccccgccttcattgagcccaacgtgcgcttctggatcaccgagcgccaatcctttattcgacgatttcttcaatggacagaattattagatcctacaaatgtgttcatttc

SEQ ID NO: 655000 - DNA, 120 bp, Artificial Sequence
  ENSG00000183605_2 (sequence is synthesized)
agttgaaagtatagaaaactcgaggcaactattgtgcacaaatgaagatgtttccagccctgcctcggcggaccaaaggatacaagaagcttggaagcggagtcttgcaacagtgcatcc

SEQ ID NO: 655001 - DNA, 120 bp, Artificial Sequence
  ENSG00000183605_3 (sequence is synthesized)
cgacagcagcaacctgatccccaagctttttcgacctgcagcgttcctgcctttcatggcacccacggtatttttgtcaatgacgccactgaaagggatcaagtccgtgattttacctca

SEQ ID NO: 655002 - DNA, 120 bp, Artificial Sequence
  ENSG00000183605_4 (sequence is synthesized)
ggttttcctctgtgcctacatggcagcgttcaacagcatcaatggaaacagaagttacacttgtaagccactagaaagatcattactaatggcgggagccgttgcttcttcaactttctt

SEQ ID NO: 655003 - DNA, 120 bp, Artificial Sequence
  ENSG00000183605_5 (sequence is synthesized)
aggagtaatccctcagtttgtccagatgaagtatggcctgactggcccttggattaaaagactcttacctgtgatcttcctcgtgcaagccagtggaatgaatgtctacatgtcccgaag

SEQ ID NO: 655004 - DNA, 120 bp, Artificial Sequence
  ENSG00000183605_6 (sequence is synthesized)
ttgggacctcagctctgattcctgaagtcttcacctacttttttaaaaggacccagtatttcaggaaaaacccagggtcattgtggattttgaaactgtcttgtactgtcctggcaatgg

SEQ ID NO: 655005 - DNA, 120 bp, Artificial Sequence
  ENSG00000183605_7 (sequence is synthesized)
gactgatggtgccattttcttttagtatatttccacagattggacagatacagtactgtagtcttgaagagaaaattcagtctccaacagaagaaacagaaatcttttatcacagagggg

SEQ ID NO: 655006 - DNA, 120 bp, Artificial Sequence
  ENSG00000183605_8 (sequence is synthesized)
tgtaggcgtgagttttaggtgaatttatgtggttcctgcttgaaaaccttcccctctccaggttcggtttagagaactttgccacaggtcttctggggaccccagaggtgtctgtgctga

SEQ ID NO: 655007 - DNA, 120 bp, Artificial Sequence
  ENSG00000183605_9 (sequence is synthesized)
caaggcgacttcagattccatactgagatcgttcccaggctggcgtctctggggtttttaaggctggctggagaagacagtgggagggtgccccgtctgacacccctggggttgctgagg

SEQ ID NO: 655008 - DNA, 120 bp, Artificial Sequence
  ENSG00000183605_10 (sequence is synthesized)
gaacggttggagtggggatcggcctgcgaaaggatactgtgaaatcactaattaactaataaacctgtctcaagttgaggatttgaagaaagaacacagagtccaccgtgcccaggacac

SEQ ID NO: 655009 - DNA, 120 bp, Artificial Sequence
  ENSG00000183605_11 (sequence is synthesized)
aggtgttaaatggataggccgtctcaagcggaacacgtacccctggggcgctgtttacgccctccaaccccaaaagcaatcttgtttccttactcagtgtcctccattctagacagctac

SEQ ID NO: 655010 - DNA, 120 bp, Artificial Sequence
  ENSG00000183605_12 (sequence is synthesized)
gtgcgcttctggatcaccgagcgccaagtacggcccgggcccggcgcgactaggggcagggagggggcgggccgggccgcgtggagtcgggctgacccgggtgaccttggccaggccacg

SEQ ID NO: 655011 - DNA, 120 bp, Artificial Sequence
  ENSG00000183605_13 (sequence is synthesized)
tgggcgccccctgtctccgtttcctcctctcggagttgtgccgggaacgcgcaccaccggccttcaccccttagggcgcggcaggggacgcaggggaaatcgaagctgccagatgcccac

SEQ ID NO: 655012 - DNA, 120 bp, Artificial Sequence
  ENSG00000183605_14 (sequence is synthesized)
gaccacaacgtcaccctccagattgccctctcggaggggcccagtccgcgcaggtggctgctccctactgcctgagctgtggctgagcagcagattggggagaaacaggctctcgcacct

SEQ ID NO: 655013 - DNA, 120 bp, Artificial Sequence
  ENSG00000183607_0 (sequence is synthesized)
acttactccagcaccttcctctcccaggcaaaatgaaaatacttgtggcatttctggtggtgctgaccatctttgggatacaatctcatggatacgaggtttttaacatcatcagcccaa

SEQ ID NO: 655014 - DNA, 120 bp, Artificial Sequence
  ENSG00000183607_1 (sequence is synthesized)
gcaacaatggtggcaatgttcaggagacagtgacaattgataatgaaaaaaataccgccatcattaacatccatgcaggatcatgctcttctaccacaatttttgactataaacatggct

SEQ ID NO: 655015 - DNA, 120 bp, Artificial Sequence
  ENSG00000183607_2 (sequence is synthesized)
acattgcatccagggtgctctcccgaagagcctgctttatcctgaagatggaccatcagaacatccctcctctgaacaatctccaatggtacatctatgagaaacaggctctggacaaca

SEQ ID NO: 655016 - DNA, 120 bp, Artificial Sequence
  ENSG00000183607_3 (sequence is synthesized)
tctccagcaaatacacctgggtcaagtacaaccctctggagtctctgatcaaagacgtggattggttcctgcttgggtcacccattgagaaactctgcaaacatatccctttgtataagg

SEQ ID NO: 655017 - DNA, 120 bp, Artificial Sequence
  ENSG00000183607_4 (sequence is synthesized)
gggaagtggttgaaaacacacataatgtcggtgctggaggctgtgcaaaggctgggctcctgggcatcttgggaatttcaatctgtgcagacattcatgtttaggatgattagccctctt

SEQ ID NO: 655018 - DNA, 120 bp, Artificial Sequence
  ENSG00000183607_5 (sequence is synthesized)
gttttatcttttcaaagaaatacatccttggtttacactcaaaagtcaaattaaattctttcccaatgccccaactaattttgagattcagtcagaaaatataaatgctgtatttataga

SEQ ID NO: 655019 - DNA, 120 bp, Artificial Sequence
  ENSG00000183607_6 (sequence is synthesized)
tgaaaacacacgtgagtaccaataagtcattcactcaccaaatattttctgaaagctactatgtgccaggtgctctgttgggtgccaagtgaaatgcaaataaatgggaacagtactcag

SEQ ID NO: 655020 - DNA, 120 bp, Artificial Sequence
  ENSG00000183607_7 (sequence is synthesized)
ttcagtttgctttgggaattaattacatgccatgtgtgtaaattgtgctaaattttaggaatacagaaatgaattaaacgtctccagggaacacatagtctagtgaagaagctgacaagt

SEQ ID NO: 655021 - DNA, 120 bp, Artificial Sequence
  ENSG00000183607_8 (sequence is synthesized)
gtatactttcatatgtaagaatttcaagtagcaaaaagtcatctgggcccttagaatagcatattttgaagataataagaaggaagtcactaagaaatgctctcaggatctagaatagaa

SEQ ID NO: 655022 - DNA, 120 bp, Artificial Sequence
  ENSG00000183607_9 (sequence is synthesized)
ttggtataggaaagaggaggccaagcggacttacagacagggagtaaaaaccctgattcatctgggtaacatatgccactgcagatattactgtcatttttatacaaagtttctaaatgt

SEQ ID NO: 655023 - DNA, 120 bp, Artificial Sequence
  ENSG00000183607_10 (sequence is synthesized)
ggcagagcaaccagagtgaaagaggtcgggccaactgatgatgaacacaacaaaggaaatttctcagagtactggaaggtagataaagaagagtttatgtttattatatatctactgccc

SEQ ID NO: 655024 - DNA, 120 bp, Artificial Sequence
  ENSG00000183607_11 (sequence is synthesized)
agaaaaaaattttaagtactcattcataaagtaaataaaggcacataggtatgccattgacacagaatggcataatatcactgggattgagccaaccagcacttccaaaagttgtcagtt

SEQ ID NO: 655025 - DNA, 120 bp, Artificial Sequence
  ENSG00000183615_0 (sequence is synthesized)
atacttggcctcacacacccatctgctcactcaccctggcacattcagcccccctaacccaccttgaacattgaccaccacacactccctggcacgctcttctcaccctcaacttctgcc

SEQ ID NO: 655026 - DNA, 120 bp, Artificial Sequence
  ENSG00000183615_1 (sequence is synthesized)
acctctccctgggcaatactgccagcctttccctaatctcagagctgcagccctgccctgtcactcacctcaaacctgccatgtccctggggctactgaaattccaggcagtgggtgaag

SEQ ID NO: 655027 - DNA, 120 bp, Artificial Sequence
  ENSG00000183615_2 (sequence is synthesized)
aggacgaggaggatgaggagggggagagcctggactctgtgaaggcactgacagccaagctgcagctgcagactcggcggccctcatatctggagtggacagcccaggtccagagccagg

SEQ ID NO: 655028 - DNA, 120 bp, Artificial Sequence
  ENSG00000183615_3 (sequence is synthesized)
atgcaggcgcaggacaggcagctggcagggcagctgctgcggctgcgggcccagctgcaccgactgaagatggaccaagcctgtcacctgcaccaggagctgctggatgaggccgagctg

SEQ ID NO: 655029 - DNA, 120 bp, Artificial Sequence
  ENSG00000183615_4 (sequence is synthesized)
gagctggagctggagcccggggccggcctagccctggccccgctgctgcggcacctgggcctcacgcgcatgaacatcagcgcccggcgcttcaccctctgctgaggaacacctgtgccc

SEQ ID NO: 655030 - DNA, 120 bp, Artificial Sequence
  ENSG00000183615_5 (sequence is synthesized)
cccgactccccgccccctctcccaatgccgcttcccctgcctgcctgggaagaggaaagggaggggtgccccagaggcaccagctcctggcgggggaggaggaacattcaggtttctgag

SEQ ID NO: 655031 - DNA, 120 bp, Artificial Sequence
  ENSG00000183615_6 (sequence is synthesized)
agctgaattccaagagtgcaaaaccccagcatcctgtttcctctgctgacccagctgggagggggaggaggaggagctcacaccctcaaactcctcaataaacgctttctctggttccca

SEQ ID NO: 655032 - DNA, 120 bp, Artificial Sequence
  ENSG00000183617_0 (sequence is synthesized)
aagctgcccgcaatacgtcatggcgaccaaacgccttttcggggctacccggacgtgggccggctggggggcctgggagctcctaaaccccgccacttccggaagactcctggcccggga

SEQ ID NO: 655033 - DNA, 120 bp, Artificial Sequence
  ENSG00000183617_1 (sequence is synthesized)
ttatgccaagaaaccagttatgaagggggccaaatcgggaaaaggtgcagtgaccagcgaggccctcaaggaccccgacgtatgcacagatcctgtccagctcaccacatatgccatggg

SEQ ID NO: 655034 - DNA, 120 bp, Artificial Sequence
  ENSG00000183617_2 (sequence is synthesized)
tctacaaggaagggcaggatgtacccctgaaaccggatgctgagtaccctgaatggctgttcgagatgaacttgggtcccccaaagaccctggaggagctggaccccgagagccgggagt

SEQ ID NO: 655035 - DNA, 120 bp, Artificial Sequence
  ENSG00000183617_3 (sequence is synthesized)
actggcggcggctgcggaaacagaacatctggcgccacaaccggctgagcaagaacaagaggttgtagcatggagggcccggcatcgctgacccccacgccgagggcttgccgttttccc

SEQ ID NO: 655036 - DNA, 120 bp, Artificial Sequence
  ENSG00000183617_4 (sequence is synthesized)
ggaggacgtggacttttgtgagacaagaggcggctccccagcctgggtttccatgtgaccccacagtggggctggaccagggccctggaggccaataaagagctttctgggtagacccta

SEQ ID NO: 655037 - DNA, 120 bp, Artificial Sequence
  ENSG00000183617_5 (sequence is synthesized)
cgaccaaacgccttttcggggctacccggacgtgggccggctggggggcctgggagctcctaaaccccgccacttccggaagactcctggcccgggattatgccaagaaaccagtccacc

SEQ ID NO: 655038 - DNA, 120 bp, Artificial Sequence
  ENSG00000183617_6 (sequence is synthesized)
ctctggagtcggctttcggcaccctgaccctgacccagggtctgaccctaggcctgagtgaggactggcctccctgcagtcccaacaactcctgccctgcctggctgtgatggggcggga

SEQ ID NO: 655039 - DNA, 120 bp, Artificial Sequence
  ENSG00000183617_7 (sequence is synthesized)
ggagtccaccagattagaggaggctgagggtgacacgtagttagggagtgatggggcctcttgctgggggtagatcacctcatggaccccacgtcctgcagaacccccaagggtcatgcc

SEQ ID NO: 655040 - DNA, 120 bp, Artificial Sequence
  ENSG00000183617_8 (sequence is synthesized)
ctcggccccacccttgccacagcagccccacccatgcctaggtgggtgccctgggggatttggactgggctcacccaccctccggcttcctctgtccacaagctggatgggcggggcggg

SEQ ID NO: 655041 - DNA, 120 bp, Artificial Sequence
  ENSG00000183621_0 (sequence is synthesized)
aattaattaaaaggatttacggtatatcttatgactctacaggagccttgggatatagataaaaatgaatgccatttcccatccagtactgaagtgttaaagttagaagacatttgctaa

SEQ ID NO: 655042 - DNA, 120 bp, Artificial Sequence
  ENSG00000183621_1 (sequence is synthesized)
gtcaaatcacttcaggaagctcatcctgggagtggaggaacagatgttctgtcattgccacattcttctggacacagactggagaactataggaatgtatgttgaagaaagtacgcacat

SEQ ID NO: 655043 - DNA, 120 bp, Artificial Sequence
  ENSG00000183621_2 (sequence is synthesized)
cttatcttctgaacattttgatggaattaaccacaaacttcatgcaagaacagtaaaaggaaagatactattcaagtccagtacatcataatgcagaattctgtatcagtaccaccaaaa

SEQ ID NO: 655044 - DNA, 120 bp, Artificial Sequence
  ENSG00000183621_3 (sequence is synthesized)
gatgaaggtgaatcaaacatcccttctggaacaatacagagtaggaaaggtttgcagaataagagtcagtttaggaccattgcaccaaaaattgtgcccaaagtcctaacgtccagaatg

SEQ ID NO: 655045 - DNA, 120 bp, Artificial Sequence
  ENSG00000183621_4 (sequence is synthesized)
ctgccatgtcattcaccatcacgctctgatcaggtgaatctgggaccctccatcaactccaagctgctggggatgtccacccagaactatgccctgatgcaggttgctggccaggagggg

SEQ ID NO: 655046 - DNA, 120 bp, Artificial Sequence
  ENSG00000183621_5 (sequence is synthesized)
acattttctcttgttgctctgccacatgttgcctcagctcagccaattcagaaacccagaatgtccctacctgaaaacctgaaacttcctattcctagatatcaaccccctagaaatagc

SEQ ID NO: 655047 - DNA, 120 bp, Artificial Sequence
  ENSG00000183621_6 (sequence is synthesized)
aaagcatcaagaaagaaacccatcctgatctttcctaagagtggctgtagcaaagctcctgcccaaacccaaatgtgtcctcagatgtccccttccccacctcaccaccctgaactcctg

SEQ ID NO: 655048 - DNA, 120 bp, Artificial Sequence
  ENSG00000183621_7 (sequence is synthesized)
tacaaacccagtccatttgaggaagtaccatcactagagcaagccccagccagcattagcacagctgcgctgaccaatggaagtgaccatggggacttgagaccaccagtgaccaacacc

SEQ ID NO: 655049 - DNA, 120 bp, Artificial Sequence
  ENSG00000183621_8 (sequence is synthesized)
catggcagtctgaaccctcctgctaccccagcatcatccacaccagaggagcctgccaagcaggacctcacagctctttcagggaaagcacactttgtaagcaagataacatctagtaaa

SEQ ID NO: 655050 - DNA, 120 bp, Artificial Sequence
  ENSG00000183621_9 (sequence is synthesized)
ccttctgctgttgccagtgaaaaatttaaagaacaagttgatcttgcaaaaaccatgaccaatttatcaccaaccattcttggcaatgcagttcagttgatctcttcagtccccaaaggg

SEQ ID NO: 655051 - DNA, 120 bp, Artificial Sequence
  ENSG00000183621_10 (sequence is synthesized)
aaactgccaatcccaccctactcaagaatgaagacaatggaggtttacaaaatcaaatcagatgctaacattgcaggtttttctttaccaggacctaaggccgactgtgataagataccc

SEQ ID NO: 655052 - DNA, 120 bp, Artificial Sequence
  ENSG00000183621_11 (sequence is synthesized)
tccaccacagaaggctttaatgcagccaccaaggtggcaagcaggctacctgttccacaagtgtcacagcagagtgcctgtgaaagtgccttttgtccacccaccaaacttgatcttaac

SEQ ID NO: 655053 - DNA, 120 bp, Artificial Sequence
  ENSG00000183621_12 (sequence is synthesized)
cacaaaacaaaactgaacagtggagcagcaaagagaaaaggaagaaaacggaaggtaccagatgaaattttggcatttcagggaaaaaggaggaaatatatcattaataagtgtagagat

SEQ ID NO: 655054 - DNA, 120 bp, Artificial Sequence
  ENSG00000183621_13 (sequence is synthesized)
ccccaagaattcagagaccaaaagctggggaccctgaaaaaataccgtagcattatgcccaaacctatcatggtcatacccactttggcctccctggcttctccaactacactacagtcc

SEQ ID NO: 655055 - DNA, 120 bp, Artificial Sequence
  ENSG00000183621_14 (sequence is synthesized)
cagatgcttgggggcctaggacaggatgttttgttaaataattcactcactcctaaatatcttggctgtaagcaagacaacagctcttcccctaagcccagctccgtgttcagaaatgga

SEQ ID NO: 655056 - DNA, 120 bp, Artificial Sequence
  ENSG00000183621_15 (sequence is synthesized)
ttctctggcattaagaagccttggcacagatgtcacgtctgcaaccaccacttccagttcaaacagcaccttcgagaccacatgaatacacacaccaacagacgcccttacagttgtcgg

SEQ ID NO: 655057 - DNA, 120 bp, Artificial Sequence
  ENSG00000183621_16 (sequence is synthesized)
atttgtcgcaagtcctatgtacgtcctggcagcctgagcacacacatgaaacttcatcatggtgagaaccgtctgaagaaactcatgtgttgtgagttttgtgcaaaagtgtttggccac

SEQ ID NO: 655058 - DNA, 120 bp, Artificial Sequence
  ENSG00000183621_17 (sequence is synthesized)
atccgagtctattttggccatctgaaagaagtgcatagggttgtgatcagcactgagcctgcgcccagtgaactgcagccaggagacataccaaagaacagagacatgagtgtgcgaggc

SEQ ID NO: 655059 - DNA, 120 bp, Artificial Sequence
  ENSG00000183621_18 (sequence is synthesized)
atggagggatcattggagagggaaaacaagtccaacctggaagaagacttccttctaaaccaggcagacgaagtcaaattacaaatcaaatgtggtcgttgtcagattactgctcagtct

SEQ ID NO: 655060 - DNA, 120 bp, Artificial Sequence
  ENSG00000183621_19 (sequence is synthesized)
tttgcggaaataaaatttcatttacttgatgttcatggagaggaaattgagggcaggctacaagaagggaccttcccaggaagcaaggggactcaggaagagttggtgcagcacgctagc

SEQ ID NO: 655061 - DNA, 120 bp, Artificial Sequence
  ENSG00000183621_20 (sequence is synthesized)
cccgactggaaaaggcatcctgagagagggaagccggagaaggttcattcctcctccgaggaatcacatgcatgtccaagactgaaaaggcagctccaccttcatcagaatggcgtggaa

SEQ ID NO: 655062 - DNA, 120 bp, Artificial Sequence
  ENSG00000183621_21 (sequence is synthesized)
atgctcatggaaaatgaaggaccccagtcaggaaccaacaagccaagggaaacctgccagggccctgagtgtcctggcctccacacgtttctcttgtggtcccattcaggctttaactgc

SEQ ID NO: 655063 - DNA, 120 bp, Artificial Sequence
  ENSG00000183621_22 (sequence is synthesized)
ctgctttgtgcagagatgctgggacggaaagaggacctcctccaccactggaagcaccagcataactgtgaggacccttccaaactgtgggctattttaaatacggtctccaaccaggga

SEQ ID NO: 655064 - DNA, 120 bp, Artificial Sequence
  ENSG00000183621_23 (sequence is synthesized)
gtgatcgaactttccagtgaagctgagaaatgagaccccaaggcagcctggggttaaggagagagctctgccgccaccttccttcagagcttcgtgctttatggtggtgcttagtcacaa

SEQ ID NO: 655065 - DNA, 120 bp, Artificial Sequence
  ENSG00000183621_24 (sequence is synthesized)
agatcaaacaacaggattggtgtgagtgaacagaaatgatttttgtacatggttttattttcttaacgaaataaaatataagctctcgaagcatatttttctaactatatgcagtcttat

SEQ ID NO: 655066 - DNA, 120 bp, Artificial Sequence
  ENSG00000183621_25 (sequence is synthesized)
tttaaaatacgtactgattcttaatatcttagactttcagaataaataaaaagatcaaaatttgaagattgaaatttagcagaatataggctgttcttcaaatacagctctcagtgaaaa

SEQ ID NO: 655067 - DNA, 120 bp, Artificial Sequence
  ENSG00000183621_26 (sequence is synthesized)
agggcggagcctgggggcccagcggcccgcgccccgtggcttgacctccccgactgctgggcccgtgacgtcaccccgctgtgacgcgcacgctgtaggaaaactataaaaatgaatgcc

SEQ ID NO: 655068 - DNA, 120 bp, Artificial Sequence
  ENSG00000183621_27 (sequence is synthesized)
attaagctgagaccagaaggctgagtggtggtgacctacaagaagaagaagggaaggtcataacagtaatgacttggagtggagaggccctgcaggttggagaagttcagtgtggctcac

SEQ ID NO: 655069 - DNA, 120 bp, Artificial Sequence
  ENSG00000183621_28 (sequence is synthesized)
cttaggagaaaaaataatggaacaagtatcaggaaagctggactccattccatacctgcctccaaccagctgtggaaccccaggcaaagttattttgcccctgagcctcagttttctcat

SEQ ID NO: 655070 - DNA, 120 bp, Artificial Sequence
  ENSG00000183621_29 (sequence is synthesized)
aagaaaatgaaactgtcaaatgaaaacaacattggaaggagtacaagagaaaaagatgatacaggaaaaacagtgaggtcatggaaattagacatgagagaggtatgttgaagaaagtac

SEQ ID NO: 655071 - DNA, 120 bp, Artificial Sequence
  ENSG00000183621_30 (sequence is synthesized)
ttcaccatcacgctctgatcaggtcagatgcccagggccactgaagagaaaactccgcttttcatttagctgtcacttggcccaaaccagtcaaagattcatcaacatcgttgtgaaaat

SEQ ID NO: 655072 - DNA, 120 bp, Artificial Sequence
  ENSG00000183621_31 (sequence is synthesized)
gtcttaaatggacaattcttctagaagacaattaaaataagacagaaaagatgggcaaccgctgaaaaataactaccatcagagtcttcaaatgggacacattccagagttgcattctaa

SEQ ID NO: 655073 - DNA, 120 bp, Artificial Sequence
  ENSG00000183621_32 (sequence is synthesized)
agatggaggaatgggggctcacagccttatctaatctccaaatgaagaatgggcccatctgacatatcctatgagcacaaagcttaggggactcttcaccgaaacctagacaaatatttg

SEQ ID NO: 655074 - DNA, 120 bp, Artificial Sequence
  ENSG00000183621_33 (sequence is synthesized)
aatgcattttttttttttttttttggaaagggagataacgtccaatgggtctgttttataatgcatttgtgtaaggggaacgggaggaaatgagatttaaaaataaaactgtttacttca

SEQ ID NO: 655075 - DNA, 120 bp, Artificial Sequence
  ENSG00000183624_0 (sequence is synthesized)
agagtcgagggaggtgacgcgcgctgccggggcgaggttgcgaggggcggtgttgaagaatgtgtgggcgaacatcctgtcacttacctagagatgttctcacgagagcttgcgcctacc

SEQ ID NO: 655076 - DNA, 120 bp, Artificial Sequence
  ENSG00000183624_1 (sequence is synthesized)
aggatcggcggggccagcagcggctcccggagtggagggaccctgataagtactgcccctcttacaacaagagtcctcaatccaacagcccagtgcttctgtctcgactgcactttgaga

SEQ ID NO: 655077 - DNA, 120 bp, Artificial Sequence
  ENSG00000183624_2 (sequence is synthesized)
aggatgcagactcatctgagcgtatcattgctcccatgcgctggggcttggtcccttcttggttcaaagaaagtgatccttccaagctgcagttcaatactaccaactgtcgtagtgata

SEQ ID NO: 655078 - DNA, 120 bp, Artificial Sequence
  ENSG00000183624_3 (sequence is synthesized)
ccgtaatggagaaacggtcatttaaggtgcctctgggaaagggaagacgctgtgtcgttttagcagatggattctatgagtggcagcgatgtcagggaacaaaccagaggcagccatact

SEQ ID NO: 655079 - DNA, 120 bp, Artificial Sequence
  ENSG00000183624_4 (sequence is synthesized)
tcatctattttcctcaaatcaagacagagaagtcaggtagcattggtgctgcagatagtcctgagaactgggagaaagtctgggacaactggaggctgctgacaatggccgggatctttg

SEQ ID NO: 655080 - DNA, 120 bp, Artificial Sequence
  ENSG00000183624_5 (sequence is synthesized)
actgctgggagcccccagagggaggagatgtcctgtattcctataccatcatcacagtggattcctgcaaaggcttgagtgacatccaccacaggatgcctgccatattagatggagagg

SEQ ID NO: 655081 - DNA, 120 bp, Artificial Sequence
  ENSG00000183624_6 (sequence is synthesized)
aggcagtttctaaatggcttgactttggtgaagtctcaactcaggaagctctgaaattaatccacccaacagagaacatcaccttccatgcagtctcttctgtggtgaacaactcgcgaa

SEQ ID NO: 655082 - DNA, 120 bp, Artificial Sequence
  ENSG00000183624_7 (sequence is synthesized)
acaacactcctgagtgtctggctcctgtcgacttggtggtcaaaaaggagctcagggcaagtggcagtagccagaggatgttgcagtggttggccacaaagtcacccaaaaaggaagact

SEQ ID NO: 655083 - DNA, 120 bp, Artificial Sequence
  ENSG00000183624_8 (sequence is synthesized)
caaaaacacctcaaaaggaagagtcagatgttccccagtggtccagtcagttcctgcagaagagtccactccccaccaagagaggcactgcaggactcctagagcaatggctgaagcggg

SEQ ID NO: 655084 - DNA, 120 bp, Artificial Sequence
  ENSG00000183624_9 (sequence is synthesized)
agaaggaggaggaacctgtggccaagcgtccttacagccagtgacacaggactttcagagaccaaggccagggtctgctgcactgctgttctgataataggttcttaacattgtatgtat

SEQ ID NO: 655085 - DNA, 120 bp, Artificial Sequence
  ENSG00000183624_10 (sequence is synthesized)
tagtggggctggtggacagctttggaagaggtgtcctgctgctgttaccagccatgtgggccccataggggcactgcgcctgctgccctttcctggcagggctggtggagtcttccctca

SEQ ID NO: 655086 - DNA, 120 bp, Artificial Sequence
  ENSG00000183624_11 (sequence is synthesized)
aagcatgccttacccagctgggaagtctctgccctgatctggtactccttgtagtaagctgttttctgctcagccactgggctctttcacttttttagttcttaaaaatttatttttaag

SEQ ID NO: 655087 - DNA, 120 bp, Artificial Sequence
  ENSG00000183624_12 (sequence is synthesized)
ttctaaaataaaataaaaataagttcttaaaatttatttttttcctgaataaattgtatttggtaaacttctgcctacattttggaaagtgatgctggtggggaaagttctagatcttac

SEQ ID NO: 655088 - DNA, 120 bp, Artificial Sequence
  ENSG00000183624_13 (sequence is synthesized)
ttggtttcttctagaatcagtcttcaggaatggattttgtcacaaatggggcatgggggctttctgaggaaataactacaagtcttggtggtgggctccttattatgtttctttttcttt

SEQ ID NO: 655089 - DNA, 120 bp, Artificial Sequence
  ENSG00000183624_14 (sequence is synthesized)
cattcttgatacttggaagtcgtctgaatcctttagcttcaaaccagcctgagtttgagtgcttgccgtagcagaaactatccttaccacaggtgggaaggaaaggaccagtttctagca

SEQ ID NO: 655090 - DNA, 120 bp, Artificial Sequence
  ENSG00000183624_15 (sequence is synthesized)
gtgtcgggccactcctctttcgaacatccctaagggaggcattcacaaaagctgtcccaagcagctggaagaaaacagcttccgagatgaccaggaggactgggcggcgccgagcccaga

SEQ ID NO: 655091 - DNA, 120 bp, Artificial Sequence
  ENSG00000183624_16 (sequence is synthesized)
acgctcctggcgcagcaccgttggcgttggccgattgctgctggtggggggcgggggtgcaggccccagtctctatgcaaatcagggatcagaagatcggaatttccaccaatcagcggg

SEQ ID NO: 655092 - DNA, 120 bp, Artificial Sequence
  ENSG00000183624_17 (sequence is synthesized)
aagcctcggccctgtaactgctaatgggagacagcagcgccacgccacaggcttttcccctggtttcgggaggggtggggagccaggtggggctcccgcccagaccctttcccgaggtcc

SEQ ID NO: 655093 - DNA, 120 bp, Artificial Sequence
  ENSG00000183624_18 (sequence is synthesized)
gccctctccgccttttctctaaattcctcttttgagtgccctcccttccggttgagaggcgggggttggcccgtagttgtacactcagtcaccctgcactgtggaggcgggggcctccct

SEQ ID NO: 655094 - DNA, 120 bp, Artificial Sequence
  ENSG00000183624_19 (sequence is synthesized)
tgtggactgatttgcgtgggatttggttgttttattaagagatttaaaaaattcagatgacttactagtatgactgttttgtcatatttgcttccaggttaataaatgacaaaaatgaaa

SEQ ID NO: 655095 - DNA, 120 bp, Artificial Sequence
  ENSG00000183624_20 (sequence is synthesized)
gcgagctgacagaggggagcagaggcccgagcggacgcgaggcgacgcggagagggcggcctgggccgaagtgaggcgacgcggggcggcggagtctgagggccggagcggagcggaggc

SEQ ID NO: 655096 - DNA, 120 bp, Artificial Sequence
  ENSG00000183624_21 (sequence is synthesized)
gaggggcgagggatcgcggccggtggctgggggccacctgctccccgagcaccggcccccgctccggggagcagagtccggagcgggatccgcggcccacaggttcgcaggttgcgaggg

SEQ ID NO: 655097 - DNA, 120 bp, Artificial Sequence
  ENSG00000183625_0 (sequence is synthesized)
tgctgggcgaatccctttcttgtctggttcatttggaccctccaaagcccacaggctggaacggctgagtcatccaaacaaaaaaggtggcagcccatccctcccccaggagctctaccc

SEQ ID NO: 655098 - DNA, 120 bp, Artificial Sequence
  ENSG00000183625_1 (sequence is synthesized)
tgtctcaagtaggtgctaccctgttgctggtggctggctggaattccaagccagttgatcttatcctgtgaggtcccttggaagtggggcccacagactgacgctgctctgcttcctgga

SEQ ID NO: 655099 - DNA, 120 bp, Artificial Sequence
  ENSG00000183625_2 (sequence is synthesized)
ttcagccctcttcctaaggagctcatggaccctggccgtcatcaggttcaacctcatattcaactgctgggccttgtcttctggccacacactctctccaaatcagcgatggtggggaac

SEQ ID NO: 655100 - DNA, 120 bp, Artificial Sequence
  ENSG00000183625_3 (sequence is synthesized)
tgaggagccagaggccattgtggaagaactccaagaaaacaatctccaggttatcacatctaaagcctgagcaagatttgaggctgggaagaggtggatcccagaattggaagaaggagt

SEQ ID NO: 655101 - DNA, 120 bp, Artificial Sequence
  ENSG00000183625_4 (sequence is synthesized)
ggtgacgcctaagctatcactggacatatcaaggacttcactaaattagcagggagaagtgaaatgacaacctcactagatacagttgagacctttggtaccacatcctactatgatgac

SEQ ID NO: 655102 - DNA, 120 bp, Artificial Sequence
  ENSG00000183625_5 (sequence is synthesized)
gtgggcctgctctgtgaaaaagctgataccagagcactgatggcccagtttgtgcccccgctgtactccctggtgttcactgtgggcctcttgggcaatgtggtggtggtgatgatcctc

SEQ ID NO: 655103 - DNA, 120 bp, Artificial Sequence
  ENSG00000183625_6 (sequence is synthesized)
ataaaatacaggaggctccgaattatgaccaacatctacctgctcaacctggccatttcggacctgctcttcctcgtcacccttccattctggatccactatgtcagggggcataactgg

SEQ ID NO: 655104 - DNA, 120 bp, Artificial Sequence
  ENSG00000183625_7 (sequence is synthesized)
gtttttggccatggcatgtgtaagctcctctcagggttttatcacacaggcttgtacagcgagatctttttcataatcctgctgacaatcgacaggtacctggccattgtccatgctgtg

SEQ ID NO: 655105 - DNA, 120 bp, Artificial Sequence
  ENSG00000183625_8 (sequence is synthesized)
tcctgaatttatcttctatgagactgaagagttgtttgaagagactctttgcagtgctctttacccagaggatacagtatatagctggaggcatttccacactctgagaatgaccatctt

SEQ ID NO: 655106 - DNA, 120 bp, Artificial Sequence
  ENSG00000183625_9 (sequence is synthesized)
ctgtctcgttctccctctgctcgttatggccatctgctacacaggaatcatcaaaacgctgctgaggtgccccagtaaaaaaaagtacaaggccatccggctcatttttgtcatcatggc

SEQ ID NO: 655107 - DNA, 120 bp, Artificial Sequence
  ENSG00000183625_10 (sequence is synthesized)
ggtgtttttcattttctggacaccctacaatgtggctatccttctctcttcctatcaatccatcttatttggaaatgactgtgagcggagcaagcatctggacctggtcatgctggtgac

SEQ ID NO: 655108 - DNA, 120 bp, Artificial Sequence
  ENSG00000183625_11 (sequence is synthesized)
agaggtgatcgcctactcccactgctgcatgaacccggtgatctacgcctttgttggagagaggttccggaagtacctgcgccacttcttccacaggcacttgctcatgcacctgggcag

SEQ ID NO: 655109 - DNA, 120 bp, Artificial Sequence
  ENSG00000183625_12 (sequence is synthesized)
atacatcccattccttcctagtgagaagctggaaagaaccagctctgtctctccatccacagcagagccggaactctctattgtgttttaggtcagatgcagaaaattgcctaaagagga

SEQ ID NO: 655110 - DNA, 120 bp, Artificial Sequence
  ENSG00000183625_13 (sequence is synthesized)
aggaccaaggagatgaagcaaacacattaagccttccacactcacctctaaaacagtccttcaaacttccagtgcaacactgaagctcttgaagacactgaaatatacacacagcagtag

SEQ ID NO: 655111 - DNA, 120 bp, Artificial Sequence
  ENSG00000183625_14 (sequence is synthesized)
cagtagatgcatgtaccctaaggtcattaccacaggccaggggctgggcagcgtactcatcatcaaccctaaaaagcagagctttgcttctctctctaaaatgagttacctacattttaa

SEQ ID NO: 655112 - DNA, 120 bp, Artificial Sequence
  ENSG00000183625_15 (sequence is synthesized)
tgcacctgaatgttagatagttactatatgccgctacaaaaaggtaaaactttttatattttatacattaacttcagccagctattgatataaataaaacattttcacacaatacaataa

SEQ ID NO: 655113 - DNA, 120 bp, Artificial Sequence
  ENSG00000183625_16 (sequence is synthesized)
accactggtcttcttgtgcttatccgggcaagaacttatcgaaatacaatagaagtttttacttagaagagattttcagggagaagtgaaatgacaacctcactagatacagttgagacc

SEQ ID NO: 655114 - DNA, 120 bp, Artificial Sequence
  ENSG00000183625_17 (sequence is synthesized)
ctgatggtatctctgtttcaggagtggtgacgcctaagctatcactggacatatcaaggacttcactaaattagcaggtaccactggtcttcttgtgcttatccgggcaagaacttatcg

SEQ ID NO: 655115 - DNA, 120 bp, Artificial Sequence
  ENSG00000183625_18 (sequence is synthesized)
aaatacaatagaagtttttacttagaagagattttcagctgctgtggattggattatgccatttggaataagaatgctgttaagagcacacaagccaggttcctcaaggagaagtgaaat

SEQ ID NO: 655116 - DNA, 120 bp, Artificial Sequence
  ENSG00000183625_19 (sequence is synthesized)
atctagtgacaggagaaatggacatggatagagactaaagatctagcccaaattttatatttacttgttagaggattttgaacaaattactaaatttcttcaaggttcaatttccccatt

SEQ ID NO: 655117 - DNA, 120 bp, Artificial Sequence
  ENSG00000183625_20 (sequence is synthesized)
aactataatgaatggctcatcattatggggccctggagaagcataattacttgtaattgtaataatcattgttattattattatacatattttgcttttaaatggataaggatttttaag

SEQ ID NO: 655118 - DNA, 120 bp, Artificial Sequence
  ENSG00000183625_21 (sequence is synthesized)
cagctgctatggattggattatgctattatgaataagaatgctgatgggagcacacacaaaccatttgttcctcagtccattttcctcctcaaaagcctggaatgtgccattgatcagtg

SEQ ID NO: 655119 - DNA, 120 bp, Artificial Sequence
  ENSG00000183625_22 (sequence is synthesized)
ggagatgtacctggacagacccatgaaaagagatcaacaagttccacccaagggaccctatttttcctaatttcatttgaaatggcttctaattgtccttctttcattcctgcttcctac

SEQ ID NO: 655120 - DNA, 120 bp, Artificial Sequence
  ENSG00000183625_23 (sequence is synthesized)
cagttttacagctttttctggtttcaaatgtgaactcacatacactctcatttttcctcatcacaaccccaagtgacccaatggtcctcactttcgatataagtaaaggaggctctgcat

SEQ ID NO: 655121 - DNA, 120 bp, Artificial Sequence
  ENSG00000183625_24 (sequence is synthesized)
taagggcttgtccaaggcacgcagctgagaggcgctaggactggctccatttccatctctattctcactgactttgactacccagaaccccaacatgtggggcctcagtattcgatcaat

SEQ ID NO: 655122 - DNA, 120 bp, Artificial Sequence
  ENSG00000183625_25 (sequence is synthesized)
tattctattaagaagcaaaaacaattccccgcattggccccagttattaagcatttctcagatttaccttgagaaatgcccatcggcctgtatattcacatcttcacccttgtcccttcc

SEQ ID NO: 655123 - DNA, 120 bp, Artificial Sequence
  ENSG00000183625_26 (sequence is synthesized)
gttttctattttcctccttttccaccgaagtctataatctcaagaaaagcaggcactggccttagggctcctggcctaagaaatatcaagtccagtgagaaatcccattgactgacccct

SEQ ID NO: 655124 - DNA, 120 bp, Artificial Sequence
  ENSG00000183625_27 (sequence is synthesized)
cctgcttacccctttgtgatggagaagctcccaggggtttgctttttgcatgttaccaggcctaactcagcatcaccaggggcaagaaaaggaaagtaacctaaactaatgctgcttata

SEQ ID NO: 655125 - DNA, 120 bp, Artificial Sequence
  ENSG00000183628_0 (sequence is synthesized)
gacgtgagctgggggcgctcgtcgctgcagccggcggctagcgggcgtccgcgccatggagcgctacgcgggcgccttggaggaggtggcggacggtgcccggcagcaggagcgacacta

SEQ ID NO: 655126 - DNA, 120 bp, Artificial Sequence
  ENSG00000183628_1 (sequence is synthesized)
ccagctgctgtcggcgttacagagcctggtgaaggagttgcccagctcattccagcagcgcttgtcctacaccacgctgagcgacctggccctggcgcttctcgacggcaccgtgttcga

SEQ ID NO: 655127 - DNA, 120 bp, Artificial Sequence
  ENSG00000183628_2 (sequence is synthesized)
aatcgtgcaggggctactggagatccagcacctcaccgaaaagagcctgtacaaccagcgcctgcgcctacagaacgagcatcgagtgctcaggcaggcgctgcggcagaagcaccagga

SEQ ID NO: 655128 - DNA, 120 bp, Artificial Sequence
  ENSG00000183628_3 (sequence is synthesized)
agcccagcaggcctgccggccccataacctgcctgtgcttcaggcggctcagcagcgagaactagaggcggtggagcaccggatccgtgaggagcagcgggcgatggaccagaagatcgt

SEQ ID NO: 655129 - DNA, 120 bp, Artificial Sequence
  ENSG00000183628_4 (sequence is synthesized)
cctggagctggaccggaaggtggctgaccagcagagcacactggagaaggcgggggtggctggcttctacgtgaccaccaacccacaggagctgatgctgcagatgaacctgctggaact

SEQ ID NO: 655130 - DNA, 120 bp, Artificial Sequence
  ENSG00000183628_5 (sequence is synthesized)
catccggaagctgcagcagaggggctgctgggcagggaaggcagccctggggctaggaggtccctggcagttgcctgctgcccagtgtgaccagaaaggcagccctgtcccaccatagcc

SEQ ID NO: 655131 - DNA, 120 bp, Artificial Sequence
  ENSG00000183628_6 (sequence is synthesized)
acaggcagcagaagtctgggcagagttcatcttcttgacctttggccactgccttcccagctgcccgcagggggttccccctgctgaggagagaccaggtggaccccagctgcctgtcac

SEQ ID NO: 655132 - DNA, 120 bp, Artificial Sequence
  ENSG00000183628_7 (sequence is synthesized)
ccttcatctgggacttgctgtcaaaccctaggatagtctcataaaggggaggctgggccagcctgctgctgtctgcttcagggccaggcagagagtgaggctgggggttctcacacctta

SEQ ID NO: 655133 - DNA, 120 bp, Artificial Sequence
  ENSG00000183628_8 (sequence is synthesized)
ctccaccgggcacatcccaacctgcactggggcccactcgagcgcttgttctggtctcagccgctcccttggcagctgcagcccccatgcagaagaggctcccaggcccaagctctgtgt

SEQ ID NO: 655134 - DNA, 120 bp, Artificial Sequence
  ENSG00000183628_9 (sequence is synthesized)
gacccagagaaataaagatgcctcagtgtggcccgcatgtggcttgtgtgatagctgcaggttctgccataaccggggccctggtagggcccccacctctgttgcagcagaggcctctac

SEQ ID NO: 655135 - DNA, 120 bp, Artificial Sequence
  ENSG00000183628_10 (sequence is synthesized)
ctgggggccccttcctgggctgtgtgcccagcccaccacccctccccctgcctggagactgggaccctccagcctttcctgccccagccctggtcccaggatgctgtcactgccatctgt

SEQ ID NO: 655136 - DNA, 120 bp, Artificial Sequence
  ENSG00000183628_11 (sequence is synthesized)
acaggggcccccatccaagccccagggcatgaggaccacatccagcctgctttgtggggctgggggctggagagcatgggagaaggcccgaagtgcaagtatgcgcctgccgcagcctgg

SEQ ID NO: 655137 - DNA, 120 bp, Artificial Sequence
  ENSG00000183628_12 (sequence is synthesized)
tcagtgtcctgtgggaaccactaggaggagcctgatgcaggtcactggggtagaggactcagggtggcaggaatggcctgaggaggagccctgcggggaggcgtgccaggcccacctggg

SEQ ID NO: 655138 - DNA, 120 bp, Artificial Sequence
  ENSG00000183628_13 (sequence is synthesized)
cccctccgtgctggcctgggcccatgggccctgctgggtccttgtggagtcagggttgggggtgtccagcaccctgggtggccaggtctgcgcagggcctggcccccaggaacagatgat

SEQ ID NO: 655139 - DNA, 120 bp, Artificial Sequence
  ENSG00000183628_14 (sequence is synthesized)
gctggaagccagagtctgggatgagacttctctgaccctgtctgagccactccctctttgttgcccagagctgaccctgtgtgagggcaaagggctctcagctgcaggaacagtggttta

SEQ ID NO: 655140 - DNA, 120 bp, Artificial Sequence
  ENSG00000183628_15 (sequence is synthesized)
ttgaccaggcaggcctccccagcccggccactgctccccaaggggctcgggctgtgtgggctggccttggcagaaggtggacaatcctctaggtccaaggacatgggggtcacagaggtg

SEQ ID NO: 655141 - DNA, 120 bp, Artificial Sequence
  ENSG00000183628_16 (sequence is synthesized)
ggggccttgggcccacacattcgaggagagttcccaaaagtttccagtggctgtcccaggcaggtatcaggttcggcccacacctgagtgcccatactctgggcagggctgggaggcacc

SEQ ID NO: 655142 - DNA, 120 bp, Artificial Sequence
  ENSG00000183628_17 (sequence is synthesized)
tgacctcacctccagcagctctgcaagtgtggggtgaaaaaaggtgaatctgtgtgaggatggggttggctgcagctgtggtgatggcctgggcgggggcggggggtgctggaggctaag

SEQ ID NO: 655143 - DNA, 120 bp, Artificial Sequence
  ENSG00000183628_18 (sequence is synthesized)
ggtgtgctggcgggtgctaggcagggcgatggaagaggttgccagttcggagccgcctcaagagctccagccacagcagctgccgctcccgatgggtgcccttcatgaggctgctgttct

SEQ ID NO: 655144 - DNA, 120 bp, Artificial Sequence
  ENSG00000183628_19 (sequence is synthesized)
ccagggcacggcgggacaagtagggcagcacctccatcacggggccatagggcacgtacttgtacacggggtagccggcctggcctgcatgggggcagatacaccatgaggcccaggccc

SEQ ID NO: 655145 - DNA, 120 bp, Artificial Sequence
  ENSG00000183628_20 (sequence is synthesized)
agcaccgtaccccatcgcaccagggagggccccactcacccagcgggaagctgatctggtcacacatgcctagcagctgtccaaagtacacccggtggtcagcaggatgcaggcccagct

SEQ ID NO: 655146 - DNA, 120 bp, Artificial Sequence
  ENSG00000183628_21 (sequence is synthesized)
cctccatcctgtgcaggtgaagccaggaactgagggccagttccaggacactgtccccagtgcagggatacagggctcctgtcccagctctgagcctgtcctgccatcccaggtgcccca

SEQ ID NO: 655147 - DNA, 120 bp, Artificial Sequence
  ENSG00000183628_22 (sequence is synthesized)
tctgcactctccagacttcatcccctgcaaggtggggctggggtatgggctctgcctggccctgccccagtgaggcctcttcccagcaggactctgctgggctgccctactcgtctccct

SEQ ID NO: 655148 - DNA, 120 bp, Artificial Sequence
  ENSG00000183628_23 (sequence is synthesized)
ggggaggcctcagcccttggccaacaaggcctcccacctgctttccctcccctctcctctctcacctctcctctagctcccttcttggaggtgcagcccttcctcgggccctgacccacc

SEQ ID NO: 655149 - DNA, 120 bp, Artificial Sequence
  ENSG00000183628_24 (sequence is synthesized)
cagcagcctgccccacagggcagagaagctcctcagctctcctgccatcccttcctcaagcccctccagggttctgtggtatgactggtctccggcccctgccctcgccctctgtgggct

SEQ ID NO: 655150 - DNA, 120 bp, Artificial Sequence
  ENSG00000183628_25 (sequence is synthesized)
gctgccctgccccatccccacagctgctgtgtcccacacagctgccaccagcccccgagtcctcggaaggcggctgctctgaatcgagatgtgttgcaaatgtcaaatacacacgggatt

SEQ ID NO: 655151 - DNA, 120 bp, Artificial Sequence
  ENSG00000183628_26 (sequence is synthesized)
taggagactttgtagaaaaataatgcacgatgccgcgttgcttttctaaaagcaactggaatacaatttgaagtaatattttgaatattttgggttaattaaaattattcttgaaattca

SEQ ID NO: 655152 - DNA, 120 bp, Artificial Sequence
  ENSG00000183628_27 (sequence is synthesized)
ctcagcaagggccggtgggattctacatggtcctgcgatatccaggcgacggagtctcgcctctaaagtggcccggggagcaggaagctcattccagcagcgcttgtcctacaccacgct

SEQ ID NO: 655153 - DNA, 120 bp, Artificial Sequence
  ENSG00000183628_28 (sequence is synthesized)
gtgcagctcggctccttccttgggagtgttcggaagaggtccctaagattaacaaaatcaagggcgcagagactgagacagcgcctttttggtgaccaatgtgtccaacgagttttgttt

SEQ ID NO: 655154 - DNA, 120 bp, Artificial Sequence
  ENSG00000183628_29 (sequence is synthesized)
tcagttgcgcagcacccaccttcttagcagaaactccctgttcgggcttccctgtgccccacccccttccaggcctgatggccctaggcctccgtgcttggttggccggcaggctgactc

SEQ ID NO: 655155 - DNA, 120 bp, Artificial Sequence
  ENSG00000183628_30 (sequence is synthesized)
gtaattggagttctgttgacagtgctcaggcaggcgctgcggcagaagcaccaggaagcccagcaggcctgccggccccataacctgcctgtgcttcaggcggctcagcagcgagaacta

SEQ ID NO: 655156 - DNA, 120 bp, Artificial Sequence
  ENSG00000183628_31 (sequence is synthesized)
gaggtactggggacgcaggcagggtggccggcccagctctcctgtgggcaccacctggctctgctgactgggctgagctgaaggggtgtggggggctcaggtgtgggtggctaccctggg

SEQ ID NO: 655157 - DNA, 120 bp, Artificial Sequence
  ENSG00000183628_32 (sequence is synthesized)
ctctcaggcctgcagggcctcattctagttgcacatcaaattcctaagcactgtctcctgtggcgccctcccaaaccagaagagcttcccacttgagccgcatgcttcctgggcttcgga

SEQ ID NO: 655158 - DNA, 120 bp, Artificial Sequence
  ENSG00000183628_33 (sequence is synthesized)
caccatcagatttccacctttgctgttttatttttcccaaacttcttattttaaaagttcaaacatttggaaaaactgaaaagacagtgtagtgcatacgcttgtgctctccaccgaaag

SEQ ID NO: 655159 - DNA, 120 bp, Artificial Sequence
  ENSG00000183628_34 (sequence is synthesized)
ttcagtagttaacattttgctctagttcttgacatcccaaaatacatacatgtgacagcatagaattcaccaagagtcttcagcattcctggagaccaggattttcaacccagccatgct

SEQ ID NO: 655160 - DNA, 120 bp, Artificial Sequence
  ENSG00000183628_35 (sequence is synthesized)
gacatttgtggctgggtaagtctttatggtgagatgctgtcttgcgcattgcaggatggcaggggtaccctccctagtcgtgaaaaccaagaatgcctccagacaacctgggtggtgggg

SEQ ID NO: 655161 - DNA, 120 bp, Artificial Sequence
  ENSG00000183628_36 (sequence is synthesized)
tcaaccttggccttggattgggagcaagtgctctagaacaagagcggtctcctacacagctgcagagggtagccccctgagaaattaactgttccaggtgtctcctgactttcagtgcat

SEQ ID NO: 655162 - DNA, 120 bp, Artificial Sequence
  ENSG00000183628_37 (sequence is synthesized)
ggccacatcatggtacctaacttgtggcaaattgttgctttataagtaaggatccagtccaagttcatgtactacaattggttactttggtctctttgcttctggaacagtccccaacat

SEQ ID NO: 655163 - DNA, 120 bp, Artificial Sequence
  ENSG00000183628_38 (sequence is synthesized)
ttattgtggcattgactttttatagagtctaattctataattagaatgccctgctctggatctatcagaggaaatgcttcctcgtgcatttaacctgcttctccactctctgggtttact

SEQ ID NO: 655164 - DNA, 120 bp, Artificial Sequence
  ENSG00000183628_39 (sequence is synthesized)
gtacactggactcctggtaggagcctgattagaggcaggtttaatgtggcaaaaattcctcctagcggggcaaggcccccttccccagaaggcaggcagtgtccatctgctccaggattg

SEQ ID NO: 655165 - DNA, 120 bp, Artificial Sequence
  ENSG00000183628_40 (sequence is synthesized)
gtgtgtttctatcaagaatggatgttggattttggcagtttcctttttggcagctcttgagatgatcacgtggtgaatcattttctattactacagtgaattacagtcacttgaattcca

SEQ ID NO: 655166 - DNA, 120 bp, Artificial Sequence; identical to SEQ ID NO: 439274
  ENSG00000183629_0 (sequence is synthesized)

SEQ ID NO: 655167 - DNA, 120 bp, Artificial Sequence; identical to SEQ ID NO: 439275
  ENSG00000183629_1 (sequence is synthesized)

SEQ ID NO: 655168 - DNA, 120 bp, Artificial Sequence; identical to SEQ ID NO: 439276
  ENSG00000183629_2 (sequence is synthesized)

SEQ ID NO: 655169 - DNA, 120 bp, Artificial Sequence; identical to SEQ ID NO: 439277
  ENSG00000183629_3 (sequence is synthesized)

SEQ ID NO: 655170 - DNA, 120 bp, Artificial Sequence; identical to SEQ ID NO: 439278
  ENSG00000183629_4 (sequence is synthesized)

SEQ ID NO: 655171 - DNA, 120 bp, Artificial Sequence; identical to SEQ ID NO: 439279
  ENSG00000183629_5 (sequence is synthesized)

SEQ ID NO: 655172 - DNA, 120 bp, Artificial Sequence; identical to SEQ ID NO: 439280
  ENSG00000183629_6 (sequence is synthesized)

SEQ ID NO: 655173 - DNA, 90 bp, Artificial Sequence; identical to SEQ ID NO: 439281
  ENSG00000183629_7 (sequence is synthesized)

SEQ ID NO: 655174 - DNA, 120 bp, Artificial Sequence
  ENSG00000183629_8 (sequence is synthesized)
agagtggcaggagagctccaggcccaggtggagtacaatcagcgcataagtctcctgaatgaggggcaaaaggagaggcttcgggagcaggaggagaggcttcaggagcagcaggagagg

SEQ ID NO: 655175 - DNA, 120 bp, Artificial Sequence
  ENSG00000183629_9 (sequence is synthesized)
aggagaggcttccagagcaggaggagaggcttcagcagctggccgagccacagaacagcttcaaggagctgaacaatgagaacaagagcgtactacagttggagcagcaagtaaaggagc

SEQ ID NO: 655176 - DNA, 120 bp, Artificial Sequence
  ENSG00000183629_10 (sequence is synthesized)
aagctaggcaaggagcgtctggaagctgcgagccagcagaaacagcagctaacggcccagttgagcctcatggctctccctggggaaggagatggaggaggacatctggacagtgagggg

SEQ ID NO: 655177 - DNA, 120 bp, Artificial Sequence
  ENSG00000183629_11 (sequence is synthesized)
gaggaggcacctcggcccattcctagcatcccacaggacctggagagcagggaggccatgagcggctttatggaccacctggaggagaaggcagacctgagtgagctggtggagaaagaa

SEQ ID NO: 655178 - DNA, 120 bp, Artificial Sequence
  ENSG00000183629_12 (sequence is synthesized)
gaacttggattcttccagtactacagagagagatgccatcagaaagtttatcaccctataacaaagccagggggcagtgccaaagatgcagcaccgggaggaggacaccatcaggctggc

SEQ ID NO: 655179 - DNA, 120 bp, Artificial Sequence
  ENSG00000183629_13 (sequence is synthesized)
cctggacagggaggagatgaaggtgaagctgctggagctgcaggagatggtgttgcagctggtggcgactacaagggacacagcaaattcttggtgactgcccagaaccctgctcatgag

SEQ ID NO: 655180 - DNA, 120 bp, Artificial Sequence
  ENSG00000183629_14 (sequence is synthesized)
cccagtccaggagccccagccccccaggagcttggggctgcccacaagcatggtgatctttgtgaggtgagcctcactgacagcgtggagcctgtgcaaggagaggccagggagggttct

SEQ ID NO: 655181 - DNA, 83 bp, Artificial Sequence; identical to SEQ ID NO: 439305
  ENSG00000183629_15 (sequence is synthesized)

SEQ ID NO: 655182 - DNA, 120 bp, Artificial Sequence; identical to SEQ ID NO: 439306
  ENSG00000183629_16 (sequence is synthesized)

SEQ ID NO: 655183 - DNA, 79 bp, Artificial Sequence
  ENSG00000183629_17 (sequence is synthesized)
gaagaaggagataaacatcaccatcgtcaaagagctgctgaagaaatttttaaaaaagaaactttgaatgttatagcca

SEQ ID NO: 655184 - DNA, 120 bp, Artificial Sequence
  ENSG00000183629_18 (sequence is synthesized)
tgtgtttctaatttatagtttaagttcatttgtaaatagttaaaagagagtgggtctctgtggctttcactgatgttcactctggcatactttcgcaattttctttttcaatttcataat

SEQ ID NO: 655185 - DNA, 120 bp, Artificial Sequence
  ENSG00000183629_19 (sequence is synthesized)
aatgttattgcagcatgtatattcattacagaattcagataaaatgtgcctatgttctgctgttgtttgatctaatcttaatcacagtgagctcttcattagcacaatatgtggtttgcc

SEQ ID NO: 655186 - DNA, 120 bp, Artificial Sequence
  ENSG00000183629_20 (sequence is synthesized)
gatctaatcttaatcacagtgagctcttcattagcacaatatgtggtttgccccaagtgtgcactatttaatactttgtaatatgccaccaagagtactgacatttagagttgtttaaag

SEQ ID NO: 655187 - DNA, 120 bp, Artificial Sequence
  ENSG00000183629_21 (sequence is synthesized)
aaacagccttttcctcattttctgtgtattggtgatgggagtaataacattttgggggagctttttaaatttcacagaagaggaaagttgcctgctctggcaggtatgtgcaagatagag

SEQ ID NO: 655188 - DNA, 120 bp, Artificial Sequence
  ENSG00000183629_22 (sequence is synthesized)
aggaaagttgcctgctctggcaggtatgtgcaagatagagtgtgtttcatttgttctgttgccaagaattagtgctgtactattgtagttcctttaggatttgtatgtgctctgggctca

SEQ ID NO: 655189 - DNA, 72 bp, Artificial Sequence
  ENSG00000183629_23 (sequence is synthesized)
tgaagatattgcatcatgagcttcagcagttgtactctttttttgactacggttgtggaaaacctttcctag

SEQ ID NO: 655190 - DNA, 64 bp, Artificial Sequence
  ENSG00000183629_24 (sequence is synthesized)
gactaagatcataagaaatcctttaagagttcaaatgtccctggaacaggcatacaggctctag

SEQ ID NO: 655191 - DNA, 120 bp, Artificial Sequence
  ENSG00000183629_25 (sequence is synthesized)
actctgcctattcttcaaccaccttggttactttgacataggaattgacttcttttccttgaatggaaaacactttgaaataataataaacattgttataaactaatatatgtgagagtg

SEQ ID NO: 655192 - DNA, 79 bp, Artificial Sequence
  ENSG00000183629_26 (sequence is synthesized)
aggagttttagtagacagtattatactatctttgaaaatcaaggagaagtttatggtgaatgtcagtgtattatcagga

SEQ ID NO: 655193 - DNA, 120 bp, Artificial Sequence
  ENSG00000183629_27 (sequence is synthesized)
cagtgtattatcaggaaacatgtctatacaatcacagagttatatttcctcacaaacttctttgtgaagagtgaaatgtgtttctgtacctctgggtttcacttacgggcatattttgtg

SEQ ID NO: 655194 - DNA, 120 bp, Artificial Sequence
  ENSG00000183629_28 (sequence is synthesized)
tgggtttcacttacgggcatattttgtgcagtatttatgtgattgtgcctatgcatgatgaatgaatgaatttcagttgtacattgcctaaatcataacttgatgatgcttgggaaagac

SEQ ID NO: 655195 - DNA, 71 bp, Artificial Sequence
  ENSG00000183629_29 (sequence is synthesized)
atgtctgtgttccaaaacacatcacattattaggatgtagggagatatgtatgtgtgctccctggggtggg

SEQ ID NO: 655196 - DNA, 120 bp, Artificial Sequence
  ENSG00000183629_30 (sequence is synthesized)
gatacttttataaatacgacattaacaggagagcagcagtacgattttgccgatggaataacagatttgccggcaatcactgaaagagtgcaaacatcgggtccttgtgacttcaacgga

SEQ ID NO: 655197 - DNA, 120 bp, Artificial Sequence
  ENSG00000183629_31 (sequence is synthesized)
cccagtttcagaatgataaagaaaaaatgttagaccaaataatgcggctagttaacagtggtacgatttctcgcccgtggctttaaaatgcacttaaagtcctgtccttgccttttattt

SEQ ID NO: 655198 - DNA, 120 bp, Artificial Sequence
  ENSG00000183629_32 (sequence is synthesized)
aatgcggctagttaacagtggtacgatttctcgcccgtggctttaaaatgcacttaaagtcctgtccttgccttttattttctgaacttgatgtttttgcattctttgagttcagtttaa

SEQ ID NO: 655199 - DNA, 120 bp, Artificial Sequence
  ENSG00000183629_33 (sequence is synthesized)
gttcatcaggtgcctgtggattaaatcacatactggcatatttaagctgaatgtcaatctggaaaataaattgactgtattaacggaaataccactctttgtgtagatatttgtcgtata

SEQ ID NO: 655200 - DNA, 120 bp, Artificial Sequence
  ENSG00000183629_34 (sequence is synthesized)
ttgaagaaaaagctaaaaagaatggaaatcgcatgactataacttaagtctttcttcaaagtgcatgcagtcttttgcgatacctcattcagccaagtattggtattcttcctcattcgg

SEQ ID NO: 655201 - DNA, 120 bp, Artificial Sequence
  ENSG00000183629_35 (sequence is synthesized)
tataaggcagctttcaatttgcttagagggcaacattggaaggttagagttcatcagaaacagaattctaaaatgtgagttcaattcaataaatttgaatttctgtaggaagaatcaaat

SEQ ID NO: 655202 - DNA, 120 bp, Artificial Sequence
  ENSG00000183629_36 (sequence is synthesized)
caccgatttaaagattgcaatatataataatcatttttaaagtattggattaaatctgataggttttccagaaatgaacaaaaatcagctctaaaaccaaagctgatttttagaaaattt

SEQ ID NO: 655203 - DNA, 120 bp, Artificial Sequence
  ENSG00000183629_37 (sequence is synthesized)
gaaaatgtaaatcagccctatccatactatagtttctctaaaactttatctgaaagagtcattttaaaataactattaaacaatgtaactgctatcttaatgttctgaaataagttaaaa

SEQ ID NO: 655204 - DNA, 76 bp, Artificial Sequence
  ENSG00000183629_38 (sequence is synthesized)
tatttgccaagttttcttagaatgaattttaccaatttatgaattcttgtaagcggaatgtaaaacggaaatactg

SEQ ID NO: 655205 - DNA, 120 bp, Artificial Sequence
  ENSG00000183629_39 (sequence is synthesized)
ttatgaattcttgtaagcggaatgtaaaacggaaatactgaaagacttttgcctaaagtggcattattgactgctggtgtgatgctactgtaatgtaataaattattaagttgttgcaaa

SEQ ID NO: 655206 - DNA, 120 bp, Artificial Sequence; identical to SEQ ID NO: 439315
  ENSG00000183629_40 (sequence is synthesized)

SEQ ID NO: 655207 - DNA, 120 bp, Artificial Sequence
  ENSG00000183629_41 (sequence is synthesized)
attactgcaagactggcctttgatcttatgacccagtcccctaagcattgccaccccatttctggttcctcttgtcacagcacaaatttccagctggaaggggaatggagattgggacct

SEQ ID NO: 655208 - DNA, 120 bp, Artificial Sequence
  ENSG00000183629_42 (sequence is synthesized)
gagcccgtgccaagaactagcagtagtcccagactcgaggtccgtaaaagtcagtcaactgaagaacaccatcaaatctttggtaagagtccactggggtcccctgattccacgctgcca

SEQ ID NO: 655209 - DNA, 120 bp, Artificial Sequence
  ENSG00000183629_43 (sequence is synthesized)
aaggggacggcggcccctggtgccaagggcgaatagggagctggggcgcccaggcctcacctggagggaccccggagcatgcagcatggctctttttttgctgccctgtttgctgactct

SEQ ID NO: 655210 - DNA, 66 bp, Artificial Sequence
  ENSG00000183629_44 (sequence is synthesized)
ttgggctcatgtttccagaggacctagaatggaaacctcagggccaaaggctcctgtctgtccttt

SEQ ID NO: 655211 - DNA, 120 bp, Artificial Sequence
  ENSG00000183629_45 (sequence is synthesized)
gaatggaaacctcagggccaaaggctcctgtctgtccttttccgccctaaatcttctgtgaagaaccgtacttggcccgtacgtgctcagtaaatgtttattgaatgaatgcacttttct

SEQ ID NO: 655212 - DNA, 120 bp, Artificial Sequence
  ENSG00000183629_46 (sequence is synthesized)
aaatcacaagctggcagaagggggggcctttctcaaactccatctctagaggtttatgttactgtcctgtcaagagattccagattcagaccttgagttctgtggctgtggacaaaagcc

SEQ ID NO: 655213 - DNA, 72 bp, Artificial Sequence
  ENSG00000183629_47 (sequence is synthesized)
gagcttgaggagagtttaccagttcgagttcccactgcttcctgctctggggaatagagttgagggggccac

SEQ ID NO: 655214 - DNA, 88 bp, Artificial Sequence
  ENSG00000183629_48 (sequence is synthesized)
tgagggggccaccctccatcaccttaatgtgactctccccacagaaacaacagaatatgatttctttgtttgctcgcgacatgactgc

SEQ ID NO: 655215 - DNA, 120 bp, Artificial Sequence
  ENSG00000183631_0 (sequence is synthesized)
attctagttgccaagcctctaaagcagaagcaggagtcatttctccagacctagctggcctgttcagtgggttatctccaccacctcaggaaagctattctgatcaaatttcttcatggc

SEQ ID NO: 655216 - DNA, 120 bp, Artificial Sequence
  ENSG00000183631_1 (sequence is synthesized)
ttgtattgaaaacgtccttggagggcacgccccttcacccttggtagtatctgtggacaaaaatgggaaccaggagctgcaccacgacatgcccctgcaatgtctgagttccaagccaga

SEQ ID NO: 655217 - DNA, 120 bp, Artificial Sequence
  ENSG00000183631_2 (sequence is synthesized)
ggatgacgcagagccctggggtcaacctcaagtaccgctgagaccttccgtcaatgtgctgactgatctggatagcaagcaactggagtggccctctgaaagaacaggatcctgcattcc

SEQ ID NO: 655218 - DNA, 120 bp, Artificial Sequence
  ENSG00000183631_3 (sequence is synthesized)
tcttcatagcttgagagctcatagacacccctacgggccaccacctgctgttgcagaagagtccctagcaacagcagaagtaaacagctctgatgcactggcaggctggaggcaggaggg

SEQ ID NO: 655219 - DNA, 120 bp, Artificial Sequence
  ENSG00000183631_4 (sequence is synthesized)
acaggatgctattaatgtgtcctgggaagtctctggcggccctcctgcactgatagtagggggcacaaaggtcaacaatgggggcactgagagaggcagtaataacgcaaggttgcatgt

SEQ ID NO: 655220 - DNA, 120 bp, Artificial Sequence
  ENSG00000183631_5 (sequence is synthesized)
tattcccacccttagatcagggatagtaatggaggtgccgcccggaaatacacgaatagcctgcagaggaaagctggctcatgtttctttcccactcaggggcccatgccaccccatgca

SEQ ID NO: 655221 - DNA, 120 bp, Artificial Sequence
  ENSG00000183631_6 (sequence is synthesized)
taattggccaaggcctatcccgttgtcttccagtactccaggtttaccttcttgctctactgttcattgtttcatccctcctcgacctccgattttcaatccctttctcactatgcctct

SEQ ID NO: 655222 - DNA, 120 bp, Artificial Sequence
  ENSG00000183631_7 (sequence is synthesized)
tccttttgctcctcctccgatatttggtcctccactgccttcttattttgcccatttccattctgggggaatgccagctcctgcatcacccaacagagagcacagctgatggcaaaaagg

SEQ ID NO: 655223 - DNA, 120 bp, Artificial Sequence
  ENSG00000183631_8 (sequence is synthesized)
aaggatgaaaaaagggttgtggaaagaggtgaaagttattcatttatgcttttatatttgaaaccttgtaccctcccacactctgtttagcactaatgtgccctacttgaaaccacgtac

SEQ ID NO: 655224 - DNA, 120 bp, Artificial Sequence
  ENSG00000183631_9 (sequence is synthesized)
cctcccacactctgtttagcactaatgtgccctatttgaaaccttgtaccctaccacactctgtttagcacaaatgtgccctacatactggagattaaataaagattgtgaagtctgaaa

SEQ ID NO: 655225 - DNA, 120 bp, Artificial Sequence
  ENSG00000183632_0 (sequence is synthesized)
ggctccacggccacatccgcaaaaagggtactggtgaacgtgacattttcacgaagccacagcccatggtcactccctgcaaagctctgaacttgcgcattcccaggccaggccgtggtt

SEQ ID NO: 655226 - DNA, 120 bp, Artificial Sequence
  ENSG00000183632_1 (sequence is synthesized)
gtctttccaaggcggctcagcttgtgctttgcttggagagagcggagggcagcagcacagtgacagcgtctgggacctcagaccagtttccacagccacttatgaaagcagacggctcca

SEQ ID NO: 655227 - DNA, 120 bp, Artificial Sequence
  ENSG00000183632_2 (sequence is synthesized)
tgggctggaggaggtgggacgctctggaaagaactcgggtgcgagtgggaaagaaaatcgagctgagcagctggaagtcgaagtcgcgtgagtgaggaccagacactctcgatttaggca

SEQ ID NO: 655228 - DNA, 120 bp, Artificial Sequence
  ENSG00000183632_3 (sequence is synthesized)
aaggcggggtgcacttcccaacaacacatcctcctcactggcgagaccaggcctgcccttcaagttcctctcctgatttaatccccttggcgagggtttggcatgaaatcaatggccagc

SEQ ID NO: 655229 - DNA, 120 bp, Artificial Sequence
  ENSG00000183632_4 (sequence is synthesized)
aagcttggtaaacgaagccgcctacaccgccctccccctccctgcacggccgcgccccgcctccgctcctgtctcaatctgggattgtcctcctgtagccccaccatccaccgtggggaa

SEQ ID NO: 655230 - DNA, 120 bp, Artificial Sequence
  ENSG00000183632_5 (sequence is synthesized)
cggtggagagactacaactcccagtatgcaccgcgatgcgcgcctcaccctgcatctcccagcccgcagccagctggcatcctagaccctctgccctgcgaccaacagccgggagcggac

SEQ ID NO: 655231 - DNA, 120 bp, Artificial Sequence
  ENSG00000183632_6 (sequence is synthesized)
cagacaccagaactcccggaacggttgaagacggttccgctccctgtcccgcctttcgcagcccagcagtttcgccctgcggagaggagccttgctgtttccaaatctctcctgctgaag

SEQ ID NO: 655232 - DNA, 120 bp, Artificial Sequence
  ENSG00000183632_7 (sequence is synthesized)
agacattggagctagggcggctagtttcacctggtaattgtgacaccctgtctcctcgagctgcaggcttttatgcttgtcatgttcgaagtttgataccttgcagatcaacaaagggcc

SEQ ID NO: 655233 - DNA, 120 bp, Artificial Sequence
  ENSG00000183632_8 (sequence is synthesized)
acgcacaagagcagaatctccgtgggacatctctctggagcatcaatattactgcagtatttggaagaaacaaatttaaataagttctaaggtgaagaatggaacatttaagacaagtct

SEQ ID NO: 655234 - DNA, 120 bp, Artificial Sequence
  ENSG00000183632_9 (sequence is synthesized)
ggaaagtcatctgcctttaataactgtcgtttgtccttaacgtcagactttctccaagaccaaaactctaagaacttatttccattcttacaaatagtaaaaatgataaatcatatcaag

SEQ ID NO: 655235 - DNA, 120 bp, Artificial Sequence
  ENSG00000183632_10 (sequence is synthesized)
tcaattgaaagtcctgcctgctgctttcctaaattgcaatatggccttggtatggttttatttgtacttttgtgggggattcgtggatctttagattaaaaaaaaaaaaataggtttttg

SEQ ID NO: 655236 - DNA, 120 bp, Artificial Sequence
  ENSG00000183632_11 (sequence is synthesized)
aacaatttttgcaagtttgcagctgttagttattgatttatttttccaacccatctaattcttctgtctctctcctctcctcaggctcaataattccatgggtctctaaggctgtgttta

SEQ ID NO: 655237 - DNA, 120 bp, Artificial Sequence
  ENSG00000183632_12 (sequence is synthesized)
ttttctttaaattttgttgatttacttttatactccatttgattttttctatctctcaccttttctcagactcagtcatcccacaggtctgtaaggctctgttcattttctttaaacttc

SEQ ID NO: 655238 - DNA, 120 bp, Artificial Sequence
  ENSG00000183632_13 (sequence is synthesized)
ttttttttttcctctcctcagattggataaattatattgctatgtctctgtttctgaactatagaaaagctcaaaattattatttttatttctcattttttatatggctattttttctct

SEQ ID NO: 655239 - DNA, 120 bp, Artificial Sequence
  ENSG00000183632_14 (sequence is synthesized)
gctgatgtttcacatctattcatttatgagaatattttcctttgccctcatgagcgtgtttataatagctgccttcaaattcttgtctgccgtttacatcttggacatcttggagatggc

SEQ ID NO: 655240 - DNA, 120 bp, Artificial Sequence
  ENSG00000183632_15 (sequence is synthesized)
tactgcctgctttttatcttgtgtatttattacattttcacgtgtcttcacgcatcccttgaattggaaattgtgccctggagactgtatacaagactggattaaaaagactggattctg

SEQ ID NO: 655241 - DNA, 120 bp, Artificial Sequence
  ENSG00000183632_16 (sequence is synthesized)
ttggagctagggcggctagtttcacctggctgtcacaaatcctctgcaccccaggagcgccgcttggacccccgggctcgctgcgtggtccatatctaggtcgggcctctcacggagact

SEQ ID NO: 655242 - DNA, 120 bp, Artificial Sequence
  ENSG00000183632_17 (sequence is synthesized)
ttcccaccagtgtaataaagaggagaaaacgtcacagcggaagggcctgaccctgctgcatccactaaggaaacagctacggggatgggaccctgggagctgctgtggagcctcatccac

SEQ ID NO: 655243 - DNA, 120 bp, Artificial Sequence
  ENSG00000183632_18 (sequence is synthesized)
tcagggtcttagtgtggacctccgggccgtgattaatgcaggtcagcaggaccagagcgccccttggtccctcccaacacatgagggtagtttgtgtggtgaggtcagggatagtgtctg

SEQ ID NO: 655244 - DNA, 120 bp, Artificial Sequence
  ENSG00000183632_19 (sequence is synthesized)
cgcttctaccctgaatagggctcccttggaaaatactttaatatctctttttaaatacccccttggaccacttttaatagttttctgatagaactaaacagtgatcattctcttaattca

SEQ ID NO: 655245 - DNA, 120 bp, Artificial Sequence
  ENSG00000183632_20 (sequence is synthesized)
ggcctctcactgcctccgcggcagggttgtcaagacatgcgcagtgcggcccgtccctagggctgggttaagggccgcggatgtggcagttctcaggcctcttgggatcgcctcaagaag

SEQ ID NO: 655246 - DNA, 120 bp, Artificial Sequence
  ENSG00000183632_21 (sequence is synthesized)
tgtggagcctcatccaccgcttctctgaccccacccaggctgcttcccaggcctcagggtcttagtgtggacctccgggccgtgattaatgcagtttttcaggttaagtactgcacgact

SEQ ID NO: 655247 - DNA, 120 bp, Artificial Sequence
  ENSG00000183632_22 (sequence is synthesized)
gcagcccgtccctaggtgtagggtaatggcggccgacctggaggctccttgggatcccctcgagaagcccgttcatgagtgtctgaaactgtcacttgactgccagaagtgaaaacatcg

SEQ ID NO: 655248 - DNA, 120 bp, Artificial Sequence
  ENSG00000183638_0 (sequence is synthesized)
gcaaatggaccatctgttggagctcaggaggctgggctcctgcccaagggactggggcctcaggctctcaggccaaggagagtggccccgaggactgtccggaggagggtggccagccct

SEQ ID NO: 655249 - DNA, 120 bp, Artificial Sequence
  ENSG00000183638_1 (sequence is synthesized)
gctgcccagagggactgagccactggcagggaaggaggcggtgttccccctggcctgactttcctccaaaggacgtccccctgaggcttaggggctgagccatgcccttgtgctccctgg

SEQ ID NO: 655250 - DNA, 120 bp, Artificial Sequence
  ENSG00000183638_2 (sequence is synthesized)
aggacgcggccagagcccccacaccatgaacagcacccccaggaatgcccaggccccgagccaccgtgagtgcttcctgccctctgtggctcgcaccccctcggtcaccaaggtcacgcc

SEQ ID NO: 655251 - DNA, 120 bp, Artificial Sequence
  ENSG00000183638_3 (sequence is synthesized)
agccaagaagatcaccttcctcaagcgaggggatccacggtttgctggggtccgcctggccgttcaccagcgcgcctttaagaccttcagcgccctcatggacgagctctcccagcgcgt

SEQ ID NO: 655252 - DNA, 120 bp, Artificial Sequence
  ENSG00000183638_4 (sequence is synthesized)
gcctctctcctttggggtgcgctctgtcaccacaccccggggcctgcatagcctcagcgccctggagcagctggaagatggaggctgctacctctgctctgataagaagccccccaagac

SEQ ID NO: 655253 - DNA, 120 bp, Artificial Sequence
  ENSG00000183638_5 (sequence is synthesized)
ccccagtggaccaggccggccacaggagagaaaccccactgctcagcagttgcgggatgtcgaaggccagcgtgaagccccaggcacctcctcctcccggaagagtcttaaaaccccccg

SEQ ID NO: 655254 - DNA, 120 bp, Artificial Sequence
  ENSG00000183638_6 (sequence is synthesized)
gaggatactgctgattaagaacatggaccctcgcctccagcagacagtggttctcagtcacaggaatactaggaacctggccgcctttctcggcaaagcctcagatctcctgcgctttcc

SEQ ID NO: 655255 - DNA, 120 bp, Artificial Sequence
  ENSG00000183638_7 (sequence is synthesized)
tgtgaagcagttgtacacgaccagcgggaaaaaggtggactcgctgcaggccctgctgcacagcccctctgtgctggtgtgtgccgggcatgaggccttcagaaccccagccatgaaaaa

SEQ ID NO: 655256 - DNA, 120 bp, Artificial Sequence
  ENSG00000183638_8 (sequence is synthesized)
tgccaggagaagcgaggctgaaactttatctgggctgacttcaagaaacaaaaacgggagctgggggccaaagaccaagccgagtgtgatccattcgcggtctccgccaggcagcacgcc

SEQ ID NO: 655257 - DNA, 120 bp, Artificial Sequence
  ENSG00000183638_9 (sequence is synthesized)
acggctgccagaaaggcctggtcctagcaaccccccggtgggccctgctcctggcaggcaccctcaggacacgccagctcagtcgggcccgctggtggctggcgatgacatgaagaagaa

SEQ ID NO: 655258 - DNA, 120 bp, Artificial Sequence
  ENSG00000183638_10 (sequence is synthesized)
ggtccgcatgaatgaggacggcagcctgtccgtggagatgaaagtccgcttccacctggtcggcgaggacacgctcctatggtcccggaggatgggcagggccagcgccctcacggcagc

SEQ ID NO: 655259 - DNA, 120 bp, Artificial Sequence
  ENSG00000183638_11 (sequence is synthesized)
cagtggggaagaccccgttctgggggaggtagaccccctctgctgtgtgtgggagggctacccttggggcttctcagagcctggggtgtggggaccccggccctgcagggtgggatgcag

SEQ ID NO: 655260 - DNA, 120 bp, Artificial Sequence
  ENSG00000183638_12 (sequence is synthesized)
ggaagtctttggccgaggcgggcagccagggcccaagtatgaaatctggacgaatcccctgcatgcctcccagggagagagagtggcagctcggaagaggtggggactggcccagcacgt

SEQ ID NO: 655261 - DNA, 120 bp, Artificial Sequence
  ENSG00000183638_13 (sequence is synthesized)
ccgctgcagtggcctgtggggccacgggactgccgggagggagagatgcagccaggacagtgccagcccagcctccagcaccggcctccccgagggctcggagccagagtcctcctgctg

SEQ ID NO: 655262 - DNA, 120 bp, Artificial Sequence
  ENSG00000183638_14 (sequence is synthesized)
ccccaggaccccggaggacggggtggacagtgccagcccctctgcccagataggggctgagcggaaagctggagggagcctgggtgaggaccccggcctatgcatagatggagcagggct

SEQ ID NO: 655263 - DNA, 120 bp, Artificial Sequence
  ENSG00000183638_15 (sequence is synthesized)
gggcggcccagagcaaggcggccgcctgacaccgagggcccggagtgaggagggggcttcttcggactcgtcagccagcaccggctctcatgagggatccagcgaatggggtgggcggcc

SEQ ID NO: 655264 - DNA, 120 bp, Artificial Sequence
  ENSG00000183638_16 (sequence is synthesized)
ccagggctgtccaggcaaggcaagggccgagacctctcagcaggaggccagcgagggaggcgaccccgcttctccagccctgagtctttcatctttaaggagtgacgacctgcaggcaga

SEQ ID NO: 655265 - DNA, 120 bp, Artificial Sequence
  ENSG00000183638_17 (sequence is synthesized)
gacgcaaggacagggcaccgagcaggccacgggagcggctgtgacaagggagcctctggttctgggcctttcctgctcctgggactcggaaggagcctcttccaccccttccacctgcac

SEQ ID NO: 655266 - DNA, 120 bp, Artificial Sequence
  ENSG00000183638_18 (sequence is synthesized)
ttcatcccagcaggggcagagaaggcacagaagccgggccagtgcaatgtcctcacccagcagccctggccttggccgagtggccccgagaggccatcccaggcattctcactaccgcaa

SEQ ID NO: 655267 - DNA, 120 bp, Artificial Sequence
  ENSG00000183638_19 (sequence is synthesized)
ggacacccacagcccactggactcctctgtaaccaagcaagtgccgaggcctcctgagcggcgaagggcctgccaggatggctcagtgccacgatattctggaagctcatcgagcaccag

SEQ ID NO: 655268 - DNA, 120 bp, Artificial Sequence
  ENSG00000183638_20 (sequence is synthesized)
gacacaggcctctgggaacctgagacctccctcctcgggctctcttccttcccaggaccttctgggaaccagcagtgccactgtcacccctgcagtccactcggattttgtttctggagt

SEQ ID NO: 655269 - DNA, 120 bp, Artificial Sequence
  ENSG00000183638_21 (sequence is synthesized)
ctccccgcacaacgctccctctgccgggtgggcaggggacgcggggtccaggacatgctcgccggcccccatacctccccacacatccgactcctgctcaaaatctggggctgccagcct

SEQ ID NO: 655270 - DNA, 120 bp, Artificial Sequence
  ENSG00000183638_22 (sequence is synthesized)
gggggaagaggccagggacacgcctcagccctcctcacccttggttctgcaggttggacggcctgagcaaggggcggtgggcccccaccgaagccactgctgctcacagcctgggacgca

SEQ ID NO: 655271 - DNA, 120 bp, Artificial Sequence
  ENSG00000183638_23 (sequence is synthesized)
gccggcccaagaggcccagcggggaccctcccctgaggctagctggctgtgtggcaggtactgtcccaccccgcccagggggcggccctgcccccagaggcgctcttccagctgtgggag

SEQ ID NO: 655272 - DNA, 120 bp, Artificial Sequence
  ENSG00000183638_24 (sequence is synthesized)
caccggcagcagccaccaaagcactgcccgggggccaggtgggagcccgcaggaggggacacgccagccaggccccacgccgtccccaggccccaattcaggggcatcaaggagaagcag

SEQ ID NO: 655273 - DNA, 120 bp, Artificial Sequence
  ENSG00000183638_25 (sequence is synthesized)
tgccagccagggtgcggggtctcgggggctgtccgaggagaagaccttgaggagtgggggaggcccccaggggcaggaggaggccagtggtgtgtcacccagctctctgccccgctcgtc

SEQ ID NO: 655274 - DNA, 120 bp, Artificial Sequence
  ENSG00000183638_26 (sequence is synthesized)
tccagaggctgtggtccgcgaatggctggacaacattccagaagagcccatactcatgacatatgagttggcggacgagaccacaggtgcagctgggggtggcctgagaggccccgaggt

SEQ ID NO: 655275 - DNA, 120 bp, Artificial Sequence
  ENSG00000183638_27 (sequence is synthesized)
ggaccctggggatgaccattctctggaaggcctgggggagccagctcaggcgggacagcagtccctggaaggggaccccggccaggacccagagccagagggagccctcctggggagtag

SEQ ID NO: 655276 - DNA, 120 bp, Artificial Sequence
  ENSG00000183638_28 (sequence is synthesized)
tgacactggtccccaatcaggagagggtgtcccccaaggggcagctccagagggagtttccgaggcccctgcagaggccggagcagacagagaggccccagcaggctgcagggtgagcct

SEQ ID NO: 655277 - DNA, 120 bp, Artificial Sequence
  ENSG00000183638_29 (sequence is synthesized)
gcgggcacttcctggccgggtgtctgcctccacgcagatcatgagggcgctgatgggctccaagcagggccggcccagcagcgtgcccgaagtgtctaggcccatggccaggaggctcag

SEQ ID NO: 655278 - DNA, 120 bp, Artificial Sequence
  ENSG00000183638_30 (sequence is synthesized)
ctgctcagccggggccctcattacttgtctggccagtctgcagttatttgaggaagaccttgggtctcctgccagcaaagtgaggttcaaagactcccctcggtaccaggagctgctcag

SEQ ID NO: 655279 - DNA, 120 bp, Artificial Sequence
  ENSG00000183638_31 (sequence is synthesized)
catctcgaaggacctgtggccaggatgtgacgttggggaagaccagctggactcaggcctctgggagctcacatggagccaggctctgccagaccttgggtcccatgccatgacggagaa

SEQ ID NO: 655280 - DNA, 120 bp, Artificial Sequence
  ENSG00000183638_32 (sequence is synthesized)
cttcacgcccacatcctcctctggtgtggacatcagcagcggctctggaggctcaggggagagtagcgtaccctgtgccatggacggcaccctggtgacacaggggacagagctgcccct

SEQ ID NO: 655281 - DNA, 120 bp, Artificial Sequence
  ENSG00000183638_33 (sequence is synthesized)
gcccgagcctgcgcttgtgccaccaatgaggatgaagcagaaagagacagtgaggagcagagggcgagctcgaacctggagcagttagctgaaaacacagtgcaagaagaggtgcaatta

SEQ ID NO: 655282 - DNA, 120 bp, Artificial Sequence
  ENSG00000183638_34 (sequence is synthesized)
gaggaaactaaagaaggaacagaaggagaagggctgcaagaagaggcggtgcagttagaggaaactaaaacagaagaagggctgcaagaagagggggtgcagttagaggaaactaaagaa

SEQ ID NO: 655283 - DNA, 120 bp, Artificial Sequence
  ENSG00000183638_35 (sequence is synthesized)
acagaaggagaaggacagcaagaagaagaggcgcagttagaggaaattgaagaaacaggaggagaagggctgcaagaagagggggtgcagttagaggaagttaaagaagggccagaagga

SEQ ID NO: 655284 - DNA, 120 bp, Artificial Sequence
  ENSG00000183638_36 (sequence is synthesized)
ggactgcaaggagaggctcttgaagagggtctcaaagaggaaggacttccagaagaaggaagcgtccacgggcaggaattgtcagaggccagctctccggatgggaaaggctcccaggaa

SEQ ID NO: 655285 - DNA, 120 bp, Artificial Sequence
  ENSG00000183638_37 (sequence is synthesized)
gatgacccagtccaggaggaggaagcaggaagagcctctgcctctgcagagccgtgccccgcagagggcacagaggaacccacagagccccctagtcatctcagcgagacggacccaagt

SEQ ID NO: 655286 - DNA, 120 bp, Artificial Sequence
  ENSG00000183638_38 (sequence is synthesized)
gccagcgagaggcagagtggctcccagcttgagcctggtttggaaaagccgcccggagccaccatgatgggccaagagcacacgcaggcccaacccacccagggggctgcagagaggagc

SEQ ID NO: 655287 - DNA, 120 bp, Artificial Sequence
  ENSG00000183638_39 (sequence is synthesized)
tcttcggtggcctgcagcgcggctctggactgcgaccccatctgggtgtccgtgttactgaagaagacggagaaggccttcctggcccaccttgccagtgcggtggctgagctccgagca

SEQ ID NO: 655288 - DNA, 120 bp, Artificial Sequence
  ENSG00000183638_40 (sequence is synthesized)
cgctggggcctgcaggacaatgatctgctggaccagatggcggccgagctgcagcaggacgtggcccaacgcctccaggacagcaccaagagagagctccagaagctccagggccgggcg

SEQ ID NO: 655289 - DNA, 120 bp, Artificial Sequence
  ENSG00000183638_41 (sequence is synthesized)
ggtaggatggtgctggagcctccaagggaggccctcaccggggagctgctcctgcagacccagcagcgcagacaccgtctccggggcctgcgaaacctctcggccttctctgagcggacc

SEQ ID NO: 655290 - DNA, 120 bp, Artificial Sequence
  ENSG00000183638_42 (sequence is synthesized)
ctgggcctggggcccctctccttcaccctggaggacgagccagccctcagcacagccctggggagccagctgggcgaggaggcggagggggaggagttctgtccctgcgaggcctgcgtg

SEQ ID NO: 655291 - DNA, 120 bp, Artificial Sequence
  ENSG00000183638_43 (sequence is synthesized)
aggaagaaagtgagccctatgtcccccaaggccacaatgggggcaaccagaggtcccatcaaagaggcctttgacctgcagcagattctgcagaggaagaggggagaacacactgatggg

SEQ ID NO: 655292 - DNA, 120 bp, Artificial Sequence
  ENSG00000183638_44 (sequence is synthesized)
gaggcagcagaggtggcccctggcaagacccacacggaccccacgagcactaggactgtccagggagctgagggagggctggggccggggctgagccaggggcctggagtggacgagggt

SEQ ID NO: 655293 - DNA, 120 bp, Artificial Sequence
  ENSG00000183638_45 (sequence is synthesized)
gaggatggcgaggggagccagagactcaacagagacaaagatcccaaactcggggaggcagagggagatgcaatggctcaggagagagaagggaaaacccacaacagtgaaaccagtgcg

SEQ ID NO: 655294 - DNA, 120 bp, Artificial Sequence
  ENSG00000183638_46 (sequence is synthesized)
ggcagtgagttgggggaagctgagcaggagggagagggcataagtgaaaggggagaaactgggggtcaaggctctgggcatgaggacaacttgcagggtgaagctgcggcaggaggtgac

SEQ ID NO: 655295 - DNA, 120 bp, Artificial Sequence
  ENSG00000183638_47 (sequence is synthesized)
caagatccaggacagagtgatggggccgaaggcatagaggccccggaggctgaaggggaggcccagccagagtcagaaggtgtagaggccccagaggcagaaggggatgcccaggaggct

SEQ ID NO: 655296 - DNA, 120 bp, Artificial Sequence
  ENSG00000183638_48 (sequence is synthesized)
gaaggggaggcccagccagagtcagaagatgtagaggccccagaggcagaaggagaggcccagccagagtcagaagatgtagagaccccagaggcagaatgggaggtccagccagagtca

SEQ ID NO: 655297 - DNA, 120 bp, Artificial Sequence
  ENSG00000183638_49 (sequence is synthesized)
gaaggtgcagaagccccggaggcagaaaaggaggcccagccagagacagaaagtgtagaggccctggagactgaaggggaggacgagccagagtcagaaggtgcagaggcccaagaggca

SEQ ID NO: 655298 - DNA, 120 bp, Artificial Sequence
  ENSG00000183638_50 (sequence is synthesized)
gaagaggcggcccaggaggcagaagggcagacccagccagagtcagaagttatagagtcccaggaggcagaagaggaagcccagccagagtcagaagatgtagaggccctggaggttgaa

SEQ ID NO: 655299 - DNA, 120 bp, Artificial Sequence
  ENSG00000183638_51 (sequence is synthesized)
gtggagacccaggaggcagaaggggaggcccagccagagtcagaagatgtagaggccccagaggctgaaggggagatgcaagaggcagaagaggaggcccagccagagtcagacggtgta

SEQ ID NO: 655300 - DNA, 120 bp, Artificial Sequence
  ENSG00000183638_52 (sequence is synthesized)
gaggcccagccaaagtcagaaggtgaagaggcccaggaggttgaaggggagacccagaagacagaaggggatgcccagccagagtcagacggtgtagaggccccggaggcagaagaggag

SEQ ID NO: 655301 - DNA, 120 bp, Artificial Sequence
  ENSG00000183638_53 (sequence is synthesized)
gcacaggaggctgaaggggaggtccaggaggcagaaggggaggcccacccagagtcagaagatgtagatgcccaggaggcagaaggggaggcccagccagaatcagaaggtgtagaggcc

SEQ ID NO: 655302 - DNA, 120 bp, Artificial Sequence
  ENSG00000183638_54 (sequence is synthesized)
ccagaggcagaaggggaggcccagaaggcagaaggtatagaggccccagagactgaaggggaggcccagccagagtcagaaggtatagaggccccagaggctgaaggggaggcccagcct

SEQ ID NO: 655303 - DNA, 120 bp, Artificial Sequence
  ENSG00000183638_55 (sequence is synthesized)
gagtcagaaggtgtagaggcccaggatgcagaaggggaggcccagccagagtcagaaggtatagaggcccaggaggctgaagaggaggcccaaccagagttagaaggtgtagaggcccca

SEQ ID NO: 655304 - DNA, 120 bp, Artificial Sequence
  ENSG00000183638_56 (sequence is synthesized)
gaggcagaaggggaggcccagccagagtcagaaggtatagaggccccagaggcagaaggggaggcccaaccagagttagaaggtgtagaggccccggaggctgaagaggaggcccagcca

SEQ ID NO: 655305 - DNA, 120 bp, Artificial Sequence
  ENSG00000183638_57 (sequence is synthesized)
gagccagaaggcgtagagaccccggaggctgaaggggaggcccagccagagtcagaaggagaaactcaaggtgagaaaaaggggagccctcaggtcagtctaggagatggccaatctgag

SEQ ID NO: 655306 - DNA, 120 bp, Artificial Sequence
  ENSG00000183638_58 (sequence is synthesized)
gaggcttctgaaagcagcagcccagtccctgaggacaggcccactccacccccttccccaggtggagacactccccaccaaaggccaggctcccaaacaggcccttcctcctccagagca

SEQ ID NO: 655307 - DNA, 120 bp, Artificial Sequence
  ENSG00000183638_59 (sequence is synthesized)
tcctcttggggcaactgctggcagaaagactcagaaaatgaccatgtacttggagacacaaggagccctgatgccaagtccacggggacccctcatgcagagaggaaggccaccaggatg

SEQ ID NO: 655308 - DNA, 120 bp, Artificial Sequence
  ENSG00000183638_60 (sequence is synthesized)
tacccagaaagttctacttctgagcaagaagaggcccctttgggctcaaggactccagagcagggggccagtgaaggttatgacctacaagaggaccaggcactcggaagtctcgccccc

SEQ ID NO: 655309 - DNA, 120 bp, Artificial Sequence
  ENSG00000183638_61 (sequence is synthesized)
actgaggcagtgggcagggcagacggctttggccaagatgacttagatttctagacaagatcaagctagaaaacaatcacgagcttgggagctctgtttttattcatattttttctacaa

SEQ ID NO: 655310 - DNA, 120 bp, Artificial Sequence
  ENSG00000183638_62 (sequence is synthesized)
aactgagcaacgttcagtccactggagatgtccatagtacatggacaaagaccaaggacttgccaaggacacagcccatgccatgctgtcctgggactcttaagtccagaagtgtcagag

SEQ ID NO: 655311 - DNA, 120 bp, Artificial Sequence
  ENSG00000183638_63 (sequence is synthesized)
agctctgcggcccgtcccacacgcagtgtgaagaaagggggtgtctgcggatctgcccggttatcggaggtcagcccggctcctatttatttgtctgcagagcccgaaagatggaactga

SEQ ID NO: 655312 - DNA, 120 bp, Artificial Sequence
  ENSG00000183638_64 (sequence is synthesized)
ttggaaaggctccagtttagcttttgtttgtgggtttgttttctgctagcaagtgttgctctctgtcttttccctgttgatctcctgttacttttctccttggcttctgttggcactcac

SEQ ID NO: 655313 - DNA, 120 bp, Artificial Sequence
  ENSG00000183638_65 (sequence is synthesized)
ctcatttgactttgaggtgctttttttctagtcttgaatatatttgatgactctgcagaaatacttgggcaaagcaggtaacttcagagtcattggataaagtttgttctcaactccaaa

SEQ ID NO: 655314 - DNA, 81 bp, Artificial Sequence
  ENSG00000183638_66 (sequence is synthesized)
agatccatatataaagcaggcagagaaacgtgaaaaggagagatgggcctagccccccagcctacatctttctcccgtgct

SEQ ID NO: 655315 - DNA, 120 bp, Artificial Sequence
  ENSG00000183638_67 (sequence is synthesized)
tgacctaattcacagtctcctcaagattcagtcctgttgctccttaacatctgtatgcaccattccaccaatacttcataaatatcatatcactgggcacagtggcgcacgcctgtaatc

SEQ ID NO: 655316 - DNA, 120 bp, Artificial Sequence
  ENSG00000183638_68 (sequence is synthesized)
tcatatgataacatcattacaaaaactttgttataaacatcagctacagcagcctgcactcatggagtaacagagctctccctcctacaatcaaaaacacgttcaccttctccccacaat

SEQ ID NO: 655317 - DNA, 120 bp, Artificial Sequence
  ENSG00000183638_69 (sequence is synthesized)
cgcattatcactggacccttcgtcttctatgctgtgacaacctcaccttgatatcgtctatctcaaggtctacttaggtagtccagcaccatcaaagtaccctatgttaagaagtatagg

SEQ ID NO: 655318 - DNA, 120 bp, Artificial Sequence
  ENSG00000183640_0 (sequence is synthesized)
atcccactgaggaaacgcactctgttgctacctaagccctccactcccgacaccatgctctgcgacaacttccccggggctgtcttcccaggatgctactggggcagctatggctacccg

SEQ ID NO: 655319 - DNA, 120 bp, Artificial Sequence
  ENSG00000183640_1 (sequence is synthesized)
ctgggatatagcgttggctgtggctatggcagcacctactctccagtgggctatggcttcggctatggctacaacggctgtggggctttcggctacaggagatactcgccatttgctctc

SEQ ID NO: 655320 - DNA, 120 bp, Artificial Sequence
  ENSG00000183640_2 (sequence is synthesized)
catttgctcatcaacctcagagacactgctttccaacttacctcgagtcccaggggaggaaaatgaaaaagcagacgcttcctcaagctgcctcccctggctgatgttctctgggacatt

SEQ ID NO: 655321 - DNA, 120 bp, Artificial Sequence
  ENSG00000183640_3 (sequence is synthesized)
ttcggaaatttgacctcccacttgtcatgagctacttttgaattttccatgacactcatgacttgtgatgaagtcatggatatgtctatcaaaatctcaataaatttgtctcagctggta

SEQ ID NO: 655322 - DNA, 120 bp, Artificial Sequence
  ENSG00000183644_0 (sequence is synthesized)
atggaaacgggacccagcgaagaacctagcggccgaaaagagtcccaggaaatgtgccccccgggattactggtatttgctggctcctcggaacaagatgccaacttggctaagcagttc

SEQ ID NO: 655323 - DNA, 120 bp, Artificial Sequence
  ENSG00000183644_1 (sequence is synthesized)
tggatctcggcgtcgatgtatccccctagcgaatctcagctggtgctgcgcagagacagcagtcagcgtctgccggtggcgcggcccaggaggagcagagggtctgaaaacagccactcc

SEQ ID NO: 655324 - DNA, 120 bp, Artificial Sequence
  ENSG00000183644_2 (sequence is synthesized)
tcgcagtcttttcaccttgcgagtaacaaaaatagagacatctttgccgaagccctaaagatacaggaatctgaggagaaagtaaagtatctccaaaagacaaggtctcactctgtcacc

SEQ ID NO: 655325 - DNA, 120 bp, Artificial Sequence
  ENSG00000183644_3 (sequence is synthesized)
gagattctccaactcttaagaaaacaaagagaagaaaggatctcgaaagaactgatttcccttccgtataaaccaaaagccaaagaacacaaagcaaagaaagtggtatcagagtcagat

SEQ ID NO: 655326 - DNA, 120 bp, Artificial Sequence
  ENSG00000183644_4 (sequence is synthesized)
aaagaggaccaagaagaagtcaaaactttggactaatttgcttgacacatggcagaggatggctcacttataccttcactttggaaacaaccttctcttagatcaggatcattgagatca

SEQ ID NO: 655327 - DNA, 120 bp, Artificial Sequence
  ENSG00000183644_5 (sequence is synthesized)
ctggcaacattatagtagacaaagaaatacaagttaaatacgcagacttccaggaattttaccagttagtgagtacttgtgttaaaataaagaaataaaggttaaatatgcaggcttcta

SEQ ID NO: 655328 - DNA, 120 bp, Artificial Sequence
  ENSG00000183644_6 (sequence is synthesized)
ttcttactttgccacttacccttaaatcttctagaaacccacccgtgtattacagatttcttgccttgaataaactttcttctccgcacagctattaaagcctgtgtacgaacttgtctg

SEQ ID NO: 655329 - DNA, 120 bp, Artificial Sequence
  ENSG00000183644_7 (sequence is synthesized)
tctgtggaatatgcaagcataagttagtgcaaaatggaaagcagctcagccttgaagctctgtgcacattctctgtccctctcttctcaccctgggctatataatcacccatcatcatgc

SEQ ID NO: 655330 - DNA, 120 bp, Artificial Sequence
  ENSG00000183644_8 (sequence is synthesized)
cctcctgactccactgtcccctatccacacctggcccacttctttagtgaatcagcacgtgtttgtggctcaccagctctgagtgggctaaggttgctaaaactaagttcatgtagcaaa

SEQ ID NO: 655331 - DNA, 120 bp, Artificial Sequence
  ENSG00000183644_9 (sequence is synthesized)
ctctcaatgataagggagtagccttatctctggaataatgttagagcaggactaggaacagtttaacagtctagaagagtttaaaggaaataagtaagcaacagttaatcactaacgcac

SEQ ID NO: 655332 - DNA, 120 bp, Artificial Sequence
  ENSG00000183644_10 (sequence is synthesized)
ccctaataagaaatctgtccgtttttgtattatgactaaaaaccaatgtggccaactcaacattaatatgacaaatatttattttcataccacattctgggagaaacagaaagtgataga

SEQ ID NO: 655333 - DNA, 120 bp, Artificial Sequence
  ENSG00000183644_11 (sequence is synthesized)
attttgatttttctctcattggtattgaggctaactgcctttaatgctgtcaaagtaacacccttaaggaagaaagaatatgtctactctaattttgtaaacttctggaaaaaaaaatag

SEQ ID NO: 655334 - DNA, 120 bp, Artificial Sequence
  ENSG00000183644_12 (sequence is synthesized)
aaagatcatttaatcacctagctatattatctacacaatgctcagcaacctaatttctcgctttttagccagacgatttgacttagcttccacagatgaagcaaaactagcccaatcaag

SEQ ID NO: 655335 - DNA, 120 bp, Artificial Sequence
  ENSG00000183644_13 (sequence is synthesized)
cattcctgctactacccatgctgactcacctaataataaaacatttcccggcttggacagataattctcttaataatttaaatgcttacttaattccttttgtaaactaactttgtccta

SEQ ID NO: 655336 - DNA, 120 bp, Artificial Sequence
  ENSG00000183644_14 (sequence is synthesized)
tgtaaactaactttgtcctacatcctgaagccttgaatttcattctattctgttgtgattatcttcctactattaacttcttctagctactcttctttttttttttgagacggagtctcg

SEQ ID NO: 655337 - DNA, 74 bp, Artificial Sequence
  ENSG00000183644_15 (sequence is synthesized)
tacagggtttcaccgtcttggccaagctggtcttgaactcctgctcgtgatccacccatctcagcttcccaaag

SEQ ID NO: 655338 - DNA, 120 bp, Artificial Sequence
  ENSG00000183644_16 (sequence is synthesized)
ggcctctagttactctttgtacattctttgggcaactaatcatgcattactctgtgcccatattttataattatttaactcttattattgctttcattatttaacttttctcatattttt

SEQ ID NO: 655339 - DNA, 120 bp, Artificial Sequence
  ENSG00000183644_17 (sequence is synthesized)
tgtattgtctgtaactatactgtaagctccatgaggaattgggtcacccaaagtgccagcatactgcttacatgttggacttcagaaaatatttataacaaaaagtttagttgaaaaata

SEQ ID NO: 655340 - DNA, 120 bp, Artificial Sequence
  ENSG00000183644_18 (sequence is synthesized)
tcatgtaattcagtgttagccaatttagaaagtgatgtttgcatactatacattaatttataaactttaaaaactattctattagacacaattgtaaaataactcccctacatacacaga

SEQ ID NO: 655341 - DNA, 120 bp, Artificial Sequence
  ENSG00000183644_19 (sequence is synthesized)
ctcccccttaccattcctccttcaacaggtcttcttagtataatccaggtccccttctgttagaaagaaggaaccggaaaatgtgttcatagtaaggttttagtagcaatatatttatta

SEQ ID NO: 655342 - DNA, 120 bp, Artificial Sequence
  ENSG00000183644_20 (sequence is synthesized)
tccatcccagaatatttgcattttaaaagaagtctgaataaataaaataatgggtaaaccaaagaaatcaattaccaatgatgaaatctcaggagtctgactctagaataaacaaaacat

SEQ ID NO: 655343 - DNA, 120 bp, Artificial Sequence
  ENSG00000183644_21 (sequence is synthesized)
atttggggtaggagggctcctgtacctccaaaccacacttcacaatatcataaccacttctctcacatacaagtttatacttggttgcaaaacccaacacatagaatctacaacagtgaa

SEQ ID NO: 655344 - DNA, 120 bp, Artificial Sequence
  ENSG00000183644_22 (sequence is synthesized)
tttttattgggagaattttcaaaagttgttttcatgctacatcatgttcacaatggcggagttctgtgtattggaactgactgatattactaccaacaggaaagtggtatcagagtcaga

SEQ ID NO: 655345 - DNA, 120 bp, Artificial Sequence
  ENSG00000183644_23 (sequence is synthesized)
aatagagacatctttgccgaagccctaaagatacaggaatctgaggagaaagtaaagtatctccaaaagattacaggcaccatagtgtagtagattttggagacaacaagatgggtttgg

SEQ ID NO: 655346 - DNA, 120 bp, Artificial Sequence
  ENSG00000183644_24 (sequence is synthesized)
aagcctaactctgccacttactatttgtgtgaccttgagcaagtggtttaactcctgggatgctcagcttcctcatatataaaaagagaaatgattttttttaatatcctcctcatagag

SEQ ID NO: 655347 - DNA, 120 bp, Artificial Sequence
  ENSG00000183647_0 (sequence is synthesized)
ggaacttccggcgtcctccctgtggcgggcactttggcttgtgtcagttccatccgcgggtgccggatctggacctaggtgctgacagcgagaaggcgcgaggagagtcgttttctcagc

SEQ ID NO: 655348 - DNA, 120 bp, Artificial Sequence
  ENSG00000183647_1 (sequence is synthesized)
tgcacagccggggcctgacggtcgccggcggtggtgacagctttgctcttgtctccgcccggatcgtccaccgctcccggcccgctccgcccagagtccgatggcggcggcactgagggc

SEQ ID NO: 655349 - DNA, 120 bp, Artificial Sequence
  ENSG00000183647_2 (sequence is synthesized)
cccgacccagcaggtttttgtagcctttgaggatgtggccatttacttctcccaggaggagtgggagctccttgatgagatgcagaggctcctgtaccgcgatgtgatgctggagaactt

SEQ ID NO: 655350 - DNA, 120 bp, Artificial Sequence
  ENSG00000183647_3 (sequence is synthesized)
tgcagttatggcatccctaggttgctggtgtggagcagtagatgaggggacgccttctgcagagagcgtttctgtggaagaactgtcacagggcaggactccaaaggcagatacatccac

SEQ ID NO: 655351 - DNA, 120 bp, Artificial Sequence
  ENSG00000183647_4 (sequence is synthesized)
tgataagagtcacccctgtgagatttgtaccccagtcctgagagacattttacaaatgattgagctccatgcctcaccctgtggacagaaattgtacttgggtggagcatcaagagattt

SEQ ID NO: 655352 - DNA, 120 bp, Artificial Sequence
  ENSG00000183647_5 (sequence is synthesized)
ctggatgagttcaaaccttcaccagctccagaagcttgataatggagagaagctctttaaagtggatggggaccaggcctcatttatgatgaactgcaggttccatgtgtcaggaaaacc

SEQ ID NO: 655353 - DNA, 120 bp, Artificial Sequence
  ENSG00000183647_6 (sequence is synthesized)
cttcacgtttggggaagtcgggagggacttttcagccacctcaggacttctccagcatcaggtgactcccaccattgagagaccacacagcaggattagacacttgagagttcccactgg

SEQ ID NO: 655354 - DNA, 120 bp, Artificial Sequence
  ENSG00000183647_7 (sequence is synthesized)
acgaaagcctctcaaatacactgaatccaggaaatcttttagagagaaatctgtattcattcaacaccaaagagctgactctggagaaaggccttacaagtgcagtgaatgtgggaaatc

SEQ ID NO: 655355 - DNA, 120 bp, Artificial Sequence
  ENSG00000183647_8 (sequence is synthesized)
ctttagtcaaagttctggctttcttcgacacaggaaagcacacggtagaacaaggactcatgaatgtagtgaatgtgggaaatcatttagtcgcaaaactcacctaactcaacaccaaag

SEQ ID NO: 655356 - DNA, 120 bp, Artificial Sequence
  ENSG00000183647_9 (sequence is synthesized)
agttcacactggagaaaggccttatgactgcagtgaatgtggcaaatcctttcgccaggtatctgtcctcattcaacatcaacgagttcacactggagaaaggccttatgagtgcagtga

SEQ ID NO: 655357 - DNA, 120 bp, Artificial Sequence
  ENSG00000183647_10 (sequence is synthesized)
atgtgggaaatcttttagccacagcactaacctctatcgtcacaggagtgcccacactagcacaaggccttatgagtgcagtgaatgtggaaaatcctttagccatagcactaacctctt

SEQ ID NO: 655358 - DNA, 120 bp, Artificial Sequence
  ENSG00000183647_11 (sequence is synthesized)
tcgacactggagagttcacactggagtaaggccttatgagtgtagtgaatgtgggaaagcatttagttgcaatatctaccttattcaccaccaaagatttcacactggagaaagacctta

SEQ ID NO: 655359 - DNA, 120 bp, Artificial Sequence
  ENSG00000183647_12 (sequence is synthesized)
tatgagtgcagtgaatgtgggaaagtttttagccaaagctctggcctctttcgacacagaagagctcacactaaaacaaagccttatgagtgcagtgaatgtgaaaaatcatttagttgc

SEQ ID NO: 655360 - DNA, 120 bp, Artificial Sequence
  ENSG00000183647_13 (sequence is synthesized)
aaaactgacctcattcgacaccagacagttcacactggagaaaggccttatgagtgcagtgtatgtgggaaatcttttatccgaaaaacccacctcattcgacaccagactgttcacact

SEQ ID NO: 655361 - DNA, 120 bp, Artificial Sequence
  ENSG00000183647_14 (sequence is synthesized)
aatgaaaggccttatgagtgcgatgaatgtgggaaatcctatagccaaagctctgccctccttcagcataggagagttcacactggagaaaggccttatgagtgcagagaatgtgggaaa

SEQ ID NO: 655362 - DNA, 120 bp, Artificial Sequence
  ENSG00000183647_15 (sequence is synthesized)
tcttttacccgcaaaaatcacctcattcaacacaagacagttcacactggagaaaggccttatgaatgcagtgaatgtggaaaatcctttagccaaagctctggcctcttaagacacaga

SEQ ID NO: 655363 - DNA, 87 bp, Artificial Sequence
  ENSG00000183647_16 (sequence is synthesized)
aaaatcctttagccaaagctctggcctcttaagacacagaagagttcatgtgcagtgaatgtgggaaattattttgtcacgtcaccc

SEQ ID NO: 655364 - DNA, 70 bp, Artificial Sequence
  ENSG00000183647_17 (sequence is synthesized)
acctgcttgtgttgtgacatttaacacaagatttcccaaagaagaaaggccttatatatgctgtgaatgt

SEQ ID NO: 655365 - DNA, 120 bp, Artificial Sequence
  ENSG00000183647_18 (sequence is synthesized)
atttcccaaagaagaaaggccttatatatgctgtgaatgtgtttttgcttgttagtttgttttaacttggtatgacggcactggaggctagcctttgagaagagccttctctgatgtgac

SEQ ID NO: 655366 - DNA, 120 bp, Artificial Sequence
  ENSG00000183647_19 (sequence is synthesized)
tcatgtatccaaacatccatggatttcccataaatttgaggtatgtgggaagcatgtgtagctatgttgtactctctaaacctgcccagggaccttaccagattcgtgtcactgccagtt

SEQ ID NO: 655367 - DNA, 120 bp, Artificial Sequence
  ENSG00000183647_20 (sequence is synthesized)
tctgcggctgaagccttttcatcactacccgctgggagacccacagagtgtgcatcagtcaccaccccaacatgctcagggaggcagagttcttccattagttggaggaaagcacgagta

SEQ ID NO: 655368 - DNA, 120 bp, Artificial Sequence
  ENSG00000183647_21 (sequence is synthesized)
gtctaagctcttaggggggtttctcatttcctcctgtggctacatagtgcatataactaccccagtgttggccccaggacctgatctgagttctgctggcagcttccagaggattgcctt

SEQ ID NO: 655369 - DNA, 120 bp, Artificial Sequence
  ENSG00000183647_22 (sequence is synthesized)
ttttgaggacattgttgatctcaggcgatgcttgtgatgaagcattttttagcttccaccacttaccaggaactgcctgttaactggcttgtgcaatgataaaggccttttgtttaagta

SEQ ID NO: 655370 - DNA, 120 bp, Artificial Sequence
  ENSG00000183647_23 (sequence is synthesized)
gccttctccatgacaggatggctttctccagttctaggatgctctttgttccatgttctgccttttgcttctaactaaaatctcaagctgcctgtttcaggaattgcaggtatcatcatg

SEQ ID NO: 655371 - DNA, 120 bp, Artificial Sequence
  ENSG00000183647_24 (sequence is synthesized)
ttaactacttaactggtccataggcttttcataaagatccacctgaaagattttcttgtaacattatttttcactgctgtagtttgtcatgtgctgagttgctctgtgccagtgctggct

SEQ ID NO: 655372 - DNA, 120 bp, Artificial Sequence
  ENSG00000183647_25 (sequence is synthesized)
gtgcacctctctggtcttccctttagggcatacatcttataggtctggtatagttgcacaactgggattcgaggatggctctggttgctttacagggtgcaaacagcaagatagtctcag

SEQ ID NO: 655373 - DNA, 120 bp, Artificial Sequence
  ENSG00000183647_26 (sequence is synthesized)
aggaggcctggccctaatgagtgacaactaagggagggcaagacactagggctgtttctaatcacaccataaacctgtcctgagttctcagtgattgggtgctgattccataggacatat

SEQ ID NO: 655374 - DNA, 120 bp, Artificial Sequence
  ENSG00000183647_27 (sequence is synthesized)
atcatttctctcttttttttcttttctacacatgttctgatttttatttcatccatgacttccagcccttagctgctaccaatttctggcctccatgtgtcacctgttcctttccagtgc

SEQ ID NO: 655375 - DNA, 120 bp, Artificial Sequence
  ENSG00000183647_28 (sequence is synthesized)
aacttctagagtgttctctaacactgacccacatgtaatatgttgtcagatgtgcacatgtttttaaatagtccttccacacctagtattcagttcccatgggtgtctactgggcctgga

SEQ ID NO: 655376 - DNA, 120 bp, Artificial Sequence
  ENSG00000183647_29 (sequence is synthesized)
caccaataatcttctgtgcagtgtaccgaagtcctctcttctcatcaggggaggaagtcctgataaaagcttttggcagaatagtgagtcagagaccctacctgttctctctgagttgtg

SEQ ID NO: 655377 - DNA, 120 bp, Artificial Sequence
  ENSG00000183647_30 (sequence is synthesized)
ccccatctttgtgtctttcatctcataaggcctcccttgttctgtgacttgtagaggcttttttccacaaatttccaccagctctcatatcctaaaaacattttcttagactcattcttt

SEQ ID NO: 655378 - DNA, 120 bp, Artificial Sequence
  ENSG00000183647_31 (sequence is synthesized)
agtttggaaacataataggactctgtcagcttaaaagggtatataacatttgtggggattcaaattttgtttgcctcagaggggacagtatgctcacagaatatagattttgctccattt

SEQ ID NO: 655379 - DNA, 120 bp, Artificial Sequence
  ENSG00000183647_32 (sequence is synthesized)
ttggcctatttcgcattgtttccaaggccttctaggagacactgcagggctttctggctctgatttttgcctgcatgtgggctcagaggtcattctgcagagggggcagttgtggcaact

SEQ ID NO: 655380 - DNA, 120 bp, Artificial Sequence
  ENSG00000183647_33 (sequence is synthesized)
tccattgtttctggagacaacacaaagtttttcttgttgagtgaggatatcacataatgccctgcaatgtttagaatcccttaatgaggtcctgtgaaggagctgtgtcccttgaaacac

SEQ ID NO: 655381 - DNA, 120 bp, Artificial Sequence
  ENSG00000183647_34 (sequence is synthesized)
agaattcagtgagctagtgtccctagctataaaaccatggggctggagcgaaacataattggtaaagaaacgctgggttgaataatagggaatggaggagactgcagcaaattagatgga

SEQ ID NO: 655382 - DNA, 89 bp, Artificial Sequence
  ENSG00000183647_35 (sequence is synthesized)
aataatagggaatggaggagactgcagcaaattagatggactgttcctcatataaagtttcatccggccgggcgcagtggctcacacct

SEQ ID NO: 655383 - DNA, 77 bp, Artificial Sequence
  ENSG00000183647_36 (sequence is synthesized)
gtggatcacaaggtcgggagttcaataacagcctggccaaggtggtgaaaccctggaaggctgaggcagatcacacc

SEQ ID NO: 655384 - DNA, 120 bp, Artificial Sequence
  ENSG00000183647_37 (sequence is synthesized)
ccatggatttcccataaatttgaggtattattgagtgttttcaagaatgaaaagaggcctggcatggtggctcacatctgtaatcccaactttttgggaggctgaggtgggaggatccct

SEQ ID NO: 655385 - DNA, 120 bp, Artificial Sequence
  ENSG00000183647_38 (sequence is synthesized)
cccaagagtttgaggctgcagcaagctatgatcgtgccactacactccagcctgtgcaacacagtgagatcctgtctccaaaattaaataaataaataaaattacattttggagactaaa

SEQ ID NO: 655386 - DNA, 120 bp, Artificial Sequence
  ENSG00000183648_0 (sequence is synthesized)
agaggagtcaaccctgaggaggaaaaagtagtatgatttgctggcgtcacccctctgctccgtgcgggcgcggcgaatggcaggtcccgaggtcgcagcttccactggcgcgggttgagt

SEQ ID NO: 655387 - DNA, 120 bp, Artificial Sequence
  ENSG00000183648_1 (sequence is synthesized)
tgaacttacttcagattgtgcgggaccactgggttcatgttcttgtccctatgggatttgtcattggatgttatttagacagaaagagtgatgaacggctaactgccttccggaacaaga

SEQ ID NO: 655388 - DNA, 120 bp, Artificial Sequence
  ENSG00000183648_2 (sequence is synthesized)
gtatgttatttaaaagggaattgcaacccagtgaagaagttacctggaagtaaagactggctagattatcgaatgttcacattttaaagttctgagagaaataaaaacatgaagaatctg

SEQ ID NO: 655389 - DNA, 120 bp, Artificial Sequence
  ENSG00000183648_3 (sequence is synthesized)
cccgaggtcgcagcttccactggcgcgggttgagttccctgttgcccttggtctcggggtcgctgtaggcgctgaggctgcagagactcgctgtatcccccaggctggagtgtagtggcg

SEQ ID NO: 655390 - DNA, 120 bp, Artificial Sequence
  ENSG00000183648_4 (sequence is synthesized)
cgtagagatgtgacccagtgaccgcccgctaaccggactggagagaagaccggcccggatcccacgcctggcctgaagcagggaagacgctgcctcccctccgcgagcagcttacattcg

SEQ ID NO: 655391 - DNA, 120 bp, Artificial Sequence
  ENSG00000183648_5 (sequence is synthesized)
ttacaggcgtgagccactacacccggcccctttaccttttttagagtaatttatattcatatctacagtgacattattgaatatagttttcttttttctctcatatcttttaatttcctt

SEQ ID NO: 655392 - DNA, 120 bp, Artificial Sequence
  ENSG00000183648_6 (sequence is synthesized)
atttcctttctaaatttagttttcagtaattacagctttacctaaagaattccatttctggcaaaattgtattaaatttgtttttgcattgtgagaggttctaaatatgttttacacaag

SEQ ID NO: 655393 - DNA, 79 bp, Artificial Sequence
  ENSG00000183648_7 (sequence is synthesized)
atgcttgagcccgggagttgagagctgtagtgcctgtgaatagccactgccctccagcctgggcaacatagcaagacct

SEQ ID NO: 655394 - DNA, 120 bp, Artificial Sequence
  ENSG00000183648_8 (sequence is synthesized)
tgggcaacatagcaagaccttgtctcttttacaaaaaaaagttccaaaacaacatgaggagggtgcaaacaatcagctgttgcaggtagaatttttttacataccatctctgtttctctg

SEQ ID NO: 655395 - DNA, 120 bp, Artificial Sequence
  ENSG00000183648_9 (sequence is synthesized)
catctctgtttctctgctctgtatcgtatcacatcactattgaagctagtagtaaaatgtaataaatagacccagtgtggtgtaattttatattaatcattgtcccgtatgtaatcttca

SEQ ID NO: 655396 - DNA, 120 bp, Artificial Sequence
  ENSG00000183648_10 (sequence is synthesized)
aaagtattatactacattctgatgccaggcaaacaaagaggcgtattaggcttttaacatctattacatctatgtctatcatcttcttgtttcagatgcaatttatttattttattgaga

SEQ ID NO: 655397 - DNA, 65 bp, Artificial Sequence
  ENSG00000183648_11 (sequence is synthesized)
ctgcctcagcctctccagtagctgggataacagacgcgcaccaccacacccggctaatttttgtg

SEQ ID NO: 655398 - DNA, 120 bp, Artificial Sequence
  ENSG00000183648_12 (sequence is synthesized)
agtgctaggattacaggcatgaaccaccgcacctggcccagatgcaatttaaaagctatttcaaaaaaaaaacaaagcagttgtatttctgataatttttttttcttttagctatcatgg

SEQ ID NO: 655399 - DNA, 120 bp, Artificial Sequence
  ENSG00000183648_13 (sequence is synthesized)
gagttccctgttgcccttggtctcggggtcgctgtaggcgctgaggctgcaggtgggtttggggagcccggggggccgccgcgacgaggatcacggcgacggtggcggggagggttctag

SEQ ID NO: 655400 - DNA, 120 bp, Artificial Sequence
  ENSG00000183648_14 (sequence is synthesized)
gcaagccctcggtgctgtgcatgtgtggaggggtggtctgggcttccccggggcttccgaacgaaggtgacgggaaaggaaaatggggttttcttcgggtggaggatgggatttccgggc

SEQ ID NO: 655401 - DNA, 120 bp, Artificial Sequence
  ENSG00000183648_15 (sequence is synthesized)
ctaacctcgctctcttccaaatcgcaaatcctcttgagccgacaccattgcgccattgcactccggcctaggcaacaagagcgaaacttcgtctcaaaataaaaaaaaaaaaaggaaaga

SEQ ID NO: 655402 - DNA, 120 bp, Artificial Sequence
  ENSG00000183654_0 (sequence is synthesized)
ccgagccggcggctccaccgaacggccgcgcctgccgccgccgcagctgcagaaccttccgcatcccctccccgtcccgccccctagccccaggcgtccgggccccctccctccttttcc

SEQ ID NO: 655403 - DNA, 120 bp, Artificial Sequence
  ENSG00000183654_1 (sequence is synthesized)
ttcccctctccctcccgccccctccgcgctctctttccctgcagccagagcccggcccgccagccgggccggcaggagggcggcggcggcacaaccatgagctttgagggcggccacggc

SEQ ID NO: 655404 - DNA, 80 bp, Artificial Sequence
  ENSG00000183654_2 (sequence is synthesized)
tgagggcggccacggcggcagtcggtgtcgcggggcggagagcggggacgccgagcctcccccgcaacctcccccgccgc

SEQ ID NO: 655405 - DNA, 80 bp, Artificial Sequence
  ENSG00000183654_3 (sequence is synthesized)
ccgcggggccaagcgagccgctaggggaggtggccccgcggtgcaggggagcggacgagctgccgcctccgcccctgccc

SEQ ID NO: 655406 - DNA, 80 bp, Artificial Sequence
  ENSG00000183654_4 (sequence is synthesized)
ctgcagcccgccggccaggaagtggcggcggccggcgactccggggaaggtccgaggcgcctcccggaggcggcagcagc

SEQ ID NO: 655407 - DNA, 120 bp, Artificial Sequence
  ENSG00000183654_5 (sequence is synthesized)
gagcgcgagcggcggggcgccggagaccagcccgagacgcgctcggtgtgcagcagccgcagcagcagcagtggcggcggcgaccagcgcgctgggcaccagcaccagcaccaccagccc

SEQ ID NO: 655408 - DNA, 120 bp, Artificial Sequence
  ENSG00000183654_6 (sequence is synthesized)
atctgcaagatctgcttccagggcgcggagcagggtgagttgttgaacccctgccgatgtgatgggtcagttcggtatacacatcagctgtgcctgctaaaatggatcagtgagagaggt

SEQ ID NO: 655409 - DNA, 120 bp, Artificial Sequence
  ENSG00000183654_7 (sequence is synthesized)
catttctataacactggttgagaaagttcagatgattgctgtaatcctaggatccctgttcttaatagccagtgtgacttggctcctctggtcagccttcagcccctatgcagtgtggca

SEQ ID NO: 655410 - DNA, 120 bp, Artificial Sequence
  ENSG00000183654_8 (sequence is synthesized)
gaggaaggacatcctttttcagatctgctatggaatgtatggttttatggatctagtgtgcataggtctcattgttcatgaaggagctgcagtttacagagtgtttaagcgctggcgagc

SEQ ID NO: 655411 - DNA, 120 bp, Artificial Sequence
  ENSG00000183654_9 (sequence is synthesized)
tgtgaatttgcactgggatgtgttaaattatgacaaagccacagacatcgaagaaagcagccggggagagtcttccacaagtaggactttgtggttgccattgacagctctgcggaacag

SEQ ID NO: 655412 - DNA, 120 bp, Artificial Sequence
  ENSG00000183654_10 (sequence is synthesized)
aaacttggtccacccaactcagttaacctcaccaaggtttcagtgtggctatgtgttattgcacctgttcaatcggatgaggccccatgaagacttatcagaagataacagctcggggga

SEQ ID NO: 655413 - DNA, 120 bp, Artificial Sequence
  ENSG00000183654_11 (sequence is synthesized)
ggttgtgatgagagtgacttcagtgtgacaaaagcataagatgatgcagtgtggaccaccctgcacattttgcaatgtaattgcagtgaatggcaaaaccatagcacttctaaaaacaca

SEQ ID NO: 655414 - DNA, 120 bp, Artificial Sequence
  ENSG00000183654_12 (sequence is synthesized)
tctatgaactttttaaaatttatgctttttatatgaacatttgaattgcaaatacatttttctgagaaaaagagtcctcttgttcttcgttgtctggtttgtcacatcttttataagttg

SEQ ID NO: 655415 - DNA, 120 bp, Artificial Sequence
  ENSG00000183654_13 (sequence is synthesized)
gtacttgaaatcattatacatataatttaactatacttggttaaaagaataatgaaagttatccttaaggccaaaactattttttcttgcttgttttaaatatatttttatgaaagcttt

SEQ ID NO: 655416 - DNA, 120 bp, Artificial Sequence
  ENSG00000183654_14 (sequence is synthesized)
agctgtgcctgctaaaatggatcagtgagagaggttcctggacctgtgaactttgctgttatagataccatgttatagccattaaaatgaaacaaccttgccaggtctcattgttcatga

SEQ ID NO: 655417 - DNA, 120 bp, Artificial Sequence
  ENSG00000183654_15 (sequence is synthesized)
agttccctgcaggtgagggatttttttttttttccagaaagaaaactgttagctctgccctgaagatgagtcccacagaggttttgcagggtggagttaccgagaaattgacttcggggg

SEQ ID NO: 655418 - DNA, 120 bp, Artificial Sequence
  ENSG00000183655_0 (sequence is synthesized)
agaaactagtttgttggcggcgcctaggctgtatcgcagcgagagcgtttttgcctgtggagagccggccgacgggagccgcggcggagcctgttgagctcgcgcgggctgccgggagtg

SEQ ID NO: 655419 - DNA, 120 bp, Artificial Sequence
  ENSG00000183655_1 (sequence is synthesized)
gtctctgaggcggcggcggcggcggggatcgtctccggcactgacgcaccatgtcggtcagtgtccatgagacccgcaagtcgcggagcagcacggggtccatgaacgtcaccctcttcc

SEQ ID NO: 655420 - DNA, 120 bp, Artificial Sequence
  ENSG00000183655_2 (sequence is synthesized)
acaaggcctcccacccggactgtgtgctggcccacctcaacacgcttcgcaagcactgcatgttcaccgacgtcacactctgggcgggcgaccgtgccttcccctgtcaccgtgccgtgc

SEQ ID NO: 655421 - DNA, 120 bp, Artificial Sequence
  ENSG00000183655_3 (sequence is synthesized)
tggccgcctctagccgctattttgaggccatgttcagccatggccttcgggagagccgggatgacactgtcaacttccaggacaacctgcacccggaggtgctggagctgctgctggact

SEQ ID NO: 655422 - DNA, 120 bp, Artificial Sequence
  ENSG00000183655_4 (sequence is synthesized)
ttgcctactcctcacgcatcgccatcaacgaggagaacgctgagtcactgctggaggcaggcgacatgctgcagttccacgatgtgcgggatgctgccgccgagttcctggagaagaacc

SEQ ID NO: 655423 - DNA, 120 bp, Artificial Sequence
  ENSG00000183655_5 (sequence is synthesized)
ttttcccctccaactgcctgggcatgatgctgctctcggacgcccaccagtgccgccggctgtatgagttctcctggcgcatgtgcctggtgcactttgagacggtgaggcagagcgagg

SEQ ID NO: 655424 - DNA, 120 bp, Artificial Sequence
  ENSG00000183655_6 (sequence is synthesized)
acttcaacagcctgtccaaggacacactgctggacctcatctcgagtgatgagctggagaccgaggacgagcgggtggtcttcgaggccatcctccagtgggtgaagcacgacctggagc

SEQ ID NO: 655425 - DNA, 120 bp, Artificial Sequence
  ENSG00000183655_7 (sequence is synthesized)
cacggaaggtccacttgcccgagctcctccgcagcgtgcgtctggccttgctgccgtccgactgcctgcaggaggccgtctccagcgaggccctcctcatggcagacgagcgcaccaagc

SEQ ID NO: 655426 - DNA, 120 bp, Artificial Sequence
  ENSG00000183655_8 (sequence is synthesized)
ttatcatggatgaggccctgcgctgcaagaccaggatcctgcagaatgatggcgtggtcaccagcccctgtgcccggccacgcaaggcgggccacacgctactcatcctggggggccaga

SEQ ID NO: 655427 - DNA, 120 bp, Artificial Sequence
  ENSG00000183655_9 (sequence is synthesized)
ccttcatgtgtgacaagatctaccaggtggaccacaaggccaaggagatcatccccaaggccgacctgcccagcccccggaaggagttcagcgcctcagcgatcggctgcaaggtctatg

SEQ ID NO: 655428 - DNA, 120 bp, Artificial Sequence
  ENSG00000183655_10 (sequence is synthesized)
tgacggggggcaggggctccgagaacggggtctccaaggatgtctgggtgtacgacaccgtacatgaggaatggtccaaggcggcgcccatgctgattgcccgctttggccatggctcag

SEQ ID NO: 655429 - DNA, 120 bp, Artificial Sequence
  ENSG00000183655_11 (sequence is synthesized)
ctgagctggagaactgcctctatgtggtggggggacacacatccctggcaggggtcttcccggcctcgccttctgtctccctgaaacaagtggagaaatacgaccctggggccaacaagt

SEQ ID NO: 655430 - DNA, 120 bp, Artificial Sequence
  ENSG00000183655_12 (sequence is synthesized)
ggatgatggtggcccccttgcgggatggcgtcagcaatgccgcagtggtgagtgccaagctgaagctctttgttttcggaggaaccagcatccaccgggacatggtgtccaaggtccagt

SEQ ID NO: 655431 - DNA, 120 bp, Artificial Sequence
  ENSG00000183655_13 (sequence is synthesized)
gctatgacccctcggagaacaggtggacgatcaaggccgagtgcccccagccttggcggtacacagccgctgccgtcctgggcagccagatcttcatcatgggaggtgacacggaattca

SEQ ID NO: 655432 - DNA, 120 bp, Artificial Sequence
  ENSG00000183655_14 (sequence is synthesized)
cagccgcctcggcctaccgctttgactgtgagaccaaccagtggacgcggattggggacatgactgccaagcgcatgtcctgccatgccctggcttccggcaacaagctctatgtggtcg

SEQ ID NO: 655433 - DNA, 120 bp, Artificial Sequence
  ENSG00000183655_15 (sequence is synthesized)
acttcagatacatggaactgcatcaccacagtgccctactcacttatccccacggcctttgtcagcacctggaagcacctgcccgcgtgaggagcacctgctgagcccagccagaccgcg

SEQ ID NO: 655434 - DNA, 120 bp, Artificial Sequence
  ENSG00000183655_16 (sequence is synthesized)
gccttcagtgtcacagcgtggccttgcttgtctgccacagcgggagctaagccggccctgggccagcactccgagaggtggaaggggccctgccagctctggggagcagcagccttgggc

SEQ ID NO: 655435 - DNA, 120 bp, Artificial Sequence
  ENSG00000183655_17 (sequence is synthesized)
tgttctgagctttaggcaagagaagagaagcatctcttgcatccgtgcccctgggggcctcttcagctttgcagtggtttgtgggaagacatacctcccagaggggcatggactgccacc

SEQ ID NO: 655436 - DNA, 120 bp, Artificial Sequence
  ENSG00000183655_18 (sequence is synthesized)
aggactgaccctggcgtcggggagaaggacacttgcagagccttgagatcacctgtttggcaggtcctggactggggccgggcaggcaggggcagggaggcgccccgggtgggctttggg

SEQ ID NO: 655437 - DNA, 120 bp, Artificial Sequence
  ENSG00000183655_19 (sequence is synthesized)
gctgcggcactgccacacatcctttccctcctggcctgccctgctggggctctactgccatctatagatggtgtcctgggcctgggaaactaggttcccaggggttgagaccagaaaggt

SEQ ID NO: 655438 - DNA, 120 bp, Artificial Sequence
  ENSG00000183655_20 (sequence is synthesized)
gaccaagacagattttttaaggtgcagaaactgcaggggggcctcagtgacatccatgaggccttattagcaaaggacacccagacctccaaggtttgtgggccccttccacaaagctgt

SEQ ID NO: 655439 - DNA, 120 bp, Artificial Sequence
  ENSG00000183655_21 (sequence is synthesized)
aagtcccagcccacctactcagggccttgctcagtgctgtggcccggtggggacacagttgctcgtggccactcagtggagctgggcctgcagcagactcaaggctccgagtgccctggg

SEQ ID NO: 655440 - DNA, 120 bp, Artificial Sequence
  ENSG00000183655_22 (sequence is synthesized)
ggtcacccctcccctcccctcctcagagcccaccctgagaggcagcagtgacccccatggcacacacctgccaacagcactgggggcttctccccaggagaccacgctgccctccaagac

SEQ ID NO: 655441 - DNA, 120 bp, Artificial Sequence
  ENSG00000183655_23 (sequence is synthesized)
caggagcagctgtgagctggagacagcagagggaccccagggtgtcccctgcagatcccaccagggccgcatccatctcagtgtggaggacagtgacgggaccctcaccatcctcttgcg

SEQ ID NO: 655442 - DNA, 120 bp, Artificial Sequence
  ENSG00000183655_24 (sequence is synthesized)
ttttggcccccatttgctccctgagctccaagataagaatggccccgagagaactgctgaacatttgttcattgctgtcacctcctgagtcactggggtccctcaccagcacctccctga

SEQ ID NO: 655443 - DNA, 120 bp, Artificial Sequence
  ENSG00000183655_25 (sequence is synthesized)
cacctgggctatggagaggttggcgcctgtcagtgaccatcctaatgcctctcgctcactcccaagccaccatttgagagggaggggtgttggtgccctgacagggactgggcagggtgt

SEQ ID NO: 655444 - DNA, 120 bp, Artificial Sequence
  ENSG00000183655_26 (sequence is synthesized)
ccaaacttggggcttcccaggcacctgcagtgtgaacactgcttggctggctcaagattagggccgcggagggggctgtgcacataccagttacttaagcagccacgagtgtcccccatg

SEQ ID NO: 655445 - DNA, 120 bp, Artificial Sequence
  ENSG00000183655_27 (sequence is synthesized)
ccttggtgcgggtcctggaggcctcttgggggtgggacctttgggcagggtttgcccactgacacgcccgccatggggcactggctgcatggggctccttggaccctgtagacccagcag

SEQ ID NO: 655446 - DNA, 120 bp, Artificial Sequence
  ENSG00000183655_28 (sequence is synthesized)
accccgcctgtgtcaggccagctgcccgaaggcacttggctgtggtcccaggggacggctctgctggcacactcaggagcctggccgcggggactgcagggagggtgcctggacccgtgg

SEQ ID NO: 655447 - DNA, 120 bp, Artificial Sequence
  ENSG00000183655_29 (sequence is synthesized)
ggttgcttcattgagataaagcacacttatcacatagcacaaaggacgtgccatggtgctttccccaaaagttgtgttgcttttatcagttttctaacttaataaaaagagttgagaaaa

SEQ ID NO: 655448 - DNA, 120 bp, Artificial Sequence
  ENSG00000183655_30 (sequence is synthesized)
tgtgtgcttccttggctgctgcgctgagtccgggttgctcttaagcttctgccactgccttgcgttccagctgcttccttctcatgggcctggtggccatccagagaccctccgcgcagc

SEQ ID NO: 655449 - DNA, 120 bp, Artificial Sequence
  ENSG00000183655_31 (sequence is synthesized)
ccctcctcagcctgaggccaccccaatcccgtggcttctgtcccctcactatgaccctgggttgttcccatgctctgcaaagctcctcctgtccagcttctgcctggacagctcagtgtc

SEQ ID NO: 655450 - DNA, 120 bp, Artificial Sequence
  ENSG00000183655_32 (sequence is synthesized)
cgagttctcttcaaaggcagggagtgagctgggctctccatagaagggcctgcagcccagaagccgctgcccgggcatgcctggccttccctgggtcaccaggaaatggagccacagtgg

SEQ ID NO: 655451 - DNA, 120 bp, Artificial Sequence
  ENSG00000183655_33 (sequence is synthesized)
ctgcaagcagagctctcgctgctcaggcggccactgcggagctgtcagggctgagccagaggagagcccccaactcaggcagccgcagaccggggccaggaagggtggaaacaaagcact

SEQ ID NO: 655452 - DNA, 120 bp, Artificial Sequence
  ENSG00000183655_34 (sequence is synthesized)
cctgccacctcccccgcggtgggtgcccctggtgaccatggcacttcccactgagcttggctgcctgcagccccaaccagcgcatcgtcgtctgccacctagaatgtcgtctggcagtgc

SEQ ID NO: 655453 - DNA, 120 bp, Artificial Sequence
  ENSG00000183655_35 (sequence is synthesized)
ctgggcccgagatggcttctgtgaccaccccgctccctacgtttccctccctgacgctactctcccaggcagcagtggggatcaggccaaggatgctggtgagaagtccagctctcgcta

SEQ ID NO: 655454 - DNA, 120 bp, Artificial Sequence
  ENSG00000183655_36 (sequence is synthesized)
gtccccacgagcatggctgagtctcctgcctccagctgggcccaactgcccctgtccctggaggcccctttccatccatcctgtaagactctgacgttagcttcagaagccaccaggagg

SEQ ID NO: 655455 - DNA, 120 bp, Artificial Sequence
  ENSG00000183655_37 (sequence is synthesized)
tcccctgcacactgtggcctctgcaccccagatcatggcccctgtttgtccacaagcattttttttcccctgttctggccacctgttggagctcttcataggtgtgagcgtctgcatcga

SEQ ID NO: 655456 - DNA, 120 bp, Artificial Sequence
  ENSG00000183655_38 (sequence is synthesized)
gttccctgtcattctccagagctgtttgtcgtaggtcctgctgttggagggcgcccactaggactctgagaggtgagacagttggcatcacatgaatggtgagtcagggctggagcagga

SEQ ID NO: 655457 - DNA, 120 bp, Artificial Sequence
  ENSG00000183655_39 (sequence is synthesized)
cttgagccctgagtgtgccgcctgcctgcaggcgcctctggggagctggccacgggcatcctcacgtctgcgcccctggcacagagcacaggcttggccagcagccgtccagaagcggcg

SEQ ID NO: 655458 - DNA, 120 bp, Artificial Sequence
  ENSG00000183655_40 (sequence is synthesized)
gggaattgctgagctggaacctgagcgacctccagggcagccccttgctccagtgttgcggttggatccacagcctaggggatagcagccagcggctgcaggaggcccccgcttacccac

SEQ ID NO: 655459 - DNA, 120 bp, Artificial Sequence
  ENSG00000183655_41 (sequence is synthesized)
taagggtgatcttgctgtgaacattctctccttctctctctttctctcccactgggcaccccgtactccaggccctttaaggcgcagactcccaacccttctttcccacccgcctccagc

SEQ ID NO: 655460 - DNA, 120 bp, Artificial Sequence
  ENSG00000183655_42 (sequence is synthesized)
atgggggggctgccgaatgcaaggcaggcatccggctgccgacagcttgtcttctcttcagggtgttgctggggcctagccactggggtgcagggcagggttccagtcctggctctggga

SEQ ID NO: 655461 - DNA, 120 bp, Artificial Sequence
  ENSG00000183655_43 (sequence is synthesized)
aaggccgagctcattaatccactgtgggctccgtcactgctgcaggagggacagtacagtacattctctcctgtcttaaagaagttgctacagatgggaaatcccagagcacaggcctga

SEQ ID NO: 655462 - DNA, 120 bp, Artificial Sequence
  ENSG00000183655_44 (sequence is synthesized)
ggatttctgccagccttgagggttgggcctggctaagcaagtgcccaggacggagtccgtccgtccaggcatcagcagtcattcgttcctgtgccaggctgggggatagagcagcatccc

SEQ ID NO: 655463 - DNA, 120 bp, Artificial Sequence
  ENSG00000183655_45 (sequence is synthesized)
acccttgatggggcaggctgagcctagtggggcaggccctacaccaacaacccacaggatgcacgttggccaagacctgctgcacacaggaagtgcagggcggccgctgacccttgtcca

SEQ ID NO: 655464 - DNA, 120 bp, Artificial Sequence
  ENSG00000183655_46 (sequence is synthesized)
ctctgcaagctggaggattagcccatttcacagttgaggccaggccccagggagcacctgccaaaaattaaagggacccagcctgagagggaacaaagggacccagcctgagagggaaca

SEQ ID NO: 655465 - DNA, 120 bp, Artificial Sequence
  ENSG00000183655_47 (sequence is synthesized)
caggagcctggccccgaggctccccaacccctgtgcctctagctgtcatctgtattcctttcagcaactcagggtgccttgggggacacccccaggtaggtagcgtggctgtttagttcc

SEQ ID NO: 655466 - DNA, 120 bp, Artificial Sequence
  ENSG00000183655_48 (sequence is synthesized)
aggtagcagtgaggccttgccctgaagggaccacatgtcagcatgtggcgtgctgggatggggccaagaccgggcagccaggccccagaggttcgggtttgcagtcttagagcatctcag

SEQ ID NO: 655467 - DNA, 120 bp, Artificial Sequence
  ENSG00000183655_49 (sequence is synthesized)
gatggttagggcccctgtgaccccagcttctcacttgtgaggagcttgaagggatttgggggccttctcagtcgccgaacccagcctctgtatctggaaacaacttgagcacgtggggag

SEQ ID NO: 655468 - DNA, 120 bp, Artificial Sequence
  ENSG00000183655_50 (sequence is synthesized)
ggcagaattcctgcaaagcagccttcagagaacagacggcccagcactgtgtgggatggagaggtgtaccccacttaaaggggacagccgtggagcctcagtgctggcttcagtgtttaa

SEQ ID NO: 655469 - DNA, 120 bp, Artificial Sequence
  ENSG00000183655_51 (sequence is synthesized)
caaccaaagccaaaaaccgcggacagcgtcaccattaatcactgctttgctgaggctccttgccttatggagtgcatgaacactcagggttgctagagtgctccgcctgcctgtgcccgc

SEQ ID NO: 655470 - DNA, 120 bp, Artificial Sequence
  ENSG00000183655_52 (sequence is synthesized)
ctgtgcgagagggctcaccttttcctttcagggcctcggagtggtatgtgagagggaacttactctattaggggaattggctcacttggtgatagaggctgagaagtcccatgataggct

SEQ ID NO: 655471 - DNA, 120 bp, Artificial Sequence
  ENSG00000183655_53 (sequence is synthesized)
gcaagctgcagaaccaggagagctggggacagacctcagcccaaggacaaagagccaagagcctggggtgggggtggggtggtgggcagcaagtcccagaggccagagaacctggagctc

SEQ ID NO: 655472 - DNA, 120 bp, Artificial Sequence
  ENSG00000183655_54 (sequence is synthesized)
tgatgcccgatggcaggaaaagagcaacctagctccagaagaaagaaacctgagtccccatttccttagctttttattccaccagggcccctgcccatctgatggtgctcacctgcaacc

SEQ ID NO: 655473 - DNA, 120 bp, Artificial Sequence
  ENSG00000183655_55 (sequence is synthesized)
acggctctcacgccggtcacctctggaagcacagactcactggggcggcctggccattcgaatcaagtaccaagccgcctgggtttcccttccagcactgagaatacgtaatgtgtcccc

SEQ ID NO: 655474 - DNA, 120 bp, Artificial Sequence
  ENSG00000183655_56 (sequence is synthesized)
gggcgtctgggtatccccgaatccaatcaagttgacacctgagtcacctgccactcagtggggaaagcaggcctggggtgcctgaatcaccagactgcgctgccggtgaatggtggatct

SEQ ID NO: 655475 - DNA, 120 bp, Artificial Sequence
  ENSG00000183655_57 (sequence is synthesized)
ggcgttctcacgcccgagcctcatgggcagctgtgtcattgtcattttgttccagatcaggtcagaacagaacaatgtggccactgattgattttctcttcctctcctccctccacagac

SEQ ID NO: 655476 - DNA, 120 bp, Artificial Sequence
  ENSG00000183662_0 (sequence is synthesized)
agactactgctacttacagcaccgtatagcagccctgctcctacattttgctgccttactctgccccgaatgcactggagtggggatggtccatcggcaactataaactgattctcatca

SEQ ID NO: 655477 - DNA, 120 bp, Artificial Sequence
  ENSG00000183662_1 (sequence is synthesized)
ggaaactgcacattatctccccatcacttcaaaggtctcgtcaggcagaggtgacgccaggagatgatttaaaggtgaaaatgacaaggtttccacccctcaaaccttggctccttttct

SEQ ID NO: 655478 - DNA, 120 bp, Artificial Sequence
  ENSG00000183662_2 (sequence is synthesized)
gacaatacagtctgaatgaacccgatgtctttttttttactgtggaaataggatcggaagagagtaacatttttttttttttaatcctgataaagaagattgttgggaagctctttgaaa

SEQ ID NO: 655479 - DNA, 120 bp, Artificial Sequence
  ENSG00000183662_3 (sequence is synthesized)
aaaaattttaaattgtggcacagatggattttaaaaagtgttagatctttccaatgaacactaatagagtactctgctcttggctggatttttcagagaatggcaatggtctctgcgatg

SEQ ID NO: 655480 - DNA, 120 bp, Artificial Sequence
  ENSG00000183662_4 (sequence is synthesized)
tcctgggtcctgtatttgtggataagtgcttgtgcaatgctactctgccatggatcccttcagcacactttccagcagcatcacctgcacagaccagaaggagggacgtgtgaagtgata

SEQ ID NO: 655481 - DNA, 120 bp, Artificial Sequence
  ENSG00000183662_5 (sequence is synthesized)
gcagcacaccgatgttgtaacaagaatcgcattgaggagcggtcacaaacagtaaagtgttcctgtctacctggaaaagtggctggaacaacaagaaaccggccttcttgcgtcgatgcc

SEQ ID NO: 655482 - DNA, 120 bp, Artificial Sequence
  ENSG00000183662_6 (sequence is synthesized)
tccatagtgattgggaaatggtggtgtgagatggagccttgcctagaaggagaagaatgtaagacactccctgacaattctggatggatgtgcgcaacaggcaacaaaattaagaccacg

SEQ ID NO: 655483 - DNA, 120 bp, Artificial Sequence
  ENSG00000183662_7 (sequence is synthesized)
agaattcacccaagaacctaacagaagcatttgtggtagtaaaggaaaaccaaccctctggaaaatacattttgagaatctcaaacatctcacatatatacaagccaaatggatttctta

SEQ ID NO: 655484 - DNA, 120 bp, Artificial Sequence
  ENSG00000183662_8 (sequence is synthesized)
cctacagtgagaagacacagcgttttggcaacaccatggaaagtgggcttaaaaaagggttttctcagtgaaatttttgggcatcatgaagaacgatcaactatcttctaatttgaatct

SEQ ID NO: 655485 - DNA, 120 bp, Artificial Sequence
  ENSG00000183662_9 (sequence is synthesized)
atagttactttgtaccatttgaaatatatgtatatatatatatataatattttgaaatattatctattctcttcaagaaatgaacagtaccacagtttgagacggctggtgtaccccttt

SEQ ID NO: 655486 - DNA, 120 bp, Artificial Sequence
  ENSG00000183662_10 (sequence is synthesized)
gagttttggatgttttgtctgttttgctttgttttgttagtcatttctttttctaacggcaaggaagatatgtgcccttttgagaattcaagatggcactgacacgggaaggccagctac

SEQ ID NO: 655487 - DNA, 120 bp, Artificial Sequence
  ENSG00000183662_11 (sequence is synthesized)
aggtggactcctggaatttgaggcatcataatgatactgaatcaagaacttccttctgcttctaccagatggcccaaggaagcacatcgtcctgttttattgctttctaccctgtgcaat

SEQ ID NO: 655488 - DNA, 120 bp, Artificial Sequence
  ENSG00000183662_12 (sequence is synthesized)
attagcatgcaagcttggcttacatagtcatactttatattcaattgatatataataaccgttctaacctcttccaggaaaatatttttagaactactagcttttccacttagaagaaaa

SEQ ID NO: 655489 - DNA, 120 bp, Artificial Sequence
  ENSG00000183662_13 (sequence is synthesized)
tgaggattcttaagggagccactccaccatgctattaagactctggcagagttatgggtaggatatggatccctacatgaataagtcctgtaaatacaatgtcttaaggctttgtatagc

SEQ ID NO: 655490 - DNA, 120 bp, Artificial Sequence
  ENSG00000183662_14 (sequence is synthesized)
tgtcctagactgcagaaatgtcctctgattaaatccaaagtctggcatcgttaactacatagtgctgtagcaacaagtcttatcatggcatctctttctatgtttggtttgctttttcca

SEQ ID NO: 655491 - DNA, 120 bp, Artificial Sequence
  ENSG00000183662_15 (sequence is synthesized)
agagtattcaggtctcctcttgtgagataggaaggccatgaaaacaattagatttcaagatgatctatgtgaccaaatgttggacagccctattaaagtggtaaacaacttctttctaaa

SEQ ID NO: 655492 - DNA, 120 bp, Artificial Sequence
  ENSG00000183662_16 (sequence is synthesized)
agacttgcaatgaagttagaatgaacaggaggagtctgcagcttttcagtgcctgggataactatagtttaaagatcattgtgtaaaataggatttttagtcagcatgcattgttttaaa

SEQ ID NO: 655493 - DNA, 120 bp, Artificial Sequence
  ENSG00000183662_17 (sequence is synthesized)
ccgactaactgatagcctaaaactttatttttgcattttgccaatccttggagttttgttttgcagaattaagaaaaaaatgaatgtatgatcatctgaaaagggctttctctcaatccc

SEQ ID NO: 655494 - DNA, 120 bp, Artificial Sequence
  ENSG00000183662_18 (sequence is synthesized)
acttcatggcatgacctctgctggatcattagttctagccagagaagtagcaaaggaacatgacgtctgagacctcccttccctcatcagtggggctgactgagctgggggcttgaagcc

SEQ ID NO: 655495 - DNA, 120 bp, Artificial Sequence
  ENSG00000183662_19 (sequence is synthesized)
caggatttaagacactttgaaaatgggcaaagcctcatttttcctaggtcaaaaggagttcaagattggggaaatctgaggattcagaaggatgataaatatgtcaccagcactaacacc

SEQ ID NO: 655496 - DNA, 120 bp, Artificial Sequence
  ENSG00000183662_20 (sequence is synthesized)
tgtcctagttccagctctggtgaactccagcagacctgctcaagtggacagcattagggaccttgtcagttttgcagtgctttttgcctgaagccacctcaggtccctcatgctgcagtt

SEQ ID NO: 655497 - DNA, 120 bp, Artificial Sequence
  ENSG00000183662_21 (sequence is synthesized)
cataagtatatattttttaaaacagcaacacgattcatgactctgttgcagaatgtgaaggagcaagtctctcaattggctaattgaatcaagctctgcaatttccttcttccctggagc

SEQ ID NO: 655498 - DNA, 120 bp, Artificial Sequence
  ENSG00000183662_22 (sequence is synthesized)
ctgatcctgcaggacaaggatctattttcaagtcaattacaattcctaagggatataattacctacaaaatcagcaaaggaaccctatttctcttatgaaggagggacgtgtgaagtgat

SEQ ID NO: 655499 - DNA, 120 bp, Artificial Sequence
  ENSG00000183665_0 (sequence is synthesized)
atttccggcaccggcatggccgggtgagctgcaggctaccttatttaagaccgggaatttagtcagcctggtgagccgactctgaggagatggagtatcgctgaggtgatgagagagaat

SEQ ID NO: 655500 - DNA, 120 bp, Artificial Sequence
  ENSG00000183665_1 (sequence is synthesized)
gtggttgttagcaacatggagagagaaagtgggaagcccgtggctgttgtcgcagttgtgactgagccttggtttacccagcgatacagagaatatctccagaggcagaaactctttgat

SEQ ID NO: 655501 - DNA, 120 bp, Artificial Sequence
  ENSG00000183665_2 (sequence is synthesized)
acacagcaccgtgtggaaaagatgccggatggctcggtggcgctaccggtgctgggagagacgcttccagagcagcacctgcaggagctgaggaatcgtgttgccccaggcagtccctgt

SEQ ID NO: 655502 - DNA, 120 bp, Artificial Sequence
  ENSG00000183665_3 (sequence is synthesized)
atgctcacgcagctcccggatcctgttccttcgaagagggcccagggttgttcacctgcccaaaaattgtgtcttgaggtgagtcgctgggtggagggtcggggagtcaagtggtcagcc

SEQ ID NO: 655503 - DNA, 120 bp, Artificial Sequence
  ENSG00000183665_4 (sequence is synthesized)
gagttggaggctgatttgccccgatcatggcaacggcatggtaatctcttgttgctgagtgaagactgtttccaagccaagcagtggaaaaatctgggaccggaactctgggagaccgtt

SEQ ID NO: 655504 - DNA, 120 bp, Artificial Sequence
  ENSG00000183665_5 (sequence is synthesized)
gccttggcacttggcgtccagcgtttggcaaaacgagggcgggtatcaccggatggtactcgaactccagcagtgacactgctgctgggtgaccatggctgggtagagcatgtggataat

SEQ ID NO: 655505 - DNA, 120 bp, Artificial Sequence
  ENSG00000183665_6 (sequence is synthesized)
ggtatccgttataagtttgacgtgacccagtgtatgttctcctttggaaacatcactgagaagcttcgagtggcatcgttgtcctgtgctggagaagtgctggtggatctctatgcaggg

SEQ ID NO: 655506 - DNA, 120 bp, Artificial Sequence
  ENSG00000183665_7 (sequence is synthesized)
attggttattttacattgcctttcctagttcatgctggtgctgccttcgtccatgcttgtgagtggaatccccatgctgtagttgctctgagaaataaccttgagatcaatggagtagca

SEQ ID NO: 655507 - DNA, 120 bp, Artificial Sequence
  ENSG00000183665_8 (sequence is synthesized)
gatcggtgccaaatacactttggagataacagaaaactgaagctctcaaatattgcagatagggtgatcctggggctgattcccagctctgaagaaggctggcccattgcctgccaagtg

SEQ ID NO: 655508 - DNA, 120 bp, Artificial Sequence
  ENSG00000183665_9 (sequence is synthesized)
atctttcccagggaagaatcttcaggctcttggagtcagcaaagtagagaaagagcattggctgtatcctcagcaaattaccaccaaccaatggaaaaatggagctaccagggattctag

SEQ ID NO: 655509 - DNA, 120 bp, Artificial Sequence
  ENSG00000183665_10 (sequence is synthesized)
gggaaaaatgctgtcaccagccaccaagccagagtggcaaaggtgggcagaatctgcagaaactcgaatcgccactcttcttcagcaggtgcatgggaaaccatggaagacacaaattct

SEQ ID NO: 655510 - DNA, 120 bp, Artificial Sequence
  ENSG00000183665_11 (sequence is synthesized)
gcacatccaaccagtgaaatcctatgctccccatgtggatcacatagtcctggatctggaatgctgcccctgtccttcagttggctagaggaggtagatcctgggacacatgggatccac

SEQ ID NO: 655511 - DNA, 120 bp, Artificial Sequence
  ENSG00000183665_12 (sequence is synthesized)
gtgcgagtggcccttaaatgtatcagttcagtccaggttgtcatcccttttgtcccctggtgatcagtttttttcatattttatagccctgaaagcaggctctagatcaattcaaattat

SEQ ID NO: 655512 - DNA, 120 bp, Artificial Sequence
  ENSG00000183665_13 (sequence is synthesized)
ttcatttgtctttcattgataacagaaaatgaaatacctgtttgggagaagcagcatggcccattgaaatgaggctcatctgtgcaattatgaattccaaattctgacctcagttctgga

SEQ ID NO: 655513 - DNA, 120 bp, Artificial Sequence
  ENSG00000183665_14 (sequence is synthesized)
attgaagtttcagtatgttttggcctcgggtttcgttatttgcaaaatgagagtttctttgaactgtctcacgtgactattaagcaactatacacaggacatcggttattttagagtgaa

SEQ ID NO: 655514 - DNA, 120 bp, Artificial Sequence
  ENSG00000183665_15 (sequence is synthesized)
agacacagtgctttttccaaattgctctggctaccatatagaaaattgactgaaggagggccaagatggaaacagagagaccagtgaggaggcttctgtggttgtccaggtctgaggtga

SEQ ID NO: 655515 - DNA, 120 bp, Artificial Sequence
  ENSG00000183665_16 (sequence is synthesized)
tggtaacttggactcggatggtggtaatgggaggtagattgatatgataaataaaattgacagaccaagcaatggaatcagaattaagtccttaacatgaagctgctttgttattatgac

SEQ ID NO: 655516 - DNA, 120 bp, Artificial Sequence
  ENSG00000183665_17 (sequence is synthesized)
tgactaaattagagagagaagggaacaaaaattattttagtgtatttccattcccttactgtggcattcctaaatgattgtgaggggttgtcttataaatttggtttgttgtggtagaaa

SEQ ID NO: 655517 - DNA, 120 bp, Artificial Sequence
  ENSG00000183668_0 (sequence is synthesized)
acagaaggaggaaggacagcacagctgacagccgtgctcagacagcttctggatcccaggctcatctccacagaggagaacacacaggcagcagagaccatggggcccctcccagcccct

SEQ ID NO: 655518 - DNA, 120 bp, Artificial Sequence
  ENSG00000183668_1 (sequence is synthesized)
tcctgcacacagcgcatcacctggaaggggctcctgctcacagcatcacttttaaacttctggaacccgcccaccactgccgaagtcacgattgaagcccagccacccaaagtttctgag

SEQ ID NO: 655519 - DNA, 120 bp, Artificial Sequence
  ENSG00000183668_2 (sequence is synthesized)
gggaaggatgttcttctacttgtccacaatttgccccagaatcttcctggctacttctggtacaaaggggaaatgacggacctctaccattacattatatcgtatatagttgatggtaaa

SEQ ID NO: 655520 - DNA, 120 bp, Artificial Sequence
  ENSG00000183668_3 (sequence is synthesized)
ataattatatatgggcctgcatacagtggaagagaaacagtatattccaacgcatccctgctgatccagaatgtcacccggaaggatgcaggaacctacaccttacacatcataaagcga

SEQ ID NO: 655521 - DNA, 120 bp, Artificial Sequence
  ENSG00000183668_4 (sequence is synthesized)
ggtgatgagactagagaagaaattcgacatttcaccttcaccttatacttggagactcccaagccctacatctccagcagcaacttaaaccccagggaggccatggaggctgtgcgctta

SEQ ID NO: 655522 - DNA, 120 bp, Artificial Sequence
  ENSG00000183668_5 (sequence is synthesized)
atctgtgatcctgagactctggacgcaagctacctatggtggatgaatggtcagagcctccctgtgactcacaggttgcagctgtccaaaaccaacaggaccctctatctatttggtgtc

SEQ ID NO: 655523 - DNA, 120 bp, Artificial Sequence
  ENSG00000183668_6 (sequence is synthesized)
acaaagtatattgcaggaccctatgaatgtgaaatacggaacccagtgagtgccagtcgcagtgacccagtcaccctgaatctcctcccgaagctgcccatcccctacatcaccatcaac

SEQ ID NO: 655524 - DNA, 120 bp, Artificial Sequence
  ENSG00000183668_7 (sequence is synthesized)
gtcttagccttcacctgtgaacctaagagtgagaactacacctacatttggtggctaaacggtcagagcctccccgtcagtcccggggtaaagcgacccattgaaaacaggatactcatt

SEQ ID NO: 655525 - DNA, 120 bp, Artificial Sequence
  ENSG00000183668_8 (sequence is synthesized)
ctacccagtgtcacgagaaatgaaacaggaccctatcaatgtgaaatacgggaccgatatggtggcctccgcagtaacccagtcatcctaaatgtcctctatggtccagacctccccaga

SEQ ID NO: 655526 - DNA, 120 bp, Artificial Sequence
  ENSG00000183668_9 (sequence is synthesized)
atttacccttcattcacctattaccgttcaggagaaaacctcgacttgtcctgcttcacggaatctaacccaccggcagagtatttttggacaattaatgggaagtttcagcaatcagga

SEQ ID NO: 655527 - DNA, 120 bp, Artificial Sequence
  ENSG00000183668_10 (sequence is synthesized)
caaaagctctttatcccccaaattactagaaatcatagcgggctctatgcttgctctgttcataactcagccactggcaaggaaatctccaaatccatgacagtcaaagtctctggtccc

SEQ ID NO: 655528 - DNA, 120 bp, Artificial Sequence
  ENSG00000183668_11 (sequence is synthesized)
tgccatggagacctgacagagtctcagtcatgactgcaacaactgagacactgagaaaaagaacaggctgataccttcatgaaattcaagacaaagaagaaaaaaactcaatgttattgg

SEQ ID NO: 655529 - DNA, 120 bp, Artificial Sequence
  ENSG00000183668_12 (sequence is synthesized)
actaaataatcaaaaggataatgttttcataattttttattggaaaatgtgctgattctttgaatgttttattctccagatttatgaactttttttcttcagcaattggtaaagtatact

SEQ ID NO: 655530 - DNA, 120 bp, Artificial Sequence
  ENSG00000183668_13 (sequence is synthesized)
tttgtaaacaaaaattgaaatatttgcttttgctgtctatctgaatgccccagaattgtgaaactattcatgagtattcataggtttatggtaataaagttatttgcacatgttccgtaa

SEQ ID NO: 655531 - DNA, 120 bp, Artificial Sequence
  ENSG00000183668_14 (sequence is synthesized)
agaagtcctataagcgggaggtggacaactcaatgtaaatttcatgggaaaacccttgtacctgaagcgtgagccactcagaactcaccaaaatgttcgacaccataacaacagctgctc

SEQ ID NO: 655532 - DNA, 120 bp, Artificial Sequence
  ENSG00000183668_15 (sequence is synthesized)
aaactgtaaaccaggacaacaagtggatgacttcacactgtggacagtttttcccaagatgtcagaacaagactccccatcatgatgaggctctcacccctcttaactgtccttgctcat

SEQ ID NO: 655533 - DNA, 120 bp, Artificial Sequence
  ENSG00000183668_16 (sequence is synthesized)
gcctgcctctttcacttggcaggataatgcagtcattagaatttcacatgtagtagcttctgaggataacaacagagtgtcagatatgtcgtctcaacctcaaacttttacgtaaaatct

SEQ ID NO: 655534 - DNA, 120 bp, Artificial Sequence
  ENSG00000183668_17 (sequence is synthesized)
caggggaaatgtggctctctccaccttgcatacagggctcccaatagaaatgaatacagagatattgcctgtgtgtttgcagagaagatggtttctataaagagtaggaaagctgaaatt

SEQ ID NO: 655535 - DNA, 120 bp, Artificial Sequence
  ENSG00000183668_18 (sequence is synthesized)
atagtagagtcccctttaaatgcacattgtgtggatgactcttgccatttcctaagagatacattgtaaaacgtgacagtaagactgattctagcagaataaaacatgtaccacatttgc

SEQ ID NO: 655536 - DNA, 120 bp, Artificial Sequence
  ENSG00000183668_19 (sequence is synthesized)
gtaacattttttgcagaattagaaaactctgtcctaaatctgacctgacaggatcttattaatgactgccacaacacaaacactgagaaaaagatgcaaccagaaaaggtggaaagttct

SEQ ID NO: 655537 - DNA, 120 bp, Artificial Sequence
  ENSG00000183668_20 (sequence is synthesized)
gatgacaaagaaaatagcaatcagcctttctcacatcccaaagctttaaaaaatatatgagtgcagcatggccagtatggaattgaccaaaaactaatcatcaagctagaaaagtggtga

SEQ ID NO: 655538 - DNA, 120 bp, Artificial Sequence
  ENSG00000183668_21 (sequence is synthesized)
gagaaaaaaaaagggcaagaatatctttggcttatcacctcccacttttgcctactaatctgatgctgaaaagaaatgctcactgaagcattttagattttgaatctttcagatttggga

SEQ ID NO: 655539 - DNA, 120 bp, Artificial Sequence
  ENSG00000183668_22 (sequence is synthesized)
tgctaaaccagtaagtatatgacaaatatttcagaataaaaaaatgtcagaaatccaaaacactttttgtcctaagacttatgcataagaaatactcaatctgtgtgaactataggcatc

SEQ ID NO: 655540 - DNA, 120 bp, Artificial Sequence
  ENSG00000183668_23 (sequence is synthesized)
aagctctacagcagatctctagaacctccccaccttgcataactgaaactgcacacccatgaacaatttctgattctccccactcccagctcctggcaaccagcagtctcttctcatatt

SEQ ID NO: 655541 - DNA, 120 bp, Artificial Sequence
  ENSG00000183668_24 (sequence is synthesized)
cactctggaatccacttacatgaggtccctagagtagtcgaacccaggggatcagagagtagaatgtccaatgaaagaaaatatttgcaaaacttctctccaagtttgtctcatatccat

SEQ ID NO: 655542 - DNA, 120 bp, Artificial Sequence
  ENSG00000183668_25 (sequence is synthesized)
caaacacacatggtccatgaggaccagatttccagcagttcattcccacactttccaccagtcagttctgcatttgcaaatgtccacatgtatttctggaaagatccacatggtcctcct

SEQ ID NO: 655543 - DNA, 120 bp, Artificial Sequence
  ENSG00000183668_26 (sequence is synthesized)
ctgccctctgcagaaggagaggaaacttaaagaacccaggacagagaacatggttctgctccaaagccaccagctcttgcctgtcgccttcactctttctagatcattccttgcactctg

SEQ ID NO: 655544 - DNA, 71 bp, Artificial Sequence
  ENSG00000183668_27 (sequence is synthesized)
ctgtcgccttcactctttctagatcattccttgcactctgctctatactgccccaccttgagcctccactg

SEQ ID NO: 655545 - DNA, 120 bp, Artificial Sequence
  ENSG00000183668_28 (sequence is synthesized)
ctctgtgttatttctgctgaaacatccagtcccaggccaggctgctaagtatcttcagggtctcaggacaatgggaagtcccattattactcatctctagaacatccttagaaatggaag

SEQ ID NO: 655546 - DNA, 120 bp, Artificial Sequence
  ENSG00000183668_29 (sequence is synthesized)
ctgcagagaaatcacatataggggggcaaagtaggatggaatttggaaggggcccagcagttgcacattccaggtaaggaacccaaggtgagccagccagtcaactgattagggagggac

SEQ ID NO: 655547 - DNA, 120 bp, Artificial Sequence
  ENSG00000183668_30 (sequence is synthesized)
acacttgagaaagtctgtgcttccctaagacagagcaggcggcctcacagtctttgagcccttagatcatcatgcatctgtcttgtgacacacgcaccagctattggctttcaaggactc

SEQ ID NO: 655548 - DNA, 120 bp, Artificial Sequence
  ENSG00000183668_31 (sequence is synthesized)
gggtgggctgagaggtgggagatgccaactctgattgaagtatgcctgtggaggaatcaaaggtgccacacaggacaatcttctctctgttatccacacagcgaagctgcccatccccta

SEQ ID NO: 655549 - DNA, 120 bp, Artificial Sequence
  ENSG00000183668_32 (sequence is synthesized)
atttttattcccagcctgtgtcccatgggcacaagcaaatcccaaattctcctcctgaaccctcccaatttgtctctacagactctcttctccttgtttttctgttttcttatggctgac

SEQ ID NO: 655550 - DNA, 120 bp, Artificial Sequence
  ENSG00000183668_33 (sequence is synthesized)
cttgtgtctggcctgaaaaaggtagggagggggctttatcagccctgagccctatgtggtagaagaggcttcagagagggacaagaaggagagtcctcaagatcaagttgcttctcgctg

SEQ ID NO: 655551 - DNA, 120 bp, Artificial Sequence
  ENSG00000183668_34 (sequence is synthesized)
tcaccgacacatccccttctgccacgtcttttttttcttgtacctattccatgagctacaagggacagctgaggctttgaaacaagctcacacttttcccccagatgagaggaggaagcc

SEQ ID NO: 655552 - DNA, 120 bp, Artificial Sequence
  ENSG00000183668_35 (sequence is synthesized)
ccttgggtgagggaggagcagctcagactctgcttcctgctctgctccgggctcctctggtgactggccctgcctcactcaacctggggtgggactagcgtgtgtgtagaaagggccctg

SEQ ID NO: 655553 - DNA, 120 bp, Artificial Sequence
  ENSG00000183668_36 (sequence is synthesized)
gtggcctgtcctgaatttggctaaattgagctgccagttgaagccaagcctcccccgggccaggctgcagggaaataagaagagagggagcctcagggcagactcctgagctgcgtcctg

SEQ ID NO: 655554 - DNA, 120 bp, Artificial Sequence
  ENSG00000183668_37 (sequence is synthesized)
gctctgaagtcaccagctgtatgaggctttgggcacagcacgtgggacacagcacggaggacagtgactgatgcagagctggaggaatagggagattcaccgttggggttattcatggca

SEQ ID NO: 655555 - DNA, 120 bp, Artificial Sequence
  ENSG00000183668_38 (sequence is synthesized)
ggaaaggggcagtgccaaaaagtgtgtaattatagagagggtaagactaccagacactttatatatatctaatataagacttaccattaactatttctatgtgtgcaatttagtgttgtg

SEQ ID NO: 655556 - DNA, 120 bp, Artificial Sequence
  ENSG00000183668_39 (sequence is synthesized)
taaccatcacactatccatttccagaactttttcctcttaccatattaaacctctgtacccaataaacagtaactctcactccttcttcccctaacccttagcacccatcattctacttt

SEQ ID NO: 655557 - DNA, 120 bp, Artificial Sequence
  ENSG00000183671_0 (sequence is synthesized)
aaaccacatttccttttccagggcaataacttaaaatattatgtatttccctttgttgcaaagagaggaaatacttcttcctagactcagggcagctgtgacccgtcctcccagagaaat

SEQ ID NO: 655558 - DNA, 120 bp, Artificial Sequence
  ENSG00000183671_1 (sequence is synthesized)
cattaaaccacaaggattcagacagagcccagagccctgaaaactttggccacgcactttcccgcagcagccacaggcaccggcaacttcagagagccagataaaagtggaatgaggaat

SEQ ID NO: 655559 - DNA, 120 bp, Artificial Sequence
  ENSG00000183671_2 (sequence is synthesized)
gcagccgttctgaacaccaccctccatttcattctggaaccgggaaggtacacccaggcatgacaatagcttctctcctcacagaaatttaactgatttcttcattctccatttagcaag

SEQ ID NO: 655560 - DNA, 120 bp, Artificial Sequence
  ENSG00000183671_3 (sequence is synthesized)
gtcatggaagatttggaggaaacattatttgaagaatttgaaaactattcctatgacctagactattactctctggagtctgatttggaggagaaagtccagctgggagttgttcactgg

SEQ ID NO: 655561 - DNA, 120 bp, Artificial Sequence
  ENSG00000183671_4 (sequence is synthesized)
gtctccctggtgttatattgtttggcttttgttctgggaattccaggaaatgccatcgtcatttggttcacggggttcaagtggaagaagacagtcaccactctgtggttcctcaatcta

SEQ ID NO: 655562 - DNA, 120 bp, Artificial Sequence
  ENSG00000183671_5 (sequence is synthesized)
gccattgcggatttcatttttcttctctttctgcccctgtacatctcctatgtggccatgaatttccactggccctttggcatctggctgtgcaaagccaattccttcactgcccagttg

SEQ ID NO: 655563 - DNA, 120 bp, Artificial Sequence
  ENSG00000183671_6 (sequence is synthesized)
aacatgtttgccagtgtttttttcctgacagtgatcagcctggaccactatatccacttgatccatcctgtcttatctcatcggcatcgaaccctcaagaactctctgattgtcattata

SEQ ID NO: 655564 - DNA, 120 bp, Artificial Sequence
  ENSG00000183671_7 (sequence is synthesized)
ttcatctggcttttggcttctctaattggcggtcctgccctgtacttccgggacactgtggagttcaataatcatactctttgctataacaattttcagaagcatgatcctgacctcact

SEQ ID NO: 655565 - DNA, 120 bp, Artificial Sequence
  ENSG00000183671_8 (sequence is synthesized)
ttgatcaggcaccatgttctgacttgggtgaaatttatcattggctatctcttccctttgctaacaatgagtatttgctacttgtgtctcatcttcaaggtgaagaagcgaagcatcctg

SEQ ID NO: 655566 - DNA, 120 bp, Artificial Sequence
  ENSG00000183671_9 (sequence is synthesized)
ttctggacaattctggttgtggttgtggcctttgtggtttgctggactccttatcacctgtttagcatttgggagctcaccattcaccacaatagctattcccaccatgtgatgcaggct

SEQ ID NO: 655567 - DNA, 120 bp, Artificial Sequence
  ENSG00000183671_10 (sequence is synthesized)
ggaatccccctctccactggtttggcattcctcaatagttgcttgaaccccatcctttatgtcctaattagtaagaagttccaagctcgcttccggtcctcagttgctgagatactcaag

SEQ ID NO: 655568 - DNA, 120 bp, Artificial Sequence
  ENSG00000183671_11 (sequence is synthesized)
tacacactgtgggaagtcagctgttctggcacagtgagtgaacagctcaggaactcagaaaccaagaatctgtgtctcctggaaacagctcaataagttattacttttccacaaatcagt

SEQ ID NO: 655569 - DNA, 120 bp, Artificial Sequence
  ENSG00000183671_12 (sequence is synthesized)
atatggctttttatgtgggtcctctgactgatgctttcagattaaaattgtttccaagatagagagccgactccactttcatagttattgtttctggtcactatataggcatcacatttt

SEQ ID NO: 655570 - DNA, 120 bp, Artificial Sequence
  ENSG00000183671_13 (sequence is synthesized)
tgtgtggatatgaaacttaggaaggatcctcttgactccttgtgatgtggcaataaattttttttaaaaaactgaaaatacttaggaaggatccgcataatttttttctgcaacttaaat

SEQ ID NO: 655571 - DNA, 120 bp, Artificial Sequence
  ENSG00000183671_14 (sequence is synthesized)
gaaatgcatcattcttgttaattataccatggtgaattaatcacttttgaagcaatatcagttattttttgaataataacttttctaaagccttaagtcttaatattaaatatatgatta

SEQ ID NO: 655572 - DNA, 60 bp, Artificial Sequence
  ENSG00000183671_15 (sequence is synthesized)
ctaaagccttaagtcttaatattaaatatatgattatacccgaggtcaggaattcgagac

SEQ ID NO: 655573 - DNA, 65 bp, Artificial Sequence
  ENSG00000183671_16 (sequence is synthesized)
tgggaggcagaggttgtggtgagccaataaataaataaaatagataaataaatatatgattaact

SEQ ID NO: 655574 - DNA, 120 bp, Artificial Sequence
  ENSG00000183671_17 (sequence is synthesized)
tttaattttgtacaataacctgctagacacatttttaaaatgcaacatgtgtacttaatttctttatgtaatctatgtatatacatttatgaattaaagtaattgttggttatcttaaaa

SEQ ID NO: 655575 - DNA, 120 bp, Artificial Sequence
  ENSG00000183671_18 (sequence is synthesized)
tggaaaagatggagaactaagtcctccgcagactttcccactaagtatcctcaagaatcactttctgcatcgggcaaaacagaattagaagcaagaatctagacaaggcttcgtcctcat

SEQ ID NO: 655576 - DNA, 120 bp, Artificial Sequence
  ENSG00000183671_19 (sequence is synthesized)
ttagaagcctttaagaattctctgctttaagtggatgaaaacgtccctgtatggctgggttgccatggttcctcgctgtgacccccagggctactgagcctgccatataaaagtggaatg

SEQ ID NO: 655577 - DNA, 120 bp, Artificial Sequence
  ENSG00000183671_20 (sequence is synthesized)
attctggaaccgggaaggtacacccaggcatgacaatagcttctctcctcacagaaatttaactgttccctatatcatcgatgaaggaacaggagctgattgtaccaaaacacttatatg

SEQ ID NO: 655578 - DNA, 120 bp, Artificial Sequence
  ENSG00000183671_21 (sequence is synthesized)
attcgaagaacattccatctctgctaatttaacttgccttttcataagcaaaagcctacccagacaaaggagggctgggtgacccccatccattaccgattttcagtctgcagcagaaca

SEQ ID NO: 655579 - DNA, 120 bp, Artificial Sequence
  ENSG00000183682_0 (sequence is synthesized)
gcgccgcccgggtcgctgccggagctcgccggtcgcccctgcgctgcgcggaccgcagccacagccggactggtgggaacggcggcgacagacggattggctgacagtcccagccctcag

SEQ ID NO: 655580 - DNA, 120 bp, Artificial Sequence
  ENSG00000183682_1 (sequence is synthesized)
aacagccccggcctcgaagcgttggcgtctgcgtccgcgtcagcgtccgcttgtcccggagccggggcaggtgcgcgcggggggcgctccagggaccgcgctgaggccgcagacgccgcc

SEQ ID NO: 655581 - DNA, 80 bp, Artificial Sequence
  ENSG00000183682_2 (sequence is synthesized)
cccgccccctgctcgccgaactcagctccccgttcgccgtcggggcgtccccgggcccaggggcggcggcggagctgatg

SEQ ID NO: 655582 - DNA, 80 bp, Artificial Sequence
  ENSG00000183682_3 (sequence is synthesized)
atggccgcgcgccccggaccgctctggcttctgggcctgacgttgtgcgcgctgggcgggggcggccccggcctgcgacc

SEQ ID NO: 655583 - DNA, 80 bp, Artificial Sequence
  ENSG00000183682_4 (sequence is synthesized)
cggccccggccccgcgcgccacccgccgcctcccggctgcccgcgtccgcgccgctcttcatgctggacctgtaccacgc

SEQ ID NO: 655584 - DNA, 120 bp, Artificial Sequence
  ENSG00000183682_5 (sequence is synthesized)
acgccatggctggcgacgacgacgaggacggcgcgcccgcggagcagcgcctgggccgcgccgacctggtcatgagcttcgtcaacatggtggagcgagaccgtgccctgggccaccagg

SEQ ID NO: 655585 - DNA, 120 bp, Artificial Sequence
  ENSG00000183682_6 (sequence is synthesized)
agccccattggaaggagttccgctttgacctgacccagatcccggctggggaggcggtcacagctgcggagttccggatttacaaggtgcccagcatccacctgctcaacaggaccctcc

SEQ ID NO: 655586 - DNA, 120 bp, Artificial Sequence
  ENSG00000183682_7 (sequence is synthesized)
acgtcagcatgttccaggtggtccaggagcagtccaacagggagtctgacttgttctttttggatcttcagacgctccgagctggagacgagggctggctggtgctggatgtcacagcag

SEQ ID NO: 655587 - DNA, 120 bp, Artificial Sequence
  ENSG00000183682_8 (sequence is synthesized)
ccagtgactgctggttgctgaagcgtcacaaggacctgggactccgcctctatgtggagactgaggacgggcacagcgtggatcctggcctggccggcctgctgggtcaacgggccccac

SEQ ID NO: 655588 - DNA, 120 bp, Artificial Sequence
  ENSG00000183682_9 (sequence is synthesized)
gctcccaacagcctttcgtggtcactttcttcagggccagtccgagtcccatccgcacccctcgggcagtgaggccactgaggaggaggcaaccgaagaaaagcaacgagctgccgcagg

SEQ ID NO: 655589 - DNA, 120 bp, Artificial Sequence
  ENSG00000183682_10 (sequence is synthesized)
ccaaccgactcccagggatctttgatgacgtccgcggctcccacggccggcaggtctgccgtcggcacgagctctacgtcagcttccaggaccttggctggctggactgggtcatcgccc

SEQ ID NO: 655590 - DNA, 120 bp, Artificial Sequence
  ENSG00000183682_11 (sequence is synthesized)
cccaaggctactcagcctattactgtgagggggagtgctccttcccgctggactcctgcatgaacgccaccaaccacgccatcctgcagtccctggtgcacctgatgaagccaaacgcag

SEQ ID NO: 655591 - DNA, 120 bp, Artificial Sequence
  ENSG00000183682_12 (sequence is synthesized)
tccccaaggcgtgctgtgcacccaccaagctgagcgccacctctgtgctctactatgacagcagcaacaacgtcatcctgcgcaagcaccgcaacatggtggtcaaggcctgcggctgcc

SEQ ID NO: 655592 - DNA, 120 bp, Artificial Sequence
  ENSG00000183682_13 (sequence is synthesized)
actgagtcagcccgcccagccctactgcagccacccttctcatctggatcgggccctgcagaggcagaaaacccttaaatgctgtcacagctcaagcaggagtgtcaggggccctcactc

SEQ ID NO: 655593 - DNA, 120 bp, Artificial Sequence
  ENSG00000183682_14 (sequence is synthesized)
tcggtgcctacttcctgtcaggcttctggtcctttctcggtacctctgtgcccctcccctggggtttgtggctgtcactctgcccgacactttggtggcctaaggcacacagcagcctca

SEQ ID NO: 655594 - DNA, 120 bp, Artificial Sequence
  ENSG00000183682_15 (sequence is synthesized)
gagcctgtgctgactgcactgtctggagtcagcacagaagtcctatcttaggacctgtcagactgtggctggccccggatggtctgaggttggctgacccgagcttttctccattcacca

SEQ ID NO: 655595 - DNA, 120 bp, Artificial Sequence
  ENSG00000183682_16 (sequence is synthesized)
gagggtttaggtgtgaggagaagggctctgcctcttcccaggtacaacactggccatttctgggcaaaattggacacgcttatgttctcagcacagtgtgttctgggattcttctcattt

SEQ ID NO: 655596 - DNA, 120 bp, Artificial Sequence
  ENSG00000183682_17 (sequence is synthesized)
tctcatttggtccagggtgcagttagcatattagaaaaagaataagctggacatccccacgaagccactggggattttttttttttttttccagatagagtctcactctgtcacccaggc

SEQ ID NO: 655597 - DNA, 120 bp, Artificial Sequence
  ENSG00000183682_18 (sequence is synthesized)
ggccactggggatattttatgtcatgtgtattcccttgccctgggcctgccccttctcctgcctgggaaagaggtatgactcccacaggagcaaagaatcctgggggcttccagttccct

SEQ ID NO: 655598 - DNA, 120 bp, Artificial Sequence
  ENSG00000183682_19 (sequence is synthesized)
ccaccatctctaccatgctgacccatttggggctcagcactgagacagaggcaagaccagcagctccaacatgtagtgtaggctggcacagagcaaatgcccccgcagcctgctcccctt

SEQ ID NO: 655599 - DNA, 120 bp, Artificial Sequence
  ENSG00000183682_20 (sequence is synthesized)
gcccatggctcatgtcagtaatcaacctacgtacctttcccactgaaccaggacagggcctccaggcctcagcacagaactgcagacagccaccaccaggcattgtcaataagacctcag

SEQ ID NO: 655600 - DNA, 120 bp, Artificial Sequence
  ENSG00000183682_21 (sequence is synthesized)
gttatgaacaagctggccaccaaaattggcgtcaccctgggtgcccaccagcgctgtcctgtgtcttgggtctgtgagtcaaagaaaaggtccctgtcccagggagtgacaggcagtaat

SEQ ID NO: 655601 - DNA, 120 bp, Artificial Sequence
  ENSG00000183682_22 (sequence is synthesized)
taggctgagttgggtggggaggtttgtctcggcctccactgttcccggaaaccgctgttctccttggaacagccactgggagttggagtgtttatttgatttctgacttgctaagcctgt

SEQ ID NO: 655602 - DNA, 120 bp, Artificial Sequence
  ENSG00000183682_23 (sequence is synthesized)
aatttacctgctggaacagacagagtccagctgcccaaaccgtgtcattaaaagcagatcctgggcccgccccatccacaggcacagcctggcagagtggttccacctccccatgggccc

SEQ ID NO: 655603 - DNA, 120 bp, Artificial Sequence
  ENSG00000183682_24 (sequence is synthesized)
aaggatgcgcctctctggagttcacgtgctgcacccccagggaggggcctggggagagctggtccagcagcaggggtggaggctggggccacactgcgggacagcagcccctccacctgg

SEQ ID NO: 655604 - DNA, 120 bp, Artificial Sequence
  ENSG00000183682_25 (sequence is synthesized)
accagggagggcctccatgtgcaagcgcagaggaagagaccctctcatgtacataaagggtgggcccaggctgtctggaagatggtgagttccccactagtctaaggcttcaagctcagc

SEQ ID NO: 655605 - DNA, 120 bp, Artificial Sequence
  ENSG00000183682_26 (sequence is synthesized)
tagcagagattggaagaggcaatggcctgagtgttaggagacaggtattctggttccaactcagccactgacttggtgtcaggacaagtcccctttcttattcacgcttcagtttctcat

SEQ ID NO: 655606 - DNA, 120 bp, Artificial Sequence
  ENSG00000183682_27 (sequence is synthesized)
ctgcaacatgaggacataggactctttaattccaaaggctcttccaacccagagaacccatctgcccccatgaccttctcccagagcttgagacatggcctgagccccctgctgccatag

SEQ ID NO: 655607 - DNA, 120 bp, Artificial Sequence
  ENSG00000183682_28 (sequence is synthesized)
gacttggggcctatctgccattgcaggacctgatttaacagctctcttcttccaatactgggcagtagagtttcggaaactgacaaatgtgtggtctcttcagtgcccagtgtgtaacct

SEQ ID NO: 655608 - DNA, 120 bp, Artificial Sequence
  ENSG00000183682_29 (sequence is synthesized)
ggcatggtttgggtgtgctaggagtttgtgaaatgaatgttttcaagacgcaaacgctgctatgcccatcaggtgtgcacagcaggcctgaggatcatgatgagactccctttttatgca

SEQ ID NO: 655609 - DNA, 120 bp, Artificial Sequence
  ENSG00000183682_30 (sequence is synthesized)
gcaaagcacaaagtgtgacagtcgtggccttcctggtggccagacttctagcaactttagccacccaccaaatgacatcacatacagaaggcctcagaaagggaggaggtcgtaaggaca

SEQ ID NO: 655610 - DNA, 120 bp, Artificial Sequence
  ENSG00000183682_31 (sequence is synthesized)
cacagctgatgaagggtcagtgctcagctatcaaggtcatcttctggcctggttgcctcccacagcccaggatgcattcaaggctgcacatcaggagcataaataagggtggtcagctca

SEQ ID NO: 655611 - DNA, 120 bp, Artificial Sequence
  ENSG00000183682_32 (sequence is synthesized)
ggcccactggctgcaacaagtagccactgacagggagtctggggccatttggtgcagaacaacccccaacccagtggccatcttcacaactgcagcacagtgctggccctaatgccaggt

SEQ ID NO: 655612 - DNA, 120 bp, Artificial Sequence
  ENSG00000183682_33 (sequence is synthesized)
gagcgtgcaaagtcctgtttctttgtctttacatagggaccgggcgatgcgctttagagaaattccctattatttcacaggaaaggaggctgtgaaaaggagagggcaggttttggagcc

SEQ ID NO: 655613 - DNA, 120 bp, Artificial Sequence
  ENSG00000183682_34 (sequence is synthesized)
gctgtgaaaaggagagggcaggttttggagccaagtcgacctggcatcaggtcctggctgcctttttttttttttttttaaagacatacatggtcttgctttgtcgcccaggctggagtg

SEQ ID NO: 655614 - DNA, 120 bp, Artificial Sequence
  ENSG00000183682_35 (sequence is synthesized)
ggctcaagcaatcctcccacttcagcccgagttgctgggatgacaggcacacgccaccatacccagctaatttttaaattttttatagaaaccaggtctcactatgttgcccaggccggt

SEQ ID NO: 655615 - DNA, 67 bp, Artificial Sequence
  ENSG00000183682_36 (sequence is synthesized)
tttaaattttttatagaaaccaggtctcactatgttgcccaggccggtcttaaactttgcccaggcc

SEQ ID NO: 655616 - DNA, 120 bp, Artificial Sequence
  ENSG00000183682_37 (sequence is synthesized)
ttgttaatttgaccacatcatgtacctgctgtgcccgttccttcctccgtagaagagggtgctggtcctgcccttttgaggcctccatgagggccaaatgtgccatgggacacttagtgc

SEQ ID NO: 655617 - DNA, 120 bp, Artificial Sequence
  ENSG00000183682_38 (sequence is synthesized)
catgcctgcgcagacctgtggaataaacagcaattctgagcaggctcattttaaagggacttgcaaatttgggcgttccttgtgtgccttcctcataaaacccactcctcccagaatatg

SEQ ID NO: 655618 - DNA, 120 bp, Artificial Sequence
  ENSG00000183682_39 (sequence is synthesized)
cttagaggtgctgctgtatttacctgagagctatgcttttcatcaaaaacctaaacgtgatcatctcttggatgaggtgtggccctgcacactcgcctgctcgtggaaggagtctgggcc

SEQ ID NO: 655619 - DNA, 120 bp, Artificial Sequence
  ENSG00000183682_40 (sequence is synthesized)
agcagtgacccacgcgctagggtctctgctgaggaagtggcaggtgtgcggccctgccctggccccgtagtgagtgtggggcccacctgtgccctcatgggcagctgaagggggagcttt

SEQ ID NO: 655620 - DNA, 120 bp, Artificial Sequence
  ENSG00000183682_41 (sequence is synthesized)
ctaccccaggttcctttccttactgaaaagtcttgagcaaacagttgccgctctccaccccctgctttttaaaaaaaattttttctcacgtaagaaaatgttatctgtgtgctggggaaa

SEQ ID NO: 655621 - DNA, 120 bp, Artificial Sequence
  ENSG00000183682_42 (sequence is synthesized)
attttgaaaataacaaaaaccagaatacaaacacccataatcaatcacagagataaccactgttcataattccttccagtcttcttacttggcacatatacatttgtctttctttatata

SEQ ID NO: 655622 - DNA, 120 bp, Artificial Sequence
  ENSG00000183682_43 (sequence is synthesized)
tgacatatggatattttacaaagttaggatcctactctatgcactgcttggtgatcggatctattcaatgtacaaaatattttgaaagtttctgtgattaaatgttctttgaaaacataa

SEQ ID NO: 655623 - DNA, 120 bp, Artificial Sequence
  ENSG00000183684_0 (sequence is synthesized)
gagccgatgcccgattccgcgcccgccatggccgacaaaatggacatgtctctggacgacatcattaaactgaaccggagccagcgaggcggccggggcgggggccggggccgcggccgg

SEQ ID NO: 655624 - DNA, 120 bp, Artificial Sequence
  ENSG00000183684_1 (sequence is synthesized)
gccgccgcgcgagtgaatcgaggcggcgggcccatccggaaccggccggccatcgcccgcggcgcggccggcggaggcggcaggaaccgaccggcgccctacagcaggccaaaacaactt

SEQ ID NO: 655625 - DNA, 120 bp, Artificial Sequence
  ENSG00000183684_2 (sequence is synthesized)
aaccgaccggcgccctacagcaggccaaaacaacttcccgacaagtggcagcacgatcttttcgacagtggcttcggcggtggtgccggcgtggagacaggtgggaaactgctggtgtcc

SEQ ID NO: 655626 - DNA, 120 bp, Artificial Sequence
  ENSG00000183684_3 (sequence is synthesized)
aatctggattttggagtctcagacgccgatattcaggaactctttgctgaatttggaacgctgaagaaggcggctgtgcactatgatcgctctggtcgcagcttaggaacagcagacgtg

SEQ ID NO: 655627 - DNA, 120 bp, Artificial Sequence
  ENSG00000183684_4 (sequence is synthesized)
agatgccctgaaggccatgaagcagtacaacggcgtccctctggatggccgccccatgaacattcagcttgtcacgtcacagattgacgcacagcggaggcctgcacagagcgtaaacag

SEQ ID NO: 655628 - DNA, 120 bp, Artificial Sequence
  ENSG00000183684_5 (sequence is synthesized)
aggtggcatgactagaaaccgtggcgctggaggttttggtggtggtggaggcacccggagaggcacccgcggaggcgcccgtggaagaggcagaggtgccggcaggaattcaaagcagca

SEQ ID NO: 655629 - DNA, 120 bp, Artificial Sequence
  ENSG00000183684_6 (sequence is synthesized)
gctttcggcagaggagctggatgcccagctggacgcctataatgcgagaatggacaccagttaaacagaccagcaaatccgcgtgcggaacaggacccaggcgtctcctcttgctccctg

SEQ ID NO: 655630 - DNA, 120 bp, Artificial Sequence
  ENSG00000183684_7 (sequence is synthesized)
gctccctggttggggggcggtggctggggctgtgcggccaatgatggatttgtttcttttatgttttaaaataggatttaaaaactcatgtaaaggttttttttttttcttttttttttt

SEQ ID NO: 655631 - DNA, 120 bp, Artificial Sequence
  ENSG00000183684_8 (sequence is synthesized)
ctgaaacagacctgttttgtaccgagttatttttgggataaattttactggttgctgttgtggagaaggtggcgtttccaccttttccataataaaatagaaatgtgtgtagaactggaa

SEQ ID NO: 655632 - DNA, 120 bp, Artificial Sequence
  ENSG00000183684_9 (sequence is synthesized)
gcggccgcggtgggaccgtgcggcctcgggctggggcagctgcagcgccggagggagcgctggcggccccgtttcggccggatcctctcaggccgggaagaggaagggtccggagtagcc

SEQ ID NO: 655633 - DNA, 120 bp, Artificial Sequence
  ENSG00000183684_10 (sequence is synthesized)
ggagtctcagacgccgatattcaggtggtttctagcatccactggaaaccgcttttggtgaactccagttcccgctgtgtgcctgcggccggagtatccccacactctgggttccctctc

SEQ ID NO: 655634 - DNA, 120 bp, Artificial Sequence
  ENSG00000183684_11 (sequence is synthesized)
caactcccagcctgcctgaggtcagggcagtttccatgacagcgcttgacttcagactttgccgcaggcttgagtaggaggagagggaaaggaactctttgctgaatttggaacgctgaa

SEQ ID NO: 655635 - DNA, 120 bp, Artificial Sequence
  ENSG00000183684_12 (sequence is synthesized)
agctacatccctcccctccttcagctccttccggaagattcacttctgtgaagccttctcagaaccgccatagtacacctctgagtgcggggctgtagtcgtaaagacaaaggccgcccc

SEQ ID NO: 655636 - DNA, 120 bp, Artificial Sequence
  ENSG00000183684_13 (sequence is synthesized)
atgaagcagtacaacggcgtccctctggatgcaagctacatccctcccctccttcagctccttccggaagattcacttctgtgaagccttctcagaaccgccatagtacacctctgagtg

SEQ ID NO: 655637 - DNA, 120 bp, Artificial Sequence
  ENSG00000183688_0 (sequence is synthesized)
agtccagcgtctctccccctggctcccggctgtgcgctgaggctttgtcccctgtcctttggcgaaggagtggagtttgaccccttaccaccaaaggaagtaaggtacacctccttggtc

SEQ ID NO: 655638 - DNA, 120 bp, Artificial Sequence
  ENSG00000183688_1 (sequence is synthesized)
aagtacgactccgagaggcacttcatcgacgacgtgcagctgcccctgggcctggcggtggcctcctgcagccagacggtcacctgtgtccccaatggcacgtggcgcaactacaaggcc

SEQ ID NO: 655639 - DNA, 120 bp, Artificial Sequence
  ENSG00000183688_2 (sequence is synthesized)
gaggtgcgcttcgagccacgccacaggcccacccgcttcctcagtaccaccatcgtgtaccccaagtaccccaaggccgtctacaccaccaccctggattacaactgccgcaagacgctg

SEQ ID NO: 655640 - DNA, 120 bp, Artificial Sequence
  ENSG00000183688_3 (sequence is synthesized)
aggaggtttctgtccagcgtggagctcgaagccgcggagctcccgggcagcgacgacctctctgatgaatgctgacccagcaggctgggctggggtcggaccggctctcccgctgtcctg

SEQ ID NO: 655641 - DNA, 120 bp, Artificial Sequence
  ENSG00000183688_4 (sequence is synthesized)
cccccgactgccctggccaagctgggcgaccttacccttcacgtcattccagccccagaggagtctaacctagagatacctccaagcgcggccgggggaagagaaaaaaaagaaaaaatc

SEQ ID NO: 655642 - DNA, 120 bp, Artificial Sequence
  ENSG00000183688_5 (sequence is synthesized)
actgcatctcataattattgagatctttgtgttgtaattttcaagctgtttttagagggaatatatgtcctggtttgctgctgtgttgtttccccaaagtctcaatcagatgaggcaaca

SEQ ID NO: 655643 - DNA, 120 bp, Artificial Sequence
  ENSG00000183688_6 (sequence is synthesized)
aaaagaccaccagaattgcaggaaagcagcagcagtctgggatagggaggggggaggagagctctccctccgtggtcagtttgtcagaagaaaagcatggaaaaagtgagatttaagaaa

SEQ ID NO: 655644 - DNA, 120 bp, Artificial Sequence
  ENSG00000183688_7 (sequence is synthesized)
tctcagccacgggtgtcttcactgcacaaaagtggtgctaattcagtaaacagtgacacctgtgtgggttcaatctgtggagagttgagttccattcctttgtttttaaatttccacctc

SEQ ID NO: 655645 - DNA, 120 bp, Artificial Sequence
  ENSG00000183688_8 (sequence is synthesized)
catttgtgtttcctattaacctaaactcttgtaattctctaaatcttttttcatgatataaaaaaaaaagaaaatcccaaaccacaatttaagatgccttttttttttaaaaaaaaaggt

SEQ ID NO: 655646 - DNA, 120 bp, Artificial Sequence
  ENSG00000183688_9 (sequence is synthesized)
tctccgtgttgccacctgctccgggaaggccaggccgatgggcggccaggtttgggagcagcggcttcggctccgattgcttcctgacggtcagttccaagcacaggctctgagaaacgc

SEQ ID NO: 655647 - DNA, 120 bp, Artificial Sequence
  ENSG00000183688_10 (sequence is synthesized)
ctcgaacccttggtatctggtgaccgtctccgcaggcttccgtgagtctccgataggtgttttgggcttttggaatactttcagaatactttcccattttttcataaggcaaaacggagt

SEQ ID NO: 655648 - DNA, 120 bp, Artificial Sequence
  ENSG00000183688_11 (sequence is synthesized)
ggacggcctttttttgagagaaacagcattctaagagtgtgcttggaaaacacactttttgggagtccacgtggggagtggacactcaggacaggaagcggtggccctaagacctgcggc

SEQ ID NO: 655649 - DNA, 120 bp, Artificial Sequence
  ENSG00000183688_12 (sequence is synthesized)
cacccggaggaggcagacgcaggcgatgacctggttcatcatgagaggagctagagttgactcagtcttaggatctcgatggcgtcagaattgcagagggtttctgccagtgccttaggt

SEQ ID NO: 655650 - DNA, 120 bp, Artificial Sequence
  ENSG00000183688_13 (sequence is synthesized)
ctaattcagaaagcaaggaaggctgggcacggtggctggcgcctgtagtctcagctacttggaaactgaggcaggaggatctcttgagcccaagaattcgagaccggtctggcaacatag

SEQ ID NO: 655651 - DNA, 120 bp, Artificial Sequence
  ENSG00000183688_14 (sequence is synthesized)
tgagcctccatctctaaaaaaaagtggcaaagctgaggaaatctgtgcccccatcccccgacaccagacaagctaaggtgcattcagagtagggaacgatgtcaaaacctggccgccgtg

SEQ ID NO: 655652 - DNA, 120 bp, Artificial Sequence
  ENSG00000183688_15 (sequence is synthesized)
ccaccgtacggaggcaggtgacagtcaactgaaatgtccccaaggaccgtgtgaattcggctggcgtggcccagcagcggggtggaccagggtgcggtggcttcagacctgcctcccgcc

SEQ ID NO: 655653 - DNA, 120 bp, Artificial Sequence
  ENSG00000183688_16 (sequence is synthesized)
accccgtcctcccctaaccccttcttgggacctcctgccaatccctgtggtgtttgagtaaagaaagtggctgatggttttacttttttcttccaatattggaaagaacaaactagatat

SEQ ID NO: 655654 - DNA, 120 bp, Artificial Sequence
  ENSG00000183688_17 (sequence is synthesized)
tccccttgaacacatccaaattatttccagtgcctgagggttaccgagcactgtaagctcagctcggctgtagctccgggtttctgccgatggcctccatctgcgccgaaagctgaactg

SEQ ID NO: 655655 - DNA, 120 bp, Artificial Sequence
  ENSG00000183688_18 (sequence is synthesized)
agccccgcggtgccccggagccacagcagcaggtgcagcgacaatcgccgtcgtgcgcagtcgctggagtcctggagagccacgctgtcctctgcagacaacagcatcagtccgctgtgc

SEQ ID NO: 655656 - DNA, 120 bp, Artificial Sequence
  ENSG00000183688_19 (sequence is synthesized)
cccaatgcatcgacgccctgtggacggggcctgcagtccacccgtggtctgagcttgccgggctgaagctcggctgggacccagggaggggccaccctgggacccacagtctcctcagtc

SEQ ID NO: 655657 - DNA, 120 bp, Artificial Sequence
  ENSG00000183688_20 (sequence is synthesized)
acgtgcagagcaaaaaatgcttcctgtgtttggaagagcaagtgacgcagcatttattgataaaaatggatttttctgtctgatttcatgctgtggtcgtttaagtggtcaatgtctttt

SEQ ID NO: 655658 - DNA, 71 bp, Artificial Sequence
  ENSG00000183688_21 (sequence is synthesized)
tgctgtggtcgtttaagtggtcaatgtcagtggaatggcgccaactcagctcactgcaaccttcacctccc

SEQ ID NO: 655659 - DNA, 120 bp, Artificial Sequence
  ENSG00000183688_22 (sequence is synthesized)
gcctcggcctcccaataatttgtaagttatgttagcgggatcctcaaggccttgctttgccccgtggagacgcttgctcggatgagctcaggaaacagtaccggctgcgtggcaggtctg

SEQ ID NO: 655660 - DNA, 120 bp, Artificial Sequence
  ENSG00000183688_23 (sequence is synthesized)
ggtgttgtgtgcgaggacgtggcctttgaacaccgctgtgttctcagaggtccttaggagatatttttttttgtcttagggggactgtgttaagttcagacaaatcatgctgggtgtgta

SEQ ID NO: 655661 - DNA, 120 bp, Artificial Sequence
  ENSG00000183688_24 (sequence is synthesized)
gagagtgtgaaatacgtcagtgaagtaagtagcagtgagcgattgtgaatgtgtaatgtaaatggaaaaccgggttttaccgtgttaagttattcactagggagccagtcgtagttcttt

SEQ ID NO: 655662 - DNA, 120 bp, Artificial Sequence
  ENSG00000183688_25 (sequence is synthesized)
gtaatcctctttcttccaaacctgctttgctgaaagttgcagaaaaggaagtgtgtggagagaaacagaacccttcagggtgggtcagaggacgccatccacagtggattcgtgttcgtt

SEQ ID NO: 655663 - DNA, 120 bp, Artificial Sequence
  ENSG00000183688_26 (sequence is synthesized)
tgcaggtggaagcagtgatttttaggacccactgattaaaaacaaacattcccaagtgtctctgagagatgctgtttatttgttaattaaaaagcttttttctctgtcttttaaattatg

SEQ ID NO: 655664 - DNA, 120 bp, Artificial Sequence
  ENSG00000183688_27 (sequence is synthesized)
gctttcatgtaataaggatatttttagtgaaaaattgttttcctttcaaattacagaccttttaaaaaaacttaatttgagcgagtaccttttcatttgacacttttcctgtttctaacc

SEQ ID NO: 655665 - DNA, 120 bp, Artificial Sequence
  ENSG00000183688_28 (sequence is synthesized)
gcgagtaccttttcatttgacacttttcctgtttctaaccttaggaaaccagaatagcgtttggcagacacgacgttttcagtttacctttgacacctgccccactccattttgctttgt

SEQ ID NO: 655666 - DNA, 120 bp, Artificial Sequence
  ENSG00000183690_0 (sequence is synthesized)
gggggccaaacaacacggccgggaggcgccgctgcctgccgggccctctcttctgggaccctggattttcggacactgagcgccatggccctgcctctgctgccgggcaacagcttcaac

SEQ ID NO: 655667 - DNA, 120 bp, Artificial Sequence
  ENSG00000183690_1 (sequence is synthesized)
cgcaacgtgggaaaggagaagtttcacaaatcccaacattggggcttttgcaacaatgttatgatgttggtgagtgatgaaaagcctggaataggtggagaaccacttctggggcaaaag

SEQ ID NO: 655668 - DNA, 120 bp, Artificial Sequence
  ENSG00000183690_2 (sequence is synthesized)
ataaagcctaaatgtagcatatatcctaaaggagatggaagtgatgtaccatcatgggtagcctttgataaacaggtattatcttttgatgcctatttggaagaggaagtacttgataaa

SEQ ID NO: 655669 - DNA, 120 bp, Artificial Sequence
  ENSG00000183690_3 (sequence is synthesized)
agccaaaccaactacagaataagatactataaaatctacttctaccctgaagatgacacaattcaagtaaatgaaccagaggtgaaaaatagtggattacttcaagggacttctatccgg

SEQ ID NO: 655670 - DNA, 120 bp, Artificial Sequence
  ENSG00000183690_4 (sequence is synthesized)
cgtcatcggattactcttccgcctcctgatgaggatcagttttatactgtgtatcattttaatgtcggcacagaggttgtcttctatggccggacattcaagatttatgactgtgatgca

SEQ ID NO: 655671 - DNA, 120 bp, Artificial Sequence
  ENSG00000183690_5 (sequence is synthesized)
ttcacaagaaactttttgaggaaaataggggtcaaagtgaatcccccagtgcaatgtccagaagatccttacatgaagattcggagagaggttgtagaacacgtagagcccttacgtccc

SEQ ID NO: 655672 - DNA, 120 bp, Artificial Sequence
  ENSG00000183690_6 (sequence is synthesized)
tacgaatccctcgacaccctgaaacagttcctccagtatcatggcaagattttgtgtttcttctgcctgtgggatgactcagtctcaatgtttggagaccgtagagaactcatcctgcat

SEQ ID NO: 655673 - DNA, 120 bp, Artificial Sequence
  ENSG00000183690_7 (sequence is synthesized)
tacttcttgtgtgatgatactattgaaatcaaagaattgcttccacacagctcaggccgagatgctctaaaaatgttcctccggaggagtaagctacccaagaattgcccacctagagtc

SEQ ID NO: 655674 - DNA, 120 bp, Artificial Sequence
  ENSG00000183690_8 (sequence is synthesized)
tatcaaccaggccagataacagatcgagcagttctcaattcatatggtgactttataaagaaccaagcggatggctacctgttcgatagatataagctaggaaaagtagaccaagagttt

SEQ ID NO: 655675 - DNA, 120 bp, Artificial Sequence
  ENSG00000183690_9 (sequence is synthesized)
tacaaagatagtgacctgtccctaggagtcaccatcaatgtgtggggaagaaaagtgctcctttatgactgtgatgaatttacgaagtcttattataagtctaaatatggaattgagaac

SEQ ID NO: 655676 - DNA, 120 bp, Artificial Sequence
  ENSG00000183690_10 (sequence is synthesized)
tttacctcagtttcatgcaagcctccttctcctcctccaaaaatagaaaggaaatttccaccttacaacggttttggttctgaagaggattctctccgtaactgcatagacctcaagccc

SEQ ID NO: 655677 - DNA, 120 bp, Artificial Sequence
  ENSG00000183690_11 (sequence is synthesized)
acacctcatcggaggaacttcaagaagtttatggaaaaagacagctatggctccaaaagcaatatactccgtttttttgcaaaactagtcacagacaaatgtgttgacttggacaggatg

SEQ ID NO: 655678 - DNA, 120 bp, Artificial Sequence
  ENSG00000183690_12 (sequence is synthesized)
tttgttatttcatattatctcggtgatgacaccatttcagtgtttgaacctatagagaggaattcaggaattgctggtgggatgttcttgaaaagaagtcgcgttaagaagcctggacaa

SEQ ID NO: 655679 - DNA, 120 bp, Artificial Sequence
  ENSG00000183690_13 (sequence is synthesized)
actatctgaatatatcaaggccgaggagctgtacattggagtcacggtgaatgtgaatggttacctatttcgtttgctcaatgctgatgagtataccttaaactacatggagcagaatac

SEQ ID NO: 655680 - DNA, 120 bp, Artificial Sequence
  ENSG00000183690_14 (sequence is synthesized)
agataagtatcctttcagtaacctcaaacttgccctacaaaagctgaagcaagaagaaggaaaatccagagagctcaagcaggtatttaaagctgctgactctaagcacacaaatatggt

SEQ ID NO: 655681 - DNA, 120 bp, Artificial Sequence
  ENSG00000183690_15 (sequence is synthesized)
ggattataatacattcagagacatattgatgtctttgactgttggaaaccttgcagagcaagaatttgtaaccattgcacgtcactaccgtgtgcctgagggcacatgttcagatatgga

SEQ ID NO: 655682 - DNA, 120 bp, Artificial Sequence
  ENSG00000183690_16 (sequence is synthesized)
tttcttaatcgcactggcccacgaaaagttcaagaaaaatatgtttgagaatttcgacactttcatttattcctgtgtgtatgaagatcgagaaaaaaaaaatgtattacccaccaaaga

SEQ ID NO: 655683 - DNA, 120 bp, Artificial Sequence
  ENSG00000183690_17 (sequence is synthesized)
cattaaaaggctgtgcaaatcctccagattacctttgagtgatgatcttctagaatccttattgtcaaggtttgaagacagtgaaaaacaaatagattataagtcatttttctctgccct

SEQ ID NO: 655684 - DNA, 120 bp, Artificial Sequence
  ENSG00000183690_18 (sequence is synthesized)
gaactggagaaagaatccagtgcctgaattgcaaccagcatcataccttaaagagagatgtgaagatgtttggcttggtatgccatcacctattcctgcgaaatacattgactactggac

SEQ ID NO: 655685 - DNA, 120 bp, Artificial Sequence
  ENSG00000183690_19 (sequence is synthesized)
ctttttgaaggacgcgtttggcttagaggaggaataaccatgccagttttggtcaattctctatgatttacttctctcattttgccacatttactttagtagatataatttcattaaaaa

SEQ ID NO: 655686 - DNA, 120 bp, Artificial Sequence
  ENSG00000183690_20 (sequence is synthesized)
caaaaaagaaacaaggtttatattaaatggaaatccataaaccacaattaatcctattttgtcatgttagttttacagaacatcatgttacattgccgacgtactgttactatttaaaat

SEQ ID NO: 655687 - DNA, 120 bp, Artificial Sequence
  ENSG00000183690_21 (sequence is synthesized)
gccatcttaaaacatgttgaatatttttattatatgtatggtttattaataccaaaaaatcttctgataatttttgatccaacataatttgattcattactatatgaacagaaaatgact

SEQ ID NO: 655688 - DNA, 120 bp, Artificial Sequence
  ENSG00000183690_22 (sequence is synthesized)
tttgaaggttatacatgacaatacaaaatcaaattatatcacagcaataagttgtgattctattaaacatttttgaaacctttttgacacgtttattacttacataattaagttttgtag

SEQ ID NO: 655689 - DNA, 120 bp, Artificial Sequence
  ENSG00000183690_23 (sequence is synthesized)
gtagcaacccacctcatcaaaataattcttaaacctctctagagtaaatatatttatcttttgaacttagtaaagctatgggaagaaaaagaacctccaacacacacacacacacacaca

SEQ ID NO: 655690 - DNA, 120 bp, Artificial Sequence
  ENSG00000183690_24 (sequence is synthesized)
cgcacgtgcacacacactggaaacatatgcagtatttatatttgtaatgcccttttttctatctaaagtcagcttgttagcttaggaatatatgcatgtgtgtataattatagtttgacc

SEQ ID NO: 655691 - DNA, 120 bp, Artificial Sequence
  ENSG00000183690_25 (sequence is synthesized)
aaaactttattatgtctaaaatatttacaaatgtgaaagctgaagattttgagatttttgttttttttttggtttgttttacacacacatcccacgcgccccaccctagaggtttaaata

SEQ ID NO: 655692 - DNA, 120 bp, Artificial Sequence
  ENSG00000183690_26 (sequence is synthesized)
ttcagaaactacaacatttttcccctgcatttttctagttctatttttatttttcttcagcagaactcttgtcatgtagtgtacatttgattaaaacccatagccatgtacctctgggaa

SEQ ID NO: 655693 - DNA, 120 bp, Artificial Sequence
  ENSG00000183691_0 (sequence is synthesized)
aaaccggtgccaacgtgcgcggacgccgccgccgccgccgccgctggagtccgccgggcagagccggccgcggagcccggagcaggcggagggaagtgcccctagaaccagctcagccag

SEQ ID NO: 655694 - DNA, 120 bp, Artificial Sequence
  ENSG00000183691_1 (sequence is synthesized)
cggcgcttgcacagagcggccggacgaagagcagcgagaggaggaggggagagcggctcgtccacgcgccctgcgccgccgccggcccgggaaggcagcgaggagccggcgcctcccgcg

SEQ ID NO: 655695 - DNA, 120 bp, Artificial Sequence
  ENSG00000183691_2 (sequence is synthesized)
ccccgcggtcgccctggagtaatttcggatgcccagccgcggccgccttccccagtagacccgggagaggagttgcggccaacttgtgtgcctttcttccgccccggtgggagccggcgc

SEQ ID NO: 655696 - DNA, 120 bp, Artificial Sequence
  ENSG00000183691_3 (sequence is synthesized)
tgcctttcttccgccccggtgggagccggcgctgcgcgaagggctctcccggcggctcatgctgccggccctgcgcctgcccagcctcgggtgagccgcctccggagagacgggggagcg

SEQ ID NO: 655697 - DNA, 120 bp, Artificial Sequence
  ENSG00000183691_4 (sequence is synthesized)
cggggacgcgggacgaagcagcagccccgggcgcgcgccagaggcatggagcgctgccccagcctaggggtcaccctctacgccctggtggtggtcctggggctgcgggcgacaccggcc

SEQ ID NO: 655698 - DNA, 120 bp, Artificial Sequence
  ENSG00000183691_5 (sequence is synthesized)
ggcggccagcactatctccacatccgcccggcacccagcgacaacctgcccctggtggacctcatcgaacacccagaccctatctttgaccccaaggaaaaggatctgaacgagacgctg

SEQ ID NO: 655699 - DNA, 120 bp, Artificial Sequence
  ENSG00000183691_6 (sequence is synthesized)
aacgagacgctgctgcgctcgctgctcgggggccactacgacccaggcttcatggccacctcgccccccgaggaccggcccggcgggggcgggggtgcagctgggggcgcggaggacctg

SEQ ID NO: 655700 - DNA, 120 bp, Artificial Sequence
  ENSG00000183691_7 (sequence is synthesized)
agaagctgcggaggaagttacagatgtggctgtggtcgcagacattctgccccgtgctgtacgcgtggaacgacctgggcagccgcttttggccgcgctacgtgaaggtgggcagctgct

SEQ ID NO: 655701 - DNA, 120 bp, Artificial Sequence
  ENSG00000183691_8 (sequence is synthesized)
tcagtaagcgctcgtgctccgtgcccgagggcatggtgtgcaagccgtccaagtccgtgcacctcacggtgctgcggtggcgctgtcagcggcgcgggggccagcgctgcggctggattc

SEQ ID NO: 655702 - DNA, 120 bp, Artificial Sequence
  ENSG00000183691_9 (sequence is synthesized)
ccatccagtaccccatcatttccgagtgcaagtgctcgtgctagaactcgggggccccctgcccgcacccggacacttgatcgatccccaccgacgccccctgcaccgcctccaaccagt

SEQ ID NO: 655703 - DNA, 120 bp, Artificial Sequence
  ENSG00000183691_10 (sequence is synthesized)
tttttttttttttttttttctgggctacagagacctagctttctggttcctgtaatgcactgtttaactgtgtaggaatgtatatgtgtgtgtatatacggtcccagttttaatttactt

SEQ ID NO: 655704 - DNA, 120 bp, Artificial Sequence
  ENSG00000183691_11 (sequence is synthesized)
tatatgtgtgtgtatatacggtcccagttttaatttacttattaaaaggtcagtattatacgttaaaagttaccggcttctactgtatttttaaaaaaaagtaagcaaaagaaaaaaaaa

SEQ ID NO: 655705 - DNA, 120 bp, Artificial Sequence
  ENSG00000183691_12 (sequence is synthesized)
agaacagagaaaagagagacttattctggttgttgctaataatgttaacctgctatttatattccagtgcccttcgcatggcgaagcaggggggaaaagttatttttttcttgaagtaca

SEQ ID NO: 655706 - DNA, 120 bp, Artificial Sequence
  ENSG00000183691_13 (sequence is synthesized)
aagagacgggggaacttttgtagaggactttttaaaagctattttccattcttcggaaagtgttttggttttccttggacctcgaagaagctatagagttcaatgttattttacagttat

SEQ ID NO: 655707 - DNA, 120 bp, Artificial Sequence
  ENSG00000183691_14 (sequence is synthesized)
tgtaaatatagagaacaaatggaatgactaatcattgtaaattaagagtatctgctatttattctttataatatcccgtgtagtaaatgagaaagaagtgcagagcaggattaaagaaaa

SEQ ID NO: 655708 - DNA, 120 bp, Artificial Sequence
  ENSG00000183695_0 (sequence is synthesized)
actccagatcctgcaggcatctccccatcctcagctgtttgccagtcccaggaaagcacttctcaactcaccaactccagtagaaagaagggtgttaaggggcaccagtggaggttttct

SEQ ID NO: 655709 - DNA, 120 bp, Artificial Sequence
  ENSG00000183695_1 (sequence is synthesized)
gagcatggatccaaccaccccggcctggggaacagaaagtacaacagtgaatggaaatgaccaagcccttcttctgctttgtggcaaggagaccctgatcccggtcttcctgatcctttt

SEQ ID NO: 655710 - DNA, 120 bp, Artificial Sequence
  ENSG00000183695_2 (sequence is synthesized)
cattgccctggtcgggctggtaggaaacgggtttgtgctctggctcctgggcttccgcatgcgcaggaacgccttctctgtctacgtcctcagcctggccggggccgacttcctcttcct

SEQ ID NO: 655711 - DNA, 120 bp, Artificial Sequence
  ENSG00000183695_3 (sequence is synthesized)
ctgcttccagattataaattgcctggtgtacctcagtaacttcttctgttccatctccatcaatttccctagcttcttcaccactgtgatgacctgtgcctaccttgcaggcctgagcat

SEQ ID NO: 655712 - DNA, 120 bp, Artificial Sequence
  ENSG00000183695_4 (sequence is synthesized)
gctgagcaccgtcagcaccgagcgctgcctgtccgtcctgtggcccatctggtatcgctgccgccgccccagacacctgtcagcggtcgtgtgtgtcctgctctgggccctgtccctact

SEQ ID NO: 655713 - DNA, 120 bp, Artificial Sequence
  ENSG00000183695_5 (sequence is synthesized)
gctgagcatcttggaagggaagttctgtggcttcttatttagtgatggtgactctggttggtgtcagacatttgatttcatcactgcagcgtggctgatttttttattcatggttctctg

SEQ ID NO: 655714 - DNA, 120 bp, Artificial Sequence
  ENSG00000183695_6 (sequence is synthesized)
tgggtccagtctggccctgctggtcaggatcctctgtggctccaggggtctgccactgaccaggctgtacctgaccatcctgctcacagtgctggtgttcctcctctgcggcctgccctt

SEQ ID NO: 655715 - DNA, 120 bp, Artificial Sequence
  ENSG00000183695_7 (sequence is synthesized)
tggcattcagtggttcctaatattatggatctggaaggattctgatgtcttattttgtcatattcatccagtttcagttgtcctgtcatctcttaacagcagtgccaaccccatcattta

SEQ ID NO: 655716 - DNA, 120 bp, Artificial Sequence
  ENSG00000183695_8 (sequence is synthesized)
ggctgcagcagccgatcctcaagctggctctccagagggctctgcaggacattgctgaggtggatcacagtgaaggatgcttccgtcagggcaccccggagatgtcgagaagcagtctgg

SEQ ID NO: 655717 - DNA, 120 bp, Artificial Sequence
  ENSG00000183695_9 (sequence is synthesized)
tgtagagatggacagcctctacttccatcagatatatgtggctttgagaggcaactttgcccctgtctgtctgatttgctgaactttctcagtcctgattttaaaacagttaagagagtc

SEQ ID NO: 655718 - DNA, 120 bp, Artificial Sequence
  ENSG00000183695_10 (sequence is synthesized)
cttgtgaggattaagtgagacagtgcctatgaaacaaacactaagtgcagtgtctctggaactgccttactcacaggcttccaccacagccctatgagagctttgccaactctgcggtcc

SEQ ID NO: 655719 - DNA, 120 bp, Artificial Sequence
  ENSG00000183695_11 (sequence is synthesized)
atgactgttcccacttttaatgaatcctacctttcgcagaaggctgaaagcagggcagaaaagatctacatttctttggacactgcacttgatagggactcaaagaatgttatattttta

SEQ ID NO: 655720 - DNA, 120 bp, Artificial Sequence
  ENSG00000183695_12 (sequence is synthesized)
attaatttctttttctcttccgtacaatttctgtctcaacaaaattagaagaattaaatttaaaactagctccaaaagagcagtcgtctttcattttggcagaccttagaatatccccct

SEQ ID NO: 655721 - DNA, 120 bp, Artificial Sequence
  ENSG00000183695_13 (sequence is synthesized)
agcttaataaatctttgttgaatggcttaatgaatgaataaactggttaatgtttaagttaaacctctgaaaagtctccatttaccagatttgagtcactaaatttattgctttcactac

SEQ ID NO: 655722 - DNA, 120 bp, Artificial Sequence
  ENSG00000183695_14 (sequence is synthesized)
ttttgaattttgcaaacatgaaattaagttttataattagataaatcaatgtcaacacatatttaaagtttgaggtacactgtcttcctgtggtttcctttcacatgccatcccttaaaa

SEQ ID NO: 655723 - DNA, 120 bp, Artificial Sequence
  ENSG00000183695_15 (sequence is synthesized)
tcccagctacacgccttcccattccttcccctttgcctttgttctaatcttccctctctgggggctctctaattcgtcctggaagtttccagtggtcttatagactccatgttcttggag

SEQ ID NO: 655724 - DNA, 120 bp, Artificial Sequence
  ENSG00000183695_16 (sequence is synthesized)
gacaggctgtatgtcagatttaccttttattccgaagaactcggagcatttattttgttaattaaattgcacatatttttaaaagttacgtgttccacagaataaaatactaattgtaaa

SEQ ID NO: 655725 - DNA, 120 bp, Artificial Sequence
  ENSG00000183696_0 (sequence is synthesized)
gcgggaactcccaggatcaggaaggtcccagagaaactccccaggggggaagccgaggccgtccagagagatccagggtacacacagtgacagtgccagctccacattcccgaccaccgg

SEQ ID NO: 655726 - DNA, 120 bp, Artificial Sequence
  ENSG00000183696_1 (sequence is synthesized)
gccagggctggttccacgctgtcatttctctccgctggccccagccgcggggccaccgccagacagacagaccggggatcctgcctggcggcgtgaccttgggttagtcctagagccgct

SEQ ID NO: 655727 - DNA, 120 bp, Artificial Sequence
  ENSG00000183696_2 (sequence is synthesized)
tctagcccggtttcctccgccccaggttaggaccacgtggggcggggccgctcgcagactccatatgagattcacctcgcaggtggttccctcattcgagtgctccggcgcacagacccg

SEQ ID NO: 655728 - DNA, 120 bp, Artificial Sequence
  ENSG00000183696_3 (sequence is synthesized)
cgccccgccgtctgcgagcctcccgagagccgtcccttcgtccggccctggagcattgcgtttgtcgccggtgtcgcagtgcgaggatggcgccgcgggtgtagcggctctctgcgcagg

SEQ ID NO: 655729 - DNA, 120 bp, Artificial Sequence
  ENSG00000183696_4 (sequence is synthesized)
ccgagtgggcttggtgaggtgactcgcggtcgcgggtgactcgccggcaggacactgcctggaacgcctggagcgcctcccactgcagacgtctgtccgcctccagccgctctcctctga

SEQ ID NO: 655730 - DNA, 120 bp, Artificial Sequence
  ENSG00000183696_5 (sequence is synthesized)
cgggtcctgcctcagttggcggaatggcggccacgggagccaatgcagagaaagctgaaagtcacaatgattgccccgtcagacttttaaatccaaacatagcaaaaatgaaagaagata

SEQ ID NO: 655731 - DNA, 120 bp, Artificial Sequence
  ENSG00000183696_6 (sequence is synthesized)
ttctctatcatttcaatctcaccactagcagacacaatttcccagccttgtttggagatgtgaagtttgtgtgtgttggtggaagcccctcccggatgaaagccttcatcaggtgcgttg

SEQ ID NO: 655732 - DNA, 120 bp, Artificial Sequence
  ENSG00000183696_7 (sequence is synthesized)
gtgcagagctgggccttgactgcccaggtagagactatcccaacatctgtgcgggaactgaccgctatgccatgtataaagtaggaccggtgctgtctgtcagtcatggtatgggcattc

SEQ ID NO: 655733 - DNA, 120 bp, Artificial Sequence
  ENSG00000183696_8 (sequence is synthesized)
tcatgttgcatgagctcataaagctgctgtactatgcccggtgctccaacgtcactatcatccgcattggcacttctggtgggataggtctggagcccggcactgtggtcataacagagc

SEQ ID NO: 655734 - DNA, 120 bp, Artificial Sequence
  ENSG00000183696_9 (sequence is synthesized)
aggcagtggatacctgcttcaaggcagagtttgagcagattgtcctggggaagcgggtcatccggaaaacggaccttaacaagaagctggtgcaggagctgttgctgtgttctgcagagc

SEQ ID NO: 655735 - DNA, 120 bp, Artificial Sequence
  ENSG00000183696_10 (sequence is synthesized)
tgagcgagttcaccacagtggtggggaacaccatgtgcaccttggacttctatgaagggcaaggccgtctggatggggctctctgctcctacacggagaaggacaagcaggcgtatctgg

SEQ ID NO: 655736 - DNA, 120 bp, Artificial Sequence
  ENSG00000183696_11 (sequence is synthesized)
aggcagcctatgcagccggcgtccgcaatatcgagatggagtcctcggtgtttgccgccatgtgcagcgcctgcggcctccaagcggccgtggtgtgtgtcaccctcctgaaccgcctgg

SEQ ID NO: 655737 - DNA, 120 bp, Artificial Sequence
  ENSG00000183696_12 (sequence is synthesized)
aaggggaccagatcagcagccctcgcaatgtgctcagcgagtaccagcagaggccgcagcggctggtgagctacttcatcaagaagaaactgagcaaggcctgagcgctgccctgcacct

SEQ ID NO: 655738 - DNA, 120 bp, Artificial Sequence
  ENSG00000183696_13 (sequence is synthesized)
ccgcagacctgctgtgatgacttgccattaaaagcattgtccaaaatcccctgttgtgtggactttgagcacactttacacaagaatctagaaaatcagatcgcgattaagagacagaga

SEQ ID NO: 655739 - DNA, 120 bp, Artificial Sequence
  ENSG00000183696_14 (sequence is synthesized)
atcttggattaaccgcatgggagatgttcttccttttgaagtttcattggagcattttcaatgatgttagcctgatttggggtttcttcaagaacattctaccaaatttttgtactattt

SEQ ID NO: 655740 - DNA, 120 bp, Artificial Sequence
  ENSG00000183696_15 (sequence is synthesized)
ctagggaaatttttcagactttaaaattctaatggtagtcagatttcatgtcactaaacaagaaatctgacaatagtgccaggaaactaatttcctgatacattaaaaaaattccatgca

SEQ ID NO: 655741 - DNA, 120 bp, Artificial Sequence
  ENSG00000183696_16 (sequence is synthesized)
tcatccgcattggcacttctggtgggatagggattttgaagcaccttaggagaaaagacacaggaaaatcaaaggggggaagagagaggcgcagtacaaaactcagataagtgtccttaa

SEQ ID NO: 655742 - DNA, 120 bp, Artificial Sequence
  ENSG00000183696_17 (sequence is synthesized)
gcgcagtacaaaactcagataagtgtccttaaattagcttaaaatgtccctatcctcaacagggacattttttttttgtttaaaaaacaaagatggttggccgggcgcggtggctcacac

SEQ ID NO: 655743 - DNA, 120 bp, Artificial Sequence
  ENSG00000183696_18 (sequence is synthesized)
tttttgttatatagagagattgatgcataaaatctgtgtttgtatgactgtaattccaagtttagcgaaattgtccctaggacaacacaccaacggccatgagctgtctcggtcctgcaa

SEQ ID NO: 655744 - DNA, 120 bp, Artificial Sequence
  ENSG00000183696_19 (sequence is synthesized)
gcttagtctccgatgctgcccacctgacacagctgtgcatagcatgctggcctctgccaggaactctagtgaatggttcttgagttcttgctctggagtgatttttaaaacaatgatcag

SEQ ID NO: 655745 - DNA, 120 bp, Artificial Sequence
  ENSG00000183696_20 (sequence is synthesized)
ataattctggagggagtagtatagattttgaattttcctcaattgctctgtaaaaatggaaagagcaactagggagcaaaaccaaaaaccactggacacagttgataataaaaggtgatg

SEQ ID NO: 655746 - DNA, 120 bp, Artificial Sequence
  ENSG00000183696_21 (sequence is synthesized)
tgctatcctcacaaaccccaaagtatgaatgggtggagacaaaaagcctcaggatctggttgtgttggcagctgctcagggggaagctcaaggcgatggacagacctgagaacaagagtc

SEQ ID NO: 655747 - DNA, 120 bp, Artificial Sequence
  ENSG00000183696_22 (sequence is synthesized)
ccaggcactcctaggaaggtgcagggggacatggtgaagatggcagctgacactggagggggcctgtgcgtcccaatgtgagtgatgctggaattccaaggggcttgaccactccaggcc

SEQ ID NO: 655748 - DNA, 120 bp, Artificial Sequence
  ENSG00000183696_23 (sequence is synthesized)
ctgtgggttcaccaaggcatcagccaagctctcctctagctccagccccagtgctgggagaagctgctgaaatgagactctgaattgcccagaacagccgcaggagtagcaatggaaaga

SEQ ID NO: 655749 - DNA, 120 bp, Artificial Sequence
  ENSG00000183696_24 (sequence is synthesized)
ggagttcagatacatgtggggagcgaagcaaaggtctttgcaatcggccatgttttttaatgtttcatgaaaacaactgacttgggagctctggaaaagatctgacttcttgttccctcc

SEQ ID NO: 655750 - DNA, 120 bp, Artificial Sequence
  ENSG00000183696_25 (sequence is synthesized)
cacatgtttaggaaaaccaattttgcattaaaataagtatcagaaatggatcatagttatcttagtccctgcaggttgatagacaagatgccattgactgagtggcttataaacaatagg

SEQ ID NO: 655751 - DNA, 120 bp, Artificial Sequence
  ENSG00000183696_26 (sequence is synthesized)
aatttatcgcgtagtctggaggctgcgaagtccaaggtcaaggagtcagcaaacttggtgtctggtgagggctaactttcggattcatagagctctgttttctccctgtgtgctcacatg

SEQ ID NO: 655752 - DNA, 120 bp, Artificial Sequence
  ENSG00000183696_27 (sequence is synthesized)
gcagaaggggcaggcagctctccggggtccctcttataagggcactaatcccactcatgcaggctccaccctcatgacctaatcacctcccaaaggccctgctgcctgaaaccatcacat

SEQ ID NO: 655753 - DNA, 120 bp, Artificial Sequence
  ENSG00000183696_28 (sequence is synthesized)
ttagggttaggatttcagcctatgaattttgagggggaaaccagcattcagtccaggtccataacaatggtcaaatcccatctaaaattattataacacaaagaataaggggcagagtaa

SEQ ID NO: 655754 - DNA, 120 bp, Artificial Sequence
  ENSG00000183696_29 (sequence is synthesized)
ctccaggaaggcacgcccagaacatagaaactggaccctaataatgcatcaatctgagaggaaggccaggtaggtcaggagttggtcatagctcacctgggtttagggtgtgggacttca

SEQ ID NO: 655755 - DNA, 120 bp, Artificial Sequence
  ENSG00000183696_30 (sequence is synthesized)
ttatactgttctagtctgccttttgctggtttacttttcaagtatttgcctgaaatcttaaatattaacaaggtatgaaacagggatcaatgaaacacatcatggtatatggttcagtga

SEQ ID NO: 655756 - DNA, 120 bp, Artificial Sequence
  ENSG00000183696_31 (sequence is synthesized)
cagacaacagtgggaaatcgccgtgaatggaagcaagaaatatgggacaaagtacttgaaggttcctggccatttttattttattcttttttttttctttcgaaatggagtttgctcttt

SEQ ID NO: 655757 - DNA, 69 bp, Artificial Sequence
  ENSG00000183696_32 (sequence is synthesized)
tcttggcctcccaaagtgcttgggattacaggcgtgggccactgcacccagccctctactttgtttttt

SEQ ID NO: 655758 - DNA, 120 bp, Artificial Sequence
  ENSG00000183696_33 (sequence is synthesized)
aggcgtgggccactgcacccagccctctactttgttttttgtgcctttctcttccatagtgtccataatgatcatgcattaattactttcatagcttaaaaaaaagttgaatgggaaaaa

SEQ ID NO: 655759 - DNA, 120 bp, Artificial Sequence
  ENSG00000183696_34 (sequence is synthesized)
tgggtcactgtgtatttgagaacagtactggatgcttcgtgtttggatgtgtgggtggatctgcttctttcttccatatgctctgctgtgtgctccctggctgccctgctttaattttat

SEQ ID NO: 655760 - DNA, 120 bp, Artificial Sequence
  ENSG00000183706_0 (sequence is synthesized)
atgaagatagcaaacaacacagtagtgacagaatttatcctccttggtctgactcagtctcaagatattcagctcttggtctttgtgctgatcttaattttctaccttatcatcctccct

SEQ ID NO: 655761 - DNA, 120 bp, Artificial Sequence
  ENSG00000183706_1 (sequence is synthesized)
ggaaattttctcattattttcaccataaggtcagaccctgggctcacagcccccctctatttatttctgggcaacttggccttcctggatgcatcctactccttcattgtggctcccagg

SEQ ID NO: 655762 - DNA, 120 bp, Artificial Sequence
  ENSG00000183706_2 (sequence is synthesized)
atgttggtggacttcctctctgagaaaaaggtaatctcctacagaggctgcatcactcagctctttttcttgcacttccttggaggaggggagggattactccttgttgtgatggccttt

SEQ ID NO: 655763 - DNA, 120 bp, Artificial Sequence
  ENSG00000183706_3 (sequence is synthesized)
atccaggtggtcctcatcctccgcttgcctttttgtggcccaaaccagctggacaacttcttctgtgatgtccgacaggtcatcaagctggcttgcaccgacatgtttgtggtggagctt

SEQ ID NO: 655764 - DNA, 120 bp, Artificial Sequence
  ENSG00000183706_4 (sequence is synthesized)
ctaatggtcttcaacagtggcctgatgacactcctgtgctttctggggcttctggcttcctatgcagtcatcctctgccatgttcgtagggcagcttctgaagggaagaacaaggccatg

SEQ ID NO: 655765 - DNA, 120 bp, Artificial Sequence
  ENSG00000183706_5 (sequence is synthesized)
tccacgtgcaccactcgtgtcattattatacttcttatgtttggacctgctatcttcatctacatgtgccctttcagggccttaccagctgacaagatggtttctctctttcacacagtg

SEQ ID NO: 655766 - DNA, 120 bp, Artificial Sequence
  ENSG00000183706_6 (sequence is synthesized)
atctttccattgatgaatcctatgatttatacccttcgcaaccaggaagtgaaaacttccatgaagaggttattgagtcgacatgtagtctgtcaagtggattttataataagaaactga

SEQ ID NO: 655767 - DNA, 120 bp, Artificial Sequence
  ENSG00000183709_0 (sequence is synthesized)
ccctgggtgacagcctcagagtgtttcttctgctgacaaagaccagagatcaggaatgaaactagacatgactggggactgcacgccagtgctggtgctgatggccgcagtgctgaccgt

SEQ ID NO: 655768 - DNA, 120 bp, Artificial Sequence
  ENSG00000183709_1 (sequence is synthesized)
gactggagcagttcctgtcgccaggctccacggggctctcccggatgcaaggggctgccacatagcccagttcaagtccctgtctccacaggagctgcaggcctttaagagggccaaaga

SEQ ID NO: 655769 - DNA, 120 bp, Artificial Sequence
  ENSG00000183709_2 (sequence is synthesized)
tgccttagaagagtcgcttctgctgaaggactgcaggtgccactcccgcctcttccccaggacctgggacctgaggcagctgcaggtgagggagcgccccatggctttggaggctgagct

SEQ ID NO: 655770 - DNA, 120 bp, Artificial Sequence
  ENSG00000183709_3 (sequence is synthesized)
ttctggaggccaccgctgacactgacccagccctggtggacgtcttggaccagccccttcacaccctgcaccatatcctctcccagttccgggcctgtatccagcctcagcccacggcag

SEQ ID NO: 655771 - DNA, 120 bp, Artificial Sequence
  ENSG00000183709_4 (sequence is synthesized)
ggcccaggacccggggccgcctccaccattggctgtaccggctccaggaggccccaaaaaaggagtcccctggctgcctcgaggcctctgtcaccttcaacctcttccgcctcctcacgc

SEQ ID NO: 655772 - DNA, 120 bp, Artificial Sequence
  ENSG00000183709_5 (sequence is synthesized)
gagacctgaattgtgttgccagtggggacctgtgtgtctgaccctcccaccagtcatgcaacctgagattttatttataaattagccacttgtcttaatttattgccacccagtcgctat

SEQ ID NO: 655773 - DNA, 120 bp, Artificial Sequence
  ENSG00000183715_0 (sequence is synthesized)
cccgccttggaactttttgccgccttggggttccagatgcgagacctggggctgggggacacgtacatctgtccatgtgtgtgatctaataaaccatttcctcctctccttgaagccgca

SEQ ID NO: 655774 - DNA, 120 bp, Artificial Sequence
  ENSG00000183715_1 (sequence is synthesized)
gctttttatgacagctcctgtatgtcagagacacttgccttcttctttgggttataaacttttgatgccagagctctgcagaacgtgcccaactgaatcttaaagtagcgtctcgaagag

SEQ ID NO: 655775 - DNA, 120 bp, Artificial Sequence
  ENSG00000183715_2 (sequence is synthesized)
agaggcagagaaagcgcaatctgtgaccttcatccccgcaccttgcttcttcctctcccctcctggccgcctccctcctccccaggggagcgtcaagaaagctctttttggatgcaggag

SEQ ID NO: 655776 - DNA, 120 bp, Artificial Sequence
  ENSG00000183715_3 (sequence is synthesized)
ggggcatctggttctgctaggctggaaagctgaggcaggatctgaggaagaattctcagactccggagagcccggactcctctcttctccttccccctgctcctggcgaactctgcccct

SEQ ID NO: 655777 - DNA, 120 bp, Artificial Sequence
  ENSG00000183715_4 (sequence is synthesized)
tccctcctccccgcaccgcttcccgagcccgctggtgcgcggggcgggggaccaggactgtgcggctgccggagtcctgggaagttgtggctgtcgagaatgggggtctgtgggtacctg

SEQ ID NO: 655778 - DNA, 120 bp, Artificial Sequence
  ENSG00000183715_5 (sequence is synthesized)
ttcctgccctggaagtgcctcgtggtcgtgtctctcaggctgctgttccttgtacccacaggagtgcccgtgcgcagcggagatgccaccttccccaaagctatggacaacgtgacggtc

SEQ ID NO: 655779 - DNA, 120 bp, Artificial Sequence
  ENSG00000183715_6 (sequence is synthesized)
cggcagggggagagcgccaccctcaggtgtaccatagatgaccgggtaacccgggtggcctggctaaaccgcagcaccatcctctacgctgggaatgacaagtggtccatagaccctcgt

SEQ ID NO: 655780 - DNA, 120 bp, Artificial Sequence
  ENSG00000183715_7 (sequence is synthesized)
gtgatcatcctggtcaatacaccaacccagtacagcatcatgatccaaaatgtggatgtgtatgacgaaggtccgtacacctgctctgtgcagacagacaatcatcccaaaacgtcccgg

SEQ ID NO: 655781 - DNA, 120 bp, Artificial Sequence
  ENSG00000183715_8 (sequence is synthesized)
gttcacctaatagtgcaagttcctcctcagatcatgaatatctcctcagacatcactgtgaatgagggaagcagtgtgaccctgctgtgtcttgctattggcagaccagagccaactgtg

SEQ ID NO: 655782 - DNA, 120 bp, Artificial Sequence
  ENSG00000183715_9 (sequence is synthesized)
acatggagacacctgtcagtcaaggaaggccagggctttgtaagtgaggatgagtacctggagatctctgacatcaagcgagaccagtccggggagtacgaatgcagcgcgttgaacgat

SEQ ID NO: 655783 - DNA, 120 bp, Artificial Sequence
  ENSG00000183715_10 (sequence is synthesized)
gtcgctgcgcccgatgtgcggaaagtaaaaatcactgtaaactatcctccctatatctcaaaagccaagaacactggtgtttcagtcggtcagaagggcatcctgagctgtgaagcctct

SEQ ID NO: 655784 - DNA, 120 bp, Artificial Sequence
  ENSG00000183715_11 (sequence is synthesized)
gcagtccccatggctgaattccagtggttcaaggaagaaaccaggttagccactggtctggatggaatgaggattgaaaacaaaggccgcatgtccactctgactttcttcaatgtttca

SEQ ID NO: 655785 - DNA, 120 bp, Artificial Sequence
  ENSG00000183715_12 (sequence is synthesized)
gaaaaggattatgggaactatacttgtgtggccacgaacaagcttgggaacaccaatgccagcatcacattgtatgggcctggagcagtcattgatggtgtaaactcggcctccagagca

SEQ ID NO: 655786 - DNA, 120 bp, Artificial Sequence
  ENSG00000183715_13 (sequence is synthesized)
ctggcttgtctctggctatcagggaccctcttagcccacttcttcatcaagttttgataagaaatcctaggtcctctgagcaacgcctgcttctccatatcacagactttaatctacact

SEQ ID NO: 655787 - DNA, 120 bp, Artificial Sequence
  ENSG00000183715_14 (sequence is synthesized)
gcggagagcaaaccagcttgggcttctttttgtttttttctgttattctagatttgttttctttttgtttttgtttatttgtttgtttgcttttatttccagcttgaatgagtggggttg

SEQ ID NO: 655788 - DNA, 120 bp, Artificial Sequence
  ENSG00000183715_15 (sequence is synthesized)
ggggcggggtgggcagggttctaccacgtgtaggataatcattcattggtgtgtccaaaaatggggtctgctcctgctaccttgacccttccctttcctctgcttctctcctcatcatca

SEQ ID NO: 655789 - DNA, 120 bp, Artificial Sequence
  ENSG00000183715_16 (sequence is synthesized)
ttcccaacaacatcctctgccacacacaacaaaacgtaagtttcatttgggcaaaaattgagcctcacaataaacaccctgaagacacaacttgacttataacatagtgcacagcaagag

SEQ ID NO: 655790 - DNA, 120 bp, Artificial Sequence
  ENSG00000183715_17 (sequence is synthesized)
ctacatccaagtgtcctattatctgtgattattttcttaatgacaatgtacatatgcccccatccatgttaattattatctaattccattagggttcacgtcttttctttctgggacact

SEQ ID NO: 655791 - DNA, 120 bp, Artificial Sequence
  ENSG00000183715_18 (sequence is synthesized)
atcctactatatccatatctatagatttcaatatagatgattgtgccatcttctgtagcccctccgctctactcattccttccaccatctgcagagatttgaagtttggggctatgcatg

SEQ ID NO: 655792 - DNA, 120 bp, Artificial Sequence
  ENSG00000183715_19 (sequence is synthesized)
aaacccaacactaaattttgcaagtcaagtaaccaaaaaagggggaggcattttgaagatagaacctctattttaaaaagagaagttcaactcataaacgtgattgataggtggctgatt

SEQ ID NO: 655793 - DNA, 120 bp, Artificial Sequence
  ENSG00000183715_20 (sequence is synthesized)
tatttaggttttgtcaagctatctatcaaagtaatggtacagttacccatctactcaaatatctgatttatctcaccatccaattatctacccacctgtcttcctctctagcaatctatt

SEQ ID NO: 655794 - DNA, 120 bp, Artificial Sequence
  ENSG00000183715_21 (sequence is synthesized)
tactgtttatcaatctatcaatgtaattgtctaacactcctttctattctctccctactactcactatcaattcatccccatatgaatctctaaccatattgtatctctcccactgtatt

SEQ ID NO: 655795 - DNA, 120 bp, Artificial Sequence
  ENSG00000183715_22 (sequence is synthesized)
catttatacaccatcagcagacattggcatcttcaaaattatctttcaacttctgtgaaagccaacgatctcacaggttaacaaaatacaaaagcaataccctgtgttgtggactcttta

SEQ ID NO: 655796 - DNA, 120 bp, Artificial Sequence
  ENSG00000183715_23 (sequence is synthesized)
aaatctggtatcctatccacccaagggagacactaacagataggccaaagtagcaagctaatgatcagtcactcactattcccagaagagcctgtgttttctaaaacactttcttgggaa

SEQ ID NO: 655797 - DNA, 120 bp, Artificial Sequence
  ENSG00000183715_24 (sequence is synthesized)
gcagatcagcctagaaaagttttgattagcactgtggttttccttttgcacttgaaggacaaaggtgccagcctttatgcttctctcaacccttcaagaaagtacatgtcaggaacctat

SEQ ID NO: 655798 - DNA, 120 bp, Artificial Sequence
  ENSG00000183715_25 (sequence is synthesized)
ggctggctttccttagcagcaagaacttgagagaaaaacacatctgtctctgcaatgcaaagtgaagagtccacccgcctgagtgggatgacttcagctagagtctcctttctgctccag

SEQ ID NO: 655799 - DNA, 120 bp, Artificial Sequence
  ENSG00000183715_26 (sequence is synthesized)
ttctggtttaatctgtttgaaaactatccagtaaaaagctgatggaggccaattacatggcgggtgtattgacaactctggtatttgtttcaggaagctcttctaagctgagggcacttg

SEQ ID NO: 655800 - DNA, 120 bp, Artificial Sequence
  ENSG00000183715_27 (sequence is synthesized)
agcaactgacttaattttcaagcacttgattaacacaacactgcaaacagaagggagaaagtgtcagtgacacagtttcctctgatgcagctgcttctccaatggctttggggaagaact

SEQ ID NO: 655801 - DNA, 120 bp, Artificial Sequence
  ENSG00000183715_28 (sequence is synthesized)
caaaataaaggcattgcagaccgcacaggtgtgctgcagggactgatccacagagaggatgagaatgcagcatcaatcgcagacctgccctgcctcagttggaaaaccttttcaggccct

SEQ ID NO: 655802 - DNA, 120 bp, Artificial Sequence
  ENSG00000183715_29 (sequence is synthesized)
cagtctaaaaaataaaaaatatgagcaccattgaattctgtgcccttaatgcttaactggtcttcttcctctggtatcagtgtcctctttgtttttgtccatcaaggcacatgagtgtga

SEQ ID NO: 655803 - DNA, 120 bp, Artificial Sequence
  ENSG00000183715_30 (sequence is synthesized)
cctctgccatggggaaacacacacagagatatctatacatatatacatacatacaaacataggctatcttggcacactaaatgctaagcactgtcttaagaggtagagctggtgtgagtg

SEQ ID NO: 655804 - DNA, 120 bp, Artificial Sequence
  ENSG00000183715_31 (sequence is synthesized)
aaattaatgttacattttccagctgtaaacagacatctgcatttcctagtgagctgccaggagccagattcgggaaccgtaactgatgtgccaggaatggtgcattgattcccagttcca

SEQ ID NO: 655805 - DNA, 120 bp, Artificial Sequence
  ENSG00000183715_32 (sequence is synthesized)
gggatgatcatgagcaggcgcaaaatcagaattaaaggtcgcacatagacgtttcagatctgtcaccaccttcagcatctggagttgagttggtgtcagatagtgtatgagaattaaatg

SEQ ID NO: 655806 - DNA, 120 bp, Artificial Sequence
  ENSG00000183715_33 (sequence is synthesized)
tgtcatctgagcatgctactgatgataaatttgttactttggagttgaataaatgtgaaggctgtgaagagtggacagtcttggagaacacagtgcttgaaatggacaagctggacctat

SEQ ID NO: 655807 - DNA, 120 bp, Artificial Sequence
  ENSG00000183715_34 (sequence is synthesized)
tcctcactccaagacttgttctacaggaaagggtccatgctcctttggccaagatcatcagaacctctcaacccaacaaggctggcttcagggccactatggaaccctgctgttccccct

SEQ ID NO: 655808 - DNA, 120 bp, Artificial Sequence
  ENSG00000183715_35 (sequence is synthesized)
tccaaaggatactaagatgcccctctggtgggtacctatcccagccacgtttcagagggagagaaatgctacagttgatcctcatctgtctggggtaaagacaacaaagtaaatacaacc

SEQ ID NO: 655809 - DNA, 120 bp, Artificial Sequence
  ENSG00000183715_36 (sequence is synthesized)
caaggcaactggggtactcactgggagtgaaaatgacttcttcacaacagacatatttctgcttctgtgtttttgtgtttctttggtggggatggcttcatgggagagtggctgtcaccc

SEQ ID NO: 655810 - DNA, 120 bp, Artificial Sequence
  ENSG00000183715_37 (sequence is synthesized)
atcattttgaagcatatagaacaacaaatgcttacacaagacaatatccacacttttccaacttcacacacggagagtacatggagaatgcctacaggctagatttgttcagggtgccag

SEQ ID NO: 655811 - DNA, 120 bp, Artificial Sequence
  ENSG00000183715_38 (sequence is synthesized)
tagtgggcatggggtgggggcaaggcaggacaaaacatacaagtctgagcaagtacatctcttgcaggttttccacatgaaaaggaagccaaataagtcctgttaggagattaggtgaga

SEQ ID NO: 655812 - DNA, 120 bp, Artificial Sequence
  ENSG00000183715_39 (sequence is synthesized)
ggaattagcaatgtagggactctgaaacccttccccttcccaaaacagagttcatatgcacttccaccaaagtaatgccaatgaaagtgctcgtgttaaggctgcagccaagcttgtttt

SEQ ID NO: 655813 - DNA, 120 bp, Artificial Sequence
  ENSG00000183715_40 (sequence is synthesized)
tcagtagtttaatgtcaagtgcctgatacagtcgactgcaagtctaaacaagcatgtttagtttttctcattcttgctttaattcagggagggggagatgtagagaagtggttgtgaaaa

SEQ ID NO: 655814 - DNA, 120 bp, Artificial Sequence
  ENSG00000183715_41 (sequence is synthesized)
catgtacaggctttatgcagagcactgcgcatggctgttctgctgcaactgtgctccacgaaacagaagaaaaggtaaggtgttgtgtcacaaagaggccccagtctctttcttcttaca

SEQ ID NO: 655815 - DNA, 120 bp, Artificial Sequence
  ENSG00000183715_42 (sequence is synthesized)
tccatgcctcttactagatgatacatttacagattgggcagtttgttctcaaaacctgggtgagaagactattcctggactctagcaacttcaaaactgaggctgggtttcagaatcttt

SEQ ID NO: 655816 - DNA, 120 bp, Artificial Sequence
  ENSG00000183715_43 (sequence is synthesized)
ttctgcatcaattcagtcaatttgccttcaacaaagagaagtcagcaagttctatttatgctgaaagaactattccatgagaaaagcagagaaccccaaagtgggcaggcaaccccgacg

SEQ ID NO: 655817 - DNA, 120 bp, Artificial Sequence
  ENSG00000183715_44 (sequence is synthesized)
agagcttatccctgtggcggcatcaggagtggctgtacattgaattttcaagtgctggttggctgtcgccagcccatggtaggaggggaggaatggcttaagatgaggtaagatctggtg

SEQ ID NO: 655818 - DNA, 120 bp, Artificial Sequence
  ENSG00000183715_45 (sequence is synthesized)
gtggggcatctttcctcaattccatactgactttgatcttgagaaagaaaaactggctatgcattacctaaaaccagtccaaaatgaaacagaccaacacacacacaaaagcaaattgtc

SEQ ID NO: 655819 - DNA, 120 bp, Artificial Sequence
  ENSG00000183715_46 (sequence is synthesized)
aatccctttggaattaagggaagcagcataaggtttttctttttggaaaaaatgcatttattttctttttctccaacagcaagaatcttttgttttcattttgcacgtgaccttatcttg

SEQ ID NO: 655820 - DNA, 120 bp, Artificial Sequence
  ENSG00000183715_47 (sequence is synthesized)
gaaactcttatacccaattgcctcccctcctattattcagagcttccctgtctttttacttgaagacaaataagtttgagcacttgagtaaaacttcacaggtgtgtaagtaggaaggca

SEQ ID NO: 655821 - DNA, 120 bp, Artificial Sequence
  ENSG00000183715_48 (sequence is synthesized)
acattttcaaaaagagaccatatgatgagaacgcctaatgatcaccacatgcaaacaaacaaaactgccagtctcatttcccacatttcttacttaagagaagagaagtaaatgaaagga

SEQ ID NO: 655822 - DNA, 120 bp, Artificial Sequence
  ENSG00000183715_49 (sequence is synthesized)
agaagaaatagatttgtaattaaagatgtggcaaaaaagatagggctgagccagttcaatttagccttcaggtgcagaatacttagagtccaaagaaatgtggagtggacttaattagat

SEQ ID NO: 655823 - DNA, 120 bp, Artificial Sequence
  ENSG00000183715_50 (sequence is synthesized)
gcagttgtctttatcctgaaagtagtgagctaagcctaatttccagcattttgaaagagattcctttttgtttctttccatggtgccctctttaaggcacagagttgctccacaccactg

SEQ ID NO: 655824 - DNA, 120 bp, Artificial Sequence
  ENSG00000183715_51 (sequence is synthesized)
ggtggagaaagaaagattgcgaaccctcgaccatccttttgaggctacattctatgttatttggcagatttataaagctatcagtaataacaatgctatgtactgcaagctgcccttgtg

SEQ ID NO: 655825 - DNA, 120 bp, Artificial Sequence
  ENSG00000183715_52 (sequence is synthesized)
ttagttaaagggagcatttttaatcgttcggaaattttcgtgacatgtcaagtgcagttgtgaggactgtgtgggtgaacgaaaatgtgtctgtcaagttcagagtcctttagatttaaa

SEQ ID NO: 655826 - DNA, 120 bp, Artificial Sequence
  ENSG00000183715_53 (sequence is synthesized)
aaaaaattatgacttatcaatggtgccgttatagctgtgtcagacaatgggtgtgcccattctcacaattatccttcaaaaaaaatctatgttcaaatgctttaaaaatttatcacacga

SEQ ID NO: 655827 - DNA, 120 bp, Artificial Sequence
  ENSG00000183715_54 (sequence is synthesized)
tacaagagtatgactttgtcagccttctagagttctttttttcttttattttctttcgtattttttccttcaaaaaatcaatgaagacttgatttctgtcaataattgtatcaagggtga

SEQ ID NO: 655828 - DNA, 120 bp, Artificial Sequence
  ENSG00000183715_55 (sequence is synthesized)
atatactacctgaattttgtgcatgttacattgtagttgtaaccttttctaattcaggatgaatacgagatggttgtgattgtgcagtgtaccaataaagttcgagaaatttgtaacttt

SEQ ID NO: 655829 - DNA, 120 bp, Artificial Sequence
  ENSG00000183715_56 (sequence is synthesized)
tgtgcaagaaaagaaatcagagacgctgcctgcctgctcccatctctcgcgcgctctctctctcttctgctctctccctccctttgcaaacattggatttaaacctgctcagaattcagc

SEQ ID NO: 655830 - DNA, 120 bp, Artificial Sequence
  ENSG00000183715_57 (sequence is synthesized)
acagaggaaggcagcagcggtagcagcagcagaagcagtagcaagcccggcagctgagagcaccgcagcgtcgagatgtaccatcctgcctactgggtcgtcttctcggcgacaactgcc

SEQ ID NO: 655831 - DNA, 120 bp, Artificial Sequence
  ENSG00000183715_58 (sequence is synthesized)
aacagtaagtacagttacgtgaatctagcttttctggtgtccccaagcgttcaaacagcttttttggtaaaatgaatcctgggaaactaaaagtacccctaccttttgcgtttcctgctg

SEQ ID NO: 655832 - DNA, 120 bp, Artificial Sequence
  ENSG00000183715_59 (sequence is synthesized)
gtccctccagtttgagttagttttcctctagaggctttggagggaaagttttcctcttgccacactcaccttgaagcaggacgtaatggattgccgtggctttcactatgcatcttgtct

SEQ ID NO: 655833 - DNA, 120 bp, Artificial Sequence
  ENSG00000183715_60 (sequence is synthesized)
caatacaggccttcgggggacaggcctgcgacattacccagtctacaaaggcagattgaatatgaaagcctcaaccatcacatcaagccacagatcaatcatagccaccacacagagaaa

SEQ ID NO: 655834 - DNA, 120 bp, Artificial Sequence
  ENSG00000183715_61 (sequence is synthesized)
cgggcggcgctcccccggctggccgcgagtcgccgaccgggctgcagaggacggccaccgaccggacgaccctggctgcgccggctgcgcgtccccgccttggaactttttgccgccttg

SEQ ID NO: 655835 - DNA, 120 bp, Artificial Sequence
  ENSG00000183718_0 (sequence is synthesized)
gctgcatctgaggcggacgccgcagtgtagggcacaccctgagggtagcgagagacgtgacaggaccgagcagctgggggctgcagcctgctctgtccccaccgatcccagagagaggct

SEQ ID NO: 655836 - DNA, 120 bp, Artificial Sequence
  ENSG00000183718_1 (sequence is synthesized)
gtgagtctggatctgggcgttcgcaccctgagagagggggtcaaagctcccctgcggccccgaggaagaagagcaaggttgaggacagcctcgggtcaccagagtagtttggaggcaggc

SEQ ID NO: 655837 - DNA, 120 bp, Artificial Sequence
  ENSG00000183718_2 (sequence is synthesized)
ctgcaggcgcgtccccgctcctcagctccaagctgacgtatctacacctgccggcgggcattaagatggctggttatgccactactcccagccccatgcagacccttcaggaggaagcgg

SEQ ID NO: 655838 - DNA, 120 bp, Artificial Sequence
  ENSG00000183718_3 (sequence is synthesized)
tgtgtgccatctgcttggattacttcaaggaccccgtgtccatcagctgtgggcacaacttctgccgagggtgtgtgacccagctgtggagtaaggaggacgaggaggaccagaacgagg

SEQ ID NO: 655839 - DNA, 120 bp, Artificial Sequence
  ENSG00000183718_4 (sequence is synthesized)
aggaagatgaatgggaggaggaggaggacgaggaagcggtgggggccatggatggatgggacggctccattcgagaggtgttgtatcgggggaatgctgacgaagagttgttccaagacc

SEQ ID NO: 655840 - DNA, 120 bp, Artificial Sequence
  ENSG00000183718_5 (sequence is synthesized)
aagatgacgatgaactctggctcggtgacagtggtataactaattgggacaacgtagactatatgtgggacgaggaggaagaagaagaagaggaagatcaggactattacctaggaggct

SEQ ID NO: 655841 - DNA, 120 bp, Artificial Sequence
  ENSG00000183718_6 (sequence is synthesized)
tgagacctgacctgagaattgatgtctaccgagaagaagaaatactggaagcatacgatgaggacgaagatgaagagctgtatcctgacatccacccgcctccttccttgccccttccag

SEQ ID NO: 655842 - DNA, 120 bp, Artificial Sequence
  ENSG00000183718_7 (sequence is synthesized)
ggcagttcacctgcccccagtgccgaaagagctttacacgtcgcagctttcgtcccaacttgcagctggccaacatggtccagataattcgccagatgtgccccactccttatcggggaa

SEQ ID NO: 655843 - DNA, 120 bp, Artificial Sequence
  ENSG00000183718_8 (sequence is synthesized)
accggagtaatgatcagggcatgtgctttaaacaccaggaagccctgaaactcttctgtgaggtggacaaagaggccatctgtgtggtgtgccgagaatccaggagccacaaacagcaca

SEQ ID NO: 655844 - DNA, 120 bp, Artificial Sequence
  ENSG00000183718_9 (sequence is synthesized)
gcgtgctgcctttggaggaggtggtgcaggagtaccaggaaataaagttggaaacaactctggtgggaatacttcagatagagcaagaaagcattcacagcaaggcctataatcagtaag

SEQ ID NO: 655845 - DNA, 120 bp, Artificial Sequence
  ENSG00000183718_10 (sequence is synthesized)
atgtgtgaaaagttgggtagccacaggaggtgttcattaaggatatgattccatttatatagctatttctattgcataaccaggacagttttattgttttgaggtcaatgttcttttaaa

SEQ ID NO: 655846 - DNA, 120 bp, Artificial Sequence
  ENSG00000183718_11 (sequence is synthesized)
atttgattttctgtaagaagaggctttttggcccagaaagccttacttattttacatcttccagtttgtccatcccatgagttagagttcgtcttgactctgcaagctagaatcaaagaa

SEQ ID NO: 655847 - DNA, 120 bp, Artificial Sequence
  ENSG00000183718_12 (sequence is synthesized)
ttatgaaagtaagatcatttagatttgaccaagggcaccattaaatggtgtcaggttttaggaagcagacgggtgtataaaaagaaaatgaacaaagatttcacttattggggatcaggc

SEQ ID NO: 655848 - DNA, 120 bp, Artificial Sequence
  ENSG00000183718_13 (sequence is synthesized)
ataactggatgcctggattgtcctgccacccagctgccaccaataaaatcattcatcactctgcaagagggaccagatgcttccatcatcagtactccttgtttttctgttatctccttt

SEQ ID NO: 655849 - DNA, 120 bp, Artificial Sequence
  ENSG00000183718_14 (sequence is synthesized)
gaaagtgttgggcagtgacaccatgccaaacactgttaaattcatgccattaaaaacagtggagtgttctgcaaagcccgattctctgcagctttaagactggacagtattgaaatattc

SEQ ID NO: 655850 - DNA, 120 bp, Artificial Sequence
  ENSG00000183718_15 (sequence is synthesized)
acaggaatcttccaagccgtgaaagcttaatattaaacagcccttttaattgcaaaggagaaaaaaatggagacacttgtgaaaccttgcattctgagtgctgccacaaataaattaagg

SEQ ID NO: 655851 - DNA, 120 bp, Artificial Sequence
  ENSG00000183718_16 (sequence is synthesized)
aattccagaatttcttcatctacttctgcagtcttaactctgaattaatgactgtatatatcaaacttcagatcttaaaaaacatcagctcgcaagaggctgaggcaggagaatgacatg

SEQ ID NO: 655852 - DNA, 64 bp, Artificial Sequence
  ENSG00000183718_17 (sequence is synthesized)
cggctcatcttttattgctgttggttgagatgaatctactgatgaagaaaactgtactttgctt

SEQ ID NO: 655853 - DNA, 120 bp, Artificial Sequence
  ENSG00000183718_18 (sequence is synthesized)
ttgagatgaatctactgatgaagaaaactgtactttgcttacattcagaataaggctttcaaaactgtgggtgtgctgttttcgtgagccttctacttgaccaccaaagacagtattttt

SEQ ID NO: 655854 - DNA, 120 bp, Artificial Sequence
  ENSG00000183718_19 (sequence is synthesized)
gcagctgtatcaaatgaaccgagttggaggaaattgtataggagtatatcttaatggcactacagcaaactgtgttaaatttgggtttttggcaaagattgaagaaaactggtattcaag

SEQ ID NO: 655855 - DNA, 120 bp, Artificial Sequence
  ENSG00000183718_20 (sequence is synthesized)
atgtactgcagctgtcaccaccaagcatgaactttcactgattacccataacctactggaaatcttcagccttgctgtcagcatagaccactgtgagaaacagtacattccattccagtt

SEQ ID NO: 655856 - DNA, 120 bp, Artificial Sequence
  ENSG00000183718_21 (sequence is synthesized)
tgccctgctttttgaagatctaaatgccattccatgttttctgttacatattgaagtttcttggttgccaaagaaaaacggattctgctgaacttgtggacagaacaaccccaaggttgg

SEQ ID NO: 655857 - DNA, 120 bp, Artificial Sequence
  ENSG00000183718_22 (sequence is synthesized)
aagaacaatgaaaaataatctatacttgaacatttcaaaagttaaaattttcaacagagttttaacacactgaagcttaaaatacattgacactgaaatgtcaatgggcaaacaccaatt

SEQ ID NO: 655858 - DNA, 120 bp, Artificial Sequence
  ENSG00000183718_23 (sequence is synthesized)
tcgccgttcattatgaaatacatcaaacaaaacttgccaaaaatacaaccataaaaatatagcaaatgtatgtatgagcaaactaatgctaaaaatgtctaattttcttggctagtcttt

SEQ ID NO: 655859 - DNA, 120 bp, Artificial Sequence
  ENSG00000183718_24 (sequence is synthesized)
caaggaccagattcatgagtgttatttgaagggaaaaagtgaaatacttggaattattttgagtgatgtgctcctgagcttgttcttaaaatctaccagtggtagcttttggaaagaatg

SEQ ID NO: 655860 - DNA, 120 bp, Artificial Sequence
  ENSG00000183718_25 (sequence is synthesized)
tgtttcataccgatgtgcaggcctcactggaagagcttcaagaggagtttgtgaaactcaaagtctaatggttttgattagaaacttccaggcaaatactccagagaaacttgggtgtaa

SEQ ID NO: 655861 - DNA, 120 bp, Artificial Sequence
  ENSG00000183718_26 (sequence is synthesized)
aatgactaaacagatgaaaaggctttatccactattccatttgctccttacaccttaaaaagcttttttattttttaatgttttgatatatctagctttggggagaaagcagtgcaagag

SEQ ID NO: 655862 - DNA, 120 bp, Artificial Sequence
  ENSG00000183718_27 (sequence is synthesized)
tgttattaaaagcagcttgtgttttcttgcacctttcacaccacccaggaaagaaaagttcaggcttaacagtgacatggctatcacatcatctgaataaattttttccttctaaaatta

SEQ ID NO: 655863 - DNA, 120 bp, Artificial Sequence
  ENSG00000183718_28 (sequence is synthesized)
ggagagagatggtcatatgggtaaaaaaggagacacaaaaccatgaagattggggcagattggcttccccagaggaagctgaacagataatatgacggtcactggaagcggaccactact

SEQ ID NO: 655864 - DNA, 120 bp, Artificial Sequence
  ENSG00000183718_29 (sequence is synthesized)
gctaatactggcagtctacctaagtgtaagggacgtgagtaacagatacccagtacttcatttctccctaatgtgagtccttgaccaattccctgggacaggtacagataggaatagaaa

SEQ ID NO: 655865 - DNA, 120 bp, Artificial Sequence
  ENSG00000183718_30 (sequence is synthesized)
gccacagtacttggagataatagacatttgggacctcagcacaagcagtgtcaaaatagatgtattggtagacagaaatgccagatgtgagtcctaaactactgatagcaattggccaca

SEQ ID NO: 655866 - DNA, 120 bp, Artificial Sequence
  ENSG00000183718_31 (sequence is synthesized)
ccccccctctgaaagtctgggattgcatctctaccttcagtggggtccgttttccttctagagaaaggcaaagcatataagcatctttgatggatcagaatgtgcctcatatcctgatca

SEQ ID NO: 655867 - DNA, 120 bp, Artificial Sequence
  ENSG00000183718_32 (sequence is synthesized)
cttttctttcctggtattttatcatagtggaaggagtgcgggatttaggatcagatgacctggctctgccacttactgtctagtcttgggcaggtgtcaacctccttgagcttcactttt

SEQ ID NO: 655868 - DNA, 120 bp, Artificial Sequence
  ENSG00000183718_33 (sequence is synthesized)
ttcctctacttctgtggctgtaccctggatctcatcttcagattggctacacatctgaaatcaactcccattgcactatgaccttagctcttagccttccaatacacttaagcacactcc

SEQ ID NO: 655869 - DNA, 120 bp, Artificial Sequence
  ENSG00000183718_34 (sequence is synthesized)
gactccatattttttccttcccaatttatcagacatttaacagccttactatcctactgagcctagactgcatgattcattttggcataaagacctgatacaggccgggcgcggtggctc

SEQ ID NO: 655870 - DNA, 120 bp, Artificial Sequence
  ENSG00000183718_35 (sequence is synthesized)
ccataaagcactaaacaaatgtttgctgttttatttggctttcttgtaacttgtcttcccttgtttgggtgctgatatggttaatgccttgctttctagtcttgacttctaagcattaga

SEQ ID NO: 655871 - DNA, 120 bp, Artificial Sequence
  ENSG00000183718_36 (sequence is synthesized)
taattgtctcaatgacaatgagcatgagtaccatcttccttaccaaaagtctaggtagatttgactcctagcagtgcccaaacgaaggagaggttgtcttcaggcccataaaggttgacc

SEQ ID NO: 655872 - DNA, 120 bp, Artificial Sequence
  ENSG00000183718_37 (sequence is synthesized)
tggatatgcagcagccgctgctcacgtcttagtagtgctttacagtttataaaatatatttcctcgtgttctcctatagcagtggttttcaaattgttttttgaccaattagtgtgtctt

SEQ ID NO: 655873 - DNA, 120 bp, Artificial Sequence
  ENSG00000183718_38 (sequence is synthesized)
aagggtaagtactgctttatgaaacttttaagttatatatatatacatgtatatacttcatctaaaaatatattgctttctttgagttgcagtcaaaacacaaacacagagcactgtcct

SEQ ID NO: 655874 - DNA, 120 bp, Artificial Sequence
  ENSG00000183718_39 (sequence is synthesized)
acaggcttcatgtattagatattattatcacccccctgcccccattttatagcaaatattgggaagtgcacagttaaggcacaaatctaaccataagtcactgctacctctgttacatta

SEQ ID NO: 655875 - DNA, 120 bp, Artificial Sequence
  ENSG00000183718_40 (sequence is synthesized)
acctgacttgaaggacaaatcctagtaccatgttttcacccaaggtgataactaaagtatcccatggaaaaaacttatgtcctatgcttctgggttttagtatactgaagctgaggaaaa

SEQ ID NO: 655876 - DNA, 120 bp, Artificial Sequence
  ENSG00000183718_41 (sequence is synthesized)
ttagtatactgaagctgaggaaaagagagaaccttccatttctcttctaacttttttttttgagacggtatcttgctctgttgcccaggcagaagtgcaatggcatgatctcggctcact

SEQ ID NO: 655877 - DNA, 80 bp, Artificial Sequence
  ENSG00000183718_42 (sequence is synthesized)
ctcagctaacttttatcatcatccccttcccccattttatagtaaatattgttaagtgcacagttaagacacaaatcttt

SEQ ID NO: 655878 - DNA, 120 bp, Artificial Sequence
  ENSG00000183718_43 (sequence is synthesized)
agtaaatattgttaagtgcacagttaagacacaaatctttttttatttttatttatttatttatttacttatttatttgagctggagtctcgctctgtcatcaggctagagtgcagtggt

SEQ ID NO: 655879 - DNA, 120 bp, Artificial Sequence
  ENSG00000183718_44 (sequence is synthesized)
tctttcattctttaggcagttcattgtcacttccttccattggtaaacatgtaaattatagtcgcatgatttagaattttactgaccaaagtcataataatagttaacagtacaaggaac

SEQ ID NO: 655880 - DNA, 120 bp, Artificial Sequence
  ENSG00000183718_45 (sequence is synthesized)
tatttttgtataatggtttatttaatacagtatacattatctttcatatactttgttacaatgttaaaaaaacttcatttttcataatataggaaataaagttggaaacaactctggtgg

SEQ ID NO: 655881 - DNA, 120 bp, Artificial Sequence
  ENSG00000183722_0 (sequence is synthesized)
aaagggagatccgctcctctgcgtgcgatccccggcgcccgcgcgcgcccacagcgctccgccagagctgccgccgcggactcgccgggagtgggggtctccgctggtgccagcccgctt

SEQ ID NO: 655882 - DNA, 120 bp, Artificial Sequence
  ENSG00000183722_1 (sequence is synthesized)
ctggagaccctccgcctcctgccaacccctgctcttccaggtcgggccccggggttctgcggctgttagggacagaggcaaagaagggcaggacggtccggtttcccgtggatgttcccg

SEQ ID NO: 655883 - DNA, 120 bp, Artificial Sequence
  ENSG00000183722_2 (sequence is synthesized)
cccgagaaagacagcaagttgtgtgtgcgcccgggacgcgggagggaaggtggccgccgcccgccagccatggaccatcatctttagtgcagaggatggaaagttgatgcccagtaagac

SEQ ID NO: 655884 - DNA, 120 bp, Artificial Sequence
  ENSG00000183722_3 (sequence is synthesized)
tgaagatccattctgcattacggaactgtggattatctgtgggtccctggtgatttcacaccttcattcactcctgcagtccctgaacacttacttggggtcctcattgccctatctggt

SEQ ID NO: 655885 - DNA, 120 bp, Artificial Sequence
  ENSG00000183722_4 (sequence is synthesized)
gaaagatggcatccagcctgacttgtactggagtaatctgggctttgctgtcttttctttgtgctgccacctcctgcgtggggttctttatgccttactggctctggggatcacagctgg

SEQ ID NO: 655886 - DNA, 120 bp, Artificial Sequence
  ENSG00000183722_5 (sequence is synthesized)
gcaagcctgtgtccttcggtaccttccggaggtgctcatatcctgtgcatgatgagagtcggcagatgatggtgatggtggaggaatgtgggcgctatgcctccttccagggcatcccca

SEQ ID NO: 655887 - DNA, 120 bp, Artificial Sequence
  ENSG00000183722_6 (sequence is synthesized)
gcgcagaatggaggatctgcaccatagtgaccggcctgggttgtggcctcctcctcctggtggcgctcactgccctcatgggttgctgtgtttccgacctcatctccaggacagtgggaa

SEQ ID NO: 655888 - DNA, 120 bp, Artificial Sequence
  ENSG00000183722_7 (sequence is synthesized)
gagtggctggaggaattcagtttcttgggggcttgttgattggtgctggctgtgccctctaccccttgggctgggacagtgaggaagtccggcagacttgtggctacacttctggccagt

SEQ ID NO: 655889 - DNA, 120 bp, Artificial Sequence
  ENSG00000183722_8 (sequence is synthesized)
ttttcgggcaagaaacagaagcactacccatactgagatggagctaccaagagcagacagaggagaagatgggccaaaggggcttggagaggtcaaaacatccacctaccttcaaaaggt

SEQ ID NO: 655890 - DNA, 120 bp, Artificial Sequence
  ENSG00000183722_9 (sequence is synthesized)
gggatagtagttctaatccaatacaatgctaataaaatgaaacccgataaaatcaggaacatgatataggaaggaaggattgtaggagatttgtgggggaaaaaaaaggagagtatagaa

SEQ ID NO: 655891 - DNA, 120 bp, Artificial Sequence
  ENSG00000183722_10 (sequence is synthesized)
aaaggagagtatagaatgatggagaaaaatggaccaaaggctaaaaatattgcagggcatcgggtgtttctattccacagagtattgttaatgtacaacacacacacacacacacacaca

SEQ ID NO: 655892 - DNA, 120 bp, Artificial Sequence
  ENSG00000183722_11 (sequence is synthesized)
cacacacaacaaatctacatatacaaacaagggtttgggttttagttttttttttttaaggtgaggactcagaaaatcaaagggctagtagaaacagtgttatgttgggaagcagggtac

SEQ ID NO: 655893 - DNA, 120 bp, Artificial Sequence
  ENSG00000183722_12 (sequence is synthesized)
ccccaaagatgttccctgtaggtcacggcactcccaaaagcacacaagcacatacagacatatgcatccccacacacgcctatgcacaaacgtggattatcgcacagactgggaggttta

SEQ ID NO: 655894 - DNA, 120 bp, Artificial Sequence
  ENSG00000183722_13 (sequence is synthesized)
gtggtgcatttctcctctgttttctttttaatatacatttaaaatacagtattatcactttataaaacatacattaagcctaataaatggaccaataagccaaactatcagtattttgta

SEQ ID NO: 655895 - DNA, 120 bp, Artificial Sequence
  ENSG00000183722_14 (sequence is synthesized)
tatcctgcataaactctaatttagttcctcaacatattttcagtgtttatgcagacctttagagttaagcctttgtatttccatgttattccacaatatgcaatatttctctgagtagct

SEQ ID NO: 655896 - DNA, 120 bp, Artificial Sequence
  ENSG00000183722_15 (sequence is synthesized)
tctgctatgatattcttatgaagaaaaggggcaactttctgtccactataggagagaattcagccgaagatatgagagtaatgagagacattttccagtcattggatcgtgttttctttt

SEQ ID NO: 655897 - DNA, 120 bp, Artificial Sequence
  ENSG00000183722_16 (sequence is synthesized)
gtccattattgtactgtgctgtaccacatttatttctatattcattttgtaaaaaatttaaaagtgctattttgtttgtatttgaaaatctctgtgaataaattctctctttgatcaata

SEQ ID NO: 655898 - DNA, 79 bp, Artificial Sequence
  ENSG00000183722_17 (sequence is synthesized)
acgtgtgccaccatgcctgggtgtggctactaagggctctccctaagaaacatcatgctcactaagttcccaggaagcc

SEQ ID NO: 655899 - DNA, 120 bp, Artificial Sequence
  ENSG00000183722_18 (sequence is synthesized)
ggtgtggctactaagggctctccctaagaaacatcatgctcactaagttcccaggaagccttccctgcaacagaagccctctaactgcacctcacggagtctcgctgtcgcccaggctgg

SEQ ID NO: 655900 - DNA, 68 bp, Artificial Sequence
  ENSG00000183722_19 (sequence is synthesized)
acactggagcagtattggcctgagcattccagcacttgtatctcaagatggaggtctcacgatgttac

SEQ ID NO: 655901 - DNA, 120 bp, Artificial Sequence
  ENSG00000183722_20 (sequence is synthesized)
gtctcacgatgttacccaggctggagagcagtggctactcacaggcgggaatcccaagatggcctccaactcctggactcatgctatctcacctcagcttcctgagtagctgagactaca

SEQ ID NO: 655902 - DNA, 120 bp, Artificial Sequence
  ENSG00000183722_21 (sequence is synthesized)
ggcacacaccaccatgtccagcttcaatatccttttatgtaagatgatggaactgagctcattgatgtgaggtgacttgttgaatgtcatgcggctgcaaatcatgaggctggcatctga

SEQ ID NO: 655903 - DNA, 120 bp, Artificial Sequence
  ENSG00000183722_22 (sequence is synthesized)
gctcggttctgagtgcagggaccacatgctctgtctatatgttacactctccaaccgcaactccaacctgccacccactcctgatgagcctctccgtctgcatgaccatgtgccctgctg

SEQ ID NO: 655904 - DNA, 120 bp, Artificial Sequence
  ENSG00000183722_23 (sequence is synthesized)
tggtaggcagaataacaaacacccacaggcacccacatcctaatccccagaacctgtgaatatgttatgttacatggcaacagggaattcaggtggcaggtggaaatatgtttgcgaacc

SEQ ID NO: 655905 - DNA, 120 bp, Artificial Sequence
  ENSG00000183722_24 (sequence is synthesized)
agtcgatcgtgagataggggcattatcctgcgttatcagggtgggtccagggtgatcacaggaagaaggaggcagaggacagagtcagaaaatgtatgatgacagaagcagtgattttat

SEQ ID NO: 655906 - DNA, 120 bp, Artificial Sequence
  ENSG00000183722_25 (sequence is synthesized)
gtgagaaagactcaacttgccatgctggctttgaagaatgaggaaggagccacgagccaaggaatgccggcaaattctagaactggaaaaggtaagaaaattgtgagaggaggaagaaag

SEQ ID NO: 655907 - DNA, 120 bp, Artificial Sequence
  ENSG00000183722_26 (sequence is synthesized)
gaagcaagagggaatgaataacactggaaatgctactaggataagtatttcttcaggcatgggcttcagaaatctagggatcaaaatcatgcaaagacatcatctgggcttgttccaggg

SEQ ID NO: 655908 - DNA, 120 bp, Artificial Sequence
  ENSG00000183722_27 (sequence is synthesized)
aggcaggattccattcctcactatcaacataattcatggtttctgttggctcttgcccatggaggagaggatcaggcccaagctttgagtacatatagaggctgacaatgctccgacagg

SEQ ID NO: 655909 - DNA, 120 bp, Artificial Sequence
  ENSG00000183722_28 (sequence is synthesized)
gacagaatactgggtagtaatcagagcccacccctaactttcaggaggcagaaatggacagccttgggcccctgaaagtgacaggcaacagggctgcctggtgctgagcacttttaaaaa

SEQ ID NO: 655910 - DNA, 120 bp, Artificial Sequence
  ENSG00000183722_29 (sequence is synthesized)
taagaagtggctcaattaatcgataaaaaatggtacacataagccatgaaaacagggacccacaagccaaagactggaccatctacatgagctgcttaaacttgtaatggggctgagaag

SEQ ID NO: 655911 - DNA, 120 bp, Artificial Sequence
  ENSG00000183722_30 (sequence is synthesized)
gtcattcccccaaaatgtggtggtttgagatgttaaactgaagaagaaacatcaaggtctctctcacctccccacttcttgcctctcaatcctttctctctcctaaagtgcagcataaag

SEQ ID NO: 655912 - DNA, 120 bp, Artificial Sequence
  ENSG00000183722_31 (sequence is synthesized)
ttgttccctgaagttccctcatctgcctaaagtccagacccatcaaagatgaaaacaatgatccctggttccttccctgggttttcattaactaaactcctcttacaggaagaaagatta

SEQ ID NO: 655913 - DNA, 120 bp, Artificial Sequence
  ENSG00000183722_32 (sequence is synthesized)
aagtctgttaacacacccagacaaacttttgtcacaaaccgtcgtctgctcaatgggcccaacagatcattgtcccagatcattgtatgttttttaagcccattgaattgccctaaacat

SEQ ID NO: 655914 - DNA, 120 bp, Artificial Sequence
  ENSG00000183722_33 (sequence is synthesized)
tatttactactgtgctgaaataatccacaatttcccatttccattttctctaaggagaagtgtatagaagcatctgtaccccattgtgtgatgaggtaatcactgtggttcaccctgtgg

SEQ ID NO: 655915 - DNA, 120 bp, Artificial Sequence
  ENSG00000183722_34 (sequence is synthesized)
cgtggctcctcggggtcacccaggaagacaagcaactttctcccatacttctcggtctgtctgccttccccactcagctttgaatgagacgcagggagagggggcgcgagggggctcggg

SEQ ID NO: 655916 - DNA, 120 bp, Artificial Sequence
  ENSG00000183723_0 (sequence is synthesized)
ccgcccgctcctggcgccgggagccagccgcgcgaggcggcccgggccgggcggcagcatgcggagcggcgaggagctggacggcttcgagggcgaggcctcgagcacctccatgatctc

SEQ ID NO: 655917 - DNA, 120 bp, Artificial Sequence
  ENSG00000183723_1 (sequence is synthesized)
atgatctcgggcgccagcagcccgtaccagcccaccaccgagccggtgagccagcgccgcgggctggccggcctgcgctgcgaccccgactacctgcgcggcgcgctcggccgcctcaag

SEQ ID NO: 655918 - DNA, 120 bp, Artificial Sequence
  ENSG00000183723_2 (sequence is synthesized)
cccaagtgatcttggccctgattgcattcatctgcatagagaccatcatggcatgctccccgtgtgaaggcctctacttttttgagtttgtgagctgcagtgcgtttgtggtgactggcg

SEQ ID NO: 655919 - DNA, 120 bp, Artificial Sequence
  ENSG00000183723_3 (sequence is synthesized)
gcttcaatcgtactggctgctttaaaccatagagccggagcagaaattgctgccgtgatatttggcttcttggcgactgcggcatatgcagtgaacacattcctggcagtgcagaaatgg

SEQ ID NO: 655920 - DNA, 120 bp, Artificial Sequence
  ENSG00000183723_4 (sequence is synthesized)
agagtcagcgtccgccagcagagcaccaatgactacatccgagcccgcacggagtccagggatgtggacagtcgccctgagatccagcgcctggacacgtgaggacctgcctggatcctc

SEQ ID NO: 655921 - DNA, 120 bp, Artificial Sequence
  ENSG00000183723_5 (sequence is synthesized)
ctccctcccgtcctcgtgcctgtctctcagtcaagttttctttcccttgtcctgtcagatttccatgtgattcagttgaattttgtcctctttggtaaaagttcattttgggaaagggtt

SEQ ID NO: 655922 - DNA, 120 bp, Artificial Sequence
  ENSG00000183723_6 (sequence is synthesized)
tcccgagtggcccagtgggcgggtccgcggtggagttgggaggcccacgttcctcagcgtttggggctgtggagcagccggcgtcactgcccaggtccacttgaggtcttacctgccctg

SEQ ID NO: 655923 - DNA, 120 bp, Artificial Sequence
  ENSG00000183723_7 (sequence is synthesized)
aagcacaggcttcctttgactctgagccaccttgtcgtgtgtatttgtaacaagactttggattaaatggggctgctaagaggggggaaatatgaaggaatgaagggacagcattggaac

SEQ ID NO: 655924 - DNA, 120 bp, Artificial Sequence
  ENSG00000183723_8 (sequence is synthesized)
aatcacccacaaacctgctgagtttgaatcactggcaacttgcctagaaaagttcagatgatgggtccttgaactgtgtatctatttcatagggtaagtttgttgtctatgtttgttttt

SEQ ID NO: 655925 - DNA, 120 bp, Artificial Sequence
  ENSG00000183723_9 (sequence is synthesized)
ttatgctgaggctttaattcaggtgacttgctatctagacacctggggtggcgtgttttctttgggatgcataatacacaaaggccagggagcctttggcttggacccccagggagctat

SEQ ID NO: 655926 - DNA, 120 bp, Artificial Sequence
  ENSG00000183723_10 (sequence is synthesized)
tgaaacttttaaagtttgagtttaggagtaagaacatatctcagaccaccttagtcagctttgctgatgggatttagggccaggtcagagtttcttttcataactgcctgaaaagagaga

SEQ ID NO: 655927 - DNA, 120 bp, Artificial Sequence
  ENSG00000183723_11 (sequence is synthesized)
tggtgtgaaacaagattctgataatggtttgtgtgagatttgatcatagtctaaaactatcacgtctgagttgccttaggatgacagtgctgacacccagtaggaagtatcccattttta

SEQ ID NO: 655928 - DNA, 120 bp, Artificial Sequence
  ENSG00000183723_12 (sequence is synthesized)
tcaggaaagtcagtcacgcgtagggatggtgaggagacgcgtagggatggtgaggaggggagaggagggagacctgctggtgcccttgcaccagggtgaggcctgactcacgctgcttcc

SEQ ID NO: 655929 - DNA, 120 bp, Artificial Sequence
  ENSG00000183723_13 (sequence is synthesized)
ccccacaggccctgctttgcttgcctgctttttccagaatcgattttgcaagcttcaagattctgttcccctcttcgcagaagtgaggaaggcaaatactcagggtttgaagggagacct

SEQ ID NO: 655930 - DNA, 120 bp, Artificial Sequence
  ENSG00000183723_14 (sequence is synthesized)
ggccggcctgagggctggcagatgtgagggcaggacacctgggatggactcgtaggctgacccaggcccaaagggggctgcctgttcccaactctttcactctgtaacccattttaaaat

SEQ ID NO: 655931 - DNA, 120 bp, Artificial Sequence
  ENSG00000183723_15 (sequence is synthesized)
ctaacttgattttgtttgacgtggttccctctaagagaatggtaggaattgaaactatttgtatatgttgaaatttgtaggggttcaggaacccatggcagaaacactaaactatttatt

SEQ ID NO: 655932 - DNA, 120 bp, Artificial Sequence
  ENSG00000183723_16 (sequence is synthesized)
tacaagtatgactatttttttttcaaagtaggcaattctttgtatattttaaggcaaataatcacttcacctctggtgccttccatgcgtcgcataagcactcttgtcaatcatggaatt

SEQ ID NO: 655933 - DNA, 120 bp, Artificial Sequence
  ENSG00000183723_17 (sequence is synthesized)
ggaaaaaaagatgtacatttagttaaacaagataacactatttttgtagcatgattttagattgtgtccttttaatattgttttcaacaatggtagttttgaggttttggccattttctc

SEQ ID NO: 655934 - DNA, 120 bp, Artificial Sequence
  ENSG00000183723_18 (sequence is synthesized)
tttacacttcgtatgtattttaaagaagaaaaaaaacaaaaaaaattccctggctattcctctttcctctctgctgctgcttctcctgcatcttgttcctgcttatttaaatagtctgag

SEQ ID NO: 655935 - DNA, 120 bp, Artificial Sequence
  ENSG00000183723_19 (sequence is synthesized)
agtaagagtatatttctgtgaaataattataagtcagtataattgcatttggcattttttaaccacttgctcagtttggagccactgctcacctcaaacagtacaaagaaagtggttcca

SEQ ID NO: 655936 - DNA, 120 bp, Artificial Sequence
  ENSG00000183723_20 (sequence is synthesized)
tattttacaaacagaagagtagcatcagagccctgacctcctgtctttgggtgtaaaatggtgagaggccggtgtccggctccttcccctgtggtttgggctggtgaactgagcccaagt

SEQ ID NO: 655937 - DNA, 120 bp, Artificial Sequence
  ENSG00000183723_21 (sequence is synthesized)
gtattctctggcctgggccccttccagaatcagtgcgagcgtcctgcagaggcatggccttcctgccactgcagagtgggaagcttcctgggggacctcagccagctccggggctctcat

SEQ ID NO: 655938 - DNA, 120 bp, Artificial Sequence
  ENSG00000183723_22 (sequence is synthesized)
cttccactcggatctcagattggttcgttgtggatgctctggctaggctcggcggccttttccaggcttcaggcctgaacaaaacaggctgtttgctgtgaggagctagatgacaccaag

SEQ ID NO: 655939 - DNA, 120 bp, Artificial Sequence
  ENSG00000183723_23 (sequence is synthesized)
acacagacacgtactcttcaccggctccttttgcttctccttcctgcaggacgtgagttatgtctggtcccaaaacccttgagtaaactagctgagccattgcaaatgaaggtacagatg

SEQ ID NO: 655940 - DNA, 120 bp, Artificial Sequence
  ENSG00000183723_24 (sequence is synthesized)
gattgaaacataaaattgtagcttttggtgtccttctgaagggtcagaatatgtaattatttgataaccaaggaagtcaagtcagatggctaagtagtaactttccaatatgatttctcc

SEQ ID NO: 655941 - DNA, 120 bp, Artificial Sequence
  ENSG00000183723_25 (sequence is synthesized)
gtggtacttcacctggtggcacttttggggggcaatgttaacaactatcacattttactcatcaagtctctttcatttcggcagtttaaagacacaactgtgggctttctgaggcgatgc

SEQ ID NO: 655942 - DNA, 120 bp, Artificial Sequence
  ENSG00000183723_26 (sequence is synthesized)
ccgttgggcaaacttaggtttatgtgtttggtttttcagctgacgtggaagccctgggtgggcgtcccctggctggcctggcttttgggttcaagtctgtatgtatggagtgggttgggg

SEQ ID NO: 655943 - DNA, 120 bp, Artificial Sequence
  ENSG00000183723_27 (sequence is synthesized)
ccccaaagctttgctgctattgatttgtccccgacagcaggcaaagcctcacattgccctcaattttccccctttcatttgaaggaccagtttttcatggtacttgtcttgatctttttc

SEQ ID NO: 655944 - DNA, 120 bp, Artificial Sequence
  ENSG00000183723_28 (sequence is synthesized)
atagtgttcaaatctgtatttttgtatgtagagggaaataattttctcaacactaatcgttaataactattgtattaaattgtcatgaaggaacttgtttaataaatggacgtgtaagga

SEQ ID NO: 655945 - DNA, 120 bp, Artificial Sequence
  ENSG00000183723_29 (sequence is synthesized)
agccaccttgtcgtgtgtatttgtaacaagactttggattaaatggggctgctaagaggggggaaatatgaaggaatgaagggacagcattggaacggtcagtcggcagtggttctcagg

SEQ ID NO: 655946 - DNA, 120 bp, Artificial Sequence
  ENSG00000183723_30 (sequence is synthesized)
cagccttaggcaccacctgctccaagtcagtgttgagtctgcgtgctgggatccagcccactcctcatcttccatgccagggcccccaggcagccagcaccagcccaaaggccacagggc

SEQ ID NO: 655947 - DNA, 120 bp, Artificial Sequence
  ENSG00000183723_31 (sequence is synthesized)
tggggaaagctgatgtcctgttaggatggctcccagggacctctgactcaaggaagggtgaccttttgtttcctactctgctgagaaatcacttgattcttcctcaaatgaatcaccttc

SEQ ID NO: 655948 - DNA, 120 bp, Artificial Sequence
  ENSG00000183723_32 (sequence is synthesized)
ctgaaccccagattcttctccaggaatatgggggccatcttgttatggggactatcttgttttccagtttcctgcctaccctaaatactttgaggctgaattgcagattttcagtcattt

SEQ ID NO: 655949 - DNA, 120 bp, Artificial Sequence
  ENSG00000183723_33 (sequence is synthesized)
taccttctcaggtaaaagccatgaaagaaacaagcctactccaccagccaaagcacttgcccatttgctggcttcatgaaccgcaggtgggaggtgtttgtgttaaaaaacagcatgcac

SEQ ID NO: 655950 - DNA, 120 bp, Artificial Sequence
  ENSG00000183723_34 (sequence is synthesized)
acgcgtgcgcgcacacatgcacacacacacccctctattttagggatgtgtgctaattttctaaatgcctgcaaagagttctaaaatgattctgagcagattcgtctaggatttgaaaat

SEQ ID NO: 655951 - DNA, 120 bp, Artificial Sequence
  ENSG00000183723_35 (sequence is synthesized)
acttgaatttgcaccagaacacacccttccacccatgtttcagaaggcactaattgtcgctttgggcgcctcagtgtcataactgtagacatcattcttgggagttgttggggggaaaaa

SEQ ID NO: 655952 - DNA, 120 bp, Artificial Sequence
  ENSG00000183723_36 (sequence is synthesized)
tcctagctacttaaggtttctgattgattcttgataaagtgaagattattgtgtgtggtgaatgagttcagtgagtccccatgatgcagtagtttttttaaaaaattagagagtaattat

SEQ ID NO: 655953 - DNA, 120 bp, Artificial Sequence
  ENSG00000183723_37 (sequence is synthesized)
atcttttatggaaaaaagttgttttagtttgtcaggttttccctctttgaactgtttttaatgtttacaaacctcactttagctctaacattttgtgtttagccctcaccaaaaagcact

SEQ ID NO: 655954 - DNA, 120 bp, Artificial Sequence
  ENSG00000183723_38 (sequence is synthesized)
tactgtggcaggaagattttgcagtaacatggagaaatccccaagatcaagtgctgacaaatgttgacagctttagcagcgtactgtgtaataaataactccgagggggcggcggggggt

SEQ ID NO: 655955 - DNA, 120 bp, Artificial Sequence
  ENSG00000183723_39 (sequence is synthesized)
ctgtgcaagaaagcgtcaccttatggacatgtggcgtctcattccccagaaaaggacagcatctgagctcacagtgttgatcaggcaacactgctgggctgggggtcggagttggggtta

SEQ ID NO: 655956 - DNA, 120 bp, Artificial Sequence
  ENSG00000183723_40 (sequence is synthesized)
gcttcctgcaccaacaccttcagtacgatctgagttgggagcagtgtcccaggctatgtggctgagcaccacgtctgcctcaggggctgaccctgctagcctgttaacaactcgtctccc

SEQ ID NO: 655957 - DNA, 120 bp, Artificial Sequence
  ENSG00000183723_41 (sequence is synthesized)
ctctgctcccacagagagggcagccaggccagctcacagctgggtgtgctgcctgtcaggtctgttgagtgtgtttgcaaagtcaaaattgggcttatctctctttgagagttcctttta

SEQ ID NO: 655958 - DNA, 120 bp, Artificial Sequence
  ENSG00000183723_42 (sequence is synthesized)
aaatagggccacaaaggctcagccttgcattaaatggggcccacttggaaggaccatcctgagctttatcagaaatctcctgctgggaatcatgttacttggcccccaaaaaaggccatc

SEQ ID NO: 655959 - DNA, 120 bp, Artificial Sequence
  ENSG00000183723_43 (sequence is synthesized)
tttgaagtgagattgaaaacaagaacaccattcaggtgggcttgttgcccaagttttcccagctcacttcagtaaaaccacttgatcatctggtgaaagaggggggcaggtggttggcct

SEQ ID NO: 655960 - DNA, 120 bp, Artificial Sequence
  ENSG00000183723_44 (sequence is synthesized)
cctgaggatatgttgtcagctgcaagaaatagttctgaagtcactgaaactaaatgcagatgaatgaccaaaaaggatgacacgccagagagtgacttaggagttaatttgcatcttcgt

SEQ ID NO: 655961 - DNA, 120 bp, Artificial Sequence
  ENSG00000183723_45 (sequence is synthesized)
gatagactcttcagaattatttatgtccctgtaactatttaatatcctttgtgccgtgaggctcctcggtggttttgtaaatgttctccttgtatttaattaactcccactagaaccgga

SEQ ID NO: 655962 - DNA, 120 bp, Artificial Sequence
  ENSG00000183723_46 (sequence is synthesized)
agtggtgctatggacgctttctagttgatgtaatgtgtggttgcacatgtcatcatgtatagaccacgtggtgacgaaagttctggagggaatagggttatccaaggtgaatatgaagac

SEQ ID NO: 655963 - DNA, 120 bp, Artificial Sequence
  ENSG00000183723_47 (sequence is synthesized)
gcctatatttttcttatattgcctctatatgcaaacagaagacaatcgatatctgggggccttaaaatgacctcttggcaaattgaaggaagcgtttttgcgtttaatagtttcaatagg

SEQ ID NO: 655964 - DNA, 120 bp, Artificial Sequence
  ENSG00000183723_48 (sequence is synthesized)
gaccaatatcagtttggtttggggcatttgaaggctgagcgaccttagtttttctcagtgttctggtgggacgatattggttttcacatttaaagcaaaacttgaagaaactgcagttgc

SEQ ID NO: 655965 - DNA, 120 bp, Artificial Sequence
  ENSG00000183723_49 (sequence is synthesized)
tgtgtgcatttgggttttttcctggacactgtacagctgaaaccctcaagcatttggtggaacctctggtggttttagatggatgcaaacactgatgtcctcagagaaagtttattttgg

SEQ ID NO: 655966 - DNA, 120 bp, Artificial Sequence
  ENSG00000183723_50 (sequence is synthesized)
cactgattgggtggatttggtattttttccctctgattctctttgatatccttctttcacactgctgaaggcatgggagggaaatatgttttccctgccttaaagagggattacagtcat

SEQ ID NO: 655967 - DNA, 120 bp, Artificial Sequence
  ENSG00000183723_51 (sequence is synthesized)
gaaaggctggagatacttgttggccccacataaagctgggaagaacagatgcagtttcagattaaaatctcgtcagagaagtttgatttgaagtaaacagccatccgagggaggtgactt

SEQ ID NO: 655968 - DNA, 120 bp, Artificial Sequence
  ENSG00000183723_52 (sequence is synthesized)
ttgtctacagaaaaagcaagaatgtggcagcctgcacagccccaatacacatcttccttggcaatgtgagctgaagccagcatgggcaagtccggcccagctctgagcgcttggccctgg

SEQ ID NO: 655969 - DNA, 120 bp, Artificial Sequence
  ENSG00000183723_53 (sequence is synthesized)
gaagccagcggcacccccagcccttcgggccctgttactgtcccctggcaggaaggctcacgcctgtgggcagccagggaatgtgtctgacctccaccctatgtcgggtgcttctgggac

SEQ ID NO: 655970 - DNA, 120 bp, Artificial Sequence
  ENSG00000183723_54 (sequence is synthesized)
agcttcgtgactcagttgaaaacattctgactctcttcaagtttgcagttacatctgtggttcttggaagctgtcctagtgagtcagccttgggttaagcctgaggagaccaagctccaa

SEQ ID NO: 655971 - DNA, 120 bp, Artificial Sequence
  ENSG00000183723_55 (sequence is synthesized)
cacctttgtgcactcatgtacgtgaattcttgcttgcagtgaatgagacctgaacaaccctagtgggtgccatgtcctgcgtgtggcccaggcgtaccttttcttgtagattcacatgag

SEQ ID NO: 655972 - DNA, 120 bp, Artificial Sequence
  ENSG00000183723_56 (sequence is synthesized)
aaacccgtcacctatccatgtgctctgagaggtggactgaggtctaatccctttctgtgccagattttctgtgggttggtcttagcacctaggagatgaatagagcatggagacacctga

SEQ ID NO: 655973 - DNA, 120 bp, Artificial Sequence
  ENSG00000183723_57 (sequence is synthesized)
acaatttagtgattctgcaaggcagtgatgatttaagggttcctattgtctcatctgtgttcaaaacaaaacagtcatgaagtctttgtgccactgcctgactgtcatcttctccagatc

SEQ ID NO: 655974 - DNA, 120 bp, Artificial Sequence
  ENSG00000183723_58 (sequence is synthesized)
ctgctggtggattctcttgagcagaataacaagttgcttcctgctccagggactgccattagcttgtgaagtctctaggtgccttgttatttcctagtgaagttgcagaatccagggttt

SEQ ID NO: 655975 - DNA, 120 bp, Artificial Sequence
  ENSG00000183723_59 (sequence is synthesized)
tttccaggtttgtcttattttatcagcacccacgtccaggcccaacagcttggtaggctggtgaggtccacacacggccaggtctgggagataagggaggaagcagtggcctggaacacc

SEQ ID NO: 655976 - DNA, 120 bp, Artificial Sequence
  ENSG00000183723_60 (sequence is synthesized)
ccacctgtctgctatcagcactagacagctcaggctgtcttggaaacgtgtactttgttaactgccttcctgtcctcttgtctttgaaagctgtctcgcgttccacagtcagcttgaggg

SEQ ID NO: 655977 - DNA, 120 bp, Artificial Sequence
  ENSG00000183723_61 (sequence is synthesized)
caagagtgggatgctggggacaggtctttcccgtcctgtgggtgagctcctggcatctggctcaggaacatgtgggtccagcaggtgactctgaagctggcttggctgccatctcagaca

SEQ ID NO: 655978 - DNA, 120 bp, Artificial Sequence
  ENSG00000183723_62 (sequence is synthesized)
ggacgcaggcctgacaccctcagcttttagctttgtaaacttccctggcgctttgtagaatcttgtgtttcttctcttctcagcagatatcattcaagtcacaagaactgtctggttgag

SEQ ID NO: 655979 - DNA, 120 bp, Artificial Sequence
  ENSG00000183723_63 (sequence is synthesized)
aaagtaatttaaaatatttgaccttttatgtttcttttatttagaaactgtgagagaaaataccgtcaatatctgttaggtctagaaaaattttcttccgaaagtgaatgttctgtttaa

SEQ ID NO: 655980 - DNA, 120 bp, Artificial Sequence
  ENSG00000183723_64 (sequence is synthesized)
ttcttcttcatgcaagtgagtggcattttgtacactctttagcttgaagcggagtgggtcctattgtattttcccttcttttgtctggaatatattctttttccatttggatacagtttt

SEQ ID NO: 655981 - DNA, 120 bp, Artificial Sequence
  ENSG00000183726_0 (sequence is synthesized)
actgctgcatccgggtgtctggaggctgtggccgttttgttttcttggctaaaatcgggggagtgaggcgggccggcgcggcgcgacaccgggctccggaaccactgcacgacggggctg

SEQ ID NO: 655982 - DNA, 120 bp, Artificial Sequence
  ENSG00000183726_1 (sequence is synthesized)
gactgacctgaaaaaaatgtctggatttctagagggcttgagatgctcagaatgcattgactggggggaaaagcgcaatactattgcttccattgctgctggtgtactattttttacagg

SEQ ID NO: 655983 - DNA, 120 bp, Artificial Sequence
  ENSG00000183726_2 (sequence is synthesized)
ctggtggattatcatagatgcagctgttatttatcccaccatgaaagatttcaaccactcataccatgcctgtggtgttatagcaaccatagccttcctaatgattaatgcagtatcgaa

SEQ ID NO: 655984 - DNA, 120 bp, Artificial Sequence
  ENSG00000183726_3 (sequence is synthesized)
tggacaagtccgaggtgatagttacagtgaaggttgtctgggtcaaacaggtgctcgcatttggcttttcgttggtttcatgttggcctttggatctctgattgcatctatgtggattct

SEQ ID NO: 655985 - DNA, 120 bp, Artificial Sequence
  ENSG00000183726_4 (sequence is synthesized)
ttttggaggttatgttgctaaagaaaaagacatagtataccctggaattgctgtatttttccagaatgccttcatcttttttggagggctggtttttaagtttggccgcactgaagactt

SEQ ID NO: 655986 - DNA, 120 bp, Artificial Sequence
  ENSG00000183726_5 (sequence is synthesized)
atggcagtgaacacatctgatttcccacagcacaacagccctgcatgggtttgtttgtttttttactgctcactcccaaccttttgtaatgccattttctaaacttatttctgagtgtag

SEQ ID NO: 655987 - DNA, 120 bp, Artificial Sequence
  ENSG00000183726_6 (sequence is synthesized)
tctcagcttaaagttgtgtaatactaaaatcacgagaacacctaaacaacaaccaaaaatctattgtggtatgcacttgattaacttataaaatgttagaggaaactttcacatgaataa

SEQ ID NO: 655988 - DNA, 120 bp, Artificial Sequence
  ENSG00000183726_7 (sequence is synthesized)
tttttgtcaaattttatcatggtataatttgtaaaaataaaaagaaattacaaaagaaattatggatttgtcaatgtaagtatttgtcatatctgaggtccaaaaccacaatgaaagtgc

SEQ ID NO: 655989 - DNA, 120 bp, Artificial Sequence
  ENSG00000183726_8 (sequence is synthesized)
tctgaagatttaatgtgtttattcaaatgtggtctcttctgtgtcaaatgttaaatgaaatataaacattttttagtttttaaaatattccgtggtcaaaattcttcctcactataattg

SEQ ID NO: 655990 - DNA, 120 bp, Artificial Sequence
  ENSG00000183726_9 (sequence is synthesized)
ccaccaggctccctgtgtcccttccatgggaaggtcttccgctgtgcctctcattccaagggcaggaagatgtgactcagccatgacacgtggttctggtgggatgcacagtcactccac

SEQ ID NO: 655991 - DNA, 120 bp, Artificial Sequence
  ENSG00000183726_10 (sequence is synthesized)
atccaccattgaaggaaaggaaaaaagggcagagacttgacactccagtcttagacaggggacaatttctttgtagttgttctgataataaactgggttccatgttgcatttcatctgtg

SEQ ID NO: 655992 - DNA, 120 bp, Artificial Sequence
  ENSG00000183726_11 (sequence is synthesized)
tactgaaccactagcctaatagaccagcacggtcaactagaatgacaaacattagctactgggaactcttgttgtctcttcctcttcagaactcttgtccccccaggctccccacctctg

SEQ ID NO: 655993 - DNA, 120 bp, Artificial Sequence
  ENSG00000183726_12 (sequence is synthesized)
caagatgggatacactcttcaggaccacagtttgaaatgtctttcataaaatgtgctacaattagccttcggaatatttgctgggtgatttaaatgtgtgggtctcatttccatgctagc

SEQ ID NO: 655994 - DNA, 120 bp, Artificial Sequence
  ENSG00000183726_13 (sequence is synthesized)
catggtcatctgacagtctctacactgtgaatattgcctggtgatcaagactctcctcaaagaaatgacttgctgtcatcccacatgaactcctgatgttttttctacaaaagtccataa

SEQ ID NO: 655995 - DNA, 120 bp, Artificial Sequence
  ENSG00000183726_14 (sequence is synthesized)
aatgtgaaaactggagaagatcttagaggttgaagcccaccttctcttttcacataggagggaacagaccatggaaatttaaacgacttcctcacggtcacagaactagttttttaatcc

SEQ ID NO: 655996 - DNA, 120 bp, Artificial Sequence
  ENSG00000183726_15 (sequence is synthesized)
tcaggcagtgcatccccccaccctacaactgagcacaacctctttccccacagtgcaattcagaatatgctcagggaatgccagccaccttgtaaaactgctgggagaaaagcatgattc

SEQ ID NO: 655997 - DNA, 120 bp, Artificial Sequence
  ENSG00000183726_16 (sequence is synthesized)
ccacaaggactaagtatcagtgatttgtaattttcctgttttgtattatctgctttgctgatgtagacaagagttaactgagtagcatgctttattaagcatgagaaagaatcttaagaa

SEQ ID NO: 655998 - DNA, 120 bp, Artificial Sequence
  ENSG00000183726_17 (sequence is synthesized)
ttgtcaataaaattaacccaaaactttaataatgtgtctgtaaccaagaaaatattgatagcatcatcctaatgaaactaaacatttattttaaacttattaaattgactcttaaactaa

SEQ ID NO: 655999 - DNA, 120 bp, Artificial Sequence
  ENSG00000183726_18 (sequence is synthesized)
atttctctggaagtttatcatatatcaacaggacacttctgtcagttggaattggagtcacttttttcctttccccctccatgagataactggtttctagttcaccaaattagattacaa

SEQ ID NO: 656000 - DNA, 120 bp, Artificial Sequence
  ENSG00000183726_19 (sequence is synthesized)
ggctttattatgataaaaattaaataatgattgaagtaggcttagagaaaagttatgttaataaatataaattgctctcagatttaagggtacctaatcagttattaggccatgtgcaaa

SEQ ID NO: 656001 - DNA, 120 bp, Artificial Sequence
  ENSG00000183726_20 (sequence is synthesized)
agtgtcgggcggggagtgggggtaagagagtagcggccgcaggctggagaggcctcggagccggggccgtctgacgggctggtgcccacagcacaggctcgttgccgccaccctcccgga

SEQ ID NO: 656002 - DNA, 120 bp, Artificial Sequence
  ENSG00000183726_21 (sequence is synthesized)
agccgcagacccgggctgagccgccgcggacctctcctctcctgggtccggcggcgccaggagaaggcgacggcgtccagaccccgccaagacggagaggggaccgcgccctcccccggg

SEQ ID NO: 656003 - DNA, 120 bp, Artificial Sequence
  ENSG00000183726_22 (sequence is synthesized)
acaccccaggatccctggaaaatcccccgatcccccacttcacagctggacaagccgaagccccgagaaaggagcgtgacccggccagctccctcagcgaggggtgccccggctaaagtg

SEQ ID NO: 656004 - DNA, 120 bp, Artificial Sequence
  ENSG00000183729_0 (sequence is synthesized)
ttggaaataaccaatatttagtttatttcattcgattcttaggggaactggtgaggagcctaagatgattttcccttcctagagaaagaatccaaagtccagggaaatagcgacagggga

SEQ ID NO: 656005 - DNA, 120 bp, Artificial Sequence
  ENSG00000183729_1 (sequence is synthesized)
gttcaagactgcccctgctagtccttccttggctactctccgctgcgatcgcaggatagctctcattagcaggagaatcgggcaagtgtgtggataagtagagagtgtgttgaacaactt

SEQ ID NO: 656006 - DNA, 120 bp, Artificial Sequence
  ENSG00000183729_2 (sequence is synthesized)
gtaacgttttatgaaatacgcattgtcatggttccctaaaaggctttgcggaagccgtttgtctttactaatcaagtctttacttacacaaaagtagaagtagaagtagttttagaaaac

SEQ ID NO: 656007 - DNA, 120 bp, Artificial Sequence
  ENSG00000183729_3 (sequence is synthesized)
atactaacaatcttctatccccttgaagaccagagtagcagaaaacaggtgatttgcattataaaattgcactcactttttcctcctttcagatttcacattacattagcctatttgtgt

SEQ ID NO: 656008 - DNA, 120 bp, Artificial Sequence
  ENSG00000183729_4 (sequence is synthesized)
tacggtgtataaaaaatggaacaggcgcctccactacattgttctcctttaaaaatagatcacttacaccctaactttgttttccttaaattcgattcttaacaggagagctttctatta

SEQ ID NO: 656009 - DNA, 120 bp, Artificial Sequence
  ENSG00000183729_5 (sequence is synthesized)
tttcagatggagtgaggttgcacgactgggatggaagaaaggaatcccttaaatttgggggaatttctgttctctgttctaagaccattttacttggggtgtgggggtgggcgcggcggt

SEQ ID NO: 656010 - DNA, 120 bp, Artificial Sequence
  ENSG00000183729_6 (sequence is synthesized)
cagggcagtggaacgcagtcgcggctgcgccatccctgcacttccaggcgcgcgggagggaccggcggggacgcgagctgcggactctggcgaactcgggggaggcagacagggggaggc

SEQ ID NO: 656011 - DNA, 120 bp, Artificial Sequence
  ENSG00000183729_7 (sequence is synthesized)
ggacacccagccggcaggcgtctcagcctccccgcagccggcgggcttttctcctgacagctccaggaaaggcagaccccttccccagccagccaggtaaggtaaagactgctgttgagc

SEQ ID NO: 656012 - DNA, 120 bp, Artificial Sequence
  ENSG00000183729_8 (sequence is synthesized)
ttgctgttactgagggcgcacagaccctggggagaccgaagcttgccactgcgggattctgtggggtaacctgggtctacggaagtttcctgaaagaggggagaagggtttgcatttttc

SEQ ID NO: 656013 - DNA, 120 bp, Artificial Sequence
  ENSG00000183729_9 (sequence is synthesized)
ctatggaggattcttctctctctagcatttcgtttgatgtattcaactggtagaagtgagatttcaacaggtagcagagagcgctcacgtggaggaggtttggggcgccgcggcgccacc

SEQ ID NO: 656014 - DNA, 120 bp, Artificial Sequence
  ENSG00000183729_10 (sequence is synthesized)
cccacccctcctcgggaccgcgcctatttctaaagttacacgtcgacgaactaacctatgctttaaattcctctttccagccccgtgagtccgcggcgacattgggccgtggggtggctg

SEQ ID NO: 656015 - DNA, 120 bp, Artificial Sequence
  ENSG00000183729_11 (sequence is synthesized)
gaaacgagcgtccgcgagcaggtccgtgcagaaccgggcttcaggaccgctgagctccgtagggcgtccttgggggacgccaggtcgccggctcctctgccctcgttgagatggacaacg

SEQ ID NO: 656016 - DNA, 120 bp, Artificial Sequence
  ENSG00000183729_12 (sequence is synthesized)
cctcgttctcggagccctggcccgccaacgcatcgggcccggacccggcgctgagctgctccaacgcgtcgactctggcgccgctgccggcgccgctggcggtggctgtaccagttgtct

SEQ ID NO: 656017 - DNA, 120 bp, Artificial Sequence
  ENSG00000183729_13 (sequence is synthesized)
acgcggtgatctgcgccgtgggtctggcgggcaactccgccgtgctgtacgtgttgctgcgggcgccccgcatgaagaccgtcaccaacctgttcatcctcaacctggccatcgccgacg

SEQ ID NO: 656018 - DNA, 120 bp, Artificial Sequence
  ENSG00000183729_14 (sequence is synthesized)
agctcttcacgctggtgctgcccatcaacatcgccgacttcctgctgcggcagtggcccttcggggagctcatgtgcaagctcatcgtggctatcgaccagtacaacaccttctccagcc

SEQ ID NO: 656019 - DNA, 120 bp, Artificial Sequence
  ENSG00000183729_15 (sequence is synthesized)
tctacttcctcaccgtcatgagcgccgaccgctacctggtggtgttggccactgcggagtcgcgccgggtggccggccgcacctacagcgccgcgcgcgcggtgagcctggccgtgtggg

SEQ ID NO: 656020 - DNA, 120 bp, Artificial Sequence
  ENSG00000183729_16 (sequence is synthesized)
ggatcgtcacactcgtcgtgctgcccttcgcagtcttcgcccggctagacgacgagcagggccggcgccagtgcgtgctagtctttccgcagcccgaggccttctggtggcgcgcgagcc

SEQ ID NO: 656021 - DNA, 120 bp, Artificial Sequence
  ENSG00000183729_17 (sequence is synthesized)
gcctctacacgctcgtgctgggcttcgccatccccgtgtccaccatctgtgtcctctataccaccctgctgtgccggctgcatgccatgcggctggacagccacgccaaggccctggagc

SEQ ID NO: 656022 - DNA, 120 bp, Artificial Sequence
  ENSG00000183729_18 (sequence is synthesized)
gcgccaagaagcgggtgaccttcctggtggtggcaatcctggcggtgtgcctcctctgctggacgccctaccacctgagcaccgtggtggcgctcaccaccgacctcccgcagacgccgc

SEQ ID NO: 656023 - DNA, 120 bp, Artificial Sequence
  ENSG00000183729_19 (sequence is synthesized)
tggtcatcgctatctcctacttcatcaccagcctgagctacgccaacagctgcctcaaccccttcctctacgccttcctggacgccagcttccgcaggaacctccgccagctgataactt

SEQ ID NO: 656024 - DNA, 120 bp, Artificial Sequence
  ENSG00000183729_20 (sequence is synthesized)
gccgcgcggcagcctgactcccccagcgtccggctccgcaactgcccgccactcctggccagcgagggaggagccggcgccagagtgcgggaccagacaggccgcctaggcctcctgggg

SEQ ID NO: 656025 - DNA, 120 bp, Artificial Sequence
  ENSG00000183729_21 (sequence is synthesized)
aaaccgactcgcgccccatacccgacctagcagatcggaagcgctgcgactgtgcccgcaggttgaccttgccaagccctccaggtgatgcgcggccatgccgggtgaggagaactgagg

SEQ ID NO: 656026 - DNA, 120 bp, Artificial Sequence
  ENSG00000183733_0 (sequence is synthesized)
ctgccatggaccccgcgcccggcgtcctagatccccgcgccgcgccgcccgcgctcctgggcaccccgcaagccgaggtgctggaggacgtgttgcgggagcagttcgggccgctgcccc

SEQ ID NO: 656027 - DNA, 120 bp, Artificial Sequence
  ENSG00000183733_1 (sequence is synthesized)
agctggccgctgtctgccggctcaagcggctgccctcgggcggctactcgtccactgaaaacctccagttggtgctggagcggcggcgtgtggccaacgccaaggagcgtgagcggataa

SEQ ID NO: 656028 - DNA, 120 bp, Artificial Sequence
  ENSG00000183733_2 (sequence is synthesized)
aaaatctcaaccgtggttttgccagattgaaggcacttgtgccatttcttccccaaagcaggaagcccagcaaagttgatatccttaaaggtgcgactgaatatatacaggttctcagtg

SEQ ID NO: 656029 - DNA, 120 bp, Artificial Sequence
  ENSG00000183733_3 (sequence is synthesized)
cttttggaaggagccaaagactcaaagaaacaagacccagatgagcagagctatagtaacaacagttctgaatcacatacatcctcggcaagacagctgtcaagaaacatcacccaacat

SEQ ID NO: 656030 - DNA, 120 bp, Artificial Sequence
  ENSG00000183733_4 (sequence is synthesized)
atcagctgtgctttcggcttgaagaatgaagaggaagggccttgggcagatggtggcagtggtgagccagcacacgcttgtcgccacagtgtgatgtctacgactgaaattatctcccca

SEQ ID NO: 656031 - DNA, 120 bp, Artificial Sequence
  ENSG00000183733_5 (sequence is synthesized)
accagaagtctggatagattcccagaagtagaactgctgagtcacagacttccacaagtatgaaaaatgaaaaggcccagggttaccttctagagacaaataaatgcagtcttgaaagtt

SEQ ID NO: 656032 - DNA, 120 bp, Artificial Sequence
  ENSG00000183734_0 (sequence is synthesized)
ctggcggctcttgggactggcggggctgcgcgcggggttagggtgggggtacgggaaggctcaacccaggacctgcgtaccttgctttgggggcgcactaagcacctgccgggagcaggg

SEQ ID NO: 656033 - DNA, 120 bp, Artificial Sequence
  ENSG00000183734_1 (sequence is synthesized)
ggcgcaccgggaactcgcagatttcgccagttgggcgcactggggatctgtggactgcgtccgggggatgggctagggggacatgcgcacgctttgggccttacagaatgtgatcgcgcg

SEQ ID NO: 656034 - DNA, 120 bp, Artificial Sequence
  ENSG00000183734_2 (sequence is synthesized)
agggggagggcgaagcgtggcgggagggcgaggcgaaggaaggagggcgtgagaaaggcgacggcggcggcgcggaggagggttatctatacatttaaaaaccagccgcctgcgccgcgc

SEQ ID NO: 656035 - DNA, 120 bp, Artificial Sequence
  ENSG00000183734_3 (sequence is synthesized)
ctgcggagacctgggagagtccggccgcacgcgcgggacacgagcgtcccacgctccctggcgcgtacggcctgccaccactaggcctcctatccccgggctccagacgacctaggacgc

SEQ ID NO: 656036 - DNA, 120 bp, Artificial Sequence
  ENSG00000183734_4 (sequence is synthesized)
gtgccctggggagttgcctggcggcgccgtgccagaagcccccttggggcgccacagttttccccgtcgcctccggttcctctgcctgcaccttcctgcggcgcgccgggacctggagcg

SEQ ID NO: 656037 - DNA, 120 bp, Artificial Sequence
  ENSG00000183734_5 (sequence is synthesized)
ggtggatgcaggcgcgatggacggcggcacactgcccaggtccgcgccccctgcgccccccgtccctgtcggctgcgctgcccggcggagacccgcgtccccggaactgttgcgctgcag

SEQ ID NO: 656038 - DNA, 120 bp, Artificial Sequence
  ENSG00000183734_6 (sequence is synthesized)
gcagccggcggcggcgaccggccaccgcagagaccggaggcggcgcagcggccgtagcgcggcgcaatgagcgcgagcgcaaccgcgtgaagctggtgaacttgggcttccaggcgctgc

SEQ ID NO: 656039 - DNA, 120 bp, Artificial Sequence
  ENSG00000183734_7 (sequence is synthesized)
gctgcgctcagccgtggagtacatccgcgcgctgcagcgcctgctggccgagcacgacgccgtgcgcaacgcgctggcgggagggctgaggccgcaggccgtgcggccgtctgcgccccg

SEQ ID NO: 656040 - DNA, 120 bp, Artificial Sequence
  ENSG00000183734_8 (sequence is synthesized)
cagggaccaccccggtcgccgcctcgccctcccgcgcttcttcgtccccgggccgcgggggcagctcggagcccggctccccgcgttccgcctactcgtcggacgacagcggctgcgaag

SEQ ID NO: 656041 - DNA, 120 bp, Artificial Sequence
  ENSG00000183734_9 (sequence is synthesized)
ctgcgaaggcgcgctgagtcctgcggagcgcgagctactcgacttctccagctggttagggggctactgagcgccctcgacctatgagcctcagccccggaagccgagcgagcggccggc

SEQ ID NO: 656042 - DNA, 120 bp, Artificial Sequence
  ENSG00000183734_10 (sequence is synthesized)
cggcccgcgctccgcccccagcgagccggggacccacccaccaccccccgcaccgccgacgccgcctcgttcgtccggcccagcctgaccaatgccgcggtggaaacgggcttggagctg

SEQ ID NO: 656043 - DNA, 120 bp, Artificial Sequence
  ENSG00000183734_11 (sequence is synthesized)
ccaatgccgcggtggaaacgggcttggagctggccccataagggctggcggcttcctccgacgccgcccctccccacagcttctcgactgcagtggggcggggggcaccaacacttggag

SEQ ID NO: 656044 - DNA, 120 bp, Artificial Sequence
  ENSG00000183734_12 (sequence is synthesized)
atttttccggaggggagaggattttctaagggcacagagaatccattttctacacattaacttgagctgctggagggacactgctggcaaacggagacctatttttgtacaaagaaccct

SEQ ID NO: 656045 - DNA, 120 bp, Artificial Sequence
  ENSG00000183734_13 (sequence is synthesized)
tgacctggggcgtaataaagatgacctggacccctgcccccactatctggagttttccatgctggccaagatctggacacgagcagtccctgaggggcggggtccctggcgtgaggcccc

SEQ ID NO: 656046 - DNA, 120 bp, Artificial Sequence
  ENSG00000183734_14 (sequence is synthesized)
cgtgacagcccaccctggggtgggtttgtgggcactgctgctctgctagggagaagcctgtgtggggcacacctcttcaagggagcgtgaactttataaataaatcagttctgtttacca

SEQ ID NO: 656047 - DNA, 120 bp, Artificial Sequence
  ENSG00000183735_0 (sequence is synthesized)
ggaagtgtcctgagtctcgaggaggccgcgggagcccgccggcggtggcgcggcggagacccggctggtataacaagaggattgcctgatccagccaagatgcagagcacttctaatcat

SEQ ID NO: 656048 - DNA, 120 bp, Artificial Sequence
  ENSG00000183735_1 (sequence is synthesized)
ctgtggcttttatctgatattttaggccaaggagctactgcaaatgtctttcgtggaagacataagaaaactggtgatttatttgctatcaaagtatttaataacataagcttccttcgt

SEQ ID NO: 656049 - DNA, 120 bp, Artificial Sequence
  ENSG00000183735_2 (sequence is synthesized)
ccagtggatgttcaaatgagagaatttgaagtgttgaaaaaactcaatcacaaaaatattgtcaaattatttgctattgaagaggagacaacaacaagacataaagtacttattatggaa

SEQ ID NO: 656050 - DNA, 120 bp, Artificial Sequence
  ENSG00000183735_3 (sequence is synthesized)
ttttgtccatgtgggagtttatacactgttttagaagaaccttctaatgcctatggactaccagaatctgaattcttaattgttttgcgagatgtggtgggtggaatgaatcatctacga

SEQ ID NO: 656051 - DNA, 120 bp, Artificial Sequence
  ENSG00000183735_4 (sequence is synthesized)
gagaatggtatagtgcaccgtgatatcaagccaggaaatatcatgcgtgttataggggaagatggacagtctgtgtacaaactcacagattttggtgcagctagagaattagaagatgat

SEQ ID NO: 656052 - DNA, 120 bp, Artificial Sequence
  ENSG00000183735_5 (sequence is synthesized)
gagcagtttgtttctctgtatggcacagaagaatatttgcaccctgatatgtatgagagagcagtgctaagaaaagatcatcagaagaaatatggagcaacagttgatctttggagcatt

SEQ ID NO: 656053 - DNA, 120 bp, Artificial Sequence
  ENSG00000183735_6 (sequence is synthesized)
ggggtaacattttaccatgcagctactggatcactgccatttagaccctttgaagggcctcgtaggaataaagaagtgatgtataaaataattacaggaaagccttctggtgcaatatct

SEQ ID NO: 656054 - DNA, 120 bp, Artificial Sequence
  ENSG00000183735_7 (sequence is synthesized)
ggagtacagaaagcagaaaatggaccaattgactggagtggagacatgcctgtttcttgcagtctttctcggggtcttcaggttctacttacccctgttcttgcaaacatccttgaagca

SEQ ID NO: 656055 - DNA, 120 bp, Artificial Sequence
  ENSG00000183735_8 (sequence is synthesized)
gatcaggaaaagtgttggggttttgaccagttttttgcagaaactagtgatatacttcaccgaatggtaattcatgttttttcgctacaacaaatgacagctcataagatttatattcat

SEQ ID NO: 656056 - DNA, 120 bp, Artificial Sequence
  ENSG00000183735_9 (sequence is synthesized)
agctataatactgctactatatttcatgaactggtatataaacaaaccaaaattatttcttcaaatcaagaacttatctacgaagggcgacgcttagtcttagaacctggaaggctggca

SEQ ID NO: 656057 - DNA, 120 bp, Artificial Sequence
  ENSG00000183735_10 (sequence is synthesized)
caacatttccctaaaactactgaggaaaaccctatatttgtagtaagccgggaacctctgaataccataggattaatatatgaaaaaatttccctccctaaagtacatccacgttatgat

SEQ ID NO: 656058 - DNA, 120 bp, Artificial Sequence
  ENSG00000183735_11 (sequence is synthesized)
ttagacggggatgctagcatggctaaggcaataacaggggttgtgtgttatgcctgcagaattgccagtaccttactgctttatcaggaattaatgcgaaaggggatacgatggctgatt

SEQ ID NO: 656059 - DNA, 120 bp, Artificial Sequence
  ENSG00000183735_12 (sequence is synthesized)
atgaaactgttcacaaaaagacagaagttgtgatcacattggatttctgtatcagaaacattgaaaaaactgtgaaagtatatgaaaagttgatgaagatcaacctggaagcggcagagt

SEQ ID NO: 656060 - DNA, 120 bp, Artificial Sequence
  ENSG00000183735_13 (sequence is synthesized)
taggtgaaatttcagacatacacaccaaattgttgagactttccagttctcagggaacaatagaaaccagtcttcaggatatcgacagcagattatctccaggtggatcactggcagacg

SEQ ID NO: 656061 - DNA, 120 bp, Artificial Sequence
  ENSG00000183735_14 (sequence is synthesized)
catgggcacatcaagaaggcactcatccgaaagacagaaatgtagaaaaactacaagtcctgttaaattgcatgacagagatttactatcagttcaaaaaagacaaagcagaacgtagat

SEQ ID NO: 656062 - DNA, 120 bp, Artificial Sequence
  ENSG00000183735_15 (sequence is synthesized)
tagcttataatgaagaacaaatccacaaatttgataagcaaaaactgtattaccatgccacaaaagctatgacgcactttacagatgaatgtgttaaaaagtatgaggcatttttgaata

SEQ ID NO: 656063 - DNA, 120 bp, Artificial Sequence
  ENSG00000183735_16 (sequence is synthesized)
agtcagaagaatggataagaaagatgcttcatcttaggaaacagttattatcgctgactaatcagtgttttgatattgaagaagaagtatcaaaatatcaagaatatactaatgagttac

SEQ ID NO: 656064 - DNA, 120 bp, Artificial Sequence
  ENSG00000183735_17 (sequence is synthesized)
aagaaactctgcctcagaaaatgtttacagcttccagtggaatcaaacataccatgaccccaatttatccaagttctaacacattagtagaaatgactcttggtatgaagaaattaaagg

SEQ ID NO: 656065 - DNA, 120 bp, Artificial Sequence
  ENSG00000183735_18 (sequence is synthesized)
aagagatggaaggggtggttaaagaacttgctgaaaataaccacattttagaaaggtttggctctttaaccatggatggtggccttcgcaacgttgactgtctttagctttctaatagaa

SEQ ID NO: 656066 - DNA, 120 bp, Artificial Sequence
  ENSG00000183735_19 (sequence is synthesized)
gtttaagaaaagtttccgtttgcacaagaaaataacgcttgggcattaaatgaatgcctttatagatagtcacttgtttctacaattcagtatttgatgtggtcgtgtaaatatgtacaa

SEQ ID NO: 656067 - DNA, 120 bp, Artificial Sequence
  ENSG00000183735_20 (sequence is synthesized)
tattgtaaatacataaaaaatatacaaatttttggctgctgtgaagatgtaattttatcttttaacatttataattatatgaggaaatttgacctcagtgatcacgagaagaaagccatg

SEQ ID NO: 656068 - DNA, 120 bp, Artificial Sequence
  ENSG00000183735_21 (sequence is synthesized)
accgaccaatatgttgacatactgatcctctactctgagtggggctaaataagttattttctctgaccgcctactggaaatatttttaagtggaaccaaaataggcatccttacaaatca

SEQ ID NO: 656069 - DNA, 120 bp, Artificial Sequence
  ENSG00000183735_22 (sequence is synthesized)
ggaagactgacttgacacgtttgtaaatggtagaacggtggctactgtgagtggggagcagaaccgcaccactgttatactgggataacaatttttttgagaaggataaagtggcattat

SEQ ID NO: 656070 - DNA, 120 bp, Artificial Sequence
  ENSG00000183735_23 (sequence is synthesized)
tttattttacaaggtgcccagatcccagttatccttgtatccatgtaatttcagatgaattattaagcaaacattttaaagtgaattcattattaaaaactattcatttttttcctttgg

SEQ ID NO: 656071 - DNA, 120 bp, Artificial Sequence
  ENSG00000183735_24 (sequence is synthesized)
ccataaatgtgtaattgtcattaaaattctaaggtcatttcaactgttttaagctgtatatttctttaattctgcttactatttcatggaaaaaaataaatttctcaattttaatgtaaa

SEQ ID NO: 656072 - DNA, 120 bp, Artificial Sequence
  ENSG00000183735_25 (sequence is synthesized)
ggccagggcttgcgaagccggaagtgtcctgagtctcgaggaggccgcgggagcccgccggcggtggcgcggcggagacccggctggttgcaaattttttttttctcttagtataacaag

SEQ ID NO: 656073 - DNA, 120 bp, Artificial Sequence
  ENSG00000183735_26 (sequence is synthesized)
taggccaaggagctactgcaaatgtctttcgtggaagacataagtgtggaaatctaaaatgagaatttcagaagtataagaattaattaaaagattgtgaagtcgagcatggtggctcac

SEQ ID NO: 656074 - DNA, 120 bp, Artificial Sequence
  ENSG00000183735_27 (sequence is synthesized)
aaggaagagatggaaggggtggttaaagaacttgctgaaaataaccacattttagaaagacggagtttcgctgttgcccaggctggagtccaatggcgtgatctcagctcactgtaacct

SEQ ID NO: 656075 - DNA, 120 bp, Artificial Sequence
  ENSG00000183735_28 (sequence is synthesized)
gtatgtctatatgacttaggaaattattcacttaaattgataccctttccaagtgattttgtggtctttcttttttactttttatcctttcttgaattcattatataagaaaattctctc

SEQ ID NO: 656076 - DNA, 120 bp, Artificial Sequence
  ENSG00000183735_29 (sequence is synthesized)
tattatatttatatctatttttaactcttagaaattggtggtttattgtgtttttaattaacctgataaaaatgtgtaagcttgaataattttgtgtaaaagtttttcttaccctatacc

SEQ ID NO: 656077 - DNA, 120 bp, Artificial Sequence
  ENSG00000183735_30 (sequence is synthesized)
acacacacagaggaaagaaaatattaagaatcctgtatattacacaggtatccaaacataaaaatactttagaattgcttactgtatggacaggttatatggaatggagtttgtagtatc

SEQ ID NO: 656078 - DNA, 120 bp, Artificial Sequence
  ENSG00000183735_31 (sequence is synthesized)
cacattaacaaagcaagtttatatggactggttatgatattagggatatgaattagaaatggatgttgttgcactcatttaaaatattttgcctctcactttatccccagttatagtgtc

SEQ ID NO: 656079 - DNA, 120 bp, Artificial Sequence
  ENSG00000183735_32 (sequence is synthesized)
attttaggccaaggagctactgcaaatgtctttcgtggaagacataagatactcagtgttcttcatgtaagtgactacacatagtatgcactctgtaaatgtttgctgaatgaaagaata

SEQ ID NO: 656080 - DNA, 120 bp, Artificial Sequence
  ENSG00000183735_33 (sequence is synthesized)
agtgaatgaatgaggactgattagactaccccaagacaacctaaagttctccaaaggaaacaaatatgtactttacccattatagtgtggaaatctaaaatgagaatttcagaagtataa

SEQ ID NO: 656081 - DNA, 120 bp, Artificial Sequence
  ENSG00000183735_34 (sequence is synthesized)
tttgaattgaagtaatctacaaaagaaatgtggtccagactttagactttgttgggactgtgatgatcatttctggcttttggcaatctggatctgaacctttggttttatttagctttc

SEQ ID NO: 656082 - DNA, 120 bp, Artificial Sequence
  ENSG00000183735_35 (sequence is synthesized)
cctcttagtaattagttataattcagttaaattaatttggtatatctgtaagggtagcttcttaagctgtttttttcagagatgtgattctgtcaggaaaaaggttgattgtgttaaaaa

SEQ ID NO: 656083 - DNA, 120 bp, Artificial Sequence
  ENSG00000183735_36 (sequence is synthesized)
ttgcagtttgtgcttttgctcttacattttgaaattttttatgtttgttgtaatacaatgtttaataaggttatctattgaccagttaaaagaaaataaaacataaacatcattctaaaa

SEQ ID NO: 656084 - DNA, 120 bp, Artificial Sequence
  ENSG00000183735_37 (sequence is synthesized)
atccccgctccgcgccgcgcggccggtcctcgacctgcatcccgtccggcggctttgggcataaagaggacgactccgttaccgggcctgggccctggctgcctggggaggcaggggcac

SEQ ID NO: 656085 - DNA, 120 bp, Artificial Sequence
  ENSG00000183735_38 (sequence is synthesized)
ctctttcccttagactcgctgttttctaccctctttccgagcgtcgacacaacgggcagtttttaaattataacaagaggattgcctgatccagccaagatgcagagcacttctaatcat

SEQ ID NO: 656086 - DNA, 120 bp, Artificial Sequence
  ENSG00000183735_39 (sequence is synthesized)
ataaagcactgtgagatctcaaatgaaaattaattatggcatatataaataaccgtacaaccactattgtacttcagtcagtcagattcaaagtattttgattgttttatggatcctgtg

SEQ ID NO: 656087 - DNA, 80 bp, Artificial Sequence
  ENSG00000183735_40 (sequence is synthesized)
ggcgcggtcggtcaggcctgcgccgcccggcggggagcgctcccgccccctgtgggaggctgggatgctgagtcagagcg

SEQ ID NO: 656088 - DNA, 120 bp, Artificial Sequence
  ENSG00000183735_41 (sequence is synthesized)
ggggcgggggcgggcgcaccgagaagccccggacgacccgaggccaagccatccaggaccccggctgcgtggacactgcctctgggtataacaagaggattgcctgatccagccaagatg

SEQ ID NO: 656089 - DNA, 120 bp, Artificial Sequence
  ENSG00000183735_42 (sequence is synthesized)
agctcataacctattcctttgctggcactattagatttaaactttcttaggagctaggcatggtagtacacacctagagtcgcaactactcaggaggccgaggcaggaggatcacttgag

SEQ ID NO: 656090 - DNA, 120 bp, Artificial Sequence
  ENSG00000183735_43 (sequence is synthesized)
ggttgctgtgagccgagatcatgccactgtcctccagcctgggcgacagagaccctgtctcaaaaaataaaaaaaaagtaaagaagagtggctcctgggccagcagcttcagcctcacat

SEQ ID NO: 656091 - DNA, 120 bp, Artificial Sequence
  ENSG00000183735_44 (sequence is synthesized)
acatgggaacttattagaaatgcacattttgggaccccacctcggatgtgttgagtcagcaactcactggcagaacccagcaaaggccctttttaataagccttccaggtgattctcatg

SEQ ID NO: 656092 - DNA, 120 bp, Artificial Sequence
  ENSG00000183735_45 (sequence is synthesized)
ctgctaaaatctgggtaatcactgttttcattttcttttatatgtattattaaatgactgttactctacaaacatatggttgttatttttactttttggataccattatagtgtaggcat

SEQ ID NO: 656093 - DNA, 120 bp, Artificial Sequence
  ENSG00000183735_46 (sequence is synthesized)
ttcccaggtttttttggtaacaccattttcttaatgatatgatgttgcagccagtggatttattacagtcttacttattattgctctactgttggtcctttagtttgcttttcactcttc

SEQ ID NO: 656094 - DNA, 120 bp, Artificial Sequence
  ENSG00000183735_47 (sequence is synthesized)
aggatcacttgagctgaggcattaaaagctgcaacgagttatgatggtgccactgcaccctagcctgggcaactgcacgaaatcttgtctgtaaaataaataatttaaataaataaactt

SEQ ID NO: 656095 - DNA, 120 bp, Artificial Sequence
  ENSG00000183741_0 (sequence is synthesized)
atgggctgtgggtgccgctgagcaagatggagctgtctgcagtgggcgagcgggtcttcgcggccgaatccatcatcaaacggcggatccgaaagggacgcatcgagtacctggtgaaat

SEQ ID NO: 656096 - DNA, 120 bp, Artificial Sequence
  ENSG00000183741_1 (sequence is synthesized)
ggaaggggtgggcgatcaagtacagcacttgggagcccgaggagaacatcctggactcgcggctcattgcagccttcgaacaaaaggagagggagcgtgagctgtatgggcccaagaaga

SEQ ID NO: 656097 - DNA, 120 bp, Artificial Sequence
  ENSG00000183741_2 (sequence is synthesized)
ggggacccaaacccaaaactttcctcctgaaggcgcgggcccaggccgaggccctccgcatcagtgatgtgcatttctctgtcaagccgagcgccagtgcctcctcgcccaagctgcact

SEQ ID NO: 656098 - DNA, 120 bp, Artificial Sequence
  ENSG00000183741_3 (sequence is synthesized)
ccagcgcagccgtgcaccggctcaagaaggacatccgccgctgccaccgtatgtcccgccgtcccctgccccgcccggacccgcaggggggcagccccggactgcgcccgcccatttcgc

SEQ ID NO: 656099 - DNA, 120 bp, Artificial Sequence
  ENSG00000183741_4 (sequence is synthesized)
ccttctcggagacggtgcgcatcatcaaccgcaaggtgaagccgcgggagcccaagcggaaccgcatcatcctgaacctgaaggtgatcgacaagggcgctggcggcgggggcgccgggc

SEQ ID NO: 656100 - DNA, 120 bp, Artificial Sequence
  ENSG00000183741_5 (sequence is synthesized)
agggggccggggcgctggcccgccccaaagtcccctcgcggaaccgcgttataggcaagagcaagaagttcagcgagagcgtcctgcgtacacagatccgccacatgaagttcggcgcct

SEQ ID NO: 656101 - DNA, 120 bp, Artificial Sequence
  ENSG00000183741_6 (sequence is synthesized)
gcctttgcgctgtacaagcctccgcccgcccccctggtagccccgtcccccggcaaggctgaggcctcagccccgggccctgggctacttctggccgcccccgccgccccctacgacgcc

SEQ ID NO: 656102 - DNA, 120 bp, Artificial Sequence
  ENSG00000183741_7 (sequence is synthesized)
gctctggctcctccggctgcccctcgcctacaccacagtcctctgaccccgacgacacgccccccaagctcctccccgagaccgtgagcccatccgcccccagctggcgcgagccggagg

SEQ ID NO: 656103 - DNA, 120 bp, Artificial Sequence
  ENSG00000183741_8 (sequence is synthesized)
tgctcgacctgtccctccctcccgagtcggcagccaccagcaagcgggcaccgcctgaggtcacagctgctgccggcccggcacctcccacggcccctgagcccgccggtgcctcctccg

SEQ ID NO: 656104 - DNA, 120 bp, Artificial Sequence
  ENSG00000183741_9 (sequence is synthesized)
agcccgaggctggggactggcgccccgagatgtcaccctgctccaatgtggtcgtcaccgatgtcaccagcaacctcctgacggtcacaatcaaggaattctgcaaccctgaggatttcg

SEQ ID NO: 656105 - DNA, 120 bp, Artificial Sequence
  ENSG00000183741_10 (sequence is synthesized)
agaaggtggctgctggggtagcaggcgccgctgggggcggtggcagcattggggcgagcaagtgagggggctccaccaaggaggggggcttgggggggccctcctgcccgaagtcatact

SEQ ID NO: 656106 - DNA, 120 bp, Artificial Sequence
  ENSG00000183741_11 (sequence is synthesized)
cttgctcccaccccacccttgcccccagccctctctccctgtgctttgcttgtctcaaatggctcggtgttgacccagggatggggctgggtagttggggtcccagaaagccgggggtag

SEQ ID NO: 656107 - DNA, 120 bp, Artificial Sequence
  ENSG00000183741_12 (sequence is synthesized)
gggccaccctggaatggggcaggggaagggcacaccccctgcccatgcatggtagcccactgggtggtttctggaaagccctagaaactagggttcctctgccccttccacatcccacct

SEQ ID NO: 656108 - DNA, 120 bp, Artificial Sequence
  ENSG00000183741_13 (sequence is synthesized)
gtctctctagcttgcttcctgctctcctgtgcggcgtctgatttctcggtgctaacctggcagctgtggggcccttaggagccccccaccgagggtggacacagtccctttccttcctgc

SEQ ID NO: 656109 - DNA, 120 bp, Artificial Sequence
  ENSG00000183741_14 (sequence is synthesized)
agatgcctaggcaggaggagggcttcctgcctgtttggcaaagtcccaggcagaggccaaggatgaggcctgactcggctcctccctccacatcagccagggcatcagaagttgggccag

SEQ ID NO: 656110 - DNA, 120 bp, Artificial Sequence
  ENSG00000183741_15 (sequence is synthesized)
ggcggggtcttccctgctcgattttggacgaggcctaagtagaccccctatgccctgccccagccctggctctttcctaaccccctcaacggtgggaggaactggcagagggtgcgcctg

SEQ ID NO: 656111 - DNA, 120 bp, Artificial Sequence
  ENSG00000183741_16 (sequence is synthesized)
gccacagcctccccgcatctaaaggccccttcagttcttgaccaaaggtgctacgagaacctgccgtggaaacttccagttgtgcgtctgccccactcgctgtgtttgtccgtgggttca

SEQ ID NO: 656112 - DNA, 120 bp, Artificial Sequence
  ENSG00000183741_17 (sequence is synthesized)
tacatgcattgggtgctaggccccaggctgccgggtggcaccctttacagttcctttgaacaggggcattgaaggcctggactgcctctcgcctcagtaggcctggggaccaggcttggg

SEQ ID NO: 656113 - DNA, 120 bp, Artificial Sequence
  ENSG00000183741_18 (sequence is synthesized)
tctggaggtttgctgtggaagtcaccaggcctcccctcctggcccaggtgtgctgggggcaccgtgccccccacccccctgccctcctcagggtggtcagcccaacctgtcggaccttca

SEQ ID NO: 656114 - DNA, 120 bp, Artificial Sequence
  ENSG00000183741_19 (sequence is synthesized)
cttcacatcatggtggggaccgagatagagagggagaccccattccaagctccctcttcctccgggtgtttggggaggatgctgaagaatccattcccgagggcctcccggcttgtccca

SEQ ID NO: 656115 - DNA, 120 bp, Artificial Sequence
  ENSG00000183741_20 (sequence is synthesized)
gcccctcttttgcttctgaccacggaggctttctcacagcccagcctgcctgaagcaaaggaggctcccgtgtcctgggcagcttctgtttccctctgctgcctgggagctgaggcaccc

SEQ ID NO: 656116 - DNA, 120 bp, Artificial Sequence
  ENSG00000183741_21 (sequence is synthesized)
gtgccagtggcagaggccacagccccagccttaggccaggccctgggagggcaggcaggcaaaggggagaccagagggtctgtgttctccaggagaatgagggtgttggtcccagaattg

SEQ ID NO: 656117 - DNA, 120 bp, Artificial Sequence
  ENSG00000183741_22 (sequence is synthesized)
ggaccggggccccgctggccagccctgggccacttcccgggtctccattgtgcgtgggtggcgtgttccaggcgtggctggagctggcttcctggctgtgctgccatgggcccctccctc

SEQ ID NO: 656118 - DNA, 120 bp, Artificial Sequence
  ENSG00000183741_23 (sequence is synthesized)
agaagcacgttggcaggaggccgatcagaaccctagcgcctttggtcctaagaatgggaggctgccttccttcccaatctccctgccagggcccacagcgtggccctagccctcccctcc

SEQ ID NO: 656119 - DNA, 120 bp, Artificial Sequence
  ENSG00000183741_24 (sequence is synthesized)
ccgggatgtagaacggggaccctcgcagggttggggcgggggctgatactcctcggcccctccctaccctgccctgtgtgttggctttgtggccgtccaagtgccaattggcttttcgcc

SEQ ID NO: 656120 - DNA, 120 bp, Artificial Sequence
  ENSG00000183741_25 (sequence is synthesized)
cccctcccccaggtgagtgaccacctgggtgccagttacaggtgtttccagagaccatagaaatgtgttttcctgagagttcgtgtcattcgtgacttttttgtaaagaagttgtgtttt

SEQ ID NO: 656121 - DNA, 85 bp, Artificial Sequence
  ENSG00000183741_26 (sequence is synthesized)
tcgtgtcattcgtgacttttttgtaaagaagttgtgttttcagaggtgattttatgacaggaaagtgaaagaattagttttgcga

SEQ ID NO: 656122 - DNA, 120 bp, Artificial Sequence
  ENSG00000183741_27 (sequence is synthesized)
gggggagaaagagctatttaagaaaaaatagtaacgcagtgattgcacaggtgaggtggcaatgtcaggatggggcggaggcctgggcccagctggcaggtcccctggcatcgcaggcac

SEQ ID NO: 656123 - DNA, 120 bp, Artificial Sequence
  ENSG00000183741_28 (sequence is synthesized)
tgtggagagggcctggacccagatctccacacccgtgcttgctcaaagggaaggacaacagcgggcccccgggagctaacccaagctgcaggtcccggcaagctgaggtttgggagggtg

SEQ ID NO: 656124 - DNA, 120 bp, Artificial Sequence
  ENSG00000183741_29 (sequence is synthesized)
ggggttgtcactggtgattttctccagggggctggtgagtgggcagtttggtttcttgcccccttctgttcctttcccagttgttgggccatctggtccccaccaccgccaccctatggg

SEQ ID NO: 656125 - DNA, 120 bp, Artificial Sequence
  ENSG00000183741_30 (sequence is synthesized)
ggagacctccctccccacgggtcaccctaaagcccacaacctctctgagcctccctggcctgaaaggggatgcaggcttcaggaggcaagaagctgggcccctgggggtggctggggaga

SEQ ID NO: 656126 - DNA, 120 bp, Artificial Sequence
  ENSG00000183741_31 (sequence is synthesized)
gggaatgcatttcccttgccacaggtggtctgcttctgctggcctgagctccaagtggagcagcccgggccagccttggtgcatgaagaggcaccaggcacaccgccttgaggtgggcag

SEQ ID NO: 656127 - DNA, 120 bp, Artificial Sequence
  ENSG00000183741_32 (sequence is synthesized)
tgcccatgggggcccgagtggatgggaccgagggtgagtggagcctccttcctcccctctctagtacccccgcctcccacacacttgcacggatcggcctcccttgggagatcagcctcc

SEQ ID NO: 656128 - DNA, 120 bp, Artificial Sequence
  ENSG00000183741_33 (sequence is synthesized)
atgggcccctcgtccacccttgctgctttccatttgcctaattaccaagcagaagttgcaatctggtttgctttatttttgtatgtgaaataacccccaaagcccaatctcctcctacgt

SEQ ID NO: 656129 - DNA, 120 bp, Artificial Sequence
  ENSG00000183741_34 (sequence is synthesized)
tcaatattggttggggcatccgtcatctccccttaagtgcgccccctccccacccaagtatcataggaaaccggtgaggtctggtgtctctggtttgagacggtaagttgggacccatcc

SEQ ID NO: 656130 - DNA, 120 bp, Artificial Sequence
  ENSG00000183741_35 (sequence is synthesized)
ctgtctgggtgcccactctgacctttagtttgcccttctgtgaaatgggtgtattgggtagcaagccctcttcagaaagcgctgctggtgtcagagcagctgcccagtaccaggtggggg

SEQ ID NO: 656131 - DNA, 120 bp, Artificial Sequence
  ENSG00000183741_36 (sequence is synthesized)
gtcaaggttgctggtactggggcccccagctgcccacaacccctctttgttctcaccctgcaaaggggtcaaggtcaaaatgagcctcatccttcctatgatctgggaagaggtgatgat

SEQ ID NO: 656132 - DNA, 120 bp, Artificial Sequence
  ENSG00000183741_37 (sequence is synthesized)
caagtccccaacttcagtgtgaggtggacagagttggggggatggcccctttttgaagaggtgaaaatggttttggagaagcgcagctgcttcactgggggaatgcggcagggactgggg

SEQ ID NO: 656133 - DNA, 120 bp, Artificial Sequence
  ENSG00000183741_38 (sequence is synthesized)
cccaggatgctttggcctatggggaaaagccctttaaaaggcagggcccaggccctggagccagcacaagactggcctcgagcccctgagccaggaggtcctggaggagagccaggccgg

SEQ ID NO: 656134 - DNA, 120 bp, Artificial Sequence
  ENSG00000183741_39 (sequence is synthesized)
tgggcccgcccaaggctggagggtcagccccaacagggagctgggttggccagggggctggactgctaccagcctctctggcctatggggacccaagaggacacatcccccttttgccca

SEQ ID NO: 656135 - DNA, 76 bp, Artificial Sequence
  ENSG00000183741_40 (sequence is synthesized)
gcctatggggacccaagaggacacatcccccttttgcccactcttctgtgtcattttgttgttttggtttgtggtg

SEQ ID NO: 656136 - DNA, 120 bp, Artificial Sequence
  ENSG00000183741_41 (sequence is synthesized)
gacagtggagccccacctggtcagttccacttccgggctcccatgcacttgcccaaggcggcctctttgggacggggatggtttgaggaaacacttttaaagaaaaaaggaagacattga

SEQ ID NO: 656137 - DNA, 120 bp, Artificial Sequence
  ENSG00000183741_42 (sequence is synthesized)
aaggttttagtttcttccctatctgcatgtcctctcatatagaaagcccagaattaggggctagaactccaggagagggtctccccgactcatctcttgctgacggtcaccaggatgcag

SEQ ID NO: 656138 - DNA, 120 bp, Artificial Sequence
  ENSG00000183741_43 (sequence is synthesized)
aaatagggagatggttagtgggggccaaagatgccccctcccaggccttcgtggttccctcctccgccccctgcaatctttggaggagtcagtgcctcactccagcagtgagtgcctact

SEQ ID NO: 656139 - DNA, 120 bp, Artificial Sequence
  ENSG00000183741_44 (sequence is synthesized)
gtatgcaggtagtcagccaggcaaagagagactaacggtctcatgggggaaccctcttgcgggaggccgggtagctggagcgaagcgttccggctgcccttgctgctgggtggagtggag

SEQ ID NO: 656140 - DNA, 120 bp, Artificial Sequence
  ENSG00000183741_45 (sequence is synthesized)
agggagacttctttttgttggttttaatttaaaaacacaaaggcctaaagaaatacgtatcttataatttttttaatttttgagacgttcatttaatgaattgtgcacgaatgaattcta

SEQ ID NO: 656141 - DNA, 120 bp, Artificial Sequence
  ENSG00000183741_46 (sequence is synthesized)
tatatataaaatatacatatatagctctatatttggggaggggcactgtctcttttttctctcatttttaaaatgaagtgttgttgcctttgtatgtggttcaaccatccagctcccagc

SEQ ID NO: 656142 - DNA, 120 bp, Artificial Sequence
  ENSG00000183741_47 (sequence is synthesized)
tggctaaactttgcctccagtggtcaaagatgggaaaagagtggggttggcaggagatggaaaacggaggtgccgccccagcatggggggcaggtcccccagtccaccctgcccctcccc

SEQ ID NO: 656143 - DNA, 120 bp, Artificial Sequence
  ENSG00000183741_48 (sequence is synthesized)
ctgtggagaagacgcttagttgggggtgtgggtttgggctccattctggattcggcggttccgggggaggggtgggtctgtgccgattactctgtcttgtacgtttgttctgctgctctt

SEQ ID NO: 656144 - DNA, 120 bp, Artificial Sequence
  ENSG00000183741_49 (sequence is synthesized)
caatattgtatcaacgccaggaaaggggggtgaaaagcctcttttaccccccaaataaattgtcacattccgaagctgaggcctagcccctaggttggggtgtgtctgtgtcttcttcca

SEQ ID NO: 656145 - DNA, 120 bp, Artificial Sequence
  ENSG00000183741_50 (sequence is synthesized)
gcacggggcctggaagggagggacagatacgcggccgcccaagcgggccggccttttcagaggggccccagctgggcagggggtggttgtgagcccccccagaagcccctgatggcaggc

SEQ ID NO: 656146 - DNA, 120 bp, Artificial Sequence
  ENSG00000183741_51 (sequence is synthesized)
ctcagccagcatcagcttcaacaagagggttttgggactggggataatcctccctgttgaaaccaggggctggggatgcctttagggctccaggaaagggggtggctgaggcaggtgggg

SEQ ID NO: 656147 - DNA, 120 bp, Artificial Sequence
  ENSG00000183741_52 (sequence is synthesized)
gatgcccatgggaagggggcatttgtttgagctgttatgactgtgctgggagttggaacccagggggagagtgagtggggtcccacctcctggcagggcacaaggagaggatttggggga

SEQ ID NO: 656148 - DNA, 120 bp, Artificial Sequence
  ENSG00000183741_53 (sequence is synthesized)
ccacctgcctccctgcccccagcttcccccgttcagtctttcaggatttgttcttcatggctcccctcctttcttggggatccaacttgaatttgacctcaaatcattttactttgaatt

SEQ ID NO: 656149 - DNA, 120 bp, Artificial Sequence
  ENSG00000183741_54 (sequence is synthesized)
tatcacccaggctgggccactaactttagggctctgagcctcagtttccccccactcccggccatttctgggggatggggatgtgggagtgagagcatagcatattagtctctgctaggg

SEQ ID NO: 656150 - DNA, 120 bp, Artificial Sequence
  ENSG00000183741_55 (sequence is synthesized)
agggaagaacttccagaggaagccatcttggaggatttgggtttttattttattttgacaaggaaaaacagagtctgggaaaggaagggcaagatggccctaggtggcaggcacggctgc

SEQ ID NO: 656151 - DNA, 120 bp, Artificial Sequence
  ENSG00000183741_56 (sequence is synthesized)
gccccctcccacccgacagccggtgactttgtgggaggactctttttcggagaagagaagcagaagtgaaagaaatgttggtttccagaatttcatatttttataacccccaccctcaag

SEQ ID NO: 656152 - DNA, 120 bp, Artificial Sequence
  ENSG00000183741_57 (sequence is synthesized)
cgacgcacatcctaggggatccagggagtaaccttaaccctgatgcttctcttggggagggatgggcggagcagctggaaggctggtgggctgtgtgacagcctctcagtgcagctgggg

SEQ ID NO: 656153 - DNA, 120 bp, Artificial Sequence
  ENSG00000183741_58 (sequence is synthesized)
caccctctagcggcgaagcgagtatgaccatgagcattgatacacagaacgcctttttttcttgatagttcttttggttcctgagctggctgtgggcctaatacagggctgagcccccac

SEQ ID NO: 656154 - DNA, 120 bp, Artificial Sequence
  ENSG00000183741_59 (sequence is synthesized)
atggattatctcctttaattctttcaacagttccaagaagtaaggagtattatccccatttcacagataaaaaatcaaggcccaggaagggaaagtgacttacccgaggtccagcttcct

SEQ ID NO: 656155 - DNA, 120 bp, Artificial Sequence
  ENSG00000183741_60 (sequence is synthesized)
ggcttcatcctgtctccttttcttcatcttgtgccttgagtagtccatgtcaggttaaagggggaaggcagacacacacaggaaactatgaaggctgcagagttggcgtggcaggggata

SEQ ID NO: 656156 - DNA, 120 bp, Artificial Sequence
  ENSG00000183741_61 (sequence is synthesized)
gagacacagatagtaggacttttttatctggaccctaagaaacaggtagcctgagagtgatgtggatgtttgtgaggggctatggagattagcttgggctgaacacattgttctggggct

SEQ ID NO: 656157 - DNA, 120 bp, Artificial Sequence
  ENSG00000183741_62 (sequence is synthesized)
ccctgagaggcagtatggcagagtcagcaaattacactcagcgctttctgccaggaactactctgaagcaaacaggagcccatgagatagcttccatcctccctgtttcacgcatgggga

SEQ ID NO: 656158 - DNA, 120 bp, Artificial Sequence
  ENSG00000183741_63 (sequence is synthesized)
aacagggccagaggtgtccagtaacttgcccacagacatggggagaggccatggtagagttcaggtgcttaaaccttcacaccatctacggtgcttgccaagcccacagagctatgcctg

SEQ ID NO: 656159 - DNA, 120 bp, Artificial Sequence
  ENSG00000183741_64 (sequence is synthesized)
tcacctggtcagggtgcaataagcatgttggctacagttatttttaattcatcaggcagacccaggtcccactttcaaagagttctccatgtggggaggaagaggaagggtaaacccttt

SEQ ID NO: 656160 - DNA, 120 bp, Artificial Sequence
  ENSG00000183742_0 (sequence is synthesized)
atacggagcaaggcatgtttgaagagtacccgggtttggtagagtgacttctattcactaaaaccatgtgtctgaactgaagaagcttgggctcacttccacaaatgtggaaaaatgcta

SEQ ID NO: 656161 - DNA, 120 bp, Artificial Sequence
  ENSG00000183742_1 (sequence is synthesized)
atcactgaaagaaaacattttcggtcaggaagaattgcacaaagtatgtctgaagcaaatttgattgacatggaagctggaaaactctcaaaaagttgcaatattacagaatgccaggac

SEQ ID NO: 656162 - DNA, 120 bp, Artificial Sequence
  ENSG00000183742_2 (sequence is synthesized)
ccagacttgcttcacaattggccggatgctttcacccttcgtggtaataatgcttccaaagttgcaaatccattctggaatcaactgtctgcttctaacccatttttggatgacataact

SEQ ID NO: 656163 - DNA, 120 bp, Artificial Sequence
  ENSG00000183742_3 (sequence is synthesized)
caactaagaaataacaggaagagaaataatatttccatcttaaaggaagatccttttcttttctgtagagaaatagaaaatggaaattcttttgattcctccggtgatgaacttgatgtg

SEQ ID NO: 656164 - DNA, 120 bp, Artificial Sequence
  ENSG00000183742_4 (sequence is synthesized)
catcagttacttaggcagacttcctcaagaaattctggaagatctaaaagtgtttcagaacttctggacattttagacgacacagcacatgcccatcagagtatacataactctgaccag

SEQ ID NO: 656165 - DNA, 120 bp, Artificial Sequence
  ENSG00000183742_5 (sequence is synthesized)
atcctactacacgacttagagtggcttaaaaatgatcgggaggcttataaaatggcttggttaagtcaacgccagctggcccgctcctgccttgatttgaatacaattagtcagagccct

SEQ ID NO: 656166 - DNA, 120 bp, Artificial Sequence
  ENSG00000183742_6 (sequence is synthesized)
ggatgggcccagacacaacttgcggaggtcaccatagcttgcaaagtaaaccatcaaggagggtcagtacaattacctgaatcagacatcactgttcatgtgccccaaggtcatgtggct

SEQ ID NO: 656167 - DNA, 120 bp, Artificial Sequence
  ENSG00000183742_7 (sequence is synthesized)
gtgggagaattccaagaggtgtctctaagggctttccttgatccgccacacatgcttaaccatgatctttcgtgcactgtgagcccgttgttggaaatcatgttaggcaacctcaataca

SEQ ID NO: 656168 - DNA, 120 bp, Artificial Sequence
  ENSG00000183742_8 (sequence is synthesized)
atggaagcccttttgctggagatgaaaattggggctgaagtaagaaaggatcctttcagccaagtcatgacagaaatggtgtgtttacacagcttgggtaaagaaggcccttttaaagtt

SEQ ID NO: 656169 - DNA, 120 bp, Artificial Sequence
  ENSG00000183742_9 (sequence is synthesized)
ttaagcaactgctacatttataaagacaccatccaagtcaagctaatcgacttgagtcaggtaatgtatctagtggttgctgcacaagctaaagctcttccgtcaccagctgccaccatt

SEQ ID NO: 656170 - DNA, 120 bp, Artificial Sequence
  ENSG00000183742_10 (sequence is synthesized)
tgggattatatccacaaaaccacctcaattggaatttatggacccaaatatatccatcccagttttactgttgttttaacagtttgtggacacaattatatgccaggacagcttacaatt

SEQ ID NO: 656171 - DNA, 120 bp, Artificial Sequence
  ENSG00000183742_11 (sequence is synthesized)
tctgatattaagaagggtggaaaaaacatatctccagttgtgtttcagctctgggggaagcagtcatttttacttgacaagccacaagatttaagtatttctattttttcctgtgatcct

SEQ ID NO: 656172 - DNA, 120 bp, Artificial Sequence
  ENSG00000183742_12 (sequence is synthesized)
cacttgtttgatttttgtgttcaagtggagcctcccaatggtgaaccagttgcacagttctctatcactactcctgatccaaccccaaacctaaaaagactctcgaatctgccaggctat

SEQ ID NO: 656173 - DNA, 120 bp, Artificial Sequence
  ENSG00000183742_13 (sequence is synthesized)
ttgcagaagaaggaggaaatcaagtctgctcctttatcaccaaaaattcttgttaaatatcctacatttcaagataaaacattgaactttagcaactatggggtaaccctgaaggcagtg

SEQ ID NO: 656174 - DNA, 120 bp, Artificial Sequence
  ENSG00000183742_14 (sequence is synthesized)
ctaagacaaagcaagattgattacttccttgaatatttcaaaggggacacaatagctctcctcggggaaggtaaggtaaaagctattggtcagtccaaagtgaaagaatggtatgtagga

SEQ ID NO: 656175 - DNA, 120 bp, Artificial Sequence
  ENSG00000183742_15 (sequence is synthesized)
gtcctcagaggtaagattggacttgtacactgcaaaaatgtcaaggtgatttcaaaggagcaagtaatgtttatgtcagatagtgtctttacaaccagaaatcttcttgaacagattgtc

SEQ ID NO: 656176 - DNA, 120 bp, Artificial Sequence
  ENSG00000183742_16 (sequence is synthesized)
ctgcctttaaaaaaattgacttatatctactcagttgtattaaccttggtgtcagaaaaagtttatgattggaaagttttagctgatgtcctgggttactcacatctgtccctggaagat

SEQ ID NO: 656177 - DNA, 120 bp, Artificial Sequence
  ENSG00000183742_17 (sequence is synthesized)
tttgatcaaattcaagcagacaaagaatcagagaaagtttcttatgttataaagaagttaaaggaagattgccacacagagagaaatacaaggaagtttctgtatgaacttattgtggct

SEQ ID NO: 656178 - DNA, 120 bp, Artificial Sequence
  ENSG00000183742_18 (sequence is synthesized)
cttctgaaaatggattgccaagagttagtcgcacgtctcatccaagaagctgctgttctgacttcagctgtcaagcttggaaaaggctggagggaactagctgaaaagttagtacgactc

SEQ ID NO: 656179 - DNA, 120 bp, Artificial Sequence
  ENSG00000183742_19 (sequence is synthesized)
acaaagcaacaaatggaggcatatgaaattcctcatcgaggaaacactggagatgttgctgttgagatgatgtggaaacctgcctatgattttctgtatacctggagtgctcactatgga

SEQ ID NO: 656180 - DNA, 120 bp, Artificial Sequence
  ENSG00000183742_20 (sequence is synthesized)
aataactacagagatgtgttacaagaccttcagtcagctttggacagaatgaaaaaccctgtgactaaacactggagagaattaactggagttttaatactagtaaattctttggaggtt

SEQ ID NO: 656181 - DNA, 120 bp, Artificial Sequence
  ENSG00000183742_21 (sequence is synthesized)
tctttggaggttttgagagtaactgcattctccacttctgaggaagtatagaaacaaagcgtgtgtttttgatgggagggaaaatgaggtaatggtgtgtgtgtgtgtgtgtctgtgtgt

SEQ ID NO: 656182 - DNA, 120 bp, Artificial Sequence
  ENSG00000183742_22 (sequence is synthesized)
gtctgtgtgtgtgtgtgtgtgtgtgtaggaaagaaagaatctcagaaaagcattatattaattttcttcatgctcaaaaccagtttttttttcctgatgaaagcacagcctaactgataa

SEQ ID NO: 656183 - DNA, 120 bp, Artificial Sequence
  ENSG00000183742_23 (sequence is synthesized)
ttttttttcctgatgaaagcacagcctaactgataaccaagatgggttttatcctcaaatatgtatttttgtgtatgtttcaaatacaagtattaggctgctttgttcttagaaaggaaa

SEQ ID NO: 656184 - DNA, 120 bp, Artificial Sequence
  ENSG00000183742_24 (sequence is synthesized)
gaagagtacccgggtttggtagagtgacttctattcactaaaaccatgtgtctgaactgaagaagcttgggctcacttccacaaatgtagccttgtcagatgatatgcaaatgattcaca

SEQ ID NO: 656185 - DNA, 120 bp, Artificial Sequence
  ENSG00000183742_25 (sequence is synthesized)
tcagtgtttgaagttcaaaccaaggaaaactatcagaaaaggcttctgctttctttaaaaaataaaactacttgaaaagaaaaaaatcaagaattagaaagaagagtataacaataaaga

SEQ ID NO: 656186 - DNA, 120 bp, Artificial Sequence
  ENSG00000183742_26 (sequence is synthesized)
agctgtttgaataattacatcacacagatatctgggtaaactagagactatcaacatgatcaaggcagtgttcccaggaggcagctagaaagaggggaagcaagcacacaccctgtggcc

SEQ ID NO: 656187 - DNA, 120 bp, Artificial Sequence
  ENSG00000183742_27 (sequence is synthesized)
agtcacggctgcccgctttccacacctgacctcttcagttcatcagtggggttcaccagcatcacccccatttttcatggggagaaactcagaagtggagagaacgtctgaggctacata

SEQ ID NO: 656188 - DNA, 120 bp, Artificial Sequence
  ENSG00000183742_28 (sequence is synthesized)
gccagtacaaagtaggttttctgcttgaaaaacctgtttctatttctttttaaaaaatcatactgcataacagaatagtaaaaacaaaatgcgtgttaagacttacagggaaacagttgc

SEQ ID NO: 656189 - DNA, 120 bp, Artificial Sequence
  ENSG00000183742_29 (sequence is synthesized)
cgtttcattttaagtgagacttgctactctttttcatcgtctcttgaaagactgacagaaggaaaatatgacttatcagaaatctgttgtctgcatgcatggacctagtgttttcatcag

SEQ ID NO: 656190 - DNA, 120 bp, Artificial Sequence
  ENSG00000183742_30 (sequence is synthesized)
ctcccttcagcatcttgggacctctctaatcctgcctaatttgggactttttctgcaggattgtaatgtaaaatagttctttagctcttggagatttttaataatacgagttattaaaaa

SEQ ID NO: 656191 - DNA, 120 bp, Artificial Sequence
  ENSG00000183742_31 (sequence is synthesized)
ccaccaccaccagaaacttgattaacttgattaccctgttgagtagagaggtcttaaccaccgaaaacactgatatctttatgttggcatgctcatgcaaacacatgtgtgtgtgtgtgt

SEQ ID NO: 656192 - DNA, 120 bp, Artificial Sequence
  ENSG00000183742_32 (sequence is synthesized)
gtgtgtgtgtgtgtgtgtgtgtaccacagtgttttataaagcacagcctaattgattatataggacaaaaattgtataggaccctgggtcagtataaatgctaatggctgacaaagttca

SEQ ID NO: 656193 - DNA, 120 bp, Artificial Sequence
  ENSG00000183742_33 (sequence is synthesized)
caaagagatgtattttgcttactcctctgttcaatcctctggttgcctgccagtgtttatgtgtgtatttggacagacattcatttattgtcattcagtcaataggtagagtatatgtgt

SEQ ID NO: 656194 - DNA, 120 bp, Artificial Sequence
  ENSG00000183742_34 (sequence is synthesized)
ctattttttggcaggcatatagatgcttgaggctaatgggaaaaaaccagcatgaactctgactttagtagtgctaagtaatagataattttaaaaaatgacaccgttaaatagaaaatg

SEQ ID NO: 656195 - DNA, 120 bp, Artificial Sequence
  ENSG00000183742_35 (sequence is synthesized)
gcatgcatactaacagttgcaatggagaggctgtgatgctacgagatataaacgtagagatgccatcatgtgaaactggaagtgggggtgggtcagggaaatttgttcttggaaagaaat

SEQ ID NO: 656196 - DNA, 120 bp, Artificial Sequence
  ENSG00000183742_36 (sequence is synthesized)
aatgaacctcaaggaagagtaggcattgtcctggtgtggtggggtgtaagcggtgatcccacaaagcactgaagctcttagatgggtgggagctgaataggtgcagatagcaggggtgaa

SEQ ID NO: 656197 - DNA, 120 bp, Artificial Sequence
  ENSG00000183742_37 (sequence is synthesized)
gaggatggagcaagaagaagccacattagggccattaaggctgctagaatttagaaagaaaacacacagcctcaaagaaatgtgggtaagccaaagaaggattttgttttgggaacctga

SEQ ID NO: 656198 - DNA, 120 bp, Artificial Sequence
  ENSG00000183742_38 (sequence is synthesized)
ataaaagatgtccatttggctaaaaagtaaaagcagaatctttttagggcttttaatatacccaccctgggatatttggtatgctggcaatggtaattcaaattggcgtttaagaataat

SEQ ID NO: 656199 - DNA, 120 bp, Artificial Sequence
  ENSG00000183742_39 (sequence is synthesized)
tgccactgcactccagcctgggtgacaggctgtctcaaaaaaaaaaaaaggaataatctgtacggctttcagtatttatatttgattataagggaacacagcctgaccaaataattatgt

SEQ ID NO: 656200 - DNA, 120 bp, Artificial Sequence
  ENSG00000183742_40 (sequence is synthesized)
atacacattcaaggacagaatttattttaattaaaaataaattatgagagaaggaaaaaaaagcacagtttttactttcagaacacagtccttttttgtggtgattttgctttctttaga

SEQ ID NO: 656201 - DNA, 120 bp, Artificial Sequence
  ENSG00000183742_41 (sequence is synthesized)
acattcttggaatcttattaacatgtcagctaaccagagaattttgggaagggatagtggggattaataactgggtttttccaggctccaagatctaagaagacagagatcttgttagct

SEQ ID NO: 656202 - DNA, 120 bp, Artificial Sequence
  ENSG00000183742_42 (sequence is synthesized)
gattagtgtagtaagattaaataaataatttaaggtttacattgcatcatgtattatgattgtgattgagaataataagagtttaaaaaaatgaaaaacaagatctctgtaatttgagga

SEQ ID NO: 656203 - DNA, 120 bp, Artificial Sequence
  ENSG00000183742_43 (sequence is synthesized)
aacaagatctctgtaatttgaggatgaaacaatggttctaatattaatacacacaaatatattttataatcttgtaacaaatccttccaggggaaatttttttttttttttttttttttt

SEQ ID NO: 656204 - DNA, 79 bp, Artificial Sequence
  ENSG00000183742_44 (sequence is synthesized)
ttttttttttttttgagccagagtctggctctgttgcccagactggagtgcggtgttagatccttctgcctccgcctcc

SEQ ID NO: 656205 - DNA, 88 bp, Artificial Sequence
  ENSG00000183742_45 (sequence is synthesized)
tagctgggattacaggcatgcaccaccttgtccgggtaatttttgtatttttagtggagacaaggttttaccattggtcatccacctg

SEQ ID NO: 656206 - DNA, 120 bp, Artificial Sequence
  ENSG00000183742_46 (sequence is synthesized)
aggcatgagccactgctcccagccttccagaggaattttaagcccatgtccaaacattctgtttgtataaatatattctaatttttaaataaatagtttctacttttctgaactttatat

SEQ ID NO: 656207 - DNA, 120 bp, Artificial Sequence
  ENSG00000183742_47 (sequence is synthesized)
tttttcttgctataatggattttcataatcagaaaagattaaattagtaatcatgaattgccttcaatatttggcagtaagtcaatgaaataataaggcacttatataccatctttgaca

SEQ ID NO: 656208 - DNA, 120 bp, Artificial Sequence
  ENSG00000183742_48 (sequence is synthesized)
tcattaaaagtatcaaatcccattaatctaaaacttctttaagcattttgaaagcagaaaatgtttacatggttctttcagttcctcaggctttttgtctaatgatgcgtgacttaggat

SEQ ID NO: 656209 - DNA, 120 bp, Artificial Sequence
  ENSG00000183742_49 (sequence is synthesized)
aagatttgaattaagtgcccagcttgaaacataataatttttctgtataagccacagatcctctacctcctttgtgttaaagcctttatatgaaacaattaagtagaagcattcaatagt

SEQ ID NO: 656210 - DNA, 120 bp, Artificial Sequence
  ENSG00000183742_50 (sequence is synthesized)
gtgtcattaactgttcatactaataaatggatacagcacattttcatggcctgtaatgtagaacatactatataaagttctcagtttggggatgactaggtttctggaaggaatagaatg

SEQ ID NO: 656211 - DNA, 120 bp, Artificial Sequence
  ENSG00000183742_51 (sequence is synthesized)
ctaaatcaatggatggcattgggctgagaaacactgctgctactaatcagccttgaatgtgtaatgtgaacatgcaaaagagaacatgcatacactcaaatttgtacaatgctataactg

SEQ ID NO: 656212 - DNA, 120 bp, Artificial Sequence
  ENSG00000183742_52 (sequence is synthesized)
gaagttgaaggacttgaatttttatattgtgctattgttatgttttctgtaattgtttatatctaaggaatttttgaggtaatataaaagaaaaagagaataatgaacaatgatgtcact

SEQ ID NO: 656213 - DNA, 80 bp, Artificial Sequence
  ENSG00000183742_53 (sequence is synthesized)
agaataatgaacaatgatgtcactggagggtttttacattaaattagatcatttttcttcttattcacaataataatctt

SEQ ID NO: 656214 - DNA, 120 bp, Artificial Sequence
  ENSG00000183742_54 (sequence is synthesized)
taataataatccttaatcgcaataataatcgcaaggaggagaagtaagtccctcctccttctgtatgaacttttctcccacatgctgctgtatggtttagtgagagtgaagttctaaaga

SEQ ID NO: 656215 - DNA, 120 bp, Artificial Sequence
  ENSG00000183742_55 (sequence is synthesized)
acatcaatatgattggtgggataatccaaagacattttttcagaatcaaatggcatgtcgaaggtttgtttcttgcatatgtatttactggtccacagcacaaaataaagtgaccacata

SEQ ID NO: 656216 - DNA, 120 bp, Artificial Sequence
  ENSG00000183742_56 (sequence is synthesized)
tacataggaaagttgaatttgtacacatacagcatctgaaatgtatctgatgttcagcatcaagatttcactgaacattgtagaaatgtgtatcttttgcatgtatattttacattgatt

SEQ ID NO: 656217 - DNA, 120 bp, Artificial Sequence
  ENSG00000183742_57 (sequence is synthesized)
ttctatttatgtacatctagaaagttttaaccctaataaatagttttgtaattttgaataatagtgtcagtttatatgtgagggagtagagacagagaggttagcactggataataatta

SEQ ID NO: 656218 - DNA, 120 bp, Artificial Sequence
  ENSG00000183742_58 (sequence is synthesized)
gtaaggccaaaggagaaaatttcatagaaaatattgttgttgtcataatgagtacagcatgaaaggcttcctctacaagacactagtcaaagagttgagagctgcggtttctaatctttg

SEQ ID NO: 656219 - DNA, 120 bp, Artificial Sequence
  ENSG00000183742_59 (sequence is synthesized)
tccattactcccttactccctatgagactgtggacctgtcacttggcctctctggtcttcagttttctcaccagtaaaacaaggaacttgaaccaaatgacctctagtgttccccttggg

SEQ ID NO: 656220 - DNA, 120 bp, Artificial Sequence
  ENSG00000183742_60 (sequence is synthesized)
tttaaatgtctataaatgttcaatgactagaatgtattgcgtttttctttattctttttgctttgagaaaagagaatgtgatttaagagtaataatttgaataccaattatccacattaa

SEQ ID NO: 656221 - DNA, 120 bp, Artificial Sequence
  ENSG00000183742_61 (sequence is synthesized)
aattgtgtcctctatgtgtaaggcatagcacatttagcacacatacataagcacactaagcaccttacaaatatcctcatttattctttacataatcttttgaaattgattatgtaatac

SEQ ID NO: 656222 - DNA, 120 bp, Artificial Sequence
  ENSG00000183742_62 (sequence is synthesized)
acactgtttttgaacaattggtgacttccagctgtttaaaacaaactacagtatggtgcttgagtactgacttaggaggtcagcattggtttcactaggagcttctcaaagcacgctgcc

SEQ ID NO: 656223 - DNA, 120 bp, Artificial Sequence
  ENSG00000183742_63 (sequence is synthesized)
aaacatgctccagtctcattgtcaaggccttagaccaggcaatcattacggcagtggttcttcaacttcagcagcagcaaaacgatctggcgggggcttggtgaaacagactgctgggct

SEQ ID NO: 656224 - DNA, 120 bp, Artificial Sequence
  ENSG00000183742_64 (sequence is synthesized)
cgaccaccagaatttctcattcagagggtctggcctgatcacttgcatttctaatcacttcccaggtgatgcagatgtttctggtccagggaccccagtttgagaaccactgtattaaaa

SEQ ID NO: 656225 - DNA, 120 bp, Artificial Sequence
  ENSG00000183742_65 (sequence is synthesized)
tttccttcatctctatagaaatggaaagattttttataagtcctctaatttgctttaagataaatgagatttcacttaattctgttggagaaattgttttaaaaattgtgctaaagaacc

SEQ ID NO: 656226 - DNA, 120 bp, Artificial Sequence
  ENSG00000183742_66 (sequence is synthesized)
gaaaatcactttatgttaaggctctatttatagcaagtgaacttttcatgagttaataaaggcctacaaaaataattttgactgtgaaactaattaaaatctctgtgtttcatttaaagc

SEQ ID NO: 656227 - DNA, 120 bp, Artificial Sequence
  ENSG00000183742_67 (sequence is synthesized)
acatatttgaataaaaataggttaacaataatttgggacatgtattcagtataattttaagataattttacaaaatatatgtaacattgcatttgtttctgtaaaatatcttcggaaaaa

SEQ ID NO: 656228 - DNA, 120 bp, Artificial Sequence
  ENSG00000183742_68 (sequence is synthesized)
aaaagccttgttttccctagtgtgttatttgttgaatttcttgttaaatgtattttttcccattgaaaaaaatgtttttaatcaatgtgatcaatacagctatctatatgccctgctttc

SEQ ID NO: 656229 - DNA, 120 bp, Artificial Sequence
  ENSG00000183742_69 (sequence is synthesized)
actgtagaattagaaagtgttaataaggtgatcggatgttctttctaaggatcatattccacatttaaagagatggtgactgagaagaggtggcaagctgaaccatctcactttgagatt

SEQ ID NO: 656230 - DNA, 120 bp, Artificial Sequence
  ENSG00000183742_70 (sequence is synthesized)
gacgtatcacgttttatcctctgccatcatttccttgttaattgtttttctttgggtgattggaagaatctatggcttccttttctctgttcttaaagatatcaagactctgcccttttg

SEQ ID NO: 656231 - DNA, 120 bp, Artificial Sequence
  ENSG00000183742_71 (sequence is synthesized)
tgactggaagtagattttaaatgtccctaatgtttatatgctcacttaaactcaatacatggaatttactggggcatttaacttgttcatgaaaatagagtgagtcattgaaaaatcaaa

SEQ ID NO: 656232 - DNA, 120 bp, Artificial Sequence
  ENSG00000183742_72 (sequence is synthesized)
cttctattcactaaaaccatgtgtctgaactgaagaagcttgggctcacttccacaaataaagcgacagaagaaattataggcgaggctgagatctaaaaggagagctccagaatggagg

SEQ ID NO: 656233 - DNA, 120 bp, Artificial Sequence
  ENSG00000183742_73 (sequence is synthesized)
gacaaaatgtttacttgtctgtaggtagccttgtcagatgatatgcaaatgattcacatcagtgtttgaagttcaaaccaaggaaaactatcagaaaaggcttctgctttctttaaaaaa

SEQ ID NO: 656234 - DNA, 120 bp, Artificial Sequence
  ENSG00000183742_74 (sequence is synthesized)
attcactaaaaccatgtgtctgaactgaagaagcttgggctcacttccacaaattaggtagccttgtcagatgatatgcaaatgattcacatcagtgtttgaagttcaaaccaaggaaaa

SEQ ID NO: 656235 - DNA, 120 bp, Artificial Sequence
  ENSG00000183742_75 (sequence is synthesized)
ctgtgagtatacacaaaatgtcagagtgtttttctcttggcaaagaatgctgggaatcttacgattaattccatacagtaacaactcagcaagtgttggctaaaaatacttgcttttact

SEQ ID NO: 656236 - DNA, 120 bp, Artificial Sequence
  ENSG00000183742_76 (sequence is synthesized)
actaacacaaatctaattttaaacgatacaataatttttacattttccccttcagagaggtgaaaagtattgtcaagttgaataatctgttaagctaaaatgacaaactttcacagtgtt

SEQ ID NO: 656237 - DNA, 120 bp, Artificial Sequence
  ENSG00000183742_77 (sequence is synthesized)
tattctgtttcctcttttccaatattctttacatatctttgtcagtaaccactcattacattgtctaagaccaacggaattggcacagaagtgaaaaacagagaagaattatcattttaa

SEQ ID NO: 656238 - DNA, 120 bp, Artificial Sequence
  ENSG00000183742_78 (sequence is synthesized)
gcagcaactgatgttcattggggatttatgttatttcaatatttacaacaattttttaaaaaagctttattgagatatatttcacgtatcattgtaaccactttttgaagacaatatttt

SEQ ID NO: 656239 - DNA, 120 bp, Artificial Sequence
  ENSG00000183747_0 (sequence is synthesized)
gtgctctcttccaaggctgtaggagttctggagctgctggctggagaggagggtggacgaagctctctctagaaagacatcctgagaggacttggcagcctgcagatggcctattgtggg

SEQ ID NO: 656240 - DNA, 120 bp, Artificial Sequence
  ENSG00000183747_1 (sequence is synthesized)
accttgtgatcatgcctgaatatgcattggctgcgaaaagttcagggactttgcaccctgtggggtactcagatgtccagccgcactctctacattaatagtaggcaactggtgtccctg

SEQ ID NO: 656241 - DNA, 120 bp, Artificial Sequence
  ENSG00000183747_2 (sequence is synthesized)
cagtggggccaccaggaagtgccggccaagtttaactttgctagtgatgtgttggatcactgggctgacatggagaaggctggcaagcgactcccaagcccagccctgtggtgggtgaat

SEQ ID NO: 656242 - DNA, 120 bp, Artificial Sequence
  ENSG00000183747_3 (sequence is synthesized)
gggaaggggaaggaattaatgtggaatttcagagaactgagtgaaaacagccagcaggcagccaacgtcctctcgggagcctgtggcctgcagcgtggggatcgtgtggcagtggtgctg

SEQ ID NO: 656243 - DNA, 120 bp, Artificial Sequence
  ENSG00000183747_4 (sequence is synthesized)
ccccgagtgcctgagtggtggctggtgatcctgggctgcattcgagcaggtctcatctttatgcctggaaccatccagatgaaatccactgacatactgtataggttgcagatgtctaag

SEQ ID NO: 656244 - DNA, 120 bp, Artificial Sequence
  ENSG00000183747_5 (sequence is synthesized)
gccaaggctattgttgctggggatgaagtcatccaagaagtggacacagtggcatctgaatgtccttctctgagaattaagctactggtgtctgagaaaagctgtgatgggtggctgaac

SEQ ID NO: 656245 - DNA, 120 bp, Artificial Sequence
  ENSG00000183747_6 (sequence is synthesized)
ttcaagaaactactaaatgaggcatccaccactcatcactgtgtggagactggaagccaggaagcatctgccatctacttcactagtgggaccagtggtcttcccaagatggcagaacat

SEQ ID NO: 656246 - DNA, 120 bp, Artificial Sequence
  ENSG00000183747_7 (sequence is synthesized)
tcctactcgagcctgggcctcaaggccaagatggatgctggttggacaggcctgcaagcctctgatataatgtggaccatatcagacacaggttggatactgaacatcttgtgctcactt

SEQ ID NO: 656247 - DNA, 120 bp, Artificial Sequence
  ENSG00000183747_8 (sequence is synthesized)
tctaaagacactctccagttatccaatcaagagtatgatgggtgcccccattgtttaccggatgttgctacagcaggatctttccagttacaagttcccccatctacagaactgcgtcac

SEQ ID NO: 656248 - DNA, 120 bp, Artificial Sequence
  ENSG00000183747_9 (sequence is synthesized)
tgtaggggagtcccttcttccagaaactctggagaactggagggcccagacaggactggacatccgagaatcctatggccagacagaaacgggattaacttgcatggtttccaagacaat

SEQ ID NO: 656249 - DNA, 120 bp, Artificial Sequence
  ENSG00000183747_10 (sequence is synthesized)
gaaaatcaaaccaggatacatgggaacggctgcttcctgttatgatgtacagatcatagatgataagggcaacgtcctgccccccggcacagaaggagacattggcatcagggtcaaacc

SEQ ID NO: 656250 - DNA, 120 bp, Artificial Sequence
  ENSG00000183747_11 (sequence is synthesized)
catcaggcctataggcatcttctctggctatgtggacaatcccgacaagacagcagccaacattcgaggagacttttggctccttggagaccggggaatcaaagatgaagatgggtattt

SEQ ID NO: 656251 - DNA, 120 bp, Artificial Sequence
  ENSG00000183747_12 (sequence is synthesized)
ccagtttatgggacgggcaaatgatatcattaactccagcgggtaccggattggaccctcggaggtagagaatgcactgatggagcaccctgctgtggttgagacggctgtgatcagcag

SEQ ID NO: 656252 - DNA, 120 bp, Artificial Sequence
  ENSG00000183747_13 (sequence is synthesized)
cccagaccccgtccgaggagaggtggtgaaggcatttgtggtcctggcctcgcagttcctgtcccatgacccagaacagctcaccaaggagctgcagcagcatgtgaagtcagtgacagc

SEQ ID NO: 656253 - DNA, 120 bp, Artificial Sequence
  ENSG00000183747_14 (sequence is synthesized)
cccatacaagtacccaagaaagatagagtttgtcttgaacctgcccaagactgtcacagggaaaattcaacgagccaagcttcgagacaaggagtggaagatgtccggaaaagcccgtgc

SEQ ID NO: 656254 - DNA, 120 bp, Artificial Sequence
  ENSG00000183747_15 (sequence is synthesized)
gcagtgagacatctaagagacattcatttggattcccctcttctttctctttcttttccctttgggcccttggccttcctatgattatatgagattctttatggaagaacatgaatataa

SEQ ID NO: 656255 - DNA, 120 bp, Artificial Sequence
  ENSG00000183747_16 (sequence is synthesized)
ccatgttagatgttgaaagaagaaagggaaggaatgagagagagtgaaaaggagagggtaacagaaaaaaaggaaagaaaagtaagtcagggaaatattaaaactgcaagggaaagcaat

SEQ ID NO: 656256 - DNA, 120 bp, Artificial Sequence
  ENSG00000183747_17 (sequence is synthesized)
tgaaaaagaaataaagtagggaaagaaggagagaggaagcaagggaaggaggaagaaaggaaagaggagatgaaagggggagaaaagatagaagaaaaataattgaagggagaatcagaa

SEQ ID NO: 656257 - DNA, 120 bp, Artificial Sequence
  ENSG00000183747_18 (sequence is synthesized)
aaataaagagcagaaaggaaagaaataaagagagaaagagaaagaagaaagagcaaaagaacacaagaaagaaagagagggagaaagagagggagaaagggagagaaaaaaattgtaaaa

SEQ ID NO: 656258 - DNA, 120 bp, Artificial Sequence
  ENSG00000183747_19 (sequence is synthesized)
ataaaaatagtaaaagaaactgataaagaaaagtaatggaagacaggaagaaaagaagagaaggaagtaaagaggaaaacttataaatattcccacagatagacaaagtcaagcataaaa

SEQ ID NO: 656259 - DNA, 120 bp, Artificial Sequence
  ENSG00000183747_20 (sequence is synthesized)
ctggagcttgagaaggaaatgaaaggccgtggcaccttcttataccctagaagaagacctccatacaggaagacttgtgtgtggggttgggacattagaatcatccacaagtcaccccaa

SEQ ID NO: 656260 - DNA, 120 bp, Artificial Sequence
  ENSG00000183747_21 (sequence is synthesized)
accttggaactgtcagggtcagaggggaaccaccatttattaagcatttgccatgtgccaggcactaacccagatgcattataaataccacgttgtttcacctgtgtgtggcatctacag

SEQ ID NO: 656261 - DNA, 120 bp, Artificial Sequence
  ENSG00000183747_22 (sequence is synthesized)
accttagatcatagctgtgagaacaacgtaagcactgccaaagttatcagctacccatatctcatgtttttgatgttatctactcttcctagaatcaaatattaaaataattttaaaacc

SEQ ID NO: 656262 - DNA, 120 bp, Artificial Sequence
  ENSG00000183747_23 (sequence is synthesized)
aatgattagctgagctctctttctgacagtgcagggattctgaagctgtctgcttgagttactgtgctctcttccaaggctgtaggagttctggagctgctggctggagaggagggtgga

SEQ ID NO: 656263 - DNA, 120 bp, Artificial Sequence
  ENSG00000183747_24 (sequence is synthesized)
gtaggagttctggagctgctggctggagaggagggtggacgaagctctctctagaaagacatcctgagaggacttggcagaaaaaaaggagacagaaatgtcagacactgtgatggttaa

SEQ ID NO: 656264 - DNA, 120 bp, Artificial Sequence
  ENSG00000183747_25 (sequence is synthesized)
tactgagtgtcaattgattgaattgaaggatacaaagtgttgatcctggatgtgtctgtgagggtgttgtcaaaagagattaacatttgagtcggtgggctgggagaggcagacccaccc

SEQ ID NO: 656265 - DNA, 120 bp, Artificial Sequence
  ENSG00000183747_26 (sequence is synthesized)
ttaatctgggtaggaaccacctaatccagcatgactagaatataagcaggcagaaaaatatgaaaagagagactggcctagcttcccagcctagatctttcttccgtactggatgcttcc

SEQ ID NO: 656266 - DNA, 120 bp, Artificial Sequence
  ENSG00000183747_27 (sequence is synthesized)
gcttgagttactgtgctctcttccaaggctgtaggagttctggagctgctggctggagaggagggtggacgaagctctctctagaaagacatcctgagaggacttggcaggctggcaagc

SEQ ID NO: 656267 - DNA, 120 bp, Artificial Sequence
  ENSG00000183747_28 (sequence is synthesized)
ggtatttgaatcagagtctgattcccgaccagaagaacagaggagggatttgagccaaaggacagagcccgtgtgccacagagttcgcagtgaaaataaagggaaaaagaaagaccccta

SEQ ID NO: 656268 - DNA, 120 bp, Artificial Sequence
  ENSG00000183747_29 (sequence is synthesized)
taaagccaggcttatagaaataggctcagatggggtctagtggactttgatgtgtgtgtaggaaaatattaaggtgggatgtgtggatcagtgtcctagcacattcccgcagggtgtaag

SEQ ID NO: 656269 - DNA, 120 bp, Artificial Sequence
  ENSG00000183747_30 (sequence is synthesized)
cctggcactatcatacctctggtacgtacagaatacatcatacagaaaattatgggaaccactgagcagtgaggccatgggggatcccctgctgagaaaatcctgtgtgcccagctctga

SEQ ID NO: 656270 - DNA, 120 bp, Artificial Sequence
  ENSG00000183747_31 (sequence is synthesized)
gctagccctgctgtatatgatttcattttatttaccgtaagttaaatttggcaattttatccccactttacagatgggaacactgaagtttggagaagttaacacattgtttagggttat

SEQ ID NO: 656271 - DNA, 120 bp, Artificial Sequence
  ENSG00000183747_32 (sequence is synthesized)
ggttttcagtctatttttctcttttctccccctgtatcttctttctccttatctgtctctattgttattggagtatgaggtgagcctagtctcaatcttttgtccacctgctcctccaat

SEQ ID NO: 656272 - DNA, 120 bp, Artificial Sequence
  ENSG00000183747_33 (sequence is synthesized)
agctgtaacctcattcatgtccccagttttctccttttcccttgacctggatcaccgggggtgcaaatgaggagatacaagggtgatggaagtcttaatgccaatttcacattattccag

SEQ ID NO: 656273 - DNA, 120 bp, Artificial Sequence
  ENSG00000183747_34 (sequence is synthesized)
atatgaataaggacaatggagttgtggcaagcataccctggcaggggcctcccaccattcagaggaggacatgtttaggatatgcttacaaggacactcaggttcccatgatcttaatca

SEQ ID NO: 656274 - DNA, 120 bp, Artificial Sequence
  ENSG00000183747_35 (sequence is synthesized)
ctcagcagcctctcttctgaggtgggtggataaacttgccctttccagcacagtgggtggcgggaaaagatgggtcattgtgatatcttttgtccaggctagatctgagaaaatgacaat

SEQ ID NO: 656275 - DNA, 120 bp, Artificial Sequence
  ENSG00000183747_36 (sequence is synthesized)
ctatgtctctgtcagtgaggcatccaccactcatttgttattctgttgggaaggttcatttcagggttcaagcagaactggtgctgccatgggagatactttaaaaagtatattttactg

SEQ ID NO: 656276 - DNA, 84 bp, Artificial Sequence
  ENSG00000183747_37 (sequence is synthesized)
ttccataaatagatacacctatgtacccacaaaaattcaaaataaaaataaaagtagtatattttaggccttacagattgcata

SEQ ID NO: 656277 - DNA, 120 bp, Artificial Sequence
  ENSG00000183747_38 (sequence is synthesized)
aaaataaaagtagtatattttaggccttacagattgcatattggtgatcccatatagtttgaaagggctttgggtatccatagtgtcgtattaaaatgtggttccccctaaaagagatta

SEQ ID NO: 656278 - DNA, 120 bp, Artificial Sequence
  ENSG00000183747_39 (sequence is synthesized)
taatgtgattgttaggtcctcttcctggggagtggtagatgggttgcttcctgaactaacaatttagcgaagcccctaggattgtggttccagtaatggggagagagccagggaatgagg

SEQ ID NO: 656279 - DNA, 120 bp, Artificial Sequence
  ENSG00000183747_40 (sequence is synthesized)
agcagggggagccaccaagtgcaggccaagttcaggacagtgtcaggacctgctctgcagaaattttttctttttctgtgaccttgtacctcctcctgaggtttgctgatctgtctgctt

SEQ ID NO: 656280 - DNA, 120 bp, Artificial Sequence
  ENSG00000183747_41 (sequence is synthesized)
agtagcctgggggtgaacacatatgaacacaagggcagtgtagtatgatggtttaagaacagggactgtggggctgaacactctgagacccaatcttggccctgccacttactagctatg

SEQ ID NO: 656281 - DNA, 120 bp, Artificial Sequence
  ENSG00000183747_42 (sequence is synthesized)
tgaccttgggcaagctacttggcctctctgtttctcagtttccccatctgtaagatgagggattgttatgagggttaaatgtgctaatatttgtaaagtacttaagtatggtgatttcta

SEQ ID NO: 656282 - DNA, 90 bp, Artificial Sequence
  ENSG00000183747_43 (sequence is synthesized)
tcagcatatcaagaagatgtccacactcccatggtaattgcagcactattcacaatacgaagatatgggatcaacctaagtatccagtgg

SEQ ID NO: 656283 - DNA, 120 bp, Artificial Sequence
  ENSG00000183747_44 (sequence is synthesized)
agatgtccacactcccatggtaattgcagcactattcacaatacgaagatatgggatcaacctaagtatccagtggatgaaaggataaataatatgtggtatatatacacaatggaatac

SEQ ID NO: 656284 - DNA, 120 bp, Artificial Sequence
  ENSG00000183747_45 (sequence is synthesized)
gcagcaacatggagagaactggaggtcattatgttaactgaagtaagccaggcacagaaaataaatatcacgtgtttgcactcatgagtaagtgctaaaatagctgatctcatggagata

SEQ ID NO: 656285 - DNA, 120 bp, Artificial Sequence; identical to SEQ ID NO: 50343
  ENSG00000183747_46 (sequence is synthesized)

SEQ ID NO: 656286 - DNA, 120 bp, Artificial Sequence; identical to SEQ ID NO: 50344
  ENSG00000183747_47 (sequence is synthesized)

SEQ ID NO: 656287 - DNA, 120 bp, Artificial Sequence
  ENSG00000183747_48 (sequence is synthesized)
cccaagtatcctaacttgataattaccatatttgcgtgtaacaaaatgtcacttgtacccaatacatatgtacaaatattatgaaatgataaaaacttttataaagtaaagtgcttggtt

SEQ ID NO: 656288 - DNA, 80 bp, Artificial Sequence; identical to SEQ ID NO: 50346
  ENSG00000183747_49 (sequence is synthesized)

SEQ ID NO: 656289 - DNA, 77 bp, Artificial Sequence
  ENSG00000183747_50 (sequence is synthesized)
ctggctctccttgcaagtcagggaccctgaatggagggatcggccagagctgaggcagaagaacataaattgtgaag

SEQ ID NO: 656290 - DNA, 61 bp, Artificial Sequence
  ENSG00000183747_51 (sequence is synthesized)
gtccccaattaacactcttatagtttcttatgcctatctttactttaatctcttaatcctg

SEQ ID NO: 656291 - DNA, 89 bp, Artificial Sequence
  ENSG00000183747_52 (sequence is synthesized)
tacctggaaaaagaacagaatatcagtgattttcagggaacaatggaagataactataaggtctgactgcctgcggggtcgggcagaat

SEQ ID NO: 656292 - DNA, 120 bp, Artificial Sequence
  ENSG00000183747_53 (sequence is synthesized)
ctggagctgctggctggagaggagggtggacgaagctctctctagaaagacatcctgagaggacttggcagatctttcttccgtactggatgcttcctgcacttgaacatcagactccag

SEQ ID NO: 656293 - DNA, 120 bp, Artificial Sequence
  ENSG00000183747_54 (sequence is synthesized)
ctccagttatccaatcaagagtatgatgggtgcccccattgtttaccggatgttgctacagcaggatctttccaggtgatggggctttgaggattggtaagagagtctggccccatcccc

SEQ ID NO: 656294 - DNA, 120 bp, Artificial Sequence
  ENSG00000183747_55 (sequence is synthesized)
ctgactccctcacatacattcatgcctatctatctgaatctctcgcacacagagagccccatgaagccatttgcatcatcaaagcacccagaaacccagtctaggcctgagtggactttg

SEQ ID NO: 656295 - DNA, 120 bp, Artificial Sequence
  ENSG00000183747_56 (sequence is synthesized)
gttagccaccatgtatcattcatctattcgagaagtatttattgagcctctatgaagggacaggtactgagtattgaaaattccgcacagaacaaaaaaggcaaagttcctgttttctgg

SEQ ID NO: 656296 - DNA, 120 bp, Artificial Sequence
  ENSG00000183747_57 (sequence is synthesized)
gagattacattccagtgagatttggggagagagaaaataaactaagaaatatctagcatggcaggtggtgagaaatgcgatggaaaaagtaaagtagatgacatggggtgagaagttggt

SEQ ID NO: 656297 - DNA, 120 bp, Artificial Sequence
  ENSG00000183747_58 (sequence is synthesized)
aaatcagatatggtagtcagaaaattcctctgtgatggggaaacattttagcagagaccaaagtttatcaaacatgtcaagcactgtacaaagctacttagactgaagtgaggaatggga

SEQ ID NO: 656298 - DNA, 120 bp, Artificial Sequence
  ENSG00000183747_59 (sequence is synthesized)
agaagaacccaccatgactttactgcacctcctgacatatcttcttggaactcttgaggtctcatgtgcacaatgtggatttatgctattctatactattttacttatcaaaactacatg

SEQ ID NO: 656299 - DNA, 120 bp, Artificial Sequence
  ENSG00000183747_60 (sequence is synthesized)
gggaatacttttccccaactcttcttctcctttttccagtgcctcttacttgtgactctcagcacttcttgcctcttcctctccactctcttaccctgcatccttctttggctaatgagt

SEQ ID NO: 656300 - DNA, 120 bp, Artificial Sequence
  ENSG00000183747_61 (sequence is synthesized)
ttggatactgaacatcttgtgctcacttatggaaccttgggcattaggagcatgcacatttgttcatctcttgccaaagtttgacccactggttattctaaaggtctttagataaactca

SEQ ID NO: 656301 - DNA, 120 bp, Artificial Sequence
  ENSG00000183747_62 (sequence is synthesized)
caaccagaaaaatttaaatctacctataagctggaagcccccgcttcaagttgccccacctttctggaccaaaccaatgtattttttaaatgtgtttgattgatgtcttatgtctcccta

SEQ ID NO: 656302 - DNA, 120 bp, Artificial Sequence
  ENSG00000183747_63 (sequence is synthesized)
aaatgtataaaaccaaggtgcaccctgaccaatttgggcacgtgttctcaggacatcctgagggctctgtcatggccatggtcactcatgtttggctcagaataaatctcttcaaatgtt

SEQ ID NO: 656303 - DNA, 120 bp, Artificial Sequence
  ENSG00000183751_0 (sequence is synthesized)
gcagcgcgccgggagtgtggcgttctgtgaagagttcggtgctaacctccctcacgcggcggtggctgccgggaccctagcaggtttcagctggagcggcggcggcggcaacatggcaga

SEQ ID NO: 656304 - DNA, 120 bp, Artificial Sequence
  ENSG00000183751_1 (sequence is synthesized)
gaccgcggccggagtgggccgcttcaagaccaactatgctgtggagcgcaaaattgagcctttctacaagggcggaaaagcacagctggaccagactggccagcacctcttctgcgtctg

SEQ ID NO: 656305 - DNA, 120 bp, Artificial Sequence
  ENSG00000183751_2 (sequence is synthesized)
tggcaccagagtcaacattctggaagtggcctcgggggccgtgctgcggagtctggagcaggaggaccaggaggacatcactgcctttgacctcagccctgacaacgaggtgctggtgac

SEQ ID NO: 656306 - DNA, 120 bp, Artificial Sequence
  ENSG00000183751_3 (sequence is synthesized)
agccagtcgggcattgctgctggctcagtgggcctggcaagagggcagcgttacccgcctgtggaaggcgatacacacggcccccgtggccaccatggccttcgaccccacctccactct

SEQ ID NO: 656307 - DNA, 120 bp, Artificial Sequence
  ENSG00000183751_4 (sequence is synthesized)
gctagccacaggtggctgtgatggggccgtgcgcgtctgggacatcgtgcggcactacgggacacaccacttccgaggctcgcccggtgtcgtgcacctagtggccttccacccggaccc

SEQ ID NO: 656308 - DNA, 120 bp, Artificial Sequence
  ENSG00000183751_5 (sequence is synthesized)
tacacgcctgctgctcttctcctcggccacggatgccgccatccgcgtgtggtcactgcaggaccggtcatgcctggctgtgctgactgcccactacagcgccgtcacctcactggcctt

SEQ ID NO: 656309 - DNA, 120 bp, Artificial Sequence
  ENSG00000183751_6 (sequence is synthesized)
cagcgccgacggccacaccatgctcagctccggccgtgacaagatatgtatcatctgggaccttcagagctgccaggccacgaggaccgtgcctgtgtttgagagcgtggaggctgctgt

SEQ ID NO: 656310 - DNA, 120 bp, Artificial Sequence
  ENSG00000183751_7 (sequence is synthesized)
gctgttgccagaggagccagtgtcccagctgggtgtgaagtccccagggctgtactttctgacagctggcgaccaaggcactctgcgcgtgtgggaggcagcttctgggcagtgtgtgta

SEQ ID NO: 656311 - DNA, 120 bp, Artificial Sequence
  ENSG00000183751_8 (sequence is synthesized)
cacgcaggcccagccgccgggccctgggcaggagctgacccactgcaccctggcacacaccgccggcgtggtcctcaccgccaccgccgaccacaacctgttgctctacgaggctcgctc

SEQ ID NO: 656312 - DNA, 120 bp, Artificial Sequence
  ENSG00000183751_9 (sequence is synthesized)
cctgcggctgcagaaacagttcgctggctacagtgaggaggttttggatgtccggtttcttgggcccgaggactcccacgttgtcgtggcctccaatagcccctgcctaaaagtgtttga

SEQ ID NO: 656313 - DNA, 120 bp, Artificial Sequence
  ENSG00000183751_10 (sequence is synthesized)
gctgcagacgtcagcctgccagatcctccacggccacacggatatcgtcctggccctggatgtgttccggaaggggtggctctttgccagctgtgccaaggatcagagcgtccgtatctg

SEQ ID NO: 656314 - DNA, 120 bp, Artificial Sequence
  ENSG00000183751_11 (sequence is synthesized)
gagaatgaacaaggctggccaggtgatgtgcgtggctcagggttccggtcacacacacagtgtgggcaccgtctgctgctctaggctgaaggagtccttcctggtgacaggcagccagga

SEQ ID NO: 656315 - DNA, 120 bp, Artificial Sequence
  ENSG00000183751_12 (sequence is synthesized)
ctgcactgtgaagctgtggcctcttcccaaagccttgctgtccaagaacacagccccagacaacggccctatcctcctgcaggcccagaccactcagcgctgccatgataaggacatcaa

SEQ ID NO: 656316 - DNA, 120 bp, Artificial Sequence
  ENSG00000183751_13 (sequence is synthesized)
cagcgtggctattgcccccaacgacaagctgctggccacaggctcacaggaccgcacggccaagctctgggccctgccacagtgccagctgctgggtgtcttctcaggccaccggcgtgg

SEQ ID NO: 656317 - DNA, 120 bp, Artificial Sequence
  ENSG00000183751_14 (sequence is synthesized)
cctctggtgcgtccagttctctcccatggaccaggtgctggccacggcctcagctgatggcaccatcaagctctgggcactccaggacttcagctgtctcaagacatttgaggggcacga

SEQ ID NO: 656318 - DNA, 120 bp, Artificial Sequence
  ENSG00000183751_15 (sequence is synthesized)
tgcttctgtgctgaaggtggcctttgtgagccgtggcacgcagctgctgtccagcggttcggatggcctcgtgaagctctggaccatcaagaacaacgagtgtgtgcggacgctggatgc

SEQ ID NO: 656319 - DNA, 120 bp, Artificial Sequence
  ENSG00000183751_16 (sequence is synthesized)
ccacgaggacaaggtctgggggctgcactgcagccggctggacgaccacgccctcactggggccagtgactcccgagtcatcctctggaaggatgtgaccgaggcggagcaggcagagga

SEQ ID NO: 656320 - DNA, 120 bp, Artificial Sequence
  ENSG00000183751_17 (sequence is synthesized)
gcaggccaggcaagaggagcaggtggtcaggcagcaagagctggacaacctgctgcatgagaagcggtacctgcgggcgctgggcctggccatctccctggatcggccccacaccgtgct

SEQ ID NO: 656321 - DNA, 120 bp, Artificial Sequence
  ENSG00000183751_18 (sequence is synthesized)
gactgtcatccaggccatccggagggaccctgaggcctgcgagaagctggaagccaccatgctccgactgcggcgcgaccagaaagaggccctgctgcgcttctgcgtcacgtggaacac

SEQ ID NO: 656322 - DNA, 120 bp, Artificial Sequence
  ENSG00000183751_19 (sequence is synthesized)
caactcgcggcactgccacgaggcccaggccgtgctgggtgtgctcttgaggcgagaggcccccgaggagctgctggcctacgaaggcgtgcgggcagcgcttgaggccctgctgcccta

SEQ ID NO: 656323 - DNA, 120 bp, Artificial Sequence
  ENSG00000183751_20 (sequence is synthesized)
cactgagcggcactttcagcggctcagcaggaccctccaggccgccgctttcttggacttcctgtggcacaacatgaagctccctgtgccggccgccgcccccaccccctgggaaaccca

SEQ ID NO: 656324 - DNA, 120 bp, Artificial Sequence
  ENSG00000183751_21 (sequence is synthesized)
taaaggcgcactgccctagccggtccggcctctctccagtccatcctgaacccctggaaaacccataaaggccgctctcctggccggctctgtctctctggactgcagtccagcccccca

SEQ ID NO: 656325 - DNA, 120 bp, Artificial Sequence
  ENSG00000183751_22 (sequence is synthesized)
ccctggccaacaccctacctagccagccagaagggcactggagctgatggtctcggccctgccacgcccatcccgcaccctggcctggcagagatccagcccgcggctccgcacgcttag

SEQ ID NO: 656326 - DNA, 120 bp, Artificial Sequence
  ENSG00000183751_23 (sequence is synthesized)
acggtgggggtcatgcagaacaagctttactcagaggaacagcaaatggccccctcccatccctgctggccagggagatccgccctccccgctcctccccagccctgggatggcgcggtc

SEQ ID NO: 656327 - DNA, 120 bp, Artificial Sequence
  ENSG00000183751_24 (sequence is synthesized)
catcccctcatcgggatcctcgcgctcactgctccgtcgtggggtgcggcacagagtccacgcaccctcgagggcggccctggcgccgtgggcgccgctccagggccctgcgtgtgacgg

SEQ ID NO: 656328 - DNA, 120 bp, Artificial Sequence
  ENSG00000183751_25 (sequence is synthesized)
tgcagcagcggctctggatggcgcccggcgaaggtcgggtgggcacggtggggggaggggcggtggcctgggagggttcagggaagccccgggcctcacccgccgggtcgtctcctccac

SEQ ID NO: 656329 - DNA, 120 bp, Artificial Sequence
  ENSG00000183751_26 (sequence is synthesized)
ccacggaaccccgtcccgctcaggagagcgcccagcccttccggccgcagcagcaccgcggggagtaggcccgcccggtcgccgtacctgcgaggggcggggtgtggttagggccccgcc

SEQ ID NO: 656330 - DNA, 120 bp, Artificial Sequence
  ENSG00000183751_27 (sequence is synthesized)
tcggctagcctgccctgcccacgcccgctcccgcgtacctgcatagccaccagccgcggtctgacgtttccaacacgcgcacgcgcgcccccgcgggcacggacagctcatctgcgcggc

SEQ ID NO: 656331 - DNA, 120 bp, Artificial Sequence
  ENSG00000183751_28 (sequence is synthesized)
cgcggggccacagaggacgaggcccgcccgcacccttctccacattctccttgcttgagtctgctgacggcggggccgctctaagaccggttcggggcttcctctaggtgcggagaccaa

SEQ ID NO: 656332 - DNA, 120 bp, Artificial Sequence
  ENSG00000183751_29 (sequence is synthesized)
gcacgggctcctggcccgccctgcccgcggtgcttctggcccagtcttgccacacggtcaagccgcagtggtggcgtgaggggtggggttaggcgcataccgctgctccctagggacggg

SEQ ID NO: 656333 - DNA, 120 bp, Artificial Sequence
  ENSG00000183751_30 (sequence is synthesized)
cctccctcccggccttggcccggggccgcctcctccaggtagggcgctggaaaccaggcggtctgccggtcttcgttctccaccagccaccagcctgtgcgcaagaagcgggcagggact

SEQ ID NO: 656334 - DNA, 120 bp, Artificial Sequence
  ENSG00000183751_31 (sequence is synthesized)
caaatctcgaggctccctcgggtccaggagcagaggagcaaatccctgggttcttggggggccctacctgaggggtgccgcagcagcacgtccaggctctcctgggcctgcgcctgaaaa

SEQ ID NO: 656335 - DNA, 120 bp, Artificial Sequence
  ENSG00000183751_32 (sequence is synthesized)
ggcctatcccgcgtgtcctgggtacagaagggctgcaggcagcgcaggctctgagcctccagactgtggatggagaggcggcccgcagcgcgagaaagaggctgctcctctggggtgggc

SEQ ID NO: 656336 - DNA, 120 bp, Artificial Sequence
  ENSG00000183751_33 (sequence is synthesized)
aggatcacccggctgggaagggcagcccgtacgagtgagaggtaggcggatggggagggtgaaactgggggcgccaccccggcaagaccgccagcctcccactctctgcccctattcgct

SEQ ID NO: 656337 - DNA, 120 bp, Artificial Sequence
  ENSG00000183751_34 (sequence is synthesized)
ggctgttcccccccaccctggacctctcccagctccaaacgccgctgcatgctgggagtttggggcgagtcaggcacctgccgggtggcagcgcgggctccaggtccaggggttgcggtg

SEQ ID NO: 656338 - DNA, 120 bp, Artificial Sequence
  ENSG00000183751_35 (sequence is synthesized)
cgaagaagccagtgatcgtcgggctccgtgccacgcgctctgcagtcgccagcagcctccgagaataggtttccaacagctgcaggcgcgccaggccgcggctcgtgcgccccacgcgtc

SEQ ID NO: 656339 - DNA, 120 bp, Artificial Sequence
  ENSG00000183751_36 (sequence is synthesized)
ccaacagtggtgcatcttaaggcaccacaaaaacgtactgtgatacgccgctttgggcttcactggtccctggcgcccccaggcaagccaccgccttccccgctcccgtacccaggctgg

SEQ ID NO: 656340 - DNA, 120 bp, Artificial Sequence
  ENSG00000183751_37 (sequence is synthesized)
cctgaccgagaagctttgggagaacgcggtcagatctccgcagcaggcccgcctccaccgggaaggtctccttgagggtcttctgagggcgggaaccagggcattggtcttccagagccc

SEQ ID NO: 656341 - DNA, 120 bp, Artificial Sequence
  ENSG00000183751_38 (sequence is synthesized)
actgtgcacccttgagagggcggggtccctcacccggatggcaggggctgggagcttcagcagggacgaagggcctccagtgggagtcactgatgggaggcagtccagtgggaggcagcc

SEQ ID NO: 656342 - DNA, 120 bp, Artificial Sequence
  ENSG00000183751_39 (sequence is synthesized)
gcgtggggaagccgccaccgcggcatcagggtggcccagggtcactcaccttgagctgcctgaattcgtcccaactcctgcgcacgaaggtgtcgctgccgtctgaccagcgcacagaga

SEQ ID NO: 656343 - DNA, 120 bp, Artificial Sequence
  ENSG00000183751_40 (sequence is synthesized)
aggcaaacgtctgggggacaaaaagttgggagtgccgtggaggtgctggtccaggcacccccttcctatcccttggggccactaaggacccagccaggtcttacttggagcctcttgatc

SEQ ID NO: 656344 - DNA, 120 bp, Artificial Sequence
  ENSG00000183751_41 (sequence is synthesized)
tgcaccagggctgccccttgcactgaaactgggtatcgggggcctgccatggctgtggcttccaggctgcagattcctgaaatgggcgaggacccttctgcctccccgtgcttgagaggg

SEQ ID NO: 656345 - DNA, 120 bp, Artificial Sequence
  ENSG00000183751_42 (sequence is synthesized)
ctctgggggacccagaaaaccccctgggatagaatcctggcaacacctcaagcctgtggggtccttgtggagccgccccagctgagtcctttgcagctttcttgctgtcccccaagccca

SEQ ID NO: 656346 - DNA, 120 bp, Artificial Sequence
  ENSG00000183751_43 (sequence is synthesized)
cgatctgggggcaggagcacagggattgggggacttccaggcagagctgctgggaggaagaagaagaatgagctttccagccctggaggcgtgcaagactgaagaaggggcgaagggtag

SEQ ID NO: 656347 - DNA, 120 bp, Artificial Sequence
  ENSG00000183751_44 (sequence is synthesized)
gcgggactgctgcctggggccctcctgcctgcctctggccacaggaggagggaggagaaggcagggctaatcaaagcgccacctgtcctgcccacctctctggattcccctaccctgtga

SEQ ID NO: 656348 - DNA, 120 bp, Artificial Sequence
  ENSG00000183751_45 (sequence is synthesized)
ggtaattgccctgccagggtgcgcccaacaactttgaactggcctggggatttctgtgcagaaccaaggactcagtgcttacagctttaagtgctttgtctgacttaatcctaatgctgg

SEQ ID NO: 656349 - DNA, 120 bp, Artificial Sequence
  ENSG00000183751_46 (sequence is synthesized)
aggaaaggtctcttaatgtccccaactcatagaggaggaaatgtgtgttaaatgcgtaattattgtgagctgttctatacatgctgggggaggggcagacctcacaggctcaccccaggg

SEQ ID NO: 656350 - DNA, 120 bp, Artificial Sequence
  ENSG00000183751_47 (sequence is synthesized)
gttcccctgcagtgaggagacttggggtaggagaaagagggcccatctgtgcagtcactggcatttggtgggtgggggtggtggtcagggaagtggtcactagggctgttttgagaacca

SEQ ID NO: 656351 - DNA, 120 bp, Artificial Sequence
  ENSG00000183751_48 (sequence is synthesized)
cctctcaattcacgatttgccatgacttactgcaaacatggcctgggcagaggctcgcccaggtgccccacctctctggctgcttccttatagttcgggcttcggaagccacattcaacc

SEQ ID NO: 656352 - DNA, 120 bp, Artificial Sequence
  ENSG00000183751_49 (sequence is synthesized)
ctggcacacagtggtttttcctcgtgctggggccaccagttctgtgttgggatgcacctactccagccccttcagggagcagtcagcctctaaggcatccctccaggaagctgccctggc

SEQ ID NO: 656353 - DNA, 120 bp, Artificial Sequence
  ENSG00000183751_50 (sequence is synthesized)
tgcaacaaagggcctttgtgtgtctgtcccaccagcactctctctcatgccctcaagctgtccctggtcttggcatgggcaatgaacacctgctcacatagggctgatttgcagggttcc

SEQ ID NO: 656354 - DNA, 120 bp, Artificial Sequence
  ENSG00000183751_51 (sequence is synthesized)
cccagccagctgtcaccttctccctgtctcagctgagggcccagctgacctggtggggtccagcgtgtgaacccaggggagaccttgctcccctggaagacaggagaagctggggaggat

SEQ ID NO: 656355 - DNA, 120 bp, Artificial Sequence
  ENSG00000183751_52 (sequence is synthesized)
ttattcacaagcagaggcctagagggattctgaggccacctgcctaccccagctgacagctcctgccccacaccccatcagccctgcatggtttccactttttcctcccctaccctcttt

SEQ ID NO: 656356 - DNA, 120 bp, Artificial Sequence
  ENSG00000183751_53 (sequence is synthesized)
tcttgcctgaatagtacaccccaccctccatctgtatgctcctcacttgcccctacaaaatccactccaaggacagacacagtgcctcacctgtaatccaagtactttgggaggccgagg

SEQ ID NO: 656357 - DNA, 76 bp, Artificial Sequence
  ENSG00000183751_54 (sequence is synthesized)
agtactttgggaggccgaggcagggttgagacctccatctgtgccccccaaaaatacaaaaattagctgggcgtgg

SEQ ID NO: 656358 - DNA, 90 bp, Artificial Sequence
  ENSG00000183751_55 (sequence is synthesized)
gggcgtggtggcgtgtgcctgtagtctacttgggaggctgaggtgggagatcacttgagcctaagcagtcgcggctgcagtgaataacgg

SEQ ID NO: 656359 - DNA, 120 bp, Artificial Sequence
  ENSG00000183751_56 (sequence is synthesized)
tcccgccctggtgacatctcatgccctaccccccaccttgcagacatttgaggggcacgatgcttctgtgctgaaggtggcctttgtgagccgtggcacgcagctgctgtccaggtgagt

SEQ ID NO: 656360 - DNA, 120 bp, Artificial Sequence
  ENSG00000183751_57 (sequence is synthesized)
gggctggggtggggcagcgatggagtggggggtggcggggggacctgcctgacgctgagcctctccccaccccaaacccagcggttcggatggcctcgtgaagctctggaccatcaagaa

SEQ ID NO: 656361 - DNA, 120 bp, Artificial Sequence
  ENSG00000183753_0 (sequence is synthesized)
aatatctcaggacccaggaccatgtgatatgggcccaacacctggatgatgttactcttctgcctaggtcatgcgtaaagagggaattagggcatattgcttggcccagtcccgtaatga

SEQ ID NO: 656362 - DNA, 120 bp, Artificial Sequence
  ENSG00000183753_1 (sequence is synthesized)
tatgactctcctgcttgtgccagagccacagaagtgtgcttggtgacataatctttgaggctgtcacatcaccaagattatattgtatcactggaccagcataaagctgacacttctgac

SEQ ID NO: 656363 - DNA, 120 bp, Artificial Sequence
  ENSG00000183753_2 (sequence is synthesized)
tatgcccagccttcaaataatactacactgtataattggctcaacacccaggtgatattgttccatttacctgagaccagataaaaagcctaatgatgacgcttgtccccagagccagga

SEQ ID NO: 656364 - DNA, 120 bp, Artificial Sequence
  ENSG00000183753_3 (sequence is synthesized)
cacgtgcaggacaggatcattactctcatccctgccccagattttcacaggtgctgcttacagagggcatcatgacatattgcttgacaaagaacctaagtgatgttaatattctgcata

SEQ ID NO: 656365 - DNA, 120 bp, Artificial Sequence
  ENSG00000183753_4 (sequence is synthesized)
ggttgctaaaaaatgggaatgtgagaaataccttgcttcagtccaaagtgggcttgctgacatattatgtgaaactgtacccgggtgaagtgactcttctgactaggcccagcatacaaa

SEQ ID NO: 656366 - DNA, 120 bp, Artificial Sequence
  ENSG00000183753_5 (sequence is synthesized)
tatgctgtatcactggctcagtgtcgaggcccagatcacagaagtaattgtgccatatgtggaacaagcagctaagcaatagataacatccatcgtggctctgccttcaaagggaaattt

SEQ ID NO: 656367 - DNA, 120 bp, Artificial Sequence
  ENSG00000183753_6 (sequence is synthesized)
tacatatgtcactgggaccatcacccagatgatgtcctgcccactaaaagaattgtgacataacgctgactgcaaaaactgggtaatgcaactctcctctttattctggagtctgccaaa

SEQ ID NO: 656368 - DNA, 120 bp, Artificial Sequence
  ENSG00000183753_7 (sequence is synthesized)
acaagggattatcacatattgcggagtccagcacccaggtaaaattttgtcatatacccagcttcagataccatgcaataatacaactatcatacctggacccaaagaggagagatattt

SEQ ID NO: 656369 - DNA, 120 bp, Artificial Sequence
  ENSG00000183753_8 (sequence is synthesized)
tgattctcattgccattcttatggccacaagcaaagtaatggttctcatagtggtataaagttcacacagtattatgacactcccagcgtatcatagaaaatgtgagtagtacaatgagt

SEQ ID NO: 656370 - DNA, 120 bp, Artificial Sequence
  ENSG00000183753_9 (sequence is synthesized)
gttataacagggaacagcaaaccaatgctattgtgattattggattcacacccagctgacgcgactatcattctctcacaagaacagaacctgcaaataaagtactaaatctcaccaaaa

SEQ ID NO: 656371 - DNA, 120 bp, Artificial Sequence
  ENSG00000183753_10 (sequence is synthesized)
atggaacattgtgacatatatgtgggacctgcacccaggtgatgtaactctcttgactgggaccttttctaaggagggcttgcaaatgtctcaggacccaggaccgtgtgatgtggcact

SEQ ID NO: 656372 - DNA, 120 bp, Artificial Sequence
  ENSG00000183753_11 (sequence is synthesized)
tcagcctggattctgcccacctattaaattgtctaggtgatgtgacttcctgcttgaccctgcccacatggagcattgtgacatatgtgtggaacctgcacttagggcccaacacctgga

SEQ ID NO: 656373 - DNA, 120 bp, Artificial Sequence
  ENSG00000183760_0 (sequence is synthesized)
agaggcgcgtgcgggcagccggcgcccccgaggcacctggataaccacccatcttgaaggagacctccctgccctgcctctgttgtcccccagagcactgcctgatcatcctctgttccc

SEQ ID NO: 656374 - DNA, 120 bp, Artificial Sequence
  ENSG00000183760_1 (sequence is synthesized)
catcctcccagcccttcctgctgtacctgtggggagctgatctcctcagtccccctgcttttccccggtctgccatcaccaccccaccaccatgcacccccttcctggctactggtcctg

SEQ ID NO: 656375 - DNA, 120 bp, Artificial Sequence
  ENSG00000183760_2 (sequence is synthesized)
ttactgtctactcctgctattctccttgggagtccaggggtccctgggggctcccagcgctgccccagagcaagtccatctgtcttacccaggtgagccaggctccatgactgtaacttg

SEQ ID NO: 656376 - DNA, 120 bp, Artificial Sequence
  ENSG00000183760_3 (sequence is synthesized)
gaccacatgggtcccaacccgctctgaagtgcaattcgggttgcagccgtcggggcccctgcccctccgcgcccagggcaccttcgtcccctttgtggacgggggcattctccggcggaa

SEQ ID NO: 656377 - DNA, 120 bp, Artificial Sequence
  ENSG00000183760_4 (sequence is synthesized)
gctctacatacaccgagtcacgcttcgcaagctgctgccaggggttcagtatgtttatcgctgtggcagtgcgcagggctggagccgtcggttccgcttcagggccctcaagaatggggc

SEQ ID NO: 656378 - DNA, 120 bp, Artificial Sequence
  ENSG00000183760_5 (sequence is synthesized)
ccactggagtccccgtctggctgtgtttggagacctgggggctgacaacccgaaggccgtcccccggctgcgcagggacacccagcagggcatgtatgacgccgttctccatgtgggaga

SEQ ID NO: 656379 - DNA, 120 bp, Artificial Sequence
  ENSG00000183760_6 (sequence is synthesized)
ctttgcctacaacctggatcaggacaacgcccgtgttggggataggttcatgcggctcattgaacccgtggctgccagcctgccgtacatgacatgccctgggaatcatgaagaacgcta

SEQ ID NO: 656380 - DNA, 120 bp, Artificial Sequence
  ENSG00000183760_7 (sequence is synthesized)
caacttctctaactacaaggctcgcttcagcatgccgggggataatgagggcctgtggtacagctgggatctgggtcccgcccacatcatctccttctccaccgaggtctatttctttct

SEQ ID NO: 656381 - DNA, 120 bp, Artificial Sequence
  ENSG00000183760_8 (sequence is synthesized)
ccattatggccgccacttggtacagaggcagtttcgctggctggagagcgacctccagaaagccaataagaaccgggcagcccggccgtggatcatcactatggggcaccggcccatgta

SEQ ID NO: 656382 - DNA, 120 bp, Artificial Sequence
  ENSG00000183760_9 (sequence is synthesized)
ctgctccaacgcagatctggacgactgcacacgacatgaaagcaaggtccgcaaaggcctccaaggcaagctgtacgggttggaggatcttttctacaaatatggagtggatctgcagct

SEQ ID NO: 656383 - DNA, 120 bp, Artificial Sequence
  ENSG00000183760_10 (sequence is synthesized)
gtgggctcatgagcactcgtatgaacgactgtggccaatttacaactaccaggtatttaacggcagccgagagatgccctacaccaacccgcgagggcctgtccacatcatcacaggatc

SEQ ID NO: 656384 - DNA, 120 bp, Artificial Sequence
  ENSG00000183760_11 (sequence is synthesized)
tgctggctgtgaggagcggctgacgccctttgctgtcttcccgaggccctggagtgccgtgcgtgtgaaggagtacgggtatacgcggctgcacatcctcaacgggacccacatccacat

SEQ ID NO: 656385 - DNA, 120 bp, Artificial Sequence
  ENSG00000183760_12 (sequence is synthesized)
atgggaagatcgtagatgatgtctgggtggtgagacccctgtttggccggaggatgtacctctagggatggcggcagctctcctccagaagcctaggttttgccgccttggctgctgtga

SEQ ID NO: 656386 - DNA, 120 bp, Artificial Sequence
  ENSG00000183760_13 (sequence is synthesized)
ccagaaactgcccaggcctgggtggggagttgggtgggccctgactcccctgccctccagaggccccatgtagggtacatgcagccctatggagctggggcagctgttccctcctggaga

SEQ ID NO: 656387 - DNA, 120 bp, Artificial Sequence
  ENSG00000183760_14 (sequence is synthesized)
ggtgggagtcctggctggctgtggagggagggcaggtgtgcgggcacagagtgacacacggcaggtttctgctggcagggccccaccctcctgcatagctctgatcgggcgaggtgccca

SEQ ID NO: 656388 - DNA, 120 bp, Artificial Sequence
  ENSG00000183760_15 (sequence is synthesized)
cggggcttcaggaatgaagaggcttaagctctggctccatggattctgcacatctgcgggggatgccgctgggcttcctcctctcctgcccacctggcaagggcatcgccaggtgggcac

SEQ ID NO: 656389 - DNA, 120 bp, Artificial Sequence
  ENSG00000183760_16 (sequence is synthesized)
aaccgtcatgacactactcaccagcaggtggcgtcaggggctttttcttctgagcccggcactgagagttggtctgaagcctggctccttcttcactgctccaggactgctatgaagagt

SEQ ID NO: 656390 - DNA, 120 bp, Artificial Sequence
  ENSG00000183760_17 (sequence is synthesized)
cccttcatgcctcagtttcccagcctggcaccatcttattcgggaagaggagacgtgttaacactcttgcctcctagctaggacagatgacaaaccgcaagagccacagacttgccagtt

SEQ ID NO: 656391 - DNA, 120 bp, Artificial Sequence
  ENSG00000183760_18 (sequence is synthesized)
ccttccctctttccttcctttctttcccttcttttatttattgaatcataatttattgagcatctaccatgtgccaggctctgttctcagtgctggagagacagctgtgaatgagacaga

SEQ ID NO: 656392 - DNA, 120 bp, Artificial Sequence
  ENSG00000183760_19 (sequence is synthesized)
gatctcggccctcacagagctgacatcctaaccagagagttggacaaaaatcacgataaatgagttggttaaatagcgatttgtgagtagaaaacgcagggacggtgagagagcagtttc

SEQ ID NO: 656393 - DNA, 120 bp, Artificial Sequence
  ENSG00000183760_20 (sequence is synthesized)
aattttcagggggatctcactgagagggcaacatttgatctgaaggaggtggggaaggagccaagtgggcagacatctgggggaagagcattccaggcagaggaacagccagtgcaaagg

SEQ ID NO: 656394 - DNA, 86 bp, Artificial Sequence
  ENSG00000183760_21 (sequence is synthesized)
gggaagagcattccaggcagaggaacagccagtgcaaaggccctgagacagaaatgtgcctggccggctgggtacagtaactcaca

SEQ ID NO: 656395 - DNA, 65 bp, Artificial Sequence
  ENSG00000183760_22 (sequence is synthesized)
tgagaccagcctgggcaacacagcgaaaccctttctctaccaaaaatatgaaatgggaggatggc

SEQ ID NO: 656396 - DNA, 80 bp, Artificial Sequence
  ENSG00000183762_0 (sequence is synthesized)
ctgctctccgccgcggcgctcacgctggcggcccggcccgcgcctagccccggcctcggccccggacccgagtgtttcac

SEQ ID NO: 656397 - DNA, 120 bp, Artificial Sequence
  ENSG00000183762_1 (sequence is synthesized)
cgcctagccccggcctcggccccggacccgagtgtttcacagccaatggtgcggattataggggaacacagaactggacagcactacaaggcgggaagccatgtctgttttggaacgaga

SEQ ID NO: 656398 - DNA, 120 bp, Artificial Sequence
  ENSG00000183762_2 (sequence is synthesized)
ctttccagcatccatacaacactctgaaataccccaacggggaggggggcctgggtgagcacaactattgcagaaatccagatggagacgtgagcccctggtgctatgtggcagagcacg

SEQ ID NO: 656399 - DNA, 120 bp, Artificial Sequence
  ENSG00000183762_3 (sequence is synthesized)
aggatggtgtctactggaagtactgtgagatacctgcttgccagatgcctggaaaccttggctgctacaaggatcatggaaacccacctcctctaactggcaccagtaaaacgtccaaca

SEQ ID NO: 656400 - DNA, 120 bp, Artificial Sequence
  ENSG00000183762_4 (sequence is synthesized)
aactcaccatacaaacttgcatcagtttttgtcggagtcagaggttcaagtttgctgggatggagtcaggctatgcttgcttctgtggaaacaatcctgattactggaagtacggggagg

SEQ ID NO: 656401 - DNA, 120 bp, Artificial Sequence
  ENSG00000183762_5 (sequence is synthesized)
cagccagtaccgaatgcaacagcgtctgcttcggggatcacacccaaccctgtggtggcgatggcaggatcatcctctttgatactctcgtgggcgcctgcggtgggaactactcagcca

SEQ ID NO: 656402 - DNA, 120 bp, Artificial Sequence
  ENSG00000183762_6 (sequence is synthesized)
tgtcttctgtggtctattcccctgacttccccgacacctatgccacggggagggtctgctactggaccatccgggttccgggggcctcccacatccacttcagcttccccctatttgaca

SEQ ID NO: 656403 - DNA, 120 bp, Artificial Sequence
  ENSG00000183762_7 (sequence is synthesized)
tcagggactcggcggacatggtggagcttctggatggctacacccaccgtgtcctagcccgcttccacgggaggagccgcccacctctgtccttcaacgtctctctggacttcgtcatct

SEQ ID NO: 656404 - DNA, 120 bp, Artificial Sequence
  ENSG00000183762_8 (sequence is synthesized)
tgtatttcttctctgatcgcatcaatcaggcccagggatttgctgttttataccaagccgtcaaggaagaactgccacaggagaggcccgctgtcaaccagacggtggccgaggtgatca

SEQ ID NO: 656405 - DNA, 120 bp, Artificial Sequence
  ENSG00000183762_9 (sequence is synthesized)
cggagcaggccaacctcagtgtcagcgctgcccggtcctccaaagtcctctatgtcatcaccaccagccccagccacccacctcagactgtcccaggatggacagtctatggtctggcaa

SEQ ID NO: 656406 - DNA, 120 bp, Artificial Sequence
  ENSG00000183762_10 (sequence is synthesized)
ctctcctcatcctcacagtcacagccattgtagcaaagatacttctgcacgtcacattcaaatcccatcgtgttcctgcttcaggggaccttagggattgtcatcaaccagggacttcgg

SEQ ID NO: 656407 - DNA, 120 bp, Artificial Sequence
  ENSG00000183762_11 (sequence is synthesized)
gggaaatctggagcattttttacaagccttccacttcaatttccatctttaagaagaaactcaagggtcagagtcaacaagatgaccgcaatccccttgtgagtgactaaaaaccccact

SEQ ID NO: 656408 - DNA, 120 bp, Artificial Sequence
  ENSG00000183762_12 (sequence is synthesized)
gtgcctaggacttgaggtccctctttgagctcaaggctgccgtggtcaacctctcctgtggttcttctctgacagactcttcccctcctctccctctgcctcggcctcttcggggaaacc

SEQ ID NO: 656409 - DNA, 120 bp, Artificial Sequence
  ENSG00000183762_13 (sequence is synthesized)
ctcctcctacagactaggaagaggcaccctgctgccagggcaggcagagcctggattcctcctgcttcatcgattgcacttaggagagagactcaaagccctggggcccggccctctctg

SEQ ID NO: 656410 - DNA, 120 bp, Artificial Sequence
  ENSG00000183762_14 (sequence is synthesized)
catctctctctgatctagctagcagtgggggtgtcaggacagtgaggctgagatgacagaggtggtcatggctggcacagggctcaggtacattctagatggctgtcaggtggtgggtag

SEQ ID NO: 656411 - DNA, 120 bp, Artificial Sequence
  ENSG00000183762_15 (sequence is synthesized)
ctttagttacattgaatttttcttgcttctctatttttgtccacacacaaatcagtttctcctgatctttatgtcttggaacagggccagacagggagaactctcaggtactcttgggag

SEQ ID NO: 656412 - DNA, 120 bp, Artificial Sequence
  ENSG00000183762_16 (sequence is synthesized)
ttggtcccatacaagtgcggactcctggacattagcgaggtgtaaagagggcagtgtctgtgctgccccggcagctttgctctccagatgctggactagggtgggcctccttcagcctgg

SEQ ID NO: 656413 - DNA, 120 bp, Artificial Sequence
  ENSG00000183762_17 (sequence is synthesized)
gagggtctgagaataagatctagtgacccccatttatatcaaacctgataccttacacatgggcttctttctagattcttctttccatagctcatggagctgcagggaaagctttaagag

SEQ ID NO: 656414 - DNA, 66 bp, Artificial Sequence
  ENSG00000183762_18 (sequence is synthesized)
ctttccatagctcatggagctgcagggaaagctttaagagctttggtcatataaaacatccattca

SEQ ID NO: 656415 - DNA, 62 bp, Artificial Sequence
  ENSG00000183762_19 (sequence is synthesized)
aatatacagaagaacagcttgaacccaggaggctgagattgcagtgagccgagatcgcacca

SEQ ID NO: 656416 - DNA, 61 bp, Artificial Sequence
  ENSG00000183762_20 (sequence is synthesized)
tccattcatttactcatgcaataaattctcctgcaagcttttatgggcactcagtaagtac

SEQ ID NO: 656417 - DNA, 120 bp, Artificial Sequence
  ENSG00000183762_21 (sequence is synthesized)
taaattctcctgcaagcttttatgggcactcagtaagtactcaggattggctttatcagccttgccactgagcagctcatggtcctatggaacctgagccaggcctcagtctctccatga

SEQ ID NO: 656418 - DNA, 120 bp, Artificial Sequence
  ENSG00000183762_22 (sequence is synthesized)
ttggctcagctaactctcagttcagagtggagagtatcaatcttgtgtttttgcccttaggcagcactatatgagacatggggcctgtggtccttccttctggtgtcccccgtgttaaaa

SEQ ID NO: 656419 - DNA, 120 bp, Artificial Sequence
  ENSG00000183762_23 (sequence is synthesized)
aagactctgtctcaaaaaaaaaaaaaacactccaagggccatccgtgctctctgcccctcctgtggggaccaagtggggttaggaatggctcagtggggaaggagagcactcttgtcccc

SEQ ID NO: 656420 - DNA, 120 bp, Artificial Sequence
  ENSG00000183762_24 (sequence is synthesized)
agtggggaaggagagcactcttgtccccagtcccttgccaccctgtcccttagatagggaggtgggctgcagagattggtgccagaagagggtgggtttgggaattggagctcctccaag

SEQ ID NO: 656421 - DNA, 120 bp, Artificial Sequence
  ENSG00000183762_25 (sequence is synthesized)
gagctcctcctaagattgagtgctgcagctgtagtggctgctggttgggagagtaagtgccatcactaatttaaaagtccttgccatctggaatcaggctttgtcaacagcagctgagaa

SEQ ID NO: 656422 - DNA, 120 bp, Artificial Sequence
  ENSG00000183762_26 (sequence is synthesized)
aagcagcctgtgcctctgctggccaggcctaggccctcgtcagagcgtgcctctccacaaggcacttgggcctgggtgattgttgcgcctctggctttggcgtttcctctttgcagcact

SEQ ID NO: 656423 - DNA, 120 bp, Artificial Sequence
  ENSG00000183762_27 (sequence is synthesized)
ttgcctacctcccccaagccctgagccactgcctgctggggctcctactgaggttctggaaacacctctgcacctgccgcccctgggaggaaagagggccacacaggaagtgtctgcagg

SEQ ID NO: 656424 - DNA, 120 bp, Artificial Sequence
  ENSG00000183762_28 (sequence is synthesized)
gagaggtggcactcggcagcctgagttcaggagaggtgcttggagcttcaggcagaggggccttcagaggagggaaacggagcaatgtgtcacaggcaggcaggggcaggactgccaccc

SEQ ID NO: 656425 - DNA, 120 bp, Artificial Sequence
  ENSG00000183762_29 (sequence is synthesized)
caggccccgtgggaggcctgctgagggcacagagctgctcggtgcagccttcatgctttgatctggaaagagcagctgtccgcaggcctctgtctccaagaggcctgtcacacaggagga

SEQ ID NO: 656426 - DNA, 120 bp, Artificial Sequence
  ENSG00000183762_30 (sequence is synthesized)
ccgctggaaacataccaacacgtgcagtctcccctccaagctattcatgctgtttgtggaatctctctcaaacataagtgtcaggtgtgtgtcgtcccaacgggtcctgtgctgtgaata

SEQ ID NO: 656427 - DNA, 120 bp, Artificial Sequence
  ENSG00000183762_31 (sequence is synthesized)
gatccatgtgcagcacaaagggaatgtggcacgtggccccaggaagagttcacccggccagggggcagttgttcagttgcctggggctgacactgaccactggcctctggggtgtcctgc

SEQ ID NO: 656428 - DNA, 120 bp, Artificial Sequence
  ENSG00000183762_32 (sequence is synthesized)
agcccaaatgcccaccttgccctcctcacatctcagtcaggggaggccatgcccaagccaatgtgctgtcacagcctgcagcgggggcagcacttcctcggagggcctgggaggtgctgg

SEQ ID NO: 656429 - DNA, 120 bp, Artificial Sequence
  ENSG00000183762_33 (sequence is synthesized)
ggatgccccagcgcttctcttcctgcctcgccctggcatggcccagcgcctctaggatcaacttacgatccgtggagcagccccgggaaacccaaatctggctcaggacagcgtacgggc

SEQ ID NO: 656430 - DNA, 120 bp, Artificial Sequence
  ENSG00000183762_34 (sequence is synthesized)
aggagggctgtaaatcatcccaggctaagcctccgtgggcactggctcctgccgcagcctggctatggactcagttagaaccaggtagaaagtcagcgacaccccacagaaggccactgc

SEQ ID NO: 656431 - DNA, 120 bp, Artificial Sequence
  ENSG00000183762_35 (sequence is synthesized)
ggctaggtaaacacctgagaaagaaactgctccagaagagatgacgtgggcttccaggagcatggaggaggtggcacttgaacttttaggaaactccttagatgagataaagtgggggtt

SEQ ID NO: 656432 - DNA, 120 bp, Artificial Sequence
  ENSG00000183762_36 (sequence is synthesized)
ggaggtggcgaaaagagggtaaccctgggaaagtcagtcagaacccatggcagaagactgcaggagaggcaggggaggggcttcggggaccactgtggacagagctctgaaagcaccctg

SEQ ID NO: 656433 - DNA, 120 bp, Artificial Sequence
  ENSG00000183762_37 (sequence is synthesized)
gccaaagcccctcctgaggtgacagagcgtgggaggaggctgcactgggcctgcgtgccatcctcacccctgttccccgctggcgccaggccctgccttcttggtacctgtgccaacagg

SEQ ID NO: 656434 - DNA, 120 bp, Artificial Sequence
  ENSG00000183762_38 (sequence is synthesized)
agagccctcaccagccgatcttgtcactctccgtggtgacagtgtcttggccagctgtggcccctagtttctagcagcgtttctcagtgtccttggcccttctgagaaggcaggcgggag

SEQ ID NO: 656435 - DNA, 120 bp, Artificial Sequence
  ENSG00000183762_39 (sequence is synthesized)
gcacacggtgccctgttcttccccgtttgtccagttgcttgcaaagcagagaatgagtaggagtgaacccgagtgacttcacccgccctgtcccccacgtcaggacaggcttgaggcctc

SEQ ID NO: 656436 - DNA, 120 bp, Artificial Sequence
  ENSG00000183762_40 (sequence is synthesized)
tctgggcgtgagcgaggaaaccaggctgctctaacttctgaagagtgggctctggctcaagactccaatcggccagaagcccacagagatcaaagcactagcaagttcagctgtcctggc

SEQ ID NO: 656437 - DNA, 120 bp, Artificial Sequence
  ENSG00000183762_41 (sequence is synthesized)
cctcgggtagaacccacgggcgtgcctgggtgcggctccacccacatgccccactgtcagcccaggcaggagccttcctggccgggctcaggatctgcctgcagcccagccaggccatca

SEQ ID NO: 656438 - DNA, 120 bp, Artificial Sequence
  ENSG00000183762_42 (sequence is synthesized)
cccagccccgatgcatcctggcactgcacgcttactcttcacaagcacttatacgcggatggcctccgagaccctgcctccctggtctgctgaggtcaggccaggtctcccacggagccg

SEQ ID NO: 656439 - DNA, 120 bp, Artificial Sequence
  ENSG00000183762_43 (sequence is synthesized)
ggcagctccacaccccaccacctggcaccgttaggtttcagatctcccgtgtggtgtttgatgtcggcttttgttcctaccttgggagtttggattgtttcctctggtgtctttgtttac

SEQ ID NO: 656440 - DNA, 120 bp, Artificial Sequence
  ENSG00000183762_44 (sequence is synthesized)
cttcctcactgttctacctcctggccaggtctcagcttagcttccctggtgtggggtgtttttcaagccttccagccacagctgtctcccctcaggctggacggctccggggtgacaggg

SEQ ID NO: 656441 - DNA, 120 bp, Artificial Sequence
  ENSG00000183762_45 (sequence is synthesized)
cttcaccctctgcctgcagacccctggtgggcacatctcacaggcttccgtcttgctgagttgggtacggaggcagaagtggggtgtggaggaaagtcagagggaaatctgcttcagaaa

SEQ ID NO: 656442 - DNA, 120 bp, Artificial Sequence
  ENSG00000183762_46 (sequence is synthesized)
ggaagggtctttagacacaaagactggaggcccttccccgcccgcacgggagctgccatcgtgggtctcatgcacgtcaagaccttcccacatccaaactcagcttccagcagggatttt

SEQ ID NO: 656443 - DNA, 120 bp, Artificial Sequence
  ENSG00000183762_47 (sequence is synthesized)
gactttggatgacaaggctttatttgtaaatatgctcttaatatgcaactttgagaataaaatagaaacatcatgtattttaaaatataagatgaagtgtgacgcactgtatacaattta

SEQ ID NO: 656444 - DNA, 120 bp, Artificial Sequence
  ENSG00000183762_48 (sequence is synthesized)
atatatatttttagggttttgttatttaagaaaatggaatgtaatggtacttttacaaacgagaaaaaatgttatttttactttctggaaaaaataaatattctcattgttgtagaaaga

SEQ ID NO: 656445 - DNA, 120 bp, Artificial Sequence
  ENSG00000183762_49 (sequence is synthesized)
cttccacttcaatttccatctttaagaagaaactcaagggtcagagtcaacaagatgaccgcaatccccttggacctagctgttgggtgaaaatacccttttctgccgactccctgcctg

SEQ ID NO: 656446 - DNA, 120 bp, Artificial Sequence
  ENSG00000183762_50 (sequence is synthesized)
cagtggatttccttatctgttgcttcaggtaagggaacaaatgcagaatttgaatgtcctcatagttcccccaatgctgcaggtggacaaataggctaaggcccctggcccagctggcag

SEQ ID NO: 656447 - DNA, 120 bp, Artificial Sequence
  ENSG00000183762_51 (sequence is synthesized)
cagctcccgctgcggcagagcccccagccgccgcctcctgccgccctcgcctttcctgcaggagccgtcccagcgcaggcttgctcaccagcgccgccccgtggtaagactgcagatctg

SEQ ID NO: 656448 - DNA, 120 bp, Artificial Sequence
  ENSG00000183762_52 (sequence is synthesized)
cagatctgcggaagaaggccagccctgaaccgcaactgctctcaagcccttccattacagttacacggattttttgcccagcgcggtgatgcgtgcctgtaatcccagctactctggagg

SEQ ID NO: 656449 - DNA, 120 bp, Artificial Sequence
  ENSG00000183762_53 (sequence is synthesized)
atatctgggtggcaatttcagagggcagaggggacaccttcattgcctctcctcgcacagaaatggtgggctctctctggcccagcgtggtggttcatgcctgtaataccagcgttttgg

SEQ ID NO: 656450 - DNA, 120 bp, Artificial Sequence
  ENSG00000183762_54 (sequence is synthesized)
ggctgcagtgagctatgatcacaccaccacactccagcctgagcagcagagcgggacctcgtctctaagaatagaaagaaagaaagagaaacggtgtcctccgcacagccggtcagaact

SEQ ID NO: 656451 - DNA, 120 bp, Artificial Sequence
  ENSG00000183762_55 (sequence is synthesized)
agaaagagaaacggtgtcctccgcacagccggtcagaactgtgtgactcacttgaggcaggaccgagagtgacatccagttgcacctttctcacctactttgggacctttgggggtgagt

SEQ ID NO: 656452 - DNA, 120 bp, Artificial Sequence
  ENSG00000183762_56 (sequence is synthesized)
tcccctttgtcctctcgtggaaacagcacacagcaagcaaccacaaaaccagagcggaaggagggacttcccaccggcatccggccccagtgccatgttttatcatctggaacggttgtg

SEQ ID NO: 656453 - DNA, 120 bp, Artificial Sequence
  ENSG00000183762_57 (sequence is synthesized)
aagctttgtgtgacttgctcaggatcagcagtcaccatggtctaatcccaagagggactcgtcacccagagacctcaaaaggccccaggcctactgtggttttttctgagaggctcccag

SEQ ID NO: 656454 - DNA, 120 bp, Artificial Sequence
  ENSG00000183762_58 (sequence is synthesized)
aaccaagtggcacgttggtttcctgtgcgtctgtgtctttgtgcctgtatctcgctgggggacttcacaggaagcaggatttgggcattcctgaagctcccagctggacaccactcctga

SEQ ID NO: 656455 - DNA, 120 bp, Artificial Sequence
  ENSG00000183762_59 (sequence is synthesized)
gcgccacatcccatgatcacttcaaccacaggcctttgactttgccacatggcaaggcacccagcagaagatgaggatgacgggtgatgctagatggatgtgtacctggtggatggccca

SEQ ID NO: 656456 - DNA, 120 bp, Artificial Sequence
  ENSG00000183762_60 (sequence is synthesized)
atggcccacgcacgaagactcaagaccctcaggactggccatataatctgcaaggtccagtatgaaataagaataagcagcccacacaactgggcatagtggttcatgcctgtaatccca

SEQ ID NO: 656457 - DNA, 120 bp, Artificial Sequence
  ENSG00000183763_0 (sequence is synthesized)
aagtcgtgctgcggagccaaatttgaagcaagcggaggcgcgggggcgcgtctacgaagccggacctgtagcagtttctttggctgcctgggccccttgagtccagccatcatgcctatc

SEQ ID NO: 656458 - DNA, 120 bp, Artificial Sequence
  ENSG00000183763_1 (sequence is synthesized)
cgtgctctgtgcactatctgctccgacttcttcgatcactcccgcgacgtggccgccatccactgcggccacaccttccacttgcagtgcctaattcagtggtttgagacagcaccaagt

SEQ ID NO: 656459 - DNA, 120 bp, Artificial Sequence
  ENSG00000183763_2 (sequence is synthesized)
cggacctgcccacagtgccgaatccaggttggcaaaagaaccattatcaataagctcttctttgatcttgcccaggaggaggagaatgtcttggatgcagaattcttaaagaatgaactg

SEQ ID NO: 656460 - DNA, 120 bp, Artificial Sequence
  ENSG00000183763_3 (sequence is synthesized)
gacaatgtcagagcccagctttcccagaaagacaaggagaaacgagacagccaggtcatcatcgacactctgcgggatacgctggaagaacgcaatgctactgtggtatctctgcagcag

SEQ ID NO: 656461 - DNA, 120 bp, Artificial Sequence
  ENSG00000183763_4 (sequence is synthesized)
gccttgggcaaggccgagatgctgtgctccacactgaaaaagcagatgaagtacttagagcagcagcaggatgagaccaaacaagcacaagaggaggcccgccggctcaggagcaagatg

SEQ ID NO: 656462 - DNA, 120 bp, Artificial Sequence
  ENSG00000183763_5 (sequence is synthesized)
aagaccatggagcagattgagcttctactccagagccagcgccctgaggtggaggagatgatccgagacatgggtgtgggacagtcagcggtggaacagctggctgtgtactgtgtgtct

SEQ ID NO: 656463 - DNA, 120 bp, Artificial Sequence
  ENSG00000183763_6 (sequence is synthesized)
ctcaagaaagagtacgagaatctaaaagaggcacggaaggcctcaggggaggtggctgacaagctgaggaaggatttgttttcctccagaagcaagttgcagacagtctactctgaattg

SEQ ID NO: 656464 - DNA, 120 bp, Artificial Sequence
  ENSG00000183763_7 (sequence is synthesized)
gatcaggccaagttagaactgaagtcagcccagaaggacttacagagtgctgacaaggaaatcatgagcctgaaaaagaagctaacgatgctgcaggaaaccttgaacctgccaccagtg

SEQ ID NO: 656465 - DNA, 120 bp, Artificial Sequence
  ENSG00000183763_8 (sequence is synthesized)
ctacctttgatgtggatactcccccagcccggccctccagctcccagcatggttactacgaaaaactttgcctagagaagtcacactccccaattcaggatgtccccaagaagatatgca

SEQ ID NO: 656466 - DNA, 120 bp, Artificial Sequence
  ENSG00000183763_9 (sequence is synthesized)
aaggccccaggaaggagtcccagctctcactgggtggccagagctgtgcaggagagccagatgaggaactggttggtgccttccctatttttgtccggaatgccatcctaggccagaaac

SEQ ID NO: 656467 - DNA, 120 bp, Artificial Sequence
  ENSG00000183763_10 (sequence is synthesized)
agcccaagaggcccaggtcagagtcctcttgcagcaaagatgtggtaaggacaggcttcgatgggctcggtggccggacaaaattcatccagcctactgacacagtcatgatccgcccat

SEQ ID NO: 656468 - DNA, 120 bp, Artificial Sequence
  ENSG00000183763_11 (sequence is synthesized)
tgcctgttaagcccaagaccaaggttaagcagagggtgagggtgaagacagtgccttctctcttccaggccaagctggacaccttcctgtggtcgtgagaacagtgagtctgaccaatgg

SEQ ID NO: 656469 - DNA, 120 bp, Artificial Sequence
  ENSG00000183763_12 (sequence is synthesized)
ccagacacatgcctgcaacttgtaggtcaaggactgtccaggcaggggttttgtggacagagccccactttcgggaccagcctgaggtgtaagggcagacaaacaggtgagggtgagtgt

SEQ ID NO: 656470 - DNA, 120 bp, Artificial Sequence
  ENSG00000183763_13 (sequence is synthesized)
ggcacccagagactgctcttcctgccctcaccctgccccactcctacgactgggagctgacatgaccagcccactgatcctgtcagcaggtcctgctcctgttgccaggctcctgtttat

SEQ ID NO: 656471 - DNA, 120 bp, Artificial Sequence
  ENSG00000183763_14 (sequence is synthesized)
agccatgatcagatgtggtcagactctttctgggcctggagaccacggtcacttgttgactgtctctgtggaccagagtgcttgaggcatctcaggcagcctcagcccaagcttctacct

SEQ ID NO: 656472 - DNA, 120 bp, Artificial Sequence
  ENSG00000183763_15 (sequence is synthesized)
gcctttgacttgcttctaggcatagcctgggccaagcagggtggggaatggaggatagcatgggatgtatggagaggatggaagattttcatgtaaaataaaattaaaaaaaaaaaacaa

SEQ ID NO: 656473 - DNA, 120 bp, Artificial Sequence
  ENSG00000183763_16 (sequence is synthesized)
ttctaggcagctccggatgtgcattgccagactgaggcctagcctcagagagctgggatctctgcccatatctctagtctcttctgggctaccttgatcactccctggggagcagcagga

SEQ ID NO: 656474 - DNA, 120 bp, Artificial Sequence
  ENSG00000183763_17 (sequence is synthesized)
tgggcaaggccgagatgctgtgctccacactgaaagtaggtcctcaggttttatgggtacagaattcatagggaggtattgccccagaactggactccccattctgggcttatcttctgg

SEQ ID NO: 656475 - DNA, 120 bp, Artificial Sequence
  ENSG00000183763_18 (sequence is synthesized)
caacagcctcaggtgtgcagtgctgggcctcattctgtgtatcagcgccgcccacccccggctctgagcctttcttgccctgcattgcagtcctttctcgccctgcattgcagtcctttc

SEQ ID NO: 656476 - DNA, 120 bp, Artificial Sequence
  ENSG00000183763_19 (sequence is synthesized)
ccataagaaaagggccatattggctatacttgtgggttttgtactaggtagtttgaagagtcaaggccttcccagtacctcacagaggggatgctcaactaagacctcagtgaggctggg

SEQ ID NO: 656477 - DNA, 120 bp, Artificial Sequence
  ENSG00000183763_20 (sequence is synthesized)
ccatatttccgaaagtggttcatactctactgatgaggccagcctgaagaaccttccattagcactctagtccttggctgggctgctctcctgagccagatcaaacagcatcctagggag

SEQ ID NO: 656478 - DNA, 120 bp, Artificial Sequence
  ENSG00000183763_21 (sequence is synthesized)
gagcaagggcctttgaagtcagctgtgctgagctgaccaaccagatcaaagtctgcagagtgaacagccttagacccagatgaattttgcatcagcctgggttggtgagcctcttgctct

SEQ ID NO: 656479 - DNA, 120 bp, Artificial Sequence
  ENSG00000183763_22 (sequence is synthesized)
ccaaggggcatgagaggcgattgatctgaacccacgattgatattctggccttgtaggcaggagcagtccttgctggatgccatttgaaagggaaagggagccatccttgtgaacagaca

SEQ ID NO: 656480 - DNA, 120 bp, Artificial Sequence
  ENSG00000183765_0 (sequence is synthesized)
actctgctggctgaggctgcggagagtgtgcggctccaggtgggctcacgcggtcgtgatgtctcgggagtcggatgttgaggctcagcagtctcatggcagcagtgcctgttcacagcc

SEQ ID NO: 656481 - DNA, 120 bp, Artificial Sequence
  ENSG00000183765_1 (sequence is synthesized)
ccatggcagcgttacccagtcccaaggctcctcctcacagtcccagggcatatccagctcctctaccagcacgatgccaaactccagccagtcctctcactccagctctgggacactgag

SEQ ID NO: 656482 - DNA, 120 bp, Artificial Sequence
  ENSG00000183765_2 (sequence is synthesized)
ctccttagagacagtgtccactcaggaactctattctattcctgaggaccaagaacctgaggaccaagaacctgaggagcctacccctgccccctgggctcgattatgggcccttcagga

SEQ ID NO: 656483 - DNA, 120 bp, Artificial Sequence
  ENSG00000183765_3 (sequence is synthesized)
tggatttgccaatcttgaatgtgtgaatgacaactactggtttgggagggacaaaagctgtgaatattgctttgatgaaccactgctgaaaagaacagataaataccgaacatacagcaa

SEQ ID NO: 656484 - DNA, 120 bp, Artificial Sequence
  ENSG00000183765_4 (sequence is synthesized)
gaaacactttcggattttcagggaagtgggtcctaaaaactcttacattgcatacatagaagatcacagtggcaatggaacctttgtaaatacagagcttgtagggaaaggaaaacgccg

SEQ ID NO: 656485 - DNA, 120 bp, Artificial Sequence
  ENSG00000183765_5 (sequence is synthesized)
tcctttgaataacaattctgaaattgcactgtcactaagcagaaataaagtttttgtcttttttgatctgactgtagatgatcagtcagtttatcctaaggcattaagagatgaatacat

SEQ ID NO: 656486 - DNA, 120 bp, Artificial Sequence
  ENSG00000183765_6 (sequence is synthesized)
catgtcaaaaactcttggaagtggtgcctgtggagaggtaaagctggctttcgagaggaaaacatgtaagaaagtagccataaagatcatcagcaaaaggaagtttgctattggttcagc

SEQ ID NO: 656487 - DNA, 120 bp, Artificial Sequence
  ENSG00000183765_7 (sequence is synthesized)
ttttgaaaaagctaaatcatccttgcatcatcaagattaaaaacttttttgatgcagaagattattatattgttttggaattgatggaagggggagagctgtttgacaaagtggtgggga

SEQ ID NO: 656488 - DNA, 120 bp, Artificial Sequence
  ENSG00000183765_8 (sequence is synthesized)
ataaacgcctgaaagaagctacctgcaagctctatttttaccagatgctcttggctgtgcagtaccttcatgaaaacggtattatacaccgtgacttaaagccagagaatgttttactgt

SEQ ID NO: 656489 - DNA, 120 bp, Artificial Sequence
  ENSG00000183765_9 (sequence is synthesized)
catctcaagaagaggactgtcttataaagattactgattttgggcactccaagattttgggagagacctctctcatgagaaccttatgtggaacccccacctacttggcgcctgaagttc

SEQ ID NO: 656490 - DNA, 120 bp, Artificial Sequence
  ENSG00000183765_10 (sequence is synthesized)
ttgtttctgttgggactgctgggtataaccgtgctgtggactgctggagtttaggagttattctttttatctgccttagtgggtatccacctttctctgagcataggactcaagtgtcac

SEQ ID NO: 656491 - DNA, 120 bp, Artificial Sequence
  ENSG00000183765_11 (sequence is synthesized)
ctgagcataggactcaagtgtcactgaaggatcagatcaccagtggaaaatacaacttcattcctgaagtctgggcagaagtctcagagaaagctctggaccttgtcaagaagttgttgg

SEQ ID NO: 656492 - DNA, 74 bp, Artificial Sequence
  ENSG00000183765_12 (sequence is synthesized)
tccacagctctaccccaggttctagcccagccttctactagtcgaaagcggccccgtgaaggggaagccgaggg

SEQ ID NO: 656493 - DNA, 120 bp, Artificial Sequence
  ENSG00000183765_13 (sequence is synthesized)
ctactagtcgaaagcggccccgtgaaggggaagccgagggtgccgagaccacaaagcgcccagctgtgtgtgctgctgtgttgtgaactccgtggtttgaacacgaaagaaatgtacctt

SEQ ID NO: 656494 - DNA, 78 bp, Artificial Sequence
  ENSG00000183765_14 (sequence is synthesized)
atagtttgtattttaattatgggaataattgctttttcacagtcactgatgtacaattaaaaacctgatggaacctgg

SEQ ID NO: 656495 - DNA, 80 bp, Artificial Sequence
  ENSG00000183765_15 (sequence is synthesized)
ggagagtgtgcggctccaggtgggctcacgcgatactggatttcaccatgacctgcgttggcctcccaaagtgctgggat

SEQ ID NO: 656496 - DNA, 120 bp, Artificial Sequence
  ENSG00000183765_16 (sequence is synthesized)
tgactgctaattagactcctctgggaaggtagaggcgggcaacacataatgccttcgctgtgggagcttcatcaaggggatgattcttggacggacatttttcctccctctttccacagg

SEQ ID NO: 656497 - DNA, 63 bp, Artificial Sequence
  ENSG00000183765_17 (sequence is synthesized)
cctcagcctcccaaagtgctgggataagaggtgtgaggcaccatccccggccagtttgcagtc

SEQ ID NO: 656498 - DNA, 120 bp, Artificial Sequence
  ENSG00000183765_18 (sequence is synthesized)
cggcctcccaaagtgctgggaatacagatagatagggtctcactctcactctggagtgagtggtgcaaccacagcttagtgcagcctcgaccttcaggctcaagtgatcctccttccttg

SEQ ID NO: 656499 - DNA, 87 bp, Artificial Sequence
  ENSG00000183765_19 (sequence is synthesized)
accatatggtcttgctctgttgcccaggttggagtacagtggcaggatcacagcccattgtagcatcagcttatcttgctcaagtga

SEQ ID NO: 656500 - DNA, 120 bp, Artificial Sequence
  ENSG00000183765_20 (sequence is synthesized)
cgaacatacagcaagaaacactttcggattttcagggaggaaaatttgtcctgtccttacagaatatggtttaagtgagtaaagatgagtaagttgctgggcgtggtggctcacacctgt

SEQ ID NO: 656501 - DNA, 71 bp, Artificial Sequence
  ENSG00000183765_21 (sequence is synthesized)
aaaagatgatttttgtcttttttgatctgactgtagatgatcagtcagtttatcctaaggcattaagagat

SEQ ID NO: 656502 - DNA, 120 bp, Artificial Sequence
  ENSG00000183765_22 (sequence is synthesized)
agctacctgcaagctctatttttaccagatgctcttggctgtgcaggtaaaagaagccctcaattcttttgacagctgcctttcttttagttgaattactccctgaattaggcagaaatc

SEQ ID NO: 656503 - DNA, 120 bp, Artificial Sequence
  ENSG00000183765_23 (sequence is synthesized)
agacccatgtttgtattgctgggctcagaaatggaatttggagctgacttagtgtttttggctgttaagcccttgacattttacactggtgaagtttcactgtgtcctctgcaaacaggg

SEQ ID NO: 656504 - DNA, 120 bp, Artificial Sequence
  ENSG00000183765_24 (sequence is synthesized)
acaatggaaaggctgttatatggaatgtctgtaaattctaatacttgaagtggacccaggagtggtaggtctcataattaaaaacattcagacaatcactatctttgtttttccctctag

SEQ ID NO: 656505 - DNA, 120 bp, Artificial Sequence
  ENSG00000183765_25 (sequence is synthesized)
tgtcatcaactgcttatgcacttcctttgaagatggagaataagaaggaaagaaatttatccattaaagttattcatttgcagattctgtttaccgttatttgtttgttttgggcactta

SEQ ID NO: 656506 - DNA, 120 bp, Artificial Sequence
  ENSG00000183765_26 (sequence is synthesized)
tttttgaccagggaggactgtttctagttaatgtttttctgacctctcggatacgtagtttctctctcatttttctcttagtatctttctgggaatttcacaatccagggctacatggtg

SEQ ID NO: 656507 - DNA, 120 bp, Artificial Sequence
  ENSG00000183765_27 (sequence is synthesized)
cttccgccagccagatccgtcctcccctctcgcaggccagacctcgacgtgtctctcgcccgggcccgtttcccgaaaccgtcgctcgtaccagtccataaggctgaagtagtctcgagt

SEQ ID NO: 656508 - DNA, 120 bp, Artificial Sequence
  ENSG00000183765_28 (sequence is synthesized)
ggggtcaggtgcctgcagcgctcggcactgtgggcagaagaacctgtcctcccgcccggggccccatgggccgccgcagttccaacagcggggataattgcttcccgcctgcgacgcagc

SEQ ID NO: 656509 - DNA, 120 bp, Artificial Sequence
  ENSG00000183765_29 (sequence is synthesized)
atcgcagcttagcggtctccttctgggaacccctgtcggccaaaacccccacacccggagcaaagccccggctctcccccgccacatctggccggcggcctatctagccgtggtcactcg

SEQ ID NO: 656510 - DNA, 120 bp, Artificial Sequence
  ENSG00000183765_30 (sequence is synthesized)
tggggaaaagcaaagagagcgtctaaccagactaatgttgctgattggctggggagtcgagggggcgggatcacccgaggggaacccgggttctaagttccgctctcccttctaaactac

SEQ ID NO: 656511 - DNA, 120 bp, Artificial Sequence
  ENSG00000183765_31 (sequence is synthesized)
aactcccaggaggcattgaggcggcgcctgacggccacatctgctgctcctcattggtccggcggcaggggagggggttttgattggctgagggtggagtttgtatctgcaggtttagcg

SEQ ID NO: 656512 - DNA, 120 bp, Artificial Sequence
  ENSG00000183765_32 (sequence is synthesized)
cactgtcactaagcagaaataaagagaaaatacttaaaatctactctctcagctgattttcaaaaatacggcggggcgcggtggctcacgtctttaatcccagcactttgggaggccgag

SEQ ID NO: 656513 - DNA, 120 bp, Artificial Sequence
  ENSG00000183770_0 (sequence is synthesized)
agaacagagcgaggctcctggcgcactagggactccaggaggcagctccgccagagacgcgggtcgtgcttcgggaaaccggggggcggggggaggggaagagcgcagaaaagaaaaccc

SEQ ID NO: 656514 - DNA, 120 bp, Artificial Sequence
  ENSG00000183770_1 (sequence is synthesized)
accaaggcggggactggcctgagcggggaggggcggcgaggccggagcccctctctgttgggcggactccccatggccagaggctgagctccactcccgccggccgctccctaggggaag

SEQ ID NO: 656515 - DNA, 120 bp, Artificial Sequence
  ENSG00000183770_2 (sequence is synthesized)
gggaaggagaggggagagcagcgacaggcctccagcaagcaagcgcgggcggcatccgcagtctccagaagtttgagacttggccgtaagcggactcgtgcgccccaactctttgccgcg

SEQ ID NO: 656516 - DNA, 120 bp, Artificial Sequence
  ENSG00000183770_3 (sequence is synthesized)
ccagcgcctggagcggagagcagaggcggcccggccgcggcgcgccggctttgtcatgatggccagctaccccgagcccgaggacgcggcgggggccctgctggccccagagaccggtcg

SEQ ID NO: 656517 - DNA, 120 bp, Artificial Sequence
  ENSG00000183770_4 (sequence is synthesized)
cacagtcaaggagccagaagggccgccgccgagcccaggcaagggcggtgggggtggcggcgggacagccccggagaagccggacccggcgcagaagcccccgtactcgtacgtggcgct

SEQ ID NO: 656518 - DNA, 120 bp, Artificial Sequence
  ENSG00000183770_5 (sequence is synthesized)
catcgccatggcgatccgcgagagcgcggagaagaggctcacgctgtccggcatctaccagtacatcatcgcgaagttcccgttctacgagaagaataagaagggctggcaaaatagcat

SEQ ID NO: 656519 - DNA, 120 bp, Artificial Sequence
  ENSG00000183770_6 (sequence is synthesized)
ccgccacaacctcagcctcaacgagtgcttcatcaaggtgccgcgcgagggcggcggcgagcgcaagggcaactactggacgctggacccggcctgcgaagacatgttcgagaagggcaa

SEQ ID NO: 656520 - DNA, 120 bp, Artificial Sequence
  ENSG00000183770_7 (sequence is synthesized)
tgttcgagaagggcaactaccggcgccgccgccgcatgaagaggcccttccggccgccgcccgcgcacttccagcccggcaaggggctcttcggggccggaggcgccgcaggcgggtgcg

SEQ ID NO: 656521 - DNA, 120 bp, Artificial Sequence
  ENSG00000183770_8 (sequence is synthesized)
ggccgacggctacggctacctggcgccccccaagtacctgcagtctggcttcctcaacaactcgtggccgctaccgcagcctccctcacccatgccctatgcctcctgccagatggcggc

SEQ ID NO: 656522 - DNA, 120 bp, Artificial Sequence
  ENSG00000183770_9 (sequence is synthesized)
cggctgcagcagctgcggctgcagccgcgggccccggtagccctggcgcggccgctgtggtcaaggggctggcgggcccggccgcctcgtacgggccgtacacacgcgtgcagagcatgg

SEQ ID NO: 656523 - DNA, 120 bp, Artificial Sequence
  ENSG00000183770_10 (sequence is synthesized)
gagcatggcgctgccccccggcgtagtgaactcgtacaatggcctgggaggcccgccggccgcacccccgcctccgccgcacccccacccgcatccgcacgcacaccatctgcacgcggc

SEQ ID NO: 656524 - DNA, 120 bp, Artificial Sequence
  ENSG00000183770_11 (sequence is synthesized)
gccatgatgcattgctcttactgggaccacgacagcaagaccggcgcgctgcattcgcgcctcgatctctgagagcccaccgcatgccggtgcagacggatgcgaggatgcagggacgcg

SEQ ID NO: 656525 - DNA, 120 bp, Artificial Sequence
  ENSG00000183770_12 (sequence is synthesized)
cgacgccggccccggtcgcagccgacgacgccgccgccagcctgacctcacaccctctgggcccgcctctggagccagcgcccagggtccctctgtgctttttcgctttcctaagctcct

SEQ ID NO: 656526 - DNA, 120 bp, Artificial Sequence
  ENSG00000183770_13 (sequence is synthesized)
gtcgctcctctttgtcccctcagtttatgtcctcctgtgctcacctccctgacctctgtgaccttgcactcccctggcctgaagctgcctctctgcgcgctttctactgggctcgtctct

SEQ ID NO: 656527 - DNA, 120 bp, Artificial Sequence
  ENSG00000183770_14 (sequence is synthesized)
ttccggagccccagcgtctcctgcccaaattcaccgcggaaagggcccggggcggaggtgcgaccgggcgtcggcagcgcagacctcttggccttctctcacaggtcggtgcgctcgctc

SEQ ID NO: 656528 - DNA, 120 bp, Artificial Sequence
  ENSG00000183770_15 (sequence is synthesized)
tccgcgttccccgcccgactgccgtgcagtccatggctagacgcgccggacaggactgatggcgggaccgcgctgcccgagaaagggacggaccaatacgtgtgtttgctccgcgaaccc

SEQ ID NO: 656529 - DNA, 120 bp, Artificial Sequence
  ENSG00000183770_16 (sequence is synthesized)
tcttgaagctgttcagaagccgcttgccgcggggcccactaggcggggcgggggttgggacccagcgggagccggggcagcctggctccacggcctgtactcggtttacaccgcgggcgg

SEQ ID NO: 656530 - DNA, 120 bp, Artificial Sequence
  ENSG00000183770_17 (sequence is synthesized)
gcgcggagggaggctgcgtttcctccgctatcagtcccgtcgcttcgggcacctccgggccccggcggctggctaatgttttgtttgaaagatcggtggaactttttaagagagtattta

SEQ ID NO: 656531 - DNA, 120 bp, Artificial Sequence
  ENSG00000183770_18 (sequence is synthesized)
aaaaaaaaaaaaggaaaaaaaattcaccgggcaaccggggaagtattgtggccttggagtttgctaaatccaaatatgaaaatcaaaagctttagtattcctcatcttctcttctggaag

SEQ ID NO: 656532 - DNA, 120 bp, Artificial Sequence
  ENSG00000183770_19 (sequence is synthesized)
atttgcgttagagtttttgttgggccttcaaaaagctgtgttcagagttaggagaatatatccaataaaagatggtttcgtctaccaattggggaagtttcaccctctccctatctgaag

SEQ ID NO: 656533 - DNA, 120 bp, Artificial Sequence
  ENSG00000183770_20 (sequence is synthesized)
aaaaaaatcaaaaacaaatgtccccggatctttcgatgcaagtcctggaggcagggagatcactgcctgcctggcccacgctgctgggacggctcgtcctccctgctttttgtttttcaa

SEQ ID NO: 656534 - DNA, 120 bp, Artificial Sequence
  ENSG00000183770_21 (sequence is synthesized)
acctcctgcttctcccaccttgggaaggagaaatgtgaaacccggcagcggccgacctaggcggtcttgtggcccggagccggcccggcccgaaaaccatagacctggttgtactgtagc

SEQ ID NO: 656535 - DNA, 90 bp, Artificial Sequence
  ENSG00000183770_22 (sequence is synthesized)
cggcccggcccgaaaaccatagacctggttgtactgtagcttgttgtttgggggaccaaattttctagagagaactagagcacttttggc

SEQ ID NO: 656536 - DNA, 120 bp, Artificial Sequence
  ENSG00000183773_0 (sequence is synthesized)
gcgcctccccgcccccccgcgcccgcggccccaagcggttcccgagcccaggcccgcgccgagcccaggtcctagagcagctccagcaggatggcggctccagcgtctctaaggcctgca

SEQ ID NO: 656537 - DNA, 120 bp, Artificial Sequence
  ENSG00000183773_1 (sequence is synthesized)
ggatggcggctccagcgtctctaaggcctgcagggggtccagccccatggggggcgccctaggcctccgacagctccccatctgtgctcctgcctgccggccatcctcaggccactcgcc

SEQ ID NO: 656538 - DNA, 120 bp, Artificial Sequence
  ENSG00000183773_2 (sequence is synthesized)
atgggcggctgcttctccaaacccaaaccagtggagctcaagatcgaggtggtgctgcctgagaaggagcgaggcaaggaggagctgtcggccagtgggaagggcagcccccgggcctac

SEQ ID NO: 656539 - DNA, 120 bp, Artificial Sequence
  ENSG00000183773_3 (sequence is synthesized)
cagggcaatggcacggcccgccacttccacacggaggagcgcctgtccacccctcacccctaccccagccctcaggattgcgtggaggctgctgtctgccacgtcaaggacctcgagaat

SEQ ID NO: 656540 - DNA, 120 bp, Artificial Sequence
  ENSG00000183773_4 (sequence is synthesized)
ggccagatgcgggaagtggagctgggctgggggaaggtgttgctggtgaaggacaatggggagttccacgccctgggccataagtgtccgcactacggcgcacccctggtgaaaggcgtt

SEQ ID NO: 656541 - DNA, 120 bp, Artificial Sequence
  ENSG00000183773_5 (sequence is synthesized)
ctgtcccgtggtcgggtgcgctgcccctggcacggcgcctgcttcaacatcagcactggggacctggaggacttccctggcctggacagtctacacaagttccaggtgaagattgagaag

SEQ ID NO: 656542 - DNA, 120 bp, Artificial Sequence
  ENSG00000183773_6 (sequence is synthesized)
gagaaggtgtacgtccgggccagcaagcaggccctacagctgcagcgaaggaccaaggtgatggccaagtgtatctctccaagtgctgggtacagcagtagcaccaatgtgctcattgtg

SEQ ID NO: 656543 - DNA, 120 bp, Artificial Sequence
  ENSG00000183773_7 (sequence is synthesized)
ggtgcaggtgcagctggcctggtgtgtgcagagacactgcggcaggagggcttctccgaccggatcgtcctgtgcacgctagaccggcaccttccctacgaccgtcccaagctcagcaag

SEQ ID NO: 656544 - DNA, 120 bp, Artificial Sequence
  ENSG00000183773_8 (sequence is synthesized)
tccctggacacacagcctgagcagctggccctgaggcccaaggagtttttccgagcctatggcatcgaggtgctcaccgaggctcaggtggtcacagtggacgtgagaactaagaaggtc

SEQ ID NO: 656545 - DNA, 120 bp, Artificial Sequence
  ENSG00000183773_9 (sequence is synthesized)
tatccggacgccagaggatgccaatcgcgtggtgaggctggcccgaggccgcaacgtggtcgtcgtgggagccggcttcctggggatggaggtggccgcttacctgacggagaaggccca

SEQ ID NO: 656546 - DNA, 120 bp, Artificial Sequence
  ENSG00000183773_10 (sequence is synthesized)
ctctgtgtctgtggtggagctggaggagacgcccttcaggaggttcctgggggagcgcgtgggtcgtgccctcatgaagatgtttgagaacaaccgggtgaagttctacatgcagacgga

SEQ ID NO: 656547 - DNA, 120 bp, Artificial Sequence
  ENSG00000183773_11 (sequence is synthesized)
ggtgtctgagctgcggggccaggagggaaagctgaaggaggttgtgctgaagagcagcaaggtcgtgcgggctgacgtctgcgtggtgggcattggtgcagtgcccgccacaggcttcct

SEQ ID NO: 656548 - DNA, 120 bp, Artificial Sequence
  ENSG00000183773_12 (sequence is synthesized)
gaggcaaagcggcatcggtttggattcccgaggcttcatccctgtcaacaagatgatgcagaccaatgtcccaggcgtgtttgcagctggcgatgctgtcaccttcccccttgcctggag

SEQ ID NO: 656549 - DNA, 120 bp, Artificial Sequence
  ENSG00000183773_13 (sequence is synthesized)
gaacaaccgcaaagtgaacattccacattggcagatggctcatgctcaggggcgcgtggcagcccagaacatgttggcgcaggaggcggagatgagcactgtgccctacctctggaccgc

SEQ ID NO: 656550 - DNA, 120 bp, Artificial Sequence
  ENSG00000183773_14 (sequence is synthesized)
catgtttggcaagagcctgcgctacgcgggctacggagaaggcttcgacgacgtcatcatccagggggatctggaggagctgaagtttgtggctttttacactaaaggcgacgaggtgat

SEQ ID NO: 656551 - DNA, 120 bp, Artificial Sequence
  ENSG00000183773_15 (sequence is synthesized)
cgccgtggccagcatgaactacgatcccattgtgtccaaggtcgctgaggtgctggcctcaggccgtgccatccggaagcgggaggtggagctgtttgtgctgcacagcaagactggcga

SEQ ID NO: 656552 - DNA, 120 bp, Artificial Sequence
  ENSG00000183773_16 (sequence is synthesized)
catgtcctggcttacggggaaaggatcctgagctcacatgcagtagacttgggcaggcaaagggggcaccaagggcacaggccaagccttgggggcaggtgccaatctccagtcccagga

SEQ ID NO: 656553 - DNA, 120 bp, Artificial Sequence
  ENSG00000183773_17 (sequence is synthesized)
tcccccagggcagaacctgagccctcccagtgcttgccttcagccacctggctcccctcctgggaggcctctgctggatccagaagatgctcaaccctcaaggcctctgctgccactgac

SEQ ID NO: 656554 - DNA, 120 bp, Artificial Sequence
  ENSG00000183773_18 (sequence is synthesized)
agctggcactggaggcaggacaagccctgcctcttctccctctattgggactggtcccctgaagaaccctgcaacacgttaaacattaccgtaaaattaaaacgcacaaatttgcagatc

SEQ ID NO: 656555 - DNA, 120 bp, Artificial Sequence
  ENSG00000183773_19 (sequence is synthesized)
tggcacccacaggccctacagctgcagcgaaggaccaaggtgatggccaagtgtatctctccaagtgctgggtacagcagtagcaccaatgtgctcattgtgggtgcagagacactgcgg

SEQ ID NO: 656556 - DNA, 120 bp, Artificial Sequence
  ENSG00000183773_20 (sequence is synthesized)
gagaacaaccgggtgaagttctacatgcagacggaggtgtctgagctgcggggccaggagggaaaggtgggcccttctcccttctccctgctgctttctgtcctctgtcccctgagcctg

SEQ ID NO: 656557 - DNA, 120 bp, Artificial Sequence
  ENSG00000183773_21 (sequence is synthesized)
ggagctgggtccacctgtttatccacccactccccacagctgaaggaggttgtgctgaagagcagcaaggtcgtgcgggctgacgtctgcgtggtgggcattggtgagttggtgtgtggg

SEQ ID NO: 656558 - DNA, 120 bp, Artificial Sequence
  ENSG00000183773_22 (sequence is synthesized)
caggcaggcacaaagcagcccagccgtctgcacatgctcacatgtgaccttgggctagtcccttcccctcccagagcctcagtttccaccacatctgtcaaatgggaacccccaaccgcc

SEQ ID NO: 656559 - DNA, 120 bp, Artificial Sequence
  ENSG00000183773_23 (sequence is synthesized)
cccactttacggagctgttggggaaggtatgtactgggctcagcccaggcctggcacagtggatgctcccagtgcccgctgcccagtaacactcatctccatgccctgcgagagttgaca

SEQ ID NO: 656560 - DNA, 120 bp, Artificial Sequence
  ENSG00000183773_24 (sequence is synthesized)
tagacgagactcgaactggcttctgctccagctgaagtgccaatttgggtaggggccaagatgggaggtggtagcacctgcaggggctgaggaggtatggcatgctgtccctccacttaa

SEQ ID NO: 656561 - DNA, 120 bp, Artificial Sequence
  ENSG00000183773_25 (sequence is synthesized)
gggcctcatggagcacttcttggagaaggtgatatctgaggtcttgcgggaggcaccgggtctgtgggagaccgggtagtggggaccagggtgcatgaaggcctcaggtagacagcccct

SEQ ID NO: 656562 - DNA, 120 bp, Artificial Sequence
  ENSG00000183773_26 (sequence is synthesized)
ggaggatcagtctggggctggcacatcaagcgcatgctgtagggtgtggagagtgactacgcagaaggcagggacaggggagtggacacaggcttccgtcctgtcaggtgcagtgcccgc

SEQ ID NO: 656563 - DNA, 120 bp, Artificial Sequence
  ENSG00000183773_27 (sequence is synthesized)
agagcaccggggtgcagcttggcgcgaagcagcgggagctcagtcgggaagggggattcatcccaggcaaaatcccagaacaagagcccagccctgagccccgctgaggagtgctggagc

SEQ ID NO: 656564 - DNA, 120 bp, Artificial Sequence
  ENSG00000183773_28 (sequence is synthesized)
gggtaggtccttccctgggccccagatggacagcagtgcatcagggttttcaaaaaggggctgctgcctcgcagtcctcaggcttggccatcctctccttgcagaggcgacgaggtgatc

SEQ ID NO: 656565 - DNA, 120 bp, Artificial Sequence
  ENSG00000183773_29 (sequence is synthesized)
gccgtggccagcatgaactacgatcccattgtgtccaaggtcgctgaggtgctggcctcaggccgtgccatccggaagcgggaggtggagtgagtgtgggtgtgggaagcctgggggtgg

SEQ ID NO: 656566 - DNA, 120 bp, Artificial Sequence
  ENSG00000183773_30 (sequence is synthesized)
gagtagttccctggagtactggctaaggtgcctatgacagccagccgcccccacaaccctccagggcctttcccctcttggtttgcatcgcctgaggcttacaggactacagggaggtgt

SEQ ID NO: 656567 - DNA, 120 bp, Artificial Sequence
  ENSG00000183773_31 (sequence is synthesized)
ggggcaaggatcatggtttgagagcaggctggttatgtgttcatggtggatggaagggatagagatgtgtgtcaccaggcagggccagtgctgtgggaaggggtcagggcccaatgcatg

SEQ ID NO: 656568 - DNA, 120 bp, Artificial Sequence
  ENSG00000183773_32 (sequence is synthesized)
ggcaatcaccaggcgtgggacacctaactggacatagttgtgctgagcctggcagaagctaggtgggaaatgcagctactgatgccctgggtatgccctccacatagatggtgggggtgg

SEQ ID NO: 656569 - DNA, 120 bp, Artificial Sequence
  ENSG00000183773_33 (sequence is synthesized)
ttctaggtttcactcaacaccagccagttcccttatcctggtgtggtgtcaatgagattcaccctctgggagagagctcccagggactggggacagcctggaggccactgggaggctatg

SEQ ID NO: 656570 - DNA, 120 bp, Artificial Sequence
  ENSG00000183773_34 (sequence is synthesized)
agacaggggcaggcttcaggctggaaacaatggaggaccagaaggggacatgataaatgacatgctctctccttggccttctctccgtttctctctcttgccttcgtgaaggctgtttgt

SEQ ID NO: 656571 - DNA, 120 bp, Artificial Sequence
  ENSG00000183773_35 (sequence is synthesized)
gctgcacagcaagtacgtgtgtccttcatgttgaccgttctgagcctttcccatgtcagcccagaccctccacccaatggtcttatctccctctgtccaagtacacctccctgctgggca

SEQ ID NO: 656572 - DNA, 120 bp, Artificial Sequence
  ENSG00000183773_36 (sequence is synthesized)
ctagggtctggcacagaacagaccccctgctgtcctcaagggccagctgttcagggtgcccagagtggagagcctgttttcttctgtcttgacccctcctcccctcactcctgcaggact

SEQ ID NO: 656573 - DNA, 120 bp, Artificial Sequence
  ENSG00000183773_37 (sequence is synthesized)
ctcttcgccccggcgccgggggccagcgcttgcgctcccaagtctcggaccccggcccggcacgttaggggctgggggttggcaagcggggccagaggcactggccggggtccgaagctc

SEQ ID NO: 656574 - DNA, 120 bp, Artificial Sequence
  ENSG00000183773_38 (sequence is synthesized)
acctcgtccttctctcgtcccacaacggccccttcccggctcgccgcggggccccactgtgtgccagtcccccttctcgggctgcaaggcacccacccacggcccttcctggtatctgga

SEQ ID NO: 656575 - DNA, 120 bp, Artificial Sequence
  ENSG00000183773_39 (sequence is synthesized)
cccacctcaagtgagacttcaggaagaacttccagaggaaactggaggatggcagtgggatggactgtggggaggtcatttgcaaacaaggcagcttatgcctgtgccctgggccttcca

SEQ ID NO: 656576 - DNA, 120 bp, Artificial Sequence
  ENSG00000183773_40 (sequence is synthesized)
aagtccacctgtaggctgcatcttccggaaggcccaccctgtagcctggaaggcacctggctacagtgatctctctgctgtgcaggtgtcccctcccccagggcaccttgcagggcctta

SEQ ID NO: 656577 - DNA, 120 bp, Artificial Sequence
  ENSG00000183773_41 (sequence is synthesized)
tgctttccccatatgctgttgggcatgactgcccacaggcctggtgggcgtttgtgaagggctggagtcgggggtagggggagcttatggctgctgggcacaggcgtggcagggctgtgt

SEQ ID NO: 656578 - DNA, 120 bp, Artificial Sequence
  ENSG00000183773_42 (sequence is synthesized)
ctcctggccacagcttgagctgggaggagggtggaggctgggccgcctcctggacccctgccctccctgcccggccttccaaggcccggcagcctcagtccactgctgggcctggaacac

SEQ ID NO: 656579 - DNA, 120 bp, Artificial Sequence
  ENSG00000183773_43 (sequence is synthesized)
ttctgggcttgcctgggagcggggatcaggggtcccaaggtgggagggtgagggggccatagccgggggtcggggttggcctgaaggggctatgaccagctgctgccctggtcactgcct

SEQ ID NO: 656580 - DNA, 120 bp, Artificial Sequence
  ENSG00000183775_0 (sequence is synthesized)
ccgaggaggacgtgactcggagctgcctccgctttctccaagccatattcctttaagatgatgtaatagtcatttccctggatggtttcttgcctgcactgctgaaacaacagcatccga

SEQ ID NO: 656581 - DNA, 120 bp, Artificial Sequence
  ENSG00000183775_1 (sequence is synthesized)
actgcactgggaactgtggaaccacccagctccgccgccagagaagccggagccccgggccccccgccggcatctctgcgctgcgttggcctctggctcgcaccggctcccacctggctg

SEQ ID NO: 656582 - DNA, 120 bp, Artificial Sequence
  ENSG00000183775_2 (sequence is synthesized)
ggaacatgggagtccgtttgcccttgccggcaggtggggtggctacctgggaccctagcagggcacatctctccatctttctgcttctgggctttctgaaaagcttctaagtcctggtac

SEQ ID NO: 656583 - DNA, 120 bp, Artificial Sequence
  ENSG00000183775_3 (sequence is synthesized)
ctcttgcaactctcttctaaggatcctttccaaagatttctttttccatttttcttttcccctggggaagctttggttgaatattttctctgctttacttcttcaacccaacctcctctc

SEQ ID NO: 656584 - DNA, 120 bp, Artificial Sequence
  ENSG00000183775_4 (sequence is synthesized)
atcagggcttaactttttttgcgacttgttttaacttaagatacggaatgaacacatatgtacctacatacatacataaatacaaataggcatttatataaatgcatatatataatagtt

SEQ ID NO: 656585 - DNA, 120 bp, Artificial Sequence
  ENSG00000183775_5 (sequence is synthesized)
attttccaagagcacacctctctggcacttttcattgatacctcggtcgtttacctgtttgggatttgacaagatccagactcagtttggctgtggattttgattgctttacaaatggtt

SEQ ID NO: 656586 - DNA, 120 bp, Artificial Sequence
  ENSG00000183775_6 (sequence is synthesized)
attattatttttttcacaagaactgggtctccagcactcactaagacggacatctgagtaactggggaattggcctgccttgcatgtgagcttgatggaagattggatatagacgagttg

SEQ ID NO: 656587 - DNA, 120 bp, Artificial Sequence
  ENSG00000183775_7 (sequence is synthesized)
attatattttatgaagtagcagctcactaccatccaccatccagggtttaaactactttttcagcatcacttcacctgtggactcttatacattttgatttcttgggggaaaaatactgg

SEQ ID NO: 656588 - DNA, 120 bp, Artificial Sequence
  ENSG00000183775_8 (sequence is synthesized)
gataagaggaggtcattttttaataagttagcatccttttccctttcttacaagttgatccaaaggataaggctgtgactccattggattgcacctttaaatcaaaatagcagcagcaga

SEQ ID NO: 656589 - DNA, 120 bp, Artificial Sequence
  ENSG00000183775_9 (sequence is synthesized)
agaaagggacaatggctctgagtggaaactgtagtcgttattatcctcgagaacaagggtccgcagttcccaactccttccctgaggtggtagagctgaatgtcgggggtcaagtttatt

SEQ ID NO: 656590 - DNA, 120 bp, Artificial Sequence
  ENSG00000183775_10 (sequence is synthesized)
ttactcgccattccacattgataagcatccctcattccctcctgtggaaaatgttttccccaaagagagacacggctaatgatctagccaaggactccaagggaaggtttttcattgaca

SEQ ID NO: 656591 - DNA, 120 bp, Artificial Sequence
  ENSG00000183775_11 (sequence is synthesized)
gagatggattcttgttccgttatattctggactatctcagggacaggcaggtggtcctgcctgatcactttccagaaaaaggaagactgaaaagggaagctgaatacttccagctcccag

SEQ ID NO: 656592 - DNA, 120 bp, Artificial Sequence
  ENSG00000183775_12 (sequence is synthesized)
acttggtcaaactcctgacccccgatgaaatcaagcaaagcccagatgaattctgccacagtgactttgaagatgcctcccaaggaagcgacacaagaatctgccccccttcctccctgc

SEQ ID NO: 656593 - DNA, 120 bp, Artificial Sequence
  ENSG00000183775_13 (sequence is synthesized)
tccctgccgaccgcaagtggggtttcattactgtgggttacagaggatcctgcaccttgggcagagagggacaggcagatgccaagtttcggagagttccccggattttggtttgtggaa

SEQ ID NO: 656594 - DNA, 120 bp, Artificial Sequence
  ENSG00000183775_14 (sequence is synthesized)
ggatttccttggcaaaagaagtctttggagaaactttgaatgaaagcagagaccctgatcgagccccagaaagatacacctccagattttatctcaaattcaagcacctggaaagggctt

SEQ ID NO: 656595 - DNA, 120 bp, Artificial Sequence
  ENSG00000183775_15 (sequence is synthesized)
ttgatatgttgtcagagtgtggattccacatggtggcctgtaactcatcggtgacagcatctttcatcaaccaatatacagatgacaagatctggtcaagctacactgaatatgtcttct

SEQ ID NO: 656596 - DNA, 120 bp, Artificial Sequence
  ENSG00000183775_16 (sequence is synthesized)
accgtgagccttccagatggtcaccctcacactgcgattgctgctgcaagaatggcaaaggtgacaaagaaggggagagcggcacgtcttgcaatgacctctccacatctagctgcgaca

SEQ ID NO: 656597 - DNA, 120 bp, Artificial Sequence
  ENSG00000183775_17 (sequence is synthesized)
gccagtctgaggccagctctccccaggagacggtcatctgtggtcccgtgacacgccagaccaacatccagactctggaccgtcccatcaagaagggccctgtccagctgatccaacagt

SEQ ID NO: 656598 - DNA, 120 bp, Artificial Sequence
  ENSG00000183775_18 (sequence is synthesized)
cagagatgcggcggaaaagcgacttactccggactctgacttcaggctccagggaatcgaacatgagcagcaaaaaaaaagctgttaaagaaaagctctcaattgaggaggagctggaga

SEQ ID NO: 656599 - DNA, 120 bp, Artificial Sequence
  ENSG00000183775_19 (sequence is synthesized)
aatgtatccaggatttcctaaaaatcaaaattccagatcggtttcctgagagaaaacatccttggcaatctgaacttttaaggaagtatcatctataagggagggctgggggcgggaaaa

SEQ ID NO: 656600 - DNA, 120 bp, Artificial Sequence
  ENSG00000183775_20 (sequence is synthesized)
gaaaaaaaaaagtcattttgaaattaacctcctaaaaggaattcatattttaaaggaaaaaaatacaactaatgatgcacatttcttagaacacaatagtccattgatatactactgcct

SEQ ID NO: 656601 - DNA, 120 bp, Artificial Sequence
  ENSG00000183775_21 (sequence is synthesized)
actttacctagttcaccttaacatgtaaatccacagggtagatttctttctagatgtggaagtacaagaaaatcttttttagttatttgtttgtttacttcgtcccatgtgctaactatc

SEQ ID NO: 656602 - DNA, 120 bp, Artificial Sequence
  ENSG00000183775_22 (sequence is synthesized)
ttatatataatgagagccagctacgtaaaagtagctgagaggccttgggagtcatttatcccaaactgggttttttctctcatccttctacctccctcctttgaatgagggtatggtaga

SEQ ID NO: 656603 - DNA, 120 bp, Artificial Sequence
  ENSG00000183775_23 (sequence is synthesized)
aaaagatctggcccaatggcataagtttggaatttttaattttggtttttccttttgtttatggggttggggggaatggcagatttatatgacttttcactcaaatctatatgtgccagt

SEQ ID NO: 656604 - DNA, 120 bp, Artificial Sequence
  ENSG00000183775_24 (sequence is synthesized)
ttatattgactccgtatgcatgagtatttgtgcaacacaagcacaactaagtatgtatatacacatgacgcacacgatgccagggcctagacctcccaagggctgtgctcctgctcccag

SEQ ID NO: 656605 - DNA, 120 bp, Artificial Sequence
  ENSG00000183775_25 (sequence is synthesized)
cagccctctcttagaatatttcagatggatgagcttctgactctttcttaaaattcttttgggaagatttcccagcctttcttcacaacactttctaacatcaaatgactctcatcatca

SEQ ID NO: 656606 - DNA, 120 bp, Artificial Sequence
  ENSG00000183775_26 (sequence is synthesized)
acaaattgtattccttattgtgaaattaataccctcaggctccattttactgctttgctctttgtctgcattaagagaggatgaggagagctggtcaaacattccttgtgttaaaaaaat

SEQ ID NO: 656607 - DNA, 120 bp, Artificial Sequence
  ENSG00000183775_27 (sequence is synthesized)
caaacattcatatccacaaaattttctgctaaatgactccacactcagccttctctaccctgaactgaattatcacccttttctccatgttttcagagttcttactgcccacagtttaat

SEQ ID NO: 656608 - DNA, 120 bp, Artificial Sequence
  ENSG00000183775_28 (sequence is synthesized)
ggtgtggcctttccacataatccacattaagttctgtgttcctgtgttgttgtggaactaaggacaacacacagtacttgaataagggtccggccttttgtttgttttagagaaagttgt

SEQ ID NO: 656609 - DNA, 120 bp, Artificial Sequence
  ENSG00000183775_29 (sequence is synthesized)
attccacacacaacctaataatttcttataaaaattttaaactacaaagctacatttttacttgcttgtagccgtttttgtttgcctttgggattcgggctttggctgtgcccatgctag

SEQ ID NO: 656610 - DNA, 120 bp, Artificial Sequence
  ENSG00000183775_30 (sequence is synthesized)
gatttagctgtgtcatttttatgatgtctgtaacaacccaacaaggtaactgaagctccagagttaaggtttcagatttctaaatgaaactatctttttcaattacatcctgacttgtat

SEQ ID NO: 656611 - DNA, 120 bp, Artificial Sequence
  ENSG00000183775_31 (sequence is synthesized)
agacacagccaaaaagaaactgttaatagccatccgtccatgtaactctgtattttactaaggtaccaatagctctttcatagacttgtgctacaagaaggttaaaagaccagttttatt

SEQ ID NO: 656612 - DNA, 120 bp, Artificial Sequence
  ENSG00000183775_32 (sequence is synthesized)
ttcagcattcctcatgcatttcagtggtaaccaaaaaataatttgtcaattaatagttgtgtgccaagcactcctaatttgttttattgcgtgtgtgtgcatgtgtgtatgtgtatcaca

SEQ ID NO: 656613 - DNA, 120 bp, Artificial Sequence
  ENSG00000183775_33 (sequence is synthesized)
ggtaataaaggcaattggatgatatctgtaggaggaaaacaatgactaatttcttccttttgaaatctttcattgatgcacatttattatgtaagatgttctgtcttgatttctgttctt

SEQ ID NO: 656614 - DNA, 120 bp, Artificial Sequence
  ENSG00000183775_34 (sequence is synthesized)
agtgatgattagtatatgaatatctttctgaatttttgtaattctcgccttcacactaggatgacagactcagctaatgtttccttgtcctgaaggtttgaatggagttgaaagttttac

SEQ ID NO: 656615 - DNA, 120 bp, Artificial Sequence
  ENSG00000183775_35 (sequence is synthesized)
ataagtgaaaaagaaagtttatcttgggagttgagttgtcaagagaattataatttatgaatttaagtggtattcttttctgtattaatatattagcagatatttggtcttaactacaac

SEQ ID NO: 656616 - DNA, 120 bp, Artificial Sequence
  ENSG00000183775_36 (sequence is synthesized)
atagctttgtttgtaaacttaccagtatgtcttgattcttttcaatgtttcttgatagcacatggcaataccatcatcctaataacagaagatcttgcaaagaatcacagagcttaatgg

SEQ ID NO: 656617 - DNA, 120 bp, Artificial Sequence
  ENSG00000183775_37 (sequence is synthesized)
gtcaagaagttgaatttggggaaaatatcctgaaactcactttggtcaaatgattattgtgttgtcactggaagtactgtcaaagactttgggggtctaactaaaatggccaaagttcca

SEQ ID NO: 656618 - DNA, 120 bp, Artificial Sequence
  ENSG00000183775_38 (sequence is synthesized)
acttccttaaatttcagacctgactgtaatggcctcaagatagagagatacccttataagagtaaagaattaagatgatagtcaacccaatatttctactacattctttaaacaggaaat

SEQ ID NO: 656619 - DNA, 120 bp, Artificial Sequence
  ENSG00000183775_39 (sequence is synthesized)
taaacactgcaaaaggagtgttcgtggcagtgttcctctgacccctgacctgtcatgagttttctctgctctgacattccttatacatccagtgaacaaagctggaatagaaaacctgtt

SEQ ID NO: 656620 - DNA, 120 bp, Artificial Sequence
  ENSG00000183775_40 (sequence is synthesized)
taaaaccatcacaacagcaatatttttattctgggccacctctcgactggcactcatcccatggtaaaatattcaagtaactaagacaacagcatggcatttatttgtgtgagtgtttat

SEQ ID NO: 656621 - DNA, 120 bp, Artificial Sequence
  ENSG00000183775_41 (sequence is synthesized)
atagaaatgaacatagacctggccagtaaaaggctctgaggaggcttaaagtacctagtttgagtggagttatcaagtgaggtccaggtagcctgcaacactggaaatgagttctgggta

SEQ ID NO: 656622 - DNA, 120 bp, Artificial Sequence
  ENSG00000183775_42 (sequence is synthesized)
agtgagttataagagtacatgctctagtaactctggtagtcactgtgactcgggcatgtttccctgaagttaaaatagtttttagaactttttgtttaattctgaagaaaacaatatata

SEQ ID NO: 656623 - DNA, 120 bp, Artificial Sequence
  ENSG00000183775_43 (sequence is synthesized)
tggtttacttctcgaacattggttatgacaagggccataaattgctaatataaagaagttagtagtattgagtggatacaatgaatggggaatcacatgtgtagagccccaacttagatt

SEQ ID NO: 656624 - DNA, 120 bp, Artificial Sequence
  ENSG00000183775_44 (sequence is synthesized)
gccttctgggaaatcccgcgatactaaaatccagtgagctttgggagatcattccctaaaggtatgtgggttgtctgaagtcagaaacatatttacaaagtccttctacccactatcaaa

SEQ ID NO: 656625 - DNA, 120 bp, Artificial Sequence
  ENSG00000183775_45 (sequence is synthesized)
aatgaactgatctgcattcagcaggaaaaggggaagacaggaatgtaaaactactagatcatatggtattgtgattttctttcccctgctaggaaaaaattgcactgaaatgctgacaaa

SEQ ID NO: 656626 - DNA, 120 bp, Artificial Sequence
  ENSG00000183775_46 (sequence is synthesized)
aaataatgaaatgaagtggcttccaaaatatgcactgatgttatcctttgtatttataggcacagttatcttactgaaaatgcatgcatggtgaattaaaataaaagggggaacaatgca

SEQ ID NO: 656627 - DNA, 120 bp, Artificial Sequence
  ENSG00000183775_47 (sequence is synthesized)
caaataataagcgttccctttgctctttattcctttatagttgtatctattccaaccaattcattttgggggaacacatttattaagggatgttgacatggaatttttctcttttcaatt

SEQ ID NO: 656628 - DNA, 120 bp, Artificial Sequence
  ENSG00000183775_48 (sequence is synthesized)
agccttgttagattcagaggaatctttatccataggcacaggtgtgttgcttgttctgggccccattactgcctgcgcttctggattacttttgctttcctgggctttagattcttctct

SEQ ID NO: 656629 - DNA, 120 bp, Artificial Sequence
  ENSG00000183775_49 (sequence is synthesized)
gaggatcctttgttggtgtcagacaaaacatgttacaatgagacaaaaggaaggcatgtatggtgttttgtaaaattacttgacaccagctcccacaatgggaaccaaattttgattctt

SEQ ID NO: 656630 - DNA, 120 bp, Artificial Sequence
  ENSG00000183775_50 (sequence is synthesized)
atacattttcctttgctacaattccaaccttcaactttgtatctactatagtgtagatctgtgaatttgagtgctggtattttctgccactatataccatgccatggaatttgactagcc

SEQ ID NO: 656631 - DNA, 120 bp, Artificial Sequence
  ENSG00000183775_51 (sequence is synthesized)
ttggtcttctagatgatctttactagaattaataatactctttctgtgaacttttaggaagaattctttgtcacctccacctgacataccaattttcaaaagaaaaacgaagggagttta

SEQ ID NO: 656632 - DNA, 120 bp, Artificial Sequence
  ENSG00000183775_52 (sequence is synthesized)
tttttccttatggtgactctgtggcagataaatgtttttgccaatttgcatgctggtttataggtttagcatgggccatttctctctttaatgtcttggtattgttggtgtcttgcaatc

SEQ ID NO: 656633 - DNA, 120 bp, Artificial Sequence
  ENSG00000183775_53 (sequence is synthesized)
ttgatgccccacagtttcaatttatttattttcttttatattgtcaaaatagcacactagagaaagaaccagagtgaacattctgtatcctgagttacaatggagttacatgtcatttgt

SEQ ID NO: 656634 - DNA, 120 bp, Artificial Sequence
  ENSG00000183775_54 (sequence is synthesized)
atagaactgtataatgattaatatctgcagagaaattagaccaaatgaaacctgctggaataggtttgatttatattgccttcatcattctggtttcagacgaaatggttattgctctct

SEQ ID NO: 656635 - DNA, 120 bp, Artificial Sequence
  ENSG00000183775_55 (sequence is synthesized)
acccctgctgaaagaatagagtcttaaactttaataatcacagccttgtgatgcaaacacagagcttatttgtttgaaatgcctattattctcatcttgctgtatacgttggaatggaga

SEQ ID NO: 656636 - DNA, 120 bp, Artificial Sequence
  ENSG00000183775_56 (sequence is synthesized)
ttctttttccagtgatctccattgcaaactttttaatagtgttttttaatactcagtatgcacaaaaatcatgtgtagcacttgtaaaaatgcagattccttcaacctaacttcaaagag

SEQ ID NO: 656637 - DNA, 120 bp, Artificial Sequence
  ENSG00000183775_57 (sequence is synthesized)
tctgattcagaaacttgaagcagggcaaagaaatttgtattttgagctagtctccttaataattttgatgaggattgtctatagaccttactttgaaaaattctgctgtttagggaatat

SEQ ID NO: 656638 - DNA, 120 bp, Artificial Sequence
  ENSG00000183775_58 (sequence is synthesized)
aagcacttcctcattttctcttactttcttcccactacaaataagtcaaagcatgcattattcattatcttaagagaaaacacccaaagaaaaatatcctaagactagggcagaatagat

SEQ ID NO: 656639 - DNA, 120 bp, Artificial Sequence
  ENSG00000183775_59 (sequence is synthesized)
tttcatgaattctttgccatttcatctgctgtctgtcaaccataaccctttctccatattgtgtgtgtatgtgtatgtgtatgtgtatgggttttttcccaaaataaaagcctgcattat

SEQ ID NO: 656640 - DNA, 120 bp, Artificial Sequence
  ENSG00000183775_60 (sequence is synthesized)
tatagtcttagctctgggtagatgggagcatatctctgagtgagatgtattctaatgatacccaacaagaaataaaaataatgatctttcccaaggagagttgtttatttctaggccctt

SEQ ID NO: 656641 - DNA, 120 bp, Artificial Sequence
  ENSG00000183775_61 (sequence is synthesized)
acttagtatgagtgggaggaaattgaaagtgatccataatttaatggtgtatatggccccaaaggtgattccattaactgcacataaaatataaccaaaatgaatatggaatgattagtg

SEQ ID NO: 656642 - DNA, 120 bp, Artificial Sequence
  ENSG00000183775_62 (sequence is synthesized)
aattcagctatatttaaccaatcaaatcctgcgccattgaactgctaaatttgtccaatttgactcaatcaggactatgaagctctcagataattgaagatcctgaaccctgacattaac

SEQ ID NO: 656643 - DNA, 85 bp, Artificial Sequence
  ENSG00000183775_63 (sequence is synthesized)
gaaagagtgaattcaaaagggtttcaatgatccaattgaccctattcatttaacagagtaactggatacataccaaattcccacg

SEQ ID NO: 656644 - DNA, 120 bp, Artificial Sequence
  ENSG00000183775_64 (sequence is synthesized)
tcatttaacagagtaactggatacataccaaattcccacgttataagaaagatgaaaatagagatcatgcttgtcatgatcatgagtgaatatttgagtaaatattgccaaaggaaagtg

SEQ ID NO: 656645 - DNA, 120 bp, Artificial Sequence
  ENSG00000183775_65 (sequence is synthesized)
aaggatgtttaatgaaactgatgaacatgagcaactaattatgttaaattggccaagattaaaacaaaaatggttaaatttgattcagtttgttgccctctctcctctacttcctaagtg

SEQ ID NO: 656646 - DNA, 120 bp, Artificial Sequence
  ENSG00000183775_66 (sequence is synthesized)
ggatcccttttctgtcccggcttcctaatgttcaaaaaatgtttctcttgcttgtgaacaaattttgttgccaattaggtaaaaaatgttaagttcccagactgtcatccttgcattatt

SEQ ID NO: 656647 - DNA, 120 bp, Artificial Sequence
  ENSG00000183775_67 (sequence is synthesized)
taggaaatttacttttaaaaggataaagaaaaatgtgcctggcctagcaactatcaagggcttgtcctggaggagggtgggggtaatcttcctgttaatcagctttgtaaaacacttata

SEQ ID NO: 656648 - DNA, 120 bp, Artificial Sequence
  ENSG00000183775_68 (sequence is synthesized)
tgccaaccagagggtttattaagtctcttgtctccagcaacctcctccatcttatcagtttatttttagaattgacctttagataatttacctgcatttgcacagtgaaaaatcaacata

SEQ ID NO: 656649 - DNA, 120 bp, Artificial Sequence
  ENSG00000183775_69 (sequence is synthesized)
actttatattctcttcctgctgatgtggtctccatccatcacaaatggaagcagaactgatgcttagtaaagtaatgagagttgctttcaaattacattagtgtgcatgtgtgtgtgtgc

SEQ ID NO: 656650 - DNA, 120 bp, Artificial Sequence
  ENSG00000183775_70 (sequence is synthesized)
acatggccatgtgcaatttttaggtttatgtcagctcagtggataatgtgcgtgggagtgctatccgagtgcatggaaaaagcctttggttacatagtttaacagctttttagttcagca

SEQ ID NO: 656651 - DNA, 120 bp, Artificial Sequence
  ENSG00000183775_71 (sequence is synthesized)
caatagtttgtctctactgtggatgtcagtccttgagaatgttaagtaaagcttgagcttgtctcctcatgtgaaattcaaacaatactaatttctggggaaaaatcaaactcatatcca

SEQ ID NO: 656652 - DNA, 120 bp, Artificial Sequence
  ENSG00000183775_72 (sequence is synthesized)
tgtatatagtgaagagtagcatcttattcaaaaaaagaatgtatttttgaaagctaagatagacatagaatacatattaatcatcagtagtcttttttaattgcagccagtgatcagtgg

SEQ ID NO: 656653 - DNA, 120 bp, Artificial Sequence
  ENSG00000183775_73 (sequence is synthesized)
tttatctataccctttaggtgagagacagagagaaacaatttcaggaaactctccttgattcatgtgggttatgtgcatttaaggccgtggctctcaaccaggagtggttttgcatacca

SEQ ID NO: 656654 - DNA, 120 bp, Artificial Sequence
  ENSG00000183775_74 (sequence is synthesized)
gagatcttttggcaatgcctggagatattttttgtttcatgatttgaggggtgctactgacaattaatgggtataggccagagatgctgctaaagatcctacagtgtactggaaagccct

SEQ ID NO: 656655 - DNA, 120 bp, Artificial Sequence
  ENSG00000183775_75 (sequence is synthesized)
ccataacaaaaagttatccagcccacaatgtcaatagtgcttagcttgagaaactctaaattaagcatgagtttaaatttgtcaaggcatttttttttctgtaccatatacgggaagtct

SEQ ID NO: 656656 - DNA, 120 bp, Artificial Sequence
  ENSG00000183775_76 (sequence is synthesized)
tccaggtcaataaataggataaaatagaaaaataaaaatcggaaccagtttaaatgtgtatagaaattatatgtatggaaattatttgaagttagacataattatctctttatgcagatg

SEQ ID NO: 656657 - DNA, 120 bp, Artificial Sequence
  ENSG00000183775_77 (sequence is synthesized)
tgaaagctgagatttacagaaataggaaactttttccagggatctggtagtgatgaggaaggcctgtagtttaggtgtcttgtgttcttctacttcagtctttctgcctcagaaaaatta

SEQ ID NO: 656658 - DNA, 120 bp, Artificial Sequence
  ENSG00000183775_78 (sequence is synthesized)
tacttcagtgatgttgtcaatctttcaacagctaaatgtgtttgttgtgaagcactctgggatccttttcagtttacatgatcctgttaaagatgtttcccaagctgatcaacagtagac

SEQ ID NO: 656659 - DNA, 120 bp, Artificial Sequence
  ENSG00000183775_79 (sequence is synthesized)
cacaaagtgctctcagaaatgaaactagtaagggggagaaagtgttttgagcaggccaatgatttcattgtctgtaactgcttatcataccctttgttactttgagttgaatattccctc

SEQ ID NO: 656660 - DNA, 120 bp, Artificial Sequence
  ENSG00000183775_80 (sequence is synthesized)
tctgaggatggtaaaatcttattggaaaatatgtttcctagactcacccaggggtggctcccaagtccttgtttccaaacatgtgacaagtctaagcacaagtccttgctactgagtctt

SEQ ID NO: 656661 - DNA, 120 bp, Artificial Sequence
  ENSG00000183775_81 (sequence is synthesized)
attgtttagtttatatacactgactttattagaacacaatttgtgtctgaaatgatttgacatttttcttttaatgtatcataccaatatcccagggatggaattatggtagggtcattc

SEQ ID NO: 656662 - DNA, 120 bp, Artificial Sequence
  ENSG00000183775_82 (sequence is synthesized)
taattccattttatacaagggaaactaaggacccagaaagtttaaatcggtcatttatttgtttgtttatgcatatatccagcaaatatttgttgggtacatactatatataggtcactg

SEQ ID NO: 656663 - DNA, 120 bp, Artificial Sequence
  ENSG00000183775_83 (sequence is synthesized)
tcgtgagcattataatgtctaagcaatcaaatttggagtaaagaacttgaattaagttcattcaattcctagactaacattatttctatatgtagttctgatcagtattctagaattatg

SEQ ID NO: 656664 - DNA, 120 bp, Artificial Sequence
  ENSG00000183775_84 (sequence is synthesized)
gtttaaatatccagttataaataatatatattacagatttattattatgtacctgaaactctactgagtacttttcatgccttatctcatttaatcctatcataatccaatgaagtaagc

SEQ ID NO: 656665 - DNA, 120 bp, Artificial Sequence
  ENSG00000183775_85 (sequence is synthesized)
cctaccactatcctctctttacagatgaggtcagtgaggctcagaaagataaagtagcacataaaggctcatagctaaaaagtggcagagccagattttcctctgagtttattagactct

SEQ ID NO: 656666 - DNA, 120 bp, Artificial Sequence
  ENSG00000183775_86 (sequence is synthesized)
aaaggctgctggcttaaccatctctttgtacaatctgttctctctgttctctgaactttgcctgtttctcctctctcctatgctaaacaaggtgagatcccagcctgacatccttcctaa

SEQ ID NO: 656667 - DNA, 120 bp, Artificial Sequence
  ENSG00000183775_87 (sequence is synthesized)
aagtcatcagttttttttgtttgtttgtgacttgtatctgcctaggaggtaaagaaagggcagatttgctacagcttgtactttatgccacaaaaattttcaagggggcaataatgttgt

SEQ ID NO: 656668 - DNA, 120 bp, Artificial Sequence
  ENSG00000183775_88 (sequence is synthesized)
agaacaagtatctggtgagtactgataccctaagaaactcaccgtgataagctagcttccacgtctggagaaaatgacacctgcaattgcttgctgtgctgcacacaggtcactagggca

SEQ ID NO: 656669 - DNA, 120 bp, Artificial Sequence
  ENSG00000183775_89 (sequence is synthesized)
agcttcaggagaagtaaaataggtgtatgagcgtgtttatatgtgtttatgcatgagtgtatctaggtatctgctattttcatcttttggcttgttaaacagtctcaggtttttattcaa

SEQ ID NO: 656670 - DNA, 120 bp, Artificial Sequence
  ENSG00000183775_90 (sequence is synthesized)
gacaggtcaaaagcccaaatgtgattaactgccctcagcatctcattgttactgttataagttgggaaaaagagaggcagctttagaaaagaaacttcaccgaaatacgtgcatgcatgt

SEQ ID NO: 656671 - DNA, 120 bp, Artificial Sequence
  ENSG00000183775_91 (sequence is synthesized)
gtgagtgtgtgtgtgtgaggagtgtgtgtatttatgtgtgttttgtgtttatgtataaaattatgtatatatatgtacatatgtgtgtacatctatcttaatgtgtatatataaatatat

SEQ ID NO: 656672 - DNA, 120 bp, Artificial Sequence
  ENSG00000183775_92 (sequence is synthesized)
atctatagctgtacatatgtatacacccataaacaaagctcatagtttaaaactttggaattttcagtttggagaacttattattattacaatttatatttggtttcctagacggtctaa

SEQ ID NO: 656673 - DNA, 120 bp, Artificial Sequence
  ENSG00000183775_93 (sequence is synthesized)
tatagttctaatttccaaaattctcttccactaaaagtggatatatttatttatggtgccgagaacattaacaaaatatttagatttaatatctatgaataataaaccaaaaaaagtgca

SEQ ID NO: 656674 - DNA, 120 bp, Artificial Sequence
  ENSG00000183775_94 (sequence is synthesized)
tttaaggaaacaccaaacttgtaaaaactggctctcttatccaaaccatttgttggaatttcaaactacatgttttcacacttcttcattccaaaaaaaaaaaaaaaaccaaaccagaaa

SEQ ID NO: 656675 - DNA, 120 bp, Artificial Sequence
  ENSG00000183775_95 (sequence is synthesized)
aaacccaaaacactaccaaatgaacagtgataatgtttaagaagaaaaagaaaaatgtaggtgtatgatagcacaaattcaatggttattgccctagtggtgcttcacttacctattggt

SEQ ID NO: 656676 - DNA, 120 bp, Artificial Sequence
  ENSG00000183775_96 (sequence is synthesized)
taatttattatatcctggttaatttcactttatcactgatgagggttcctgtgtccctacatgatttatcggtggagctaattatctatttatttaaagctatagtaaataatttataat

SEQ ID NO: 656677 - DNA, 120 bp, Artificial Sequence
  ENSG00000183775_97 (sequence is synthesized)
atgcatattgtaaatagatactaaaagtcatgggcacattgtaataatcacaaagttttagtctcctgcaaataacacttgaagtctgtttatacaatacccaaatagttgctcaaagaa

SEQ ID NO: 656678 - DNA, 120 bp, Artificial Sequence
  ENSG00000183775_98 (sequence is synthesized)
agaacaatgtaagtcaaatacaagaaaaccttacttacctattttggcattttacagacataacaaccaaattaacgaattttggccatcttaagaatacagtaagttgtgtactcattc

SEQ ID NO: 656679 - DNA, 120 bp, Artificial Sequence
  ENSG00000183775_99 (sequence is synthesized)
atagccacatgctttgcatattactggggaatgtgaaaaatatttaaagtcaacctatgcaaacagagattccctgctgctccttgggatcagtttgtatgcacacaagcccatgccttc

SEQ ID NO: 656680 - DNA, 120 bp, Artificial Sequence
  ENSG00000183775_100 (sequence is synthesized)
aactgatagtcctagcacagatccctcctcccagagatctgtcaggtgtgcccacacaacagaagcacttgtaaactaattaagcacggtcactgaatccttttttcaccagccttctaa

SEQ ID NO: 656681 - DNA, 120 bp, Artificial Sequence
  ENSG00000183775_101 (sequence is synthesized)
agatgttgtcttaaaaacataagaaagaaaatccatttttttaaagcaatgaaatgttctaattaggtttgaggacatttgaaggagcgattgttttttccccaaaattttggagcagag

SEQ ID NO: 656682 - DNA, 120 bp, Artificial Sequence
  ENSG00000183775_102 (sequence is synthesized)
gggacgttttacatcatcctaacttcatgttcctctgtcattttattttatttatttatttttaattccaaaggagaaagttgaatcaggaaaatttgtcttaaaatatactgcttagtt

SEQ ID NO: 656683 - DNA, 120 bp, Artificial Sequence
  ENSG00000183775_103 (sequence is synthesized)
tagagacggacaaactaatgtatttttgtaaatcatgggtggcggatgtcaaaatctctcattaattaccctgtttttttctttaaggaaattgattcatgaataattggaaaggtattc

SEQ ID NO: 656684 - DNA, 120 bp, Artificial Sequence
  ENSG00000183775_104 (sequence is synthesized)
tagttaagacacacagaaacacaaacttagcggagctgcacttcagagagtcccactgtaatctgttaatagaatctgctttaaatgagtcactccttagactggcaatgacacccagct

SEQ ID NO: 656685 - DNA, 120 bp, Artificial Sequence
  ENSG00000183775_105 (sequence is synthesized)
tagtctgtaaaatcaggaatctttgtgttggctgaaggaacttagtaatcttagttgaattcctcttccccatgtctttcaaaaccagagcactgggtcgaacctaacccacaaaataat

SEQ ID NO: 656686 - DNA, 120 bp, Artificial Sequence
  ENSG00000183775_106 (sequence is synthesized)
tcgtccaaattaaattgacttttttacataacatcagcaccaccccttacacttttaaagttaaagaccctgttgatcaggttacctggaaatttcaagtgcatctgaccagggattatc

SEQ ID NO: 656687 - DNA, 120 bp, Artificial Sequence
  ENSG00000183775_107 (sequence is synthesized)
aagctccttgtgacatctgtttctgatgctgtgaatgtgatgtcaccacaaatagaggattctgaattttgctggtactaatgctgagtggtgacttattggggccttgctcatgttact

SEQ ID NO: 656688 - DNA, 120 bp, Artificial Sequence
  ENSG00000183775_108 (sequence is synthesized)
ttttcctgacgtcattcaagcacttgatgacttgggtcagtttgttgcacattgatgaataacaagtgacacccaatgaaattacctcttctcctttccaatgcagttcgcttgtacata

SEQ ID NO: 656689 - DNA, 120 bp, Artificial Sequence
  ENSG00000183775_109 (sequence is synthesized)
aatgtaacgtcatattgtttacaggttatttttgtgcgtaattgtgatagcagatttagctcaaactttaaaggaatttgtttactgactggtgttaaaatgaatgtgcttattacagta

SEQ ID NO: 656690 - DNA, 120 bp, Artificial Sequence
  ENSG00000183775_110 (sequence is synthesized)
taaacatcattaattatggactcacatgaatgcatgtctacatgtcgtcagttctcagcagctcagttattcagcaaaaagtctgcagtctgtgaatagcaaatatacataaactactgt

SEQ ID NO: 656691 - DNA, 120 bp, Artificial Sequence
  ENSG00000183775_111 (sequence is synthesized)
gactctaataactctaactgtttttaccttgggatgtaacactgtagatcttcgcctgctgtatttctttcttacctatttgtttttgcgagaaaaacatgatagaaaatgctactacta

SEQ ID NO: 656692 - DNA, 120 bp, Artificial Sequence
  ENSG00000183775_112 (sequence is synthesized)
attgtcccaatggaattgcacatcattttggcaatcattggttcactcagaaggcaaccgcctatagatggaacagccctgagcaacatataaatatatacatacatatctatgtatgca

SEQ ID NO: 656693 - DNA, 120 bp, Artificial Sequence
  ENSG00000183775_113 (sequence is synthesized)
atatctacactgcgaattactaccatctattctcactgccaatggaaacaaactactcttttctttggattcattgatggatataaaaaattaatttgctattaactgctttcatattct

SEQ ID NO: 656694 - DNA, 120 bp, Artificial Sequence
  ENSG00000183775_114 (sequence is synthesized)
gtttagttcttatagtatggtaaatgatacaggtgcagtatcagtattgtaaaattgtatggtgaaaactacaaaagtcattctgtggatatattttaaaaggaagaacagaaactatat

SEQ ID NO: 656695 - DNA, 120 bp, Artificial Sequence
  ENSG00000183775_115 (sequence is synthesized)
ttcagattcttgtgtgaatataattacagaataggtaactatttttatgtgtttccataaatgactccatttcatatgcattgtaatttagcacaaatcataataaatcatttggtaaca

SEQ ID NO: 656696 - DNA, 120 bp, Artificial Sequence
  ENSG00000183775_116 (sequence is synthesized)
agacctaggtgatggaggaagactgggaggcgctaaaatgagacagacggagtcccctctcctgtccacaaactacaatgcctacaatgcctcggtgtcagcatttactgtgattcaagc

SEQ ID NO: 656697 - DNA, 120 bp, Artificial Sequence
  ENSG00000183775_117 (sequence is synthesized)
actgtgctaaagtgtttttcatatgtcatgaaaagttgtgccagaaaattatggtttgaacatgggcagttttctcctaccgtcagctatatccacaagcatcacatgaagtggagatct

SEQ ID NO: 656698 - DNA, 120 bp, Artificial Sequence
  ENSG00000183778_0 (sequence is synthesized)
ctctctagagaaccctgactaatacacctggagtgcagaatctgctggagaaactgccattccgttattgactggctggtcaggccatacagcctggtggtctagatgtgtttggagtga

SEQ ID NO: 656699 - DNA, 120 bp, Artificial Sequence
  ENSG00000183778_1 (sequence is synthesized)
ttcctgtcagaatcaccatttttggtaaacaaaccaagcccagaacctgataattatggagcattctacactgacagttctttgagacaaatttcctcttggcatttacactgtggcttt

SEQ ID NO: 656700 - DNA, 120 bp, Artificial Sequence
  ENSG00000183778_2 (sequence is synthesized)
agctttcaaaccagaggttcctcttacccagcaaaaaatggctttcccgaagatgagattgatgtatatttgccttctggttctgggggctctttgtttgtattttagcatgtacagtct

SEQ ID NO: 656701 - DNA, 120 bp, Artificial Sequence
  ENSG00000183778_3 (sequence is synthesized)
aaatcctttcaaagaacagtcctttgtttacaagaaagacgggaacttccttaagctcccagatacagactgcaggcagacacctcccttcctcgtcctgctggtgacctcatcccacaa

SEQ ID NO: 656702 - DNA, 120 bp, Artificial Sequence
  ENSG00000183778_4 (sequence is synthesized)
acagttggctgagcgcatggccatccggcagacgtgggggaaagagaggatggtgaagggaaagcagctgaagacattcttcctcctggggaccaccagcagtgcagcggaaacgaaaga

SEQ ID NO: 656703 - DNA, 120 bp, Artificial Sequence
  ENSG00000183778_5 (sequence is synthesized)
ggtggaccaggagagccagcgacacggggacattatccagaaggatttcctagacgtctattacaatctgaccctgaagaccatgatgggcatagaatgggtccatcgcttttgtcctca

SEQ ID NO: 656704 - DNA, 120 bp, Artificial Sequence
  ENSG00000183778_6 (sequence is synthesized)
ggcggcgtttgtgatgaaaacagactcagacatgttcatcaatgttgactatctgactgaactgcttctgaagaaaaacagaacaaccaggtttttcactggcttcttgaaactcaatga

SEQ ID NO: 656705 - DNA, 120 bp, Artificial Sequence
  ENSG00000183778_7 (sequence is synthesized)
gtttcccatcaggcagccattcagcaagtggtttgtcagtaaatctgaatatccgtgggacaggtacccaccattctgctccggcaccggctacgtgttttctggcgacgtggcgagtca

SEQ ID NO: 656706 - DNA, 120 bp, Artificial Sequence
  ENSG00000183778_8 (sequence is synthesized)
ggtgtacaatgtctccaagagcgtcccatacattaaactggaagacgtgtttgtggggctctgcctcgaaaggctgaacatcagattggaggagctccactcccagccgaccttttttcc

SEQ ID NO: 656707 - DNA, 120 bp, Artificial Sequence
  ENSG00000183778_9 (sequence is synthesized)
agggggcttacgcttctccgtatgcctcttcaggaggatcgtggcctgccacttcatcaagcctcggactctcttggactactggcaggctctagagaattcccggggggaagattgtcc

SEQ ID NO: 656708 - DNA, 120 bp, Artificial Sequence
  ENSG00000183778_10 (sequence is synthesized)
gcgggacagaggatgctgttcttcagtgctgaaatccacgccagaatgtcggtgttcatgaagtcactgattagttcccacttggtgccccaggcaataataggcccgtctcttgggcac

SEQ ID NO: 656709 - DNA, 120 bp, Artificial Sequence
  ENSG00000183778_11 (sequence is synthesized)
gcacactcttcatactaagtgtttgacatacacctggatttttgcatttcaggggtcagtatcctatgacatgatgggtgttaccatcctaattttacaggcaaggacacagcagctgcg

SEQ ID NO: 656710 - DNA, 120 bp, Artificial Sequence
  ENSG00000183778_12 (sequence is synthesized)
agaggtacagaaacttgtcccaaggctcacagccagtaggcataggagcgggaatgaaaatcgagcactgtcagaatctggtgggcagcccctgacttgaaccactcccacgtgctgcct

SEQ ID NO: 656711 - DNA, 120 bp, Artificial Sequence
  ENSG00000183778_13 (sequence is synthesized)
cccttaggaggggacactgatgatgaggtctcggagccggcatccttccatccctgtcgagtcccctccacctcagctcccagtccttgtgctttttggagctaagcctgggatgaccaa

SEQ ID NO: 656712 - DNA, 120 bp, Artificial Sequence
  ENSG00000183778_14 (sequence is synthesized)
attcaccccagctccttcattcacagggctggatgtagctgggattgagtccatgttatcggctcggtactcaacacaacccaagtttcatccgaggaaatgtccccgcagtggatgcag

SEQ ID NO: 656713 - DNA, 120 bp, Artificial Sequence
  ENSG00000183778_15 (sequence is synthesized)
ctcacatgctgaggaacacccagctctggacagagttcttataaatgtataaattaggctcagaaaccactgcattctgacctgctgtacagactgcccacactgctgacctgcctagcg

SEQ ID NO: 656714 - DNA, 120 bp, Artificial Sequence
  ENSG00000183778_16 (sequence is synthesized)
agcaggacatcccttctgagccatctgctgctctctcatttcatcaccccaactgtcccttgtttttgatcaatggggaccagccactgccccaggagcactttagggctctcagttcaa

SEQ ID NO: 656715 - DNA, 120 bp, Artificial Sequence
  ENSG00000183778_17 (sequence is synthesized)
actgaaggacagttgaactcagatggggttcatgtgggattctgggagctttctgggaattcagttggagtcaagtcaggatgctctcaaggacccctcgggctcagagccctaaagtgg

SEQ ID NO: 656716 - DNA, 120 bp, Artificial Sequence
  ENSG00000183778_18 (sequence is synthesized)
gccctggtgaagcagggtggtcctgcgtccacttcccaagcctgagccaagctcatcttcattgaatgtctcatttggccgaggaacaactgaactttgtggtttgctgtttagccttca

SEQ ID NO: 656717 - DNA, 120 bp, Artificial Sequence
  ENSG00000183778_19 (sequence is synthesized)
gtttgctccgctgcctcctacccagaggtttgtgcgagcctgtgttgcagggttgtataaaaccaaggtacttcgttagttttgcccattcagccatggtcacgtgacatgcaaagtaat

SEQ ID NO: 656718 - DNA, 120 bp, Artificial Sequence
  ENSG00000183778_20 (sequence is synthesized)
cttgctcctaattatagaaatgatttttcttttaattttttactttaccagactttactttgtactcagagaagaggcctcacatggctgtgtcacatataaatgttggactaaactctt

SEQ ID NO: 656719 - DNA, 120 bp, Artificial Sequence
  ENSG00000183778_21 (sequence is synthesized)
gggcccagatagaacaagaaggcagaagaaatgtgaattcctctttctctgctggagctgggatattcttcttctcctgcccttggacatcagagctgcaggctctctggcctttggacc

SEQ ID NO: 656720 - DNA, 120 bp, Artificial Sequence
  ENSG00000183778_22 (sequence is synthesized)
cgaggatttataccaagcaggtttctgggttctcaggcctttggccttggactgatagttacaccattggcatatctggttctgaggctcttggtcttggactgagccacactcctggca

SEQ ID NO: 656721 - DNA, 120 bp, Artificial Sequence
  ENSG00000183778_23 (sequence is synthesized)
acaggaaagccgctggttgtgatggtggctatgacaaaccttcagcctgaagacccgggagggaaaaatgaagctgacaagaagcacgttgctgagtgatcctgggttcccatcctccgc

SEQ ID NO: 656722 - DNA, 120 bp, Artificial Sequence
  ENSG00000183778_24 (sequence is synthesized)
acccgtgcatccacgcgtgggcccagccagcaaggagaagtctaacaggcaggaggaggggagacacaaggagcccccgcatttcatctggaagagaggccattgaaaccaagcatttgt
